United States Patent Application Publication US 2007/0059710 A1 - sequence listing, part 9

SEQ ID NO: 35384 - DNA, 201 bp, Homo sapiens
aggaagaaaggcatcagcatcactgactctcagcgcccgtcatggtgctcacgcacaaagtgatggtggaagtgaactgaaattgacatgataatcaatcrtctcccgaggccatgaagaaaataaacagcatccctaggagtatgtgaagaactatttattagagagaataccatcatcgccacagcattccctttccac

SEQ ID NO: 35385 - DNA, 201 bp, Homo sapiens
gctttggcgctgtggaaacagccttcgtgtacacacttcttgacccttcactcccttcatgcccttcttcccatcaagacttaatgattggctgggcatgrtagctcatgcttataatcccagcgctttgggaggtcaaagtggaaggatcacttgaatccaggagtttgagaccagcctggaccacataatgagacccca

SEQ ID NO: 35386 - DNA, 201 bp, Homo sapiens
ttttttttctccttcatgttcgttggtgtctaaggtttatcatctatttcgctaatggtcagtagaatgtaacctccacgtaagcaaggagttttgtctgktttgttcatgtctatgtccttagtgcctggagcattccctagtatgcagtaggtgctcaataaatgtcagttggattaatggctgaaagaaaggtcaccg

SEQ ID NO: 35387 - DNA, 201 bp, Homo sapiens
tttcaatcaccctccccttccttccttcactgcaggcacactggcctccccagctctcctcagtactgccaggcatgctcctgccttgggcagagtgtatrtgtgtgagtgcacctgcccttcccacagcctagaacgttcctcctccagacagcacatatggcctgctctctcacttccttaaggtctttattcaaaagt

SEQ ID NO: 35388 - DNA, 201 bp, Homo sapiens
acctgccgggcattagttagcaaagctgcttatactctgatttctattgttctcccagtttttagactgtagccgtttaattacaatgcagcagctttcaygtcagtatttctcctgaaggtcttagtttattttattcctccatcacagaaggttccttgaggtcctgtattctgaaaatagatgcatttcttccaaaat

SEQ ID NO: 35389 - DNA, 201 bp, Homo sapiens
cttgtcatatatttggaaggtcttcacctcttgatcacttgcattttacattctacttgtctattgttcattcacacggcaagaaatgacggctacctgcygggcattagttagcaaagctgcttatactctgatttctattgttctcccagtttttagactgtagccgtttaattacaatgcagcagctttcacgtcagt

SEQ ID NO: 35390 - DNA, 201 bp, Homo sapiens
ggaaaccatgctgggattgagtctctgtggtaccaatggtcttactattgacgtcagagttaaaaaagaagagagttatattcaaattctggttgagttaktctcttattaacatttcctgactcaccaactggtaaatgtccaagaaaaatatatctttttgttttatcagaaaatatacatgctatttgatcactcttc

SEQ ID NO: 35391 - DNA, 201 bp, Homo sapiens
ctttatttaaatttttttaacatttaaaaaaatttttttacttaaataatgaggcagtgtctcattattatccaggctggactgcatggggcattcatagytcctgggctcaagcaatcttcctgtctcagcctccaaagtaactaggactaacagcatgtaccaccacatccaactagtttttttcatttttttataggg

SEQ ID NO: 35392 - DNA, 201 bp, Homo sapiens
tttgcctggaaaagtgtttcagtttgtcattgcttcatcatttcgaattccatattaggttacctttttttttttttttttgcctgaccatagtacttaaraaaaatcttgcaactgtccttcattctgttgaaccaactatatcttatgttttcacttgacattttgttttagatctacttggggctttatttaaatttt

SEQ ID NO: 35393 - DNA, 201 bp, Homo sapiens
tggaggaggattcctgatgtcatttacagagaatggggaggggatctgaggtgggattaagcttgaggaacaaactcaagttgggttttggacagactacwttcgaagttcctgttggacgttgaaggctgttggctgtgagtctgccttccaaatccctgagtccttgaattcaaggtcgtgtgttggccgtctttgtat

SEQ ID NO: 35394 - DNA, 201 bp, Homo sapiens
ggccatgagaggtgagaattaatcagatcccagttcacagagttgatgggatttactactggtctgactgggaaggactgtaaagaaaagcagggagtcargaatgattagaaacaaggtttgtgccctcggcaactggaggaggattcctgatgtcatttacagagaatggggaggggatctgaggtgggattaagcttg

SEQ ID NO: 35395 - DNA, 201 bp, Homo sapiens
gtatcaacctttgccaatgttgtaggtgtaaaaacttaccttgctattttaattttaatatttttcataagttgaaaacttatttcccatcagaaaacgcwataagaatcctttatatatttaaggcattagccatttgccactggtattgcagatggtgatctgcatagtcctaaaatggatttggagaaactgaggcat

SEQ ID NO: 35396 - DNA, 201 bp, Homo sapiens
ctaccagactgtccttgctagcatgaaattatgcctgaaggcatagcactgtggcctttgcagccagagggcttgttttagaagtacagtacactgtacaygtcctagtcactggggagctctgtgtacaaatacacacaaggccatggtcacagagagcaacagtcacaaacataaattcagatgtgtgaacaagacaat

SEQ ID NO: 35397 - DNA, 201 bp, Homo sapiens
attgtatcaacctttgccaatgttgtaggtgtaaaaacttaccttgctattttaattttaatatttttcataagttgaaaacttatttcccatcagaaaaygcaataagaatcctttatatatttaaggcattagccatttgccactggtattgcagatggtgatctgcatagtcctaaaatggatttggagaaactgagg

SEQ ID NO: 35398 - DNA, 201 bp, Homo sapiens
gcatccatcacaggactaaagccagacaaggctccgctggcacaagcagagcaattcattgtgaagtttactcctgagagttttcttctgctttaaactgmcacagaaagaaccgtctagacagctacctcatgtaattgactgccccacgtttaatagaatgatcttttcttctgagatgtcaacctcataaggaatcat

SEQ ID NO: 35399 - DNA, 201 bp, Homo sapiens
cagatttattaaatgaactacttattaaatcaatcccctattgttggagattctccctcaccttatattattcctacagttgatacttcattgagtgtctwggtaaggatgtcattgtgcctaaatgtgtaaaagttgaattagtgcttcaaaccacatgtgtactttgggggcttttgatacattgacaaataacccttc

SEQ ID NO: 35400 - DNA, 201 bp, Homo sapiens
cctcctctgtagcatccatcacaggactaaagccagacaaggctccgctggcacaagcagagcaattcattgtgaagtttactcctgagagttttcttctkctttaaactgccacagaaagaaccgtctagacagctacctcatgtaattgactgccccacgtttaatagaatgatcttttcttctgagatgtcaacctca

SEQ ID NO: 35401 - DNA, 201 bp, Homo sapiens
ttgccttttgctaagtgtgcttaacaattacacttgagaaataccttttctacaacataagcactgtagagtgttgctgttttcccttagaatgtgtgcaractcctcatcttgcactcagtatgttaggtctgaagtgtggatgtctgtgtgtgtcctgcccttcacgatgtgaacctgagcactatgatgccattctgt

SEQ ID NO: 35402 - DNA, 201 bp, Homo sapiens
actctgtcgccaggctggagtgcagtggcatgatcttggctcactgcaactccgcctcccaggttcaagcaattctcatgcctcagcctcccgagtagctrggattagaggcacatgccaccatgcccagctaatttttgtatttttagtagagacggggtttcaccatgttgcccaggatgatctcgatctcctgacctt

SEQ ID NO: 35403 - DNA, 201 bp, Homo sapiens
ccctgcagttccctccacccgcatctcttccctccacccacatctcttccctccctcctctgtagcatccatcacaggactaaagccagacaaggctccgytggcacaagcagagcaattcattgtgaagtttactcctgagagttttcttctgctttaaactgccacagaaagaaccgtctagacagctacctcatgtaa

SEQ ID NO: 35404 - DNA, 201 bp, Homo sapiens
ctaatgggcaaggagggtttttttttttttttgagacggagtcttgctctgtcacccaggctgggagtgcagtggcacaatctcagctcactgcaacctcygtctccctggttcaagcagttctcctgccttagcctccctagtagccgagattacaggcaggtaccaccacacccggctaatgggtatggagttttatta

SEQ ID NO: 35405 - DNA, 201 bp, Homo sapiens
ttgccagattgatgttataagtggttttgtttgtttgtttgtttgtttgttttgttttgaggtggagtcttgctctgtcacccaggctggagtgcaatggygtgatcttggctcgttgccacctcatgcctcctgggtttaagcaattctcctgcctcagcctcccaaggagctgagactacaggcctatgccaccacacc

SEQ ID NO: 35406 - DNA, 201 bp, Homo sapiens
tgaggaaaaggaagaggtgggaagaagtggtacccaaggataaggctttatggaatctaagcatcccacatttactgtttttaaaaatgagcttgaaaaaktagggtgtccgtcctgtgaaatggaatcccacagccacagatctgctaacatttgtttatatttgttgtcaaagaatagcttgatttttttttttttggt

SEQ ID NO: 35407 - DNA, 201 bp, Homo sapiens
cacatgaataaatgcacgcctaagtgtgagggtggcaaagaccaatcattcacagactgatgggaattgtttccctaaaatattcccctgagctgctagaragggggtgatttccacgagagcatagactgatgcggactagaattgctaggacagggaacccccgtggacggctggccattgagacacagtggagaggaa

SEQ ID NO: 35408 - DNA, 201 bp, Homo sapiens
ctgatgctgtaacaatttctgccttctgttggtggtacggcttggccgtgtccccacccaaatctcattttgaattgtagctcccacagttcccatgtgtygtgggaagaacccggtgtgagataattgaatcatgggggcagcttctcccatacagttctcctagtagtgaataggtctcacgagatctgatggtctgat

SEQ ID NO: 35409 - DNA, 201 bp, Homo sapiens
cccggccagtgaggacattttaaagaaggaagcagaagaatcaactagactgattgccctctccaaaattaaatattgcaaaggcaggagttggataagcrtttggtcatgaaagatgttaggatgccttagaatcttcgaaggctaaaaagcagcagcattaatgaagttgaatgtatgaaagcagatttcaggtgttga

SEQ ID NO: 35410 - DNA, 201 bp, Homo sapiens
gcatgttatgattggggtagctcagtatgatgactttgcttgataagttcctcaggtaacaaagcagatgggagggggtacttatagggttgattgctttkttcccagtgccttgagttggaaagccaacaattgtcgttttgatcatgaggcatttagggggacttctacctctgtatgtaatggggagagaaaggtgat

SEQ ID NO: 35411 - DNA, 201 bp, Homo sapiens
ttacatggagaaggaaaatttcgagtcaaagtgacttacattgaaatcctggtttatgcatgaactagcaagtttttgaagcttgatttcctgatctgtawaactgaagattccatatttttctcagtgttactatgtggattgaataaaatattacatgtgaaagaacctgataggtttctggtatacatagtagctccc

SEQ ID NO: 35412 - DNA, 201 bp, Homo sapiens
agccaccatgcccggccagtgaggacattttaaagaaggaagcagaagaatcaactagactgattgccctctccaaaattaaatattgcaaaggcaggagwtggataagcatttggtcatgaaagatgttaggatgccttagaatcttcgaaggctaaaaagcagcagcattaatgaagttgaatgtatgaaagcagattt

SEQ ID NO: 35413 - DNA, 201 bp, Homo sapiens
ttgttggttgcatctcattttctcatccatagacactggcttctgccctagacctcattgcttctctatattcatgccatcggtgtgaatggatcctgccrcatggtgccaaatatcagctataggatgatgaccgctgtagcctggatgtgtcctctgaaatacagattaatagttcagatcatctacttgacatctcaa

SEQ ID NO: 35414 - DNA, 201 bp, Homo sapiens
ttggcctcccaaaatgctgggattccaggcatgagccaccgcgcccggcccgtaaacatttttatgtttgcctttctcctagtcattttgccagtttcagsagtacatgggacattgtaatctctcaaagtgttttctaaatttaacttgaatctgtaatctagaaagcaaccaacaaatggccaatgcagcatgagtctc

SEQ ID NO: 35415 - DNA, 201 bp, Homo sapiens
gaaattccaactatagtgtttaaatggggactcattttaattaataaatttggtcctgacatgcaattgctcttcacttgatcaatattttgctattcagwtggacaggtttttttttaatttactgctgtgtgtgactgagttcctacttaatattcattgacacaaaaggattcaaagagaagtcagcctaactctcaa

SEQ ID NO: 35416 - DNA, 201 bp, Homo sapiens
atttaagtagcctgactgtgatcacagctaacaaatggcagagccaagattcaaactctagttctagagagcattatcattaacccattttctccaggccygggattctgggtctgatgttctgggtcacctcctatatgcagtcatgcttcaccctatcccagaggctaaatattcatgtcatctctgtgtctgaccttg

SEQ ID NO: 35417 - DNA, 201 bp, Homo sapiens
tgcccttctcggctggactgggacagctccagggtatccctattgtccttgtacaatacttgcaatgaccaatggctcccctgtccactttctgaagtatsctggtgtggagaataaatgatttgattcccctcgccacaagccctggacaggtcaaccgtctgcccctctgacatcatttcaatcaccctccccttcctt

SEQ ID NO: 35418 - DNA, 201 bp, Homo sapiens
tctcacagtccttcgtgcgtgtcttctttttctcgcttgtgaataaggtgtactaaatgcctcccagcacacacaggactcagtgttatgttctttttttyctctcaattcaccgtgtaagagaggcaccacctattaaaaacaatatccacagacctgaagtcagcaaagatatcagaatgtactgtgcatgtcagatta

SEQ ID NO: 35419 - DNA, 201 bp, Homo sapiens
agcatggatgtatctcaagataatgatgcagaatgaaagaagccagaccaaaagagtatatactgtctgatttcatttcttcaaaattctagggaatgcamattaatttatagtgacagaaagcagatcagtaattgctcaggggctggaggaagggattacaaatggcccaaaggaacattttagggtgatgcagatagt

SEQ ID NO: 35420 - DNA, 201 bp, Homo sapiens
gatggcaggaaacacagaaaatggccaggtcggtggcaggggtaggagggaaggaggaatttaggatcagaggttaaaatgattatgattatttagaggcwcagtcagaaataatgtagtagaaggtcacgtgaaaggtagaagggcagggcagagtatgtactgttttgtgtgtgtgtgttattttttgagactaagtct

SEQ ID NO: 35421 - DNA, 201 bp, Homo sapiens
tgcacatagtagatgctcaataaatatgtgttgcattagttaatgaactggcgtggatgatacagtagtttatattggactttcgaagcacttttacatayacagtcttatttgatccttggaaataagaatcacagggggacagattttttttcttgcccctacacctacaaagattggctcagatcccaaaggggcttc

SEQ ID NO: 35422 - DNA, 201 bp, Homo sapiens
tggccacaatctctgaaatatcctttccttccctgttaaatttatctctaacctgccttatttccctatagaggactaatagccacctgatatagtatackctcattcttaaactgacatatgacctgtctcttgctaaccagcatcggtggtccatgacagcaactatcttgttttgttcactgctgttttacaagctcc

SEQ ID NO: 35423 - DNA, 201 bp, Homo sapiens
gacgtctttcgtgcctctaagaagccccatctctattctgcgtctcaccttgcagggctgctcatctgaatcctgaagatggtggacacccatctgctagsactgaaatgaataggacagagggaggtgcagagtgaatggaccatactacctgtcatcttggcaacgtgtgattgaataaaacaacttctttagaagttt

SEQ ID NO: 35424 - DNA, 201 bp, Homo sapiens
atggaaataatgcattttctaaaaggaatgctgcagtgttttgaaggtgaagtagtcttacattttatagaatgaaatatgaaatcatctccaaactatgrgcacaacagaaagctttcctatcttccctttttatttgatttcattgaccaaagtgtggacaaaactgattacaaaatagaaggctttcacatcttccct

SEQ ID NO: 35425 - DNA, 201 bp, Homo sapiens
tgggacccactgataccctggagcatctctggaaggttgaagcggaggacagaggaggcatggaaaaggtgtgcagtaatacataggaagcttccaaagasaagtgggtgcaagacagcacagaaacatgttcagttgcctcagctgctgatgttcaaaatacctgcagaaaatcaacgctgctacacccaaaagaaaagg

SEQ ID NO: 35426 - DNA, 201 bp, Homo sapiens
taggtatacataaaacaaaacatgtatatgatctgtatgttgaaaattacaatatgctgttgaaagaagtcaaagacctaataactgaagagactattttyatagataggaagattcagccaaatgaagatgtcactgctctcccaaaagatctataggtttaaaaatattcctataaaaaccacagcaagttttttttgt

SEQ ID NO: 35427 - DNA, 201 bp, Homo sapiens
agaactgagagggcaagagtatagctggcttttttgtaagactcatgaactctgtggcccattgatgagatgctctctgctctacaaagtggactttcctygaggtggaattttattttcctccctgtgctggtgttagattctctggatacataaggtgacccgaggagaagcaggcaatgtcatcacagtttatttgta

SEQ ID NO: 35428 - DNA, 201 bp, Homo sapiens
gaggagagaaaacatgaaagaccaacttagagacaggatcaagcaaccagggccacctatgtctgagaggaattctggaagataaggctagaaaaaaattrgggaaagacaatagtggatgagagaatagatgagaatttttctagaattgaagacaaacctgagacttaagattgaaaaataacacaaaattccaagcaa

SEQ ID NO: 35429 - DNA, 201 bp, Homo sapiens
gagagtgagaccctgtctcaaacaaaacaaaacaaagcaaaaaaatgaagattgccaaatatttaaatgtcagttactattaatttaaatgtccatcaggrttctccttgaagtcaaaactgctgttttccccaatgccagaactcctaacagtggaccccaggccgtaggaggtgatctagaattgcccctgaattaaag

SEQ ID NO: 35430 - DNA, 201 bp, Homo sapiens
agagacccaagcaggcaccttggagctcaagtgtggcatttttatatatcgacatatttcaggggtcttgtgtcctttttcccatgattctttcctctggrtgggccgcccgcatgcacagtgacctgctaacacttaagagttgagcgtgcacagtgtgtttactgcagttgtacacatgcccacctgaggcattcttcc

SEQ ID NO: 35431 - DNA, 201 bp, Homo sapiens
ccatgttcttacaaatgttgcacactatatctgactgtgggatcacagtgtacgtttgtataccaaagtctctgtaaagacctgcaatgaagtgaacccckttaacctttcttttactcagtgttcccctattgtatttgactgtggaaccctctgcgtcatacccttttacatcccagaacccaccgaacacagtttctt

SEQ ID NO: 35432 - DNA, 201 bp, Homo sapiens
aaaattagctaggcatggtggctaatgcctgtaatcccagctacttgggaggctgaggtcggaggatcacttgaacccaggaggcggaggttgcagtgagmtgagatcacaccactgcactgcagcctgggtgacagagcaagactctgtcaaaaaaaaaaaaaaaaaggaaggaaggaagggagggagggagggagggaa

SEQ ID NO: 35433 - DNA, 201 bp, Homo sapiens
ttgactgaggggcctaaggcagaaaaagaaaccaaggcaagtttcagggcaggagtggaagtttgttagaaagctttagaacaggaaagaaaggaaagtayacttggaagagacccaagcaggcaccttggagctcaagtgtggcatttttatatatcgacatatttcaggggtcttgtgtcctttttcccatgattcttt

SEQ ID NO: 35434 - DNA, 201 bp, Homo sapiens
tttgggagactgaggtgggtggatcacctgaggtcaggagttcgagaccagcctggccaacatggtgaaaccctctctctactaaaaatacaaaaattagmcaggtgtggtggcaggcacctgtaatcccaactagtcgggaggctgtggcaggagaatcacttgagcccgggaagcggaggttgcagagagcagagattg

SEQ ID NO: 35435 - DNA, 201 bp, Homo sapiens
gccattctcctgcctcagcctcccaagtagctgggactacaggcgcccgccaccatgcccggctaattttttgtatttttagtagagacggggtttcaccrtgttagtcaggatggtctcgagctcctggcctcatgatccacccacctcggcctcccaaagtgctgggattacaggcgtgagccactgcacccggccaat

SEQ ID NO: 35436 - DNA, 201 bp, Homo sapiens
gcccagaagccaagtgtcccctttcactgcttgttctctgttggtattcttcaaagggacatcgtgtctttcacagtttggaatgtgatgtttctgttctyactgacataactgtcttagtatctgctcctcctcttgtcatatatttggaaggtcttcacctcttgatcacttgcattttacattctacttgtctattgt

SEQ ID NO: 35437 - DNA, 201 bp, Homo sapiens
gtcttcttctttcgtcctgtctcctttgaggggaatgtcaggcttatgacagttgtcacaaacatattgtgtgtctttcttcaagacattaaaattgtgtktgtcaagctttccattcactttaatttgttttcatttcagcacatcagcttggtttcttagcattccaaggggaaagtttaaaacctttttgcatataga

SEQ ID NO: 35438 - DNA, 201 bp, Homo sapiens
gttggaacaagagatgagacattaggaaatgttacctgaactgtgtatgaggaaaaagattttgtttatcagcctcttttgtttccctttgccatgaaaastctatctaaaatctgttcaccatgccttactgttttcataaatgcaaaatatattacacacattatttttttttaattaaaagtttctggctgagtcaat

SEQ ID NO: 35439 - DNA, 201 bp, Homo sapiens
ggagctatagggttaagtaactggaaaggtaacatatttccaaagccatttcagaaaatcagtcttggcgttaagttagagtgaactattccattctctcyctgctatacccattgataccccatcctaacccagacacctagctgattttgttttcctgatgcgaaaaatactctaattcaaaaatgaaccctccatcaa

SEQ ID NO: 35440 - DNA, 201 bp, Homo sapiens
gcagaagggagtttcatagcaggtcaataagttcatggtcaggctcttaggctgctagcatagaaaatgtcagagcaggcagacacacaacaaaaaaagakaattttagaccaatatccctgatgaacattgatgcaaaaattctcagtaaaattctggcaaactgaatccagcagcacatcaaaaggcttatccaccaaa

SEQ ID NO: 35441 - DNA, 201 bp, Homo sapiens
ttgctcttccttttcactgtgttttaggtaaagtccacctcaagtaaaatttgtctaagcctttactttataactcctcgattgttactttttttttttttcttttgagacggagtcttgctctgtctcccaggctggagtgcagtggcgtgatctcggctcactgcaagctccgcctcccaggttcacgccattctcctg

SEQ ID NO: 35442 - DNA, 201 bp, Homo sapiens
cactcagactgaaaaagcaaaaatgatcttaagtggcataggaggattttagactggttagagggagaagttcctcagggggacgaattattgaatatctrtgtggctgttcttttattccaacatgattaactttgatgcttatcattccctatgggaatttaaggaaaagaaggctcataattgccagaatcttccatc

SEQ ID NO: 35443 - DNA, 201 bp, Homo sapiens
tatacacttcctaatgtgttgctcttttatgagtgaattacctttaatttggccttatgttttctatgtctatgttgtgcttctcttttattcttatttaytcagtgtatatttcttaagggcatattaggcactgctgtgtaggtctggaaaaacagggaacacacaaagtacctgccttattagtgccaggatttcaga

SEQ ID NO: 35444 - DNA, 201 bp, Homo sapiens
gccattctcctgcctcagcctcctgagtagctgggacgcaggtgcctgccaccatgcctggctaattttttagtatttttagtagagaccaggtttcaccrtgttagccaggatggtctcgatctcctgacctcgtgatccgcctgccttggcctcctaaagtgctgggattactggcgtgagccaccacacccacctgct

SEQ ID NO: 35445 - DNA, 201 bp, Homo sapiens
gctcaaacactgatgccgaggctacgtacagagagatgctttaccagttactcaccttcctcactgggcatctgcagagactcctagagaaatgtttgtargacaacatgagttataaattttgcattcaaaatcttttaaattggtaacaaaatgaatccctgtcccacagtgtgaagagatcactgcttagtcagtttc

SEQ ID NO: 35446 - DNA, 201 bp, Homo sapiens
tttttccttttcagtagtcacttttacgcttatgagtaaactacaattttatgaagcctgtggatgctggagtgatacttacagccctggtgtgtcctctrtgggttcagcctgccctgtgaactaatgaaatttaaccagtgtggtgcctccctcccatttagacttctctctctgaccaaactgcctctgttttccttc

SEQ ID NO: 35447 - DNA, 201 bp, Homo sapiens
aatagaaaaaatagccgggcgtggtggcaggcgcctgtagtcccagctactggggaggctgaggcgaatggcatgaacctgggaggcggagcttgcagtgrgccgagatagcgccactgcactccagcctgggtgacagagcgagactccgtctcaaaaaaaaaaaaaaaaaaaaaaaaaaaagaaatagttcctttccac

SEQ ID NO: 35448 - DNA, 201 bp, Homo sapiens
acggttgcaaaacttctgtttgtctttaaaaaatatgttggtcaagagttttctttagtctaaaattattgaaaggctaagaggtcaccttaactcccttytacagtcttcaaaaaatgcgggtggcccttattgcaacataatgctgatctgcataatagtagctgtgatcgttaaggactcttatcagcataaccttag

SEQ ID NO: 35449 - DNA, 201 bp, Homo sapiens
ataaataaataaataaatacaatggaacacttaagggcaatgttattttccggtaattttcacaactgatactttgacccactgggtctttagttttcccwatctaacccttgtgatggactgttaccccttgccatattatttttccagattaatagaaatggcattggacatattttccacacgattaataatagtcta

SEQ ID NO: 35450 - DNA, 201 bp, Homo sapiens
ttgtatttttacactattctatacctagagcagctacattcgacaaattagcatagagttacactaggaagaaaaattttgcccattccgagcacctatawctacagaaaagcaaacaacttgagtttctattatgatttttgaggcatggtagacttagcagaaccttctgtgtacaggaggaagcccacatggcaactg

SEQ ID NO: 35451 - DNA, 201 bp, Homo sapiens
tctaacacttgccagcagatgggacctttgacaaagtaccgaatcttgctctgcctccatttgctcaactgtgacatagagataataatagtatctacccmacaggatgcaacaactcattacagttcagtgtgttatggcagcctgggatatactaagtggctgagagtttctagtttgagcaaagcactctactaagtg

SEQ ID NO: 35452 - DNA, 201 bp, Homo sapiens
tcaccttagcctcctgagtagcaactacaggcacacgtcaccacttctggccagttttaaaaattatttgtagggacagggtcttgctgtgttgcccagaytggtcttcaaagcctggcctcaagcgatcctctcgctttgacctcctaaagtgctgggatcatgagccactgcacctggcctcacttgacttttttgtca

SEQ ID NO: 35453 - DNA, 201 bp, Homo sapiens
gcagtaacttgtaatggacttccaagccagagtgcctgggttcaaatcccagttctaacacttgccagcagatgggacctttgacaaagtaccgaatcttkctctgcctccatttgctcaactgtgacatagagataataatagtatctaccccacaggatgcaacaactcattacagttcagtgtgttatggcagcctgg

SEQ ID NO: 35454 - DNA, 201 bp, Homo sapiens
caatctgctcatcaaccagttgttcagaggcagtaacttgtaatggacttccaagccagagtgcctgggttcaaatcccagttctaacacttgccagcagmtgggacctttgacaaagtaccgaatcttgctctgcctccatttgctcaactgtgacatagagataataatagtatctaccccacaggatgcaacaactca

SEQ ID NO: 35455 - DNA, 201 bp, Homo sapiens
aaatacaaaaattagctgggcatgatggtacatgcctgtaatcccagctacttgggaggttgaggcaggagaattgcttgaacccaggaggcagaggttgmagtgagccaagatggcaccactgcactccagtctgagcaacaagaatgaaacgccatctcagaaaaaataaaataaaataaaaatctcccttgcaatgtg

SEQ ID NO: 35456 - DNA, 201 bp, Homo sapiens
agatgtttagcagcatctctggcctctacccactggaagccagtagcaaataccaactaccaatcctgacctagccaggataatcaaagacatctctagawattgtaatgccctgcccaggggggcaaaatgccccagcttagaaacgttgctctaaaggaaatttgaactttttctacttttaataaaatagagaaatga

SEQ ID NO: 35457 - DNA, 201 bp, Homo sapiens
cctcacttggagtcataaggaaatcttgaggagcttgtccaatccaataaaaccaggccagggcctctgagtctcctgggacttatagtgaattgctttcygtgcagcctgtttgcatccaggtttatggggacctttgccaagtatcctaagtgtgagcacctggttccacccactctaagcatgtcacacatccatctt

SEQ ID NO: 35458 - DNA, 201 bp, Homo sapiens
gatgattaataccagagtcgtgtcaataaatttcccctgcgcacgtgttttcttgaaactaaccaatccacgacccccatgggaaagcctaaggggtaacrcccctggaccctgatagaagcacagcccctcaggcttgctcactctcactctctccccacctcttggttgagctctgctgtcactgcctccagacctctc

SEQ ID NO: 35459 - DNA, 201 bp, Homo sapiens
agtgtcagtgagaaggacatttttcttttatccatcctacagcactgcacaattattgattgtggcttggaagcgaaatgatttatttaacattacttctytattctgctccagattgagatctttaatcactgttggacccaggactggtcagccaggtctggccactggagggctcagtagagttcctctgtcaaaaga

SEQ ID NO: 35460 - DNA, 201 bp, Homo sapiens
aaaagaaaccataataaaaaccaacatcaatgggttctcttaaaaagaaagcaaatatgcttaaagtattaacacattggatctatgtgtagtttcacatyatatgaccacatgaggaatttgtgtggagtagcaggagagttccaagacatttcatagggagatttgagtgttggtgggtggcgaggggctcctgggcac

SEQ ID NO: 35461 - DNA, 201 bp, Homo sapiens
aatccagactttgtctgcagtgaccagagggcagagctgagcggggctttcaagacggtatgctgcacagatgccagctctggccacagtgctgtgcacayggggtctttgctgcccagcatctatcttccaacttaaaatagataaaagaaaccataataaaaaccaacatcaatgggttctcttaaaaagaaagcaaat

SEQ ID NO: 35462 - DNA, 201 bp, Homo sapiens
ccaaatggggagctcctttagtgaaaccccacatccttacctctgtgagtctccccttcatattcacccagccccctttaataacagggctgctggttccscctcaagccgacttctaacaagctactggagcaaccgtgcaagcttgggctagtcattgcttcaaagcaattactggcggatatttaaaggagaaagaga

SEQ ID NO: 35463 - DNA, 201 bp, Homo sapiens
tttaggtatcagcttgctcttgtctactgttagttcctctctcattcccttacttctttgatgtatgcttttgtatcccttattgtcactttaatggaatktctggaggaagcagagacaaatgtattacatgggctgccatattgaaccggaattcattcttttctcttttgagtctccctttccaaagtttactccagt

SEQ ID NO: 35464 - DNA, 201 bp, Homo sapiens
ttaaactgacatatgacctgtctcttgctaaccagcatcggtggtccatgacagcaactatcttgttttgttcactgctgttttacaagctcctagtatgrtgcctgcacatagtagatgctcaataaatatgtgttgcattagttaatgaactggcgtggatgatacagtagtttatattggactttcgaagcactttta

SEQ ID NO: 35465 - DNA, 201 bp, Homo sapiens
acccattcaaagatggagttacagggacgcgtgccccttgccgcttgctgctttttataaactgcagctctgggacccggcaaaggaaaaaaaaaaaaaaaggcaatttcttgggatggtacattttccaaactgagtagagcatagagaactgtgatttcttaggcttgactttatctctggcacgattttcttaagcag

SEQ ID NO: 35466 - DNA, 201 bp, Homo sapiens
tatttccctatagaggactaatagccacctgatatagtatacgctcattcttaaactgacatatgacctgtctcttgctaaccagcatcggtggtccatgrcagcaactatcttgttttgttcactgctgttttacaagctcctagtatggtgcctgcacatagtagatgctcaataaatatgtgttgcattagttaatga

SEQ ID NO: 35467 - DNA, 201 bp, Homo sapiens
atttcataaaaccaatgtgggaaaataaatcatgagctatcaacccaccctccgaatgtatatagatcctgaccacttcttacatcccctactcctaatcsaccaccacctcttgctgggacttgtgcagtagccacctaactggttcccctcttatcacgagcagtctccacagggcaacccaagtagttgttccaactc

SEQ ID NO: 35468 - DNA, 201 bp, Homo sapiens
gatataaaaataggacctacttcatagtattgctgtgaggattacattagttaattgtgcagtatagtgcctgaaccataacaaacacttcataagttggrggtatttttgtttttaagcatttcataaaaccaatgtgggaaaataaatcatgagctatcaacccaccctccgaatgtatatagatcctgaccacttctt

SEQ ID NO: 35469 - DNA, 201 bp, Homo sapiens
tactgagcatctgccctgtgtctggaaacctgctaacatcacagtctctattataattctgaaaggaagtagctttttcctctttttattgaagagaaacwaatgccaaacagggggtgaataaagtacaagttagagcggtaagtggtaaagtcaatatttgaacccagggctctctatctcctaagcatatgtgctttt

SEQ ID NO: 35470 - DNA, 201 bp, Homo sapiens
atcgacatatttcaggggtcttgtgtcctttttcccatgattctttcctctgggtgggccgcccgcatgcacagtgacctgctaacacttaagagttgagygtgcacagtgtgtttactgcagttgtacacatgcccacctgaggcattcttcccttttccagtggcatgcccccagaagatcatgctttgccattttgtc

SEQ ID NO: 35471 - DNA, 201 bp, Homo sapiens
acttgaacattccagcaatgaagctggagccacagaggtgtatttctctctacagcagttattccatcctatccagtgccattcacacctgtagctacagstgttcccacaaccccacccccaataaagagggcactgagtgtacccggaagcagccagtagagtaatcaggatcatctcatctgggttcctttacttacc

SEQ ID NO: 35472 - DNA, 201 bp, Homo sapiens
atcaaaataactctgttgtttaagccccttagcacagccccacgtacttaattgtggcagcctgaacaaatgagtacggggactcctgtcttcttctttcrtcctgtctcctttgaggggaatgtcaggcttatgacagttgtcacaaacatattgtgtgtctttcttcaagacattaaaattgtgtttgtcaagctttcc

SEQ ID NO: 35473 - DNA, 201 bp, Homo sapiens
aaattaagataaagatgatggctgtaattgcagttaatattagaatataagacaaaagaagaaatgtaaggcattattacatggattgcattgtttaagaygaggtttataccagctcattagaaaaaaaaaaagttttaaggcattatcttccaacaactcttatatcttaatgtttttgacatctgattatctactaag

SEQ ID NO: 35474 - DNA, 201 bp, Homo sapiens
agaaccattaaaataagaattaatacaagtagctgttgggtaaaatatgtgttccagaaaaattaagataaagatgatggctgtaattgcagttaatattrgaatataagacaaaagaagaaatgtaaggcattattacatggattgcattgtttaagatgaggtttataccagctcattagaaaaaaaaaaagttttaag

SEQ ID NO: 35475 - DNA, 201 bp, Homo sapiens
cttggcgttaagttagagtgaactattccattctctctctgctatacccattgataccccatcctaacccagacacctagctgattttgttttcctgatgygaaaaatactctaattcaaaaatgaaccctccatcaagtttcaaagacaacacagaagaaagtaggcaagttttatctatgatttatacctttctaaatc

SEQ ID NO: 35476 - DNA, 201 bp, Homo sapiens
tcatggtgctgtcttagaaatgcctgtctggaatgtgaccatgggcgggggttggtgtctggccactgcgtagtcggccttcggggaaagggtagccacargatgttcccactcttctgtgagccctcaggaatttgaaaataagactcatgtgaaaacaggaacaacagcagcaacttcttgatgcagacagattccttt

SEQ ID NO: 35477 - DNA, 201 bp, Homo sapiens
cagcttagtctttgggaaactccccgcctgcctggccttatttaacacacagacgcacgggttcctgggataaacagtgctccccagagagccccggccaygagcagggtgtctaccagcacctgggtggcccagaagcacagctgcaactccatggggcctcagatatgccgactggatactttgagctgtaacccccct

SEQ ID NO: 35478 - DNA, 201 bp, Homo sapiens
tggccgattggggaatgtccccccagccgcacctggcccttatggcgtaatccagttgagcctggacgggaaataaaaaggaaaatgtgactcacagcaartgcaaatgcagtctccctcccaggggccttgctcagcttagtctttgggaaactccccgcctgcctggccttatttaacacacagacgcacgggttcctg

SEQ ID NO: 35479 - DNA, 201 bp, Homo sapiens
ctagatcaaacctgaaattgtgtttgcttcccccttttttggtattaaagtatctttcctttcttatggtaaaaaaatgataccacagagagtaagatttmtttaatgcctcttactttgcaaaataaaatcaacatccttgtattgtaacccctcataaatttgggggaaatatttctttagaaattttcatctatgaaa

SEQ ID NO: 35480 - DNA, 201 bp, Homo sapiens
catgactgagaaaagttttcaccggaggcaaaatgagaacactaactccaacataaagaatttttcactagatcaaacctgaaattgtgtttgcttccccyttttttggtattaaagtatctttcctttcttatggtaaaaaaatgataccacagagagtaagatttctttaatgcctcttactttgcaaaataaaatcaa

SEQ ID NO: 35481 - DNA, 201 bp, Homo sapiens
agaatgtcttcgtgacagagagaccccttcgaagaagagaagaatagaaaggacaagtggggttcaggtggcctgattatacagaccacccccttcatgcrtgaccccaaagggcttaccatttgggtttgcgggtttggggttgcctaatgatttggggaagtctttacaaggttgtgatggaaacagagggagattggt

SEQ ID NO: 35482 - DNA, 201 bp, Homo sapiens
aaagtgttgaaatattagcgttgaagaaacaggatataaactgagtgtatcaaggatatttcatcaaaataaatcctagagaaaatgcttcccctttatcyaagtcagggaagagaaatactaattatcagacctcaacttaagctaggagaaacgtgagaatctcagatatgcaccgttggaagttggcattaaaatgtg

SEQ ID NO: 35483 - DNA, 201 bp, Homo sapiens
agaggggtcctgcctggctcacttcgctccacacagaggatgcctcagtgcagggatgactgtggctggctccatatgagctgcccgtgggcagcgggtamtgggtatcactgccctttcatctttccaatctgataatgaaataatacacacagagaaggaaaatgtggaaacaaaagatgcagttgtactttgcccaac

SEQ ID NO: 35484 - DNA, 201 bp, Homo sapiens
atgaggaaaatgttttgagactgtagaagcagagaagagacttcgccaaagcccatagaaaataaaaagcaaaccctcaagcatgaaaatccctggccctrgagtaagtgcaggtgataaggcttgctatctgatgcctcattccatgtctctggcttcccattgcctaaattaagatgtcctgaaagaaaccttgggaaa

SEQ ID NO: 35485 - DNA, 201 bp, Homo sapiens
gaaaggcaggggggaggagctggggctctacacaaaatcagaggctgagacgggcactcggcccctcctcttcctctgtgaggcctcgtgttcagctctawgtgctggtgtccttgctcccgcagcgagttggaagactttgttgaagacttgaagaaggactccacggcagccagccgattggttactctgaaagacgtg

SEQ ID NO: 35486 - DNA, 201 bp, Homo sapiens
gctcaaaggtcatgctcatggaagcatttcagattttggatttttggattagggatgctcaactggtagctatgtactgcaaatattctaaaatccaaaawaaaaaaaaaatctgaaacctgaaacacctctggtcccaagcattttggataacagttactcaacctgtaatgagcgtgtttattagaaactacatacata

SEQ ID NO: 35487 - DNA, 201 bp, Homo sapiens
cgggttcaagcaagtctcctgcctcagcctcccaagtagctgggattacaggtgcccaccaccatgcctggctaatattttgtatttttagtagagacaasgtttcaccatattggccaggctggtctcaaactcctgaccttgtgatctacctgcctcccaaagtgctgggattacagtcatgagccactgtacccagcc

SEQ ID NO: 35488 - DNA, 201 bp, Homo sapiens
gtaaaaagtttagaaatggaactagactcagctaagaatttcctcttcagagctattaatttattctaatccaatggcgaaatgatgggagaatagccacrtgtagtagaagcagctacttagttgtgtgaactaatgactgaatatgagtttacagagctgtttcttttttatttttattttgtttatttatttattctt

SEQ ID NO: 35489 - DNA, 201 bp, Homo sapiens
ggtgacaatgggttggcagaggggtcctgcctggctcacttcgctccacacagaggatgcctcagtgcagggatgactgtggctggctccatatgagctgyccgtgggcagcgggtaatgggtatcactgccctttcatctttccaatctgataatgaaataatacacacagagaaggaaaatgtggaaacaaaagatgca

SEQ ID NO: 35490 - DNA, 201 bp, Homo sapiens
tcattaaatgcatgttcatgcttacttaaccaacagtatggccctttggcttagtctcatagtctatctgacccttattttcttttcttttttttttttttcaaatgcccctttcattatgaaactcttttttaacttttaatttaagttcaggggtatgtgtgcagatttgttacataggtaaacttgtgtcatggggct

SEQ ID NO: 35491 - DNA, 201 bp, Homo sapiens
cttctttaaacaatgaggaagagcccttttctgcacagaggtgtccttgtcatttgtttgtttgcagctgtaggaaggcagggggctttgcatggtgacartgggttggcagaggggtcctgcctggctcacttcgctccacacagaggatgcctcagtgcagggatgactgtggctggctccatatgagctgcccgtggg

SEQ ID NO: 35492 - DNA, 201 bp, Homo sapiens
gctgtgtagaatattcacatatatacaggaatatatatatatatatacacatctatgaatgtgtagaatattcatatatatgaatacatacgaatgaatayatatgtgtgtttgtgtgtatatataggactatatatacacatctatgaatgtatacaatattcatatatatgaatatataagaatgaatatatatgagtt

SEQ ID NO: 35493 - DNA, 201 bp, Homo sapiens
gagagtcttcagagtggcctctgtagcatggggataccattaacaacccttccctgtgggaagaccttggaacttaaaggcttggaagtttcccaggaggygatggctagcaatagaagttccataaattttttgttgtttctgacaaccacaaggacaaggtaaattaacaatacctcagaagatgaatctgacacacag

SEQ ID NO: 35494 - DNA, 201 bp, Homo sapiens
tccagctccaaccatgttactacaaaagacgtgtttcattcttttttatggctgtgtagaatattcacatatatacaggaatatatatatatatatacacmtctatgaatgtgtagaatattcatatatatgaatacatacgaatgaatatatatgtgtgtttgtgtgtatatataggactatatatacacatctatgaat

SEQ ID NO: 35495 - DNA, 201 bp, Homo sapiens
tgacatacatgatattttacatatgacaaggtaatacttattaatccttcaggaagcaaaatcatattctttgtttcaaattgtgaaagaaacattgttcrtgcctttataaaaggtacactgatcagcatagtaggcaggaccaacaagtaaacagcagtattcttcatgtggcttttgtttttttagagacaggatctt

SEQ ID NO: 35496 - DNA, 201 bp, Homo sapiens
tcctcctaacacacacaaaaaagggggtggtagaagccacggcagatcatggcagatggcacttagggacagctgtagtgcttggcttgagttcccctcckcatggagcacagagctgcccacttcgtaggaatacggcaatatttatctacgcataggagtcattccaaataaaaagggtaacagaaagaaattgcagcc

SEQ ID NO: 35497 - DNA, 201 bp, Homo sapiens
ttcctatttatatggcgagaaaataaatgagatttctttctatctgtcttccatatgtttaatggtaggaatgtgtcttggatcttgagttaaaacagacygtggattcagttagttgatacaattaagaactgttcttatctcagaatcaactctgcagactatctcagagaatccaatatcaaccatccaggtggctaa

SEQ ID NO: 35498 - DNA, 201 bp, Homo sapiens
tctcccatacagttctcctagtagtgaataggtctcacgagatctgatggtctgataaagggttaaccctttcacttgcctctccttctctcttgcctgcygccacgtaagccatgcctttcaccttccaccatgattgtgaggcctccccaaccacttggaagtatgagtccattaaacctttttttctttagaaattac

SEQ ID NO: 35499 - DNA, 201 bp, Homo sapiens
aatgaggatagcacattaagaaagttctgggccaatgttgcacccaggtctctctgagacttttattattatccaccatttaattgcatttagggaccatrattatgaggagacatcttttacaatgaagaactttagtgtccccccaaagccaatgttagtctgtctcccaaaacagattctccccttttctttgactct

SEQ ID NO: 35500 - DNA, 201 bp, Homo sapiens
aggttcagaagccagtaagttcaagggtgaggtgataatcaggaattttggtgtttgtcaaatatccactgtgagccaggaactagagcaggtgttgtacrtgtgtttccacacttaatttcacaactctctattaggtatcattatcactgttttacaagagaggaaataagggctgcagaggttggttaactcaatgag

SEQ ID NO: 35501 - DNA, 201 bp, Homo sapiens
aaaacttctttgtttcaagagtctggtaatatttactggaagttgggagagtaagagaaatgaggagaagagctgacaaaaggccgttatagcagactttrgattaaaatctgtagacacccatgtcctgcctatcaggggtactgaaatatttctttagaatgattgcctcatggaacacccagcgtagagagaatatag

SEQ ID NO: 35502 - DNA, 201 bp, Homo sapiens
ataagccagcagattctaggtgtatattgaaggtaatgcccaaagcatttcctgtagcctgggcagcatagtgagaccccatctctagaaaaaaaaatttrgctaggcatagtgccctgtagtcccagctacttgggaggctgaggcaggaggatcacttcagccaggaggttgagactgcagttagccatgattacacca

SEQ ID NO: 35503 - DNA, 201 bp, Homo sapiens
tcaaggaggcaagaaccagggctagcttggaccaggcggtgattagcaggcggtgataagccagcagattctaggtgtatattgaaggtaatgcccaaagyatttcctgtagcctgggcagcatagtgagaccccatctctagaaaaaaaaatttagctaggcatagtgccctgtagtcccagctacttgggaggctgagg

SEQ ID NO: 35504 - DNA, 201 bp, Homo sapiens
attccatgtctctggcttcccattgcctaaattaagatgtcctgaaagaaaccttgggaaaaaaaaagcacagtccccacatttgaagtagaaatagaatkaaggagaaattgtgattttcctgaaggaacagaaccaacactggttttcaaaaggcttagttttacattttagtagaaactgttagcagtaggaggattt

SEQ ID NO: 35505 - DNA, 201 bp, Homo sapiens
cactcgcctccatttcaggcaggcagagcccactgaggttgatttttttgtgttcacagctgcagaaccaggagttgctgagggcaatgatgaagaaggcygagctggaaatcagtggcaaagtgatggaaacaatgaagagactggaggatcccgtgcagcgacagcgcgtcctagtggagcaagagagacaaaaatatc

SEQ ID NO: 35506 - DNA, 201 bp, Homo sapiens
gggaaaaaaaaagcacagtccccacatttgaagtagaaatagaatgaaggagaaattgtgattttcctgaaggaacagaaccaacactggttttcaaaagscttagttttacattttagtagaaactgttagcagtaggaggatttgctttgtgtgtgtgtgtgtctgtctgctttgccttattttggttctgaccatacc

SEQ ID NO: 35507 - DNA, 201 bp, Homo sapiens
aaataagtaaagattcagccgcagggctgtctacccaaagtgctccgaagacttcaaggcattcactcgcctccatttcaggcaggcagagcccactgagkttgatttttttgtgttcacagctgcagaaccaggagttgctgagggcaatgatgaagaaggccgagctggaaatcagtggcaaagtgatggaaacaatga

SEQ ID NO: 35508 - DNA, 201 bp, Homo sapiens
ccacattatgtacagtctttgctccctttcctttctcattgaaataagtaaagattcagccgcagggctgtctacccaaagtgctccgaagacttcaaggyattcactcgcctccatttcaggcaggcagagcccactgaggttgatttttttgtgttcacagctgcagaaccaggagttgctgagggcaatgatgaagaa

SEQ ID NO: 35509 - DNA, 201 bp, Homo sapiens
tgggtctttagttttccctatctaacccttgtgatggactgttaccccttgccatattatttttccagattaatagaaatggcattggacatattttccayacgattaataatagtctattttcccactttctttaaaatgccttttgcagacaaggagccccaaactgtctcacagtcctcaaccacccagtctgggtga

SEQ ID NO: 35510 - DNA, 201 bp, Homo sapiens
gctttatagaattccatggtgaacatgtaccacattttctttatccagtccaccattgacggacacctaggttgattccatgtctttgtggatagcacggwgatgaacatagaagtgcatgtgtcttctcggtataatgatctatattcccttgggtatatacccaataatggcattactgagtcaaatggtagttctgtt

SEQ ID NO: 35511 - DNA, 201 bp, Homo sapiens
gagcacaatccaagtagggttgagggaagggcagggaggcctttaggaagcttctgcagtcaaggaggcaagaaccagggctagcttggaccaggcggtgwttagcaggcggtgataagccagcagattctaggtgtatattgaaggtaatgcccaaagcatttcctgtagcctgggcagcatagtgagaccccatctcta

SEQ ID NO: 35512 - DNA, 201 bp, Homo sapiens
gaaactgcatagctgactctctttttcttttattcagcgagaaaatgatgaaaaccacagccaacaggaaccacacagatagtgcaggtaagtaagtgttyttggagctgtaggaggcctgtgggctgcctgggatgagccctggctggtctcagaaatgtttaacatttccctaagtcacgtatttggtatgatgtcagg

SEQ ID NO: 35513 - DNA, 201 bp, Homo sapiens
cccccctcacaccatgcagccagaccgggcctctccgagccgccaggcctttaaaaaggagccaggcaccttggtgtatatagaaaagccacggagcgctrcaggattatccagccttgtagacctcggccctcctctaatggagaagcaagtttttgcctacagcacggcgacaatacccaaagacagagagaccaggta

SEQ ID NO: 35514 - DNA, 201 bp, Homo sapiens; identical to SEQ ID NO: 5549

SEQ ID NO: 35515 - DNA, 201 bp, Homo sapiens
ttcaggaagcccatactggtattagcatttctgttcttttccttcatgcctggaagaccaaatggttaaccaggaaagggccaggcgaggtggctcacgcytgtaatcccagcactttgggcggctgaggcaggtggatcgcctgaggtcaggagttcgagaccaggctgcccaacatggcaaagccccatctctactgaa

SEQ ID NO: 35516 - DNA, 201 bp, Homo sapiens
gggtctgccacacatctagatgataagtggaacctggttagcatgggagggtggtgagggcatcctaggatactaaaatgctggatcaaagtctgggaccrtgactaagcctgtctaagtggaacaagaacgaggacctaagactggggaaatgggctggaaactgacttgagtgcttgaaaaacagtccatgatgtttgg

SEQ ID NO: 35517 - DNA, 201 bp, Homo sapiens
aagcactccactgaggtgaaggcagcctggggagggtctgccacacatctagatgataagtggaacctggttagcatgggagggtggtgagggcatcctargatactaaaatgctggatcaaagtctgggaccatgactaagcctgtctaagtggaacaagaacgaggacctaagactggggaaatgggctggaaactgac

SEQ ID NO: 35518 - DNA, 201 bp, Homo sapiens
ctgaagttgggagaaatgtaacaatcagctctcctgggccaggacaagccggcttcaagcactccactgaggtgaaggcagcctggggagggtctgccacwcatctagatgataagtggaacctggttagcatgggagggtggtgagggcatcctaggatactaaaatgctggatcaaagtctgggaccatgactaagcct

SEQ ID NO: 35519 - DNA, 201 bp, Homo sapiens
tgtgtgtggcatttgccaatttccatggtgtaaatatcgcaaccatggctgatttcaagttatgacatgacaccactactgctgaagttgggagaaatgtracaatcagctctcctgggccaggacaagccggcttcaagcactccactgaggtgaaggcagcctggggagggtctgccacacatctagatgataagtgga

SEQ ID NO: 35520 - DNA, 201 bp, Homo sapiens
tacacacacacatacacacaatcactccttaaatgtgcaagaccgggacttgactttgagaaatttcaattcaggaaggaaaattcaatgggaggtattaytatagatttaatttgatgggaaacgaggcagaaaatttcaaggacattatcccctttatattctcttcatcctttgctgattctggctttaaaagacttc

SEQ ID NO: 35521 - DNA, 201 bp, Homo sapiens; identical to SEQ ID NO: 5546

SEQ ID NO: 35522 - DNA, 201 bp, Homo sapiens; identical to SEQ ID NO: 5548

SEQ ID NO: 35523 - DNA, 201 bp, Homo sapiens
tgaatggagacatgagggtaagtgtttctgtcatatttttacttatcttcagtgggtcaaagcgtccctcctcttgcttgtactcctgatgtaatcagaastctacaactgagttttggagggttctccgcactcatctcacctagtggatcattatttgttcttggtagagaagtaagatttcctggttatttagggcaa

SEQ ID NO: 35524 - DNA, 201 bp, Homo sapiens
taatggtagtgtaaattttccttccataaggtataaagtaggttaactgattggatggctagatctgaatggcaagacagcaggttataaaagacagctgsaaatagctagaagagaagaactagaatgtttctagcatgaagaaaagacaaatatttaaggtgacggatatcccaagtacactgatttgatctgtacaaa

SEQ ID NO: 35525 - DNA, 201 bp, Homo sapiens
tgttcatgttttttacctgatctttaagggcaggctaaggaaatggccaaagtcaggcttctttcatctgccatagttatcgatgtttttgattccaggarcattcaagacagatcactcctcaaagtgtacaacaaggatcctgcacatgcgtttaatcacacaccaaaaactatgaatggagacatgagggtaagtgtt

SEQ ID NO: 35526 - DNA, 201 bp, Homo sapiens
tgaattaaatgatgtaaggtaagttgtgacatcattttttgcctgccattttgccttagagttttttttgttttttgtttttttgtttttgaggggttttyttttacccactatattgcatttagagtgtttttttgttttttgttttttgttttttgttttttgtttggtccatcatatccctttcatagagtttatacc

SEQ ID NO: 35527 - DNA, 201 bp, Homo sapiens
ctcacagtcctcaaccacccagtctgggtgacccggtcgagcatttatcagagacgtccgctgattctttggaagccatgtctgagggggatgctccaacycctttttccagaggcagccggactcgtgcgagccttcctgtggtgaggtcaaccaaccagacgaaagaaagatctctgggtaagctttagaaggcagttt

SEQ ID NO: 35528 - DNA, 201 bp, Homo sapiens
gattctttggaagccatgtctgagggggatgctccaacccctttttccagaggcagccggactcgtgcgagccttcctgtggtgaggtcaaccaaccagaygaaagaaagatctctgggtaagctttagaaggcagtttctgatgcccctttcttactgaatgcgtttgttgttatactactgaacctatactctttcatt

SEQ ID NO: 35529 - DNA, 201 bp, Homo sapiens
cctttaagcaacttccttaccaaagctgtctagactctaaaaatgccacgttacctttttttttttcttaaaggaatatcctttgcatttgcctaggattraagaaaagcagtaaagtggtacatctcaaggtagccctgaatgcacctctgctcttactgtcattcattttactccagcaccactgcggatagagtccct

SEQ ID NO: 35530 - DNA, 201 bp, Homo sapiens
ccgtcccccaggaagcaacctccactctgcagatgtcgcaggctccgcagtccccacagatacccatgaatgggtctgccatgcagagcttgttcattgargaaatccacagtgtgagtgccaagaacagggcagtgtctatcgaggtagagtcctatttctgtttctcataaccccataaaggagtctgatacatggacc

SEQ ID NO: 35531 - DNA, 201 bp, Homo sapiens
tctttaaaatgccttttgcagacaaggagccccaaactgtctcacagtcctcaaccacccagtctgggtgacccggtcgagcatttatcagagacgtccgstgattctttggaagccatgtctgagggggatgctccaacccctttttccagaggcagccggactcgtgcgagccttcctgtggtgaggtcaaccaaccag

SEQ ID NO: 35532 - DNA, 201 bp, Homo sapiens
gacttagctcaggccttgaactgtgtttggttggttttctttgattgaattattctcagaagggctgtgttgccaggccctgtgggttgatcatgtgaccrcctttctgacaaaatgtctcccgccatctttatttgcaggctaatggaagtgctaagaaatctggtggggactttaagcctacttccccctccttacctg

SEQ ID NO: 35533 - DNA, 201 bp, Homo sapiens
tagctcaggccttgaactgtgtttggttggttttctttgattgaattattctcagaagggctgtgttgccaggccctgtgggttgatcatgtgaccgcctktctgacaaaatgtctcccgccatctttatttgcaggctaatggaagtgctaagaaatctggtggggactttaagcctacttccccctccttacctgcttc

SEQ ID NO: 35534 - DNA, 201 bp, Homo sapiens
ggacatggatatttcagagatgggtaccatgtctttgaactaggactttgctacttaacatagcaacaggaaaatgaacagatagatggactaatcgcccytgcgtaaatagcctagaggttcaaataactgatcatttattttttaaaaatgggtagatagaactctaatcacatcccaggaaagcagcaaagaggtttg

SEQ ID NO: 35535 - DNA, 201 bp, Homo sapiens
atgtttgtaagacaacatgagttataaattttgcattcaaaatcttttaaattggtaacaaaatgaatccctgtcccacagtgtgaagagatcactgcttrgtcagtttccttttgggagaattatttccaatttttttaagttaaatgctagttattagaaaagtgaccacatggccacctgagtctgttcagatctttt

SEQ ID NO: 35536 - DNA, 201 bp, Homo sapiens
cagcattctctgatttccacgcctacttacccaagttggttgactcaacagctgctaagactacagctgtgtgaatcctccacattttttttttttttgcmtggaaaagtgtttcagtttgtcattgcttcatcatttcgaattccatattaggttacctttttttttttttttttgcctgaccatagtacttaagaaaaa

SEQ ID NO: 35537 - DNA, 201 bp, Homo sapiens
ctctactaaaaaacaaaaaattagccaagcatggtcacaggcgcctgtagtcccagctactcaggaggctgaagcaggagaatgcagtgaacctgggaggyggagcttgcagtgagcagagattgcgccactgcactccagcctgggcaacagagcgagactccgtctcaaaaaaaaaaaaaaaaagaataaacctaatta

SEQ ID NO: 35538 - DNA, 201 bp, Homo sapiens
taaaatcctgttcagttctgggtgaatatgatgctgtagagaagcatggcttcatttttagttctcccggtgagcacgagtgccgcaagggagagcaacakctctgatgctaacatcacccataacgttcatttctatcattgcattctctcttgtgtctgcctgtgtatctgttttacccaatgacaatgtgatattcca

SEQ ID NO: 35539 - DNA, 201 bp, Homo sapiens
tgccgctgtgcatggtttctcctagacatgtcactgatgggctcctgaaaggcacggacgcagcccaagccgcacagtacatggctatggaaaaggccacrgccgcagaagtcctgaagagtcaggaggaggcagcccacacctccggccagcccttccacagcacaggtgcccctggcgatgcgaagtcggaagtggtgc

SEQ ID NO: 35540 - DNA, 201 bp, Homo sapiens
atagcctgcaagtataccaccatgagaaagtgacatgagggttaatgccgctgtgcatggtttctcctagacatgtcactgatgggctcctgaaaggcacsgacgcagcccaagccgcacagtacatggctatggaaaaggccacagccgcagaagtcctgaagagtcaggaggaggcagcccacacctccggccagccct

SEQ ID NO: 35541 - DNA, 201 bp, Homo sapiens
cactgttttccagaagattctccaaattcggaacaggacttggaaaagctggggggaaagtcgccccctcctcctccgccacctcctcgtcgaagctaccygccaggatcgggactcaccaccacgaggtcaggcgatgtggtctacaccggcagaaaggagaacatcaccgctaaggtctgataggctaagccctggtaa

SEQ ID NO: 35542 - DNA, 201 bp, Homo sapiens
ctttagggtctatacacttaatccttgctctatggagagaacagaaaatttttaaatcagattgcattgggtttgtagcaatataccagactttctggatrttttcttgaaaaaagattattcttgtaatggtgcactgttttccagaagattctccaaattcggaacaggacttggaaaagctggggggaaagtcgcccc

SEQ ID NO: 35543 - DNA, 201 bp, Homo sapiens
ggcagaaaggagaacatcaccgctaaggtctgataggctaagccctggtaaactggcctctgggttcagatgatacccttagacaaggttctctctgttgraacataaaaagtagtgaggcagagaagtagtaactcgaccacacaagatccccaggaagcaccacagatggaacaatggcagccagtatgattggactag

SEQ ID NO: 35544 - DNA, 201 bp, Homo sapiens
agagagaacgtggaaggttatttgggaggtctaggggccccaacaaaaggtggcccacatggcttctgcccacaatacattgactggaattagtacaaggmcccagtgagatggagatggctggaaaatgtggtcttcctctgtgtgcagcagaagagcgttctggtcgaacacatagggctgtctctgccacggtacacc

SEQ ID NO: 35545 - DNA, 201 bp, Homo sapiens
gtgctcttaacccactgccacctgaagatgtgtgagccaccctgtggcttgtgaactctgcacttctctgtccagtatcggagtgcgggatgagggttgtmgttctggctttttctcctccaattcacctgctggtttgggcctgcaggagaatttccaaccttacaaaacaagatgcgagccatcctgcgcatagaagtg

SEQ ID NO: 35546 - DNA, 201 bp, Homo sapiens
ctctatgcaagtgaagtgctattagcccacctgcttgccttccccactgtctgattggcagcctcccatcgagtgcaagcctggggaatcagatatgcagmagcctcctctaaaacagccccctcagtctctgtacccttatcccgtttcattcttcaaagcacttaccgttacatgacatttagagtctatatgatttgt

SEQ ID NO: 35547 - DNA, 201 bp, Homo sapiens
ttttagttctcccggtgagcacgagtgccgcaagggagagcaacatctctgatgctaacatcacccataacgttcatttctatcattgcattctctcttgkgtctgcctgtgtatctgttttacccaatgacaatgtgatattccacagcaaggaccatgttttatttattcacgtttgcatttccagcacctaacagagc

SEQ ID NO: 35548 - DNA, 201 bp, Homo sapiens
actacagctgtgtgaatcctccacattttttttttttttgcctggaaaagtgtttcagtttgtcattgcttcatcatttcgaattccatattaggttaccyttttttttttttttttgcctgaccatagtacttaagaaaaatcttgcaactgtccttcattctgttgaaccaactatatcttatgttttcacttgacatt

SEQ ID NO: 35549 - DNA, 201 bp, Homo sapiens
ggaagatgctcagtgctctggagtccacggtgcctcccagccagcctccacctgtgggcacctcggccatccacatgagcctgcttgagatgaggcggagygtggcggaactcaggctccagctccagcagatgcggcagctccaggtattcctcatgcacggcggcctctgtctcggttgccctgagctcttcctacctt

SEQ ID NO: 35550 - DNA, 201 bp, Homo sapiens
cggccatccacatgagcctgcttgagatgaggcggagcgtggcggaactcaggctccagctccagcagatgcggcagctccaggtattcctcatgcacggyggcctctgtctcggttgccctgagctcttcctaccttccttttcctaggggctccgtgaagacctagagaatgtagaaccatagaaacagcatggcttcc

SEQ ID NO: 35551 - DNA, 201 bp, Homo sapiens; identical to SEQ ID NO: 5553

SEQ ID NO: 35552 - DNA, 201 bp, Homo sapiens
aactggtgagatggctcacacctggaattccagcactttgggaggcccaagagggaggattgtttgagcccaggagttcaagaccaacctgggcaacattktgagagcctgtccctacaaaaaataaaaaaaaattagccaggcatgctggcacacacctgtggtcctagctactctagaagccgaggccaaaggattgct

SEQ ID NO: 35553 - DNA, 201 bp, Homo sapiens
ttgttcattgaagaaatccacagtgtgagtgccaagaacagggcagtgtctatcgaggtagagtcctatttctgtttctcataaccccataaaggagtctratacatggacctttcccttaaagcatttataggtcagatgatgacatgattgtgtatggatcagagacagggttttggaagtggaagtgggattcagtgg

SEQ ID NO: 35554 - DNA, 201 bp, Homo sapiens
tttgggaggccaaggcaggaaaatcgcctgaggccaggagttcaagaccagcctaggaaacataacaaaaccccatctctaaaaaaaaaaaaaaagttttkttttttttttttttctggccaggcgtagtggctcatgccactttgggaggctgaggcgggcagatcacttgaggtcaggagttcgaaaccagcctagcca

SEQ ID NO: 35555 - DNA, 201 bp, Homo sapiens
caaatctccagggttcaggcagctcctaggccactcggaatgacatcgttgcttaaaagcatcactttactctaaatgagcctcagaacacctcggagcgyggtagtacctgttactatttcagagaaggattgctaagagtacttttattgtaagacttaaaggtttaaaacgtcttgtgagcttttgctgtataatttc

SEQ ID NO: 35556 - DNA, 201 bp, Homo sapiens
tctagaaaaggctagaattataaattattataaacgttggccatgtggggaaattcttataccaaaaatactgcaatgtatgtcagcctatagattttcaygtagtttcttgtccaaaactgtatatgagagcagaaatgattgattatgttatgttcaatgtatacctaatatctagtgctgatacataaataaacccat

SEQ ID NO: 35557 - DNA, 201 bp, Homo sapiens
aggactaagaaaaaataaggattggaaaatagtattcattctctcctttccaaagtcctcatgaagtgaaattctaagcatcaaagaaagggactcttccygtcactgcagacagctaaggggtataggataaacactcatagtggttcatgggaacagaccaatgtgacatctggagaggaatctaccaagatgtgcgat

SEQ ID NO: 35558 - DNA, 201 bp, Homo sapiens
ctgtttcatttcatatcattttacgtgttattattctaataagaatacaaatggagtttgatgccatttgctgatcatccatcttattgatgccattgaamagaacgcagaaacacaaagggatttataaggcatttcagttttgatgtcctttgaaaaatgaaagtcttttcagaaatgcaaaagacaaaatgacttaga

SEQ ID NO: 35559 - DNA, 201 bp, Homo sapiens
ttccaaagcagtgtctcatctgcaggagcaaactatagcaagggccctggccatcagttctcccttctggtcctgatattcctttttaaactgtctttccrtacccctccctccagtgggcttggcgatgttgcattaaatagcaaagagaaggaaactcctccccagtcctcactgaccatttctttttccactcagtcc

SEQ ID NO: 35560 - DNA, 201 bp, Homo sapiens
gagcagatatttggtgtagggcattttctaatgtagtaccaataaattagacgcatacctcaaccaaaaaacagcccatatccagtaagtaataaggcaaygatttacatttcacatattaccagagtaatgactaatagcatacatgtataaactgaaaagtgactgatgcttattttcagatgggtccaaatttattgg

SEQ ID NO: 35561 - DNA, 201 bp, Homo sapiens
catgttgaccaggctggtctccagctcctgacctcaggtgatccgccagcctcagcctcccaaagttctgcaattacaggcgtgagccaccatgctcgacytaaagactgatcattttttatcagttgtccaaagacttcatcttttctccttccctgataccattgcattcagccatggtgctgagaggtgaagccagct

SEQ ID NO: 35562 - DNA, 201 bp, Homo sapiens
agcttggatatttcaaagacattagccatggccttcatgtttatctggacttgagggcttcatatctttgaccatagatgatgcttaagttggtctttcaygtggtttcagatccacagacattttgattaggtcaaataacaatcgtcttcataatgccaccatgtatgtatgtagtcctttggagactattttgacatc

SEQ ID NO: 35563 - DNA, 201 bp, Homo sapiens
tcaaagatttgttttagaggatagctgggtaagaacttgtgctgaaaaaacaatgcaagggatttgtaaagaaacagggaaatgaatgatctgacaggccrtttgttaccaccaacatttttcttaatttaacctgaacttacttgctcttgtggtggtcggtcggtctttctctctctctctctctctctctctctctct

SEQ ID NO: 35564 - DNA, 201 bp, Homo sapiens
aaataagttggtagaaatattatcaaataaaggccaaaactgtgttcagagacctggaagttcattcttttcctggttttgttgtatgtctgagacatgcrgagggacagacaaaaagatgcatttaaaaaagagctgccagggaacacataccaaaatggaaatttgggaaggggatggacaagatgagacaaagcagac

SEQ ID NO: 35565 - DNA, 201 bp, Homo sapiens
acaaaaaaattagctgggcacaatggtggctcatacctgtaatgccagctacttgggaggctgaggtgggaggattctgtgaatctgggaggtggaggctrcagtgagccagtatcgcaccactgcactccagtctgggtaacagcaagaccctgtctcaaaaaaaaaaaaaaaagagaaaagtattgtaagtcacttcag

SEQ ID NO: 35566 - DNA, 201 bp, Homo sapiens
aaatatacaaaaaaattagctgggcacaatggtggctcatacctgtaatgccagctacttgggaggctgaggtgggaggattctgtgaatctgggaggtgkaggctgcagtgagccagtatcgcaccactgcactccagtctgggtaacagcaagaccctgtctcaaaaaaaaaaaaaaaagagaaaagtattgtaagtca

SEQ ID NO: 35567 - DNA, 201 bp, Homo sapiens
ctcaaaaagaatataaaaataataaaaataaaataaaatgtttcctcttgatcacaaaaaaaaggatatagttctatgcaatcatgtctgaaacaggataygtgtgtcatgcatccctgagttcgggttacctcaatgacatgaccatttacctaatctttgctttttcatctgctctcaattgaaaagaaagaaaccatt

SEQ ID NO: 35568 - DNA, 201 bp, Homo sapiens
tctcatttccagtggcatcttcccttggcaaaaggaatcccagataggacctcatctttctaaacaaatgctgttttgggtcctaaccatcccatgtttgstttgaatatgtttaagttgcctggaattatcaacaaaagaattaaatttattgtaggtcagggcatcttttgactcattgtataaaacattcactttaaa

SEQ ID NO: 35569 - DNA, 201 bp, Homo sapiens
actcttcactttcactccgtttcacttgctcatgattaagcaacaaacgtggtaatggtgtttcctactctgagtttcactagatttagtaaacgcacatratcatgctggtcccgtcgaagtgacgataggagtcctcggagctgtggtctccgccctggctggttgcacctgctctgtgctctgctcagatcatacaag

SEQ ID NO: 35570 - DNA, 201 bp, Homo sapiens
caaattcattagatatgcatctgtcatatttgtcttggctctgatctatatctgtctattcaaaatttacgtacatgcatctatatttatgaaggtacctkccagtgaaggctgaaaagtaaggctaattgaaattaagacacatgtatactatacactgttcagtaagtcgcagcctttggccacggtgaaggtctggat

SEQ ID NO: 35571 - DNA, 201 bp, Homo sapiens
aagaaatgtaactatgtgtgagaaaacaggaattagggagaggtaagggaggggagttggtcaacaggaagcagggggtcaatgaggcatcatcatgggtraggggtctgacaatttattgtttagatgcagtgatctggtgagtgtcagcttcttgatgctaactgggaggcctgatggtttcctgagaaaagaactcag

SEQ ID NO: 35572 - DNA, 201 bp, Homo sapiens
gtactaccctctgttatgtgtgaaaaactccaaattcattagatatgcatctgtcatatttgtcttggctctgatctatatctgtctattcaaaatttacrtacatgcatctatatttatgaaggtacctgccagtgaaggctgaaaagtaaggctaattgaaattaagacacatgtatactatacactgttcagtaagtc

SEQ ID NO: 35573 - DNA, 201 bp, Homo sapiens
agctcttatagaaaaggaatgtacagccaagtttatgggaagcatgaggatggtgagtccaaagtcaaggtaggtgatagcattggtggccccttgcagcrccgggagtctatatggcggtctaacttcgcaccccctatttgtcacttcatagcactcttcactttcactccgtttcacttgctcatgattaagcaacaa

SEQ ID NO: 35574 - DNA, 201 bp, Homo sapiens
gacgtgtttcattcttttttatggctgtgtagaatattcacatatatacaggaatatatatatatatatacacatctatgaatgtgtagaatattcatatrtatgaatacatacgaatgaatatatatgtgtgtttgtgtgtatatataggactatatatacacatctatgaatgtatacaatattcatatatatgaatat

SEQ ID NO: 35575 - DNA, 201 bp, Homo sapiens
tagcaatgttcgtgctaaagggctgtttttaagggctttttttttttttttattgaatgaactgagatttttgaatagagctgaaaacaagcgatgcattrtgcgttctgctgattgtgcccggtgaatactgctataaaagtgccacagataagggttagatggacaatctgaaaattgagatgctccatgtatttctta

SEQ ID NO: 35576 - DNA, 201 bp, Homo sapiens
tatcaaccatccaggtggctaatccatcatcaactgaatgggcaatttggttgcttctgttcaattgaacaaagaggcataggcactcgttagttccacamcccagtcagagaagcaacatgggtgtgtgacaaaaggggtatatagtctgttctttggcttcagatatgaaaaagcttttttcaatccaactaattcaag

SEQ ID NO: 35577 - DNA, 201 bp, Homo sapiens
cttgtaatcccggcactttgggaggctgaggtgggcagatcacttgaggtcaggggttcgagaccagcctggccaacatggtgaaaccccatctctattaraaatacaaaaattagccgggcatggttgcgcacggctgtaatctcagctactcgggaggctgaggtacaagaattgctcgaactcgggaggtagaggttg

SEQ ID NO: 35578 - DNA, 201 bp, Homo sapiens
ttaaaactaaaagtgggccgggtgcggtggcttatgcctgtaatctcagcactctgggaggccaaggtgggcacatcacaaggtcgggagatggagaccckcctggccaacatgttgaaaccctgtctctactaaaaatacaaaaatcagccaggcatggtggtgtgtgcctataatcccagctactcgggaggctgagac

SEQ ID NO: 35579 - DNA, 201 bp, Homo sapiens
tttaaaactaaaagtgggccgggtgcggtggcttatgcctgtaatctcagcactctgggaggccaaggtgggcacatcacaaggtcgggagatggagaccmtcctggccaacatgttgaaaccctgtctctactaaaaatacaaaaatcagccaggcatggtggtgtgtgcctataatcccagctactcgggaggctgaga

SEQ ID NO: 35580 - DNA, 201 bp, Homo sapiens
ctcctgaatagctgggattacagacatgtgccaccacaccttgctaatttttgtatttttagtagagacggggtttcaccatcttggccaggctgttctcraactcctgacctcaagtgatcctcccgcctcagcctcccaaagtgctgggattacaggcatgagccatcttgcccagcctggatctccttaacaggatgg

SEQ ID NO: 35581 - DNA, 201 bp, Homo sapiens
agcttgttctaaaatttatataaaaaggcaaacgagtggtcaggcgcagtgactcacgcctgtaatcccagcactttgggaggccaaggcgggcggatcaygaggtcaggaggtcgagaccatcctggctaacacggtgaaaccctgtctctactaaaaaatacacaaaaaattagccgggcgtattggtgggcgcctgta

SEQ ID NO: 35582 - DNA, 201 bp, Homo sapiens
gacaatagtggatgagagaatagatgagaatttttctagaattgaagacaaacctgagacttaagattgaaaaataacacaaaattccaagcaagaaacayacacacacacacacacacacacacacacacacacacaggcccactttggagaaactgcaaaacatcaaagatcaaaagaaaattttaaaagcagctggag

SEQ ID NO: 35583 - DNA, 201 bp, Homo sapiens
taacaaatcttggctcttaaagcttctgcaagaagtgatgctttggttaaaagaagccacagatccatgcttacctccaaaggggacaaggaagtgcaatycaacaatggacctggaatatttgtgaacaatactagagacaatcacaccaagcctatacattaacctaaaagtaatcaggatcattgaaatccctagtcc

SEQ ID NO: 35584 - DNA, 201 bp, Homo sapiens
acagaagcaggataaagggagcataacaaatcttggctcttaaagcttctgcaagaagtgatgctttggttaaaagaagccacagatccatgcttacctcmaaaggggacaaggaagtgcaatccaacaatggacctggaatatttgtgaacaatactagagacaatcacaccaagcctatacattaacctaaaagtaatc

SEQ ID NO: 35585 - DNA, 201 bp, Homo sapiens
gttgtacacatgcccacctgaggcattcttcccttttccagtggcatgcccccagaagatcatgctttgccattttgtctctaaatgtgcaaaccaaagtytagtggcccaatttctgagctgccagttaccaatttcaagtgtttttatttatagggaaactgcctttccctggtactggctgcgaccaattattatttt

SEQ ID NO: 35586 - DNA, 201 bp, Homo sapiens
gtggcatttttatatatcgacatatttcaggggtcttgtgtcctttttcccatgattctttcctctgggtgggccgcccgcatgcacagtgacctgctaasacttaagagttgagcgtgcacagtgtgtttactgcagttgtacacatgcccacctgaggcattcttcccttttccagtggcatgcccccagaagatcatg

SEQ ID NO: 35587 - DNA, 201 bp, Homo sapiens
agaccagaaacccaggaggacaggaaatgaacagaacggagctgaacaagttcagccacgtggattctccaaattcggaatgcaagggtgaggacgcgacygatgaccagtttgaaagccccaagaaaaagtttaaattcaaattccctaagaagcaactcgccgctctcactcaagccattcgcaccggaactaaaacag

SEQ ID NO: 35588 - DNA, 201 bp, Homo sapiens
agagtgagcagggaaaagaatctgggttctgtagatgctttgaaatgagattaaggttggtttctgccatccaggagtttgtgttctgatggagaaggcayagatgtaagaaactctttttttttttttttttttttgagacggagtctcactctgtcacccaggctggagtgcaatggtgccatcttggctcactgcaac

SEQ ID NO: 35589 - DNA, 201 bp, Homo sapiens
ggaacagactaaaggcagtgtggacaggagctgggagaccagttaggagtcttgcaataatccaggaagatgggagtgttagcagagtgagcagggaaaasaatctgggttctgtagatgctttgaaatgagattaaggttggtttctgccatccaggagtttgtgttctgatggagaaggcatagatgtaagaaactctt

SEQ ID NO: 35590 - DNA, 201 bp, Homo sapiens
tattctggctactgggtttggaacagactaaaggcagtgtggacaggagctgggagaccagttaggagtcttgcaataatccaggaagatgggagtgttascagagtgagcagggaaaagaatctgggttctgtagatgctttgaaatgagattaaggttggtttctgccatccaggagtttgtgttctgatggagaaggc

SEQ ID NO: 35591 - DNA, 201 bp, Homo sapiens
cacctcagcctctcaagtagctgggactataggtgtgtactatcaattacacttggctattttgttgttgttgttaattttgtagggacgggggtctcackattagcccaggctggtctcaagcttcaggtggtcatctacctcagcctccaaaactgctggaattacaggcatgaaccaccaagcccagcctataggagc

SEQ ID NO: 35592 - DNA, 201 bp, Homo sapiens
cacccaggctggagttcggtggtgcagtcatagttctacagcctcaatctcctgggctcaagcaagcctcccacctcagcctctcaagtagctgggactayaggtgtgtactatcaattacacttggctattttgttgttgttgttaattttgtagggacgggggtctcacgattagcccaggctggtctcaagcttcagg

SEQ ID NO: 35593 - DNA, 201 bp, Homo sapiens
tctgtcacccaggctggagttcggtggtgcagtcatagttctacagcctcaatctcctgggctcaagcaagcctcccacctcagcctctcaagtagctggkactataggtgtgtactatcaattacacttggctattttgttgttgttgttaattttgtagggacgggggtctcacgattagcccaggctggtctcaagct

SEQ ID NO: 35594 - DNA, 201 bp, Homo sapiens
tagaggcccttgcagggaggacctctcccccattctttgctgttcttatttttgatccctacttgatctctgaatcacctcatctgccacctctttccccygctggacacccttagactcaacatctgacctccgccctgttgctccggtcttggagggtaatcttttcttatgcctttgtgccactctgcacatacatcc

SEQ ID NO: 35595 - DNA, 201 bp, Homo sapiens
caatctggttcttgtatttaaggaattttcagtataactaaagacacatggtaactatgtaaggactgactttaaaatatccataaatcaaagacttcccrgatgaagctctgattacacccagccaccccggactcctggctgttccagcagtctcgcccagcacctacatccctgccgctctctgctttgattcacccc

SEQ ID NO: 35596 - DNA, 201 bp, Homo sapiens
tctccattcatgtgtttattaagaatcgatttggtttctggcactgctaaaggtgccatgatgagttattttaaaaacatatacaatctggttcttgtatktaaggaattttcagtataactaaagacacatggtaactatgtaaggactgactttaaaatatccataaatcaaagacttcccggatgaagctctgattac

SEQ ID NO: 35597 - DNA, 201 bp, Homo sapiens
cattccaaggggaaagtttaaaacctttttgcatatagactccatttgcacggctacttttcttttcggcgattctcaagccccatcctcaaattcagccygtggaagttgtttgacatctaactgagttaactgcatcctatcaagcgaagctcctattttcagcctgctgagtttggctactcaaaagttggttaatgt

SEQ ID NO: 35598 - DNA, 201 bp, Homo sapiens
aattcctgcccagcaagttggtttgcagatcagaggcagtgtgtgagaagtacttaacccagcacctggcatatagtagatgttcaggacatcgtagcaasaataagggagacatctcacaaaacattttgtgagaaaggatcagtttctatctagtcaatgtcttaaacattcataggttgttcatggtgggagctgctc

SEQ ID NO: 35599 - DNA, 201 bp, Homo sapiens
gatagtcaaacatatgacaaacaaaaatacccacaccctctttcctttcctacctggtgctaattggaaagggtacctggtcagcgcatttatttcacttycagtcatgggggagtctaattatgtttgatttaaccaaataatacaaaattcctcagttcttgcttatggatttggacttcaaagcatcttgcctttacc

SEQ ID NO: 35600 - DNA, 201 bp, Homo sapiens
tctcaccatctctatctaaccctgcactcaggtccaacccaccataatcactttcctggattattgccttaactcctggtggtctcttgagtttagtcctygtcccttgtagttaattctttttgagatggactctcgctctgtcacccaggctggagtgcagtggcatgatctcagctcactgcaacctccacctcctgg

SEQ ID NO: 35601 - DNA, 201 bp, Homo sapiens
aggatggtctcgatctcctgacctcgtgatccgcctgccttggcctcctaaagtgctgggattactggcgtgagccaccacacccacctgctttttaaaaktattgcacaaagacattatttatcatgatcactgagcttttgggagacccttaaattttgcactggaggtatgcgtcttgttgacctcaccccagtgctg

SEQ ID NO: 35602 - DNA, 201 bp, Homo sapiens
cccagctactagggaggctgagacttgagaatcacttgaatgtggaaggcagaggttgcatgagccaggatagcaccattgcactccagcctgggcaataraccaagactatgtctcaaaaaaaacaagataaatgtatccaggatcctggagcagccatggggatgcaacctcctgagccctttcctctaataggaaaaa

SEQ ID NO: 35603 - DNA, 201 bp, Homo sapiens
tacctgaactgtgtatgaggaaaaagattttgtttatcagcctcttttgtttccctttgccatgaaaactctatctaaaatctgttcaccatgccttactrttttcataaatgcaaaatatattacacacattatttttttttaattaaaagtttctggctgagtcaattttttttgaaagctaattttcagatatgatcc

SEQ ID NO: 35604 - DNA, 201 bp, Homo sapiens
cagcctcctaagtagctgggattacaggcaacggccaacacacctggttaatttttgtatttttaataaagacaaggtttcactatgttggccaagctggyctcgaactcctgacctcaggtgatccacccacctcagcctcccaaagtgatgggattacaggtgtgagccaccacacttggcctaggttctcctgtttct

SEQ ID NO: 35605 - DNA, 201 bp, Homo sapiens
tttttttttttttgtgagacggagttttgctcttgtcacccaggctggagtgcagtggtgtgatctcaactcactgcaacctccacctctggggttcagcrattcttgtgcttcagcctcctaagtagctgggattacaggcaacggccaacacacctggttaatttttgtatttttaataaagacaaggtttcactatgt

SEQ ID NO: 35606 - DNA, 201 bp, Homo sapiens
ctgtttctttctttctttctttttttttttttttttttttttttttgtgagacggagttttgctcttgtcacccaggctggagtgcagtggtgtgatctcractcactgcaacctccacctctggggttcagcaattcttgtgcttcagcctcctaagtagctgggattacaggcaacggccaacacacctggttaatttt

SEQ ID NO: 35607 - DNA, 201 bp, Homo sapiens
taggttctcctgtttctttctttctttctttttttttttttttttttttttttttgtgagacggagttttgctcttgtcacccaggctggagtgcagtggygtgatctcaactcactgcaacctccacctctggggttcagcaattcttgtgcttcagcctcctaagtagctgggattacaggcaacggccaacacacctg

SEQ ID NO: 35608 - DNA, 201 bp, Homo sapiens
aggaggaaacagtcttagcagtgagagaggtcttagagaagatttaggttctcctgtttctttctttctttctttttttttttttttttttttttttttgkgagacggagttttgctcttgtcacccaggctggagtgcagtggtgtgatctcaactcactgcaacctccacctctggggttcagcaattcttgtgcttca

SEQ ID NO: 35609 - DNA, 201 bp, Homo sapiens
agaaaatttttacaatctacccacctgacaaagggctaatatccagaatctacaaagaacttaaacaaatttacaagaaaaaatcaaactcttcaacaagygggcgaaggatatgaacagacacttctcaaaagaagacatttatgcatccaacagacacatgaaaaaatgctcatcatcactggtcatcagagaaatgca

SEQ ID NO: 35610 - DNA, 201 bp, Homo sapiens
aactgtctgatctttgacaaacctgacaaaaacaagcaatggggaaaggattccctatttatttaataaatggtgccgggaaaactggctagccatatgtrgaaagctgaaactggatcccttccttacagcttatacaaaaattaattcaagatgaattaaaggcttaaatgttagacctaaaaccgcaaaaaccctaga

SEQ ID NO: 35611 - DNA, 201 bp, Homo sapiens
tctaaactgttaaccgtgaacatgtaactatttaaaacttatgctgggtttgctgggtcatgtctgtaatcccatcttggaagccaaggcaggaggatcasttgaggccaggagtttgagaccagcctggccaacatggcgaaacccgatctctactaaaaatataaaaattagctgcacacggtggtgcgcatctgcaat

SEQ ID NO: 35612 - DNA, 201 bp, Homo sapiens
tcaacgaaataaaagaggacacaaacaaatggaagaacattccatgctcatggataggaagagtcaatattgtgaaaatggccatactgcccaaggtaatktatagattcaatgccatccccatcaagctaccaatgactttcttcacagaattggaaaagactactttaaagttcatatggaaccaaaaaagaggctgta

SEQ ID NO: 35613 - DNA, 201 bp, Homo sapiens
gaattcctgcccagcaagttggtttgcagatcagaggcagtgtgtgagaagtacttaacccagcacctggcatatagtagatgttcaggacatcgtagcarcaataagggagacatctcacaaaacattttgtgagaaaggatcagtttctatctagtcaatgtcttaaacattcataggttgttcatggtgggagctgct

SEQ ID NO: 35614 - DNA, 201 bp, Homo sapiens
gttgttcaagatctctctgtcttgatcataataatgtcaatgctggttacaaatttttctcttgggtttacctctgcctgtccactgaggaaacggttaawggagttgctttcccatctgaattctttctggactctctccatttgcctttacattctgactcttctcgctctcttttccaagcctgaattcaataagcaa

SEQ ID NO: 35615 - DNA, 201 bp, Homo sapiens
gagctaagaattcctgcccagcaagttggtttgcagatcagaggcagtgtgtgagaagtacttaacccagcacctggcatatagtagatgttcaggacatygtagcaacaataagggagacatctcacaaaacattttgtgagaaaggatcagtttctatctagtcaatgtcttaaacattcataggttgttcatggtggg

SEQ ID NO: 35616 - DNA, 201 bp, Homo sapiens
atccaacttacaagggatgtgaaggacctcttcaaggagaactacaaaccacttctcaacgaaataaaagaggacacaaacaaatggaagaacattccatrctcatggataggaagagtcaatattgtgaaaatggccatactgcccaaggtaatttatagattcaatgccatccccatcaagctaccaatgactttcttc

SEQ ID NO: 35617 - DNA, 201 bp, Homo sapiens
tcggccatccacatgagcctgcttgagatgaggcggagcgtggcggaactcaggctccagctccagcagatgcggcagctccaggtattcctcatgcacgkcggcctctgtctcggttgccctgagctcttcctaccttccttttcctaggggctccgtgaagacctagagaatgtagaaccatagaaacagcatggcttc

SEQ ID NO: 35618 - DNA, 201 bp, Homo sapiens
tgctggaggttacctggtgaaattgttgctcttaacgcagaagggaaaattctgttttgatctatgagtcatatagaaatgtattatactatggaatctgygaaattgtttgttagtggggcttgtaatacggtccgtgtgaggctcacacctttgctctaattattgtttaagattaattattttttaattattgtttca

SEQ ID NO: 35619 - DNA, 201 bp, Homo sapiens
caccatgcctggctcattttttatttttggtagtagagacggggtctttctctattgaccaggttggtcttgaactcctggcctcaagtgatcctcctgcytctgtctcccaaagtactagaattacaggcatgaaccactgtgcctggcatttttttcttttgaatcacagatgtgctccttctgcatgcgttgctttgt

SEQ ID NO: 35620 - DNA, 201 bp, Homo sapiens
tcccattcacaattgcttcaaagagaataaaatacctaggaatccaacttacaagggatgtgaaggacctcttcaaggagaactacaaaccacttctcaaygaaataaaagaggacacaaacaaatggaagaacattccatgctcatggataggaagagtcaatattgtgaaaatggccatactgcccaaggtaatttata

SEQ ID NO: 35621 - DNA, 201 bp, Homo sapiens
gtgaactcccattcacaattgcttcaaagagaataaaatacctaggaatccaacttacaagggatgtgaaggacctcttcaaggagaactacaaaccactkctcaacgaaataaaagaggacacaaacaaatggaagaacattccatgctcatggataggaagagtcaatattgtgaaaatggccatactgcccaaggtaa

SEQ ID NO: 35622 - DNA, 201 bp, Homo sapiens
tttgttttttttaaaaaagtaactcttttttctgagctagctggaatattcatacctgacaccccatctcccaaccatcgaggatgaatggagattccctytacatgctccccactctcagcattgacatcatatgacttggttgatctgttcttagcagaaaccaacttgtcccttcaaagccagctcagaaggcaggat

SEQ ID NO: 35623 - DNA, 201 bp, Homo sapiens
tattgctctgtagagtaagtgaaacatttatgaaatttgttttttctaagaccttgtagttattgaaaagtaatactgtaaaaacaaaaattcgcagaagrgagtttcatagcaggtcaataagttcatggtcaggctcttaggctgctagcatagaaaatgtcagagcaggcagacacacaacaaaaaaagagaatttta

SEQ ID NO: 35624 - DNA, 201 bp, Homo sapiens
ctgacaccccatctcccaaccatcgaggatgaatggagattccctttacatgctccccactctcagcattgacatcatatgacttggttgatctgttcttrgcagaaaccaacttgtcccttcaaagccagctcagaaggcaggatgtcttaggtccaggctatcaggatgtaccattgctcttccttttcactgtgtttt

SEQ ID NO: 35625 - DNA, 201 bp, Homo sapiens
gaatgtgaacagttatttcttgaatattcaaaaataaatctattttatttatttatttatttatttttagagacagggtctttctctgttgcccaggctgkagtacagtggcacaaacatagctcactgcagccttgaagtccctgactcaagcaatcctcccacctcatcctcctgagtagctgggactacaagtgcaca

SEQ ID NO: 35626 - DNA, 201 bp, Homo sapiens
gacaccccatctcccaaccatcgaggatgaatggagattccctttacatgctccccactctcagcattgacatcatatgacttggttgatctgttcttagsagaaaccaacttgtcccttcaaagccagctcagaaggcaggatgtcttaggtccaggctatcaggatgtaccattgctcttccttttcactgtgttttag

SEQ ID NO: 35627 - DNA, 201 bp, Homo sapiens
gcaacaactgtaagactaatgtgagactgtctgaatgtgaacagttatttcttgaatattcaaaaataaatctattttatttatttatttatttatttttmgagacagggtctttctctgttgcccaggctggagtacagtggcacaaacatagctcactgcagccttgaagtccctgactcaagcaatcctcccacctca

SEQ ID NO: 35628 - DNA, 201 bp, Homo sapiens
gggcatgatggtacatgcctgtaatcccagctacttgggaggttgaggcaggagaattgcttgaacccaggaggcagaggttgaagtgagccaagatggcrccactgcactccagtctgagcaacaagaatgaaacgccatctcagaaaaaataaaataaaataaaaatctcccttgcaatgtgagtttactgattgtgga

SEQ ID NO: 35629 - DNA, 201 bp, Homo sapiens
tggctgttcttttattccaacatgattaactttgatgcttatcattccctatgggaatttaaggaaaagaaggctcataattgccagaatcttccatcctktgtacatgcaaggctgagtaggaaatcagggcaaaggaattgatgaattgtctgtctctaaagatgaaaacaaagagggggcaacaactgtaagactaat

SEQ ID NO: 35630 - DNA, 201 bp, Homo sapiens
tttttgccatttcagtgatgcaccaaagggtggagttgaagaacatcagttttgctgctgcttgttggcaatactctcaaaaaggcgtggggagggagagrtgtaactcacccctgaagtcaagcctggagattacttgtcaggaatgtcaaaagcatttgttaagcaaccttcttcctggcattttaagaagaaagccgc

SEQ ID NO: 35631 - DNA, 201 bp, Homo sapiens
cactgagcttttgggagacccttaaattttgcactggaggtatgcgtcttgttgacctcaccccagtgctggcccctcatgtaaccccaggagcatcagayactgttactgccagcccccagccacggggcctggagtaaggagagtgaggaaagcccagttcccggcctgtacactggcacgtggtgccacagtttgtca

SEQ ID NO: 35632 - DNA, 201 bp, Homo sapiens
aataaaaagcaaaccctcaagcatgaaaatccctggccctagagtaagtgcaggtgataaggcttgctatctgatgcctcattccatgtctctggcttccyattgcctaaattaagatgtcctgaaagaaaccttgggaaaaaaaaagcacagtccccacatttgaagtagaaatagaatgaaggagaaattgtgattttc

SEQ ID NO: 35633 - DNA, 201 bp, Homo sapiens
ggctggagtgcagtggaacgatctcggctcaccgcaatctctgtctcccgggttcacgccattctcctgcctcagcctcctgagtagctgggacgcaggtrcctgccaccatgcctggctaattttttagtatttttagtagagaccaggtttcaccatgttagccaggatggtctcgatctcctgacctcgtgatccgcc

SEQ ID NO: 35634 - DNA, 201 bp, Homo sapiens
gcctcattccatgtctctggcttcccattgcctaaattaagatgtcctgaaagaaaccttgggaaaaaaaaagcacagtccccacatttgaagtagaaatmgaatgaaggagaaattgtgattttcctgaaggaacagaaccaacactggttttcaaaaggcttagttttacattttagtagaaactgttagcagtaggag

SEQ ID NO: 35635 - DNA, 201 bp, Homo sapiens
ggttctgaccataccactgctatctcagtcttagaggctgattttgtggcccagagtgtttcgttcagatatctttgtgttgaggtgatattgagccagcwgccaaagaaatgcatggccaagatatggaatatctggtcaacagagaataacaacaaagtgggacgcatcataaggtcataggtcagtgaaaacagctgc

SEQ ID NO: 35636 - DNA, 201 bp, Homo sapiens
aataagcagaaacggctgggcgtggtggctcacacctgtaatcccagcactttgggaggccgaggcaggttgatcacctgaggtcaggagttggagaccarcctggccaacatggtgaaatcctgtttctactaaaaatacaaaaattagccaggcgtggtggcgtgcacctgtaatcccagctactcagaaggctgaggc

SEQ ID NO: 35637 - DNA, 201 bp, Homo sapiens
gagggacatatagcttcaaatgactccaaacaccagaggaagttgaggaataaacacgaccgttagatttcgagtcactgtgtaccttgtggcaagacttsgttgaatccaggtggggaagccagtgagcaacaggttgagatacagaagagcaaacagaaggaattagaatgtgggcggcccacccaagatgcttggcag

SEQ ID NO: 35638 - DNA, 201 bp, Homo sapiens
cttcaaagtgagatccattggcagcaggaactgttatatagtattatgtgtgtgtttaagggcagagggatggtgttatctaactgtcctgtcccagtttkcaggcatggaaggagttcctaggatgtgtgactttcaattttaaaactgagaaaggcctggacaaaccaggatgagttgtcaacctgcatgggggcaatg

SEQ ID NO: 35639 - DNA, 201 bp, Homo sapiens
ggtgcaaggccccaaatcccttgctgcaggtcagctgacccagccagagtaacccgagttgtggcaaagaagctggccttggcagcgcctgcagttgcctrcctgccggacttgcagtgcggctttctccttgaggaggccccatcttccatgagcctctgcgtgtttggtgtctgccccagcccctactttctatgcttt

SEQ ID NO: 35640 - DNA, 201 bp, Homo sapiens
cacccagagtccatagtttacactggggttcactcttgctgttgtacattccatggatttggacaaagaggctgtcaagggcaacatcaacccagctggcycagtgtcgcccaggctggagtgcagtggaacgatctcggctcaccgcaatctctgtctcccgggttcacgccattctcctgcctcagcctcctgagtagc

SEQ ID NO: 35641 - DNA, 201 bp, Homo sapiens
ctaaccgattatgtgtattaatcagataggctaattgttgtaaccaccctctaatcttggtggctttgcatgattaaggttaattgttcactcagacacarcacagtgtgatttctgtggccaggtggatttcctgggtggccgatgaggctcctcctgccttgtcactatggcatcccccacggcgttggagggttctgc

SEQ ID NO: 35642 - DNA, 201 bp, Homo sapiens
gcataccctactagagtggtacgtttgttacgatcaatgaaatgagaccgacacattgatatcacccagagtccatagtttacactggggttcactcttgstgttgtacattccatggatttggacaaagaggctgtcaagggcaacatcaacccagctggctcagtgtcgcccaggctggagtgcagtggaacgatctcg

SEQ ID NO: 35643 - DNA, 201 bp, Homo sapiens
tatctcaatccatagagttttaagttctctcatgaagccctgttgatcttgcctttatttaaaattttgatggtttatcatgaattttttttatcattttrttttttaggagcaattttttaggtttgtaacaagatcgagcagaaagtacagacagttcccatacacccttggcctccacgcatgaacagcctcccccat

SEQ ID NO: 35644 - DNA, 201 bp, Homo sapiens
agcatgtctggcctgaaacttgtgctttcttaactccactcacacttaggagccaggcaaggaatgggatttctcctttgtgcttggaggaaatgagctcrggtctctgtaaagataacctcagctctgcaaaccaaaacgaagataagaataaatgcctgtccgccttcccccatacctgggggaactttgactctgtcg

SEQ ID NO: 35645 - DNA, 201 bp, Homo sapiens
ttcttttttttttttttttttcttgagacagagttttgctctgtcacccaggctggagtgcaatggcatgatcatgattcactacagcctcgacttcccasgttcaagggatcctcccatctcagccttcagagtagatgggactacaggcacgcacccaggcgcctggctaattttttattttttgtagagatggggtct

SEQ ID NO: 35646 - DNA, 201 bp, Homo sapiens
aggctggggctttctgtgtggattcaagaaatttgtggtttttcttttcttttttttttttttttttcttgagacagagttttgctctgtcacccaggctrgagtgcaatggcatgatcatgattcactacagcctcgacttcccacgttcaagggatcctcccatctcagccttcagagtagatgggactacaggcacgc

SEQ ID NO: 35647 - DNA, 201 bp, Homo sapiens
caaggacacacaggggagggacacacccaaggagcatcatgggccaagacagtgtcaagatgacacaggcttccacaccgtcaccaggctggggctttctktgtggattcaagaaatttgtggtttttcttttcttttttttttttttttttcttgagacagagttttgctctgtcacccaggctggagtgcaatggcatg

SEQ ID NO: 35648 - DNA, 201 bp, Homo sapiens
gctcacacacttaattaagtggcagcagtgggaagtccagggctccagttcccattaacatgatcttacaaatgaagggacaaggacacacaggggagggrcacacccaaggagcatcatgggccaagacagtgtcaagatgacacaggcttccacaccgtcaccaggctggggctttctgtgtggattcaagaaatttgt

SEQ ID NO: 35649 - DNA, 201 bp, Homo sapiens
tactctagtactgggaaacttcattggtttaatatcaagcattgaggatttgcctgctgggtaatcaggtcaagtgcaagctgattttgaggctgggcacwttcagaagtggttgggattagcaattcaagccaagaggctagtagtattttacctatgttcctgctactatacagcaggagtccccagtccccaggccat

SEQ ID NO: 35650 - DNA, 201 bp, Homo sapiens
aatttgaagacaatgcccatgttttctcttcgtgtgtgtgtgtgtgtgtgtgtgtgtgtgtgtgtgtgtgtttgactaacttagggtggttttttttcgtwtttcttcttagtacctgagagttaatgtatcctagttaattaatgatagtatgtttctaaaaatcaaaggaagaataataagtataataaaatgttataa

SEQ ID NO: 35651 - DNA, 201 bp, Homo sapiens
cagtgagctatgatcatgccactgtattccagcctgggaacagagtgagaacctgtcaaaaaaaaaaaaaaaaaaaaaaaggttctataaatggagtcatkggctaaaaatcatcccctaaacacagattcttttttttccttttctgtgttccaaaggcagaacagaccaccagcggtatgaattttgcttcgtcttcac

SEQ ID NO: 35652 - DNA, 201 bp, Homo sapiens
gattcctcaaggatctagaactagaaatagcatttgacccaaccatcccattactgggcatatatccaaaggattataaatcatgctgctataaacacacrcacgtacgtttattgcagcactattcacaatagcaaagacttggaaccagcccaaacgtccatcaatgatagactggattaagaaaatgtggcacatata

SEQ ID NO: 35653 - DNA, 201 bp, Homo sapiens
gattcgctttattttttttctctgcacttttttctgtttcacttttcctgcccacgttaaccacagcttcaagttgaaaactaagttgtttcaagttctcygtagacattgactaatagatcctctgtcccagatctaaatttacaattgagagtttaattggaccagctaagttcaggtaactacttcttgacccaatca

SEQ ID NO: 35654 - DNA, 201 bp, Homo sapiens
ttgtgctctctgaagatcgtgggggtctcacatctctgttttttaatacagattcgctttattttttttctctgcacttttttctgtttcacttttcctgyccacgttaaccacagcttcaagttgaaaactaagttgtttcaagttctctgtagacattgactaatagatcctctgtcccagatctaaatttacaattga

SEQ ID NO: 35655 - DNA, 201 bp, Homo sapiens
gaatcgcctctgagaatcttgtttgtggctggaaagacacctgttttaaccctccagcagctctggtacctacgtaaggaccagcagtgaggactgagagwatcgaatattgaccgtatgaacaaagctgatcaggatatgcagaacatgtgctgtgggtttctgcagagtggttctgttcttacttcaagatgaaaccct

SEQ ID NO: 35656 - DNA, 201 bp, Homo sapiens
tgcatgaccccaaagggcttaccatttgggtttgcgggtttggggttgcctaatgatttggggaagtctttacaaggttgtgatggaaacagagggagatyggtgtcatggatctccatggagcaaggaggaaaatccagtcttacagacccttgagtcctgctcacgtggctcagagaatattcccaccatcccctgctt

SEQ ID NO: 35657 - DNA, 201 bp, Homo sapiens
tttatttcttccctcatcctttcattaggaagagaatatttctatagggtcaatcacagatgcagaagaggagagagctgcattgagccaatgacaccagmatgtcttcgtgacagagagaccccttcgaagaagagaagaatagaaaggacaagtggggttcaggtggcctgattatacagaccacccccttcatgcatg

SEQ ID NO: 35658 - DNA, 201 bp, Homo sapiens
ggttaccacatgacagttacttgatacagagcagcaggcacctgttatgttgggtcctttatttcttccctcatcctttcattaggaagagaatatttctrtagggtcaatcacagatgcagaagaggagagagctgcattgagccaatgacaccagaatgtcttcgtgacagagagaccccttcgaagaagagaagaata

SEQ ID NO: 35659 - DNA, 201 bp, Homo sapiens
gtcctgcaagggatctgagacaccaactagctcaacctctggccttacagatgagatacctgtgactcaacgaggttatatgtggaccagtttttggcagragctgaactagaactagcattcccagactcctggttaaataaaaattttaggcagggtgcagtggctcacacctgtaatcctagcactttgggagactga

SEQ ID NO: 35660 - DNA, 201 bp, Homo sapiens
tgacatgatcttttcttcttatatgatgtgtacttagagttagaaagttttggtcctgcaagggatctgagacaccaactagctcaacctctggccttacmgatgagatacctgtgactcaacgaggttatatgtggaccagtttttggcagaagctgaactagaactagcattcccagactcctggttaaataaaaattt

SEQ ID NO: 35661 - DNA, 201 bp, Homo sapiens
taaataattcgaaggaaatctcagtaaactgtttttctggatgacatgatcttttcttcttatatgatgtgtacttagagttagaaagttttggtcctgcragggatctgagacaccaactagctcaacctctggccttacagatgagatacctgtgactcaacgaggttatatgtggaccagtttttggcagaagctgaa

SEQ ID NO: 35662 - DNA, 201 bp, Homo sapiens
gcattgcaaagaatatgaataaatctgatctccctcgcagaacagtgcacttggtgaacatttcagcaaatatttgttcatgatgttaaaatgaaatcatkaccgtcttttaaaaattaatgctgttcaactatgttgcatacacttgaggacataaatgcggaaagccagatcttagcactacctagctacatatatcta

SEQ ID NO: 35663 - DNA, 201 bp, Homo sapiens
ggctgcagtgtgacactgtagacttgccagaaagggctctctttggacctactacttgccactcagaagcaaatgggctgcagcctcatacgtttttggartgaataagagaactaagattctgatggacccttggtgattttctctcttcaatattatgaatgttcatgaatgcccctcagaaggtcacagggatgtcag

SEQ ID NO: 35664 - DNA, 201 bp, Homo sapiens
aagatctataccagaaatcctcttcatcactggtaaaattttaaggtactatagaggaatataatgacctggtttcagctgtaatttctgtgctgatttgyatatatattatgatagtaacaagggagctaaccccatcactttgggatgctgaggcaggaggatcacttgaggccaggagttctagaccaccctgggcaa

SEQ ID NO: 35665 - DNA, 201 bp, Homo sapiens
gtggtgtcttattgtccagttgtaattattaatagtgtctactttccctctcacaaatgctggtttatactaagtataaggtcaccctaaccacctgacayattgctgtcaaaactaggattggagagcccacatttcacatgcgccagatcatccatttaagcaaatgttatcccagttgttaaaaatcctttatttctg

SEQ ID NO: 35666 - DNA, 201 bp, Homo sapiens
gaagaggagctcctgtctctattttgtctaagatctataccagaaatcctcttcatcactggtaaaattttaaggtactatagaggaatataatgacctgktttcagctgtaatttctgtgctgatttgcatatatattatgatagtaacaagggagctaaccccatcactttgggatgctgaggcaggaggatcacttga

SEQ ID NO: 35667 - DNA, 201 bp, Homo sapiens
ggaagaggagctcctgtctctattttgtctaagatctataccagaaatcctcttcatcactggtaaaattttaaggtactatagaggaatataatgacctrgtttcagctgtaatttctgtgctgatttgcatatatattatgatagtaacaagggagctaaccccatcactttgggatgctgaggcaggaggatcacttg

SEQ ID NO: 35668 - DNA, 201 bp, Homo sapiens
acctcaagtgatccacccgcctcagcctcccaaagtgctgggattacaggtgtgagcccccgcaactggccaggtctgcattcctaatgctacttttgagyccggcaatctcagacaataaaattcagtgcagctggggcagataagtgcccccctgctctcacatttctctttagtcttggcatcttcaagttagaacca

SEQ ID NO: 35669 - DNA, 201 bp, Homo sapiens
tccttacgctgttctgtgcattttgggtggcgtctgcattcttttattatttttttgagatggagtctcattgtatcacccaagctggagtgcagtggcaygatctcgactcactacagcctccacctcctgggttcaagcaattctcctgcctcagcctcctgagtagctgggactagaggcatgcaccaccacacctgg

SEQ ID NO: 35670 - DNA, 201 bp, Homo sapiens
gagggcattaagtctgacttgatctacttcacactgtatctcctaactcctttcagtgtgggagcaggcagtcaataaatatttgtatgaatgaatgaatsaatcaatcagtgcttgacacagaatgcttttctgggaagaggagctcctgtctctattttgtctaagatctataccagaaatcctcttcatcactggtaa

SEQ ID NO: 35671 - DNA, 201 bp, Homo sapiens
gggcatggtagtacctgcttatagtctcagctactcaggaggctgaggcaggagaatcacttgaacttggaaggcggaggccatggtgagccaagatcgcmccactgcactccagcctgggcgacagaggaagactccatctcaaaaagaaaaaataaataaataaaataaaataaatagtaagagcatatcccacaggaa

SEQ ID NO: 35672 - DNA, 201 bp, Homo sapiens
tttctttctttcattttttgtgtaccctcactgggtagtgtttggccttcgcgaagaaggatagagagaaagcttgctaattggggctaaatacagattaygtgcaaaaaaagaaattgctagcatctaaaaataagcactctacacgtgtatagttttataatcttatcagctgtgatcttcaggaccaagtacgtggca

SEQ ID NO: 35673 - DNA, 201 bp, Homo sapiens
cattttaacaaggggtctccaggtgattccaatgcagctgagttgggagttctggctttgtacattgcacagaaccttgtataaagcagagactccctggrtagctattgaacaactaatgaataaatcacattaaaagctgagtttcttctcattgacttagagggaggttacctcataattactcaaacatagaaaacg

SEQ ID NO: 35674 - DNA, 201 bp, Homo sapiens
gtgggatcagaattcacattttttttcttttttctttttggagacaggggcccactctgttgcccaggctggagtgcagtggcacaatcattgctcactgmagccttgacctcctgggctcaagcgatcttctcccctcagcctcctgaatagttggccttacaggtgcacatcatcaaacccagttaatttttaagtttt

SEQ ID NO: 35675 - DNA, 201 bp, Homo sapiens
tcccaagtagctgggattacaggggtccgccaccacacccagctaattttttgtatttttaatagagacagggtttcactatgttggccaggctgatctcraactcctgacctcagatggtccacctgcctcggcctcccaaagtgttgggattacaggtgtgagccaccgcacctggtcgggattattctttaacatgaa

SEQ ID NO: 35676 - DNA, 201 bp, Homo sapiens
ggtggccaactggaggaagaaggcctcagctgatgctgtcaccagggatgggtttatgtaaggatgggagataagatagaagccaggtgtgcccgatggakctccctgtcttccttcccacccttagtcctcaacccagcatggacattaaagacaggaaactagaaggagagcagaaaatgggaaaaaggcaactgcact

SEQ ID NO: 35677 - DNA, 201 bp, Homo sapiens
ggtcacaggactcaccagagaatggcaggtggtggccaactggaggaagaaggcctcagctgatgctgtcaccagggatgggtttatgtaaggatgggagrtaagatagaagccaggtgtgcccgatggagctccctgtcttccttcccacccttagtcctcaacccagcatggacattaaagacaggaaactagaaggag

SEQ ID NO: 35678 - DNA, 201 bp, Homo sapiens
tggatctgtttccttaacagaacatggttctgctccactgtacacttcaaccaactgcttcagagcaagctttttccttagaaaagttttcatttaattargatttagaaaggaacgtggaaactttaagatctccatttagtcttctgcatacttcagagacttctgatgtctcctacagggacaggaaaggagtcaggg

SEQ ID NO: 35679 - DNA, 201 bp, Homo sapiens
ctgtacctgaccccagggctcgctgttcgaaatatacacctggctgttggtcacaggactcaccagagaatggcaggtggtggccaactggaggaagaagrcctcagctgatgctgtcaccagggatgggtttatgtaaggatgggagataagatagaagccaggtgtgcccgatggagctccctgtcttccttcccaccc

SEQ ID NO: 35680 - DNA, 201 bp, Homo sapiens
gttttgtttctgagacagactctccctctgtcgcccagccaggagtacagtggcgtaatcttggctggctgcaacctctgcctcctgggttcaagcagttmttttgcctcagcctcccgagtagctgggattataggcatgtgccaccatgcccggctaattttgttgttgttgttgtttgttttgtttgtttttgttttt

SEQ ID NO: 35681 - DNA, 201 bp, Homo sapiens
ctccccagtggctggaactacacgtgtgcagcaccacacctggctaattttttaattttttgtagagacagagtctcaactaggttgcccatgctggtctygaactcctgggctcaagcaatccacctgcctaggcctcccaaagttctgggattacaggtgtgagccactgtacctgaccccagggctcgctgttcgaaa

SEQ ID NO: 35682 - DNA, 201 bp, Homo sapiens
tttgcttttctgtccataagccacagaagccgtgggaagttgccaagaagacatgcatagctaagccttgctgttctttttttaaattttgtattcttctrttattttttagagatgggagtcttgttctttctcccaggctgatgtgcagtggtgtcaccctagctcactgcagcttcaacctcgggctcaagccatcct

SEQ ID NO: 35683 - DNA, 201 bp, Homo sapiens
tgagggttcttacattccatcttgagtcaaccatctcctgttaccctctgaaaagtggcagaatttgtcccagacttttttttgttgcacttcatatctaytatggaattacatttatagctaatgcattaactctaaaaatggagaaacccattgctctgctgttttcatggtaaggaaaaactgctgagtcatgattga

SEQ ID NO: 35684 - DNA, 201 bp, Homo sapiens
tttagaatcatgggtgtctcagtctattacccagagtgatcatagttgcaagaatggcactggggagatatcattcagattttgcttttctgtccataagycacagaagccgtgggaagttgccaagaagacatgcatagctaagccttgctgttctttttttaaattttgtattcttctgttattttttagagatgggag

SEQ ID NO: 35685 - DNA, 201 bp, Homo sapiens
tattttagaatcatgggtgtctcagtctattacccagagtgatcatagttgcaagaatggcactggggagatatcattcagattttgcttttctgtccatragccacagaagccgtgggaagttgccaagaagacatgcatagctaagccttgctgttctttttttaaattttgtattcttctgttattttttagagatgg

SEQ ID NO: 35686 - DNA, 201 bp, Homo sapiens
tgcagttctcacatccacccgttgtattttagaatcatgggtgtctcagtctattacccagagtgatcatagttgcaagaatggcactggggagatatcaytcagattttgcttttctgtccataagccacagaagccgtgggaagttgccaagaagacatgcatagctaagccttgctgttctttttttaaattttgtat

SEQ ID NO: 35687 - DNA, 201 bp, Homo sapiens
atatgtatatatgtatatgtgtgtgtatatatatatagatatacatatatattgatatacatatatatagatagatagatatacatatatatatatatatwtttttttttttttttttttttttgaaacagtctcgctctgttgcccaggctggagtgcagtggcatgatctcggctcactgcaacctccgcctcccgggt

SEQ ID NO: 35688 - DNA, 201 bp, Homo sapiens
actaactacagttctcttctccatttgtgttgcagttctcacatccacccgttgtattttagaatcatgggtgtctcagtctattacccagagtgatcatrgttgcaagaatggcactggggagatatcattcagattttgcttttctgtccataagccacagaagccgtgggaagttgccaagaagacatgcatagctaa

SEQ ID NO: 35689 - DNA, 201 bp, Homo sapiens
tgagcccaggagttggaggctgcagtgagctatgattgcactactgcactccagcctgggcaacagagcaagatcctgtctcaaaaaaaaaaaaaaaaaaagtctgtatatactcatgcagggccaacttgtatcaccagtaaatacttcctctgtctccttgtccatcctcaaagctaaagagaccttggagaatactgg

SEQ ID NO: 35690 - DNA, 201 bp, Homo sapiens
tcatcctggcaagtatccacaaactgctcacatccagcatccagatgtccactaaacactcgattttgtgtgtgtgtatattgtactgtagattaacagcwggaccctctagcgcctgcacccaaggtttctattaaaaacaaaagctgctgatttattctcctctaccaccatttctctgagtctttaatgccagaccca

SEQ ID NO: 35691 - DNA, 201 bp, Homo sapiens
tgttctgtgcagtccttctaggactaaatacagcctgcagctaaatacatactgcttctccaaggctgctgctgtgctgatgtttctgtctgaactacccyagactccagtaccgtctgttaactccgtatctcggaggatctgcagaaggtccgcgttgaccctttgcaatccagtatgcactttcaggctcatctacta

SEQ ID NO: 35692 - DNA, 201 bp, Homo sapiens
acagttggggtccatgtttcattaaagaatccaagcattcttatcttttggtgatacttgtagtgtggtcttgacttacgaaatgtatatgtgttgttttmtacctttttcatgtttgacagtttttctttagaccagaacttcggattgcagctatttcttaagagttgctatttcattagccttatcaacatcctagag

SEQ ID NO: 35693 - DNA, 201 bp, Homo sapiens
agcatttagtgtaacaactgatggacttaattatattcctccatcttaatttgacagcaagtactgtatgtctattcttcttctctcttaaatgtggctcmtgctatttaaatgcgaaacaatggcttgagtttaggtcttgacaagctgtatctgaaatgacagtggttgctccaagtgaaaatgactgttagacaattg

SEQ ID NO: 35694 - DNA, 201 bp, Homo sapiens
attcatttcttctcagtctttattttttaaggttgttcacttctgagcaaagtataacaaagtctcccatatcattgtatttttatctttttctccctgcrttcctaagaatttgtttcacaggtttttagttatgatcacaccttctctataagttatgtctttaacattaccagatgacctcttcattctgtttagtgt

SEQ ID NO: 35695 - DNA, 201 bp, Homo sapiens
caaggccgggcacagtggctcattaatcccagcactttgggaggctgaggcaggtggattgccagagctcaggagcaacatggtaaaaccttatctctacwaaaaaaaaaaaaaaaaaaaaaaaaaagaataaagaaaaattagccaggcatagtggtgtacacctacagtcccagatacttaggaggctgagatgggagg

SEQ ID NO: 35696 - DNA, 201 bp, Homo sapiens
gatctcggctcactgcaacctccacctccggggttcagccttctgcctcagcctcccatatagctgggactacaggcatgtgccaccacgcctgagtaatytttgtattcttagtagagatggggtttcaccacgttggccagggtggtctcaaactcctgacctcaagcaaattcacctgccctggattcccaaagtgtt

SEQ ID NO: 35697 - DNA, 201 bp, Homo sapiens
ggaggttgcagtgagccgagatcactccactgccctccagcctgggcaacaaagcaagactccatctcaaaaaaaaaaaaaaaaaaaaaaaaaaatgtccytcatacctaaaccttacctcttgctaatttgctgagggttcattttagataaaaggtgtttaggttttcatattatgtttgtaactgtatagctatgatt

SEQ ID NO: 35698 - DNA, 201 bp, Homo sapiens
tcagcatccctgacccctacacactaaatgccagttttgcctctaacattgggacaaccagaaaactctccacaaatacccaaaactgcctttcaagggcrgcattgctgtgactcagaaccactggcacagagtaatgaacaggggcctcattgttgagtcgggacaaaccctgagggcataaggacccaacagggaatc

SEQ ID NO: 35699 - DNA, 201 bp, Homo sapiens
tactcgccttgtttcaaaaataaaatacaatgtcctagtggcactataacaaaggtataattattaccgtgccatgcacgcacccatcagcagaattcacwttcagagacgagtcgtaccggggactcgaacgctgtgaatggctggtaatgtgacttttcccaaatagcgaatgacttggttgaaagctttgaacaaagc

SEQ ID NO: 35700 - DNA, 201 bp, Homo sapiens
tgatagaagcacagcccctcaggcttgctcactctcactctctccccacctcttggttgagctctgctgtcactgcctccagacctctcatgaaggccccrccaccaccctccctggaatctgtaagtaagatatttcctctgtttggtgcatttttggtttcgcctcctcactgtgccttagctgaccaacacacccaaa

SEQ ID NO: 35701 - DNA, 201 bp, Homo sapiens
ccagagtcgtgtcaataaatttcccctgcgcacgtgttttcttgaaactaaccaatccacgacccccatgggaaagcctaaggggtaacgcccctggaccytgatagaagcacagcccctcaggcttgctcactctcactctctccccacctcttggttgagctctgctgtcactgcctccagacctctcatgaaggcccc

SEQ ID NO: 35702 - DNA, 201 bp, Homo sapiens
ggattacaggcatgagccaccgcacccggccaacctagttgtttgaaaccttgtaccctgccctctatggcctcattaaaacttcgcctcccagtgtggtkgtttgaaaaatacagcccaggctccttcctcatcccaccaaccaaaaacccaacatgccccacacctgcgggcccgtggtaaaacctgatgattaatacc

SEQ ID NO: 35703 - DNA, 201 bp, Homo sapiens
cgcggcctcccaaagtgctaggattacaggcatgagccaccgcacccggccaacctagttgtttgaaaccttgtaccctgccctctatggcctcattaaarcttcgcctcccagtgtggtggtttgaaaaatacagcccaggctccttcctcatcccaccaaccaaaaacccaacatgccccacacctgcgggcccgtggt

SEQ ID NO: 35704 - DNA, 201 bp, Homo sapiens
ctgtgtcagccaggatggtctcaatctcctgacctcgtgatccgcctgccgcggcctcccaaagtgctaggattacaggcatgagccaccgcacccggccmacctagttgtttgaaaccttgtaccctgccctctatggcctcattaaaacttcgcctcccagtgtggtggtttgaaaaatacagcccaggctccttcctc

SEQ ID NO: 35705 - DNA, 201 bp, Homo sapiens
cagaggtgatggtagtttcagccaatgtcgtgaaggatgggacatgttcacccggtaagggaaaactccacacagtcccatccactgccctgagatccgasccagtgctgcctgcctcttcaggaaactggaggagaaactaccatgattggagaaaccagagtcaggtgttgcaaagacttcctatcacagcacagaccc

SEQ ID NO: 35706 - DNA, 201 bp, Homo sapiens
tcacagaggtgatggtagtttcagccaatgtcgtgaaggatgggacatgttcacccggtaagggaaaactccacacagtcccatccactgccctgagatcygagccagtgctgcctgcctcttcaggaaactggaggagaaactaccatgattggagaaaccagagtcaggtgttgcaaagacttcctatcacagcacaga

SEQ ID NO: 35707 - DNA, 201 bp, Homo sapiens
agtggaacgatctcggctcaccgcaatctctgtctcccgggttcacgccattctcctgcctcagcctcctgagtagctgggacgcaggtgcctgccaccaygcctggctaattttttagtatttttagtagagaccaggtttcaccatgttagccaggatggtctcgatctcctgacctcgtgatccgcctgccttggcct

SEQ ID NO: 35708 - DNA, 201 bp, Homo sapiens
aggccatgagggttcttacattccatcttgagtcaaccatctcctgttaccctctgaaaagtggcagaatttgtcccagacttttttttgttgcacttcawatctactatggaattacatttatagctaatgcattaactctaaaaatggagaaacccattgctctgctgttttcatggtaaggaaaaactgctgagtcat

SEQ ID NO: 35709 - DNA, 201 bp, Homo sapiens
gaggccatgagggttcttacattccatcttgagtcaaccatctcctgttaccctctgaaaagtggcagaatttgtcccagacttttttttgttgcacttcwtatctactatggaattacatttatagctaatgcattaactctaaaaatggagaaacccattgctctgctgttttcatggtaaggaaaaactgctgagtca

SEQ ID NO: 35710 - DNA, 201 bp, Homo sapiens
caatgagaagggtttgagttccatcttatgaaaagctgcttctagatgccctgcaatttatacagctgccatatattaatctcctactgtgtgcctgggcwtgcccatacatgtttttctttactttttacgcttttttctctactggctcttaacctgcctcatcctatgccaagtttataaacatatttcaatttaata

SEQ ID NO: 35711 - DNA, 201 bp, Homo sapiens
ttctttcatacttacagtctcaactctatcacttcctgctgtgagtatggaaatgaattttgttgaaatcaaagaaattagttaataagattttttttagsctgttagtagaagtggcttaacgtttataaagaatatttgctttgctcataatttaactgaatgagacatctgacctctgctgtctatcaaattcattac

SEQ ID NO: 35712 - DNA, 201 bp, Homo sapiens
cctgacttcgagatccacccactttggcctcctaaagtgctgggattataggtgtgagctaccgtacccagctgagcatcttttcttttttaaaagaaatwttaattttagattcagggggtacatgtgcagatttgttacaagggtatactgtatgatgctgaggtttgggcttctataaaacctgtcacccagatagtg

SEQ ID NO: 35713 - DNA, 201 bp, Homo sapiens
acatggcaaaatcccatgtctactaaaaattcaaaaattagccagaagtggtggtgtatgcctgtagtcccagctactcaggaggccgagcatgagaatcrcttgaacacaggaggtggaggttgcagtgagccaatgttgtgccaccgcacttcagcctgaggaacaaagcgacactccatctcaaaaaaataattaaaa

SEQ ID NO: 35714 - DNA, 201 bp, Homo sapiens
aagatttacttattctattaaagatgtaatatgtacagatttgcttcctgacactccagtacaagaactaccacttttcttaattttcccaaatcaaaccratctatcctggcttcagcaattattgagaaattcatcctcatcatattaaggggaagcattttcccctcacttggagtcataaggaaatcttgaggagct

SEQ ID NO: 35715 - DNA, 201 bp, Homo sapiens
cttacgcctgtaatcccagcactttgggaggccaaggtgagcagatcacttgaggtcaggagttcaggaacagcctggtcaacatggcaaaatcccatgtmtactaaaaattcaaaaattagccagaagtggtggtgtatgcctgtagtcccagctactcaggaggccgagcatgagaatcacttgaacacaggaggtgga

SEQ ID NO: 35716 - DNA, 201 bp, Homo sapiens
caagatttacttattctattaaagatgtaatatgtacagatttgcttcctgacactccagtacaagaactaccacttttcttaattttcccaaatcaaacyaatctatcctggcttcagcaattattgagaaattcatcctcatcatattaaggggaagcattttcccctcacttggagtcataaggaaatcttgaggagc

SEQ ID NO: 35717 - DNA, 201 bp, Homo sapiens
cttggcaatatgcatttaagattcgtccatgtctttttgttgcttaagaacttttcattgcttcataagaaactgacaaactggctgggatggtggcttaygcctgtaatcccagcactttgggaggccaaggtgagcagatcacttgaggtcaggagttcaggaacagcctggtcaacatggcaaaatcccatgtctact

SEQ ID NO: 35718 - DNA, 201 bp, Homo sapiens
atggaaatccacaaagtggaaaccgtttttgcttgcctttaaaagcaaatctaaaaatatgttttctagcagctgtgtaactgcaaggaaaaaaaaaaaaatctgctccactgcaacacaactcgctcaccagatatctgcagggttcagatcttaatgcttcagaaatttgttgcagattttactgtatatatttagacc

SEQ ID NO: 35719 - DNA, 201 bp, Homo sapiens
cccaccatcaaaagaaaactaatgctcgcatttggctctattgtgtccaattactaaattataccccaaaattccattaaaacacctttattatgattgtrtagtactctagagtacacagacattgtaatttgttaaccagccctccaaattgtttcaagatttacttattctattaaagatgtaatatgtacagatttg

SEQ ID NO: 35720 - DNA, 201 bp, Homo sapiens
tgccaatgatggggcaattcagaaatagcaggggcctgatctgtagggtgcttaaacttccatgcatgattttcatgaaatgcagcacctctaaagcatasgactggtggtcagggtctgatagcttcgtctagaatgagcatctagtgccagtccttgcagtcacttacaaggaaggagggcacggaatagaacatgttg

SEQ ID NO: 35721 - DNA, 201 bp, Homo sapiens
aacctgcacgccaaaataaatctaaatctaaaataaaaggtgaaattatttaaaaagaatgttacccgtaatcccaccatcaaaagaaaactaatgctcgyatttggctctattgtgtccaattactaaattataccccaaaattccattaaaacacctttattatgattgtgtagtactctagagtacacagacattgta

SEQ ID NO: 35722 - DNA, 201 bp, Homo sapiens
tggcttcttccacttggcaatatgcatttaagattcgtccatgtctttttgttgcttaagaacttttcattgcttcataagaaactgacaaactggctggratggtggcttacgcctgtaatcccagcactttgggaggccaaggtgagcagatcacttgaggtcaggagttcaggaacagcctggtcaacatggcaaaat

SEQ ID NO: 35723 - DNA, 201 bp, Homo sapiens
atgtatgactcctcacattactttcagagttgttcattgcttggaaccagtgattttaggtggcaactagaaaagcagtttgtaaatggtaataattataygatgttgttttgaatgaatgttggaaagactggtagcacaaagaacttgagagttacttttcattaactccttaagtcacaactataattcttagtcacg

SEQ ID NO: 35724 - DNA, 201 bp, Homo sapiens
atcctaaaatcaaccatctctctaaggagttctaaaccaagatgtgttctttgctactgaggtgttgcttctttttttttttttttttttttttttttcaracggagtttcattcttgttgcccaggctggagtgcaatggcgcaatctcggctcactgcaacctccgccttccaggttcaagcaattctcctgccttagc

SEQ ID NO: 35725 - DNA, 201 bp, Homo sapiens
ttagatctttttggtactgtttttttttttttttctggactccagataccttttctttcagttgccgaaagtgtttgaaggcaaaaaaaaaaaaaaaaaargaaaaagaaaaaaatcttctttcatgtacattcattagataagcagcaaaccaggtgtttgggaaaagtaaacaattaaatatttaaatatcaaccaaat

SEQ ID NO: 35726 - DNA, 201 bp, Homo sapiens
cagcattttgcaatatacccatgtaacaaacctgcacgccaaaataaatctaaatctaaaataaaaggtgaaattatttaaaaagaatgttacccgtaatsccaccatcaaaagaaaactaatgctcgcatttggctctattgtgtccaattactaaattataccccaaaattccattaaaacacctttattatgattgtg

SEQ ID NO: 35727 - DNA, 201 bp, Homo sapiens
aaaaaaaaaggctgggcgctgtggctcacgcctgtaatcccagcactttgggaggccaaggtgggcggatcacgaggtcaggagatcgagaccatcctggytaacacagtgaaaacccgtctctactgaaaatacaaaaaattagccgggcgtggtggcgggcacctgtagtcccagctgctggggaggctaaggcaggag

SEQ ID NO: 35728 - DNA, 201 bp, Homo sapiens
cgggatcaattgtaccccagacctcagcattttgcaatatacccatgtaacaaacctgcacgccaaaataaatctaaatctaaaataaaaggtgaaattayttaaaaagaatgttacccgtaatcccaccatcaaaagaaaactaatgctcgcatttggctctattgtgtccaattactaaattataccccaaaattccat

SEQ ID NO: 35729 - DNA, 201 bp, Homo sapiens
ctcccaaagtgctgggattacaggtgtggggtaggcactactattaactatagttaacagaatgggaaactgaggcacaaagcagttcaggcttgtctgargagacacagcaagtaagtggcagcaccagtatttaaatccagttatcttcctgtgggagccttgctcttaaattctagatcagaccacctctctgatggg

SEQ ID NO: 35730 - DNA, 201 bp, Homo sapiens
ggcatctggtgtggtgatctggtgcgtttcagttctttgatacttttttgagagtcctaaaggtgtttcctgaggaaggaactcagataaaacaaatactrgtttccagctttgagaccagaacaatttcttgttcagtttatcaaaaaaaataatctatgggactgttgggtcagtttcatgctcactgcctgggtgacg

SEQ ID NO: 35731 - DNA, 201 bp, Homo sapiens
ggctgagacaggagaatcgcttgaacttgggaggcggaggttgcagtgagccgagatcactccactgccctccagcctgggcaacaaagcaagactccatytcaaaaaaaaaaaaaaaaaaaaaaaaaaatgtccctcatacctaaaccttacctcttgctaatttgctgagggttcattttagataaaaggtgtttaggt

SEQ ID NO: 35732 - DNA, 201 bp, Homo sapiens
catgttcttacttaataagtgagagctaaacattgggtacacatgggtataaagatggcaataatagacactggggactcctggagtggggaggcaggagragagcaagggttgaaaacccattgaatactacgcttgttacaaaaacaccgggggtttggtcgaggttctgctgctcaccaaacagaaaaccaatcactg

SEQ ID NO: 35733 - DNA, 201 bp, Homo sapiens
ggggctgagacaggagaatcgcttgaacttgggaggcggaggttgcagtgagccgagatcactccactgccctccagcctgggcaacaaagcaagactccwtctcaaaaaaaaaaaaaaaaaaaaaaaaaaatgtccctcatacctaaaccttacctcttgctaatttgctgagggttcattttagataaaaggtgtttag

SEQ ID NO: 35734 - DNA, 201 bp, Homo sapiens
aaaacccaatgcagcatgttcttacttaataagtgagagctaaacattgggtacacatgggtataaagatggcaataatagacactggggactcctggagyggggaggcaggaggagagcaagggttgaaaacccattgaatactacgcttgttacaaaaacaccgggggtttggtcgaggttctgctgctcaccaaacag

SEQ ID NO: 35735 - DNA, 201 bp, Homo sapiens
aaaatataaaaattagccgggcatggtggcgggtgcctgtaatcccagctactaggggggctgagacaggagaatcgcttgaacttgggaggcggaggttrcagtgagccgagatcactccactgccctccagcctgggcaacaaagcaagactccatctcaaaaaaaaaaaaaaaaaaaaaaaaaaatgtccctcatacc

SEQ ID NO: 35736 - DNA, 201 bp, Homo sapiens
gttcaagaccagcctggccaacatggtgaaatcccgtctctactaaaaatataaaaattagccgggcatggtggcgggtgcctgtaatcccagctactagsggggctgagacaggagaatcgcttgaacttgggaggcggaggttgcagtgagccgagatcactccactgccctccagcctgggcaacaaagcaagactcc

SEQ ID NO: 35737 - DNA, 201 bp, Homo sapiens
ttgaacccaggaggcagaggttgcagtaagccaagcccacaccactgcactccagcctaggtaactagagtgaaactccatctcaaaaaaaaaaaaaaaaagaataggtagaaacttgaaaagcaaggctatgttaccctttggacattttttgtttgtttgtttgccatttaagaggacgtaaaaggagatcattagaca

SEQ ID NO: 35738 - DNA, 201 bp, Homo sapiens
gtggttgtcccttgaagaaggaagcagttctctttttcttttttcccttttccattataggatcagtcacttcttggggcattagtagtctcatttccagyggcatcttcccttggcaaaaggaatcccagataggacctcatctttctaaacaaatgctgttttgggtcctaaccatcccatgtttgctttgaatatgtt

SEQ ID NO: 35739 - DNA, 201 bp, Homo sapiens
taaacagaaatggttgccctggaatgtggcctgtgttctttcaagggaggccagcagtttctacagtggctgagatggtaccttcatctcacacacctacrcaggagtgcatttgtgctttgatgtggttgtcccttgaagaaggaagcagttctctttttcttttttcccttttccattataggatcagtcacttcttgg

SEQ ID NO: 35740 - DNA, 201 bp, Homo sapiens
aaaacaaaattagcagggtgttgtggcgggcgcctgtagtcccagctactcaggaggctgaggcaggagaatggcatgaacccgggaggtggagcttgcartgagctgagattgcgccactgccctccagcctggacaacagagtgaggctccgtcttaaaggaaaaaaatttctggaatgatgtccaataaatcagagag

SEQ ID NO: 35741 - DNA, 201 bp, Homo sapiens
cacctcctcctggccttgccacgcccctccaggtactgcctcaacctgcctcagctaagccacgccccacctttctggtcacacccctcgaggcctcaccrcacccctcgaggcctcaccgcgcccctcctgctggtgccttcgggaacttcagctgctggagaccagggtaagcggcccccaagtgcctcctaaaagggt

SEQ ID NO: 35742 - DNA, 201 bp, Homo sapiens
gatcatgaggttaggagatcgaaaccatcctggctaacacggtgaaaccccgtctctactaaaaatacaaaaacaaaattagcagggtgttgtggcgggcrcctgtagtcccagctactcaggaggctgaggcaggagaatggcatgaacccgggaggtggagcttgcagtgagctgagattgcgccactgccctccagcc

SEQ ID NO: 35743 - DNA, 201 bp, Homo sapiens
agcaaaacagcagatggtgggctcactttttcagtttagcttcaggcttcccagagagctctgacaaggtcacagaggtgatggtagtttcagccaatgtygtgaaggatgggacatgttcacccggtaagggaaaactccacacagtcccatccactgccctgagatccgagccagtgctgcctgcctcttcaggaaact

SEQ ID NO: 35744 - DNA, 201 bp, Homo sapiens
actctgaaagacgtggaagacggggctttcctcctgcgtcaagtgggagaggctgtagctaccctgaaaggtaaactttctgctgggtcgggggaggagtytgagctgtctttcctgcggtgtttaaaaatctgccacatagaggattcattcatgtatgcaagtatttattaaacgtctacatgtgccaggcattgttct

SEQ ID NO: 35745 - DNA, 201 bp, Homo sapiens
cccacagatgaggtccagagagagtatagagctagcaagcaaggtctcagatagttaaggcagctctgccaccagcaccttttcaaatgccttttgcaccrccttctgaatagattgtcttaaacttctcagacatgactaattacaagtggccggttgatcctataataaccgatttgtctggtctggctataagattag

SEQ ID NO: 35746 - DNA, 201 bp, Homo sapiens
caggaggatcagttgaggccaggagtttgagaccagcctggccaacatggcgaaacccgatctctactaaaaatataaaaattagctgcacacggtggtgygcatctgcaattccagctacttaggaggctgaggcaggagaatcactggaacccgatggcggaggctgcagtgaacggagatcacaccactgcactccag

SEQ ID NO: 35747 - DNA, 201 bp, Homo sapiens
aaaaatgcttccttagctgttatgaatgttatttaaggttcttattgaaagcatctatcaagtcctactattgaaatgagcagaattttattactcccccrtcaccaggcaggcacatcttttatggtaattgtatgttttggtatgcaatgaagatttatcatagaactatctcaccttttagtataatgaatagtaatt

SEQ ID NO: 35748 - DNA, 201 bp, Homo sapiens
gcccaggaggtaaaggctgcattaagccgtgatcacaccactgcactccagcctggacaacagagtgagaccctgtctcaaaaaacaacagcaacaggccrggcactgtggctcacgcctgtaatcccagcacttcgggaggccaaggtgggtggatcgcttgaggtcaggagtttaagaccagcctgtccaacatggtga

SEQ ID NO: 35749 - DNA, 201 bp, Homo sapiens
gtggcttttttttttttgtctgttcgccatgaaacccttctttcatactttctccctcaccttccaaacaacaacaactaggtatctaacagctaatcagytctgtttttgcctctgttgctgactggtgttgggtaaacacgaggctgctgggtcagccatgtgctgttgaaatggttgctctgatactcacattaaaat

SEQ ID NO: 35750 - DNA, 201 bp, Homo sapiens
ggtatggtggatgggagcaccagggatgggaggggatttcctgggtagtggtagggaacttagggatgagatagtcaagaattccaaagcaggggagataytgagacattagacgaaacaaaatattgaagtgctttttaggggagacagaacgtagccagtcttcttgctcatgccataagcacagggcccggggagaag

SEQ ID NO: 35751 - DNA, 201 bp, Homo sapiens
aaagccatctttaatctcaataatactctgagattacagcctagcataggaatgagacagaaaaggtagtggaacgaacatatcataagagggctttatckggttggatttgtgggaaggccacagatgagtaaaagaggcaaagagcccttgaggatcttcagtctagcaaaggcaacctgataaataggagtatagccc

SEQ ID NO: 35752 - DNA, 201 bp, Homo sapiens
cagcctcaagttcctgggctcagcaatcttcccacttcagcctcctgagtagctgggactataggcatgaaccaccatgcccagctaattaaaaaaaaaaatgtttttgtagagatgagtcttgctatgttgcccagaatggtcttgaactcccgacctcaagtgattctgtcacctcaacctctcagtcttctttttatt

SEQ ID NO: 35753 - DNA, 201 bp, Homo sapiens
ccctgaaacagcacaaagaagccaagcgcttcgaaatcgctaggtctcaacctgaagacacccctgaaaacacagtgaggaggcaagagcagcccagcatygagagtacatctccgatttcaagaactgatgaaattagaaaaaacacctacagaacattggatagcctggagcagaccattaaacagctcgaaaatacaa

SEQ ID NO: 35754 - DNA, 201 bp, Homo sapiens
accgtgcccagctaatttttatattttcagtagagatgggatttcaccgtgatgaccaggtcggtctcaaatttctgacctcaagtgatccacccaccttrgcctcccaaagttctgggattacaggcatgagccactacacatagcctatttttattttttatttttgcgtatatgtgatggagtctttgccatgttgcc

SEQ ID NO: 35755 - DNA, 201 bp, Homo sapiens
tcactgtgagtttgcatgacaattatgaccaagctcctgcacttgctttgatacattcattcatttttttctagcccagtgataaaaagtataggtcgtgkgaaaaccaaacttcacatttttatcctagtgactttccattagagcatttatgctactactcagttttaaaatacatatattacaggggggatttttgaa

SEQ ID NO: 35756 - DNA, 201 bp, Homo sapiens
gtctctcgttttggtttattgtccatatgcctattgagtgcttttccagttgtcttcataatccaaatcccagggcctataaatacatattaaagaggcayaattacctttcacccagagtcttgaccatctaagactaagaaatcactgtgagtttgcatgacaattatgaccaagctcctgcacttgctttgatacatt

SEQ ID NO: 35757 - DNA, 201 bp, Homo sapiens
cccggttcaagtgattctcgtgcctcagcctcccgagtagctgggactacaggcgtgcaccaccacacccggctaatttttttgtatttttattagagatrgggtttcaccttgttggccaggctggtcttcaactactgacctcaggtgatccacccgcctcagactcccaaagtgctgggattacaagcgtgagccacc

SEQ ID NO: 35758 - DNA, 201 bp, Homo sapiens
ttttcttttctttttaattgaaatggagtctcgctctatcacccaagctggagtgcaatggcgccatctcagctcactgcaacctccccctccccggttcmagtgattctcgtgcctcagcctcccgagtagctgggactacaggcgtgcaccaccacacccggctaatttttttgtatttttattagagatagggtttca

SEQ ID NO: 35759 - DNA, 201 bp, Homo sapiens
aacccatgaaaccatgttggaaatatattgatttttattgtttttggttttttttttttttttttgtgagaccgagtctcactctgtcacccaggctggaktgctgtgacgtggtctcggctcactgcaacctccgcctcccgggttcaagcagttctctgtttcagcctctctagtagctgggattacaggcgcctgcca

SEQ ID NO: 35760 - DNA, 201 bp, Homo sapiens
gttgttgttttgtggctcttctttatggcactgaaagatactccaggctcatcttctacatttcctgccacaatcctaaaatcaaccatctctctaaggasttctaaaccaagatgtgttctttgctactgaggtgttgcttctttttttttttttttttttttttttttcagacggagtttcattcttgttgcccaggct

SEQ ID NO: 35761 - DNA, 201 bp, Homo sapiens
aagtttgttgacatcatgtacatcacattgggtcaagcaatagagccatagacatgacttccattgccgtttctttaaaaaggcaaatctgactgggtgcrgtggctcacgcctgcagtcccaacactttgggaggctaaggcgggcagatcacgaggtcaggagatcgagaccatcctggctaacacggtgaaaccccgt

SEQ ID NO: 35762 - DNA, 201 bp, Homo sapiens
taaacctaattatacttcttcaacttaagatggacatttctctacctaagaatataaaattatcaaatactctagagaaagttgggtttatattcaaatascacaatatcaacacatgtgaaggtcagtattccatagatggggatgttgatagctaatttcaaatcagtgtgttttgtttattaaagctagactgctgat

SEQ ID NO: 35763 - DNA, 201 bp, Homo sapiens
atagttgcaactaacattctaagggggttctctaagtttagtgtttgattttcttaaaaaccgatttgaaaattcatggtgcatggaactcagtgaaggcwcctctgttgaagaaataactctctgaaataaaatgaacatataggccctttatcttttttaatgggatggcgtgcttaggcccatgaggatcggtttggt

SEQ ID NO: 35764 - DNA, 201 bp, Homo sapiens
ttggctgtgtacccacccacttctcatcttgaattgtagttcccataatccccacatgttgtgggaggaacctggtgggaggtaattgaatcatgggggckgttttccccatgctattttcataatagtgagtgagttctcatgaaagctgatggttttataaggggctttccctttcactgggcactcattcttctcctt

SEQ ID NO: 35765 - DNA, 201 bp, Homo sapiens
aaaaataaaaatcgtagagatggggtctccccgtgttgcccaagctggtgtcaaattcctgacctcaagcaatcctcccacctcggcctcccaaagctctrtgattatagatgtgagctgccatgcctggccttaaatttttcaaaagcttttaaaccaatcttaaaatgttttatcctcttagaatcatgtccctagttt

SEQ ID NO: 35766 - DNA, 201 bp, Homo sapiens
tcttttcagaaatgcaaaagacaaaatgacttagaattccatctcgttctgcccggtttgagggcatcccttcctattccttagatagctgttaataagartcctgaggaaaactgggtttgaatttaaaaacaaaaaatttttaagagacagggtctcgctttgtcacccaggctggagtgcagtggcacaatcatagcc

SEQ ID NO: 35767 - DNA, 201 bp, Homo sapiens
atcctaagcaatctaatgcagaacagaaaacccaatgcagcatgttcttacttaataagtgagagctaaacattgggtacacatgggtataaagatggcartaatagacactggggactcctggagtggggaggcaggaggagagcaagggttgaaaacccattgaatactacgcttgttacaaaaacaccgggggtttgg

SEQ ID NO: 35768 - DNA, 201 bp, Homo sapiens
tcagtgcagtttggttaatgataaaattttccaaagcagtgtctcatctgcaggagcaaactatagcaagggccctggccatcagttctcccttctggtcytgatattcctttttaaactgtctttccatacccctccctccagtgggcttggcgatgttgcattaaatagcaaagagaaggaaactcctccccagtcctc

SEQ ID NO: 35769 - DNA, 201 bp, Homo sapiens
ttcctgatgaggaaatgatggagtagtaatgggggaagattgttcagaggacttgatgtatatgtgaagcaaagaggtggtgagaagtgcgtggcgcagcrtgtgggatgaatgtgcaccgtaagaggtccagtcccactgcggtgccctagcaaagtgggacgcttcgggaaaataaggcaggaagaggagttgaggtca

SEQ ID NO: 35770 - DNA, 201 bp, Homo sapiens
gtaaaaacaacatattcttattttggagaaataaagaaagtgtgtcactcttatcctaagcaatctaatgcagaacagaaaacccaatgcagcatgttctyacttaataagtgagagctaaacattgggtacacatgggtataaagatggcaataatagacactggggactcctggagtggggaggcaggaggagagcaag

SEQ ID NO: 35771 - DNA, 201 bp, Homo sapiens
caggtgtgcaccacgactcctggctaattttcatgttggttttttgtagagatgggacgttgccgaggttggtctcaaactcctggcttcatttatcctcstgcctcagcctctcaaagtgctgcaattataggtgtaagccaccacacctagtccaggcttttaattttgtatcggcaaaacgaaaagaagaaaacacat

SEQ ID NO: 35772 - DNA, 201 bp, Homo sapiens
tgctttagtagtctcaagtatgttttttttctcattaagcctttgcttaagatgcaggcaagattgatgctgttggtttggtgcaaaagtaattgcagtgyttcccatttaaaagtaatggcacacactgcaattacttttgctccaacttaatacttggctttattgacttttagcatcagtgcagtttggttaatgata

SEQ ID NO: 35773 - DNA, 201 bp, Homo sapiens
taattttatttttttgtagaggcagggtctggctatgtttttgaggtcttaattccccaatgaacatgactagtatattccaggctggtcttgaactcctrtcacaaagcaattctcttgccttagcctcccaaagtgctgggatttcaggcatgagccactgcacctggcttggaccattttaaatagtgaagtcactca

SEQ ID NO: 35774 - DNA, 201 bp, Homo sapiens
ttaaaatataggtactatgattagcttggacattaaatttactttcaagcttcctgacatacatgatattttacatatgacaaggtaatacttattaatcyttcaggaagcaaaatcatattctttgtttcaaattgtgaaagaaacattgttcgtgcctttataaaaggtacactgatcagcatagtaggcaggaccaac

SEQ ID NO: 35775 - DNA, 201 bp, Homo sapiens
ttctcttttcttatttaaagaaaaaatttgtagatgccgggtctcgccctcttgaccaggctggagtgcagtgacacaatcacaactcactggagcctcaractcctgggctcaagtgatcttcccacctcagcctcccaaatatctgggactacaggcacacgccaccatgcccagctaattttttaattttattttttt

SEQ ID NO: 35776 - DNA, 201 bp, Homo sapiens
cagcctgggcaacagagcgagactctgtctcaaaaaaaaaaaaaaaaaaaaagacatctaccctaaggtagatacactgaaaatcaaaaagcaaaatctcrtaagaagaggaagcaaattttaaaatataggtactatgattagcttggacattaaatttactttcaagcttcctgacatacatgatattttacatatgac

SEQ ID NO: 35777 - DNA, 201 bp, Homo sapiens
ccactgcactccagcctgggcaacagagcgagactctgtctcaaaaaaaaaaaaaaaaaaaaagacatctaccctaaggtagatacactgaaaatcaaaargcaaaatctcgtaagaagaggaagcaaattttaaaatataggtactatgattagcttggacattaaatttactttcaagcttcctgacatacatgatatt

SEQ ID NO: 35778 - DNA, 201 bp, Homo sapiens
tacctggccgggcgcggcggctcacgcctgtaatcccagcactttgggaggccgaggcaggtagatcacgaggtcaggagatcgagaccatcctggctaayacggtgaaaccccatctctactacaaatataaaaacttagccaggcgtgatggcgggcgcctgtagtcccagctactcgggaggctgaggcaggagaatg

SEQ ID NO: 35779 - DNA, 201 bp, Homo sapiens
tgagccagtgcttccggccagcttatcctaacggcaggaagctttgatacttttacttcctgaccacagacttagtaggcagcaggaacagtcttcaactycctggttgtataattacaagagccaatgtgaaatattatgcatttggagaagcccttctctagagctcttatagaaaaggaatgtacagccaagtttatg

SEQ ID NO: 35780 - DNA, 201 bp, Homo sapiens
taaagtgcattcctgactttctgaattacaaaagcatctgcagtcttgctcagacctcaaccaatgaggattttggcagccaaagcctgttcaacattttrcttgttgataaggcattacttttcttgtttcagaaagaaaggagagaaagaataaattaattgttgtattcaaggcaacttgcaataaaaagacatctac

SEQ ID NO: 35781 - DNA, 201 bp, Homo sapiens
tggcattggatatttagaaagtgtttttatattctttacttcctcttatcattacaagtaatgactagcagtcaagtaaggctagtagtcttttttttttwaaaaaaaaaagacagggtctcactctgccacctaggctgaagtgcagtggcgcgatcttggctcactgcaacctctgcctcccggctaaagcaatcctcc

SEQ ID NO: 35782 - DNA, 201 bp, Homo sapiens
catcttttataatttaccaattgctgtcccatgcaacatttttccaattacttctcactttatcaagtagatattctgattattttataaaagtgagaacygaggttcagaaaggtttcatatggagttgcaccgtgagttcatggcaggattggagtctgcttttcataaaataacctgataaaaacagtaagttctctc

SEQ ID NO: 35783 - DNA, 201 bp, Homo sapiens
gttgcctctagggtacctctaagtacgttatattctttgtgggtgttgtttttctgttctgttttttgtttttgtttttgctttttttgagacggagtctyactctgtcgccaggctggagtgcagtggcatgatcttggctcactgcaactccgcctcccaggttcaagcaattctcatgcctcagcctcccgagtagct

SEQ ID NO: 35784 - DNA, 201 bp, Homo sapiens
gtaatcttggctggctgcaacctctgcctcctgggttcaagcagttcttttgcctcagcctcccgagtagctgggattataggcatgtgccaccatgcccrgctaattttgttgttgttgttgtttgttttgtttgtttttgtttttagtagagacaggatttcaccacattggccagcctggtcttgaactcctgacctc

SEQ ID NO: 35785 - DNA, 201 bp, Homo sapiens
aagctgcttctagatgccctgcaatttatacagctgccatatattaatctcctactgtgtgcctgggcatgcccatacatgtttttctttactttttacgsttttttctctactggctcttaacctgcctcatcctatgccaagtttataaacatatttcaatttaatattataaataaaataataatacaaagccattaa

SEQ ID NO: 35786 - DNA, 201 bp, Homo sapiens
gatggaaatccacaaagtggaaaccgtttttgcttgcctttaaaagcaaatctaaaaatatgttttctagcagctgtgtaactgcaaggaaaaaaaaaaaaatctgctccactgcaacacaactcgctcaccagatatctgcagggttcagatcttaatgcttcagaaatttgttgcagattttactgtatatatttagac

SEQ ID NO: 35787 - DNA, 201 bp, Homo sapiens
gacaccctactcagaagcctactccctaatttttttttctagttactcatttgccaagatgacttgtttatttgaaagttgttgtgatggaagttggattrtgtatattatgattgcttttcttcctgtgtattattttcatttgaaaatgtcaaagtatctcaccattttcctattttatagactagtaaactgagttat

SEQ ID NO: 35788 - DNA, 201 bp, Homo sapiens
actctatcacttcctgctgtgagtatggaaatgaattttgttgaaatcaaagaaattagttaataagattttttttagcctgttagtagaagtggcttaamgtttataaagaatatttgctttgctcataatttaactgaatgagacatctgacctctgctgtctatcaaattcattaccgctttctgggacccatgaact

SEQ ID NO: 35789 - DNA, 201 bp, Homo sapiens
gatttggacttcaaagcatcttgcctttacctctcagaagctgttctcacttgttttttgttttgttttgttttgtttttgagatggagtcttgctctgtygcccaggctggagtgcagttggtgtgatctcggctcactgcaacctccacctcctgggttgaagcaattctcttgcctcagcctcccaagtaactgggat

SEQ ID NO: 35790 - DNA, 201 bp, Homo sapiens
cttgtcaaaaaaaaaaaaagaaagaagaagaagagagatacctccccttttattcttcatttccatctagcaaaataataaaaataatattgatgattgargggtcgccttggacaattgccttggacttcagtagtgaaaaaagaggataaaagatcctaaggtattcatcaagtataacagagcaaaggctgaacagga

SEQ ID NO: 35791 - DNA, 201 bp, Homo sapiens
gcctgtcatcccagctacctgggaggctgaggcaggagaattgcttgaacccgggaagcagaggttgcagtgagctgagatctcaccactgcactccagcstgggcgacagggagagactctgcctcaaataaataaacaaacaaacaaataaaaatagtttttaatcctagctgcacattagaattactttgggagttaa

SEQ ID NO: 35792 - DNA, 201 bp, Homo sapiens
atagattttaaaagttagttcagaataaagtttacccttcctcattaatacacttaataatgcttagttttaacaaattatatacatacacacacacacaygcatatatatatatacacacacacacacacatacacatacacacacacatacacacaatcactccttaaatgtgcaagaccgggacttgactttgagaaa

SEQ ID NO: 35793 - DNA, 201 bp, Homo sapiens
aggctgaggtgggcagattgcttgaggtcagcagtttgagaccagcctggccaacatggtgaaaccccatctctactaaaactacaaaaaaatcagccagrcgtggtggcgggtgcctgtcatcccagctacctgggaggctgaggcaggagaattgcttgaacccgggaagcagaggttgcagtgagctgagatctcacc

SEQ ID NO: 35794 - DNA, 201 bp, Homo sapiens
tccatcttggggtaatttttgtatatggtgataagtagagatccagtttcattcctccgcttatggctagccagtttccccagcagggagtcctttccccrtggcttagtcttattgactttgttgaagatcagttggttgttgctgtgtggctttatttgtgggtttatttcttattctgttggtctatgtgtctatttt

SEQ ID NO: 35795 - DNA, 201 bp, Homo sapiens
ccagcaccttggggctcaaaaacatgttagctttttaccgacgtaccaatggctttgtgccaacccataaattttcctcttttctttggagtagggagaaytttcaatctacattgtttttactgcacttgttctactctggtttccatggtaataactgccaaaattgagctgcctggattttgcagggaaaacagaact

SEQ ID NO: 35796 - DNA, 201 bp, Homo sapiens
tccatgccatactggatattagctgtaaaatatttcgactatcactggtgtttcccacatgaatgcccaatacaatgtatcagaattacttttagttaattgttatatttctttctaatctcatctatacataccactagtaaatctattgagatattctagttagatctttaaatgtttcattttaaaggttatttatat

SEQ ID NO: 35797 - DNA, 201 bp, Homo sapiens
cccttttttccacagcttcgccaacttgttactttttggctttttagtaataaccattctgactggtgtgagatggtttctcattgtggttttgatttgcrtttaatgatcaatgatgattagctttttttcatatgcttgttggccttacgtatgtattcttttgagaagtgtctgttgacgtcttttgcttacttttta

SEQ ID NO: 35798 - DNA, 201 bp, Homo sapiens
gaggaggaagaagaagaagaaggagacaaaataatggcagaactccaggtatgtggatgaggtgactgacattggctccttgcctcccgcctgggtctctscagccatggcactcacagatttgttagcgagaaggccagggaagcgcatggaccgggaccatagaagctgtgtcttctggccttagcctttgctttccca

SEQ ID NO: 35799 - DNA, 201 bp, Homo sapiens
atctgattttatttctgtgctaattcacttaggataatggcctccagctgcatccatgttgctgcaaaggacacgattttggttttttaaaaatgactgcrtagtattccatggtgtaaatgtaccacattttctctatccattccaccactgatgggcccctaggttgattccatgtctttgctgagttctgtgtctttg

SEQ ID NO: 35800 - DNA, 201 bp, Homo sapiens
ttctctctgttggaacataaaaagtagtgaggcagagaagtagtaactcgaccacacaagatccccaggaagcaccacagatggaacaatggcagccagtrtgattggactagacccagaccatgagttttatccttattttacttttagctgcaacaatatgaaatgcaaatcacaagctatttcccatgtgggcatcat

SEQ ID NO: 35801 - DNA, 201 bp, Homo sapiens
tcttgacttgcatgttgagaaacattaaagtgtattccatttataaccaccgtacagtcatcccttggtatccatgggagattagttccaggactcccatyggataccaaaatctgaggacgttccagttcctggtataaaatggcatggtatttgcatgtaacctactcacatcctcccatatactttacgggccagaac

SEQ ID NO: 35802 - DNA, 201 bp, Homo sapiens
tgatgtttggagtttatttggaaggtatcagagaaatgctgcagctctaatccgtgattttttttaaatggcatcttctggaaattaatctagaaacaacrtacagaattgattgaggtggtgggtctagaattaagagagctggatgagaaattactatagtcatctaagaatgaacggtagagcagtcagaatgaaaag

SEQ ID NO: 35803 - DNA, 201 bp, Homo sapiens
atgttgcccaggtgagttacaaagggatttgtctttttaaatggggtaatactgggtgctgtattgagcacaatccaagtagggttgagggaagggcaggraggcctttaggaagcttctgcagtcaaggaggcaagaaccagggctagcttggaccaggcggtgattagcaggcggtgataagccagcagattctaggtg

SEQ ID NO: 35804 - DNA, 201 bp, Homo sapiens
agctcactgcagccttgaactcttgggctcaagcaatcctctggccttagcttccaaatagctgggactactgggacatgccaccatgcatggttgtattktattgtattgtattgtattgtattgtattgtattgtattgtattgtattttattttattttagagaaggggtcttgctatgttgcccaggtgagttacaa

SEQ ID NO: 35805 - DNA, 201 bp, Homo sapiens
atcacagctactcgggaggcttgaggctggagaatcgcctgagcacacgagatggaggttgcagtgagccgagatcgtgccactgtgttctagcctgggcracagaacaagactctgtctcaaaaaaaaaaaaaaagtccaagttactgttgcagggattgggacatcttgcctttctcaagttgagcaatattcccaaat

SEQ ID NO: 35806 - DNA, 201 bp, Homo sapiens
ttttttttttttttagagagggtctcatttgtcacccagactggagtgcagtggtgtgatcatagctcactgcagccttgaactcttgggctcaagcaatyctctggccttagcttccaaatagctgggactactgggacatgccaccatgcatggttgtattgtattgtattgtattgtattgtattgtattgtattgta

SEQ ID NO: 35807 - DNA, 201 bp, Homo sapiens
cagtccagtgagggtgtcacataagaggcccttggcttacctctatgcataactggcccacgtcacatctttaattagaagtccaagttattggctggacrccatggctcatgcctgtaatccaagcactttgggaggccaaggtgggtggatcacctgaggtcaggagttcgagaccagcctggccaacatagtgaaacc

SEQ ID NO: 35808 - DNA, 201 bp, Homo sapiens
gccactgcacttcagcctgggtgacagagtgagaccctgtcttaaaaaaaaaaaagagtgagaataatgaaactgtgcacacgcaggccttttaataaacwttccccctgtacgcagcccattctagctatatatatttcttggtcccagcctcttcaaataaaaattgttttattcaaaagtatgacctagccttataca

SEQ ID NO: 35809 - DNA, 201 bp, Homo sapiens
ggcccatgaaaccattgtaaggactagagcttttattttgaaagaggtgggaatctcctggcaggtgggactacttttttttttttttttttttttttttwttagagagggtctcatttgtcacccagactggagtgcagtggtgtgatcatagctcactgcagccttgaactcttgggctcaagcaatcctctggcctta

SEQ ID NO: 35810 - DNA, 201 bp, Homo sapiens
ggtaatcccaggccagatcacctagggcccatgaaaccattgtaaggactagagcttttattttgaaagaggtgggaatctcctggcaggtgggactactytttttttttttttttttttttttttttagagagggtctcatttgtcacccagactggagtgcagtggtgtgatcatagctcactgcagccttgaactctt

SEQ ID NO: 35811 - DNA, 201 bp, Homo sapiens
agttaagtaacttgcccaaggtcacacagctaggtaatggttgtgcttaggaaatgttcggccatctggctttgtacaaaagtgacctccttcccattggycagtcttcagtgaccatgcttatctctttaccttccccttcttaataatcagtctcattgatctctttttagggtaacaagctcaatttagaaagttcct

SEQ ID NO: 35812 - DNA, 201 bp, Homo sapiens
aagtgatatttgaacaaagacaggagaggtaacagcagggatgtaatgttttcaaagaacagcaagaacatgggagaaggatgggaggaaaagagattgakaggtaatcccaggccagatcacctagggcccatgaaaccattgtaaggactagagcttttattttgaaagaggtgggaatctcctggcaggtgggactac

SEQ ID NO: 35813 - DNA, 201 bp, Homo sapiens
caagtaatccacctgccttggcctcccaaggtgatgggatcataggcatgagccactgcacccagccagatttctttcttttgatgatatttgggagtaaytgtggaatgtgtccccccacctatatcatacagcaatatttttttgatctacaaagcacaccatatacttcactatttattctgctgaggggaaatgggt

SEQ ID NO: 35814 - DNA, 201 bp, Homo sapiens
cacagtgcatggcagcgtgtgaggttaaagcggagttcagaatcatcgaaagatacctgtgaaatgggaatttggacttttgaaactaaaactacttaggrataagtggataggctttcaaaatgttttaagaactgcctcatgtgtgagaatgagacctcctgaaattttgcagttagataatgtggattaatgccagaa

SEQ ID NO: 35815 - DNA, 201 bp, Homo sapiens
tctcactaaagtccataatctctgcgcctaaatctgctaatcactgtaattgaagaaaatgcaggaagtataaatctcctagggggcagtgtttgtaaccytttttaaaaagaaattacacccagagtctttttgatagtttgaaaacatgcactggaaactgttgcatatccctaaaaggccaacttttttttttttcct

SEQ ID NO: 35816 - DNA, 201 bp, Homo sapiens
tcataggtgggaattgaacaatgagatcacatggacacaggaaggggaatatcacactctggggactgtggtggggtggggggaggggggaaggatagcaytgggagatatacctaatgctagatgacgagttagtgggtgcagcgcaccagcatggcacatgtatacatatgtaactaacctgcacaatgtgcacatgta

SEQ ID NO: 35817 - DNA, 201 bp, Homo sapiens
taaatcttgtttctgtttctcctgatgctaaaatgttgaattctaaatatgcaaaggtacattcacacacaaacacacacacacacacacacacacacacaccatacaggatgaacacacacattgctaatgggtcctagaaaaaggtgctagggcttagttgcacatgtttgttgacaggttaaaataaaagaaacctga

SEQ ID NO: 35818 - DNA, 201 bp, Homo sapiens
tgtgcatcttgggtagaatattttagtacagtttttgtctggagacctgttgtttggctttttggctttcgagtgtagccatctgtgttcaagtgttcttyttcttctagtggaaatttgtgtctgatgtgtgggactaagttctaagtaatatacacacatatatataatctatacacaatggtgatatggatcatggat

SEQ ID NO: 35819 - DNA, 201 bp, Homo sapiens
acaccgcatattctcactcataggtgggaattgaacaatgagatcacatggacacaggaaggggaatatcacactctggggactgtggtggggtggggggrggggggaaggatagcattgggagatatacctaatgctagatgacgagttagtgggtgcagcgcaccagcatggcacatgtatacatatgtaactaacctg

SEQ ID NO: 35820 - DNA, 201 bp, Homo sapiens
cagtgaggaaaaaagaaaaaagccagtctctaaagtttacatactgtaccattccactgatacaaaacattgttgagataaaattatagagatgcagaacrgattagtagatgccagggactggggatgtaggtgggagagaggagtttgaatacagaggggtagcacttgggggcctagttatgatggtacaattatctt

SEQ ID NO: 35821 - DNA, 201 bp, Homo sapiens
agccggtgttacttatcatcgctctgtgattttctgtgctttttttttttcccccttttccctgtccatagcagctcttcaaatctatcatcctgtttttrtcttacacttttatttaccatgcatctgcagggctttattatttgtggtctacttcagggtatttctttcacagttgatgaagcctgtaaacttcagagc

SEQ ID NO: 35822 - DNA, 201 bp, Homo sapiens
aacaccgcatattctcactcataggtgggaattgaacaatgagatcacatggacacaggaaggggaatatcacactctggggactgtggtggggtgggggraggggggaaggatagcattgggagatatacctaatgctagatgacgagttagtgggtgcagcgcaccagcatggcacatgtatacatatgtaactaacct

SEQ ID NO: 35823 - DNA, 201 bp, Homo sapiens
gaacccgggaggcggagcttgcagtgagccgagatcgcgccactgcactccagcctgggtgacaaggcaagactccctctcaaaaaaacaaaaaacaaaamaaaaaaaaaaaaaaggcaaaggagtttgaatagctaaaactattttgacaaagaaaaatgaagtgggaggaattattccaccagatttttaggctgctta

SEQ ID NO: 35824 - DNA, 201 bp, Homo sapiens
tccattcctggtcctctctgaagggctgtggttgtcctggttctcctcccgcagccggtgttacttatcatcgctctgtgattttctgtgctttttttttktcccccttttccctgtccatagcagctcttcaaatctatcatcctgtttttatcttacacttttatttaccatgcatctgcagggctttattatttgtgg

SEQ ID NO: 35825 - DNA, 201 bp, Homo sapiens
ccctctctctactaaaaatacaaaaattagacaggtgtggtggcaggcacctgtaatcccaactagtcgggaggctgtggcaggagaatcacttgagcccrggaagcggaggttgcagagagcagagattgcgccattgcactccagcctgggcgacagagtgagactctgtctcaaaaaaaagagaaaaaagaaaaaaaa

SEQ ID NO: 35826 - DNA, 201 bp, Homo sapiens
attgcatcttctgagaagggcttcctacgtctccagcatcccggggccttccctgctctgatggtgggagattcttccagcttctaggtttccgtgacctyagttagcaaaggcaggaaaagatgtaacaggtagactaggggtttgctccacagttcggaggctttgagcaattgtgtgtttctcttgcctgcctgcctt

SEQ ID NO: 35827 - DNA, 201 bp, Homo sapiens
actgctggaattacaggcatgaaccaccaagcccagcctataggagccttcttaagagtaaaaactcaattaaaactacataccaatgccagcaatgattsttttaagaaatgcttaccggccaggcgtggtggctcacccctgtaatcacagcactttgggagactgaggtgggtggatcacctgaggtcaggagttcga

SEQ ID NO: 35828 - DNA, 201 bp, Homo sapiens
acccgctcttattttttaagaacaattttctatggtatagtcaaagccgtaaatcaagcttgtaaatgctccacgttgatttagcaggtatatgtgagagrcctaataaaatccagttttcttttttattgctcttattgttgggctcaaaactttccacacagatggaacctactgagaagcgaaaaaaggttctcagtg

SEQ ID NO: 35829 - DNA, 201 bp, Homo sapiens
gccatgttggccaggctggtctcgaactcctgagctcaggtgatccacccgcctcagcctcccaaagtgctgggattacaggcgtgagccaccgcacccarccacccgctcttattttttaagaacaattttctatggtatagtcaaagccgtaaatcaagcttgtaaatgctccacgttgatttagcaggtatatgtgag

SEQ ID NO: 35830 - DNA, 201 bp, Homo sapiens
caaggatctagaactagaaatagcatttgacccaaccatcccattactgggcatatatccaaaggattataaatcatgctgctataaacacacacacgtaygtttattgcagcactattcacaatagcaaagacttggaaccagcccaaacgtccatcaatgatagactggattaagaaaatgtggcacatatacaccatg

SEQ ID NO: 35831 - DNA, 201 bp, Homo sapiens
tgccatgttggccaggctggtctcgaactcctgagctcaggtgatccacccgcctcagcctcccaaagtgctgggattacaggcgtgagccaccgcacccmgccacccgctcttattttttaagaacaattttctatggtatagtcaaagccgtaaatcaagcttgtaaatgctccacgttgatttagcaggtatatgtga

SEQ ID NO: 35832 - DNA, 201 bp, Homo sapiens
ttttacagtattattatttttgccattccttgaggtagttgagtcttcctgttttctcagtaacattcctttagttttttgtgggtttttttttgtttttktttttttttgaaacagggtcttactctgttgaccgagctggagtgcagcgtgcagtggcacaatctcagttcactgcaccctccacctcctgggctcaag

SEQ ID NO: 35833 - DNA, 201 bp, Homo sapiens
ctcatcatcactggtcatcagagaaatgcaaatcaatccacaatgagataccatctcacaccagttagaatggcgatcattaaaaagtcaggaaacgacakgtgctggagaggatgtggagaaataggaacacttttacactgttggtgggactgtaaactagttcaaccattgtggaagacagtgtggtgattcctcaag

SEQ ID NO: 35834 - DNA, 201 bp, Homo sapiens
tcctccacattttttttttttttgcctggaaaagtgtttcagtttgtcattgcttcatcatttcgaattccatattaggttacctttttttttttttttttgcctgaccatagtacttaagaaaaatcttgcaactgtccttcattctgttgaaccaactatatcttatgttttcacttgacattttgttttagatctact

SEQ ID NO: 35835 - DNA, 201 bp, Homo sapiens
gcatggctaacacggtgaaatcccatctctactaaaaatacaaaaaattagccaggtgtggtggcgggtgcctgtagtcccagctactcaggaggctgagrcaggagaatggtgtgaacccaggaggcggagcttgcagtgagcggagatcacaccactgcactccagcctgggtgacagagcgagactccatctcaacaa

SEQ ID NO: 35836 - DNA, 201 bp, Homo sapiens
agacaggcagatcatgaggtcagatcgagaccagcatggctaacacggtgaaatcccatctctactaaaaatacaaaaaattagccaggtgtggtggcggktgcctgtagtcccagctactcaggaggctgaggcaggagaatggtgtgaacccaggaggcggagcttgcagtgagcggagatcacaccactgcactccag

SEQ ID NO: 35837 - DNA, 201 bp, Homo sapiens
aatcagcattctctgatttccacgcctacttacccaagttggttgactcaacagctgctaagactacagctgtgtgaatcctccacattttttttttttttgcctggaaaagtgtttcagtttgtcattgcttcatcatttcgaattccatattaggttacctttttttttttttttttgcctgaccatagtacttaagaa

SEQ ID NO: 35838 - DNA, 201 bp, Homo sapiens
tttatagcttggaaattcttgctcttttcaaattgctctttaactctggcctgattggaaggtggcagcttttcaaatacaggtcatggcagcgctcaacstggattcctcagttgcagaagactgcttttgctagactgctgaatttacttccaacttttcagatgtttctgaggttgaccctggtgtggttcccactca

SEQ ID NO: 35839 - DNA, 201 bp, Homo sapiens
aaatataagtaaattagcataaatcagcattctctgatttccacgcctacttacccaagttggttgactcaacagctgctaagactacagctgtgtgaatyctccacattttttttttttttgcctggaaaagtgtttcagtttgtcattgcttcatcatttcgaattccatattaggttacctttttttttttttttttg

SEQ ID NO: 35840 - DNA, 201 bp, Homo sapiens
ccctagttttatagcttggaaattcttgctcttttcaaattgctctttaactctggcctgattggaaggtggcagcttttcaaatacaggtcatggcagcrctcaacctggattcctcagttgcagaagactgcttttgctagactgctgaatttacttccaacttttcagatgtttctgaggttgaccctggtgtggttc

SEQ ID NO: 35841 - DNA, 201 bp, Homo sapiens
atttttcaaaagcttttaaaccaatcttaaaatgttttatcctcttagaatcatgtccctagttttatagcttggaaattcttgctcttttcaaattgctstttaactctggcctgattggaaggtggcagcttttcaaatacaggtcatggcagcgctcaacctggattcctcagttgcagaagactgcttttgctagac

SEQ ID NO: 35842 - DNA, 201 bp, Homo sapiens
ttctatttcttgattttatgcattaaatgccttgattatattttatttgaatggtagaagaaattttcaccaccagcattatataagacaaaaaaaaaaaaggctgggcgctgtggctcacgcctgtaatcccagcactttgggaggccaaggtgggcggatcacgaggtcaggagatcgagaccatcctggttaacacag

SEQ ID NO: 35843 - DNA, 201 bp, Homo sapiens; identical to SEQ ID NO: 5555

SEQ ID NO: 35844 - DNA, 201 bp, Homo sapiens
gatggggtctccccgtgttgcccaagctggtgtcaaattcctgacctcaagcaatcctcccacctcggcctcccaaagctctatgattatagatgtgagcygccatgcctggccttaaatttttcaaaagcttttaaaccaatcttaaaatgttttatcctcttagaatcatgtccctagttttatagcttggaaattctt

SEQ ID NO: 35845 - DNA, 201 bp, Homo sapiens
ggattacaggcgcctgccaccatgcctagctaatttttgtatttttagtagagatggggtttcaccatcttggccaggttggtcttgaactcctgacctcrtgatccacccgcctcagcctctcaaaatgctgggattacaggcgtgagccaccgcacccagccggaaatatattggtcttttcagtatgtggaatttcct

SEQ ID NO: 35846 - DNA, 201 bp, Homo sapiens
gaggaataaacacgaccgttagatttcgagtcactgtgtaccttgtggcaagacttggttgaatccaggtggggaagccagtgagcaacaggttgagatasagaagagcaaacagaaggaattagaatgtgggcggcccacccaagatgcttggcagtgaaaggaggagggaataagcaaacttttggcttagaactaagc

SEQ ID NO: 35847 - DNA, 201 bp, Homo sapiens
ccttgtgatccgtccgcctcagcctctcaaagtgctgggattacaggcatgagccaccacacccagccaagtccagctaattaaaaaaaaaataaaaatcrtagagatggggtctccccgtgttgcccaagctggtgtcaaattcctgacctcaagcaatcctcccacctcggcctcccaaagctctatgattatagatgt

SEQ ID NO: 35848 - DNA, 201 bp, Homo sapiens
tctaagggattggggtaaaaaaagaaacagcaaaagaaagagcactgagtagcagaagagttatagaatgcaatgtcttttttcaaataaaaaaaagtaayataataaaaaggggatgagggactaactaaaaattagaggtcaagtaccatgtttgacattgcctcacacataactttacaatgttaatgttagtcctaa

SEQ ID NO: 35849 - DNA, 201 bp, Homo sapiens
gaatctaagggattggggtaaaaaaagaaacagcaaaagaaagagcactgagtagcagaagagttatagaatgcaatgtcttttttcaaataaaaaaaagyaacataataaaaaggggatgagggactaactaaaaattagaggtcaagtaccatgtttgacattgcctcacacataactttacaatgttaatgttagtcc

SEQ ID NO: 35850 - DNA, 201 bp, Homo sapiens
aaactctccacaaatacccaaaactgcctttcaagggcggcattgctgtgactcagaaccactggcacagagtaatgaacaggggcctcattgttgagtcrggacaaaccctgagggcataaggacccaacagggaatcttcaaagtacccagcccagtgacccctccctgtgtaagaacagcccttaggtacacatggag

SEQ ID NO: 35851 - DNA, 201 bp, Homo sapiens
actttttcagtttagcttcaggcttcccagagagctctgacaaggtcacagaggtgatggtagtttcagccaatgtcgtgaaggatgggacatgttcaccmggtaagggaaaactccacacagtcccatccactgccctgagatccgagccagtgctgcctgcctcttcaggaaactggaggagaaactaccatgattgga

SEQ ID NO: 35852 - DNA, 201 bp, Homo sapiens
gcattcccctctatccacagacaccacgtctgtcgtcatttttattttctgcaatcatttcttctcttggtagcttggagaagagttcatccttgttgatragacaatcagtataaaccagaggttctcatttaggggcaattttgctcccccttccccagggacattggacaatgtctgggtctggagacattctggttt

SEQ ID NO: 35853 - DNA, 201 bp, Homo sapiens
aggaaacaacaggtgctggagaggatgtggagaaataggaacacttttacactgttggtgggactgtaaactagttcaaccattgtggaagtcagtgtggmgattcctcagggatctagaactagaaataccatttgacccagccatcccattactgggtatatacccaaaggactataaatcatgctgctataaagacac

SEQ ID NO: 35854 - DNA, 201 bp, Homo sapiens
aagtcaggaaacaacaggtgctggagaggatgtggagaaataggaacacttttacactgttggtgggactgtaaactagttcaaccattgtggaagtcagygtggagattcctcagggatctagaactagaaataccatttgacccagccatcccattactgggtatatacccaaaggactataaatcatgctgctataaa

SEQ ID NO: 35855 - DNA, 201 bp, Homo sapiens
aataaatgctggccaccccagccagtagtggcaacccgctcggtccccttccacgatgtggaagctttgtcctttgcttttcgcaataaatccttgctacygctcacgctttgggtcggtgccatctttaaaagctgtaacactcaggactgcgaaggtccgcagcttcattcttgaagtcagcgagaccacgaacccacc

SEQ ID NO: 35856 - DNA, 201 bp, Homo sapiens
ggatccatttcctcaccttttccagcttctagcagctgcccacattccttggctcatggccccttctcatagcaccttccaaactcttctaaccctacttycatcagcatagatctcccctggagctgatttccctgcctccttcctccgcatataaagacccttgtgattgccttgagttcaccaggataaagatctccc

SEQ ID NO: 35857 - DNA, 201 bp, Homo sapiens
cctcctcctggccttgccacgcccctccaggtactgcctcaacctgcctcagctaagccacgccccacctttctggtcacacccctcgaggcctcaccacrcccctcgaggcctcaccgcgcccctcctgctggtgccttcgggaacttcagctgctggagaccagggtaagcggcccccaagtgcctcctaaaagggttt

SEQ ID NO: 35858 - DNA, 201 bp, Homo sapiens
gtctttctctctctctctctctctctctctctctctctctctcattctctctttctctctctctctccctttctccctttctctctttctctgtctctctytctctctttctttcttgtctcattctgttgccctggctagagtacaatggcacaatcctagctcactgcagcctcaacttctgggctcaggtgatcctcc

SEQ ID NO: 35859 - DNA, 201 bp, Homo sapiens
aacccaaacaccttccactaggccccacctcccagcactgccacgtgggggatcacatttcaacatgagttttagtggggacaaaccatatccaaaccgtmgcagatgtttagcagcatctctggcctctacccactggaagccagtagcaaataccaactaccaatcctgacctagccaggataatcaaagacatctcta

SEQ ID NO: 35860 - DNA, 201 bp, Homo sapiens
cggtctttctctctctctctctctctctctctctctctctctctcattctctctttctctctctctctccctttctccctttctctctttctctgtctctytttctctctttctttcttgtctcattctgttgccctggctagagtacaatggcacaatcctagctcactgcagcctcaacttctgggctcaggtgatcct

SEQ ID NO: 35861 - DNA, 201 bp, Homo sapiens
aaggaaaaaaagccatcatggtgatttgttacgaaaaacatctgcatttcattcagatactgtgatccatccgttccttgctcttttccattgttaaggartatataaactctacgggaatcagggtaagtgacccttcaggtcacgaatcttggtcaacaaatcccataaatctgccaaagcagaataagctgtctcctg

SEQ ID NO: 35862 - DNA, 201 bp, Homo sapiens
gtcggtcggtctttctctctctctctctctctctctctctctctctctctcattctctctttctctctctctctccctttctccctttctctctttctctstctctctttctctctttctttcttgtctcattctgttgccctggctagagtacaatggcacaatcctagctcactgcagcctcaacttctgggctcaggt

SEQ ID NO: 35863 - DNA, 201 bp, Homo sapiens
ttgtggtggtcggtcggtctttctctctctctctctctctctctctctctctctctctcattctctctttctctctctctctccctttctccctttctctytttctctgtctctctttctctctttctttcttgtctcattctgttgccctggctagagtacaatggcacaatcctagctcactgcagcctcaacttctgg

SEQ ID NO: 35864 - DNA, 201 bp, Homo sapiens
aatgctcatcatcactggtcatcagagaaatgcaaatcaatccacaatgagataccatctcacaccagttagaatggcgatcattaaaaagtcaggaaacracatgtgctggagaggatgtggagaaataggaacacttttacactgttggtgggactgtaaactagttcaaccattgtggaagacagtgtggtgattcct

SEQ ID NO: 35865 - DNA, 201 bp, Homo sapiens
catccgttccttgctcttttccattgttaaggagtatataaactctacgggaatcagggtaagtgacccttcaggtcacgaatcttggtcaacaaatcccrtaaatctgccaaagcagaataagctgtctcctgggtaataaggaggtagagatgtgcatctctgcatgagaccacatatttgctctgtgcaccttctccc

SEQ ID NO: 35866 - DNA, 201 bp, Homo sapiens
tttttcttaatttaacctgaacttacttgctcttgtggtggtcggtcggtctttctctctctctctctctctctctctctctctctctctcattctctctytctctctctctctccctttctccctttctctctttctctgtctctctttctctctttctttcttgtctcattctgttgccctggctagagtacaatggca

SEQ ID NO: 35867 - DNA, 201 bp, Homo sapiens
aaatgctcatcatcactggtcatcagagaaatgcaaatcaatccacaatgagataccatctcacaccagttagaatggcgatcattaaaaagtcaggaaaygacatgtgctggagaggatgtggagaaataggaacacttttacactgttggtgggactgtaaactagttcaaccattgtggaagacagtgtggtgattcc

SEQ ID NO: 35868 - DNA, 201 bp, Homo sapiens
ggggcttcctggggagcaagcagaagtaaaacaggaggtatttggtggctcgtgtaccttgtactttgcacagtatttgcgtgtgattaattctgactgcrttgtttgtgtgtcattcctcaggcgtgtatgaacagtctttccattcttaagtaaggtcataggggttgctctgggttgactttggctgggcccgggtgt

SEQ ID NO: 35869 - DNA, 201 bp, Homo sapiens
catttttcttaatttaacctgaacttacttgctcttgtggtggtcggtcggtctttctctctctctctctctctctctctctctctctctctcattctctytttctctctctctctccctttctccctttctctctttctctgtctctctttctctctttctttcttgtctcattctgttgccctggctagagtacaatgg

SEQ ID NO: 35870 - DNA, 201 bp, Homo sapiens
aggatatgaacagacacttctcaaaagaagacatttatgcatccaacagacacatgaaaaaatgctcatcatcactggtcatcagagaaatgcaaatcaawccacaatgagataccatctcacaccagttagaatggcgatcattaaaaagtcaggaaacgacatgtgctggagaggatgtggagaaataggaacactttt

SEQ ID NO: 35871 - DNA, 201 bp, Homo sapiens
cggctaattttttgtattttttagtagagacggggtttcaccgtgttagccaggatggtctcgatctcctgacctcgtgatccgcccgcctgggcctcccraagtgctgggattacaggcgtgagccaccgcgcccggccggcttacatcttaatgagcccacagctgcctgttgacctggtgtcatcacgagggtgatca

SEQ ID NO: 35872 - DNA, 201 bp, Homo sapiens
aaggatatgaacagacacttctcaaaagaagacatttatgcatccaacagacacatgaaaaaatgctcatcatcactggtcatcagagaaatgcaaatcaatccacaatgagataccatctcacaccagttagaatggcgatcattaaaaagtcaggaaacgacatgtgctggagaggatgtggagaaataggaacacttt

SEQ ID NO: 35873 - DNA, 201 bp, Homo sapiens
catcatgggccaagacagtgtcaagatgacacaggcttccacaccgtcaccaggctggggctttctgtgtggattcaagaaatttgtggtttttcttttcytttttttttttttttttcttgagacagagttttgctctgtcacccaggctggagtgcaatggcatgatcatgattcactacagcctcgacttcccacgtt

SEQ ID NO: 35874 - DNA, 201 bp, Homo sapiens
cttggtgtgtgtagggcacagcttttctgaaaggcagaaggattctttttatgattttaccacgtatcatttccttttttttttttttgtattggaagttyactttctatcttgctttgcttttttaattgctttttttggcgctttaacaaaatggacaagtcgtgaggatttagacctctctgtcaagggggcagatgt

SEQ ID NO: 35875 - DNA, 201 bp, Homo sapiens
aatttgaagagcaccatcgccaccactgacaccaaaactgccaccctcttcttggctctgggaagtcatccactcccctcttcctgcgcaattaggaactycctcctttccccttctggaggtaagtccagacgtcttttccagatacctttaccttctaaccccaatttagggagagagtcttcagagtggcctctgtag

SEQ ID NO: 35876 - DNA, 201 bp, Homo sapiens
ggccgtgactttagaacatccggcctgacattttggtggtgaaaaagtgtttttattaatagactctaaaaatatttttatataaacaaaaattaaatatatgctaaatttttcaggaatgcaattaccatttcaattgagaggatactgtcctttgttttgtttagaactttactatacagtaatgtctctgctcatatc

SEQ ID NO: 35877 - DNA, 201 bp, Homo sapiens
gcagaaacacaaagggatttataaggcatttcagttttgatgtcctttgaaaaatgaaagtcttttcagaaatgcaaaagacaaaatgacttagaattccrtctcgttctgcccggtttgagggcatcccttcctattccttagatagctgttaataagaatcctgaggaaaactgggtttgaatttaaaaacaaaaaatt

SEQ ID NO: 35878 - DNA, 201 bp, Homo sapiens
ccgtctcttggagctagcattcccctctatccacagacaccacgtctgtcgtcatttttattttctgcaatcatttcttctcttggtagcttggagaagarttcatccttgttgatgagacaatcagtataaaccagaggttctcatttaggggcaattttgctcccccttccccagggacattggacaatgtctgggtct

SEQ ID NO: 35879 - DNA, 201 bp, Homo sapiens
cttccaagtactagaatataagtctccttgtggagcatgttaggttgaattactggtgagccattcagaaggcagagagaagaaacttgggcctaaaactrtgaagagatgggctgggcacagtgattcacacctataatcccagcactttgggaggccaaggtgggtagatcacttgaggtcaggagttagagaccagtc

SEQ ID NO: 35880 - DNA, 201 bp, Homo sapiens
attcattcaacaaatatttattgagaaactactatgtaacaggtagtctcataggtactaaggatacagtagaaaacaacaacaaacttaaaaaaaaaaaatcccttagccccagttacttgagaagattgcttgaagccagtagtttgaggctgcagtgagctatgatcataccactgcactccagcctgggtgacagag

SEQ ID NO: 35881 - DNA, 201 bp, Homo sapiens
cctctttccttcccctctccctcctcgttctcctttttgttcttctccttcttcttcttccaagtactagaatataagtctccttgtggagcatgttaggwtgaattactggtgagccattcagaaggcagagagaagaaacttgggcctaaaactgtgaagagatgggctgggcacagtgattcacacctataatcccag

SEQ ID NO: 35882 - DNA, 201 bp, Homo sapiens
gcacttttctcataggaacgccccatgtgtctggtgggaagatgctcagtgctctggagtccacggtgcctcccagccagcctccacctgtgggcacctcrgccatccacatgagcctgcttgagatgaggcggagcgtggcggaactcaggctccagctccagcagatgcggcagctccaggtattcctcatgcacggcg

SEQ ID NO: 35883 - DNA, 201 bp, Homo sapiens
ttttagaattaccagtcatctgcattgggatgggatgcatagcttagactttcctttgtggccttctgagttctctgatgcacttttctcataggaacgcmccatgtgtctggtgggaagatgctcagtgctctggagtccacggtgcctcccagccagcctccacctgtgggcacctcggccatccacatgagcctgctt

SEQ ID NO: 35884 - DNA, 201 bp, Homo sapiens
agtgactaggagaccatatgggaagctactgtatctgtcaggcaaaaggcagtgaggcctgaaccacatagtagaagtaagaaagaagtcaaatgcaaaaygtcctatggtattcaccgtctaagactagctctcaaaattcttctttaaaacaccttttgaaatatatatccttttggctgggtgcagtggctcatgcct

SEQ ID NO: 35885 - DNA, 201 bp, Homo sapiens
tactaaaaataaaaaattagccagctgtggtggcatgcctctgtagtctcagctactcaggaggctgaagcaggaggatcgtttgagcccaggagttcaargctgcagtgagctatgactgcacctctgcattccagcatggatatcagagcaagactcaatctctaaaacaagaaagaagaaagaaagaaatggtttgtt

SEQ ID NO: 35886 - DNA, 201 bp, Homo sapiens
attaaagtcctatgttttaagcatctgtgatttcatggtacttggtacatggaaccatgtgaacgaaaaggacacagatcctctttgaactgatactgacrtatttcatagccaaatcaccacgtgttgagttcccattctacaccatgcggtatttcatgtaaccctcaagaatggccaaggaaagtggattccccatca

SEQ ID NO: 35887 - DNA, 201 bp, Homo sapiens
tagtttattggcaacaacctcaaggcctttgtactttctgttcttttttgcctgatatgttcttctcctagatgtctgtgggagagtggcttctccctcatcaatctttattcaaacaccatcttatctgaagaagggctctctggccacaatctctgaaatatcctttccttccctgttaaatttatctctaacctgcct

SEQ ID NO: 35888 - DNA, 201 bp, Homo sapiens
ccattccgagcacctataactacagaaaagcaaacaacttgagtttctattatgatttttgaggcatggtagacttagcagaaccttctgtgtacaggagkaagcccacatggcaactggcagcttgtgtctgctgttaatcatttcacatcactttctcattttatgaggattcaatgttactatgttggtaacttttag

SEQ ID NO: 35889 - DNA, 201 bp, Homo sapiens
taattgagattttcatcttgtgcaaacacagggcatttttggcagttggagaacaaagcaatccaaggtaaacagctgtaggctttggattggtgtgtaasaaatatgcgtggcccgcatgtcttagaaatgtaattaaaggaacgatttagttatagtccacttttttggggggatgtggttttgtggagtaacatgtcc

SEQ ID NO: 35890 - DNA, 201 bp, Homo sapiens
aaggccagacctgagtcaggtcctgcctcctaactcctttctcttccttcagtgggcaacaaagatggccacagaagcagagaggggttcctcccaggtayatatttaccagtacttgtaccttgcgcttttaaaaactctttagccagggatagtggtgcatacctataatcccagctacttgggaggctgaggtgggag

SEQ ID NO: 35891 - DNA, 201 bp, Homo sapiens
ctattctatacctagagcagctacattcgacaaattagcatagagttacactaggaagaaaaattttgcccattccgagcacctataactacagaaaagcmaacaacttgagtttctattatgatttttgaggcatggtagacttagcagaaccttctgtgtacaggaggaagcccacatggcaactggcagcttgtgtct

SEQ ID NO: 35892 - DNA, 201 bp, Homo sapiens
ttagccaaagatctggaactgggactgatgcttcctgaaaacagattcctgcctggagtgcatgaccctgcttgagaaagtgcagagggacagtgacaagrcgggataacgtagcagtcccagcgacttgggcacccatcctgatgcttcccctaggccccagtgttttattttctggtaaggccagacctgagtcaggtc

SEQ ID NO: 35893 - DNA, 201 bp, Homo sapiens
aactcagatcaaagtcaacctcagggaatcagagaacacagaagctgaaagatgtatccagccttccctaaatggcagatgaggacactgaggccaggaarctcaggtgacttatccaggagcgtgccagtacttagccaaagatctggaactgggactgatgcttcctgaaaacagattcctgcctggagtgcatgaccc

SEQ ID NO: 35894 - DNA, 201 bp, Homo sapiens
ttagttgcattaccacctagtgaagtctaccaagtcttgatttgagaatcaaaacaaactcagatcaaagtcaacctcagggaatcagagaacacagaagytgaaagatgtatccagccttccctaaatggcagatgaggacactgaggccaggaagctcaggtgacttatccaggagcgtgccagtacttagccaaagat

SEQ ID NO: 35895 - DNA, 201 bp, Homo sapiens
ttgacgcttccaagagctgagccttgtcgaggaaaaggctcaagtgacagatgtgctgaagtgcctttgtgtggaaagtggcgttaggtggctctgagtgytggtgacaggagagcaggtgcctcgaggtaggaggggaggcagacaggatgatagagcattgggcattgggtggaaggcacaaggcaggaaattgagaca

SEQ ID NO: 35896 - DNA, 201 bp, Homo sapiens
gactctgtctccaaagaaaaaaaaaaaagaaaagaaaagaaaaaattatccaggcatagtggtactcacctgtagtcccagctgctcgggaggttgaagcrggaggatcacctgagcccaggaggttgaggctgcagtgagccatgatcaggccactgcactccagcctgggtgacagagtgagactctgtctcaaaaaga

SEQ ID NO: 35897 - DNA, 201 bp, Homo sapiens
atggctggaatggcagagttgttgcttctcccccaggtgtggggcttgacgcttccaagagctgagccttgtcgaggaaaaggctcaagtgacagatgtgstgaagtgcctttgtgtggaaagtggcgttaggtggctctgagtgctggtgacaggagagcaggtgcctcgaggtaggaggggaggcagacaggatgatag

SEQ ID NO: 35898 - DNA, 201 bp, Homo sapiens
ctgggaggtagagattgaagtgagccaagattgtgccactgcaatccagcctgggcaacacagcgggactctgtctccaaagaaaaaaaaaaaagaaaagraaagaaaaaattatccaggcatagtggtactcacctgtagtcccagctgctcgggaggttgaagcgggaggatcacctgagcccaggaggttgaggctgc

SEQ ID NO: 35899 - DNA, 201 bp, Homo sapiens
ttcactcagacacagcacagtgtgatttctgtggccaggtggatttcctgggtggccgatgaggctcctcctgccttgtcactatggcatcccccacggcsttggagggttctgctggatcctttgtattcaactggccaaagagtaaagagagagagaacgtggaaggttatttgggaggtctaggggccccaacaaaag

SEQ ID NO: 35900 - DNA, 201 bp, Homo sapiens
agaaagatcgattgagcccaggagtttgagaccagcctgggtaatatagcgagaccccgcctctacaaataattaaaaaaaaaaaaagaaataggattacstgaaaaggagccagtcttgcaaacagccgggcaaagagtgagcaagagttttttgggaagaggtgcacacagcaagtgctgagacccagaggaaggaagg

SEQ ID NO: 35901 - DNA, 201 bp, Homo sapiens
aacccgggaggcggagcctgcagtgagccaagatcacgccactgcactccagcctgggcaacagagcgagactctgtctcaaaaaaaaaaaaaaaaaaaaagacatctaccctaaggtagatacactgaaaatcaaaaagcaaaatctcgtaagaagaggaagcaaattttaaaatataggtactatgattagcttggaca

SEQ ID NO: 35902 - DNA, 201 bp, Homo sapiens
  misc_feature (101)..(101): n is a, c, g, or t
gatttttaaaatcctgttcagttctgggtgaatatgatgctgtagagaagcatggcttcatttttagttctcccggtgagcacgagtgccgcaagggagancaacatctctgatgctaacatcacccataacgttcatttctatcattgcattctctcttgtgtctgcctgtgtatctgttttacccaatgacaatgtgat

SEQ ID NO: 35903 - DNA, 201 bp, Homo sapiens
tgagaactggttctactacttactgtttgtgtggtctgggacaagtcacttggtccaagtaagcttctgcatctgttaaaaaaaaaaaaaaaaaaaaaagkggcggggagctaagaattcctgcccagcaagttggtttgcagatcagaggcagtgtgtgagaagtacttaacccagcacctggcatatagtagatgttca

SEQ ID NO: 35904 - DNA, 201 bp, Homo sapiens
tttgctccacagttcggaggctttgagcaattgtgtgtttctcttgcctgcctgccttccttcctttctttctttcttttttcttcctttcttttttttttgttttgttttgacagtgtttctctctgttgcccaagctggagtacgttggtgtgatcatagctcactgtactcactgcaccctcgacctcctgaggtcaa

SEQ ID NO: 35905 - DNA, 201 bp, Homo sapiens
ttgtcgcccaggctagggtgcaatggcgcagtcttggctcgctgcaacctccgcctcccaggttcaagtcattcttctgcctcagcctcctgagtagctgrgattacaggcgcccaccaccacgcccagctaatttttgtatttttagtaaagatggggttttgccatgttggccaggctggtctcgaactcctgagctca

SEQ ID NO: 35906 - DNA, 201 bp, Homo sapiens
aacactcaactctggtctcacccacttttttttttttttttgagacagtgttttgctcttgtcgcccaggctagggtgcaatggcgcagtcttggctcgcygcaacctccgcctcccaggttcaagtcattcttctgcctcagcctcctgagtagctgggattacaggcgcccaccaccacgcccagctaatttttgtatt

SEQ ID NO: 35907 - DNA, 201 bp, Homo sapiens
ggaggcggagcttgcaggttcgggccactgcaagatcgggccactgcactccagcctgggcgacacagcgagactctgtctcaaaaaaaaaaaaaaaaaaagaaagaaagaaaaagaaatagaatggctgtatcaaaaagatatgcaaaattgtcttcttgttcatttgttaaaatagagcatctttttgagaatgcaatt

SEQ ID NO: 35908 - DNA, 201 bp, Homo sapiens
gggaggcggagcttgcaggttcgggccactgcaagatcgggccactgcactccagcctgggcgacacagcgagactctgtctcaaaaaaaaaaaaaaaaaaagaaagaaagaaaaagaaatagaatggctgtatcaaaaagatatgcaaaattgtcttcttgttcatttgttaaaatagagcatctttttgagaatgcaat

SEQ ID NO: 35909 - DNA, 201 bp, Homo sapiens
agggaggcggagcttgcaggttcgggccactgcaagatcgggccactgcactccagcctgggcgacacagcgagactctgtctcaaaaaaaaaaaaaaaaaaagaaagaaagaaaaagaaatagaatggctgtatcaaaaagatatgcaaaattgtcttcttgttcatttgttaaaatagagcatctttttgagaatgcaa

SEQ ID NO: 35910 - DNA, 201 bp, Homo sapiens
cgtgaaccagggaggcggagcttgcaggttcgggccactgcaagatcgggccactgcactccagcctgggcgacacagcgagactctgtctcaaaaaaaaraaaaaaaaaagaaagaaagaaaaagaaatagaatggctgtatcaaaaagatatgcaaaattgtcttcttgttcatttgttaaaatagagcatctttttga

SEQ ID NO: 35911 - DNA, 201 bp, Homo sapiens
agaatggctgggccaggggcgatggctcacgcctgtaatcccagccctttgggaggccgaggcgggaagatcacgaggtcaggagatcgagaccatccggrctaacatggtgaaaccccgtctctactaaaaatacaaaaaattagccaggcgtggtggcgggcgcctgtagtcccagctactcggaaggctgaggcagga

SEQ ID NO: 35912 - DNA, 201 bp, Homo sapiens
tctgcatgagccactttggagcaggccaaaacactgtggagaagcacattacagccacagtggcggtgtaaagggtcagactgaccactggcttctggaamgtcttcatttctgaaagactgtcaggtagaagatggatgagagttactctgtgaggccggaaacctagaactcagaccattgtgtgcagaccagggagag

SEQ ID NO: 35913 - DNA, 201 bp, Homo sapiens
aaatcgaacccaggcagtctttccccagaggccagttcatcaccatgcagtgctgatgttgggacctaatggtggttctgcttgtggcctgtgttgaaatrttttatctttattcagagaaaacagaaggcatgatgtggctttaagcaggtggtgacatggtcagattgcatttcccctcaatttacatggataatggac

SEQ ID NO: 35914 - DNA, 201 bp, Homo sapiens
cctctcctcctcttctagtggagtaagtctagttgtgtttaaacattatgccccgttgtattttccaatatttcttatccttctcagaaacgttatattgygattcattcatagagcaaatacagttgccccttgaacaacatgggggttggggtgctgacccctcatgcagtaagaaatccataacttttggctccccca

SEQ ID NO: 35915 - DNA, 201 bp, Homo sapiens
cattaccctaagagcaaaaccagacaaaaatattataagggaagaaaaccacaaaccaatatccctcacgaaaatatatgtaacaaatccttaacaaaacrttagtaactgaatccagcaatatataaaaagaataatacattatcctggggttttattccaggaatgcaagattgttttaatacgaaaaaaatcaacgta

SEQ ID NO: 35916 - DNA, 201 bp, Homo sapiens
tgccttcgaaatatgtaacagattcctccaaattgatttttcaggacccagtaaacttgaactgagattgtatttttacactattctatacctagagcagstacattcgacaaattagcatagagttacactaggaagaaaaattttgcccattccgagcacctataactacagaaaagcaaacaacttgagtttctatta

SEQ ID NO: 35917 - DNA, 201 bp, Homo sapiens
aaagcaaaaagcgaagaggccttgttgagcacctgggcattttgtagagatcggagaaggactgtgcctcagtcttaggactaaactagccccagaggaargactacccttgatttaacctaactgcttaaaaataagcctttaaaggacaaagctgatccacaagtaactggactgtctgccagagaaagtccaaaatct

SEQ ID NO: 35918 - DNA, 201 bp, Homo sapiens
tttctgtctggaggcacttttcagatcttggtgcaggaaggaaaaacccaagcatggcactgacagtgagttgaggagataagaccaaagtttagagagakctgaaacagctagaactggtggactggagaaccaaacacaagaaagctctgcagagaaagaagtacatcaataaatgggtctgttattaaatattaagcc

SEQ ID NO: 35919 - DNA, 201 bp, Homo sapiens; identical to SEQ ID NO: 5583

SEQ ID NO: 35920 - DNA, 201 bp, Homo sapiens; identical to SEQ ID NO: 29779

SEQ ID NO: 35921 - DNA, 201 bp, Homo sapiens; identical to SEQ ID NO: 30328

SEQ ID NO: 35922 - DNA, 201 bp, Homo sapiens; identical to SEQ ID NO: 29781

SEQ ID NO: 35923 - DNA, 201 bp, Homo sapiens; identical to SEQ ID NO: 29782

SEQ ID NO: 35924 - DNA, 201 bp, Homo sapiens; identical to SEQ ID NO: 29442

SEQ ID NO: 35925 - DNA, 201 bp, Homo sapiens; identical to SEQ ID NO: 29445

SEQ ID NO: 35926 - DNA, 201 bp, Homo sapiens; identical to SEQ ID NO: 29446

SEQ ID NO: 35927 - DNA, 201 bp, Homo sapiens; identical to SEQ ID NO: 29447

SEQ ID NO: 35928 - DNA, 201 bp, Homo sapiens; identical to SEQ ID NO: 29166

SEQ ID NO: 35929 - DNA, 201 bp, Homo sapiens; identical to SEQ ID NO: 29240

SEQ ID NO: 35930 - DNA, 201 bp, Homo sapiens; identical to SEQ ID NO: 5584

SEQ ID NO: 35931 - DNA, 201 bp, Homo sapiens; identical to SEQ ID NO: 29345

SEQ ID NO: 35932 - DNA, 201 bp, Homo sapiens; identical to SEQ ID NO: 30334

SEQ ID NO: 35933 - DNA, 201 bp, Homo sapiens; identical to SEQ ID NO: 29347

SEQ ID NO: 35934 - DNA, 201 bp, Homo sapiens; identical to SEQ ID NO: 29348

SEQ ID NO: 35935 - DNA, 201 bp, Homo sapiens; identical to SEQ ID NO: 29242

SEQ ID NO: 35936 - DNA, 201 bp, Homo sapiens; identical to SEQ ID NO: 29183

SEQ ID NO: 35937 - DNA, 201 bp, Homo sapiens; identical to SEQ ID NO: 29188

SEQ ID NO: 35938 - DNA, 201 bp, Homo sapiens; identical to SEQ ID NO: 29192

SEQ ID NO: 35939 - DNA, 201 bp, Homo sapiens; identical to SEQ ID NO: 5589

SEQ ID NO: 35940 - DNA, 201 bp, Homo sapiens; identical to SEQ ID NO: 29763

SEQ ID NO: 35941 - DNA, 201 bp, Homo sapiens; identical to SEQ ID NO: 5591

SEQ ID NO: 35942 - DNA, 201 bp, Homo sapiens; identical to SEQ ID NO: 29172

SEQ ID NO: 35943 - DNA, 201 bp, Homo sapiens; identical to SEQ ID NO: 29174

SEQ ID NO: 35944 - DNA, 201 bp, Homo sapiens; identical to SEQ ID NO: 5586

SEQ ID NO: 35945 - DNA, 201 bp, Homo sapiens; identical to SEQ ID NO: 5588

SEQ ID NO: 35946 - DNA, 201 bp, Homo sapiens; identical to SEQ ID NO: 29331

SEQ ID NO: 35947 - DNA, 201 bp, Homo sapiens; identical to SEQ ID NO: 29332

SEQ ID NO: 35948 - DNA, 201 bp, Homo sapiens; identical to SEQ ID NO: 29479

SEQ ID NO: 35949 - DNA, 201 bp, Homo sapiens; identical to SEQ ID NO: 30215

SEQ ID NO: 35950 - DNA, 201 bp, Homo sapiens; identical to SEQ ID NO: 29075

SEQ ID NO: 35951 - DNA, 201 bp, Homo sapiens; identical to SEQ ID NO: 5590

SEQ ID NO: 35952 - DNA, 201 bp, Homo sapiens; identical to SEQ ID NO: 29528

SEQ ID NO: 35953 - DNA, 201 bp, Homo sapiens; identical to SEQ ID NO: 29529

SEQ ID NO: 35954 - DNA, 201 bp, Homo sapiens
ctcatggccaagattaagaatatgtacataatggactggcatatattttatttctcatgttaaagcctcttaccttgaaattaaaaaatttttaaaactgrtaaaacttagggcaacattaattaatgtatactcttaactgaattgttatactttttgaaaatcccgtgacttgcttgtttctctccactccaactaaat

SEQ ID NO: 35955 - DNA, 201 bp, Homo sapiens
ttatatagcatttatatcacattaggtattgtaagtagagatcgtgacgttttgatcagccacagactgcatatacaacaatggtcccttaagagtataayggagttggaaaaattcctatcatctagtaacgtcttgatgatcttgaccctgtgtaaaccctatattaatgtgtgtgtttgtgtcttaatttttaacaaa

SEQ ID NO: 35956 - DNA, 201 bp, Homo sapiens
tcatttcctatgacaacagtgccttcttcgggaatacttcctgaaggacctgcctgaggttgttttacagttaacttttaaaaaaatattaagtagaagcygtatactctaagataacgatacgaagtatagtaaatatataaaccagtaacacagtcatttattattaagtattaggtactgtacataattgtatgtgct

SEQ ID NO: 35957 - DNA, 201 bp, Homo sapiens
ctgaggttgttttacagttaacttttaaaaaaatattaagtagaagccgtatactctaagataacgatacgaagtatagtaaatatataaaccagtaacayagtcatttattattaagtattaggtactgtacataattgtatgtgctatacttttatactgccgacagcacagtaggtttgtttacactgacatcaccac

SEQ ID NO: 35958 - DNA, 201 bp, Homo sapiens
cgatacgaagtatagtaaatatataaaccagtaacacagtcatttattattaagtattaggtactgtacataattgtatgtgctatacttttatactgccracagcacagtaggtttgtttacactgacatcaccacatacacgtgagtaatgctttacattagtacttaaaacagttacaatatcacaggtaataggaat

SEQ ID NO: 35959 - DNA, 201 bp, Homo sapiens
ggtcccagctactcgggaggctgagacaggagaattgcttgaacttgggaggcagaggttggcagtgagctgagatggcaccactgtactccagcccaggygacaaagtgagactccgtctcaaaaaaaaaaaaaaaaaaaaaaagatgcaagacaaagtcctctttactctttgctcttctgttcttaagcagaaggaag

SEQ ID NO: 35960 - DNA, 201 bp, Homo sapiens
tgagtcttattgggaagctgctgatcaccagtttcaggcttttctatctagtggtagactgccttttcctggcaccaggtgtgaccaattattattttagmgagacagtttaacaaccacctgatcatcacctgatgtggccattcctggttgggggtgtcctcctgtcctgcttatgtctgcctgactgcctactgtaac

SEQ ID NO: 35961 - DNA, 201 bp, Homo sapiens
gcctcatggctctgcctggtgctctgttctagtgtggctgagctagtatccaagatgcaagacaatgtcggggctgggcatggtggcttacgcctgtaatytcagcactttgggaggccaaggtgggcagatcacctgaggtcaggagtttgagaccagcctggccaacatggtgaaaccctgtctctactacaaatacaa

SEQ ID NO: 35962 - DNA, 201 bp, Homo sapiens
caccttgtcctcctaaaggatattttcatagtattttagaatcagtttttcaatttcgactcacttgtaaagatacacatgcacgcgcacgcgcgcgcgckctctctcgctctctctctcgctctctctctcgctctctttctctctctccctcctctctctctcctctctcttctcttgtctcctctctctctctctttt

SEQ ID NO: 35963 - DNA, 201 bp, Homo sapiens
gacctcaagtgatctgcccaccttgtcctcctaaaggatattttcatagtattttagaatcagtttttcaatttcgactcacttgtaaagatacacatgcrcgcgcacgcgcgcgcgctctctctcgctctctctctcgctctctctctcgctctctttctctctctccctcctctctctctcctctctcttctcttgtct

SEQ ID NO: 35964 - DNA, 201 bp, Homo sapiens
ttggagaaatgtttattaaaacttttgcccatttttgaattggggttttttgttgttgacttgtaggagttctttgtatattctggtattaattccttagyagatacatgatttgcaaatacttttcccattctatgggttgtcttttctctctctccatatgaattttaggatgagtttttctatttctgtaatgccatt

SEQ ID NO: 35965 - DNA, 201 bp, Homo sapiens
gatttttaaaaaagttttcttccttttttttttgagacagagtctcactcaatcgcccaggctggagtgcagtggcataatcttggctcactgcaacctcygcctcctgggttctagtgattctcctgcctcagcctcccaagtagctgggattacaggcgcccatttactaccatgcccatttaatttttgtatttttgg

SEQ ID NO: 35966 - DNA, 201 bp, Homo sapiens
gccccatttttagttctagtaggtctgtatgtatctcccaccttgtcaaacttgtgtgtaattttttttaaaaaaggtttcacccaccttgtcaaacttgygtgtgatttttaaaaaagttttcttccttttttttttgagacagagtctcactcaatcgcccaggctggagtgcagtggcataatcttggctcactgcaa

SEQ ID NO: 35967 - DNA, 201 bp, Homo sapiens
ctgcctcagccacccgagtagttgggatttcagacatgcaccaccacacccagctaattttttttttttttttttttttgtagagactgggttatgacctsttggccaggttggtctcaaactcctgacctcaagtgattgacccacctcagcctcccaaagtgctgggacaaggaacttaaatagacatttctccaaaga

SEQ ID NO: 35968 - DNA, 201 bp, Homo sapiens
ggactgcaggcacaagccaccgtgtccggccgatttttatatttgtatttttgtagagacagagttttgccacgttgcccacgctggtcttgaactcttaractcaagcaatccgtctgctttggcctcccaaagtattgggatacaggcgtgaaccaccacacccggccccatttttagttctagtaggtctgtatgtat

SEQ ID NO: 35969 - DNA, 201 bp, Homo sapiens
gatctcggctcacttatcctgcctcagccacccgagtagttgggatttcagacatgcaccaccacacccagctaattttttttttttttttttttttgtaragactgggttatgacctcttggccaggttggtctcaaactcctgacctcaagtgattgacccacctcagcctcccaaagtgctgggacaaggaacttaaa

SEQ ID NO: 35970 - DNA, 201 bp, Homo sapiens
cgctaataatgtttgctgtaagtttttaataaataatttttatcaggttaaagaagttaccttctattcctattttgttaataccttttatttagaatggrtactgactttattaaatgtgcccttctgtgctctattgatatgattatatgattcttgtcctttaataagttggtgtggtgaactacgtttgtagacttt

SEQ ID NO: 35971 - DNA, 201 bp, Homo sapiens
ctgtttagtatttcattgtatatcagcaataaaaaattacccagtctgttgttggtaaatatttgggttatttccagatgttgactactgtgagtaaagtwcgtgcaaatatacttatctatttattttggtggtcctatgtactatttctctcagatatatacctgggagtacaatttctgggccatatagtagaggatt

SEQ ID NO: 35972 - DNA, 201 bp, Homo sapiens
ataaaatgtatttactgttttccaaatgatatagtacttctgtaatactgtttttgtatcataagttcaattaacagaaataaatatatcactaaaagatytgagtttatacttgttctcaatacaaaatattaaattaccttctactttgttttcaaaatacttctagctagaggataaagaaaattgatagaaactgga

SEQ ID NO: 35973 - DNA, 201 bp, Homo sapiens
acttattccttgctgggcacggtggcccatgcctgtaatctgagcactttgggaggctgaggcgggcggatcacctgaggtcaggagttcgagaccagccyggccaatattgtaaaaccccatctctactgaaaatacaaaaattagccagacacagtggcatgtgcctgtaatcccagctactccagaggctgaggctag

SEQ ID NO: 35974 - DNA, 201 bp, Homo sapiens
acactgggaatcacatttcaacctgagattcgaaggagacagacattgaagtcatatcaccatctgttctctttcttactcttttttttcatatattcatygtttaccccgtcacggatggctaataagttcaggccaagttaaggctgtcccttggcaagaacagggacaattaggccaaacctggagaaattgtaacag

SEQ ID NO: 35975 - DNA, 201 bp, Homo sapiens
taaaattgtgttgcagtctaatacatccatgagaaatggacatacttaggcctagtatatgtaatgaagcctccttgatgaggcctgaaggatagtttgtttttaaaaaaaaaaaaaaaaaaaaaaaacggaattacccattcttgctaaattgaaagataggtaggatatgagtagcaccttaagagcaaattcatatgg

SEQ ID NO: 35976 - DNA, 201 bp, Homo sapiens
atcatatcataatcaaatttttaaaaactccagtcattgccaccatgctttgtatactgtagacgtttgctaacgcattttaaaggaacaaatgaatgagygtgaaagaaacatgagtttacttggtgggaattgctgaagagctctctggtgccatgaaatctgcttttattttttatatctttgtgttaaaatatatat

SEQ ID NO: 35977 - DNA, 201 bp, Homo sapiens
taatacatccatgagaaatggacatacttaggcctagtatatgtaatgaagcctccttgatgaggcctgaaggatagtttgtttttaaaaaaaaaaaaaamaaaaaaaaacggaattacccattcttgctaaattgaaagataggtaggatatgagtagcaccttaagagcaaattcatatggtaggtaaatatttaatgt

SEQ ID NO: 35978 - DNA, 201 bp, Homo sapiens
ggggggtgggaggtggtatatgtatgtgtgttgggagcaggggagattataaggaattggctcaagtgattatataggctgacaagtcccgagatctgcaytgggcaagctggagacccaggagagtatattttgtagttccagtcccaaagcttggcaagcttaacattcaggaaaagcttctgcctcgtttcaggtctg

SEQ ID NO: 35979 - DNA, 201 bp, Homo sapiens
aaaagcagataaaggcaaaaatacctccccttgttatgtttgcattctgttttgaggagacagacaataaatcacatacaaagtagggtcatccactgagagttaggaaggtagaggagatattagatatttgacaagaaaaagagaaaatgtgaaatggtcagtatggagacgaaaagagtaaatgagctagggaaatag

SEQ ID NO: 35980 - DNA, 201 bp, Homo sapiens
caaaaaaggaagaaaggagtggtaataaatagcaggtgagaccatttatcagaaaaaaatgtagctctgaaataaagtagtatgcaaatattttttcatgaaaaaaaaattttttttttttttttttgagatgaagtctcactctgctgcccaggctggagtgcagtggcactatctctgctcgttgcaacctccgcctcc

SEQ ID NO: 35981 - DNA, 201 bp, Homo sapiens
aaagcagataaaggcaaaaatacctccccttgttatgtttgcattctgttttgaggagacagacaataaatcacatacaaagtagggtcatccactgagagttaggaaggtagaggagatattagatatttgacaagaaaaagagaaaatgtgaaatggtcagtatggagacgaaaagagtaaatgagctagggaaatagt

SEQ ID NO: 35982 - DNA, 201 bp, Homo sapiens
cgtgatctcggctcacttatcctgcctcagccacccgagtagttgggatttcagacatgcaccaccacacccagctaattttttttttttttttttttttktagagactgggttatgacctcttggccaggttggtctcaaactcctgacctcaagtgattgacccacctcagcctcccaaagtgctgggacaaggaactt

SEQ ID NO: 35983 - DNA, 201 bp, Homo sapiens
aagcagataaaggcaaaaatacctccccttgttatgtttgcattctgttttgaggagacagacaataaatcacatacaaagtagggtcatccactgagagttaggaaggtagaggagatattagatatttgacaagaaaaagagaaaatgtgaaatggtcagtatggagacgaaaagagtaaatgagctagggaaatagtt

SEQ ID NO: 35984 - DNA, 201 bp, Homo sapiens
ctattcagaatagcatgtcatttatctaccagcgcaacagatctgattagtcccttatatgcccttgatttttgtcaagggcagtagcgtagtgattattrtatctttttcaattgttgtaatgaatataaagtcttttgcaatttgtcttttatattcaaaattattttaatcatagagtgtgcttgaaatgaacttttt

SEQ ID NO: 35985 - DNA, 201 bp, Homo sapiens
agcagataaaggcaaaaatacctccccttgttatgtttgcattctgttttgaggagacagacaataaatcacatacaaagtagggtcatccactgagagttaggaaggtagaggagatattagatatttgacaagaaaaagagaaaatgtgaaatggtcagtatggagacgaaaagagtaaatgagctagggaaatagttt

SEQ ID NO: 35986 - DNA, 201 bp, Homo sapiens
cttacaaatgtcagttctccatcttaatgcaaaatataaaatctggattcctcttcctttacctcttatcaaccatgtctctgctttacattatagaaaawttacttcaactgttgactatattttgtttatgtttctcatactgttgtttcttgaatccattccagtcaggtgtgtgcccccatcacttcatgcaaacta

SEQ ID NO: 35987 - DNA, 201 bp, Homo sapiens
tctaagctattacttctaagttggtgtgtccttctctgagctagcagtgtcatagtagtactgtgacttactagtcaagtttaggccagcaagtcacatamtatgtttaggccttataatattaatgagggttaataatatgtaccttatggattttatgataactaaattacgtattagtttggaagctaaccgtgtcta

SEQ ID NO: 35988 - DNA, 201 bp, Homo sapiens
gtggggaaacccagcaaggcctgtgtgtctaaagtcttcttggcctctctgtgcagcattccttccttccaggtatggggcaggaccctctctggaacggkggtgtgatgacctacaatgaaacaggtaaaatctgatagtttttttgttgttgttgtttctttgtttgagacagagtctcgctgtgtcccccaggctgga

SEQ ID NO: 35989 - DNA, 201 bp, Homo sapiens
caattcttaagccaagtagagaatgttcacagaaccaagtcactgtaggttgtaagggaaaagcaaaggtagcaggagaattcagagtacttgatatccamattcagtgagcaaaagggattattataataagacaggcatttttgggtagatgatgttgagtaatcaaatttgacaatacctgtctgaacacctcgaatt

SEQ ID NO: 35990 - DNA, 201 bp, Homo sapiens
aattgcttgaatcctggaggtggaggttgcagtgaggtgagatcacaccactgcactccagcctgggcaacagagcgagactctgtctcaaaaaaaaaaaraaaaactcaattattctgttaaaaaattttaatatgaaagatactggtgcttaaaggtgaataatactgtttttaaccttcatgtgtctgtgattgtaaa

SEQ ID NO: 35991 - DNA, 201 bp, Homo sapiens
agtgatttcttggggatgacacaaaattacaggcaacgaaagaaaaaaatagataaattcggcaatatctccattaaaacttctgtacatcaaagggcackatcagagtgaaaaggcaacatggaatgagagaaaatatttgcaaatcatatgtctaataacaggttagtctctaaaatatgtaaaaactcctacaagtca

SEQ ID NO: 35992 - DNA, 201 bp, Homo sapiens
atgcctcagccacacgagtagctgggactacaggtgcctgcctaatttttttgtattttcagtagagatggggtttcatcaagttggccaggctggtctcraactcctaactttaagtgatccgccttccttggcctcccaaagtgctgggattacaggcatgagccaccgtgcccagctatttttttaaagacaaggtct

SEQ ID NO: 35993 - DNA, 201 bp, Homo sapiens
agtcaaagtttatgaggcatctagcaacattttacatgatatataaaattggaggtaaatgtgctttttcttgggaggaattcatagccttaaactattcktggaggagtgtatgattctctctctgtactttcccctgtttttcaattattgcttcagagtattttttttttaagtttgagtactttaaacagcatagag

SEQ ID NO: 35994 - DNA, 201 bp, Homo sapiens
ctaatttttttgtattttcagtagagatggggtttcatcaagttggccaggctggtctcaaactcctaactttaagtgatccgccttccttggcctcccaragtgctgggattacaggcatgagccaccgtgcccagctatttttttaaagacaaggtctcattctgtcacccaggctggagtgcagtggtgcaatcacag

SEQ ID NO: 35995 - DNA, 201 bp, Homo sapiens
ttcacactgtaattaactcaacgtgtaacactcacaacaaaaattaactcaaaatcggtcaaagacctaaatacaaaaactaaaactgtgaaactcttagraaaaaaatagaagggatacttttatgaccttggatttgtcagtgatttcttggggatgacacaaaattacaggcaacgaaagaaaaaaatagataaattc

SEQ ID NO: 35996 - DNA, 201 bp, Homo sapiens
tctactaaaaatacaaaaattagccgggcatggtggtgggctcctgtaatcccagctacttgggagcctgaggcaggagaatcacctgaacctgggaggcrgagactgcagtgagccaagatcatgccattacactgcagcctgggtgcagagcgagactccgtttcaaaaaaaaaaaaaaaaaattgattctcaaggtaa

SEQ ID NO: 35997 - DNA, 201 bp, Homo sapiens
gctcttttgtagctttgctgttaggtatatattattcagaattgacatttcttccagggtattttcttttatattatattaatgaattttaaaaaaatctyacaatgattttggcatgaggatatatttaattgatattactgtagctaccttaagtttcttttctttatcatatgcctgatatatccctttccatccatt

SEQ ID NO: 35998 - DNA, 201 bp, Homo sapiens
tacacatagataacttgatgaatttttacatttttttgtaggggacaaataaataatagcattttattcttatgccatttgaccatagcatttgtgttctrtagttttcactgtagacatcttttacttctttggctgatttaaatcctaggtatttaattttatttgtggctattgtaaatgggattacttttttcattt

SEQ ID NO: 35999 - DNA, 201 bp, Homo sapiens
taacatctatgtgagttacatacatgacatgatatagattgggttgtacattttttaaatgcttaagggccagcaaacattcctaaaacattaaaatatartaatactattccttcccctctcacaggtcttctagtagatgatcttatctaagctttaagagatcactggattcctaaagtgattttattttgtagaatt

SEQ ID NO: 36000 - DNA, 201 bp, Homo sapiens
tttggctttgtgagctgcaccgtctgtgtgccagctattcaactcagcccttatgtcgtgaaagcaaacgaaaacaatacataaacaaatggatggggctktattccaataaaaacacctgtgttttaaacatttttcatgattattctgcatttccttttgcacctgaacttcagaaatagttaacttcaatcagatacc

SEQ ID NO: 36001 - DNA, 201 bp, Homo sapiens
aaataagtcctgtattatatattttatgtttctcaagaaaatactttcaaggattgtatgtgccaaaagagatttttttttgtatgaaagtgataattttratgttcatggagtaattgtaaactattaatactttatatttaaaaattttaaaaataccagcatgaatttggaaggacacacaaaaaataagaaataaat

SEQ ID NO: 36002 - DNA, 201 bp, Homo sapiens
attggagaggagggaattgtgcagagagagggcataaagtgcctcatgaaggttgggctgtgcattgtaccacaagaccatatgaggcttgacaatagcaratgatagcatttgaaaacagaccagaatactaatgatcaagcagatctcccaggcaggaaacagtgctaggggaaattgaattttcatccctggagagcc

SEQ ID NO: 36003 - DNA, 201 bp, Homo sapiens
atacgtggtggctcacacctgtaatgccagcattttgggaggcttaggcgggctgattgcttgagcccaggagttcgagacctacctgggcagcatggcamaaccctgtctatatgaaaaatacaaaaattagccaggcgtggtgatgtgcacctatagtgccagctacttgggggttgaggagggaggatcacttgagcc

SEQ ID NO: 36004 - DNA, 201 bp, Homo sapiens
tgcaagagctcaggaaatactgttcccataccccttctcaagcaatgtgctagagaacaagcttcagacaaccaaaatgataagacaccaagtactttgaraggcaagagtgaagcaggagtctagagtaaattagagaattgattcaaagtccacataaagtgttataccagttctgaaaaccagacaactaccccaact

SEQ ID NO: 36005 - DNA, 201 bp, Homo sapiens
aattttgtcattcagtttttttgtgttcttaaccattttatttctctgatctatttattcgttttttaaaaatccttatgatggtaaatgtgttaactttyctttgtaatcatcaatgttttgcacagctcttttgtagctttgctgttaggtatatattattcagaattgacatttcttccagggtattttcttttatat

SEQ ID NO: 36006 - DNA, 201 bp, Homo sapiens
aaggtttataaataaaaggaaaaatattgggcattcaggcaaaaaatatgtcacttaaaggggaaagaaaatgagattatcatcagattttttcatagtarcagtatgctaaaaacaacagcagtgaaataacacatttaagatacccaaggaaagtacaagtgaaagatttttaaggatttaatattttaaggatagtaa

SEQ ID NO: 36007 - DNA, 201 bp, Homo sapiens
taaagtttgtatacacgatatgtggcatgcagtaaaaaattaccaggcatatcagcaaacacaaccaaatcattgaaaaccaagagaaaaattcaacagcaaaaacaaaatcaaaaaagggaaaataaaaaccaggcagtcagtagaaacagacccgcaggagttcgcagtatgaaatttttatgaatggactttaatcgt

SEQ ID NO: 36008 - DNA, 201 bp, Homo sapiens
ggaagaatctgagactgaaatcaataaaccagtgagaaagaaaaacgtttagtgaaaaattcaggtggacttttttttcccattctatttgacataaataygactgaagtattacatatggtagaatgagaagatttagttgcttgtctcaagctcccacaaagaaattccagaaattggaaaactgaatgatctgcctct

SEQ ID NO: 36009 - DNA, 201 bp, Homo sapiens
aaagtttgtatacacgatatgtggcatgcagtaaaaaattaccaggcatatcagcaaacacaaccaaatcattgaaaaccaagagaaaaattcaacagcaaaaacaaaatcaaaaaagggaaaataaaaaccaggcagtcagtagaaacagacccgcaggagttcgcagtatgaaatttttatgaatggactttaatcgtg

SEQ ID NO: 36010 - DNA, 201 bp, Homo sapiens
ttggtttaaaactttttcaagctatttaaaagtaaataaaatctaaattagagctaaactcacaaacagaaaactctgagaaactcaactgaattttgttytaaggctgtagtgcttataaaatattctgtttttggaggttgtatggtaacaaagatagattgttgtatagtaacaacaaagatgaggttgtataataac

SEQ ID NO: 36011 - DNA, 201 bp, Homo sapiens
aagtttgtatacacgatatgtggcatgcagtaaaaaattaccaggcatatcagcaaacacaaccaaatcattgaaaaccaagagaaaaattcaacagcaaaaacaaaatcaaaaaagggaaaataaaaaccaggcagtcagtagaaacagacccgcaggagttcgcagtatgaaatttttatgaatggactttaatcgtgt

SEQ ID NO: 36012 - DNA, 201 bp, Homo sapiens
agtttgtatacacgatatgtggcatgcagtaaaaaattaccaggcatatcagcaaacacaaccaaatcattgaaaaccaagagaaaaattcaacagcaaaaacaaaatcaaaaaagggaaaataaaaaccaggcagtcagtagaaacagacccgcaggagttcgcagtatgaaatttttatgaatggactttaatcgtgtg

SEQ ID NO: 36013 - DNA, 201 bp, Homo sapiens
tgctgggattacaggcatgagccaccgtgcccagctatttttttaaagacaaggtctcattctgtcacccaggctggagtgcagtggtgcaatcacagctyactgcagtcttgaccaagctcccatctcagcctcccaagtagctgggatcacaggcatgcaccactatccctgactaattaatttttttttttttttttt

SEQ ID NO: 36014 - DNA, 201 bp, Homo sapiens
tttgtatacacgatatgtggcatgcagtaaaaaattaccaggcatatcagcaaacacaaccaaatcattgaaaaccaagagaaaaattcaacagcaaaaacaaaatcaaaaaagggaaaataaaaaccaggcagtcagtagaaacagacccgcaggagttcgcagtatgaaatttttatgaatggactttaatcgtgtgat

SEQ ID NO: 36015 - DNA, 201 bp, Homo sapiens
atacacgatatgtggcatgcagtaaaaaattaccaggcatatcagcaaacacaaccaaatcattgaaaaccaagagaaaaattcaacagcaaaaacaaaatcaaaaaagggaaaataaaaaccaggcagtcagtagaaacagacccgcaggagttcgcagtatgaaatttttatgaatggactttaatcgtgtgatttgtt

SEQ ID NO: 36016 - DNA, 201 bp, Homo sapiens
atgagatttgcaacttgagtgagtttggtatacagattgttgacttcttaaatttaagacatttgctgaacatgctagagagatgaccagtaggcaactasaaataagggtatagatagtaagagatagggatttaggagttgccagcatattggtattaactgaggctttggaatagataatataagtcaggaaggagag

SEQ ID NO: 36017 - DNA, 201 bp, Homo sapiens
caacataaaattctaaaagcaaccagagaagaaagacacattacgttcaaaggcatgaaacttcaactgaaaactgacctcccaacagaaaaattaaaaayggaattcagaagaaaaagaatgtcctaaaagtgctatagtaaaataactgccaacttacagtgttatttacagcaaaaaatgccttccagaaatgaaggc

SEQ ID NO: 36018 - DNA, 201 bp, Homo sapiens
gagacaggagaatcgcttgaacccgggaggcagaagttgcagtgagttgagaatgtgccattgtactctagcctgggcaacaagtgcaaaactctgtctgaaaaaaaaaaaaagagagagagaacaggcgtacaagtgaaacaagattgatgttgaagtaatcattgttgaaattaggtagtggggctcatgggaattcat

SEQ ID NO: 36019 - DNA, 201 bp, Homo sapiens
attttatttgctgcatatgtttcattgtatggatatatgtgggtatagtgttttgtggcatggatatcccgtaatttatataccatttcggtatttcctargtagtttccagtttttcattctaacatacagtatttcagggcttatacatatactcagaagtggagtttttgggcaaaaggaatgtacatttaaaatatt

SEQ ID NO: 36020 - DNA, 201 bp, Homo sapiens
agacaggagaatcgcttgaacccgggaggcagaagttgcagtgagttgagaatgtgccattgtactctagcctgggcaacaagtgcaaaactctgtctgaaaaaaaaaaaaagagagagagaacaggcgtacaagtgaaacaagattgatgttgaagtaatcattgttgaaattaggtagtggggctcatgggaattcatt

SEQ ID NO: 36021 - DNA, 201 bp, Homo sapiens
atgataggaatgatgtgccaagtggattaatatttttgcccagtgtttaacatatccctctactgtgcacaaaagactgctacctaaatttctcactcacrgattttctctactgataatatctgcctcctggccacgtactttctttagctgtgtcattagctcaccattagatcttgctctgatttagtcataattatt

SEQ ID NO: 36022 - DNA, 201 bp, Homo sapiens
ttagtaaccttcatattcatttattaaacgattattctggtgctggtaaaaaaatttcatattttaataatacatggggaaagtagaatctaatgaagactgtatttccaagtaaaaataggtaacttaactttttatatttatttaacttttgaaatccattttggcaaatggtaggtgtttaatttatatcaaaacaaa

SEQ ID NO: 36023 - DNA, 201 bp, Homo sapiens
tagtgatatgcctttttaatattcatagtattatatttatttgtttagttagttattcctggtttcagtttactgtagattgggtctatttggtatcagawttttttggcattttttgaaatttgctttgtgattttgtaacaggccagtttttatatgttctatgtttatttgaaaagaatacttttttttttctaactt

SEQ ID NO: 36024 - DNA, 201 bp, Homo sapiens
cggattgctattatagtgagatgaagccaggagaaagtagtcttctaggctctgacagtctttacaaactctctaatatgttagcagtaaaccataacctmaggttggttaaatcataaaacaggacttggtagtaagtatgtaaagtgctttctgttttccccttaaaaagaaccagagcggccgggtgtggtggctcac

SEQ ID NO: 36025 - DNA, 201 bp, Homo sapiens
tttttttttttccttgtttcttccattcttttcctttggtgcttatctgagaattcctacggaactttgaggaagtgtcatcagtatttcacagttagaaygaactattgtcctaacatttcatggaggttcaggaccatggacagatcacatgtgctacctgtctcagtcccacccacatattttagcaggttaaaatat

SEQ ID NO: 36026 - DNA, 201 bp, Homo sapiens
atctctcattggctaagctgttccaagagctttgggttatttgtgttttttttttttttttccttgtttcttccattcttttcctttggtgcttatctgaraattcctacggaactttgaggaagtgtcatcagtatttcacagttagaatgaactattgtcctaacatttcatggaggttcaggaccatggacagatcac

SEQ ID NO: 36027 - DNA, 201 bp, Homo sapiens
ccaaacctgtcatctctcattggctaagctgttccaagagctttgggttatttgtgttttttttttttttttccttgtttcttccattcttttcctttggkgcttatctgagaattcctacggaactttgaggaagtgtcatcagtatttcacagttagaatgaactattgtcctaacatttcatggaggttcaggaccat

SEQ ID NO: 36028 - DNA, 201 bp, Homo sapiens
aactatcaaaccaggaaacacctccccccaccaccacctcccaatcccaaacctgtcatctctcattggctaagctgttccaagagctttgggttatttgkgttttttttttttttttccttgtttcttccattcttttcctttggtgcttatctgagaattcctacggaactttgaggaagtgtcatcagtatttcacag

SEQ ID NO: 36029 - DNA, 201 bp, Homo sapiens
atatatgtaattccatagtctttctgtaagactatttctctcaaatttacagggtgggggaaatactcttccttttttttttttttttttttttttttggkgtatacgaatatttgaaaactatcaaaccaggaaacacctccccccaccaccacctcccaatcccaaacctgtcatctctcattggctaagctgttccaa

SEQ ID NO: 36030 - DNA, 201 bp, Homo sapiens
taaataccaccttagttgcatctcatatgttttgatatgttgtctttttattattattccattctaaatgccctctgctttctaatttttatttttgaccwgtgaattgtttagagttatgtcttaatttccaatgcttttttaaaagagccattagtttaaaatattttttatttgtatcatactccagtatttaagatt

SEQ ID NO: 36031 - DNA, 201 bp, Homo sapiens
taagactttagatttctaaataccaccttagttgcatctcatatgttttgatatgttgtctttttattattattccattctaaatgccctctgctttctawtttttatttttgacctgtgaattgtttagagttatgtcttaatttccaatgcttttttaaaagagccattagtttaaaatattttttatttgtatcatac

SEQ ID NO: 36032 - DNA, 201 bp, Homo sapiens
ttacagatgtcagctcccatgcctggttttaattacctgttttctaattaaacctaacctgctataacaagtactcaactttttttctctattggaacttyagattttgaaggatatacctcttcttttatagttttttaaattagtaagtagtttgttgtacattattgacgtgtattttcttaggtttctattaaggag

SEQ ID NO: 36033 - DNA, 201 bp, Homo sapiens
tgtttctttctactatggttatatagtaattttttggtttataagtattttgctaggatgattttacaatgatcagttattagtcagtgatcatggcttcyggtgcttattctgtcacaaatcaaattaagaagaaagttaactgaggtgaacatagttatttgtgactaagaacaaaattaaaattcaaagttttacctc

SEQ ID NO: 36034 - DNA, 201 bp, Homo sapiens
tcaccactgaactcaccaccagcagcactgtaactcgtgcctgaatgaagcttttctagcacattattttctccataaaggcacatcactgtcctctggcrctaggaacactagacagcgcttcagcactatgcttgggagcctttgcaagcagtgaatcacatacagagggcccaaaaatgtgaaatgcatgacaccaaa

SEQ ID NO: 36035 - DNA, 201 bp, Homo sapiens
gctggaattctagaccataagtcataggttcatttgctaaataagtcctgtattatatattttatgtttctcaagaaaatactttcaaggattgtatgtgycaaaagagatttttttttgtatgaaagtgataattttaatgttcatggagtaattgtaaactattaatactttatatttaaaaattttaaaaataccagc

SEQ ID NO: 36036 - DNA, 201 bp, Homo sapiens
gcctcccagtagctgggattacaggcatgcaccaccacgcccggctaattttgtatttttagtagagatgaggtttctccatgttggccaggttggtctcraactcccaacctcaggtgatccacccgccttggcctcccaaagtgctgagattataagcatgagccactgcgcccagcccagattgcatttctaaagatg

SEQ ID NO: 36037 - DNA, 201 bp, Homo sapiens
tagtaaccttcatattcatttattaaacgattattctggtgctggtaaaaaaatttcatattttaataatacatggggaaagtagaatctaatgaagactgtatttccaagtaaaaataggtaacttaactttttatatttatttaacttttgaaatccattttggcaaatggtaggtgtttaatttatatcaaaacaaat

SEQ ID NO: 36038 - DNA, 201 bp, Homo sapiens
tttttttttttttgcctgtagagacagggtcttgctatgtcaggcaggctggtttcaaacttcaggcctcaagcgatcctctcacctcacttcccaaagcrtgggactgcagatatgagccactactcctggcctattatttttatttttaaaaaataatttttttagttaaacagtttagcatagattagaactcaaagt

SEQ ID NO: 36039 - DNA, 201 bp, Homo sapiens
ttctttaattagccaggtgtagtggttgcatgcctgttgtcccaactacccaagaggctgaggtaggaggatcacttgagctatgatcatgccattgcacyccagcctaggcaatacagtgagaccttatctctaaaaacacaaacccacacacactctcatactcatcagtggaataaatgctgtcttgtaactgaatca

SEQ ID NO: 36040 - DNA, 201 bp, Homo sapiens
aaaactttttctggagaaagtgaattgatcccagcataaagagctaatgaatatcattctctgtgttgtaatttgaaataagtaatatcttttctccttaygcctaggacagatgagtttacatattgttcataagtcaggaagatgagccagtttgaaaaattataaacttactcctgtatgtgctccactttcatggtt

SEQ ID NO: 36041 - DNA, 201 bp, Homo sapiens
ccaaacattttaccttttttaaaaaatcttttttaaatgtatatacccagcctccaaacattgtaaagcttagcctattacgtttatgtttttaatccaaytggaattcatgcttggttccgtataaccagttgctcaatcactatttattgacagtccctcctttccccagtgatctacccttccatctccatcatatgt

SEQ ID NO: 36042 - DNA, 201 bp, Homo sapiens
tacttgagttcagcatccaagatatttcgcataacgctcaagttcttctgtagctctttttctgctaggaacttggattctttttttgtttttgtttttgttttttttttgagacagagtttcaccctgtcaccaggctggagtgcggtgacacgatctcagctcactgcaacctctgcgtcccaggttcaagcgattctc

SEQ ID NO: 36043 - DNA, 201 bp, Homo sapiens
aataatgtttttttaaactacagattgtgacccattagtgggtaataaaatcaagttagttacaagcaacattttttttctttctttctttctttcttttyttttttttttttttgtttgctggatcttgctctgttgcccaattagagctaactgctgtatctgattcctgggctcaagcagccctcccacctcagcctc

SEQ ID NO: 36044 - DNA, 201 bp, Homo sapiens
tctttttctgctaggaacttggattctttttttgtttttgtttttgttttttttttgagacagagtttcaccctgtcaccaggctggagtgcggtgacacratctcagctcactgcaacctctgcgtcccaggttcaagcgattctcctgcctcagcctcccaagtagctgggactacaggtgcatgccccccgtgcctag

SEQ ID NO: 36045 - DNA, 201 bp, Homo sapiens
tttttgttttttttttgagacagagtttcaccctgtcaccaggctggagtgcggtgacacgatctcagctcactgcaacctctgcgtcccaggttcaagcrattctcctgcctcagcctcccaagtagctgggactacaggtgcatgccccccgtgcctagctaatttttgtatttttagtagagacgggctttcaccatg

SEQ ID NO: 36046 - DNA, 201 bp, Homo sapiens
tgacttttttaaagttctcaatctttggggattaggacagtgtggtgatacattgttatgtaaaatattctttaggacagataaagaagggtttgagttaatttatttatttatttatttatttatttattttgagatggagtctcgctctctcacacaggctggagtgcagtggcgcgatctcagctcactgcaagctcc

SEQ ID NO: 36047 - DNA, 201 bp, Homo sapiens
gacttttttaaagttctcaatctttggggattaggacagtgtggtgatacattgttatgtaaaatattctttaggacagataaagaagggtttgagttaatttatttatttatttatttatttatttattttgagatggagtctcgctctctcacacaggctggagtgcagtggcgcgatctcagctcactgcaagctccg

SEQ ID NO: 36048 - DNA, 201 bp, Homo sapiens
acttttttaaagttctcaatctttggggattaggacagtgtggtgatacattgttatgtaaaatattctttaggacagataaagaagggtttgagttaatttatttatttatttatttatttatttattttgagatggagtctcgctctctcacacaggctggagtgcagtggcgcgatctcagctcactgcaagctccgc

SEQ ID NO: 36049 - DNA, 201 bp, Homo sapiens; identical to SEQ ID NO: 5604

SEQ ID NO: 36050 - DNA, 201 bp, Homo sapiens
cttttttaaagttctcaatctttggggattaggacagtgtggtgatacattgttatgtaaaatattctttaggacagataaagaagggtttgagttaatttatttatttatttatttatttatttattttgagatggagtctcgctctctcacacaggctggagtgcagtggcgcgatctcagctcactgcaagctccgcc

SEQ ID NO: 36051 - DNA, 201 bp, Homo sapiens
tcctttccttcactccttgcatctctactaccctattcatgaactgtatattgttaacttttatcagccattttaggagatatatactacggaattgctgyaaacccaaatatatgtaattccatagtctttctgtaagactatttctctcaaatttacagggtgggggaaatactcttcctttttttttttttttttttt

SEQ ID NO: 36052 - DNA, 201 bp, Homo sapiens
ttaagactttagatttctaaataccaccttagttgcatctcatatgttttgatatgttgtctttttattattattccattctaaatgccctctgctttctwatttttatttttgacctgtgaattgtttagagttatgtcttaatttccaatgcttttttaaaagagccattagtttaaaatattttttatttgtatcata

SEQ ID NO: 36053 - DNA, 201 bp, Homo sapiens
tcccgggttcacgccattctcctgcctcagcctcccgagtagctgggaccacaggtgcccaccaccacgcccggctaattttttgtatttttagtagagayggggtttcaccgtgttagccaggatggtcttgatctcctgacttcgtgatctgcccacctcggcctcccaaagtgctgggattacaggcatgagccacca

SEQ ID NO: 36054 - DNA, 201 bp, Homo sapiens
aatcaggcagggaggttgcagtgagccgagatggcggcagtacagtccagcctccgcttggcatcagagggagaccatggaaagtgggagaccgtggggarggggagagggggagggggagggggaacattttttcatttctaatattgtttatttgtgtcatctgtcttttttccagcactccttttagaggtttatcaa

SEQ ID NO: 36055 - DNA, 201 bp, Homo sapiens
tgggcaacattgagcactgagtgagcgagactccgtctgcaatcccggcacctcgggaggcccaggcgggcagatcactcgcggttaggagctggagaccmgcccggcgaacatggcgaaaccccttctccaccaaaaaatacaaaaaccagtcaggcgtggcggcgcgtgcctgcaatcccaggcactcggcaggctgag

SEQ ID NO: 36056 - DNA, 201 bp, Homo sapiens
cactgcactccagcctgggcaacattgagcactgagtgagcgagactccgtctgcaatcccggcacctcgggaggcccaggcgggcagatcactcgcggtyaggagctggagaccagcccggcgaacatggcgaaaccccttctccaccaaaaaatacaaaaaccagtcaggcgtggcggcgcgtgcctgcaatcccaggc

SEQ ID NO: 36057 - DNA, 201 bp, Homo sapiens
caggccactgcactccagcctgggcaacattgagcactgagtgagcgagactccgtctgcaatcccggcacctcgggaggcccaggcgggcagatcactcrcggttaggagctggagaccagcccggcgaacatggcgaaaccccttctccaccaaaaaatacaaaaaccagtcaggcgtggcggcgcgtgcctgcaatcc

SEQ ID NO: 36058 - DNA, 201 bp, Homo sapiens
cgagatcaggccactgcactccagcctgggcaacattgagcactgagtgagcgagactccgtctgcaatcccggcacctcgggaggcccaggcgggcagaycactcgcggttaggagctggagaccagcccggcgaacatggcgaaaccccttctccaccaaaaaatacaaaaaccagtcaggcgtggcggcgcgtgcctg

SEQ ID NO: 36059 - DNA, 201 bp, Homo sapiens
agcgagccgagatcaggccactgcactccagcctgggcaacattgagcactgagtgagcgagactccgtctgcaatcccggcacctcgggaggcccaggckggcagatcactcgcggttaggagctggagaccagcccggcgaacatggcgaaaccccttctccaccaaaaaatacaaaaaccagtcaggcgtggcggcgc

SEQ ID NO: 36060 - DNA, 201 bp, Homo sapiens
gttgtagcgagccgagatcaggccactgcactccagcctgggcaacattgagcactgagtgagcgagactccgtctgcaatcccggcacctcgggaggccsaggcgggcagatcactcgcggttaggagctggagaccagcccggcgaacatggcgaaaccccttctccaccaaaaaatacaaaaaccagtcaggcgtggc

SEQ ID NO: 36061 - DNA, 201 bp, Homo sapiens
ggcgacagagtgagactgtctgaaaagaaacaaacaaacaaaagttttatccagtatatctattcctagttttctaagagattttaaatttttagtaaaarctgttacagaattttatcaattgtttgcatgcattgagaggatcttaatgatttttcagtttttaaattccattatgtggtgattaacattgaagtttga

SEQ ID NO: 36062 - DNA, 201 bp, Homo sapiens
aatttaccctgatgagctaaagttgattataattataataatatatgttatttcaagtactactattctttttaagaactcatgacctaggaccccaaaaygcaattagggatatacaatttggagtatggtttacttctcagtaaagtttaatactaattgaagtactaaattgaacaaggtcaatattttgtagtacta

SEQ ID NO: 36063 - DNA, 201 bp, Homo sapiens
agccccagtagtcttcccactttggcatcccatgtatttctttttaaagcaagaagacttggaaattattttccgccgaaacataagtacccttaagattygttgttttttgccatgatacagtgtttgtggagtacacacattaattcatttattttaacagatatttattgcatacctcctatgtgacagacataaaaa

SEQ ID NO: 36064 - DNA, 201 bp, Homo sapiens
gacaccaaagagaccctgtagaggacacttgtttataatatgagagcttaaatgagaaggcagagcctctcctgttcaacctcagctgggaatgtgagcayaggacatctcaaatttttctctgctctgcacgtgtctacaaatgatcataaaattaccacaagtattgatttggggtttacaaataaatattagcttcta

SEQ ID NO: 36065 - DNA, 201 bp, Homo sapiens
ttaagagatggggtcttgttctgggcagcagaagggctggaatgcagtggtgcagtcctagctcactatagcctcagactcctgggcacaaatgatccccytgcctcagcctcctgagtagctgggacaataggcacaagccaccatgcccagctaatttttaaaacgatttagaaatggagtcttgctgtgctgtctagg

SEQ ID NO: 36066 - DNA, 201 bp, Homo sapiens
gctgggattacaggcatgagccaccatgcctgactgggtttgagttaattttaaaagaaattgaaactactttgataagtggtctcttgagaaaggcattyccattcaacctattaagaaagcagtagaacagagataccaagatcccttctgctgtagaaattattcccacttctaccctcatcttttccttcaaccgtg

SEQ ID NO: 36067 - DNA, 201 bp, Homo sapiens
gcggctgggaggtagatgttgtagcgagccgagatcacgccactgcactccagcctgggcaccattgagcactgagtgaacgagactccgtctgcaatccyggcacctcgggaggccgaggctggcggatcactcgcggttaggagctggagaccagcccggccaacacagcgaaaccccgtctccaccaaaaaaatacga

SEQ ID NO: 36068 - DNA, 201 bp, Homo sapiens
taggacaaaccagaaatactgacctgagtatcagatcaaagcagaatctgaattgcactgtattagaagttaattgggagtttagaaaatacagacggcatttgtataccatttttcagaaatctggctgaggaagttttgaatcctggctctaccacttaatagttttataaccttaggcaagttgatccatcttctaca

SEQ ID NO: 36069 - DNA, 201 bp, Homo sapiens
aggacaaaccagaaatactgacctgagtatcagatcaaagcagaatctgaattgcactgtattagaagttaattgggagtttagaaaatacagacggcatttgtataccatttttcagaaatctggctgaggaagttttgaatcctggctctaccacttaatagttttataaccttaggcaagttgatccatcttctacat

SEQ ID NO: 36070 - DNA, 201 bp, Homo sapiens
ggacaaaccagaaatactgacctgagtatcagatcaaagcagaatctgaattgcactgtattagaagttaattgggagtttagaaaatacagacggcatttgtataccatttttcagaaatctggctgaggaagttttgaatcctggctctaccacttaatagttttataaccttaggcaagttgatccatcttctacatc

SEQ ID NO: 36071 - DNA, 201 bp, Homo sapiens
gacaaaccagaaatactgacctgagtatcagatcaaagcagaatctgaattgcactgtattagaagttaattgggagtttagaaaatacagacggcatttgtataccatttttcagaaatctggctgaggaagttttgaatcctggctctaccacttaatagttttataaccttaggcaagttgatccatcttctacatct

SEQ ID NO: 36072 - DNA, 201 bp, Homo sapiens
acccaagaggagatagagatggcaagtaagcacatgaaaagatgttcaatatactgatattgaattttacgaaaatgccagttaaaaccataatgagataytattacccacctgtttgaacagttaaaataaaaagtagctaatactaaatgctagcaaggatatggagaaagtggatctcttacatgttgctggtagaaa

SEQ ID NO: 36073 - DNA, 201 bp, Homo sapiens
acaaaccagaaatactgacctgagtatcagatcaaagcagaatctgaattgcactgtattagaagttaattgggagtttagaaaatacagacggcatttgtataccatttttcagaaatctggctgaggaagttttgaatcctggctctaccacttaatagttttataaccttaggcaagttgatccatcttctacatctt

SEQ ID NO: 36074 - DNA, 201 bp, Homo sapiens
cggaacctgttaatgtttttgtggtatattattacatctattgcatgctttgtgctgctgctcctgctgttgctgtgctgcttttatgtttttgtttatgttttttttttggctttggccgcaaagctttaggaatgttcatataaatcactataaccaaactactaaaatgatatcttttttagtttgatcaaggggaaa

SEQ ID NO: 36075 - DNA, 201 bp, Homo sapiens
aaatcacatcttcatattgggctaatttaaatttaaatcacttaatgccttaacagtgctaaaaattccaagaatgtcagacatactgatattcaaaatamagtacaaaaataagtcaaatataaatatgtttgcctgtcatgctcctctttaatttaccctgatgagctaaagttgattataattataataatatatgtt

SEQ ID NO: 36076 - DNA, 201 bp, Homo sapiens
gaggatcacttgagcccaggagcctgggctgcagtgagctgtgattgtaccactgtactccagcttgggcaatagagtgagatcctgtctcaaaaaaaaargttaaacaattatttttttatttttgttcatatatttctaaggttcttcgggatatacttttatagtagtggaagtgtattctcagaataaactacaact

SEQ ID NO: 36077 - DNA, 201 bp, Homo sapiens
gcctgccccaccttcatacctgtggtaggtggggtacaggaggaaaagtagctcctattaatgtccatttggtattctttggtcttttgtttgtttgtttktttttgagacagagtctcgatctatcacccaggctgggtgtagtggcatgatctcagctcactgcaacctctgcctcccaggttcaagcgtttctcctgc

SEQ ID NO: 36078 - DNA, 201 bp, Homo sapiens
gccatcaaggcagcaggatcctcacatccatgaagaccaaaagaaagatgtaatggaagagagaactacggatctgtcttccatcctaatttaaccttcargaaataccttctgcacaaaacacttcattaaataaaaaaaattacaagacagtaagcttaaaaaaaaaaaaggctaggaccacaacttgcccagttaagt

SEQ ID NO: 36079 - DNA, 201 bp, Homo sapiens
gaagtaggaggaatacttctgattttgtcataagcattgtaataccattttactttttcaaccatgtgtatgtattaatttgattttaaaaatttaaaacaaaaatgtagaaaaattttttgtgactgggaataaatataagatctcaaatcacaagcataaggtgaaaatattcgtgggctttacatcaaaattaaaaat

SEQ ID NO: 36080 - DNA, 201 bp, Homo sapiens
aggatggaactaaaaacacagtcattatttcataggatatgccctggaaaatgcgtcgttttgcgaaactggatatgtcagctagactggagttgcagtcrgctctggatgcagaaataagagccaaacaggccatccaagaagagttgaataaagttaaagcatctaatatcataacagaatggtaagattgaatcatat

SEQ ID NO: 36081 - DNA, 201 bp, Homo sapiens
agcctgaatgacagagcaagaccctgtctttaaaaaaaaaaagtgtgtgtgtgtatatatatatatgtatatatatatatacacacacactatatatatayacatactatatatatacacacactatacacacactatatatacacatatatatatacactatatatatacagaaaaaagtatacatatatacatacacat

SEQ ID NO: 36082 - DNA, 201 bp, Homo sapiens
cacacaccaccacatccggctaattttttgtatttttattagagatggggtttcaccatgttggccaggctgatcttgaactcctaacctcaagtgatctkcccaccttggcttcccaaagtgctgggattacaagtgtgagccaccgttcccggccttagtacagtatgttaaattttgtgtgtgtgtgaatcaaattat

SEQ ID NO: 36083 - DNA, 201 bp, Homo sapiens
gcccaggctggagtgcagtggcgcgatctcagctcactgcaagctctgcctcccgggttcatgccattctcccgcctcagcctcccgagtagctgggactrcaggtgcctgccaccacgcccagctaatttttttgtatttttagtagagacggggtttcactgtgttagccaggatggtcttgatcttctgaccttgtga

SEQ ID NO: 36084 - DNA, 201 bp, Homo sapiens
tggaccatgtttctctatccagaggtatgtaccagagaatgctttgatccagaacaaaggggatttttttttttttttttttgagatggggtctcactctstcacccagtgacagattgcagtggcacaaccttgggtaactgcagccttctcctcctggaatcaagcgatcttcccacctcagcctcctgagtagctgtg

SEQ ID NO: 36085 - DNA, 201 bp, Homo sapiens
gtgggtcaacaaactttttctgtaaagtgacagtaaatattttagatttcacagttcatatgttctctgtggcaactactcttctctgtcattgtggtgtraaaactagccatagacagtttgcaaatgaatgatggatgtggttgtattcaaataaaattttatttttaaaaacaggtaatggaccagatttgaccttca

SEQ ID NO: 36086 - DNA, 201 bp, Homo sapiens
gtggttaatgtgtgagttctcgctgtgtttgttctcccaatatctgattgttaaaaagagcctgatacctccccactccccattgctcccgctcttgccaygtgacatgccagcttcttttctccatctaaaaccgcaattacttttgcatcaacctaatactatgaatgaaagcttcttgaagccctcaccataaacaga

SEQ ID NO: 36087 - DNA, 201 bp, Homo sapiens
gagtttgtatgttaattcttgtaatcatctgcagagactgactctgagttaggtttgaaattacttgtcccccagcttaggtcagatttccatattggttsagttaacactggccagttaaatggggcctcacaatatgcacttggcccacccctgagaactgagggggagattttcagaaaaagggagggaggcggcgtg

SEQ ID NO: 36088 - DNA, 201 bp, Homo sapiens
gaaaaccagtcaggtgtggcggcgcgcctgaggcactcggcaggctgaggcaggagaatcaggcagggaggttgcagtgagccgagatggcagcagtacastccagctttggctcggcatcagagggagaccgtggaaagagagggagaggaagaccgtggggagagggagagggagagggagagggttgaatttcttaat

SEQ ID NO: 36089 - DNA, 201 bp, Homo sapiens
gtgcagtgatcttaacaaagttaggattctgtttaggaagacggaatggattctgtctagacaacaaacagtctcccctatagttggcattgtggcctacmgtttatttgtatcattttcgaaaggaatttttagtgctatagtaaagctttatgctatactttgtgtttccccttcccaccccaccacctgtaactaaca

SEQ ID NO: 36090 - DNA, 201 bp, Homo sapiens
tgcagggagaagggatttgtaacacatcatgaagaactaagttcgagtaaatagaatccctgaagattaaacaaaaaacagtgcacacacatttttacaayggcaagggatattaacaggcattttatagaagaggaatgtaaaatgaccaatgataccagtgataatatgaaaaagattctcaactgtattcgtaatcat

SEQ ID NO: 36091 - DNA, 201 bp, Homo sapiens
caacatgattttttgttcaggtggggaggagggaggaaggctacctgtagccctcttatttcatggaagcacctagaaagtcttccctccattctcaatgrccaaaattaggtctcctctctattcctgaaccaatataattggtattggtgccaataagattattgaggtatatgggctgtgtatgggaagtgcagtgat

SEQ ID NO: 36092 - DNA, 201 bp, Homo sapiens
ggtagaatgtaaaatagtgtaaccactttgtaaagaaattagagagttcctcaaaatgttaaacatagaattaccatatgatccagcaattctactccgasatgtgtacaaacgcaagagaattgaaaatgtaggtacacacaaaaacttgtatatgaatgttcatagcacccttaatcataatagctaggaagtggaaac

SEQ ID NO: 36093 - DNA, 201 bp, Homo sapiens
actgccattctgtgtagaaataattggagcaagatttttaaaaataatcattatgatacctatcttttatctttctgtggaaaaaatatggaaacgcttaygtctctagaggtaaatatttagtgaaatgtggttttcatttgaaattaaaattaatcatttttgatttcatattttttctttaacactatgatactttaa

SEQ ID NO: 36094 - DNA, 201 bp, Homo sapiens
agttggactctacttcataccatattcaaaaattaactcaatatagatcatagacataaatgtaacagataaaactatgaaactcttagaaggaaacatasgtgtaaatttttgtgaccttggcttaggcaatggttcttaaatatgacacgaaatctcaggcatcaaagaaaaaacaaaaaataagatttcatcagagtt

SEQ ID NO: 36095 - DNA, 201 bp, Homo sapiens
ggtagtcattcaaataatgacagtaattaagttcaataaattattgaatgtctaccttgtgctagctattgtatagttgtggaaggtaggtgagtaagacrtattcctcataataataattcaattaaaatacctcttaccctgataattctcttcacaagtaaagttttaacaaagttagaattttgattttagaattta

SEQ ID NO: 36096 - DNA, 201 bp, Homo sapiens
ccatattggttaggctggtctcaaactcccgacctcaggtgatccgtccacctaggcctccccaaagtgctgggattacaggcgtgagccactgcacccarcaatagatctttttttttttttttaatgactttaccatagtagctttgtatatgaatctgatggcaattgggatgtagatatcttttgcaataaataata

SEQ ID NO: 36097 - DNA, 201 bp, Homo sapiens
agaaactcactcaaaaccgcacaactacttggaaactgaacaacctgctcttgaatgactactgggtaaataacgaaatgaaggcagaaataaataagttmtttaagaccaatgagaacaaagacacaacataccagaatctcttgagacacagctaaagcaatgtttagagggaaatttatagcactaaatgcccacagg

SEQ ID NO: 36098 - DNA, 201 bp, Homo sapiens
ccagtgagggttaatgtcctgtctttttctgacatcactctttttttttttttttttttaatttggagacagagtctcactctgttccccaggctggagtrcagtgacgcgatctcagctcactgcaactaccatctcccaggttcaagcaattcttgtgcctcatcctcctgagtagctgggaccacacccagctaattt

SEQ ID NO: 36099 - DNA, 201 bp, Homo sapiens
tacaaaatagggaaaagacaatagacatttcacccaagaggagatagagatggcaagtaagcacatgaaaagatgttcaatatactgatattgaattttaygaaaatgccagttaaaaccataatgagatattattacccacctgtttgaacagttaaaataaaaagtagctaatactaaatgctagcaaggatatggaga

SEQ ID NO: 36100 - DNA, 201 bp, Homo sapiens
ttggctgagatggtgatagcaattgactcagttcatcagctacattatgtacacaggtaaaacagtccttcattgtacctggctgtgagttaccatgtaayatctagcaacagaggcctatttcttgccagatttattaattatggtcttggatacatttatcgtcaacaaaaaaaaattattttgagatgattttggttg

SEQ ID NO: 36101 - DNA, 201 bp, Homo sapiens
ttggaaagctgtgttccattgttgtaggtgaagatgataataatgatgatattagctctttgcaaaatacaacaatggtaaccctgtgttgttctctgccycagtctttaaaaattttgttttactgctgtatgaaatttagaagttttgtaatgactgctgatcatcatcttacacagtttcttgttaattagcagcata

SEQ ID NO: 36102 - DNA, 201 bp, Homo sapiens
ttaaatcttaatgtcaactcagtaatatccctgaaaacaatatcttcattctgtaataaaaccttaatttcaaggcatttatgtgtcttgtactcactagscttcatgctaagtgctacattatcattattgtagttaggtagatgagaaaatgaaatgtcacagagattaatttttcaacgtccacttacaacatggagt

SEQ ID NO: 36103 - DNA, 201 bp, Homo sapiens
ccaatgttgaaggtggggtctagtgggagatatttgggttatggagacagattttcatgaatggcttggtgtccttcctgtggttaatgtgtgagttctcrctgtgtttgttctcccaatatctgattgttaaaaagagcctgatacctccccactccccattgctcccgctcttgccacgtgacatgccagcttcttttc

SEQ ID NO: 36104 - DNA, 201 bp, Homo sapiens
ggaaatattttttgagtcctcttttataagtaacattgtgctaaactatgtggaattgtaagtaagtgggtatagcatatagttgtggcttttgaaaaggwttcagttgtttggaggcacaaaacctaagatagaaataaaacttaaaataccacaagttaaatcatttaaggccaaagtataagagatgatggagtgagt

SEQ ID NO: 36105 - DNA, 201 bp, Homo sapiens
caaatcagtattattgtaatataaattcctggaacatgctttcaccaggcctgtcattatatataaacaagctgtattctatggggacaacatttctgcarttcaatctgatattttgtgttttatgtaactattggaaaaataatttcaagttttcaaatgacctttaattcccctttttccttttgtgttttgaattgt

SEQ ID NO: 36106 - DNA, 201 bp, Homo sapiens
gattttcttttttttcttttctttttttttttgagacagagtctcactcacttcagcccgggctgaagtgcagtggcgtgatcttggctcaccacacctcygtctcccgggttcaagcaattctcctgcctcagcctccctagtagctgggactacaggcgcccgccaccacacccagccaatttttgtatttttagtaga

SEQ ID NO: 36107 - DNA, 201 bp, Homo sapiens
ctggagtgcaatggcgccatctcggctcactgcaacctccacctcccaggttcaggcgattcttctgcctcaggccaacctcccgagtagccaccatgccyggctgattttgtatttttagtagagatggggtttctccatattggttaggctggtctcaaactcccgacctcaggtgatccgtccacctaggcctcccca

SEQ ID NO: 36108 - DNA, 201 bp, Homo sapiens
caggctggagtgcaatggcgccatctcggctcactgcaacctccacctcccaggttcaggcgattcttctgcctcaggccaacctcccgagtagccaccaygcccggctgattttgtatttttagtagagatggggtttctccatattggttaggctggtctcaaactcccgacctcaggtgatccgtccacctaggcctc

SEQ ID NO: 36109 - DNA, 201 bp, Homo sapiens
tcttgataatgtgcattaatgatatacaagtttttcattttgatgaaatccaatttgtccctttttttttttcttgtgcttttggtgtgatatttaagaayccattgccaaatccaatgtcatattggtttaccctttgcttttttccaaaagtttttttttttttttttttgatgtggggagagtctctctctgtttccc

SEQ ID NO: 36110 - DNA, 201 bp, Homo sapiens
tgctttcttttggtgtatgtatatatttatgtatgtatatattatgtatatatatgtatatatatgtatatatatgtgtgtgtgtgtatatgtatatatayacacacacacacataaaacaaaatttgccattttagcccctttaaagtgtattatttggtggtgtcaattacatttcaaaatgtataacatcaccactat

SEQ ID NO: 36111 - DNA, 201 bp, Homo sapiens
cactgtaccattgtatatatgagacttgagcatccgtggattttaggtattcaagtagggtcctggaatcagtgccctatggatactgagagacaaccatrtatagaacttttcacccaacaacagcaaaatatacattcttttaaagtacacatggcagattctccaggatagaccacatgttaggccaaaaaacatttt

SEQ ID NO: 36112 - DNA, 201 bp, Homo sapiens
gagatttgttatcagggggtttcacccaaggatttggagcttcacatcatgttttagttctcgtaattaaatatgaatggaaaatagaattgccagacatytgaggatcctcaaagcctctatagggtacagtcccaaacaaagaaagcaacccacatgaaacatacttttcagggaaagcataacttcgaaaaaaaaaaa

SEQ ID NO: 36113 - DNA, 201 bp, Homo sapiens
gtgctctctctctgaccccttaactccagtatttcttcactgccaccgttacctacaagtctatcaccgtttaactctgctatttataccctcatttttcrttctctggtcagccatagtcataccctggcatataccttcaaatctattgttcctctttctctttgtcaaatacctttggcagaaccccaactgtgtttg

SEQ ID NO: 36114 - DNA, 201 bp, Homo sapiens
tcgaagcaaacatgtctggagaagtgcgtttgaggcagttggagcagtttattttggacgggcccgctcagaccaatgggcagtgcttcagtgtggagacrttactggatatactcatctgcctttatgatgaatgcaataattctccattgagaagagagaagaacattctcgaatacctagaatggggtaagtttgtaa

SEQ ID NO: 36115 - DNA, 201 bp, Homo sapiens
aggagattaagtaaatttgtatttacttctgctcccagaatgctggcaactgggattaggacaggagattagaagattagaagagtcttgtctggagaatytgactctccccaagaagaaagaacttagagatgcagatatcagaggcttctcagtaaagggctcaggcagtcacactacagtgagatttgttatcagggg

SEQ ID NO: 36116 - DNA, 201 bp, Homo sapiens
agtaaactctactccgttgaaagaaaaaatacaataaaaaaacagacactagttattcaagattttccgctagtttttggtaaatattttcccaggagtaraattgtgctgctcaattgttgccttgatttaaggcctagctaatgtggaacttggctatgaagaacttatgtttttaggtcaacagtaagagattttaaa

SEQ ID NO: 36117 - DNA, 201 bp, Homo sapiens
tgtttctagcatacttattgatgaactcaaaatggttttcttggacataatatcaagttggacttccattttcaaaaggcctatggcaggcctctcaaagkctttgagaggcctatggcaggcctctcaaagtctttgagactttgggaggccaaggcaggagaattgcttgagcccaggagtttgagaccagcctgagca

SEQ ID NO: 36118 - DNA, 201 bp, Homo sapiens
tgaacccaggagtcagagcttgcagtgagccgagatcgcgccactgcactccagtctgggcgacagagcaagactctgtctcaaaaaaaaaaacaaaaaamaaaaaaaaaaactcctttccaaatctgggggacttccttttcttctccattaatggtgagtagaactccaggattattctttctagctagcttctacaca

SEQ ID NO: 36119 - DNA, 201 bp, Homo sapiens
agaatggcgtgaacccaggagtcagagcttgcagtgagccgagatcgcgccactgcactccagtctgggcgacagagcaagactctgtctcaaaaaaaaamacaaaaaacaaaaaaaaaaactcctttccaaatctgggggacttccttttcttctccattaatggtgagtagaactccaggattattctttctagctagc

SEQ ID NO: 36120 - DNA, 201 bp, Homo sapiens
gttaaacagtgaaaatatagacagttcattttttcaaaaaggacacacgatagattagggacttactcaagaacctagtgaagggaaagagtgtaaggtaygggcaagatacagacttggaaatagatgggaagaggagacatgggggagggagaaaaagagaatgagtagggagagggagacagagaatgagaatgaata

SEQ ID NO: 36121 - DNA, 201 bp, Homo sapiens
aatacaattggctttaaaaatattaatcttttatttaaggaacttgattatattaacttcttctagtttgtacataaattttttgaattctctatatgttyatcttgatcttcaattaatgatagcatttgttcttcccaatatttattccttttatttctttttcctctattattgtaatagagaagatctttaataaaa

SEQ ID NO: 36122 - DNA, 201 bp, Homo sapiens
taaatcaattctgtgatgggcaaaagtggattattggttacagttgcctaatacatggcactataatagtccttcatttgaaaggtatttattggtggaarcattcagactatggaaattattctcaaaataggaggagatattaaaatatctgtgtttgccttaggtcaacagaaagctgaaggtggtgatcagtgggtt

SEQ ID NO: 36123 - DNA, 201 bp, Homo sapiens
cccaacagatacatcgaattttgatgtagatgatgattgtttaaaaaattctgtaagtatgacactgtgaagaagttctgtccctctgtttctttctactrtggttatatagtaattttttggtttataagtattttgctaggatgattttacaatgatcagttattagtcagtgatcatggcttccggtgcttattctgt

SEQ ID NO: 36124 - DNA, 201 bp, Homo sapiens
ctttttgcttttaggaatctttttattaaaaagtgttcttaggtttgttgtggccagatttatcaatatttttatggttagtgtatttgctgtcttgtataaaaaatctgagattttaaaaaattctcctaaatttttatcttaaagttttaaatttttaggtctgtatctcaactattttttgaaaactgtgaagatgga

SEQ ID NO: 36125 - DNA, 201 bp, Homo sapiens
gcctcccaagtagctgggattacaggcgcccatttactaccatgcccatttaatttttgtatttttggtagagacagggtttcaccatgttgaccaggctsgtcttgaactcctgacctcaggtgattcacccgccttggcttcctacagtgctgggattacaggcgtgagccactgtgcccagcatcttcctattttgtt

SEQ ID NO: 36126 - DNA, 201 bp, Homo sapiens
ttttcatgctgctaacaaagacatatctggccaggcctggtggctcatgtctgtaatctcagcattttgggaggccaaggtgggcggatcacctgaggttrggagttcaagaccagcctgaccaacatggagaaaccccgtctctactaaaaatacaacattagctgggcgtggtggcacatgcctgtagtcgtagctacc

SEQ ID NO: 36127 - DNA, 201 bp, Homo sapiens
aaatctattttgttataaaaatgcataaattaagcattttcttagtaggaccaaactttttgtgatatgttagagtgactaacttttctttcctaatcttrtaatatccttctatagacatttaaagctttacttctttatgccttccccaacaactttaaaccaatgttttcctgctctttctgatctcatgctaaagac

SEQ ID NO: 36128 - DNA, 201 bp, Homo sapiens
tagtaggaccaaactttttgtgatatgttagagtgactaacttttctttcctaatcttataatatccttctatagacatttaaagctttacttctttatgycttccccaacaactttaaaccaatgttttcctgctctttctgatctcatgctaaagactgtatgctagatgatctggttgtaaatcccagttccttcatt

SEQ ID NO: 36129 - DNA, 201 bp, Homo sapiens
aaattgtcagaaattagtttaaaaacgtaaataaatggactatttaggtcacataacttaaattattttgtttcctcatttaaaatgaagctagtaatgcyacctatcttcatagtttgttgtgtgtcttggacaagttggtatgcaaaacataaaatgtcaagcttgttaaatggagttaatctgaagattatgagtcct

SEQ ID NO: 36130 - DNA, 201 bp, Homo sapiens
taaacttggcaaaatttccaggtaagattatctttcactggatagaattatattttgacttcatgcttaatattttttaagagcatttgcttggccataayaatacaactaacagtgatcgaaaacacaagaacatttattactaaataagtcttgaggcaggcaatcccagggttggctctctggctcagcagtgtcagt

SEQ ID NO: 36131 - DNA, 201 bp, Homo sapiens
ctttaattttctcctctataaaactatttcatgtcacgagtacatacatacatttgtaagctgacacattataagtgttcagtaactgttagtataatagwattatgtatattacagtgagtgaattaagatcaaattgacgtgatatttttaccatactaagtaatagtctgaatgtggtatctgccttttatctttttt

SEQ ID NO: 36132 - DNA, 201 bp, Homo sapiens
agcaatattggttgggtacttgtttcctttatactagccacctaatattctattctaggaatgataatgagtaattacaattattttatctagtacaatgytggcacatggtagaagtgtgttcaatagatgtaatggctattattataacatttctgtttgtctctctctttttaagagaaattacacttagaggtagtt

SEQ ID NO: 36133 - DNA, 201 bp, Homo sapiens
cttttctttttattagtatagttttaaagctgttcactttttttttatgacacgagtgttaattaagtgaggtgttgatggatatgtatcttttctaggayacttttgttcttcacatatgctgttcctcattgttagcttttcctgagtagaatttattaattaatcagtccgaattatcaaaatgttcacttaatacag

SEQ ID NO: 36134 - DNA, 201 bp, Homo sapiens
aggagaatcgcttgaacccaggaggtggaggttgcagtgagccaagatggtgtcattgcactccagcctgggcaacagaatgagactgcgtctcaaaaaaraaaaaaaaaaaaaaagttataaaaatatttaagaaaacaaaggaaaatgtagccttaaagattacacaaataaggaatttcagcagaaaaatgagtcaaa

SEQ ID NO: 36135 - DNA, 201 bp, Homo sapiens
gcctcagcctcccaagtagttgggatacaggcaagcaccaccacgcctggctaatttttgtattttttgtagagatggggtttcaccatgttggtcaggcyggtctcaaactcctgacctcaggttatctgcccacctcggcctcccaaagtgctgggattacaggcgtgagccaccgtgcccggccaactttggaaaatt

SEQ ID NO: 36136 - DNA, 201 bp, Homo sapiens
tctcccaccccctcactcccccagagccacccagaaaaaaaaggctgggcatggtggctcacgcttgtaatcccaacactttgggaggctgaggcaagagsatcacttgagtccaggagtttgagaccagcttaagcaacatagtgatactctgtctctgttttaaagaaaaaaaaaagtttatatgccacagttttattc

SEQ ID NO: 36137 - DNA, 201 bp, Homo sapiens
tgataaaatataccctttatgagacccttgtttgctccttctttagttggtgacttctgttgtactttagatatttcaaagttcaccgggggtaaaagaaytaagtctcacatagaaaaagaaaacgcagctttgcccgcacttttacttttttgtctttctttcctaaattgcttagttattctaagggatagtgttcaa

SEQ ID NO: 36138 - DNA, 201 bp, Homo sapiens
ctaaattattttgttcacagacatttcccttgctatttgtctgatatatctgttttagaaaccatctatttatactatctacccatccatccatttgtctrtctatgcgccacctccttccacaaaggcatttgggcatacttacagtggggttgtctaaaaagtcacaagccatttcagctgcttatatcagtgatctta

SEQ ID NO: 36139 - DNA, 201 bp, Homo sapiens
aataaaccaagttgcaaaaggcaatgcacagtttggtgtcatttataaagacattttaaaaagtacatagttttatgatgttgtatataggcataatagtrtaaaatatgcatggatacagtaaacaccaaatttaggatagtagctgtgtctgggtagtggagggagaggatgagatcaggaatggtaatagaatactta

SEQ ID NO: 36140 - DNA, 201 bp, Homo sapiens
cctggctaacatggtgaaaccctgtctctactacagatacaaaaattagcccggtatggtatcacacgcctgtaatcccagctactcaaggagctgaggcycaagaatcgcttgaacctgggaggcggaggttgcagtgagccaagatcgcaccactgcactttatgtcagtatgaacttctgcagtatttcatacacaca

SEQ ID NO: 36141 - DNA, 201 bp, Homo sapiens
ctcactgtgttgcacaggctgttcttaaactcctgggctcaagtaatcctccctcctcggcctcctttggcctcccaaagtgctgggattataggcatgamctatcacacccagctgatgaagcataatatttgaataaaccaagttgcaaaaggcaatgcacagtttggtgtcatttataaagacattttaaaaagtaca

SEQ ID NO: 36142 - DNA, 201 bp, Homo sapiens
atatactagttagtatagtatacattttctagtataacctactagaaaatgagcttcagatgactaacatggctatagagatatcagtataaggactggtrttgctcattaaatagtcagttgtagaactaaagcagaaaaaagttaaaaggagtgagcacaggattaatggctatatgctgtggcatgagcatgtagtat

SEQ ID NO: 36143 - DNA, 201 bp, Homo sapiens
ggaaaaacaagcccacatgcagggagaagggatttgtaacacatcatgaagaactaagttcgagtaaatagaatccctgaagattaaacaaaaaacagtgsacacacatttttacaacggcaagggatattaacaggcattttatagaagaggaatgtaaaatgaccaatgataccagtgataatatgaaaaagattctca

SEQ ID NO: 36144 - DNA, 201 bp, Homo sapiens
tactttatcattagacttcccagtgatgaagctttatgataaagatttataataccctagaaaagaaaatgtgaacaaaacagactttcaggtataaaagrcatgtacaaatgttatcaaatacaagaattttaggaatgttgtttccatgaattcctcttgaagaagatactaatctagttagtatagtgtaataatata

SEQ ID NO: 36145 - DNA, 201 bp, Homo sapiens
ttccccccacttgaaagtctgagaaatagagaaaggtgccacctctccgcctgtcacttctcttctttctgctggcctccttcctcatccaggctgcttcyttatgccgtaaaaggacatggggttagtttgcccctgtggtttaatctaggactttcttaatttcttccttagctcgggtaagaatgatgttcaattctc

SEQ ID NO: 36146 - DNA, 201 bp, Homo sapiens
agcaatatgtgactgtaatctagaggtgatttaaagtatatgggaggatgtgtgtaggttgtatgcaaacactgtaccattgtatatatgagacttgagcrtccgtggattttaggtattcaagtagggtcctggaatcagtgccctatggatactgagagacaaccatatatagaacttttcacccaacaacagcaaaat

SEQ ID NO: 36147 - DNA, 201 bp, Homo sapiens
aagaaaaattaacagcaatccttcccaaactcttttttgagaaggcacctgtcgtcccagctactctgggggctgaggcaggaggatcacctgagacttcrgaggtcgagacttcagtgagccatgattgggccactgcattccagcctgggtgacagagtgagaccctgtctcaaaaggaaaggtacttgagacttgagc

SEQ ID NO: 36148 - DNA, 201 bp, Homo sapiens
tcatatgtaagaaataaaagaaaatatattgttttcttagggaaattaaatctgtttattctcatatagtttgggatttttaaatattttgacaattcttraatcataatttgaatttttgtgtaactaagaaacaccattatttatatctaatttgcatcacattttattaagaaaataattgatattgctctttcattt

SEQ ID NO: 36149 - DNA, 201 bp, Homo sapiens
aattgagtagtacatgctagatgttcaacactgataggaattgtgggtataactttatatttgacatacatttttgtttaatagtctttctcctgagttawgttgcttctatgatatatgcaattctttgttataataatctgataggagtcttctgaagagagagttttgcttatctccttttattctttgtcccatata

SEQ ID NO: 36150 - DNA, 201 bp, Homo sapiens
gtgagccactgcacccagcaatagatctttttttttttttttaatgactttaccatagtagctttgtatatgaatctgatggcaattgggatgtagatatyttttgcaataaataataatagtcacagattgtataaccagttctcataacacattataagttctgtaagcttgaggatttagtttggtttaattctcttt

SEQ ID NO: 36151 - DNA, 201 bp, Homo sapiens
atctgatggcaattgggatgtagatatcttttgcaataaataataatagtcacagattgtataaccagttctcataacacattataagttctgtaagcttraggatttagtttggtttaattctctttttgtggtaatttttagaaactgtaaacatttaagtgttaaaaggtgattaagaatatgccatagtcactattt

SEQ ID NO: 36152 - DNA, 201 bp, Homo sapiens
acacaagagaaaattaggacaccatccttatgatgtctgggaagacagaaatcatagtataaattataagactacattagtattttatatatatatatatwttttttttttacaaataagaaggacattaaaaacaatggaaaaacaagcccacatgcagggagaagggatttgtaacacatcatgaagaactaagttcga

SEQ ID NO: 36153 - DNA, 201 bp, Homo sapiens
ttaatatttttttttatagagacagagtctcactatgttgcctatagatgagacatgtaagttctctgtggaaaataattcataactgaagaatataaaaraagacttataggtttagtgtatatacagatgggaagtgtcacattgcaaagatgtcagttctcttcagattaatctataaaatcatgattcccataaaaa

SEQ ID NO: 36154 - DNA, 201 bp, Homo sapiens
atgtaaaacctacttatatagcatttatatcacattaggtattgtaagtagagatcgtgacgttttgatcagccacagactgcatatacaacaatggtccyttaagagtataacggagttggaaaaattcctatcatctagtaacgtcttgatgatcttgaccctgtgtaaaccctatattaatgtgtgtgtttgtgtctt

SEQ ID NO: 36155 - DNA, 201 bp, Homo sapiens
cctcctgagtagctgggaccacaggcatgcaccacaatgcctaagatttaatatttttttttatagagacagagtctcactatgttgcctatagatgagayatgtaagttctctgtggaaaataattcataactgaagaatataaaagaagacttataggtttagtgtatatacagatgggaagtgtcacattgcaaagat

SEQ ID NO: 36156 - DNA, 201 bp, Homo sapiens
ttcacaaacaacgtagaaacctttagacaactccttgtatgactgttgttacatagtttactttaatctgtgttataaatcttttaatacacttttactcsattgttgctttatgttttctttactcattaattttaagtatctttttatttacccatatatttacccgtttggtgctttttatttctccctagtgatcca

SEQ ID NO: 36157 - DNA, 201 bp, Homo sapiens
gttaacatagtttggacaatttaaagcaaattaaattgaattgaggttcgtaaaaggtgtatgagaaaactttgtgaattaaaactttttaaaaaatagartgagcctactgctggaaatagaaagttaagcattacaaaatgaatagaacgcatgaaaatcttaactcgttttggaggggaaagaatggaacagagagct

SEQ ID NO: 36158 - DNA, 201 bp, Homo sapiens
tgtgttataaatcttttaatacacttttactccattgttgctttatgttttctttactcattaattttaagtatctttttatttacccatatatttacccktttggtgctttttatttctccctagtgatccatgtttctatctggaatcatttttctttagcctaaaaaacttcctttattgttttcttgtaatgtgaat

SEQ ID NO: 36159 - DNA, 201 bp, Homo sapiens
cagcctgggtgacagagcgagactctgtcttaaaaaaaaaaaaagttaacatagtttggacaatttaaagcaaattaaattgaattgaggttcgtaaaagrtgtatgagaaaactttgtgaattaaaactttttaaaaaatagaatgagcctactgctggaaatagaaagttaagcattacaaaatgaatagaacgcatga

SEQ ID NO: 36160 - DNA, 201 bp, Homo sapiens
atattttttattaggttgattttttttttaagtttatgggaatttagattgtttccttatttttactattttgaaccatgttgtaaaaatctttatatatrctggataaacttttgtgagtttatcggtagtgtgaattcttacaaagatgaagtgtcaaactgtcaatacatttcattattttaccatttatctatctgc

SEQ ID NO: 36161 - DNA, 201 bp, Homo sapiens
taaaaccatattttaaaataaggttacattctgaagtactggtggttagggcttcaacataggaatttgaaggtaatacagttcaacccatacacttacawttttcacttaatagtgtaataagcatttttactttcattaccaaattgtcacaaacataattttaatgattttaagtagttcaagaagaattttcacata

SEQ ID NO: 36162 - DNA, 201 bp, Homo sapiens
aaaaggttatattgaaaagtagtctctccagcatacctcttatgcctgctccctagtggcagctatattcaattctattttttaaaagttatttagccccrtatctctaatgtcctgatatgttgatgtttctagatttgcgaattttggacagtttgtaaagacttcttttgcctgccttctatgctagtggaggattta

SEQ ID NO: 36163 - DNA, 201 bp, Homo sapiens
aaacacaaagaagaaactaataatcacttttgttctgttacccagaactaataacattttggccaagtttttgcttttagtttttttttttaaactaaaamaaacaaacaaacaaaaaccctcagaagtgaagcacaaatatattctctgtaaaacaaataatagcatattacagataaagccaaagtgttctttcaccac

SEQ ID NO: 36164 - DNA, 201 bp, Homo sapiens
ctggtgtagaattctgtcagtattttaactggtaaaaggtgatactgacgagcaggctgagtaatagccctggaagttagtaagattagtaagaaaataaygacaaattcgcctttagaaatctttatctgtcagtacttgtagcaacccaaagatgaacaaacatacagggaaaagcaaaaagtgtttccatgatgacag

SEQ ID NO: 36165 - DNA, 201 bp, Homo sapiens
tactttattaaatgtataattgtactcattgttggataaacagagaccaattaatattgtcattttaacatcatggtgcttatctgtgatattgataaccrttaactgtttggactaaaatatattgcggactgcagatgatcttagtggcttagtgaaaacattttcatattctttgattaaatgattcagacatttaca

SEQ ID NO: 36166 - DNA, 201 bp, Homo sapiens
ccaacactttgggaggccaagacaggtgtatcatgaggtcaggagatcgagaccagcctggccaatatggtgaaaccccatctctactaaaaatacaaaamttaggtgggcgtggtggcaggtgcctgtaatcccagctactcgggaggccgaggcaggagaatcacttgaacctgggaggtggaggttgcagtgagccga

SEQ ID NO: 36167 - DNA, 201 bp, Homo sapiens
aaatctaaaccatctttcaagtaacttctcacttaagagtgagacaattttggctttggtactggttttgtgagtatacgtcttttatttgttgaataaartattttgtaaagcatatgtagttttacatcccatgtttcacaaattgagaaattctgtagtgttaatttttttttttaagacttaaagggttttggtact

SEQ ID NO: 36168 - DNA, 201 bp, Homo sapiens
tgatatgatatttttaagtaaaagaagaacaaaaagaacaagaagccaggggtgatggctcatgcctataatccctgcactttgggacactgaggcaggcrgatcacttgaggttaggagtttgagaccagcctgactaacatggtgaaaccctgcctctactaaaaatacaaaattagccaggcttagtggcgggcacct

SEQ ID NO: 36169 - DNA, 201 bp, Homo sapiens
ggtccaagcagttgggagaatatattactagaaaggacgactacaggagaggcaagtttgggattgggagtgttatcaagggcacattttttcccctgacragactctttcataaacagaaagagctcattttaaacagttacagttgagatgcttattagacattcagttggagatgtcaaataggctgatgtatagacc

SEQ ID NO: 36170 - DNA, 201 bp, Homo sapiens
taaagagtaaaaagaaagttaagaatggaaaaggctgtcaggagttgcgtagtgagtagtggtatttgctgtctttaagttatttgagaatttaggttaaragtgccagtctatttaagaattgaaatagatcagatgttcttcatatgaattgataactgcattttggggaaatgtcctattttattttaattacttaac

SEQ ID NO: 36171 - DNA, 201 bp, Homo sapiens
agacttaagaattctatatatccagtgaaaatatccttcaaaaataaatgtgatatgatatttttaagtaaaagaagaacaaaaagaacaagaagccaggkgtgatggctcatgcctataatccctgcactttgggacactgaggcaggcggatcacttgaggttaggagtttgagaccagcctgactaacatggtgaaac

SEQ ID NO: 36172 - DNA, 201 bp, Homo sapiens
cttagaactgagccttggggtactccaatttttggaagtcaagagatgatgaggaaccagcagagtggatagagaaagggcagtgagaatgacagcataayaacaggcaaatttagtgtccttgtgttagcagcgccgaatccatatgtgtttgcagcagcctcaattcttgcctcctcagaataaagaattagaccaagg

SEQ ID NO: 36173 - DNA, 201 bp, Homo sapiens
tcagaaggattcattcaatatttattgagaatatttaagtttgaagtcttatgctaagcaaaatacaatacttcctgcccttaagcgtaatatttcctgcycttaagcataatacaatatttcctgccctgacagtctaattggaaagacaaatatataaccagataactataacaccatgtgggaaatatagtaataaaa

SEQ ID NO: 36174 - DNA, 201 bp, Homo sapiens
gcaacatgccaagaccccatctgtacaaaaaaatttaaaaaataaaaaaataaaaaattagctggatactaattttttttagctgtaatcccagctactarggaggctgaagtgggaggattgcttgagcctaggaggtggaggttgtaataagctgagatcacaccactgcactccagcctgggtgacagagtgaaaccc

SEQ ID NO: 36175 - DNA, 201 bp, Homo sapiens
tcctgaagtttaaaagtgaaaaaaacatactggaaatcactggggtgggattcagttcagttatctgctctataaatgatcactaggaaggagggaggcaktgaaaagaccagaagcacagtgtgggccagcacacaccttctgtcttgcatgttactctccatgcattgagtggtgagttgttcccacaaagtcctgtaa

SEQ ID NO: 36176 - DNA, 201 bp, Homo sapiens
aagggtgaaggaataggactccacaaaagctaagaaagcaatcgttgagaagtatgtggttacttaggaaagtacctgtcagaaaaactagaagagcagakaattttaaggaggggaatggtcagtgtgatggtatggcagaggtggttggtcagataggacaaaccagaaatactgacctgagtatcagatcaaagcaga

SEQ ID NO: 36177 - DNA, 201 bp, Homo sapiens
agtggtatttgctgtctttaagttatttgagaatttaggttaagagtgccagtctatttaagaattgaaatagatcagatgttcttcatatgaattgatamctgcattttggggaaatgtcctattttattttaattacttaacaatatgtgaaaatcagttaagactaagaatatttccaaattgtgaattgacctcagt

SEQ ID NO: 36178 - DNA, 201 bp, Homo sapiens
ggattaagccaatgatcactagagcaagggaataaaagtgccttaagactatagatcacatttaaatttaataagatgtattatttttcatttatagtaamtagtatttgaaagactatgttttttgtctgcttagttttaagttgttgaaatgattatggtttgtatgtttgtgtatacagtaatagtcgatgtcagcat

SEQ ID NO: 36179 - DNA, 201 bp, Homo sapiens
caacatgttgctaaatctaatgatcacttgtcagtcctagtcttacttatttgcttagtctcatcttatttgccacagctccatacttttaaaataccacmttctcctgtcttctaaggcacttgactgagtttctctcaccttgctggtcattccttctcagtctccatacctgatccctcctgatttccctggcttgtt

SEQ ID NO: 36180 - DNA, 201 bp, Homo sapiens
gataaagatgattttaattcagtgaactttgtagttgagacttttgttaataaaatatttttaaaaagttttactgccattctgtgtagaaataattggarcaagatttttaaaaataatcattatgatacctatcttttatctttctgtggaaaaaatatggaaacgcttatgtctctagaggtaaatatttagtgaaat

SEQ ID NO: 36181 - DNA, 201 bp, Homo sapiens
tgtggttttcatttgaaattaaaattaatcatttttgatttcatattttttctttaacactatgatactttaaaaattattggctgggcttggtggctcaygcctgtaatcccagcactttgggaggccaagacaggcggatcactaggtcaggagtttgagaccagcccggccaatatggtgacaccccatctctactaa

SEQ ID NO: 36182 - DNA, 201 bp, Homo sapiens
gaggccaagacaggcggatcactaggtcaggagtttgagaccagcccggccaatatggtgacaccccatctctactaagaatacaaaaataagccgggcakggtggcgtgtgcctgtagtcccagctactcgggaggctgaggcagaagaatcacttgaacctgggaggcagaagttgaaatgagccgagatcgcaccact

SEQ ID NO: 36183 - DNA, 201 bp, Homo sapiens
gttaacctatcaagagcaaaagtggggtagacttcttggtttagtggctctatagtattatcaaatatccaaagtctttcagtctcactgttgttgtagtrtagatttgggtgttttttttgtttgtttttgtttttaatttttgagacagagtctcactctgtcacccaggctggaatgcagtggtgtgactttggctca

SEQ ID NO: 36184 - DNA, 201 bp, Homo sapiens
aaaggaaaggtacttgagacttgagcttaaaataaattcacccaagttccaggctgcaagatcaacacatagcaatcagttgtgtttctataaggcagcaygaacagtctgcaaagaatgttaagaaagcaattccacttaacaattgcatctaaaggaataaaatcccttgggacacatttatccaactaaaaatgacaa

SEQ ID NO: 36185 - DNA, 201 bp, Homo sapiens
ccgcataaccaattttctattgttacctttaaaaattctttgcagtattataattgccaaaaacacctttatgcactgctttttctgtatcattttcttaraacaggcacccagaaacgaagttagcgattattttaaggctaatttatgtgataaatcccacaaatctttgcaaatacgagaggccaaaaaagttgtacc

SEQ ID NO: 36186 - DNA, 201 bp, Homo sapiens
aagtagctgggattacaggcgtgtgccaccatgcctggctaatttttgtatttttagtagagacgagatttcaccatgttagccaggctggtcttgaactmctgacctcaagtgatctgcccacctctacctcacagggtgctaggattacaggcatgagccactgcacccagccaaaaatgatttcataaaaattgttaa

SEQ ID NO: 36187 - DNA, 201 bp, Homo sapiens
atacagtaaatacttattgagtacctgttatgtgtcaagtattggagatacatagacaataaacatatcctagacctaaaggagaccaaagtcaggattgrcagatagaaaattataatacagcatgatagaaaagcaaatgggatgataattctgaacaaaattacttctagctgggtatgatggcacacgcacacacac

SEQ ID NO: 36188 - DNA, 201 bp, Homo sapiens
agtcaggattggcagatagaaaattataatacagcatgatagaaaagcaaatgggatgataattctgaacaaaattacttctagctgggtatgatggcacrcgcacacacacacacacacacacacacacacacacacactagctgggtatgatggcagacacacacacacacctataatctgagctacttaagaggctga

SEQ ID NO: 36189 - DNA, 201 bp, Homo sapiens
attacttctagctgggtatgatggcacacgcacacacacacacacacacacacacacacacacacactagctgggtatgatggcagacacacacacacacmtataatctgagctacttaagaggctgaggaaggaggcttacttgagcccaggagttcaagcccagcccaggcaacatagtaaaaccctatctctaccagg

SEQ ID NO: 36190 - DNA, 201 bp, Homo sapiens
ggcgtgaacccaggaggcggagcttgcagcgagcggagatcgcaccattgcactccagcctgggtgacagagcgagactctgcctcaaaaaaaaaaaaaamacaccagggaagataaatatgaaaaaggccatgtcaaggttcattatagtgaaactattgaaatccaaagacagagagcaaattttggaagcagcaagga

SEQ ID NO: 36191 - DNA, 201 bp, Homo sapiens
ttacttctagctgggtatgatggcacacgcacacacacacacacacacacacacacacacacacactagctgggtatgatggcagacacacacacacaccyataatctgagctacttaagaggctgaggaaggaggcttacttgagcccaggagttcaagcccagcccaggcaacatagtaaaaccctatctctaccaggg

SEQ ID NO: 36192 - DNA, 201 bp, Homo sapiens
agaatggcgtgaacccaggaggcggagcttgcagcgagcggagatcgcaccattgcactccagcctgggtgacagagcgagactctgcctcaaaaaaaaamaaaaaacaccagggaagataaatatgaaaaaggccatgtcaaggttcattatagtgaaactattgaaatccaaagacagagagcaaattttggaagcagc

SEQ ID NO: 36193 - DNA, 201 bp, Homo sapiens
ccaggagttcaagcccagcccaggcaacatagtaaaaccctatctctaccagggaaaaaaagaaagaaagaaacgataaacttctaagctgagatataatyagtaagaaagaagtagctagggaggagtgtccagggaggatgtgctaagatctaaaggaaaagggggacatgccacattcagaaaatgatagctgtttac

SEQ ID NO: 36194 - DNA, 201 bp, Homo sapiens
aaacttaccagtgttttaaaattgaacagtcacaatttttttttaaatatttctttttggcattttatatttatagccaagcctacagatcatatagctayctatttcttaccagatgttttttcctcctttaggaaacgatgcccccaccaacacatactgcattttctggccaccatctgccatttgttggttttacat

SEQ ID NO: 36195 - DNA, 201 bp, Homo sapiens
tagatgagagtggtgagaaatgaagctggaaagtaaaatagaggcaaagtcatgacagaatacaaggcatttgcacattatcctcaggccattgaagaaargtgacatgattatatttacatttttgaatcaccactcttgctactgtgtggagagtgaagtgggaggagcaggctggaggtaggaatccagctgcgagag

SEQ ID NO: 36196 - DNA, 201 bp, Homo sapiens
ctacacaaatttgcaaatacagaatacatgaataataatgactgtattctcaatatcagactttgaatcttcattttactttaattagaattttagagtascagtgttcatggtctaaattttatatcactaaacaactataccaaacttaccagtgttttaaaattgaacagtcacaatttttttttaaatatttctttt

SEQ ID NO: 36197 - DNA, 201 bp, Homo sapiens
gggaggagcaggctggaggtaggaatccagctgcgagagatgaggtgtgggcctcaggtggtgatagtgaagatggagagaagtggatggattccatctastaagaagatagaacctggagaacgtaataagcagctgtgagaaatgagggagcaggagaaattatcagttatactcagctttctagatttcaggcaactg

SEQ ID NO: 36198 - DNA, 201 bp, Homo sapiens
gtttgtcttgtatagtgggcataaaagaaaagttctaaattgcctctgcaatgacttgtagtcagtggaagagtatcattttccctgatcatgaccactaygctgtaaattgatataaattaactttctctggagttacacacaaataacgaagatttaagagaaccttggctgaaataaatttccagttgtttggaggct

SEQ ID NO: 36199 - DNA, 201 bp, Homo sapiens
atttttatgtagatttgagggaaggattgactggagtgatgttaaaaatatccagcagctggtatggcctggtcagaactgctgtcacacatagatttggrgtggacttctggggggtccgctgctgtgctgtatcatggtgaagggttgaatgggataggcattctggggcttcagggaagcagaacttaactggtgtag

SEQ ID NO: 36200 - DNA, 201 bp, Homo sapiens
tgaggcacaccagctttctgttgcgtagaatctctccctgagggcaagcaggttacatgaaacttagtgaaacttagtggaatatacgtgctttcctatcwttgttttaaatcttaaatactggattgaatagattcttaggatggaatgtatttttaaagtaatttttctttaccctagtccaaaaaactaaaatgaaaa

SEQ ID NO: 36201 - DNA, 201 bp, Homo sapiens
tgttgaaatttccccatatttttatgtatttttttctctgttttctttaacattttaatattttgaggtccttatctgttactttcaacaactgaatcttytgcgagcctgcctttctgtttttttctttcatttgtcatgcttttctgcttttccaaatgtctcatgtgaaagatgtcatgaataaaaataacacagaga

SEQ ID NO: 36202 - DNA, 201 bp, Homo sapiens
gctccatccaagttgttgcaaaagacattattttgttctttttatggctgagtagtattccatggtatgtgtgtatatatataccatatattctttatccmtacattggttgatgggcacttaggttggttccatatctttacaattgtgaattgtgttgcaataaacatatgtgtgcaggtgtgtttttgatgtaatgac

SEQ ID NO: 36203 - DNA, 201 bp, Homo sapiens
aatactgaggagcattgatatttacaggaaggatggaagagtcacaaagacagctgaaaagaagccaggaatgtagactaaaactaggagagcatgggatycctgaagtcaaagccagacagcatgtcaagagggcaagagtggacaacactgtcaaaagtggccagcaggttggatgtaatcacaggcagtgttgagttt

SEQ ID NO: 36204 - DNA, 201 bp, Homo sapiens
tttgaattttttcaagactctttaaatcttaatgtcaactcagtaatatccctgaaaacaatatcttcattctgtaataaaaccttaatttcaaggcattyatgtgtcttgtactcactagccttcatgctaagtgctacattatcattattgtagttaggtagatgagaaaatgaaatgtcacagagattaatttttcaa

SEQ ID NO: 36205 - DNA, 201 bp, Homo sapiens
taatggaagaactgcctgcatttttatgtagatttgagggaaggattgactggagtgatgttaaaaatatccagcagctggtatggcctggtcagaactgmtgtcacacatagatttggagtggacttctggggggtccgctgctgtgctgtatcatggtgaagggttgaatgggataggcattctggggcttcagggaag

SEQ ID NO: 36206 - DNA, 201 bp, Homo sapiens
tgactgttaaacagtgaaaatatagacagttcattttttcaaaaaggacacacgatagattagggacttactcaagaacctagtgaagggaaagagtgtarggtatgggcaagatacagacttggaaatagatgggaagaggagacatgggggagggagaaaaagagaatgagtagggagagggagacagagaatgagaat

SEQ ID NO: 36207 - DNA, 201 bp, Homo sapiens
aaaaaaggaaattttattatatataattgtttttcaaagtaacttttaaccctgatagcttttaaattgccaagtaaagaacataatttataatgctatayggttctagaaagctgtggcaaataactttcatttctaacctacttactacaatagtttatgaaaaaatttgcaattatagcaagtagactttttgtgtgt

SEQ ID NO: 36208 - DNA, 201 bp, Homo sapiens
cttatgttaagaatcagaattcttggtgtagaagaaaggagatgctgatgtaatctggaagagatcattaaaaaccctaatgtcgtgaatttgaattgaaratatcattgtgggctgggcatggtggctcacacctgtaatattagcactttgagaggccaaggcgggcagatcacttaagatcaggaattcgagaccagc

SEQ ID NO: 36209 - DNA, 201 bp, Homo sapiens
tttaatattagtggaatactaaatggaaacccttgtaatggggggcttatgcagctatatttaaaggatgtctgcaaactactttcttctatagaaagacrttttgtaatggttgatttctaacgtgacgtaacttgtttatattattctgtatttatctgtattctgctacaagcaaaagtcagcaggagttttgaacat

SEQ ID NO: 36210 - DNA, 201 bp, Homo sapiens
ttttaagtcttattaaaactgtgtttacttctaagggtaaataagtcatcatgatccacagaactatcattttaaataagctttgtaatattataataataaatgtgtatatatgtagatgtaagaaggaatggctgaaagtattgatagaactgttggaaatttaattgaacttttaatacaatctagggttgagaacaa

SEQ ID NO: 36211 - DNA, 201 bp, Homo sapiens
ctcattaatgtgtacagtggtttttggtatattcacagatatttgcaaccattactatgatctattttagaatattttcatcatttcagaaagacactctwctctataccttaagtctctacaccctgtttccctatttccccagccttaagcaaccattagtctaccttctatctctgtagatttgcctattccagacat

SEQ ID NO: 36212 - DNA, 201 bp, Homo sapiens
ctaagcaaaatacaatacttcctgcccttaagcgtaatatttcctgcccttaagcataatacaatatttcctgccctgacagtctaattggaaagacaaayatataaccagataactataacaccatgtgggaaatatagtaataaaagataaagatcgtatatcatgggaatacaaagaagagagatttctgattgaacc

SEQ ID NO: 36213 - DNA, 201 bp, Homo sapiens
tgccagtggtattcagtggatcctcattaaaaattattgtgagattaaattgtaaatagtcttttaaaatagctttttttttttttttttttttttttgaratggaggctcgctctgttgcccaggctggagtgcagtggcacaatctcggctcactgcaagctccacctcccgggttgacgccattctcctgcctcagcc

SEQ ID NO: 36214 - DNA, 201 bp, Homo sapiens
aaatatgcagtattttaataaatttaaaattaaataactatgaaatgtcatatgaatgaggtagtattacaaaataatgtttcttgcattcttgtttctartatgctattaaacctcatttacagtttgaatgattttctttataaatagtattaagtatagtagaagaaaaagtttttattgatagtattgttaatgtcc

SEQ ID NO: 36215 - DNA, 201 bp, Homo sapiens
gacagagaatgagaatgaatactgtgttcctgagttgctacttcagtctgacttgttgaatgatagggtattttttttttttatgattgggtatttttaawttaaaagaacttaatgggcaggggagttaatttcactcttgtatttctttcaatggtttattgtctcttcctttgtttttttccgtttctgagtttgggc

SEQ ID NO: 36216 - DNA, 201 bp, Homo sapiens
atattatccttgatagttaatattaatagtagtcatttatatattactacttcttaagactttttttttttcaaacttttttgccctttggaggaaagatstctacctttttgtataacttgccagtggtattcagtggatcctcattaaaaattattgtgagattaaattgtaaatagtcttttaaaatagctttttttt

SEQ ID NO: 36217 - DNA, 201 bp, Homo sapiens
gaggtagtattacaaaataatgtttcttgcattcttgtttctagtatgctattaaacctcatttacagtttgaatgattttctttataaatagtattaagwatagtagaagaaaaagtttttattgatagtattgttaatgtccaaatacaaatgatgagagagatttccacagtgctttcattaatagtgagaaacactg

SEQ ID NO: 36218 - DNA, 201 bp, Homo sapiens
tgacttgttgaatgatagggtattttttttttttatgattgggtatttttaatttaaaagaacttaatgggcaggggagttaatttcactcttgtatttcyttcaatggtttattgtctcttcctttgtttttttccgtttctgagtttgggctaatgggcattgactttgattgattgtcagaggtatatacgtttttga

SEQ ID NO: 36219 - DNA, 201 bp, Homo sapiens
atggctttaatcctgtactaaaaatttttatgttaatgttatatgacttaacaaaatctttatttttaatttttgtgggtacataataggtacacgttatrtaacttttcactgaaacagtgaatactatttcaatacaataagctgtgatcactgtttgataactgataattgtaaaaccatcctagtactgtattcaag

SEQ ID NO: 36220 - DNA, 201 bp, Homo sapiens
attgggtatttttaatttaaaagaacttaatgggcaggggagttaatttcactcttgtatttctttcaatggtttattgtctcttcctttgtttttttccktttctgagtttgggctaatgggcattgactttgattgattgtcagaggtatatacgtttttgagtttgagtgataaccatatgacctataaacaaaggta

SEQ ID NO: 36221 - DNA, 201 bp, Homo sapiens
ttaaaaaaattattatataaactactatattatgtaaactacaatattttagcttttctgtgtgagaaagtgatttttgtttgtttgtttgtttgagacakagtcttgctctgtcatccaggctggagtgcagtggcacgatcttggctttctgcagcctcagctcccgggttccagtgattctcttgcctcagcctccca

SEQ ID NO: 36222 - DNA, 201 bp, Homo sapiens
cactatgcccggcctatttttttcccaaaagttttgtgtttcacttcttatatttgttatgaatccattttgagttaatttttatatatgatttgaagtargtatccaacttcattcttttccatgtggaaattccaattgttccagatttgccatatagaaaagagattattctttctgtattgaatggactcagcatcg

SEQ ID NO: 36223 - DNA, 201 bp, Homo sapiens
aataacctttagctgatgaaactaatcaaaaggactaaaagagaacgctattaaagaatagattgaaatagaccagtacatttttactttctgcttaatgmggtttcaagcaatttttttgtataggtccatttaaattcattgccaatttaataatatttgtcatttaaaactgttagtgttctattcgctttaataata

SEQ ID NO: 36224 - DNA, 201 bp, Homo sapiens
agaagaaaaagtttttattgatagtattgttaatgtccaaatacaaatgatgagagagatttccacagtgctttcattaatagtgagaaacactgaatgtmttatttcagattgttcatttagagtttggagcagagattttatagcccacgtatggcttaactttctcttatgttttcttagaatatgtgtaaattctcc

SEQ ID NO: 36225 - DNA, 201 bp, Homo sapiens
atcatggtaaaaggcaaaggagaagccgaccccgtcctgcatggctggagtgggaggaagagagagaagggggagatgctacacgcttttaaacaaccagwtcttgtgagaactcactcactatcacaacacaaaggggaagtctgcccccatgatccagtcacctcccgccaggtccctcctccaacactgggattacag

SEQ ID NO: 36226 - DNA, 201 bp, Homo sapiens
ttctgcttaatgcggtttcaagcaatttttttgtataggtccatttaaattcattgccaatttaataatatttgtcatttaaaactgttagtgttctattygctttaataatattatagtaatattaatggtttaccatttttattggtaggattactcagccaaatttagttaacataatcggcgttatgcttcctgctt

SEQ ID NO: 36227 - DNA, 201 bp, Homo sapiens
gagaatgggccagaaaaaatacctgaagaaataatggcctcaaatttgatgaaagatataattttatgtatttgagatgctcaagaaacaccagggggccragtgcagtggctcacgcctgtaatcctagcactttgggaggccgaggcggatggatcacgaggtcaggagatcgagaccatcctggctaacacggtgaaa

SEQ ID NO: 36228 - DNA, 201 bp, Homo sapiens
aaactccttggccgggtgcggtggtttacgcctgtaatcccagcactttgggaggccgaggtgggcggatcacgaggtcaggagattgagaccatcctggytaacatggtgaaaccgcgtctctactaaaaattcaaaaaaaaaaattagccgggcgcggtgacgggtgcctgtagtcccagctactcaggaggctgaggt

SEQ ID NO: 36229 - DNA, 201 bp, Homo sapiens
cctatttcttgccagatttattaattatggtcttggatacatttatcgtcaacaaaaaaaaattattttgagatgattttggttgttttgctttgttgttrttattatttgtcagcattacagaaccgatgtgcctgcttatacatacatgtacatgtatagtatctaaaagttgtcactcctagaataatagacattgga

SEQ ID NO: 36230 - DNA, 201 bp, Homo sapiens
tgtcaaattagcaaagatcaaaagaaaaatagtactctgtaccataaataatgcagtgagatgggcattctaagacattaataggaatataaattggtgtracctttctgttcaggaagtttacaggtgtgcacctagagccttaaaaaatggttagaggttttgattgagcaacttcagtctaggaatctaccctatgac

SEQ ID NO: 36231 - DNA, 201 bp, Homo sapiens
gtgacttctggactccttacatactggaagtggaagtctccccataatcttttaaaacttagatttcaaaacaacatgttttatcattgtgatacggctcygatgagtggaggaacaccagattcttcctcttaagttgaattagaaaaaaaacgacatggacacacgtggagtagttttaaggagcagggagtttaatag

SEQ ID NO: 36232 - DNA, 201 bp, Homo sapiens
agtacttaaaacagttacaatatcacaggtaataggaatttttcaacaccacatagtgttcccataagattataataaagttgaaaaatttacgcagttayggactaatgcattatggactaatggcagtccatagttgatcaaaatgtcattatgcattacatgactatattgtagaattctgagcagaaaagtgacaac

SEQ ID NO: 36233 - DNA, 201 bp, Homo sapiens
ataagaagggtttgaattttaatgatctttaaaggtaaagatagcaatgtattgatggactaggtatgggatgagggagaaaaaggaagactcaaggatgrtactaaggtttttggtccaagcagttgggagaatatattactagaaaggacgactacaggagaggcaagtttgggattgggagtgttatcaagggcacat

SEQ ID NO: 36234 - DNA, 201 bp, Homo sapiens
attgtgttgcagtctaatacatccatgagaaatggacatacttaggcctagtatatgtaatgaagcctccttgatgaggcctgaaggatagtttgtttttwaaaaaaaaaaaaaaaaaaaaaaacggaattacccattcttgctaaattgaaagataggtaggatatgagtagcaccttaagagcaaattcatatggtagg

SEQ ID NO: 36235 - DNA, 201 bp, Homo sapiens
ttgtgttgcagtctaatacatccatgagaaatggacatacttaggcctagtatatgtaatgaagcctccttgatgaggcctgaaggatagtttgtttttawaaaaaaaaaaaaaaaaaaaaaacggaattacccattcttgctaaattgaaagataggtaggatatgagtagcaccttaagagcaaattcatatggtaggt

SEQ ID NO: 36236 - DNA, 201 bp, Homo sapiens
aggcctgaaggatagtttgtttttaaaaaaaaaaaaaaaaaaaaaaaacggaattacccattcttgctaaattgaaagataggtaggatatgagtagcacyttaagagcaaattcatatggtaggtaaatatttaatgtccagtggttacagggcagtatttattcctgaagaaatgggagagatctggaatctctatttc

SEQ ID NO: 36237 - DNA, 201 bp, Homo sapiens
ggcagatcgcttgacgtcaggagtttgagaccagcctggccaacgtggagaaaccccatctctactaaaaatacaaaaattaaccgggtgcggtggcacgygcctgtagtctcatctactagggaggctgaggcaggagaatcacttgaacccaggaggtggaggtagcagtgagccgagatcgcaccactgcactccaga

SEQ ID NO: 36238 - DNA, 201 bp, Homo sapiens
atattagtgcaggaattaatgtaagagaagatgctgcacatacaactctcaaaaacagctgatagacttctggctatgctaatatgaagaaattgattaaycttctaaaaaaatactaaaaagcaaatgcaattgtcaaaaacaatcatttcagaagtcttggagttaaccagaggaagatgacagctacagaatactgct

SEQ ID NO: 36239 - DNA, 201 bp, Homo sapiens
cagcccaggagctgtactgcccatgaccaggaatgtaataaaaagcagataaaggcaaaaatacctccccttgttatgtttgcattctgttttgaggagasagacaataaatcacatacaaagtagggtcatccactgagagttaggaaggtagaggagatattagatatttgacaagaaaaagagaaaatgtgaaatggt

SEQ ID NO: 36240 - DNA, 201 bp, Homo sapiens
taaaggcaaaaatacctccccttgttatgtttgcattctgttttgaggagacagacaataaatcacatacaaagtagggtcatccactgagagttaggaargtagaggagatattagatatttgacaagaaaaagagaaaatgtgaaatggtcagtatggagacgaaaagagtaaatgagctagggaaatagtttaggatc

SEQ ID NO: 36241 - DNA, 201 bp, Homo sapiens
ccagtctccaagtatttcaatctttgatctatctttactctgattgcctaccaaaagtaaaagtaaatactctgtggaggaagatattatccagagtcttmaaattatctaaagtttgtatacacgatatgtggcatgcagtaaaaaattaccaggcatatcagcaaacacaaccaaatcattgaaaaccaagagaaaaat

SEQ ID NO: 36242 - DNA, 201 bp, Homo sapiens
attttaggatgagtttttctatttctgtaatgccattgtaattttgatagggattgctttgaatctgtggattgctttgggtaacattgtcatattaacartattaagtcttcttccaatctagaatactggatgtcttttcatttatttaagtcttctttaatttttatcagcaatattctgtagtttccaatgtacaag

SEQ ID NO: 36243 - DNA, 201 bp, Homo sapiens
ataaagtgtttgccatgaaaatattgaataaatgggaaatgctgaaaagagctgaggtaagagtcttatgtattggaatatataaatattttagaaatatwtttcaggaattataaaattccatagagctcattaaatattacttggtaacattttgtctgtggtgacattttttaaggcataaaagacaaattcaacaca

SEQ ID NO: 36244 - DNA, 201 bp, Homo sapiens
tataacttagcctccttgattattaaattactttgagtaaattactctgctgtggagatgcctctggtaggacaaaaatagtgctgaatttggacttgagwtgggatacaggcctggctctccaacttcacaaggcatactagtttcatgaaatcagccacatcacatgtacagagctgatattcagctggtaagctttag

SEQ ID NO: 36245 - DNA, 201 bp, Homo sapiens
taccgttccccactcttctttcccagacatatctaaatatcctgaagctgatgtgcatcttccctttcttggttttagatgttcatttcatttgtatccayaaatgatacatagtagtgcttattatgtgtttataatttacataaatattacctgtatccttctgtaatttttttcattcagaagtctgcttttcaggtt

SEQ ID NO: 36246 - DNA, 201 bp, Homo sapiens
tgcggtggtttacgcctgtaatcccagcactttgggaggccgaggtgggcggatcacgaggtcaggagattgagaccatcctggctaacatggtgaaaccscgtctctactaaaaattcaaaaaaaaaaattagccgggcgcggtgacgggtgcctgtagtcccagctactcaggaggctgaggtgggagaatggcgtgaa

SEQ ID NO: 36247 - DNA, 201 bp, Homo sapiens
ctcttggcccccaccccaacaggccccagtgtgtgatgtgcccctccctgtgtccatgtatgttctcattgttcatctcccacttatgagtgagaacatgkggtatttggttttctgttcctgtgttagtttgttgagaatgatggtttccagcttcatccatgtccctgcaaaggacatgaactcattcttttttcattt

SEQ ID NO: 36248 - DNA, 201 bp, Homo sapiens
tcatgaacaaaatttcaaatacttaaaggaatttttttcccacttagtatctcaaatttcccaacttcccaccattctgcatttcttgtgctaattcctarcaagcagttgtaaaaatcctaatattaaccagaagtttattgtttgtttgttttgatacagtctcgctctgtcgcccaggctggagtgcggtggtgcaat

SEQ ID NO: 36249 - DNA, 201 bp, Homo sapiens
tgcatacacacacatttggaagactgacctctgagtcattttgttttacttaatatgcattgtttaatgatttcatagtaacagaaaaagacactttgccrtaaatttgacgttttttttcagtgcagtggactacttcatgaataacatttttgtgattggaaaaaaattttattttataatgtactttataatattctc

SEQ ID NO: 36250 - DNA, 201 bp, Homo sapiens
cggcctcctttggcctcccaaagtgctgggattataggcatgaactatcacacccagctgatgaagcataatatttgaataaaccaagttgcaaaaggcartgcacagtttggtgtcatttataaagacattttaaaaagtacatagttttatgatgttgtatataggcataatagtataaaatatgcatggatacagtaa

SEQ ID NO: 36251 - DNA, 201 bp, Homo sapiens
gcatataccacaactacttatccattctcctgcagttggatatttaggttgtttccaatttttcattattatcagtgctgaaattaatatcctaatatctrtttttgcaaatgtacagagtttgtttggcatgtatacttagtggaattactgagttgtatgttatatgcattttcaagtttaactggatcttgccaaatt

SEQ ID NO: 36252 - DNA, 201 bp, Homo sapiens
caatgcacagtttggtgtcatttataaagacattttaaaaagtacatagttttatgatgttgtatataggcataatagtataaaatatgcatggatacagyaaacaccaaatttaggatagtagctgtgtctgggtagtggagggagaggatgagatcaggaatggtaatagaatacttatgtttttcagtactatctgta

SEQ ID NO: 36253 - DNA, 201 bp, Homo sapiens
tagttctcacagctaaagtgaaagatccagattgcagtattttaactaatccattagatatgtgtgtttaaagccaaataaaatgttcagggttaagaaarcagagatttaagagctaggagtgtattaagttataaacatgaatgacatccaggaagtacatgtagattgagaagagagcaagtacatgagtctcttaca

SEQ ID NO: 36254 - DNA, 201 bp, Homo sapiens
aaccagtgtttcacagaatacgctttgggaaatgttcttccagtataaggtcatggttttccttgtaacttcctgagtagcagggttagaaagaaattttsagagaaatttgggatatcgtgtggattggagagagaatccaaatctgaataggttatattttacttagtggctgtgaacttcattttctgtgtgaaagtc

SEQ ID NO: 36255 - DNA, 201 bp, Homo sapiens
acttactaggtatttaatattcaggaatttatattatctttctaaaccttttttttttttttctgtaaaatgggaagttcttagtatggtacttggcttaratggctcccaataaaataatgcctgctaagattattattatcacacagaaagtttgtccttagtaccaaatcaattttttttgtttttgtttttgttttg

SEQ ID NO: 36256 - DNA, 201 bp, Homo sapiens
caaagaaaaggactgcatatgttaaaaaaaaattttttagactaaagtgtagtcagggattaaaaagaatagaaaatatagaaaggaggatctaagacatrgaggatgtgatgaaaagttctaacatacaaataattggtttcccaaaaggcaaggagagagatggtggcagtgcaatatttgaagagtgtttatggccca

SEQ ID NO: 36257 - DNA, 201 bp, Homo sapiens
gaaaaagagaaaatgtgaaatggtcagtatggagacgaaaagagtaaatgagctagggaaatagtttaggatcgccagatatttccaagttatttaagttyagtaatcatgagttttaaatgactgtgtatttttttcagccattttcagctacttgggtaaaatcatacagtaggaggagagtagaaattatccaagata

SEQ ID NO: 36258 - DNA, 201 bp, Homo sapiens
aagaaataccacaaaccctaaaagtgaaataattaatagaaatcagaccccacttagacaaatcctagaaaagcggccagaaaccaaccaacataaaattytaaaagcaaccagagaagaaagacacattacgttcaaaggcatgaaacttcaactgaaaactgacctcccaacagaaaaattaaaaacggaattcagaag

SEQ ID NO: 36259 - DNA, 201 bp, Homo sapiens
gtaaagacttgaagttaaataagccagaagttattgaaggtaacagagaggaaaagattaaaataatagtagtccaaggacctgttagaaaatatcacaargttttatgtacatgtactttgagatcaagaaggagaggaaagagaatgggccagaaaaaatacctgaagaaataatggcctcaaatttgatgaaagatat

SEQ ID NO: 36260 - DNA, 201 bp, Homo sapiens
atttcttgagaagccagctgttaatcttaagctcttgaatgtaatgtgtatgttttcccttctggctgctttcagtattatgtccttaacttcaatttcaratagttggactgtgattcacgtacgtgtcgctttctttatgtgaacagaaaatcctggttgagattcattgagcttttgcaattttctttgatgtctttt

SEQ ID NO: 36261 - DNA, 201 bp, Homo sapiens
aacaagttttgtgatatgttgaagtaactggaaacttgaactattactatttatgtgatattaggaaatttgtgaaatttgtagtatgatgctatcgtggktatattttaaaagagagatccttattctttagagatacatacagtgatatgtatggataacattgtatgatgtctagtatttgttcccgaatagtacagg

SEQ ID NO: 36262 - DNA, 201 bp, Homo sapiens
ctgaccaacatggtgaaaccccatctctactaaaaagacaaaaaattagccgggcgtgatggcgcacatctgtaatcccagctactggggaggctgagacrggagaatcgcttgaacccgggaggcagaagttgcagtgagttgagaatgtgccattgtactctagcctgggcaacaagtgcaaaactctgtctgaaaaaa

SEQ ID NO: 36263 - DNA, 201 bp, Homo sapiens
acacttgctgagtttgtatgttaattcttgtaatcatctgcagagactgactctgagttaggtttgaaattacttgtcccccagcttaggtcagatttccwtattggttcagttaacactggccagttaaatggggcctcacaatatgcacttggcccacccctgagaactgagggggagattttcagaaaaagggaggga

SEQ ID NO: 36264 - DNA, 201 bp, Homo sapiens
gagacttaaatataaatgccttacatattgaatagatactgactttttaaaaataagaatgtagtgttgagaaaattatctcagactagttgctcaagaarggtgggaataatcagttaaactagactgtgtgttctgaaaaccctgagtttagtaaaatatcctacacctagtttgaccaaattggagaatttttgtaaa

SEQ ID NO: 36265 - DNA, 201 bp, Homo sapiens
taatatgttctgttgactaaagtctttggagctttttttagttttgagttattagtcaaattaaataacgaatgtttattaaattctaactagaatgtttrtaaaatttcggattgctattatagtgagatgaagccaggagaaagtagtcttctaggctctgacagtctttacaaactctctaatatgttagcagtaaac

SEQ ID NO: 36266 - DNA, 201 bp, Homo sapiens
ttaatgtggatgttaagaaagtgaagatttaataaaaagaaattcagatatttttaaaataaagggatatcttatatacatttatttgaaattgattttcytgacaaaggccatcactgaatactgaactcgttaatgggctttttattaggtctaagtgctttcctatcatttctcagccatgcaacacagtgagataaa

SEQ ID NO: 36267 - DNA, 201 bp, Homo sapiens
aagacattttaaaaagtacatagttttatgatgttgtatataggcataatagtataaaatatgcatggatacagtaaacaccaaatttaggatagtagctrtgtctgggtagtggagggagaggatgagatcaggaatggtaatagaatacttatgtttttcagtactatctgtaatgtcttgttaatttttagtattttc

SEQ ID NO: 36268 - DNA, 201 bp, Homo sapiens
attgcatgttctatttcttgatctgagttttagttatatgttgttcactttatcattgtataaacataatttgttttgtagttgtatgtaggtatgttatratcaattataaatggtataagataatttaaaaagaaggtttaataattatggaacatatgtcttacaaattatttttaaaatatatacactaacacttga

SEQ ID NO: 36269 - DNA, 201 bp, Homo sapiens
cctcagttcccagtaggggtggccgggcagaggtgcccctcgcctcccggacagggcggctggccgggcggggggctgacccccccacctccctcccggamggggcggctggcctggtggggggctgacccccacctccctcccggacggggtggctgccgggcggagatgctcctcacttcccagacggggtggctgccg

SEQ ID NO: 36270 - DNA, 201 bp, Homo sapiens
tattttttcctcatctaaaaatggtcttagtaattgctaagcttccttccagaactaaactgtacttctttgatgtttcccctacagcagatctttttcarcaggttagaatacagtcaaatgttgaggattataaagctaataccctatacagattgttgttttcaatcaccctgtctctctttagcaaccatctatcat

SEQ ID NO: 36271 - DNA, 201 bp, Homo sapiens
cccccacctccctcccggacggggtggctgccgggcggagatgctcctcacttcccagacggggtggctgccggacggcggggctcctcacttctcagacrgggcggctgccgggcggaggggctcctcacctctcagtcggggcggttgccaggcagagggtctccttacttctcagacggggcggccgggcagagacgc

SEQ ID NO: 36272 - DNA, 201 bp, Homo sapiens
tggtgagcacaacagggaatgaattgggcactccactcccccgtctctctggcccagccctgaactagatgagctgcatttcatggagcccattttaaaayctctttccttatgactttgttactcaagtccagagttctctgtgcacttctgctagataaggagtgtaagccctgccccccagcactggcagcacgctgg

SEQ ID NO: 36273 - DNA, 201 bp, Homo sapiens
tatttttcctggcgatttctattttacttttcccttttcttttcagcactttactgtttaatttctatgttggttaaaaataaacctctggtggtataatmaaaaaaaattacttttaattaatttctccagtaggttttattgtatgacaataatagagtactgattttaaaataaatcaatgtttaattgatttatttc

SEQ ID NO: 36274 - DNA, 201 bp, Homo sapiens
ggggaaatagactccacctcttgatgagaagaatggaattccttaggaggacttgttggtaggcgtctttggaggcccttgccacgatgcaatcttgagtkggtaaattaagacaatagaggttaaaaaaaaaaactactgcccaattgttatgcctatctccctatatttgtctatgaatcttgtatctaaggaaggtca

SEQ ID NO: 36275 - DNA, 201 bp, Homo sapiens
ttaaaattgtgttgcagtctaatacatccatgagaaatggacatacttaggcctagtatatgtaatgaagcctccttgatgaggcctgaaggatagtttgtttttaaaaaaaaaaaaaaaaaaaaaaaacggaattacccattcttgctaaattgaaagataggtaggatatgagtagcaccttaagagcaaattcatatg

SEQ ID NO: 36276 - DNA, 201 bp, Homo sapiens
ctaagcattagcctactaatctattttctgcttgtgtgatttagaacaagttagtttcttagagtttaatatataaaatacagatggtaattaccttgctraggttattgggaagtttaaataagatggaatacataacacagagtgccctgcataagaaagaaatccccttaacaaatggcagtttctgtgtctggaggt

SEQ ID NO: 36277 - DNA, 201 bp, Homo sapiens
tttcttgagacaacaaaccacaatgcagacattatacaaatgtgagttacttttatcctatccattttgggattaatgtaaagaataagagtaatctatamagagtaatggatttaagataaaaaaatgtttgcctcagcttcccaaagtgctgggattacaggcatgagccaccatgcctggctttttcttcacttaaaa

SEQ ID NO: 36278 - DNA, 201 bp, Homo sapiens
ttttctttgacaaaggaaggaaagcccatctcaagaggtcctttctttttctgtgttttgctttctccatcatttcttaagaggtcaaagtgttcctgcarccctctgcctgtccaaaatctcccattgccaccctgagtctccaagacctgctttaccctcataattctcaaattccaaatttgtgtcccacattctcat

SEQ ID NO: 36279 - DNA, 201 bp, Homo sapiens
ttaaagtcaaagtttcatgtacgtcagtacaacctcagagggtactgattttattcatatatctagaataaaaacaagaccttacagaagagcctttcttytaaggctaggtaatttatgcaatctttttacaaagcaggttcatctcagctcatgggaacgtgaattccatgctggattcagttagcactctctccaaca

SEQ ID NO: 36280 - DNA, 201 bp, Homo sapiens
ctactatgcctggctgatttttgtatttttttgtagagggggtatcgccatgttgaccaggctggcctggaactcctggcctcaagtgatgcgcccacctyggcttcccaaagtgccaggattaccggcgtgattacaggcgccaccacatgtggtcaaaagtgatttcttatatgagtagtcatttattatcccctagca

SEQ ID NO: 36281 - DNA, 201 bp, Homo sapiens
aactattttaggtgctggagagtttagtgttgttgtaataacagtcagtataagaaattataagatgactaaagaactgaggctagggaaccatatgcctrcttataaccaggacaaactgaactgtcagcccaaaagctgaggaccctgaggtggtgagtgtggaggagggtgtgcctaccaacagtgttcccctgggtt

SEQ ID NO: 36282 - DNA, 201 bp, Homo sapiens
ttcttataagtcaaatgtgtcaatgtacaaatagtaaaacctcattttcaaacatgaaaaatgaactaatacttaaaatttactatgtgcaggtcatcttyggaattacttcatataactcatttaattttcacaataactctctaaggtgtacccttttgttcttgccattttatagatcaggaaactaagtcaaagaag

SEQ ID NO: 36283 - DNA, 201 bp, Homo sapiens
cgtttagtaaaatatgtaaaatgtagtttaagcatttaggccttttctcttgctgaaacttgtaaaaccatttaggtaagatagatttctattaacgttamatagcataagtcatgaataaacataagtcataccacaaagtttatcaatgtatggcaggtatgtggataaatttccctattgtattctctatgttaagct

SEQ ID NO: 36284 - DNA, 201 bp, Homo sapiens
ttttgggaggccgaggtgggcagatcacgaggtcaagagattgagaccatcctagccaacatagtgaaaccctgtctgtactaaaaatacaaaaattagcygggcatggtggcacatgcctgtagtcccagctaccctggaggctgaggcaggagaatcgcttgaacccaggaggcagaggttgcagtaagccgagatcgc

SEQ ID NO: 36285 - DNA, 201 bp, Homo sapiens
gcatgggtgagttgtctgacttatcgtcatattctagattcaaatctgttgttggagatgtgcacacgtgtgtgtgtgtgtgtgtgtgtgtgtgtgtgtgwggacaaatcttttccgtggcttggcatttccctctctccaaagatcttgtattgaacagaaattcttaatgttaatggagtgcaattaattaaactttta

SEQ ID NO: 36286 - DNA, 201 bp, Homo sapiens
gctgtctgctggggccacagtcacctcaagactcagctgtgactagggaatcagtttcctggctcacccatgtggttgtggacacgtctgagttcctcacygactgttggttggaggcttcccgtttttgccaatgtgggcctctccatacccagtgcctgagtgtccttatggcctggctgcaggcttcctccagggcaa

SEQ ID NO: 36287 - DNA, 201 bp, Homo sapiens
cttctttttttttttctttttttttttttcagggaggtaaagtgggtggtttttaaaaatttttatttttctatttgtaaactgacaaattatagttgaayacatttatggggtaaacttatttttcagccctaaggtggttactcctgcctctttttctagtccttgtcctccttcttcttcattatgttatccaattaa

SEQ ID NO: 36288 - DNA, 201 bp, Homo sapiens
acatagtgaaaccctgtctgtactaaaaatacaaaaattagctgggcatggtggcacatgcctgtagtcccagctaccctggaggctgaggcaggagaatygcttgaacccaggaggcagaggttgcagtaagccgagatcgcgccaccgcactctagcttggcgacagagtgagacttcgtctcaaaaaaaaaaaaaaaa

SEQ ID NO: 36289 - DNA, 201 bp, Homo sapiens
tttttgtttttccagtgtttaatttccaacttctttttttttttctttttttttttttcagggaggtaaagtgggtggtttttaaaaatttttatttttcyatttgtaaactgacaaattatagttgaacacatttatggggtaaacttatttttcagccctaaggtggttactcctgcctctttttctagtccttgtcct

SEQ ID NO: 36290 - DNA, 201 bp, Homo sapiens
tttttcttcttcagttatttctctgttcttatgatggcaatttatagtctttgtcttaggagtttagttgattcctaaaaaacctatgtaggttaaattcrttagtgatacacagatacttctgtgaacacacagcaaaagaacactaacagagcagtgaagacaaatcacacaaatgatgtaaatgacgcaaaggatgga

SEQ ID NO: 36291 - DNA, 201 bp, Homo sapiens
ccctgtctctacaaaaaatacaaaaattagccaggcgtagtagcatgtgcctgtagtcgcagctacttgggaggctgaggtggaaggattgtttcagcccrggaggttgaggctgcagtgaaccgggatcacgccagtacactccagcctgaatgacagagcaagaccctgtctttaaaaaaaaaaagtgtgtgtgtgtat

SEQ ID NO: 36292 - DNA, 201 bp, Homo sapiens
ttaacaccttcattgcttttatatctagtctctgctgtgatcttaactgtcatcataggcctgaagacaatgacaagtgattgggtaggtgttaaagatasttggcctccctttttgatgtaactatttcaggtgaagttaataaatgatttatgcaaaaacaggttggttgcctcaggttatagctgctttgaggaaggg

SEQ ID NO: 36293 - DNA, 201 bp, Homo sapiens
agctgaggcacaggatatgtttaaagagtttgtttgagccaaagtgaggacagctgccaggaacacacttccaggttaccttgaggagtgctccattaggyctttgttacaagtagggttttaaaagcaaaaggaggcaagggctgggctgatacaaagttgtttgacaggcattttcactggtttacaaaataacattga

SEQ ID NO: 36294 - DNA, 201 bp, Homo sapiens
ctgtgtgcattgaacattccatgtacacttgaaaagaatgttttttctacatttattgtttgttgtgttttatacatcagttagctctagacggttgatgsagtcattaagctcttccataatttcctaatttttgtttagttctgtcagtgctgagaagagggttttaaagttttcaaatataattgtgggtatgtctgt

SEQ ID NO: 36295 - DNA, 201 bp, Homo sapiens
tttttttataatctccatacttttgccttttccagaatagttagaatgatacagtatgtagcctgttcagattggcttttctcagtaatatgaatttatgrttcctctacatctttaaatggcttgatagctcttttctttttagtgctgaataatattacattgtctagatacactgtgtgcattgaacattccatgtac

SEQ ID NO: 36296 - DNA, 201 bp, Homo sapiens
tcaatctttgacatacttgagttcagcatccaagatatttcgcataacgctcaagttcttctgtagctctttttctgctaggaacttggattctttttttktttttgtttttgttttttttttgagacagagtttcaccctgtcaccaggctggagtgcggtgacacgatctcagctcactgcaacctctgcgtcccaggt

SEQ ID NO: 36297 - DNA, 201 bp, Homo sapiens
tcaacttaggcaatatattatgttgaatataattgtatatattacgtattttatcgcatatataatataataatatatttagacaatctaaagagaaagamccatgattacatagtccatttcttctttggtattttattaaataagacctctaggattaattgaaccttaaaaactattagccaaattatgtactcctga

SEQ ID NO: 36298 - DNA, 201 bp, Homo sapiens
ctagttcattattttattgaatgtttgccagcactaaatcagaaatatctagatcctttttgttctcatttgttccagtctgctactgccaacctttccaraaaagaaattgtctatcacttgatgaaggcttattttgtgggtcactgtacatgggccagtgaaaagtttgtcaaccttagacgtagtccaaacaactgt

SEQ ID NO: 36299 - DNA, 201 bp, Homo sapiens
gaattgactaaatttttaactacttgctgttttttcaataaggttataatttaggatttgtttctctcattttattatggattaattatgtctcacttgcsttgcagactttctggggccttggacacctagaacattttttgtgaatcttgaaataagaaaaaaattttggagggaaatagctgttataaggtctctcct

SEQ ID NO: 36300 - DNA, 201 bp, Homo sapiens
tcattttattatggattaattatgtctcacttgccttgcagactttctggggccttggacacctagaacattttttgtgaatcttgaaataagaaaaaaawtttggagggaaatagctgttataaggtctctccttaattctatgtctttattctatgagatatgaataaactataattaaccataatctattgacttatt

SEQ ID NO: 36301 - DNA, 201 bp, Homo sapiens
tacacagcattacctttcacacaggaacttcgcattttgtgtctttctgtcaagctgtggggctaaataaagccttttgcaacaggtcagaaactttacarttttcttaagatggctcagtttcttacacatagaaagtcccctacttagataccttaaaacttcttgagatgacatttcagtcagttttaagttcttact

SEQ ID NO: 36302 - DNA, 201 bp, Homo sapiens
ctgctgtggagatgcctctggtaggacaaaaatagtgctgaatttggacttgagatgggatacaggcctggctctccaacttcacaaggcatactagtttmatgaaatcagccacatcacatgtacagagctgatattcagctggtaagctttagttcagtggcccagttttttaaatattgagtatcctagcagttggta

SEQ ID NO: 36303 - DNA, 201 bp, Homo sapiens
tcatttcatttgtatccacaaatgatacatagtagtgcttattatgtgtttataatttacataaatattacctgtatccttctgtaatttttttcattcaraagtctgcttttcaggtttattcctacagatatgtgttcatttagttcattcattataactgtggcatataccacaactacttatccattctcctgcagt

SEQ ID NO: 36304 - DNA, 201 bp, Homo sapiens
aatttttgtatttttagtagagacggggtttcaccatgttggccaggctgatctcaaactcccaacctcaggtgattcatctgccttggcctcccaaagcrctgggattacaggcatgagccaccgcacctacacctcccctgcattgggtatttttatgtctccccattttctacccccaatttagatgtcttaaaaaat

SEQ ID NO: 36305 - DNA, 201 bp, Homo sapiens
ttaaaaatttaaaacaaaaatgtagaaaaattttttgtgactgggaataaatataagatctcaaatcacaagcataaggtgaaaatattcgtgggctttayatcaaaattaaaaatgcttttacagtgaaaggattgttaacagatgatgacagactagtggaagatatctgcaatgtttaccactaataagaggcttatt

SEQ ID NO: 36306 - DNA, 201 bp, Homo sapiens
ctgggcaacatggcaaaccctgtctctacaaaaaatacaaaaattagccaggcgtagtagcatgtgcctgtagtcgcagctacttgggaggctgaggtggraggattgtttcagcccaggaggttgaggctgcagtgaaccgggatcacgccagtacactccagcctgaatgacagagcaagaccctgtctttaaaaaaaa

SEQ ID NO: 36307 - DNA, 201 bp, Homo sapiens
actttgggaggccaaggtagatggattgcttgagcccaggagtttgagaccagcctgggcaacatggcaaaccctgtctctacaaaaaatacaaaaattasccaggcgtagtagcatgtgcctgtagtcgcagctacttgggaggctgaggtggaaggattgtttcagcccaggaggttgaggctgcagtgaaccgggatc

SEQ ID NO: 36308 - DNA, 201 bp, Homo sapiens
gctgggcatggtggcacatgcctgtagtcccagctaccctggaggctgaggcaggagaatcgcttgaacccaggaggcagaggttgcagtaagccgagatsgcgccaccgcactctagcttggcgacagagtgagacttcgtctcaaaaaaaaaaaaaaaatgtctacatcctttactcctacttcactgatcttattttc

SEQ ID NO: 36309 - DNA, 201 bp, Homo sapiens
gaacagaaaacctgatgcaaactggtttgaagaatatggaaagttttactagttaacctatcaagagcaaaagtggggtagacttcttggtttagtggctytatagtattatcaaatatccaaagtctttcagtctcactgttgttgtagtatagatttgggtgttttttttgtttgtttttgtttttaatttttgagaca

SEQ ID NO: 36310 - DNA, 201 bp, Homo sapiens
attttttttttggtggaagtgatagtaggtacggggcgtaatgtttttcctaaatcttaagtgatgattgaatgtgtatttatgaataactgataaaaatraaaattttaaaaacagctgtagtttttacagaattaaaaagtctaaatccggctgggcacagtggctcatgcctgtaatcccagcattttgggaggccga

SEQ ID NO: 36311 - DNA, 201 bp, Homo sapiens
ataaggatagctactttagtgaatttaagttctgatagcatgataggaatgatgtgccaagtggattaatatttttgcccagtgtttaacatatccctctrctgtgcacaaaagactgctacctaaatttctcactcacagattttctctactgataatatctgcctcctggccacgtactttctttagctgtgtcattag

SEQ ID NO: 36312 - DNA, 201 bp, Homo sapiens
gagatgtgcacacgtgtgtgtgtgtgtgtgtgtgtgtgtgtgtgtgtggacaaatcttttccgtggcttggcatttccctctctccaaagatcttgtattraacagaaattcttaatgttaatggagtgcaattaattaaacttttacttataattagtgatttttgtgtttttaagaagtttttttctaacctcaaggtc

SEQ ID NO: 36313 - DNA, 201 bp, Homo sapiens
cataatacagctgagggaactggggcacagagtttagcaaccccaagccctgctgtcagtcagctgtgcagcacagatgtgagtagtgggccaaatccctycatagcctgtgctcacagccaccatgctgcctttatggcacaccctcacaaacagccaatgaaggagaggctggctgacaataggctagtaagattacca

SEQ ID NO: 36314 - DNA, 201 bp, Homo sapiens
gattaactctgcatttaactttatttgcacaatgtccatcataaactttagagtctggtgatgatggattgagcatacaaatataacttcatttccttctscaattcactaacactataataaaataatttttttaaagagtcataaacctttaaggatgataagagtggtagaagagactatagaaacaaaattttggaa

SEQ ID NO: 36315 - DNA, 201 bp, Homo sapiens
tgtctataatggagtgtagcagcaatgaagatgaacaacatgtggttccttccctaaaggaattaaacagaattaaatgtaataaagggggcagtagagaragattactttggtgtggggagtagaaaggctcaatcatggaagtgacattttgagcttactcttaaggaattaatgttttgtgaaacagagaaaaggggg

SEQ ID NO: 36316 - DNA, 201 bp, Homo sapiens
cttctcattaatgttttactttgggccttacaggactctgactctccgaggcattccacagcttccaacagttccaacctaagcagccccccaagcccagyttcaccccgaaaaaccaagagcctctccctggagagcactgaccgcgggagctgggacccgtgagctgcctcagcactgggacctctcgctctccgctcc

SEQ ID NO: 36317 - DNA, 201 bp, Homo sapiens
tggcctggaactcctggcctcaagtgatgcgcccacctcggcttcccaaagtgccaggattaccggcgtgattacaggcgccaccacatgtggtcaaaagygatttcttatatgagtagtcatttattatcccctagcagttggcaatttgtaaacaagtacttcatggtggtgaggtaaggagaagagggtgctgctatt

SEQ ID NO: 36318 - DNA, 201 bp, Homo sapiens
tcacggacgccacccaggcctctccatcctgtcccggagcccactgggtctgctactcggcaatcccaaatttcagaaactatattttctttctttaagarccctgaaagcctatacctctcaaagcctcttttgggcctgtgcattctgcagatgcactttcaactgctcacaggtccgtagaaagggccccagctcagt

SEQ ID NO: 36319 - DNA, 201 bp, Homo sapiens; identical to SEQ ID NO: 5601

SEQ ID NO: 36320 - DNA, 201 bp, Homo sapiens
aaatgctaatgatttaagacacagaatcctactagaacaagaaagaaaaactaagtttcatctgattagaatgttatgttcgattatcatgcgcttcagtyttagatgacaaaaatgggaagatgaggaacttttgtggtgtttttcagcactacgtagataatttacatagatagtcagaatgttgattctggcttctgg

SEQ ID NO: 36321 - DNA, 201 bp, Homo sapiens
tatcccttacatgcttatagagtataataatgtttttttaaactacagattgtgacccattagtgggtaataaaatcaagttagttacaagcaacattttytttctttctttctttctttcttttcttttttttttttttgtttgctggatcttgctctgttgcccaattagagctaactgctgtatctgattcctgggct

SEQ ID NO: 36322 - DNA, 201 bp, Homo sapiens
taaaataatcatttccagaattttccactgaaattaatctttctcatctcattctaactttacatttttaaattatttttattacataactaacacatgtwtctctgattttttttgatacaactttaagaaacatttaaataggccggatgcggtggctcacgcctgtaatcccagcactttgggaggccaaggcgggag

SEQ ID NO: 36323 - DNA, 201 bp, Homo sapiens
tttcactacacttcaaatgattttctaagaataaatttctagaagaggacttgccagttgaaaagacatagaaaaggttgtatgatttcaaattagttttmtaatccacaataatgttacctgtggctatttttctttacactttaattttataaattttctataacatattaggattaaaagagttattttttttctttt

SEQ ID NO: 36324 - DNA, 201 bp, Homo sapiens
tgctctgaagtttgggcttagggaccaacttagtatttctttaggaatcatagattaagaaaatgtgtacattctctccagtgctattagtattaaggttrggccctctcctggggatggtggtgggtagaatacttgataatcacctgctgggcctcagatttaaagcttacggacttacatgtggttcactggaaaacc

SEQ ID NO: 36325 - DNA, 201 bp, Homo sapiens
atttattttgagatggagtcacactctgtcacccaggttggagtgcagtggtgtgatctcggctcactgcagcctccatctcacaggttcaagcgattctyctgcttcagcctcctgagtagctgggactacaggtgcataccacgcctggctaatttttgtatttttaatagagatggggttttacagtgttggccaggc

SEQ ID NO: 36326 - DNA, 201 bp, Homo sapiens
attgatatataacagaaacacatttatataaattaaaaacacatactcagactatctaatttataaagatatatacatgtccaaggtattggatcatcaakgatgaaaaggcaaaataagacaaaataaaactagagtgaggcttctatcaagctgatattattttatgaattaaatattaacttagtttgttgcacctaa

SEQ ID NO: 36327 - DNA, 201 bp, Homo sapiens
catggacataaagatggcaacaaaagactctggggactactagagaaggggaaggagggaggggtgccagggctaaaaaattgggtactgtgctcagtacytgggtaatgtggatcggtcatgccctaaacttcagcatcatataatatactcaggtaacaaacctgcacgtgtacccacaaatctaaaataagagttgaa

SEQ ID NO: 36328 - DNA, 201 bp, Homo sapiens
gtttcaccatgttggccaggctggcctcgaacttcttacctcaagtgatctgcccgcctcggcctcccacggtgctggaattacaggcatgatccactgcrctcagccctatttgatttttatcatgtaatttttgcaatgtatgtgaaagaatagatatatggcctttgtgaaagataataataaactgatcactcatga

SEQ ID NO: 36329 - DNA, 201 bp, Homo sapiens
acggtgctggaattacaggcatgatccactgcgctcagccctatttgatttttatcatgtaatttttgcaatgtatgtgaaagaatagatatatggccttwgtgaaagataataataaactgatcactcatgaacctacctcctaacctgagaatcagaacatcactcatataactgcaaactgcgtcatgttgtgcttat

SEQ ID NO: 36330 - DNA, 201 bp, Homo sapiens
taatttataatagtgttcttaccagctggatagaaatacatttacttagtacctatatttattttttctttctttgtaatttatcttctaggaagctattwtgtaaaatttatggtgaaccagttgttgatttatacattattagtggtgtgataactgaggatgctcgaaagaaggcatgtaatgagattgttgctatgg

SEQ ID NO: 36331 - DNA, 201 bp, Homo sapiens
aggccctctcctggggatggtggtgggtagaatacttgataatcacctgctgggcctcagatttaaagcttacggacttacatgtggttcactggaaaacyaaccagtatttataacataatctttgagataatgtattccaaattccaaagtagttatttgtaactaaatttctagattatgactagttcataagttgtg

SEQ ID NO: 36332 - DNA, 201 bp, Homo sapiens
gagtaggtaactacccagaatgtttcccatttctagtacaatatctggtattgaataggtgctcagtaaagagttaaatacatgaagagttaaatgaatamtgaagactttttttgggtgaatttactaagctcgtaatttcagccttattgatcagaatcagagatacaagtatattcagtagtcttatttataggaggc

SEQ ID NO: 36333 - DNA, 201 bp, Homo sapiens
aggccgaggtgggcttatcatctgaggtcaggagtttgagaccagcctgaccaacatggtgaaaccccatctctactaaaaagacaaaaaattagccgggygtgatggcgcacatctgtaatcccagctactggggaggctgagacaggagaatcgcttgaacccgggaggcagaagttgcagtgagttgagaatgtgcca

SEQ ID NO: 36334 - DNA, 201 bp, Homo sapiens
gtgggcttatcatctgaggtcaggagtttgagaccagcctgaccaacatggtgaaaccccatctctactaaaaagacaaaaaattagccgggcgtgatggygcacatctgtaatcccagctactggggaggctgagacaggagaatcgcttgaacccgggaggcagaagttgcagtgagttgagaatgtgccattgtactc

SEQ ID NO: 36335 - DNA, 201 bp, Homo sapiens
gagcggccgggtgtggtggctcacgcctgtaatcccagctctttggaaggccgaggtgggcggatcacgaggtcaggagatcgagaccatcctggctaacrcagtgaaaccccatctctactaaaaatacaaaaaattagctgggcctggtggcactcacctgtagtcccagctactcaggaggctaaggcaggagaattg

SEQ ID NO: 36336 - DNA, 201 bp, Homo sapiens
gccgggcgtgatggcgcacatctgtaatcccagctactggggaggctgagacaggagaatcgcttgaacccgggaggcagaagttgcagtgagttgagaaygtgccattgtactctagcctgggcaacaagtgcaaaactctgtctgaaaaaaaaaaaaagagagagagaacaggcgtacaagtgaaacaagattgatgtt

SEQ ID NO: 36337 - DNA, 201 bp, Homo sapiens
aaaagataaatagagaattctacatgctgcagagactacacattcttttctagcttatttatgtatttatttatttaaaattgagacagagtctcgtcctstcacccaggcaggagtgcagcagtgtgatctcggctaactgcaacttccacctcctaggttcaagtgattctcctgcctcagcctcctgagtagctggga

SEQ ID NO: 36338 - DNA, 201 bp, Homo sapiens
attgaaatctgattattattactttctaagaaaatgttaccaccttcagagtcaaagttggaattcatctgctacctatggatgtttctttctaagaccaraagtcctgtatttgtgagtattttaagaaatggaaggcctgcaaaaaaaacttagaagctaaagatactgtactgttatcttgtatcatgattataccag

SEQ ID NO: 36339 - DNA, 201 bp, Homo sapiens
ggtattgctgacttagagtaataatgtgtaaagaacagaaaatatccagagcagaaccgataatgagtgttgtttagatttctctgtatcactgacttcarttctttactagtttacttttgataccaggaacatttcctatcaatttattacattttgaggcataggttaaaatcaataatgttgtttcttaaaagcccc

SEQ ID NO: 36340 - DNA, 201 bp, Homo sapiens
tagttttatcagctctttcttaagctcttgggatttagtttggaatattcatcttagtaaccttcatattcatttattaaacgattattctggtgctggtaaaaaaatttcatattttaataatacatggggaaagtagaatctaatgaagactgtatttccaagtaaaaataggtaacttaactttttatatttatttaa

SEQ ID NO: 36341 - DNA, 201 bp, Homo sapiens
atttctctgtatcactgacttcaattctttactagtttacttttgataccaggaacatttcctatcaatttattacattttgaggcataggttaaaatcartaatgttgtttcttaaaagcccctcttatctgagaatgttaaacattatttaataacattatcttgtaaggtggaaaagtcagtgcaagatttcctgggc

SEQ ID NO: 36342 - DNA, 201 bp, Homo sapiens
attgaaacaagttgttgattcgataattacaagacttgtacaaaaattcacagcgcctgtgaggagcctttggctggaactggtgacacctgtgcctctcyggacagaggaaggaagtcccaccccgccttccagcagcagcgagcctgtgtctggcattccctgttccgctgctcccaccctcactgtggggcagcagtt

SEQ ID NO: 36343 - DNA, 201 bp, Homo sapiens
atgcagacattttagagtattatataaacaaccgcttaattaattttggtttaaactcctaggaagtgatgaaatcacattttaacaggactgaataggamccataaaataatttttaggtaatctctgttctcaccctaagaatattaattctgccattctaggtaatgtttactctaattcacttaaaatttttctttt

SEQ ID NO: 36344 - DNA, 201 bp, Homo sapiens
tggtatcaaaggacattattaagaaagtaaaaagacagcttaagggatgcaagaaaatatttgcaaatcatatatgtgataacaatttaatatccagattrtatgaagaactacagctcaacaacagaaagacaactcaatcaaaaaatgggcaaaagacttgaatagacatttctccagagaagatatatataaatggtc

SEQ ID NO: 36345 - DNA, 201 bp, Homo sapiens
ttccatgccatacagtgccaagaaaataaccccatatgtatgatgccttcattaagtcctcattactaacaagttgaattttatagtcctaaatagcaccygtgagctaagaaccatttagttggtatcagctaacccagtttcgtagtactgttttttcttttgagacagagtctcattctgtcacccaggctggagtgc

SEQ ID NO: 36346 - DNA, 201 bp, Homo sapiens
ttcagtatgctgttgatcacacagaccagccctggtactgtgtgggaagggactacatacgagtgaatactagaagggacgatcatcttggagcctggctrcagacatagagcatgctttcaaggagctttcaattgacaagaagatgttgaaatgtacagtttgcaactttcttgccattatctcctaacatcatctgta

SEQ ID NO: 36347 - DNA, 201 bp, Homo sapiens
ctactgacaatgtgtgaggagaggcttgttgtcagccagtgagggttaatgtcctgtctttttctgacatcactctttttttttttttttttttaatttgkagacagagtctcactctgttccccaggctggagtgcagtgacgcgatctcagctcactgcaactaccatctcccaggttcaagcaattcttgtgcctcat

SEQ ID NO: 36348 - DNA, 201 bp, Homo sapiens
caagaagactatccgcataaccaattttctattgttacctttaaaaattctttgcagtattataattgccaaaaacacctttatgcactgctttttctgtrtcattttcttagaacaggcacccagaaacgaagttagcgattattttaaggctaatttatgtgataaatcccacaaatctttgcaaatacgagaggccaa

SEQ ID NO: 36349 - DNA, 201 bp, Homo sapiens
agcctcccgagtagctgggactacaggtgggtgccatcacacccagccaatttctgtatttttagtagagacggggtttcaccatgttggccaggctgctsttgaactcccgacctcaggtaatctgcccgcctcagcctcccaaagtgctgggattacaggcgtgacccaccgcgcccagcccagttcacattaggtttt

SEQ ID NO: 36350 - DNA, 201 bp, Homo sapiens
agactcaaccctacctttgatttcaaatgcccagaatcgggagctggatagagcctagttgggcctctttctccttcacttcctaaactatgggagatttrttctgttcttcagccttctgccctataccatttccaaatttggtgtcttgatgaagagactggccatgtatttgaagcagattctcttcctcaagcagct

SEQ ID NO: 36351 - DNA, 201 bp, Homo sapiens
ggggtgtaggtttgatgacagtggtgaactgccttgactgccttcacaggctgaatcccccgcaggcagtaaccatggctagggaaaaacaggcagccgckaggacagttccggaggagacaacaccaggctcccgtagggaaacttttgggaatggagatgggggattccatcctttgcgtgcagacccaagacttcgat

SEQ ID NO: 36352 - DNA, 201 bp, Homo sapiens
aaacgtgaaactttatgagtgctgacgtgacaccacaagtagaaaattttagacatgactttgtgatgggtcacagtcaaaatgttgtttcatacacaagaaattattataaaacattgtaaaaagttaaccttcaggctatgtttataagatgtatataaaacacaaattttgtgttttgtcttgggtcccatccccaag

SEQ ID NO: 36353 - DNA, 201 bp, Homo sapiens
ctgtcaaaggtgagaaccagccccacaggcctgggcctcgcaggcttaaggagcacttgttggcactgttagctcagcacctctcccagctccagcccatyggctggagaggaaaagggcagaaaacacaaatctcactctagaaacacatacacacacctactacacagatgataaaatcccacaatcgtatctgttcat

SEQ ID NO: 36354 - DNA, 201 bp, Homo sapiens
agagggcaaaagaaaaagagcttctataaaaagtattgaagcaggtattttatttcactagcttacaaaccagtggcaaaattcttatccgtcttctttcrgagaactctgaagcaaaatggttgataccaggctatgtaataacacattcatttgaattaaaaattaaagtcagacttattctaatagaaaataagtctt

SEQ ID NO: 36355 - DNA, 201 bp, Homo sapiens
tgatgggtcacagtcaaaatgttgtttcatacacaagaaattattataaaacattgtaaaaagttaaccttcaggctatgtttataagatgtatataaaamacaaattttgtgttttgtcttgggtcccatccccaagataatctcattatgtatattcaggtattccaaaatttaaaaaaaaaacctgaaatccaaaata

SEQ ID NO: 36356 - DNA, 201 bp, Homo sapiens
aaattttatcagatgtttacttgaagaatgaaactggaataaggatagctactttagtgaatttaagttctgatagcatgataggaatgatgtgccaagtrgattaatatttttgcccagtgtttaacatatccctctactgtgcacaaaagactgctacctaaatttctcactcacagattttctctactgataatatct

SEQ ID NO: 36357 - DNA, 201 bp, Homo sapiens
ttattttttagtagttttgttgttattttggtccctggtttcttagtttttctgtgtaagcagtcctgctgtctgataataggattttcagaatagggacrcatcctttttactttgtagactttctatttctttgtcttgacttactgcactagctcggacctctaatacagtgttgaaatggtgtcacaagggtggaca

SEQ ID NO: 36358 - DNA, 201 bp, Homo sapiens
caggagatcgagaccatccttgctaagatggtgaaaacctgtctctactaaaaattcaaaaaattagctgggcatggtggcgggcgcctgtagtcccagcyactcgagaggctgaggcaggagaatggcgtgaatctgggaggcagagcttgcagtgagctgagatcacgccactgcactccagcctgggcaacagaacaa

SEQ ID NO: 36359 - DNA, 201 bp, Homo sapiens
agaagttacatgtttagtttccattgcttgcttttagaaaaatgatggccaaatatgttacaaagatttgaaaataactagatgcttttaagccttgtagrtagtgatgaggttttaatatagccttgttttcctctggcttgtccataaagtagaattaatagtattaaataatattccattatttaattttcctcataa

SEQ ID NO: 36360 - DNA, 201 bp, Homo sapiens
tgttgttattttggtccctggtttcttagtttttctgtgtaagcagtcctgctgtctgataataggattttcagaatagggacgcatcctttttactttgyagactttctatttctttgtcttgacttactgcactagctcggacctctaatacagtgttgaaatggtgtcacaagggtggacatccttaccttattcctg

SEQ ID NO: 36361 - DNA, 201 bp, Homo sapiens
ggctgggcagaggcgccccgcacctccggacggggtgactgccgggagggctgccccccacctcccgaacggggcggctggccgagcgggggctgcccccygacctccctcccggacggggcagctgccaggcggagacgctcctcacttcccagacggggcggctgctgggcggaggggctcctcacttctcagacgggg

SEQ ID NO: 36362 - DNA, 201 bp, Homo sapiens
tttaatatagccttgttttcctctggcttgtccataaagtagaattaatagtattaaataatattccattatttaattttcctcataaaatttagttgackctcaaattttattaaacctaaaattctctcatgtttaggaatattatatttgtataataatacaacatatggtgagaacaaaatataatcatttgaaaat

SEQ ID NO: 36363 - DNA, 201 bp, Homo sapiens
taggatatcccggatttattaccattttcttgaaaactttacttgaacatttttccattcatgtgaaagcttagtcagagtgcttcatagctgtattacaygaacttcttaaactttccttaatgtggatgttaagaaagtgaagatttaataaaaagaaattcagatatttttaaaataaagggatatcttatatacatt

SEQ ID NO: 36364 - DNA, 201 bp, Homo sapiens
ttccttccttccaggtatggggcaggaccctctctggaacgggggtgtgatgacctacaatgaaacaggtaaaatctgatagtttttttgttgttgttgtttctttgtttgagacagagtctcgctgtgtcccccaggctggagtgcagtggcgtggtcttggctcactgcaacctcagcctcccgggttcaagccttcct

SEQ ID NO: 36365 - DNA, 201 bp, Homo sapiens
cattccttccttccaggtatggggcaggaccctctctggaacgggggtgtgatgacctacaatgaaacaggtaaaatctgatagtttttttgttgttgttgtttctttgtttgagacagagtctcgctgtgtcccccaggctggagtgcagtggcgtggtcttggctcactgcaacctcagcctcccgggttcaagccttc

SEQ ID NO: 36366 - DNA, 201 bp, Homo sapiens
cttcattgacaactggggccagataatgctttgttggaggggttgtcgtgtgcattgtagaatatttagcagtatccctggcctctacccactaaatgccrgtagaacccatcctttcccaattgtgacaagcaactgagagcagtgtgatatgttgaagcaaaaacgtagcctgtgctttatatctagactcaggattca

SEQ ID NO: 36367 - DNA, 201 bp, Homo sapiens
ctctctgtgcagcattccttccttccaggtatggggcaggaccctctctggaacgggggtgtgatgacctacaatgaaacaggtaaaatctgatagttttkttgttgttgttgtttctttgtttgagacagagtctcgctgtgtcccccaggctggagtgcagtggcgtggtcttggctcactgcaacctcagcctcccgg

SEQ ID NO: 36368 - DNA, 201 bp, Homo sapiens
tgtcagcggtgaaaatcagccctcaaggaggctgagaggtagccaggtttggagttatttcctttgttagggaactctatctaacccccaaaacataattsaaatagtatacacaaaagtttggtttagtccagttcttcaggccctgaagcacattagccattgtctaaactcttgaattatatctgaactaaaagaata

SEQ ID NO: 36369 - DNA, 201 bp, Homo sapiens
tgggcatccaggccaattgcaagaggacagatcttgagtcctaatccatttgagtttattacaaggacagaagtgaagtgaaagggaattactcatttttrtttttcaacatttgcctcttgaatcaagagagagggtggagcctctcttgcttgtgaggcagggtgtttccacatactcgtaacttgaactctaggaaga

SEQ ID NO: 36370 - DNA, 201 bp, Homo sapiens
ttattgactacagtccccctcttgtgctaccaaatactaggtcttcgtcattctgttttttttgtactcattaatcatccccatctcctttttctccacawcctcaccagcatttgttattgcctgccttatggataaaagtcattttaactggggtgagatgatacctcattgtagttttgatttgcatttctctgatga

SEQ ID NO: 36371 - DNA, 201 bp, Homo sapiens
ttagagaaatgcaagtcaaaactacagtgagataccccttctcacccactgagatggctgtaataggcaagacagtaacaagtattgatgaagatatagggaaattggaaagcttatgcattgctggtagaatgtaaaatagtgtaaccactttgtaaagaaattagagagttcctcaaaatgttaaacatagaattacca

SEQ ID NO: 36372 - DNA, 201 bp, Homo sapiens
actttctatttctttgtcttgacttactgcactagctcggacctctaatacagtgttgaaatggtgtcacaagggtggacatccttaccttattcctgaaytgagggaggaagaattcagtgttttactgttaagtatggtgaaattattgttaggcaatattttggtaggtgccttttatctgattgaagatattgtctt

SEQ ID NO: 36373 - DNA, 201 bp, Homo sapiens
ccataaaaaggatgagttcatgtcctttgtagggacgtggatgaagctggaaaccattattctgagcaaattattgcaaggacagaaaacaacaccgcatrttctcactcataggtgggaattaaacaacgagaacgcttggacacagggtggggaacatcacgcactggggcctgtcgtggggtggggggagggaggagg

SEQ ID NO: 36374 - DNA, 201 bp, Homo sapiens
catgtaaatgtattactcattttaagataccatgtaataacttttccagattgagctgaattcatgcaagttccatgaatcatttaaggaagaagtaattytaaacttaaacttccccagataatagaagaagaaggaccattgcccaagtcattttatgagactagaatgaccttgattctaaaacctgacatgaagcaa

SEQ ID NO: 36375 - DNA, 201 bp, Homo sapiens
agacttggagccaacccaaatgtccatgaatgatagattggattaagaaaatgtggcacgtatacaccatggaatactatgcagccataaaaaggatgagytcatgtcctttgtagggacgtggatgaagctggaaaccattattctgagcaaattattgcaaggacagaaaacaacaccgcatattctcactcataggtg

SEQ ID NO: 36376 - DNA, 201 bp, Homo sapiens
gttataatttaggatttgtttctctcattttattatggattaattatgtctcacttgccttgcagactttctggggccttggacacctagaacattttttktgaatcttgaaataagaaaaaaattttggagggaaatagctgttataaggtctctccttaattctatgtctttattctatgagatatgaataaactataa

SEQ ID NO: 36377 - DNA, 201 bp, Homo sapiens
atgcacacatatgtttattgtggcactattcacaatagcaaagacttggagccaacccaaatgtccatgaatgatagattggattaagaaaatgtggcacrtatacaccatggaatactatgcagccataaaaaggatgagttcatgtcctttgtagggacgtggatgaagctggaaaccattattctgagcaaattattg

SEQ ID NO: 36378 - DNA, 201 bp, Homo sapiens
ttggtgtaaatttttgaaacctgtttcttcacctgtacatgtagtatgcatcaaagattttatctgtctgaattcctcttcttcacaaccagattttattktcacatgacttttttctatttcactaccaaaggacatataacctggggcttttttataggcatccatttaatcatctaacaaatatttattgagcactta

SEQ ID NO: 36379 - DNA, 201 bp, Homo sapiens
attcctcaggtatctagaactagaaataccatttgacccagccatcccattactgggcatatactcaaaggattataaatcatgctgctataaagacacawgcacacatatgtttattgtggcactattcacaatagcaaagacttggagccaacccaaatgtccatgaatgatagattggattaagaaaatgtggcacgt

SEQ ID NO: 36380 - DNA, 201 bp, Homo sapiens
gctggagaggatgtggagaaataggaacgcttttacactgttggtgggactgtaaactagttcaatcattgtggaagacagtgtggcaattcctcaggtayctagaactagaaataccatttgacccagccatcccattactgggcatatactcaaaggattataaatcatgctgctataaagacacatgcacacatatgt

SEQ ID NO: 36381 - DNA, 201 bp, Homo sapiens
actggttccacatacgcaagtcaataaacgtaatccatcacataaacagaaccagtgacaaaaaccacatgattatctcaatagatgcagaaaaggccttygataaaattcaacacctttatactaaaaactcaataaactaggtattgatggaacgtatctcaaaataatagctatttatgacaaacccacagccaatat

SEQ ID NO: 36382 - DNA, 201 bp, Homo sapiens
ccagacaagagaaggaaataaagggtattcagataggaagagaggaagtcaaattgtctctgtctgcaggtgacatgattgtattagaaaaccccttcatytcagtccaaaatctccttaagctgacaagcaacttcagcaaagtctcaggttacaaaatcaatgtgcaaaaatgacaggaggacttttaaagttaagtca

SEQ ID NO: 36383 - DNA, 201 bp, Homo sapiens
ggcatgaaccatggtgcccggcctagtacagctttttctatttgttcactataattagtttttaacaactttatctaaatgtcatggctaattgtgttggrtatttataatagtctctggatttctttcagaattatagccatatttgctatttgttgtagtgaaagtaaaggctctgctgccttactcattttatagtat

SEQ ID NO: 36384 - DNA, 201 bp, Homo sapiens; identical to SEQ ID NO: 5598

SEQ ID NO: 36385 - DNA, 201 bp, Homo sapiens; identical to SEQ ID NO: 5599

SEQ ID NO: 36386 - DNA, 201 bp, Homo sapiens
tagcaacttcctatactctcttcagttcattttcttttcagccgaacctgaaaaagcttggcttgagagtattatagataatactaattacaatcatatawattagctgcttgctctttatatttgagaaacgtattgtcatatattaaatatgtgctaagtaagttttgaatttgattaaattacaattctacactttgt

SEQ ID NO: 36387 - DNA, 201 bp, Homo sapiens
cgggttggcagtcgggcagagacgctcctcagatcccagacggggtcgcggccgggcagaggcgctcctcacatcccagacggggcggcggggcagaggcrctccccacatctcagacgatgggcggcagggcagagacgctcctcacttcctagacgtgatggcggccgggaagaggcgctcctcacttcccagactggg

SEQ ID NO: 36388 - DNA, 201 bp, Homo sapiens
cttcttttacattctgttacaatcagttacagaaatccgaggcttttacagaaatctgaggcttggcagcatagtttcagcgatacttgggggaatggtcwattgtatgtgagaattggtaggaaatagagttttaaaacatacattttaaagatttttagtcctatgaccaaaatcagacctagcttctttggcattcct

SEQ ID NO: 36389 - DNA, 201 bp, Homo sapiens
ttgtttttttaatgagacagggtctcgccagtgtagtggtgccatcatagctcactgtagcctcaaactcctgggctcaagctatcttcccactcagcctyataagtagctgggactacaggtgtgccccaccatgtccggctaattaaaaattaaaaaaaaaaatagagatgggggtctcactttgttgcccaggctggt

SEQ ID NO: 36390 - DNA, 201 bp, Homo sapiens
tcatttttgaaaagagtaaaaatttactaggtaaatgtctaacgccaggctagttcattattttattgaatgtttgccagcactaaatcagaaatatctaratcctttttgttctcatttgttccagtctgctactgccaacctttccagaaaagaaattgtctatcacttgatgaaggcttattttgtgggtcactgtac

SEQ ID NO: 36391 - DNA, 201 bp, Homo sapiens
aaataaataagttctttaagaccaatgagaacaaagacacaacataccagaatctcttgagacacagctaaagcaatgtttagagggaaatttatagcacwaaatgcccacaggagaaagcgggaaagatctaaaatcgacaccctaacatcacaattaaaagaactagagaagcaagagcaaacacattcaaaagctagc

SEQ ID NO: 36392 - DNA, 201 bp, Homo sapiens
acatggtagggataacttgaattgtgtctgtgaattcagatggtaagtgttctagtaatgttgatttttttaaattgagaggattgcttcgtgattatggyagagtgtccttgactttgaaagatacacactggagtatttaggggtaatagggcataatatctgcagctagctgcctctcagtggttctgaagaacacta

SEQ ID NO: 36393 - DNA, 201 bp, Homo sapiens
cggattacagcttaataatgaataagcatttcagatacctgtactatggccagtagaactgcattcaagtgatatctcattaattattgtgtttatgaaasattactagttcaactgattgcttgattattttgaaacttgtagagacttaaaaccattagatatttggatttatcaaatgaatctgaatatatgttgatt

SEQ ID NO: 36394 - DNA, 201 bp, Homo sapiens
caaagaaaagtatctaatttggtctcaaactaatttgcctttggatagaacgtaatgcatgtgaagcaaatggcaattattattttcattttggtccattrtcaaccttgatgtacgttctctgactatataatctaaagtagccaccctctcccaaatactttttgcattgccatatatatacaatttagaacttattat

SEQ ID NO: 36395 - DNA, 201 bp, Homo sapiens
ccagcagcactgtaactcgtgcctgaatgaagcttttctagcacattattttctccataaaggcacatcactgtcctctggcgctaggaacactagacagygcttcagcactatgcttgggagcctttgcaagcagtgaatcacatacagagggcccaaaaatgtgaaatgcatgacaccaaagagaccctgtagaggaca

SEQ ID NO: 36396 - DNA, 201 bp, Homo sapiens
gcttctctttaaagacactttatataacatatgttgttgattcattaacactgaactcaccactgaactcaccaccagcagcactgtaactcgtgcctgartgaagcttttctagcacattattttctccataaaggcacatcactgtcctctggcgctaggaacactagacagcgcttcagcactatgcttgggagcctt

SEQ ID NO: 36397 - DNA, 201 bp, Homo sapiens
catgaaaaaatgctcatcatcactggccatcagagaaatgcaaatcaaaaccacaatgggataccatctcacaccagttagaatggcaatcattaaaaaartcaggaaacaacaggtgctggagaggatgtggagaaataggaacgcttttacactgttggtgggactgtaaactagttcaatcattgtggaagacagtgt

SEQ ID NO: 36398 - DNA, 201 bp, Homo sapiens
aatcattccaaattaaatacatagtacagttgatcctaattattcatggtggttatgttctatatagttgccttgaacactgttagctaatattgaaccawtgctctgagggaaatacagggttaggtttctgtgagcctctgatcaactgatcaatatatagtcttgttttatgtgtgcttctctttaaagacactttat

SEQ ID NO: 36399 - DNA, 201 bp, Homo sapiens
acatgaaaaaatgctcatcatcactggccatcagagaaatgcaaatcaaaaccacaatgggataccatctcacaccagttagaatggcaatcattaaaaaaatcaggaaacaacaggtgctggagaggatgtggagaaataggaacgcttttacactgttggtgggactgtaaactagttcaatcattgtggaagacagtg

SEQ ID NO: 36400 - DNA, 201 bp, Homo sapiens
ttgacaaaccggacaaaaacaagaaatggggaaaggattccctatttaataaatggtgctgggaaaaccggctagccatatgtaaaaagctgaaactggawcccttccttacatcttatacaaaaattaattcaagatggattaaagacttaaattttagacctaaaaccataaaaaccctagaagaaaacctaggcaata

SEQ ID NO: 36401 - DNA, 201 bp, Homo sapiens
cggacaaagctgcaggcatcacgctgcctgacttcaaactatacacaaggctacagtaaccaaaacagcatggtactggtaccaaaacagagatacagacyaatggaacagaatagagcccctagaaataataccacacatctacaatctgatctttgacaaaccggacaaaaacaagaaatggggaaaggattccctatt

SEQ ID NO: 36402 - DNA, 201 bp, Homo sapiens
tcagacagcaatattagccgttctgcaatatttgctgttctgcagcctctgctggtgatacctaggcaaatggtctggagtggacctccagcaaactccarcagacctgcggctgagggtcctgactgttagaaggaagactaacaaacagaaaggacatccacaccaaaaccccatctgtacatcaccatcatcaaagac

SEQ ID NO: 36403 - DNA, 201 bp, Homo sapiens
cttttggcttccttgggccacattggaaaaagaattgtcttgggccacagataaaatacactaacactaacgatagctaatgagctaaaaaaaaaaaaaaatcacaaaatctcatactgttttaagaaagtttacgtatttgtgttgggtcatattcaaagccgttctgggccacatgcggcctgtgggccacgggttggg

SEQ ID NO: 36404 - DNA, 201 bp, Homo sapiens
aaggttttcctgaccatcctatttataatttaatcatatatatatccccagtactactgtctcctttttctgcttttttctctaaaataaaggatgtaacrtattttacttacatattttgtgaatgaaggaatgtatttatggacaaataatcaggaacttttgtaactaatcagagttttacaatcacaaaactttact

SEQ ID NO: 36405 - DNA, 201 bp, Homo sapiens
aaatcacaaaatacacagttgtatctcttttgtcataataccttatttttgagttttagtgtcagtttagttgtatacttgcagctgagaatattgatgcygtaaactttgcatgtatatacacccacatagattaccagtcattcatcattaattcagctaatgtttattgagtagctatagattcccaattactaggtg

SEQ ID NO: 36406 - DNA, 201 bp, Homo sapiens
ataggaaagaatacatatgagacgctttttttttttttttttttttgtggagaccgggtctcattctgtcatcgaggctggagtgcagtggcacaattacrgctcactgtagcctcgacctcttgagctcagttgatcctcatacctcagcttcctgagtagctggtaccacaggcatgtgtcaccacaactggctaactt

SEQ ID NO: 36407 - DNA, 201 bp, Homo sapiens
ttttgacttttacttggagacagatgggaaaccattggaagctgtggagcagaggagtgtcatgatctgagctacatttcaagaggatcaactgtggcttyagtgttgaggatgggttgtgggatgagagggcagaagtagtagagaggtcaggtaggacaatccaggcaagattttcttttttttcttttcttttttttt

SEQ ID NO: 36408 - DNA, 201 bp, Homo sapiens
ggccgaagcaggaggattacttgagcccaggagttcaaaaccagcctgggcaacagagtgagaccccatctctacagaaaattaagaaattagctgggcayggtggtagatgcctgtagtcccagctactcaggaggctgaggtgggaagattgcttgaggtcgaggctgcagtgagtcatgattgtgccagtgtactcca

SEQ ID NO: 36409 - DNA, 201 bp, Homo sapiens
ataattagcggtcatttcatgaccaggatgtgatgtgtggtatcccatactacctcattccatgcttcaaattttatgtgttttatatagaaaatgtagaraagcaagtagaaattgcatcacttagaaatacctgatcttttgataaagcatagaaatttatggtacatattttatgtgtgtgtgtgtgtatatatatat

SEQ ID NO: 36410 - DNA, 201 bp, Homo sapiens
tttctaaaagccttctatttttagctactatatttagattggtgatccatctcaaattcatgtctgatgtgatatcggcattgagattcatttttttttttgtatttgtagccagttgtttcagcaccatttgttgaaaaggctgttttccctttattaagtcattttagcaccttagtaaaaagaccatgtgctctattg

SEQ ID NO: 36411 - DNA, 201 bp, Homo sapiens; identical to SEQ ID NO: 5592

SEQ ID NO: 36412 - DNA, 201 bp, Homo sapiens
tcatagaggctacctgagagagaacaggcttttcttggttcagaaattctaggtttgagaaggaaagcctacatacagccatctccacactgcacaatagrtgagcagttttcagcagacatctccacattggtgttcttattggtctaaatgtacacctggtcagaaatggttttcatggccccagatgttcaggaagag

SEQ ID NO: 36413 - DNA, 201 bp, Homo sapiens
ctatgttttttttttctaaaagccttctatttttagctactatatttagattggtgatccatctcaaattcatgtctgatgtgatatcggcattgagattmatttttttttttgtatttgtagccagttgtttcagcaccatttgttgaaaaggctgttttccctttattaagtcattttagcaccttagtaaaaagacca

SEQ ID NO: 36414 - DNA, 201 bp, Homo sapiens
gctctttgaaagggttaataggatatttaaaaattgttggggtcttgggaggaaaatcacatgattatttcaataaaggaaaaacataactttgataggtrtatgttacaagaactcagaaaataggaataaaggggaatatccttaacttgataaaggatttatgccaataacctaaagcaaaccttttatggagaaact

SEQ ID NO: 36415 - DNA, 201 bp, Homo sapiens
gccctattaagctcagtacccatcagttattttttcctgatcctctccctcctcccaccctctgtcctctgacaggtcccagtgtgtgttgttcccttctrtgtgtccatgtgtactcatcatttagctcccacttacaagtgagaacatggggtatttggttttctgttcctgtgttagtttgcagagcataatggcctc

SEQ ID NO: 36416 - DNA, 201 bp, Homo sapiens
ccctatgtgtgccacttattaattttttaaaaacagttttcaatgtagaagtcttttttaaaaacagttcttaaggtcaggggtacacttgcaggtttgtkaaataagtaaacttgtgtcatgggcatttgttgtacagattatttcatcgccctattaagctcagtacccatcagttattttttcctgatcctctccctc

SEQ ID NO: 36417 - DNA, 201 bp, Homo sapiens
tcatcctcactttcagcttgcatctcctttcactgaaaggattgaggcaaaccgcagacaacttccacaagctccagttaccatatttaccgcctacttaytgttggacccaaattctctgttcttttcatggatgaactgtgcaagcctctagtaaggccagtatcttccatcccttcctggctagtctagtgcatgttt

SEQ ID NO: 36418 - DNA, 201 bp, Homo sapiens
tttctgaggtataggtcaaagttcactttattctttgtggtttctgattattgtttgttttaaagactacctttttcacatttaattgcaaagaaacttthaagttgggcccctatgtgtgccacttattaattttttaaaaacagttttcaatgtagaagtcttttttaaaaacagttcttaaggtcaggggtacacttg

SEQ ID NO: 36419 - DNA, 201 bp, Homo sapiens; identical to SEQ ID NO: 5597

SEQ ID NO: 36420 - DNA, 201 bp, Homo sapiens
atgggtgagttgtctgacttatcgtcatattctagattcaaatctgttgttggagatgtgcacacgtgtgtgtgtgtgtgtgtgtgtgtgtgtgtgtgtggacaaatcttttccgtggcttggcatttccctctctccaaagatcttgtattgaacagaaattcttaatgttaatggagtgcaattaattaaacttttact

SEQ ID NO: 36421 - DNA, 201 bp, Homo sapiens
ggaaataatataacttagcctccttgattattaaattactttgagtaaattactctgctgtggagatgcctctggtaggacaaaaatagtgctgaatttgkacttgagatgggatacaggcctggctctccaacttcacaaggcatactagtttcatgaaatcagccacatcacatgtacagagctgatattcagctggta

SEQ ID NO: 36422 - DNA, 201 bp, Homo sapiens
aacttagcctccttgattattaaattactttgagtaaattactctgctgtggagatgcctctggtaggacaaaaatagtgctgaatttggacttgagatgrgatacaggcctggctctccaacttcacaaggcatactagtttcatgaaatcagccacatcacatgtacagagctgatattcagctggtaagctttagttc

SEQ ID NO: 36423 - DNA, 201 bp, Homo sapiens
tgactgaagtataaaacagggaaatttgacatatattctctaacaactccattgcaaagcagccagaatgaaatggctgtggtgagaactgaaattaacaytatattgaaacaaatcagtaaaaatatccttaaagcttttagaagctatcccctgtgatatcatctgttacaaactttatatggtagagaaattttatga

SEQ ID NO: 36424 - DNA, 201 bp, Homo sapiens
catgggtgagttgtctgacttatcgtcatattctagattcaaatctgttgttggagatgtgcacacgtgtgtgtgtgtgtgtgtgtgtgtgtgtgtgtgtwgacaaatcttttccgtggcttggcatttccctctctccaaagatcttgtattgaacagaaattcttaatgttaatggagtgcaattaattaaacttttac

SEQ ID NO: 36425 - DNA, 201 bp, Homo sapiens
ccaggtctatatgacttaagaatcaaagttcctaattactatatatgccccaacttttcaggaactgtcccttatttgtcttctcaatatgcccaatgcartagtatttaataagtattaactaattgatcatttgagagaacttggaagggaaggattaaatgtgccaagagaacacatagatctaagttggccttctgt

SEQ ID NO: 36426 - DNA, 201 bp, Homo sapiens
tggctctgcctggtgctctgttctagtgtggctgagctagtatccaagatgcaagacaatgtcggggctgggcatggtggcttacgcctgtaatctcagcrctttgggaggccaaggtgggcagatcacctgaggtcaggagtttgagaccagcctggccaacatggtgaaaccctgtctctactacaaatacaaaaatta

SEQ ID NO: 36427 - DNA, 201 bp, Homo sapiens
aatatccaagtttataaaggtcagaagactgagttattttcattttttgagtttagtttacagattgagtattccttattcaaaatgcttgggaccggaartattttggatttcttttggattttgggaagtttgcgttatacttaacagttcagcatccctaatccaaaaatttaagcatcttgtcagtactcaaaaagt

SEQ ID NO: 36428 - DNA, 201 bp, Homo sapiens
gtgtatatgtacacacatatatacatacatacatacatatatgtatacacacatcacattttcttcagtcctgcgttaatggacagcaagattgagtctgygactttgctattgggaatagtgctgtgataaacatataagtacaggtatctttttgatataatgattttttttcctttgggtagatacctagtagtggga

SEQ ID NO: 36429 - DNA, 201 bp, Homo sapiens
ttcaaggcagccggttcccttttggcccagagtgtgtctagaaatatcattggggagctagggcctggaatgggggcctcatggctctgcctggtgctctrttctagtgtggctgagctagtatccaagatgcaagacaatgtcggggctgggcatggtggcttacgcctgtaatctcagcactttgggaggccaaggtgg

SEQ ID NO: 36430 - DNA, 201 bp, Homo sapiens
gtttcatcatatatttatagatcagtcatttgtagggaattttaattcctgtatgcatattttggttcaaatgtttttccattaagagctcttaatgcttwtaatgtttctattcagtgcatataaagggaatatgcagattgtggaaatttatttgggttctagacagtacagttattggttcattaatttatatctata

SEQ ID NO: 36431 - DNA, 201 bp, Homo sapiens
aaattcaaaataaaacagtataatttaaaatcaaatattttattcaattaacaagtatttatatattctgtttctgagacaagatggaatagactcacttytccctgttctcctgtgaagtatagctgaagattctggacatttatatataaagcaaacattagaagaacccaaaaggtagagagaataaggtagaccagc

SEQ ID NO: 36432 - DNA, 201 bp, Homo sapiens
agcacccctgtggccaccatcactgggactgtgctgggtcagacctgaagccagcacagcactgggccttgcccaaggcccttcccttcagggtggtgagtttccccaggccccgggtgtgtccagagatgctgtctggtagcctgcgattctagttaaaaaccttagcaatctacctgatgttttatttttactacgtct

SEQ ID NO: 36433 - DNA, 201 bp, Homo sapiens
tagaactaaattggatatagtagggatttcattcataaattatcattcaacactaaatgcaaattcttggctgaaggagcttatagaaacaaaatctattktgttataaaaatgcataaattaagcattttcttagtaggaccaaactttttgtgatatgttagagtgactaacttttctttcctaatcttataatatcct

SEQ ID NO: 36434 - DNA, 201 bp, Homo sapiens
aagcacccctgtggccaccatcactgggactgtgctgggtcagacctgaagccagcacagcactgggccttgcccaaggcccttcccttcagggtggtgagtttccccaggccccgggtgtgtccagagatgctgtctggtagcctgcgattctagttaaaaaccttagcaatctacctgatgttttatttttactacgtc

SEQ ID NO: 36435 - DNA, 201 bp, Homo sapiens
ctatggtttagtgttttgtccttatgagtaaccgccaaagcctacagtaacaaatatttttttgttgtgtggtgtccagcccttcactagatgttagggayacgaagacacagaccctgggaaaatcaagccatgatttgccatgttctcatgccccatgtctcagtgtgaatgggtgagcacggggagtcattcatcaca

SEQ ID NO: 36436 - DNA, 201 bp, Homo sapiens
caagcacccctgtggccaccatcactgggactgtgctgggtcagacctgaagccagcacagcactgggccttgcccaaggcccttcccttcagggtggtgagtttccccaggccccgggtgtgtccagagatgctgtctggtagcctgcgattctagttaaaaaccttagcaatctacctgatgttttatttttactacgt

SEQ ID NO: 36437 - DNA, 201 bp, Homo sapiens
cgccaaagcctacagtaacaaatatttttttgttgtgtggtgtccagcccttcactagatgttagggacacgaagacacagaccctgggaaaatcaagccrtgatttgccatgttctcatgccccatgtctcagtgtgaatgggtgagcacggggagtcattcatcacaatactgtaaaaatcaaaataggtacaaaagaa

SEQ ID NO: 36438 - DNA, 201 bp, Homo sapiens
gcaggattggacaggaagagataaatctttaagtattaatagaccacctacacataaaaatgtatagatgcaatagataaaaattttgttaataagataaytgagtattttcagttaagggatcatcttacaaaaatcagtagaattcctctgtattcaaaataattaactagaagagatgatgatacaagatgtcattca

SEQ ID NO: 36439 - DNA, 201 bp, Homo sapiens
acaagcacccctgtggccaccatcactgggactgtgctgggtcagacctgaagccagcacagcactgggccttgcccaaggcccttcccttcagggtggtgagtttccccaggccccgggtgtgtccagagatgctgtctggtagcctgcgattctagttaaaaaccttagcaatctacctgatgttttatttttactacg

SEQ ID NO: 36440 - DNA, 201 bp, Homo sapiens
ttaggacacacaaaccacattccagttttcccttagaaaacttctcctgttccagcagttatggtcgtggttcctggggaagcaaatgctggctgctgttsttctcctctcccttccccccgcatgctgctgcttgacttgtttggcttgttgttcaagaggaagaggagactgtgagagccctggctggggctggcctgg

SEQ ID NO: 36441 - DNA, 201 bp, Homo sapiens
tgcatattagagtagcatttctcttcctccccaccaacccccagtaactggaaacatcctcgttcaacctttgttttcctcttttgtgggctagcctgtgscctatggcaagtccaatggcctggaagtggtcttacagattatctggttaaactgaagcagagagatagaaatgtaatcaatttgttgagagtgagaaag

SEQ ID NO: 36442 - DNA, 201 bp, Homo sapiens
tacaggcacccaccaccacccctggctaatttttatatttttagtagagatggggtttcaccatgttggccaggctggtctcgagctcctgacctcaagtratccacccacctcggcctcccatggtgctgggattacaggtgtgagccaccgtgcttggcccaaaatagctattttgaattctgtgtctgaaatgtcatg

SEQ ID NO: 36443 - DNA, 201 bp, Homo sapiens
cgtgctggcaggtgtcactgtcctcccagttgccaccatcaccaggtacagcagcttcagcagtgtggtacagcctcccgggggctggggcagtgacaccrcaacctctcctcctgttctccacccctcccacctcccttcttacagggaacggggctgagccttccaggttcagggccaagggcctcacgctgaaccagt

SEQ ID NO: 36444 - DNA, 201 bp, Homo sapiens
tgcagattgctgacatgcatatattgcattgtggtgaaatacccatctagtgaacccatcacccaaatagtgaacattggacccaataggcaacttgtcarccctcacccccttcccaccctcccaccttttgtagtctgcaatgtattattccactctgtatgtccatgtgtactcatggtttagcttccacttataaat

SEQ ID NO: 36445 - DNA, 201 bp, Homo sapiens
ctgcacctggccaaaatagcttttttttgagacaaagtctcgctctgttgcccaggctagagtgcagtgacacgatcttggctcactgcaacctctgcctyccaggttctgtgattcttccatgtcagcctgctgagtagctgggattacaggcacccaccaccacccctggctaatttttatatttttagtagagatggg

SEQ ID NO: 36446 - DNA, 201 bp, Homo sapiens
tctcctcctgttctccacccctcccacctcccttcttacagggaacggggctgagccttccaggttcagggccaagggcctcacgctgaaccagtcccaamccttgcaaatgggctgtgacactgaacctgctgaccgtcaggtcagaaaagaaccaccaccacgagctagaagatacgggtcgtcattctccagaataca

SEQ ID NO: 36447 - DNA, 201 bp, Homo sapiens
ttcctcatagcttcagtgacctggattttatctgaagacaaccagcctgcacaaagacaaattgtcttccccaaagtgtgtttagaatacacttgtgagcmttgcaaatttcaactccattttttttgtttgtgcagtatggctttctgtataccagtggttttcattcttcctgagaataggaccttcttttttagattc

SEQ ID NO: 36448 - DNA, 201 bp, Homo sapiens
ttttaagtatagtgctccaggggtaggcctgactgagaaggtgacatgttagcaaaaatttaaagaaggcaagggggttagccatacagttatctgcaaartatgtgttccaggcagaaggactagccggtgcaaaaactctaaaatcaaatgtgccccaggtgttcaagtaaaacagagagtactggatggctagagcag

SEQ ID NO: 36449 - DNA, 201 bp, Homo sapiens
ccttctctgtgttatcttgaatttctttgagtttcctcaaagtagctattgttttttaagatggactgtcactctgtcacccaggctagagtgcagtggcrcgatctcagctcactgcaacctccgcctcctaagttcaagccattctcttgcctcaaccttctgagtagctgggattacaggcgtgcaccatcatgcctg

SEQ ID NO: 36450 - DNA, 201 bp, Homo sapiens
ctaaaggggtgaaatgggcttgttgcctgatcagtagagccttactgattgttgtaaggtctttggtttttactcagaatgaaatggcagtttttcgcagkgtttagaggcattacatgatctgaataagcagagggatagggagagagagcagaaggtactattttaacgagaatggtgaggcctctccagaaaggtagt

SEQ ID NO: 36451 - DNA, 201 bp, Homo sapiens
ctgtgacactgaacctgctgaccgtcaggtcagaaaagaaccaccaccacgagctagaagatacgggtcgtcattctccagaatacagaagagggtacacrcgccaaagcacttcccatgagcatttttattaaattgaaacaagttgttgattcgataattacaagacttgtacaaaaattcacagcgcctgtgaggagc

SEQ ID NO: 36452 - DNA, 201 bp, Homo sapiens; identical to SEQ ID NO: 5603

SEQ ID NO: 36453 - DNA, 201 bp, Homo sapiens
tagagccttactgattgttgtaaggtctttggtttttactcagaatgaaatggcagtttttcgcagggtttagaggcattacatgatctgaataagcagarggatagggagagagagcagaaggtactattttaacgagaatggtgaggcctctccagaaaggtagttttaggcaaaaataagtgaaagagaagaaataat

SEQ ID NO: 36454 - DNA, 201 bp, Homo sapiens; identical to SEQ ID NO: 5608

SEQ ID NO: 36455 - DNA, 201 bp, Homo sapiens; identical to SEQ ID NO: 5609

SEQ ID NO: 36456 - DNA, 201 bp, Homo sapiens
actgtgaagcaccttatattccagaagttagtagcccaacagatacatcgaattttgatgtagatgatgattgtttaaaaaattctgtaagtatgacactstgaagaagttctgtccctctgtttctttctactatggttatatagtaattttttggtttataagtattttgctaggatgattttacaatgatcagttatt

SEQ ID NO: 36457 - DNA, 201 bp, Homo sapiens
ttttgtgactgggaataaatataagatctcaaatcacaagcataaggtgaaaatattcgtgggctttacatcaaaattaaaaatgcttttacagtgaaagsattgttaacagatgatgacagactagtggaagatatctgcaatgtttaccactaataagaggcttatttctaaaatacataagaaactcctgcaactcca

SEQ ID NO: 36458 - DNA, 201 bp, Homo sapiens
tgtgtggattctcatgccatataacttgtgtaaacaaagctccaaccacttgtccagttcctcctgaacagacaaaaggtcccctgggtatagatcctcaraaaggaataggaacagcatatgaaggtcatgtcagggtaagtatgattaagttgggtttagattaatcctttaagatttattaatgaattaaaatcaaat

SEQ ID NO: 36459 - DNA, 201 bp, Homo sapiens
ctcattcttccctattctcttctagtctcccttttgcatggattattctcttttcctgccctactgttggttccagattcttatgttattccattgcagayaagggagaagaagaatggtagaatggaaacccactggagaaattcgagacgaaagagaagaaggaaaataatgggtgaagggaaggttaaaatttcttgc

SEQ ID NO: 36460 - DNA, 201 bp, Homo sapiens
aggttgagcattcctaatctgaaaatctgaaatctgaaatgcttcaaaacgtgaaactttatgagtgctgacgtgacaccacaagtagaaaattttagacrtgactttgtgatgggtcacagtcaaaatgttgtttcatacacaagaaattattataaaacattgtaaaaagttaaccttcaggctatgtttataagatgt

SEQ ID NO: 36461 - DNA, 201 bp, Homo sapiens
ttaaacatatacttaccatacaacctggcaattctcctatttactgaaaagaattgaaagcatagtccccttaagacttacatatgaattttcatagcatmatattctcataatagtaaacaactggaaacagtacaaatgtttatcaatggtgcatgataaacaaagcatatcatacccatatactagaataccactcag

SEQ ID NO: 36462 - DNA, 201 bp, Homo sapiens
tgacaatcacatggcccttttatccctaaaaacctgtaaatagatcctctaggagcaactcaccttcatcaaagttgagtaatcaagaagaaactagcacrgtatctctacaaacatacaaaaaaggaagaaaggagtggtaataaatagcaggtgagaccatttatcagaaaaaaatgtagctctgaaataaagtagtat

SEQ ID NO: 36463 - DNA, 201 bp, Homo sapiens
aatttttgtatttttaatagagatggggttttacagtgttggccaggctggtctcgaactcctgacgtcagatgatccgcctgccttggcctcccaaagtkttgggattacaggcatgagccactacgcctggccccgtttttaattattttaatctgtgaaatttatcttatagaatcccaaattccttctctgtgttat

SEQ ID NO: 36464 - DNA, 201 bp, Homo sapiens
gggactacaggtgcataccacgcctggctaatttttgtatttttaatagagatggggttttacagtgttggccaggctggtctcgaactcctgacgtcagrtgatccgcctgccttggcctcccaaagtgttgggattacaggcatgagccactacgcctggccccgtttttaattattttaatctgtgaaatttatctta

SEQ ID NO: 36465 - DNA, 201 bp, Homo sapiens
tcatgaaaaaaaaattttttttttttttttttgagatgaagtctcactctgctgcccaggctggagtgcagtggcactatctctgctcgttgcaacctccrcctcctgagttcaagcgattttcctgcctcagcctcccaagtagctgggattaaaggcatgtgccaccacacccatctaatttttttatttttagtagag

SEQ ID NO: 36466 - DNA, 201 bp, Homo sapiens
tcctgtttacaccctcagtaatatgtttttgtttttccagtgtttaatttccaacttctttttttttttctttttttttttttcagggaggtaaagtgggkggtttttaaaaatttttatttttctatttgtaaactgacaaattatagttgaacacatttatggggtaaacttatttttcagccctaaggtggttactcc

SEQ ID NO: 36467 - DNA, 201 bp, Homo sapiens
tttttttttttgagatgaagtctcactctgctgcccaggctggagtgcagtggcactatctctgctcgttgcaacctccgcctcctgagttcaagcgattytcctgcctcagcctcccaagtagctgggattaaaggcatgtgccaccacacccatctaatttttttatttttagtagagatggggttttaccatgttggc

SEQ ID NO: 36468 - DNA, 201 bp, Homo sapiens
tattaaatatatggagatcttagttttgagcataatttatgaatgctattttgtgtttttaagaggctctcctcctaagaaatatctatatatctaatctstgttactttatctttccaaaagtaagttattgtagattgggaacatgataagtgaatcatggagtttgctttggtaccaacaataacattaagagtgcca

SEQ ID NO: 36469 - DNA, 201 bp, Homo sapiens
atcctgcaactttactgaatttgttcatcagtttgaataagtttttttgtgtgtgtgtgtggagtctttaggttttccaaaatataagaccatatcatctycaaacaaggataatttgacttttttctttccaatttggacacctttcattctttctcttgtttaattgctctagctaatacttaaagaactatgctgtac

SEQ ID NO: 36470 - DNA, 201 bp, Homo sapiens
gcataatttatgaatgctattttgtgtttttaagaggctctcctcctaagaaatatctatatatctaatctctgttactttatctttccaaaagtaagttwttgtagattgggaacatgataagtgaatcatggagtttgctttggtaccaacaataacattaagagtgccactgaatgtctgtgttagagttgtatgaca

SEQ ID NO: 36471 - DNA, 201 bp, Homo sapiens
attgttcactgttggcatagagaaatgctactgatttttgtatgttgattttgtatcctgcaactttactgaatttgttcatcagtttgaataagtttttktgtgtgtgtgtgtggagtctttaggttttccaaaatataagaccatatcatcttcaaacaaggataatttgacttttttctttccaatttggacaccttt

SEQ ID NO: 36472 - DNA, 201 bp, Homo sapiens
acactgaacctgctgaccgtcaggtcagaaaagaaccaccaccacgagctagaagatacgggtcgtcattctccagaatacagaagagggtacacgcgccaaagcacttcccatgagcatttttattaaattgaaacaagttgttgattcgataattacaagacttgtacaaaaattcacagcgcctgtgaggagcctttg

SEQ ID NO: 36473 - DNA, 201 bp, Homo sapiens
ggagttaatctgaagattatgagtcctattctgatagcctaattgagaaaaagtgccacaaacgtgtagtttcaatttacagatgcagagataagttataractagtgataaacttggcaaaatttccaggtaagattatctttcactggatagaattatattttgacttcatgcttaatattttttaagagcatttgctt

SEQ ID NO: 36474 - DNA, 201 bp, Homo sapiens
gtatgctttggatccgaaacccaacccaggttggaggtagaagtccaggttccccgtgtggtttctactgacaatgtgtgaggagaggcttgttgtcagcyagtgagggttaatgtcctgtctttttctgacatcactctttttttttttttttttttaatttggagacagagtctcactctgttccccaggctggagtgc

SEQ ID NO: 36475 - DNA, 201 bp, Homo sapiens
ttgttttttatgtaaggtgagagatagggatcaaatttccttcttctgcatatggttatccagttttcccagcaccatttattgaagagactgtcttttcyctaacattcttggcaccgttgttgaaaattagttccctgtatgtatgtggatttccttctgggttctttattctgtttcattaatctatgtgtctgtttt

SEQ ID NO: 36476 - DNA, 201 bp, Homo sapiens
ttaactgaattgttatactttttgaaaatcccgtgacttgcttgtttctctccactccaactaaatcattaactctcctaaaatgtatgtttcattctagkaagaaaacctcaaaggatattgtaggatataaatcttatttgaaaatatagccattgaaatgttttggccttttggagttggggaatgacaaatctgatc

SEQ ID NO: 36477 - DNA, 201 bp, Homo sapiens
tagttttgatttgcatttctctgatgatcagtgatgttgaccacttttttcatatgcctgtttgccattcgtatgtcttttttatagaaaggtctattcamatctttagcccattttaaaaattggattatcagattgtttcctatagagttgtttgaattccttgtatattctggttattaatcccttgtcagatgagta

SEQ ID NO: 36478 - DNA, 201 bp, Homo sapiens
ggctaaagtggccctcccacttcagtctcctgagtagctgggactgcaggcacaagccaccgtgtccggccgatttttatatttgtatttttgtagagacrgagttttgccacgttgcccacgctggtcttgaactcttagactcaagcaatccgtctgctttggcctcccaaagtattgggatacaggcgtgaaccacca

SEQ ID NO: 36479 - DNA, 201 bp, Homo sapiens
attgactacagtccccctcttgtgctaccaaatactaggtcttcgtcattctgttttttttgtactcattaatcatccccatctcctttttctccacatcytcaccagcatttgttattgcctgccttatggataaaagtcattttaactggggtgagatgatacctcattgtagttttgatttgcatttctctgatgatc

SEQ ID NO: 36480 - DNA, 201 bp, Homo sapiens
ctttttctccccctctcccatctctcctcccctgatattttcatagtattttattttatgtatgaatgtatgtatgtatgtatgtatgtatgtatgtattkatttatttatttatttttgagatggagtttccctctgttgcccaggctggagcgcagtggcatgatcttggctcactacaacctccacctcccggattca

SEQ ID NO: 36481 - DNA, 201 bp, Homo sapiens
cctttttctccccctctcccatctctcctcccctgatattttcatagtattttattttatgtatgaatgtatgtatgtatgtatgtatgtatgtatgtatdtatttatttatttatttttgagatggagtttccctctgttgcccaggctggagcgcagtggcatgatcttggctcactacaacctccacctcccggattc

SEQ ID NO: 36482 - DNA, 201 bp, Homo sapiens; identical to SEQ ID NO: 5607

SEQ ID NO: 36483 - DNA, 201 bp, Homo sapiens
aatgctgacaaatgtggatggaggggaagatactgctttagcctatcactccttattttattttgtttggttttatgccctcagtgtcttagggaactttwtaagagatcctctgctaccaaacaatgatgtggattcttttgcacagaaatatttaaggtgggatggtaaaaaatgtcacaaaagactcctcaccaatac

SEQ ID NO: 36484 - DNA, 201 bp, Homo sapiens
aagtgaacaaaaatgtaagatcattgccttttggtatgaatacttgtttcatagcagtgacatagattaacatttaaactgattcattcatttattagctrtttattgagtatcaaacagcccaggagctgtactgcccatgaccaggaatgtaataaaaagcagataaaggcaaaaatacctccccttgttatgtttgca

SEQ ID NO: 36485 - DNA, 201 bp, Homo sapiens
atatatattctttttgccaaaaacaaaagtcttgcttcttgtcaaatgattgctaaagtagatcttacattttttgttattatgtatgtatttatacacayccccaacacacttagtgatttctgttatttcctagggagcacagctttaaggctatgagatacaactaaaaggagcccatctatttggttttccagccaa

SEQ ID NO: 36486 - DNA, 201 bp, Homo sapiens
aaagcagccatagtcaatacttaaatgaatgagattggctgtgttctagtaaaactgttaatctacatgaaagtaggtagcaagctgtatttgttcttccygcagtaatttatagtcccctaatttaccatgcctgacatttaaaccaagtaagtttggctacatccaagatggctcactaaccagcaataaaaattaatg

SEQ ID NO: 36487 - DNA, 201 bp, Homo sapiens
ttcccagtaggggcggccgggcagaggcgcccctcacctcccagacggggcagctggccgggcggggggctgacccccccacctccctcccagacggggcrgccggccaggcagaggggttcctcagttcccagtaggggtggccgggcagaggtgcccctcgcctcccggacagggcggctggccgggcggggggctgac

SEQ ID NO: 36488 - DNA, 201 bp, Homo sapiens
atattttacttaactatttgctgaacaataatttggataatttattaaaattctgaagctaagatttatgagccccccaaaaaagctattgtttattttayatacttttaaaatggcattgaagagcaattatcatttaacttcttaattattttagcttagtccagttcaaattacctaataaaaatgtttaaagaccat

SEQ ID NO: 36489 - DNA, 201 bp, Homo sapiens
tactctgtggaggaagatattatccagagtcttaaaattatctaaagtttgtatacacgatatgtggcatgcagtaaaaaattaccaggcatatcagcaarcacaaccaaatcattgaaaaccaagagaaaaattcaacagcaaaaacaaaatcaaaaaagggaaaataaaaaccaggcagtcagtagaaacagacccgca

SEQ ID NO: 36490 - DNA, 201 bp, Homo sapiens
gtgtattccttttccagaacagaaataatataataaacatagtaattctttgtatatttcctagttttacataaagtatgctctaaaaattttctttttgygtttcagacagcatgttttcgtgaagaaagggatgtattagtgaatggagacaataaatggattacaaccttgcactatgctttccaggatgacaataac

SEQ ID NO: 36491 - DNA, 201 bp, Homo sapiens
aggaaaatttaaaaagcatgctgtattctgaaggattgtggcagctgctgttggtctcttccattcagcttgtatttttgctaccagtggctttgcagtarggtggagagctggtggccattaaagctgaatattcatatgtccatcaagtggtgtatgcttacagtaacttcaagggaacattttctgaagttagttttg

SEQ ID NO: 36492 - DNA, 201 bp, Homo sapiens
aaatcattgaaaaccaagagaaaaattcaacagcaaaaacaaaatcaaaaaagggaaaataaaaaccaggcagtcagtagaaacagacccgcaggagttcscagtatgaaatttttatgaatggactttaatcgtgtgatttgttcaagaaagtagacatatgaaggatttcagcaaacaactggaatctatacaaaactg

SEQ ID NO: 36493 - DNA, 201 bp, Homo sapiens
tcatgaaataatgacaactaatggtaaagggaagcaaagaaatgggttagaaaatgtcaaggggtaaagtgacatttcattgaaggagtgagagagaaagytgtgtggcttcgtggggctagaatattccaggcctagggatcaacaagtgcaaaggctagttgggattgagtgtggtgatcattatagctggagcatagt

SEQ ID NO: 36494 - DNA, 201 bp, Homo sapiens
caaaaaatgccttccagaaatgaaggcaaaaattcagaatgtggaaaactgcaggacaacctacattctttttttttttttttttttttttttttgagacrgagtctcattctgtcacccaggctgcagtgcagtgacgcaatctcagctcactgcaaactccacctaccgggttcaagcaattatcctgcctcagcctcc

SEQ ID NO: 36495 - DNA, 201 bp, Homo sapiens
aaatagattccaggggattttacagttccttagaagagtctggaagatttagtgatagagatacagaaaggtaaaagtcgagggtgggaggggaactattrattttagaaaaatcatgaggttatacaagtaagatgataaccatagtgtacttcttattagtgaataatgattctctagtcataataacttagacattac

SEQ ID NO: 36496 - DNA, 201 bp, Homo sapiens
agatttaataaaaagaaattcagatatttttaaaataaagggatatcttatatacatttatttgaaattgattttcctgacaaaggccatcactgaatacygaactcgttaatgggctttttattaggtctaagtgctttcctatcatttctcagccatgcaacacagtgagataaaactggtggagtctctgcatctgca

SEQ ID NO: 36497 - DNA, 201 bp, Homo sapiens
gagataaaactggtggagtctctgcatctgcatgtaaaatgatagagaacagagagtaatcacataaagaagctaacaagaaaaagcctttacaaatagtsgatgctcaataaattcttgtggattgaatttcttaattaacaacaaaaggaaggagcccagaaaaagtgaatagtaattcagattaggagcacaagccat

SEQ ID NO: 36498 - DNA, 201 bp, Homo sapiens
tatgaaaaacaaatcaaaacgttacaacaagaaagagaagatctaaataaggtaaaatatgtgactagatcattaaagctttttctctattttgaatcttrtataataagaatactgaaagcattcataatgaattacaataatacatagtatattttatcttcttaaaagttggtctaaaaatttaggattattttggtg

SEQ ID NO: 36499 - DNA, 201 bp, Homo sapiens
tttggaggaagaaaattagatgggtgcatttgtaccgaacatgtacagatgatttttcttgtcattgttccaaatgtaaaacctacttatatagcatttayatcacattaggtattgtaagtagagatcgtgacgttttgatcagccacagactgcatatacaacaatggtcccttaagagtataacggagttggaaaaat

SEQ ID NO: 36500 - DNA, 201 bp, Homo sapiens
cagcccttcatatccatgagttctgcattcgtggattcaaccaaccatggatcaaaaatatttggaggaagaaaattagatgggtgcatttgtaccgaacrtgtacagatgatttttcttgtcattgttccaaatgtaaaacctacttatatagcatttatatcacattaggtattgtaagtagagatcgtgacgttttga

SEQ ID NO: 36501 - DNA, 201 bp, Homo sapiens
gtgagactccgtctcaaaaaaaaaaaaaaaaaaaaaaagatgcaagacaaagtcctctttactctttgctcttctgttcttaagcagaaggaaggagtcastctggttcctgtgagctgcactgcctgggttgggggatggacagctgatgcctccctaggtcatgagcaaccctagttcactggctctaagcactaggag

SEQ ID NO: 36502 - DNA, 201 bp, Homo sapiens
tgctcttctgttcttaagcagaaggaaggagtcactctggttcctgtgagctgcactgcctgggttgggggatggacagctgatgcctccctaggtcatgwgcaaccctagttcactggctctaagcactaggagttgcctaggaattggagtccttgttagaacccaacttgactgccattcaggtttacctaggacccc

SEQ ID NO: 36503 - DNA, 201 bp, Homo sapiens
aaatgatacaatatgttggaaggtaataagtgctttaaaaataagaatagaataaggagaattagtcagatgtgcaaaatgaggagttttatcattttaartatagtgctccaggggtaggcctgactgagaaggtgacatgttagcaaaaatttaaagaaggcaagggggttagccatacagttatctgcaaagtatgtg

SEQ ID NO: 36504 - DNA, 201 bp, Homo sapiens
taaaattacatacatatatattctttttgccaaaaacaaaagtcttgcttcttgtcaaatgattgctaaagtagatcttacattttttgttattatgtatrtatttatacacatccccaacacacttagtgatttctgttatttcctagggagcacagctttaaggctatgagatacaactaaaaggagcccatctatttg

SEQ ID NO: 36505 - DNA, 201 bp, Homo sapiens
ccagactcatcctgggaatgtaagaaatctaaaccatctttcaagtaacttctcacttaagagtgagacaattttggctttggtactggttttgtgagtawacgtcttttatttgttgaataaagtattttgtaaagcatatgtagttttacatcccatgtttcacaaattgagaaattctgtagtgttaatttttttttt

SEQ ID NO: 36506 - DNA, 201 bp, Homo sapiens
ccagtataagaaggtttctagcaatgtgatgtcataaggtttaaaaaaatatgtaaatgtgaatagaataacttttcaaaacagactgccagactcatcckgggaatgtaagaaatctaaaccatctttcaagtaacttctcacttaagagtgagacaattttggctttggtactggttttgtgagtatacgtcttttatt

SEQ ID NO: 36507 - DNA, 201 bp, Homo sapiens
ccgcacagaatggcagcgcattaaagagggaattctctggaggaagctacagtgccaagcggcagcccatgccctccccgtcagagggctctttgtcctcyggaggcatggaccaaggaagtgatgccccagcgagggactttgacggagaggtgagtgggcagggttccggagacgtcatgtatcagaaagactagggca

SEQ ID NO: 36508 - DNA, 201 bp, Homo sapiens
ttattcaaagttagtttctcaggtaaaccactgatacaagaatgtctacacgtaataactttaattattcaatttgccagtataagaaggtttctagcaaygtgatgtcataaggtttaaaaaaatatgtaaatgtgaatagaataacttttcaaaacagactgccagactcatcctgggaatgtaagaaatctaaaccat

SEQ ID NO: 36509 - DNA, 201 bp, Homo sapiens
aggcaaagacacctcatctattgggagaatgacaggcacatgatgataacatgacttcataaatgccatgaaagagatgtgtgaaagatggctgggagccrtcagtggctgggaaagatgtgcaaggcagcaccaggcaggtggagacttgagggattctggggagttgttaacaagcagggcattggggcagatggcaca

SEQ ID NO: 36510 - DNA, 201 bp, Homo sapiens
aggaagctacgtgaacagagtgagcactattctaagcaactggaaaatgaattggagggactgaaggtatcttttgacttcacatttatgaagcttaattrattttcttctctttaggcttgttaggagtgttagcttgtatactgtattcggtgtgcagtgaaaactagcctttcttcaaacctactattcataattctc

SEQ ID NO: 36511 - DNA, 201 bp, Homo sapiens
aagttacagtaatcaaaacaatgtggtactgtcataaggatagacatacagaccaataaaatataattaagaatacagaaataaatgcatgtatctatggycaattaatttttgacaaatgtactaagtccattcaatggggaaagaatagtttctacagatgttttgggacaactgaatattaacctacaaaagaatgaa

SEQ ID NO: 36512 - DNA, 201 bp, Homo sapiens
tgcctgtgaagatgcttgaagaattacaaattactcagctgttaaatagaagcatctcagtggtatagtgtagaacctcagtgttccctgggacatcagtstatttcagtaggacacatgcagttaccattcttaacaatggcctctgttgtaacagtagcataagattttatgttatataccatgtttttagacaagaaa

SEQ ID NO: 36513 - DNA, 201 bp, Homo sapiens
gcatattagagtagcatttctcttcctccccaccaacccccagtaactggaaacatcctcgttcaacctttgttttcctcttttgtgggctagcctgtggsctatggcaagtccaatggcctggaagtggtcttacagattatctggttaaactgaagcagagagatagaaatgtaatcaatttgttgagagtgagaaagg

SEQ ID NO: 36514 - DNA, 201 bp, Homo sapiens
atagccagatttttacatttgtatgagtttgtataaaccatcaagcagatcaagatatagtacatttctagcattctgataggctcccattgccccccccsaccatgtgaataatcacttccttgttaactattctgacttctatcaccatagattttttttgcttgtttttgagttttatgttaatggaattatgtaata

SEQ ID NO: 36515 - DNA, 201 bp, Homo sapiens
ttttttttggatttgaaatttattcaaagttagtttctcaggtaaaccactgatacaagaatgtctacacgtaataactttaattattcaatttgccagtrtaagaaggtttctagcaatgtgatgtcataaggtttaaaaaaatatgtaaatgtgaatagaataacttttcaaaacagactgccagactcatcctgggaa

SEQ ID NO: 36516 - DNA, 201 bp, Homo sapiens
ccatgaaagagatgtgtgaaagatggctgggagccatcagtggctgggaaagatgtgcaaggcagcaccaggcaggtggagacttgagggattctggggarttgttaacaagcagggcattggggcagatggcacagcctagagagtgctcgctcaccgggagtccccgtggctggggtggacaggaacagcgagtgagat

SEQ ID NO: 36517 - DNA, 201 bp, Homo sapiens
aatgttaaagatgtcacttgaatacatagaaaaatgcaatatgaagatcttaatattatgaaaatatgtccatctttatgctttttaacaaaatggtgggkttttttccctgtgttaattgaaatactattttggcagtcatatctttttttcaattatctgtaaactcagatttgtgcatctatgcactatgcatctgta

SEQ ID NO: 36518 - DNA, 201 bp, Homo sapiens
ttggaatactaatcattttagtttgttcttatgctaagttcttatgctaaaatatctgttcccaagtaaaactttattttcctgaagtaaaagtcaagtgstgattgtgtctttttttttttttttttttggatttgaaatttattcaaagttagtttctcaggtaaaccactgatacaagaatgtctacacgtaataact

SEQ ID NO: 36519 - DNA, 201 bp, Homo sapiens
tcctctcacctcacttcccaaagcatgggactgcagatatgagccactactcctggcctattatttttatttttaaaaaataatttttttagttaaacagwttagcatagattagaactcaaagtttaatatgttctgttgactaaagtctttggagctttttttagttttgagttattagtcaaattaaataacgaatgt

SEQ ID NO: 36520 - DNA, 201 bp, Homo sapiens
ccatattttgattgtgttattacataagaaaatactgaactaaactctgaaagtcttgtatctctgaaagtccaatttctccttacttattttaattaaaraataattttataaaaaagaatgatcttttgcaaatcaactatttaagtaactggcaagagtattacaaaatttaactttctaagacctaaaagtatttca

SEQ ID NO: 36521 - DNA, 201 bp, Homo sapiens
attgagtggcatggcctctctcgggatggtacaaccgagcttcctcatttagcgcatctgttttgagcctgccgtgtgccatgttctgtgctaggccctgragaggcaaagacacctcatctattgggagaatgacaggcacatgatgataacatgacttcataaatgccatgaaagagatgtgtgaaagatggctgggag

SEQ ID NO: 36522 - DNA, 201 bp, Homo sapiens
tatttattcagcaaatatctttcagcacctaactattttaggtgctggagagtttagtgttgttgtaataacagtcagtataagaaattataagatgactraagaactgaggctagggaaccatatgcctgcttataaccaggacaaactgaactgtcagcccaaaagctgaggaccctgaggtggtgagtgtggaggagg

SEQ ID NO: 36523 - DNA, 201 bp, Homo sapiens
tcaatcctgatgctagcagacactgagaatgagaagaataagtgggtgggagtgctgagtgaattgcacaagattttgaagaaaaacaaattcagagaccrctcagtctatgttcccaaagaggcttatgacagcactctacccctcattaaaacaacccaggcagccgcaatcataggtatgaatttataacatttatca

SEQ ID NO: 36524 - DNA, 201 bp, Homo sapiens
agaccaataaaatataattaagaatacagaaataaatgcatgtatctatggccaattaatttttgacaaatgtactaagtccattcaatggggaaagaatrgtttctacagatgttttgggacaactgaatattaacctacaaaagaatgaaattggtcacctgcatcacaccagttatacaaattaactcaaattggatc

SEQ ID NO: 36525 - DNA, 201 bp, Homo sapiens
atccagctgcgagagatgaggtgtgggcctcaggtggtgatagtgaagatggagagaagtggatggattccatctactaagaagatagaacctggagaacrtaataagcagctgtgagaaatgagggagcaggagaaattatcagttatactcagctttctagatttcaggcaactgaatatatgttattgtcattctcag

SEQ ID NO: 36526 - DNA, 201 bp, Homo sapiens
tgaacccgggtgtcggagattgcactgagccgagaccacgccactgcactccagcctggtaacagagcaagactctgtctcaaaaaaaaaaaaaaaaaaaraaagaaagaaaaaagaaatagaaatcagttagcaggattggacaggaagagataaatctttaagtattaatagaccacctacacataaaaatgtatagat

SEQ ID NO: 36527 - DNA, 201 bp, Homo sapiens
gaaacaacgtttcaagtttttccttattctttattacagccctctttatgagcccattgggagaacaatttaattgtttgaaattgagatacttccttttytttctcatccattttaattgatgaaaaactataatcacagtcattataaccacttataacaattaccaagaaatatttagtatgtatacacttactgtaa

SEQ ID NO: 36528 - DNA, 201 bp, Homo sapiens
gctgcagtgtctcagaccctgctgggtaatgcctaataggcacaaatgcagttgttaagaaaatagtcccagagtccttctagagtgtacaggccatctgrgagacagacaaatatgattacaaattgtgatgataaaggctctgaaggaagtaaacagcatacattaatagagaataacaaggggtagctgttagggatg

SEQ ID NO: 36529 - DNA, 201 bp, Homo sapiens
acaggaaggtgcctctgagacagggtgacccccagctccctcccctcctgtcccgtgggtgacatgtccttcacttacgtgtgcccattgcattctcaagkggctgcagtgtctcagaccctgctgggtaatgcctaataggcacaaatgcagttgttaagaaaatagtcccagagtccttctagagtgtacaggccatct

SEQ ID NO: 36530 - DNA, 201 bp, Homo sapiens
aaacactgttttacagaaaggatcatattttgaaattacattgccaactgaattaatctcaatactcaaattagaaaattaggattgcagatataatctaytcattttccatttatttattcagcaaatatctttcagcacctaactattttaggtgctggagagtttagtgttgttgtaataacagtcagtataagaaat

SEQ ID NO: 36531 - DNA, 201 bp, Homo sapiens
taactaaacactgttttacagaaaggatcatattttgaaattacattgccaactgaattaatctcaatactcaaattagaaaattaggattgcagatatartctattcattttccatttatttattcagcaaatatctttcagcacctaactattttaggtgctggagagtttagtgttgttgtaataacagtcagtataa

SEQ ID NO: 36532 - DNA, 201 bp, Homo sapiens
tcttttaacctcaaaagccttaagtatttgtgctgatttcattgtattctgtgttaaattatttaatctataccatattatagcaaagaagatagtcatcktttaagtgtttgcataaaatgttattttgtatctttaaaacacacacaggcctgtaacttcaaatcaatattaactaaacactgttttacagaaaggatc

SEQ ID NO: 36533 - DNA, 201 bp, Homo sapiens
aaagatgtttttaaaaataagattttctcaaattatgtattgaatttttactttctacggcaggagaaacaaagcagtgacctgttgcttcctagtccatscccttatgactaagaatttcctatgttttgggttttttttaaatgttttgaattctttaatttgttcttggtatttttacatgtgtagtatcgtttgcac

SEQ ID NO: 36534 - DNA, 201 bp, Homo sapiens
gtgtctgccacctttgctttgtcatgtattctagtgctaaaggtagttattctgattaggaatagctgaactccagtaatggtatcatttaatgaatgctyattttattggtgagtgctaagcaaactaacataatcatgaaactagcataaagggtgtctgttttctaatatcatgaatattgattaaattgttctaggt

SEQ ID NO: 36535 - DNA, 201 bp, Homo sapiens
aaagatggcaacaaaagactctggggactactagagaaggggaaggagggaggggtgccagggctaaaaaattgggtactgtgctcagtacctgggtaatrtggatcggtcatgccctaaacttcagcatcatataatatactcaggtaacaaacctgcacgtgtacccacaaatctaaaataagagttgaaattattttt

SEQ ID NO: 36536 - DNA, 201 bp, Homo sapiens
attacccagaactgatccacatggaatttcatttattgctaacatcctatagcatccatcaaattgctgtagatatatgcctgtttgtcacataacaatayagtcttcaaaaacttattccttgctgggcacggtggcccatgcctgtaatctgagcactttgggaggctgaggcgggcggatcacctgaggtcaggagtt

SEQ ID NO: 36537 - DNA, 201 bp, Homo sapiens
agtatttcagggcttatacatatactcagaagtggagtttttgggcaaaaggaatgtacatttaaaatatttagttactgcaatataatatttcttccacytcaaaggataccagtttaaacttctaacattgggatatgagagtccttgtttcctaggaacagagtattatcagtcttttttgcctatcccatggtcagt

SEQ ID NO: 36538 - DNA, 201 bp, Homo sapiens
ggacttggtagtaagtatgtaaagtgctttctgttttccccttaaaaagaaccagagcggccgggtgtggtggctcacgcctgtaatcccagctctttggraggccgaggtgggcggatcacgaggtcaggagatcgagaccatcctggctaacacagtgaaaccccatctctactaaaaatacaaaaaattagctgggcc

SEQ ID NO: 36539 - DNA, 201 bp, Homo sapiens
gactttttatgtattgaagattatgcagcacccgtaaatgtatttgtgacctgacagtacgacacaaacgtgtggtgtggtatgtagaaacttaatgtacrctagtgtttcctaaattatatttctagagatataaatgaatattctgaaaattaagagttcagtggctgtgtaagattggaaaatagtgctttttgtatg

SEQ ID NO: 36540 - DNA, 201 bp, Homo sapiens
catgaaaaattattgatgtgttgttcatttaggactttttatgtattgaagattatgcagcacccgtaaatgtatttgtgacctgacagtacgacacaaaygtgtggtgtggtatgtagaaacttaatgtacactagtgtttcctaaattatatttctagagatataaatgaatattctgaaaattaagagttcagtggct

SEQ ID NO: 36541 - DNA, 201 bp, Homo sapiens
gaaccattttatatatgattatttttctaaggtttgcattcacatgcaaaaacaaatacaaaagctggtatatgatatagtttagatttgggtatcttacmcaccattgacttaacatccaaagacaatgaaagctttaaataatatagacaatctattaggcagttgttttagttcttctgtaaaatcaactttatgaag

SEQ ID NO: 36542 - DNA, 201 bp, Homo sapiens
gcctcctgggttcaagcgattctcctgcctcagcctcctgagtagctgggattacaggcacgcaccaccatgcccagctaatttttttgtatttttagtaragacggggtttcaccatgttggccaggatgatctccatctcctgacctcgtgtcccacccaccttggcctctcaaagtgctgggattacaggcgtgagcc

SEQ ID NO: 36543 - DNA, 201 bp, Homo sapiens
cagctactcgggaggctgagacaggagaattgcttgaacttgggaggcagaggttggcagtgagctgagatggcaccactgtactccagcccaggcgacaragtgagactccgtctcaaaaaaaaaaaaaaaaaaaaaaagatgcaagacaaagtcctctttactctttgctcttctgttcttaagcagaaggaaggagtc

SEQ ID NO: 36544 - DNA, 201 bp, Homo sapiens
aaacattagtttactaatttaagtggggattgtagaatctgctttagattggtgtaaggattaaatgaggggtaatatatgtaatatgcttagcccagtgstaggcacagaataagctttttataaataagagttattttttgttattattattaatcataaatgatagtagatgatatgtaggggaaattaaaaggtgaa

SEQ ID NO: 36545 - DNA, 201 bp, Homo sapiens
aagtaacagagaatatatttctgagcacttctgaccttaaaacaagtcacaagtcagtatggtgtggcgcttaagagcatgggcacaagatcccagacttrtagttgtgtgtccttggagaaatgatttaatttctttgcatcaccatttttttcatatataaaataaggatataatgacagtacatcctaaatcatgacg

SEQ ID NO: 36546 - DNA, 201 bp, Homo sapiens
gtgtgagtttattgtcactgctacttaataaggaattctttacttatgataaggaattcatataggtaaaatttaaaactgctctgatagtgttgtttgtrtaatgataaaccttcatttaaatattaatttaaatggtcaaatcttaatgataatgcgagttattgttgtgaagtaacagagaatatatttctgagcact

SEQ ID NO: 36547 - DNA, 201 bp, Homo sapiens
agatagagacacgaaaaacccttcaaaaaatcagtgattccaggagctggttttttgaaaagattaacaaaataggccgctagccagactaataagaaaaragagaagaatcaaatagacataataaaaaaatgataaaggggagatcaccactgatcccacagaaatagaaactaccatcaaagaatactataaacacct

SEQ ID NO: 36548 - DNA, 201 bp, Homo sapiens
ataattctgaacaaaattacttctagctgggtatgatggcacacgcacacacacacacacacacacacacacacacacacactagctgggtatgatggcasacacacacacacacctataatctgagctacttaagaggctgaggaaggaggcttacttgagcccaggagttcaagcccagcccaggcaacatagtaaaac

SEQ ID NO: 36549 - DNA, 201 bp, Homo sapiens
acaggcagtgttgagttttgagagagctgttttcttgagatggtggaggcagaagccagattttggtgtggtggagagcaactaagcgatgaaaaagtagytacagaatctgtttcaggatgcttaccagtgagtgggaagacaaggatttaggaaatgaattgtgacacagggtatggggagagtttctttatttttaat

SEQ ID NO: 36550 - DNA, 201 bp, Homo sapiens
ggtacttaagattagggagtggtgatgactctcaacgagcatgctgccttcaagcatctgtttaacaaagcacatcttgcaccgcccttaatccatttaascctgagtggacacagcacatgtttcagagagcacagggttgggggtaaggtcacagatcaataggatcccaaggcagaagaatttttcttagtacagaac

SEQ ID NO: 36551 - DNA, 201 bp, Homo sapiens
gaataaattttcttaaagggaaacaaggtgcattatgtataactagtaagcttacccttactggtcacaacctttagtcatttgttaggatttgttctagmgcaataaaatgtatttactgttttccaaatgatatagtacttctgtaatactgtttttgtatcataagttcaattaacagaaataaatatatcactaaaa

SEQ ID NO: 36552 - DNA, 201 bp, Homo sapiens
tcatttcaaggagaataaaatataaaaaattaaatcattactttttaggaaatgcaaattcttatatttttagttataaaatatcaaaatatcctatttartactcatcaaaccataccatcatgacatttgatgtgtcaagacaaagcattaatagaagatagtttatggattattcattagttatttaaaacaatctag

SEQ ID NO: 36553 - DNA, 201 bp, Homo sapiens
gtgcagcacaccaacatggcacatgtatacatgtgtaacaaacctgcacattgtgcacatgtaccctaaaacttaaagtataataataataaaataaaatwataaaaaagataagtagtccccatgcatatagatgcaaatatccttaacaaaatattagcaaatacaatttagcaatatgttaaaagaattatataccat

SEQ ID NO: 36554 - DNA, 201 bp, Homo sapiens
ggtcttgaactcttagactcaagcaatccgtctgctttggcctcccaaagtattgggatacaggcgtgaaccaccacacccggccccatttttagttctartaggtctgtatgtatctcccaccttgtcaaacttgtgtgtaattttttttaaaaaaggtttcacccaccttgtcaaacttgcgtgtgatttttaaaaaag

SEQ ID NO: 36555 - DNA, 201 bp, Homo sapiens
ttgctttgcattcttttatatgttatttggagtttaaacatacatttctcaccaaaaatgtaattcatatgtaagaaataaaagaaaatatattgttttcytagggaaattaaatctgtttattctcatatagtttgggatttttaaatattttgacaattcttaaatcataatttgaatttttgtgtaactaagaaacac

SEQ ID NO: 36556 - DNA, 201 bp, Homo sapiens
cagctcatttgggaccagaacatctaatgaccttgctcttacatctgggtgctggctgttagctgggtgatctcagttctcctctttgtgaactccctccwtgtggtctctggtcgtcaggtaggctggctgagctcccagtggctggcttctaagagagcaaaataagctgccaggccctttgaggactaggcccaaaac

SEQ ID NO: 36557 - DNA, 201 bp, Homo sapiens
catccattgctcaaaaccggaatttctagctgtgactcaaattggcacttcacattggcatctcaaacgcattatcttcccctacaaatatggaacatgayaggatagatgcaagaaatattggcaagaaaaatctgatagaacctactaagggactgaatatagatagggaaaagaatcacaaataggactaaggtgtca

SEQ ID NO: 36558 - DNA, 201 bp, Homo sapiens
tcccagacttgtatctccagttcagatatatccatccattgctcaaaaccggaatttctagctgtgactcaaattggcacttcacattggcatctcaaacrcattatcttcccctacaaatatggaacatgacaggatagatgcaagaaatattggcaagaaaaatctgatagaacctactaagggactgaatatagatag

SEQ ID NO: 36559 - DNA, 201 bp, Homo sapiens
taaacatttaagtaagtacagcccttgaacacttctggtctcatttttcagattcttcctgtgttccttagttctctctcctttaccttttctcctaactycaggcactatccttgagtgatcatatttactcacagcttcagccatctcctctgcattgatgactcccagacttgtatctccagttcagatatatccatc

SEQ ID NO: 36560 - DNA, 201 bp, Homo sapiens
gctatagaaacagaattgaaaataggaagtaaggtgtatttataggacaggttggtatgtgtgttgagtgtgaggggctaggagttaaggaaaaagaagtyggtgtcccaaagacctgtgtaaatggggtaatggaggcctaccatgtgaagtttatattatcacatcacctaaaggcttagagtataatttcaatgtgag

SEQ ID NO: 36561 - DNA, 201 bp, Homo sapiens
gacatgaggtaagagtttgaaggtaaaattatttgtatcattgcaacataggaattttaaagtttctgattttcaaaaattgtgttgccatggtttatttraatgaactaatttcgtattttctaatttgctaatattgctatagaaacagaattgaaaataggaagtaaggtgtatttataggacaggttggtatgtgtg

SEQ ID NO: 36562 - DNA, 201 bp, Homo sapiens
aagcaaatgaatcagctacccaaatgataaaacagttatttaaaataaaattggagataagcattcatctaacatagcatcttgtatgcagtgagtgttaygaattttctttttgttaaaatgaatttttatcaaacgtttcttttttccctctaaaagtgtgtggattctcatgccatataacttgtgtaaacaaagctc

SEQ ID NO: 36563 - DNA, 201 bp, Homo sapiens
agaaatttcaaggcagataccaagttgcagtgggatgaagagcaaaaaactctagaaaccactcttttagaaaatctaaatcaatcattttattcacaagrttagatgcttcgtctgttgcttctttttttgatcactaatgtcaatacagaacagcagtaatacaagtaattttttaaatatttactatgtctcattaaa

SEQ ID NO: 36564 - DNA, 201 bp, Homo sapiens
gagactccgtctcaaaaaaaaaaaaaaaaaaaaaaaagtgaattgaagttgtgtgtgatgactcatgcctatagtcccaactactcaggaggctaagacargaggatcattttgaggccagcctgggcaacatagcaagaccttctctttaataaataaataaagtgcattgagatgtttggatgatttttgtcatcttgc

SEQ ID NO: 36565 - DNA, 201 bp, Homo sapiens
gtaataagctgagatcacaccactgcactccagcctgggtgacagagtgaaaccctgtctcaaaaaaaacatatatccagccattaagctgggttttcttmttggtatcatgattcagtttaataaacaagttttgtgatatgttgaagtaactggaaacttgaactattactatttatgtgatattaggaaatttgtgaa

SEQ ID NO: 36566 - DNA, 201 bp, Homo sapiens
gcacctatagtcccagttactcaggaggatgagatgggaggatcgcttgagcttgggacctggtcaaggctgcagtgaccgtgatggtgccattgcattcyagcctgggtggcagcaagatcctgactccagaaaaataaataaataaaaataaataaaaataaaaaaaaactataatgaagaaactttattttatttcag

SEQ ID NO: 36567 - DNA, 201 bp, Homo sapiens
taattttttgttgaaagacagatatgatgttgttaaccttaaataacaagattagaaaataagtatagactttgagcccaaagcttgaggatggccaccaragagcatagattctatttgccttgaatatacattctgattagcagtgttacaagtgggtttttaaggaaaaaagaaaaggcagttcctaagttgttacca

SEQ ID NO: 36568 - DNA, 201 bp, Homo sapiens
gaaagccctgctttttaggttcactgatttcatgatataaccttccattagtccatatactgacaaaatggcttaaggcagtattttctaattttaatgcragaaagtagaagacagtatgcccaacttctgtcagcatgtgtttaaacagctcaaagagcagacctgctgtaaaatttcaaccagtgctattgcaaacag

SEQ ID NO: 36569 - DNA, 201 bp, Homo sapiens
tttttaaatattttgacaattcttaaatcataatttgaatttttgtgtaactaagaaacaccattatttatatctaatttgcatcacattttattaagaawataattgatattgctctttcatttcagctaaaccatttacttctaaagtgaaacaaatgcgattacatagagaagactttgaaatattaaaggtgattgg

SEQ ID NO: 36570 - DNA, 201 bp, Homo sapiens
aagtcccctacttagataccttaaaacttcttgagatgacatttcagtcagttttaagttcttactggtataaaatgtatcaattctgctttgcttctcasttccattttaactaaagcccctctccatggacacctaattcttgcaatgtgtataatcttatgaaaactaggaggaggagatttttagaaactaaaagac

SEQ ID NO: 36571 - DNA, 201 bp, Homo sapiens
aatgtggggataatatacaatttaacatatatacaaggattattattatttttcagataatgacaaagatgtgtttatgagataataatgtctattgtgtrtcttaagtaactatttaaaatattttatttctaatataggagattaataaaaatgtaaatttcttcaggttcagtcctcagtggctgtaggaactccaga

SEQ ID NO: 36572 - DNA, 201 bp, Homo sapiens
agaaggaatacatgcaaatgaaataaaaaatcttaagaaagaactgcatgattcagaaggtcagcaacttgctctcaacaaagaaattatgattttaaaaracaaattggaaaaaaccagaagagaaaggtaagaatcacattatttactatacagtaaatacttattgagtacctgttatgtgtcaagtattggagatac

SEQ ID NO: 36573 - DNA, 201 bp, Homo sapiens
tgcagacaattggcattttaacaatactactgagtcacctaatccatagacgtggtatattcttccatttatttagggctttataaatttatctcaatacygttttgtagtgttcattcagtatagaagacctccacatctttcagcagatttattcctggatatgtgatagtcttgatattattttaattagaattgttt

SEQ ID NO: 36574 - DNA, 201 bp, Homo sapiens
gtacaaatgggttacgttcctggatcttactgatcttattaatcatgtttgtttttccattaaatactaagcaataacaacttccttattacatgtacctytaacttgaaaatactgtgaattctacacatccaagacctttgtagaaggaagcaaaaaaaaaaaaaaaaccacttagaacatgatcctttgatcatgtca

SEQ ID NO: 36575 - DNA, 201 bp, Homo sapiens
ttgtcagatgagtagtttgcaaatatttcctcccattctgtgggttgtctcttcactgtggtttgattctgtctcttcactgtgggttgattgtttccttkgctgtgcagaagctttttaatttcgtgtcatcttatttgtccatttttgctttggttggctgtgttttaagaaatttttgtgcagaccagtgtcctggag

SEQ ID NO: 36576 - DNA, 201 bp, Homo sapiens
tttgtctcttttgcctatgtacctctggtaatcccagttaagtgtagtagctcatgagttctggttttattcaacctctgtgtgcatctggctcagttgayttctctgtattaaacatgtacaaatgggttacgttcctggatcttactgatcttattaatcatgtttgtttttccattaaatactaagcaataacaactt

SEQ ID NO: 36577 - DNA, 201 bp, Homo sapiens
ggtggcgggcgcctgtagtcccagctgcttgggaggctgaggcaggagaatggcgtgaaccccggggggcggagcctgcagtgagccgagattgcaccacygcactccagcctgggcgacagagcgagactccgtctcaaaaaaaaaaaaaaaaaaaaaaaagtgaattgaagttgtgtgtgatgactcatgcctatagtc

SEQ ID NO: 36578 - DNA, 201 bp, Homo sapiens
ttacttagagtggctaatgcaatgccccaagttgactcagatactattaaaagcactcaagcatctacttagaagtggtatgccctgagatttaaaaaatrcttgtttgaaaagattaggaaaagcccccgcaatgaaacagtgactaaagcccctttttgagattgtattgctagctacctgtgatctggccctgagcta

SEQ ID NO: 36579 - DNA, 201 bp, Homo sapiens
aacttgctagatactccacttaaaactgaattgaaggccgggcgcggtggctcaacgcctgtaatctcagcactttgggaggcccaggcgggcggatcacraggtcaggagatcgagaccatcctggctaacacggtgaaaccccgtctctactaaaaatacagaaaattagccgggcaaggtggcgggcgcctgtagtcc

SEQ ID NO: 36580 - DNA, 201 bp, Homo sapiens
agaatggggtaagtttgtaatttttaaagaaactgttaatctttagctggtcattatgatttaattggtatagagagttatgagtaaactctactccgttsaaagaaaaaatacaataaaaaaacagacactagttattcaagattttccgctagtttttggtaaatattttcccaggagtagaattgtgctgctcaattg

SEQ ID NO: 36581 - DNA, 201 bp, Homo sapiens
tctgtgatttagatgtcatctaaaatcgacgttgccccattttatagatgaggaaacccagcttcagagacattagttagtaagtagcatagcctagattraaatctaagtcaggcttgtctccagatttatgttctttgcacaacatcatgttttccatagaagactttaatggcggggctttgaaggatgagaagactc

SEQ ID NO: 36582 - DNA, 201 bp, Homo sapiens
tataggatacttattttgttgcttccactgccctttgcttgtaagtaaaacaaatcataacttgctagatactccacttaaaactgaattgaaggccgggygcggtggctcaacgcctgtaatctcagcactttgggaggcccaggcgggcggatcacgaggtcaggagatcgagaccatcctggctaacacggtgaaacc

SEQ ID NO: 36583 - DNA, 201 bp, Homo sapiens
ttatattaagctgaatttcttctcttctcttttttttgagacagagttttgctcttgttgcccaagctggagtgccgtggtgcgatcttggctcactgcarcctccgcctcctgggttcaagcgattcttctgcctcagcctcctgagtagctgggattacagtcatgcgccatgaagcctggctaattttttgtgctttt

SEQ ID NO: 36584 - DNA, 201 bp, Homo sapiens
gttattttggtccctggtttcttagtttttctgtgtaagcagtcctgctgtctgataataggattttcagaatagggacgcatcctttttactttgtagaytttctatttctttgtcttgacttactgcactagctcggacctctaatacagtgttgaaatggtgtcacaagggtggacatccttaccttattcctgaact

SEQ ID NO: 36585 - DNA, 201 bp, Homo sapiens
tttttttaaatgtttcagaagaatacttttttaaaaaatcaaatgaaatttgtcattacaacactaccttatatgaggggacttcaaaaagcttgtggaaragtagaatttaaaaataaaaataaacaatataaactttttttttagcataagctccattaagttcaagacaactttgtaagcaattataccacccattta

SEQ ID NO: 36586 - DNA, 201 bp, Homo sapiens
aagtgtatacagtggagaaactcttgcacatttgtacaaatatgtttattccaacattgtataataataatacaaaactggaaataacctgtgtttccacsgttgggggttgcataaataaattatagtgcattcaaacaatggtatgccatagcagttaaaagaagaacagtcattcttgagaaaaaaaaaaaatcaaat

SEQ ID NO: 36587 - DNA, 201 bp, Homo sapiens
ttgtgagagaatttaacaagtattgttacttgttacttgttaaacaatatttgttaagttgtgattgatgtgattgattgtgctgttgtgattgatataayagctcagaaaataaagtgttgaatgaaatatttctactgggaattttttctaagatcatgttttcacatgtacttcatatgtcaatgtaaatatgagtgt

SEQ ID NO: 36588 - DNA, 201 bp, Homo sapiens
aattgttattaaaaagtagacagtgtgggaaccttttcagaaatattaaatgtctgccactatgtctgaaagatattttattcctgtattaatagcagagrtttttttttttcccctaacatccatgatttattcatcacatgtttatggaacacccactgtacttctaggcactggggacataatagtggataggggaaa

SEQ ID NO: 36589 - DNA, 201 bp, Homo sapiens
catgtgaaggtaagaacacaaaggaaagaaaatgtgacttcactatctaaattgtaatcaaataagttgattctctttcaaaggtgtataaatgtttgttktacttaatcatttgcttttttgcataacaggaatggaaataatctgtgttgtctgttgaatgttcgagaaactagacatatttttcaggggcaatatatt

SEQ ID NO: 36590 - DNA, 201 bp, Homo sapiens
gattgctaaatgagttatacaagcaaattacagtgagctcaagaaatgagtaataagtttatttctaatgatcagttctaatccttatttaactctttgtrctattcactgtattctaacacaaattctgtgatttagatgtcatctaaaatcgacgttgccccattttatagatgaggaaacccagcttcagagacatta

SEQ ID NO: 36591 - DNA, 201 bp, Homo sapiens
gaagtggtaggtggttcattgtggctttgatctacttccttaataattactgataacgagcagcttttcatgtgcttattggcaatttgtatatcttcttyggagaaatgtctgattaaccctttgcccactttaaaagatagactatttttagaaaagttttaggttcacagtgaaattgagcagaaggtatagaaattt

SEQ ID NO: 36592 - DNA, 201 bp, Homo sapiens
ttggtccctggtttcttagtttttctgtgtaagcagtcctgctgtctgataataggattttcagaatagggacgcatcctttttactttgtagactttctrtttctttgtcttgacttactgcactagctcggacctctaatacagtgttgaaatggtgtcacaagggtggacatccttaccttattcctgaactgaggga

SEQ ID NO: 36593 - DNA, 201 bp, Homo sapiens
tgtagattagtggttaccaggcatgggatgtggtggtgggtcggggaggggatggggaattattgcttaatgtttacagagttctgtgtggggtgatgaarttgtagaaatagtgatcctaatgtttgtacaacattatgaatgtaactaaagctactgatgtacacttaacaatagttaaaatggcatattttatgttat

SEQ ID NO: 36594 - DNA, 201 bp, Homo sapiens
ctagagagctcttgctattcctcctctcttgagcccccctcccccaagtttgaatgaagtatctatgcttgttttactgcctattgagaacatccttatgragtaattaagagccttctttactcagttgatagatgttggtcagcagaggcattgaggcacccccactcccgcccctagtgagcactaatgggaattgga

SEQ ID NO: 36595 - DNA, 201 bp, Homo sapiens
cactgcagcctgggtgcagagcgagactccgtttcaaaaaaaaaaaaaaaaaattgattctcaaggtaatgagatatcagcaaggtttgtcttgtatagtrggcataaaagaaaagttctaaattgcctctgcaatgacttgtagtcagtggaagagtatcattttccctgatcatgaccactatgctgtaaattgatata

SEQ ID NO: 36596 - DNA, 201 bp, Homo sapiens
ttttttgggcagacccattttcttaacaaactgtactctctgaggcagcttggatctatccaggaaagtttccactagttaatttgcatagctcatgttgrcattatggagactcaacagtttatctgcagggtgtgaaattggggtattagtcagcaccgtaaggcagaaaaggtggccagacccactctttgggctctg

SEQ ID NO: 36597 - DNA, 201 bp, Homo sapiens
gaggatgtggggaaaagcagagctttcatattctgggtggagatagtaattggtatagcactcaggaaagacaattggctaaatggtggagttgaaatttkcatttagcatttctacttctaagtgtatacagtggagaaactcttgcacatttgtacaaatatgtttattccaacattgtataataataatacaaaactg

SEQ ID NO: 36598 - DNA, 201 bp, Homo sapiens
taataataataaaataaaataataaaaaagataagtagtccccatgcatatagatgcaaatatccttaacaaaatattagcaaatacaatttagcaatatkttaaaagaattatataccatgcccaagtgtgatttattgttgggatgcaagactgattccatatttgaaaggtactctcctcaaactatttgagaaaact

SEQ ID NO: 36599 - DNA, 201 bp, Homo sapiens
gaagcgctctccatcctgtactccagctagcaaaggcagacgtgtaagagacttttgcactttatgtacccatcctgaggccttttacccctctctcatcsttttgcctgtgattgcggaacctgttaatgtttttgtggtatattattacatctattgcatgctttgtgctgctgctcctgctgttgctgtgctgctttt

SEQ ID NO: 36600 - DNA, 201 bp, Homo sapiens
aattgtccaataatttcacagatttatcatttacaaactttgctagtttatcaccaataactctacaagttcatcatttacagactttgctagtttatcarcagcctcctaaattaacaaatgaactactgctctcaatctgttctgtaaattttacttctgtcttcacatttgttcagtgagtactgacttcgctcatta

SEQ ID NO: 36601 - DNA, 201 bp, Homo sapiens
ttttgcatatatgcttaggagtgatatttctgggtcatatagtaattctatgtttaactttttgaggaactgccaaactgtttttcaaagcagtggtaccrtcatacattcccaccagcaatgtatgaaggttgagttttgctacatgcttgctaacatttggtactttctgttttttgattagtcattttagtaggtatg

SEQ ID NO: 36602 - DNA, 201 bp, Homo sapiens
agttgatttttttttaatatggaccttgtatcctgtaactattgtaaatccacttagttttaggacacagtttttgtatatggtcccgtgttagatttccrccttctatcttgtctaacctttatttcctgtctttaccagttttatggtcaccagagggaaaattcaaagtctccaaagtttggcagaaagcatcagagt

SEQ ID NO: 36603 - DNA, 201 bp, Homo sapiens
gaagttgaagtttttgttttttcatatgaatgttagtctcaacttgtctgcttaaaaaagtgttattttcattgggataatttgaaatttacagatgaaargagaattgaagtccagtcctctttggattacaatgtgatttataagttcagagaagagagatggccagttttataaactttttacttgtttcttacgttc

SEQ ID NO: 36604 - DNA, 201 bp, Homo sapiens
gtgttctgtagttttcactgtagacatcttttacttctttggctgatttaaatcctaggtatttaattttatttgtggctattgtaaatgggattactttyttcatttctttttcagattgttcactgttggcatagagaaatgctactgatttttgtatgttgattttgtatcctgcaactttactgaatttgttcatca

SEQ ID NO: 36605 - DNA, 201 bp, Homo sapiens
gtaaggaggtgaggttcaaacctcttctctttgcttctgggttttaactagtatactagagctagatcaggttcaaaattaccggattttctgttaaaagrgatcaagacttaaacctggagccaaactggagatttccaattattttctcctaaatgcaaagttgggttctgacttggaatctcggagtagactccaagt

SEQ ID NO: 36606 - DNA, 201 bp, Homo sapiens
aaagtcaggagatgaatgagtttatgaaaatgggaataaagatataaaatacttttattgttctaatggggagatgagaacacctatacaacttcttcctrgtatttatacttaacaactattaaattccttatttatgtgtttaatgtttgtgttcaccaataaagtgcaatctctgtgaggccagggagtgaatttctc

SEQ ID NO: 36607 - DNA, 201 bp, Homo sapiens
tttatacttaacaactattaaattccttatttatgtgtttaatgtttgtgttcaccaataaagtgcaatctctgtgaggccagggagtgaatttctcttayttgttttattccctacttagaacagtgcttttaaatgtaattttttaaatcaagggctaaaaacaggaaaatggagttctttttttctttcatgcttccc

SEQ ID NO: 36608 - DNA, 201 bp, Homo sapiens
ctttggacccttcagcaccatttcttgctactccctgttgtgctctttatgttcctaggaaaggaagctgcttattgtcctgtgtatcttctcccccacamatatttcctgcctgtgtgccttgcttatgctgtccctacttcccaaactatcccatcctcagtcacatccatttcagtccccttttttctggagttcact

SEQ ID NO: 36609 - DNA, 201 bp, Homo sapiens
agaagcacatagaagtatttcatccaaactgttttgtttttaatgaaaaatacttgagcatgttaaaatgctgaagggaaaaaaaaccctagggaactacrtggaaaagttgtctatatgggaaatagagtaagaccgccaagaaggccagagaggacaaaattcagaagacaggtgcaagaattacttgggggcaggagg

SEQ ID NO: 36610 - DNA, 201 bp, Homo sapiens
gcatatttaagtatccctaaataatatatctttcagttttgcttggttttgagctttatgaaaatgttataatatatagtcattttctatcttgctttctktactcatccactgagtctcattcgttcatgttgttatatataccatatagtttattgctttcagtactataaaatattctgttgggtgaacttagcacta

SEQ ID NO: 36611 - DNA, 201 bp, Homo sapiens
ggtaagaaaactaaagcaaagaaagaggaaaatttaaaaagcatgctgtattctgaaggattgtggcagctgctgttggtctcttccattcagcttgtatytttgctaccagtggctttgcagtagggtggagagctggtggccattaaagctgaatattcatatgtccatcaagtggtgtatgcttacagtaacttcaag

SEQ ID NO: 36612 - DNA, 201 bp, Homo sapiens
gaaactcagcacgatgaaggcatgtttaagcaaaaaccttgtcatagtagggaatgctaagagctttaaataggtactgacaatagccccgagattccccrgggtgttctgggtcttcccttttcttcctgtgaatgctgctggtccactgttacctaccccaactctgagaacaaaatagagagtgagtttgaagaaaac

SEQ ID NO: 36613 - DNA, 201 bp, Homo sapiens
atggatgtggttgtattcaaataaaattttatttttaaaaacaggtaatggaccagatttgaccttcaggccatggtttgctgaaacctggtttagatgtygtgtttgtttgtttgtttgtttttttaatgagacagggtctcgccagtgtagtggtgccatcatagctcactgtagcctcaaactcctgggctcaagcta

SEQ ID NO: 36614 - DNA, 201 bp, Homo sapiens
ggaccagatttgaccttcaggccatggtttgctgaaacctggtttagatgttgtgtttgtttgtttgtttgtttttttaatgagacagggtctcgccagtktagtggtgccatcatagctcactgtagcctcaaactcctgggctcaagctatcttcccactcagcctcataagtagctgggactacaggtgtgccccacc

SEQ ID NO: 36615 - DNA, 201 bp, Homo sapiens
tgctcttttaaacgtttttttgtggatgattgtgagtatgtggccaagttggtatgaattccaggtggctactaataatggtttttatctcatttgtcagmtgtgataaataagttactctgaaaagcacagttttattactgatctgttgtgttctactgtgttttctgttacattcctctgttccctaactctaacaaa

SEQ ID NO: 36616 - DNA, 201 bp, Homo sapiens
aaaaaaacttacagagcactataatctcatttgtataaagaccaaaaaatataggggaggtgggataccatgtgaatatataatctgtgtgtgtgtgtgtrtgtgtgcacgtgcacatgcatgcttatatagacacagattttctgagaggattttgaccaaagagttaataatggtaacctctgcacacaacaattgggc

SEQ ID NO: 36617 - DNA, 201 bp, Homo sapiens
aaactccatctcaaaaaaaaaaaaaaaggaagaaacatcacttgggcaaagcagtgaatggcttggtatgctatgctaaggacctttattctgcaggaatyggagtcctataaactattaataagcagaatacaaaaacttcataaaataaataaaaacaaaatacaaaaaagcagagtacagatgccacctgtcttttga

SEQ ID NO: 36618 - DNA, 201 bp, Homo sapiens
taagatttcatcagagtttaaaacttttgtgcctccaaaaaacaccatcagggaaggaaaaagacaactcacagggtgggagaaaatatttgcaaatcatrtatctgatgagggcccagtgtctgtgttaaaagaactctgcaactcagcaataaaagcacaacctaatttaaaaattgatgagtgatttggatagctgtt

SEQ ID NO: 36619 - DNA, 201 bp, Homo sapiens
acatagaaaaggttgtatgatttcaaattagttttctaatccacaataatgttacctgtggctatttttctttacactttaattttataaattttctatarcatattaggattaaaagagttattttttttcttttaagtacatttctatttattcagagagcagtgagcagtcttctaactggaatataaggtttttgtt

SEQ ID NO: 36620 - DNA, 201 bp, Homo sapiens
aatttgaataaatatgtaatctttgtgtgaagaaaactttttaaaaacagcaacaaagacagactattaaggaatgtaaactgaggaaaatatttgcaatrtatggcaggcaaaaagttagtagacttaacatagaattttatttttgttaggatgtacaaaaaatgcagttatatgaatactcatttatattacagaaag

SEQ ID NO: 36621 - DNA, 201 bp, Homo sapiens
ccacatgactggggaggcctcacaatcatggtggaaggtgaaagaggagcaaagtcacgtcttacatgtcggcaggcaagagagcatgtgcaggggaactmctcagatttcacgagacttaatcactatcaccagagcagcacagagagacctgcccccatgattcaattacctcccactgtgtccctcccatgacacatg

SEQ ID NO: 36622 - DNA, 201 bp, Homo sapiens
aaattgcctgtgaaataacatcctctcaaatgtttgctgatgaaattcaagttgaaatgtattcattgcaaaagtctataaacctgtggattatatattcmaaataagacaaaggcaaataaaaagcagctgtcttcatgaatagacaaaagttgctttcaggaagtataaattatattctgcactgaccaaagaatagaa

SEQ ID NO: 36623 - DNA, 201 bp, Homo sapiens
tattaaatcagttttaaattcctggattaaactcatcttgattgtgatggataacgtatttctggatttgatttactaatgctttgattaggatatttttyggattatgtttgccagagagattagtctgtagtcttgtaatactgtccttgtaagttttaagtattaacattatgctgtcctcataaaaaaggatgagat

SEQ ID NO: 36624 - DNA, 201 bp, Homo sapiens
aggaccctctctggaacgggggtgtgatgacctacaatgaaacaggtaaaatctgatagtttttttgttgttgttgtttctttgtttgagacagagtctckctgtgtcccccaggctggagtgcagtggcgtggtcttggctcactgcaacctcagcctcccgggttcaagccttcctcatgcctcagccacacgagtagc

SEQ ID NO: 36625 - DNA, 201 bp, Homo sapiens
gcgcccctcacctcccagacggggcagctggccgggcggggggctgacccccccacctccctcccagacggggcagccggccaggcagaggggttcctcarttcccagtaggggtggccgggcagaggtgcccctcgcctcccggacagggcggctggccgggcggggggctgacccccccacctccctcccggacggggc

SEQ ID NO: 36626 - DNA, 201 bp, Homo sapiens
ataaggacaggaagggaaggaaggagagggtttgggatcaagatgtcaaatgatactgttagccctgaaaagtggtagggttcaaaaggaaaagaggtatgaagcgcaaaaacatttagagttggcatgagggaatgtaaaaggtctgttatctataaagtaggcaaccaggtcattaattgctggtgaagagtagatagg

SEQ ID NO: 36627 - DNA, 201 bp, Homo sapiens
gtccatttggtattctttggtcttttgtttgtttgtttttttttgagacagagtctcgatctatcacccaggctgggtgtagtggcatgatctcagctcaytgcaacctctgcctcccaggttcaagcgtttctcctgcctcagcctcccgagtagctggtattacaggcatgcaccaccatgcgtggctaatttttgtat

SEQ ID NO: 36628 - DNA, 201 bp, Homo sapiens
agcaagtagaaattgcatcacttagaaatacctgatcttttgataaagcatagaaatttatggtacatattttatgtgtgtgtgtgtgtatatatatatakagagagagaaaaagtcacagtgtacatactttaataaacttatttgtttaacattatactgtgaacttttccgtattaacattcctcagtaattttttca

SEQ ID NO: 36629 - DNA, 201 bp, Homo sapiens
catgactggggaggcctcacaatcatggtggaaggtgaaagaggagcaaagtcacgtcttacatgtcggcaggcaagagagcatgtgcaggggaactcctcagatttcacgagacttaatcactatcaccagagcagcacagagagacctgcccccatgattcaattacctcccactgtgtccctcccatgacacatggga

SEQ ID NO: 36630 - DNA, 201 bp, Homo sapiens
ttttactattgaaaaccacactgtggtgaatattgtggcttagtttttatttgtatatagatatattcagttgagggtatttctatccatatttctatgtraatatatttgtcataagtctaaaattacagaaagttagaaattaaagagatgaaagatttttttattttggtagttaaactgaagaaattgagagttata

SEQ ID NO: 36631 - DNA, 201 bp, Homo sapiens
tatcattcaacactaaatgcaaattcttggctgaaggagcttatagaaacaaaatctattttgttataaaaatgcataaattaagcattttcttagtaggmccaaactttttgtgatatgttagagtgactaacttttctttcctaatcttataatatccttctatagacatttaaagctttacttctttatgccttcccc

SEQ ID NO: 36632 - DNA, 201 bp, Homo sapiens
atgactggggaggcctcacaatcatggtggaaggtgaaagaggagcaaagtcacgtcttacatgtcggcaggcaagagagcatgtgcaggggaactcctcagatttcacgagacttaatcactatcaccagagcagcacagagagacctgcccccatgattcaattacctcccactgtgtccctcccatgacacatgggaa

SEQ ID NO: 36633 - DNA, 201 bp, Homo sapiens
gactggggaggcctcacaatcatggtggaaggtgaaagaggagcaaagtcacgtcttacatgtcggcaggcaagagagcatgtgcaggggaactcctcagatttcacgagacttaatcactatcaccagagcagcacagagagacctgcccccatgattcaattacctcccactgtgtccctcccatgacacatgggaatt

SEQ ID NO: 36634 - DNA, 201 bp, Homo sapiens
actggggaggcctcacaatcatggtggaaggtgaaagaggagcaaagtcacgtcttacatgtcggcaggcaagagagcatgtgcaggggaactcctcagatttcacgagacttaatcactatcaccagagcagcacagagagacctgcccccatgattcaattacctcccactgtgtccctcccatgacacatgggaatta

SEQ ID NO: 36635 - DNA, 201 bp, Homo sapiens
aagagttcagtggctgtgtaagattggaaaatagtgctttttgtatgcctctttggatattacaaagcacattatcatagaaaaagtttcaaaaagtttgstgtagaaaccatttaaactttgttttacctagaatttgcctgagtaatttaacattggaactccttatgaagaacagctgacagagtttgggaaatgctg

SEQ ID NO: 36636 - DNA, 201 bp, Homo sapiens
ctggggaggcctcacaatcatggtggaaggtgaaagaggagcaaagtcacgtcttacatgtcggcaggcaagagagcatgtgcaggggaactcctcagatttcacgagacttaatcactatcaccagagcagcacagagagacctgcccccatgattcaattacctcccactgtgtccctcccatgacacatgggaattat

SEQ ID NO: 36637 - DNA, 201 bp, Homo sapiens
tagaagacctactgtagtggaatagatcaatgatgtgagcaaacgctccatgaccttcaagcttgaaggcttggctcaagttcttcagcgtctgctgttayatacagggcacattctaaggtccagaagttcactgttgcaataagcacgcatcgtcacccagatctgtctgtagtagtggtacgttggcttttgaaggat

SEQ ID NO: 36638 - DNA, 201 bp, Homo sapiens
ggggaggcctcacaatcatggtggaaggtgaaagaggagcaaagtcacgtcttacatgtcggcaggcaagagagcatgtgcaggggaactcctcagatttcacgagacttaatcactatcaccagagcagcacagagagacctgcccccatgattcaattacctcccactgtgtccctcccatgacacatgggaattatgg

SEQ ID NO: 36639 - DNA, 201 bp, Homo sapiens
gggttttatttcatctctacatagtacaaggaaaggaaactgctaaacatggactttccaaaaattatgtttgtaagattaaatgacatagtttaaaaatyttgtgatagtagttagagaatgtttgggggcagcttccacttgagagttagattttactcgaaagttaatttaaatctaaactggttaggtttttggctt

SEQ ID NO: 36640 - DNA, 201 bp, Homo sapiens
gggaggcctcacaatcatggtggaaggtgaaagaggagcaaagtcacgtcttacatgtcggcaggcaagagagcatgtgcaggggaactcctcagatttcacgagacttaatcactatcaccagagcagcacagagagacctgcccccatgattcaattacctcccactgtgtccctcccatgacacatgggaattatggg

SEQ ID NO: 36641 - DNA, 201 bp, Homo sapiens
tattggttacagttgcctaatacatggcactataatagtccttcatttgaaaggtatttattggtggaaacattcagactatggaaattattctcaaaatrggaggagatattaaaatatctgtgtttgccttaggtcaacagaaagctgaaggtggtgatcagtgggttttatttcatctctacatagtacaaggaaagg

SEQ ID NO: 36642 - DNA, 201 bp, Homo sapiens
ggaggcctcacaatcatggtggaaggtgaaagaggagcaaagtcacgtcttacatgtcggcaggcaagagagcatgtgcaggggaactcctcagatttcacgagacttaatcactatcaccagagcagcacagagagacctgcccccatgattcaattacctcccactgtgtccctcccatgacacatgggaattatggga

SEQ ID NO: 36643 - DNA, 201 bp, Homo sapiens
  misc_feature (101)..(101): n is a, c, g, or t
gtacttctttgatgtttcccctacagcagatctttttcaacaggttagaatacagtcaaatgttgaggattataaagctaataccctatacagattgttgntttcaatcaccctgtctctctttagcaaccatctatcatctacaataggggtttgaaaactttttctataaacagcctgagagtaaatatgttaggcttt

SEQ ID NO: 36644 - DNA, 201 bp, Homo sapiens
gaggcctcacaatcatggtggaaggtgaaagaggagcaaagtcacgtcttacatgtcggcaggcaagagagcatgtgcaggggaactcctcagatttcacgagacttaatcactatcaccagagcagcacagagagacctgcccccatgattcaattacctcccactgtgtccctcccatgacacatgggaattatgggag

SEQ ID NO: 36645 - DNA, 201 bp, Homo sapiens
aaaatgttaccaactgatattgtgtgtccttcagtgacttagatcttaccttgattctgtttgtggtatagtttcctacaatatcaccatttaaacaatgktgcacactttgccttcaaactggaaggaccctattagaagccattttgattgagaagggtcattgctggttggcgtattggtctgttaaagagaatcttt

SEQ ID NO: 36646 - DNA, 201 bp, Homo sapiens
aggcctcacaatcatggtggaaggtgaaagaggagcaaagtcacgtcttacatgtcggcaggcaagagagcatgtgcaggggaactcctcagatttcacgagacttaatcactatcaccagagcagcacagagagacctgcccccatgattcaattacctcccactgtgtccctcccatgacacatgggaattatgggagc

SEQ ID NO: 36647 - DNA, 201 bp, Homo sapiens
ctcatgtttgatttggccatgaaatatatattaaaacgaagacttaaaagtgaattgatgccatggtaatacttggaattcttacattttgcaatttaaamtttcactgatttagattttaaaaatgaaaaatgttgttctttccctcaaatattagagaaagattcagttattatttgaaagagtttctctgtgatagta

SEQ ID NO: 36648 - DNA, 201 bp, Homo sapiens
ttatttctatatttaaaattacatttaaaactttttactgaaaaataagttaaaaatgatacatctcatgtttgatttggccatgaaatatatattaaaaygaagacttaaaagtgaattgatgccatggtaatacttggaattcttacattttgcaatttaaactttcactgatttagattttaaaaatgaaaaatgttg

SEQ ID NO: 36649 - DNA, 201 bp, Homo sapiens
aaattgatctacagatacagtgcaatccctataaaaattcaaggtacctttctggtagaaatggacaagctgattttaaaatttatgtagaaatttgagarttccagaatagccaaaacaattttgaaaaagagcaaagttggaggactcacacttcctgatttcaaaacttactacaaagcaatggtaatcaaggttgtg

SEQ ID NO: 36650 - DNA, 201 bp, Homo sapiens
ctgctcagaaaagtaatacttctttcaaaatattactgctcattgacaatgcacctaagtcacccaaaatctctgatggagatgtacaaggagattgatgwtattttcacgtctgctaacacagcatccattctgtagcccatggataaaggagtaattttgactttcaagtctgatcatttaagaaacacatttcataag

SEQ ID NO: 36651 - DNA, 201 bp, Homo sapiens
ctgttccaccaagcagctgttccctggtctccctccctctcattgggcctctctattctctgagaaccaacaatagtgaaatagcccaattaatagccctrcaatagactcttaagtgttcaactgaagagtcgcacatctcttactttaaatcaaaagctagaaatgattaaacttaatgaggaaggcatattgaaagtc

SEQ ID NO: 36652 - DNA, 201 bp, Homo sapiens
aatgtgtgtgttctgactgttccaccaagcagctgttccctggtctccctccctctcattgggcctctctattctctgagaaccaacaatagtgaaatagsccaattaatagccctgcaatagactcttaagtgttcaactgaagagtcgcacatctcttactttaaatcaaaagctagaaatgattaaacttaatgagga

SEQ ID NO: 36653 - DNA, 201 bp, Homo sapiens
gcttggccataacaatacaactaacagtgatcgaaaacacaagaacatttattactaaataagtcttgaggcaggcaatcccagggttggctctctggctyagcagtgtcagtgttagattgccaggtctctgaagctcttctgtttttcctttcatggttgcaagacagctcctaaaagagcgtatcatcatagtaatat

SEQ ID NO: 36654 - DNA, 201 bp, Homo sapiens
aagtcttgaggcaggcaatcccagggttggctctctggctcagcagtgtcagtgttagattgccaggtctctgaagctcttctgtttttcctttcatggtwgcaagacagctcctaaaagagcgtatcatcatagtaatatatagagtagagagagagcattcgagaaagggctttctccttgttcttcttactcattaag

SEQ ID NO: 36655 - DNA, 201 bp, Homo sapiens
gggccttcagcttggagcagatgaggaaggagccccccatcttcctgtgcagggagtaggtttcctcgggtggggggacgagacggtgcctcagcatgacrggaatcaggttgtggatcttctcggtggtgctctgagtgccaaaatcaaaaggctcatcagaggcgaaggcctcccccaggatgaggatggcatccaagt

SEQ ID NO: 36656 - DNA, 201 bp, Homo sapiens
agtctgatgagtgcatcttatcaatacgatgaagagaatcctgtgtcaactttccagaattaccatttatgtatgtagtccttactaacttgtgtttcaasataggcattcctgttcctgtttatcccaatagtccattaaggataaaatttaaataatatagactgaatattttttaaaaaggaaaactgtataacagtt

SEQ ID NO: 36657 - DNA, 201 bp, Homo sapiens
atcagggagatgttttggttattctgccaacctcccactgggtctagtcttaactcctttccagtttatagtgttccactttgaatactgctttaatcatrcccattttttgacctcaattcctatagcacatacagcctgccacacaatttgcatttgattttctactttattatttttttaaagagtgttgctgttgtc

SEQ ID NO: 36658 - DNA, 201 bp, Homo sapiens
ggtatttctatccatatttctatgtgaatatatttgtcataagtctaaaattacagaaagttagaaattaaagagatgaaagatttttttattttggtagttaaactgaagaaattgagagttatattctttgccacatattagaggtagagttggcagtgaagagattgggctgtaatgtgcttagtgcaatgcctggca

SEQ ID NO: 36659 - DNA, 201 bp, Homo sapiens
tccagaggtggttttggttccaatatttttggattttagaaagataatttagtttgtatactctattttatgtaacattctcattggggtttggagcagcmcttcataaacagatacattcacgtttcttcagtgaagcatgtttgtttttatactaagtgagattaaaaagcaagaatattaatagcctgatgtcactac

SEQ ID NO: 36660 - DNA, 201 bp, Homo sapiens
aatgttttatttttacaattatgtattagtatttctagtttcagagagaaggagaaactagggtctagaggataatatacccaagttcaaatagatgggargttctaattgtaatatcagttaataatttttgaatcttttttttttttttttaagacggagtctcgctctgtcgtcaccaggctggagtgcagtggcgtg

SEQ ID NO: 36661 - DNA, 201 bp, Homo sapiens
caaatgagttatgaaaaccttttgtctttgagaattgcagataagggattatggacctgtataaaactcttaccatagtgcctggcatttagaacacactyctccttctactagatttatactagtagtattgggtgggtactactactaccactactgttattagtagttatcatcagatacatacttacagaaaactgg

SEQ ID NO: 36662 - DNA, 201 bp, Homo sapiens
agttatgaaaaccttttgtctttgagaattgcagataagggattatggacctgtataaaactcttaccatagtgcctggcatttagaacacactcctcctyctactagatttatactagtagtattgggtgggtactactactaccactactgttattagtagttatcatcagatacatacttacagaaaactggtgaatt

SEQ ID NO: 36663 - DNA, 201 bp, Homo sapiens
ataaactactatattatgtaaactacaatattttagcttttctgtgtgagaaagtgatttttgtttgtttgtttgtttgagacagagtcttgctctgtcayccaggctggagtgcagtggcacgatcttggctttctgcagcctcagctcccgggttccagtgattctcttgcctcagcctcccaagtagctgggattaca

SEQ ID NO: 36664 - DNA, 201 bp, Homo sapiens
ttgtaaatacagttgatccttgagcaacatggatttgaactgtgtggatccacttatatgcagatttttttcccaaccaaatagagattgaaaatacagtwtgctttggatccgaaacccaacccaggttggaggtagaagtccaggttccccgtgtggtttctactgacaatgtgtgaggagaggcttgttgtcagccag

SEQ ID NO: 36665 - DNA, 201 bp, Homo sapiens
ttcttccctcaatcagaataagagggtgtaagtcatagtgttctgtgtgttttccccgccctaaattgagtcttgtatagcttagtgctcctgtccctctrtccatgtgcactcccagttgtgcagggtttgattttagagtctaagcaatagctcacgtggtgtgttcaccgcttcagagatcttagtgaaacaacgttt

SEQ ID NO: 36666 - DNA, 201 bp, Homo sapiens
ggtggaaggtgaaagaggagcaaagtcacgtcttacatgtcggcaggcaagagagcatgtgcaggggaactcctcagatttcacgagacttaatcactatcaccagagcagcacagagagacctgcccccatgattcaattacctcccactgtgtccctcccatgacacatgggaattatgggagctacaattcaagatga

SEQ ID NO: 36667 - DNA, 201 bp, Homo sapiens
aggtcaggggtacacttgcaggtttgttaaataagtaaacttgtgtcatgggcatttgttgtacagattatttcatcgccctattaagctcagtacccatyagttattttttcctgatcctctccctcctcccaccctctgtcctctgacaggtcccagtgtgtgttgttcccttctatgtgtccatgtgtactcatcatt

SEQ ID NO: 36668 - DNA, 201 bp, Homo sapiens
agcccattgggagaacaatttaattgtttgaaattgagatacttccttttctttctcatccattttaattgatgaaaaactataatcacagtcattataaycacttataacaattaccaagaaatatttagtatgtatacacttactgtaattatatggtcatgttacttttattgcagtctgatccaaatataaatttat

SEQ ID NO: 36669 - DNA, 201 bp, Homo sapiens
tatgtgtccatgtgtactcatcatttagctcccacttacaagtgagaacatggggtatttggttttctgttcctgtgttagtttgcagagcataatggccyccggctccatccatgtccctgcaaaggacatgatctcattttttttctgtggctgcatagcattccatggtgtatatgtaccacatttaaaaatctagtc

SEQ ID NO: 36670 - DNA, 201 bp, Homo sapiens
gtggaaggtgaaagaggagcaaagtcacgtcttacatgtcggcaggcaagagagcatgtgcaggggaactcctcagatttcacgagacttaatcactatcaccagagcagcacagagagacctgcccccatgattcaattacctcccactgtgtccctcccatgacacatgggaattatgggagctacaattcaagatgag

SEQ ID NO: 36671 - DNA, 201 bp, Homo sapiens
tggaaggtgaaagaggagcaaagtcacgtcttacatgtcggcaggcaagagagcatgtgcaggggaactcctcagatttcacgagacttaatcactatcaccagagcagcacagagagacctgcccccatgattcaattacctcccactgtgtccctcccatgacacatgggaattatgggagctacaattcaagatgaga

SEQ ID NO: 36672 - DNA, 201 bp, Homo sapiens
ggaaggtgaaagaggagcaaagtcacgtcttacatgtcggcaggcaagagagcatgtgcaggggaactcctcagatttcacgagacttaatcactatcaccagagcagcacagagagacctgcccccatgattcaattacctcccactgtgtccctcccatgacacatgggaattatgggagctacaattcaagatgagat

SEQ ID NO: 36673 - DNA, 201 bp, Homo sapiens
gaaggtgaaagaggagcaaagtcacgtcttacatgtcggcaggcaagagagcatgtgcaggggaactcctcagatttcacgagacttaatcactatcaccagagcagcacagagagacctgcccccatgattcaattacctcccactgtgtccctcccatgacacatgggaattatgggagctacaattcaagatgagatt

SEQ ID NO: 36674 - DNA, 201 bp, Homo sapiens
agatcgagaccatcctggctaacacggtgaaaccccgtctctactaaaaatacagaaaattagccgggcaaggtggcgggcgcctgtagtcccagctgctygggaggctgaggcaggagaatggcgtgaaccccggggggcggagcctgcagtgagccgagattgcaccaccgcactccagcctgggcgacagagcgagac

SEQ ID NO: 36675 - DNA, 201 bp, Homo sapiens
tttttcagagacattaaacctgacaatatactgatggatatgaatggacatattcggttagcagattttggttcttgtctgaagctgatggaagatggaayggtaaataaagataaatcctaaattattttgttcacagacatttcccttgctatttgtctgatatatctgttttagaaaccatctatttatactatctac

SEQ ID NO: 36676 - DNA, 201 bp, Homo sapiens
aaaaccccatctctactgaaaatacaaaaattagccagacacagtggcatgtgcctgtaatcccagctactccagaggctgaggctagagaattgcttgamcctgaaaggcggagattgcagtgagctgagatcgcaccactgcactccagcctgggatacagagtgagactcttgtctcaaaaaaaaaaaaaaaaaacca

SEQ ID NO: 36677 - DNA, 201 bp, Homo sapiens
tctctactaaaaatacagaaaattagccgggcaaggtggcgggcgcctgtagtcccagctgcttgggaggctgaggcaggagaatggcgtgaaccccgggrggcggagcctgcagtgagccgagattgcaccaccgcactccagcctgggcgacagagcgagactccgtctcaaaaaaaaaaaaaaaaaaaaaaaagtgaa

SEQ ID NO: 36678 - DNA, 201 bp, Homo sapiens
acttaatatgcattgtttaatgatttcatagtaacagaaaaagacactttgccataaatttgacgttttttttcagtgcagtggactacttcatgaataayatttttgtgattggaaaaaaattttattttataatgtactttataatattctcaaatgctatgatatgaggttatcactctgacagtggcaatgtgtgtt

SEQ ID NO: 36679 - DNA, 201 bp, Homo sapiens
gagaaaaaggagctatgtagttgattcattggcagagtacgccaatagtatttaaaaccaaaaattattagaaggtggattcttttgtatatatatatatrtatatatatgcagtggattttttttttttttttttttgagatacagtctcactttgtctcccaggatggagtacagtgccatgatcaaggctcactacca

SEQ ID NO: 36680 - DNA, 201 bp, Homo sapiens
ataattttaagtagacaaatataagtaaaaatactggcttcaagaaaacacattaaaatgtttagacccattattttggggtagttaatttttatttttattttatttttttttgcgggggagacggagtctcgctctgttgcgaggctggagtgcagtggcaccatctcagctcactgcaacctctgcctcctgggttca

SEQ ID NO: 36681 - DNA, 201 bp, Homo sapiens
tttaagtagacaaatataagtaaaaatactggcttcaagaaaacacattaaaatgtttagacccattattttggggtagttaatttttatttttattttatttttttttgcgggggagacggagtctcgctctgttgcgaggctggagtgcagtggcaccatctcagctcactgcaacctctgcctcctgggttcaagcga

SEQ ID NO: 36682 - DNA, 201 bp, Homo sapiens
aatttttataattattccagctggctaactgcaagatattcagatctgtgttttaaatgagcaatttaaaaatgtttttgccataaatgtggagtcagttraaaacaatttttaaaaaatgttaacgtttttcttcaagctttttatcacagtatgaacctacatttttttttcttttcttcagtgtactttctgatcgga

SEQ ID NO: 36683 - DNA, 201 bp, Homo sapiens
tctggtgaagcttttcccaggcgtttttctgctaaagctttggctatatttctcaaaacactctcattataaacaggtgctatcatcgtttggctctctaraaagccaacaagcaaaatgcctcaagcatcccaaaaaactattgccatgacctttgctcttgactggtccacttttgctgtgactggaccacttccacct

SEQ ID NO: 36684 - DNA, 201 bp, Homo sapiens
aggaggctaagacaggaggatcattttgaggccagcctgggcaacatagcaagaccttctctttaataaataaataaagtgcattgagatgtttggatgakttttgtcatcttgcctctctgctggtttcacagtatccatcagtgatatgtagtccatttatagagatggtaactgtacctctcttagattgttatagaa

SEQ ID NO: 36685 - DNA, 201 bp, Homo sapiens
caatagtatttaaaaccaaaaattattagaaggtggattcttttgtatatatatatatatatatatatgcagtggattttttttttttttttttttgagawacagtctcactttgtctcccaggatggagtacagtgccatgatcaaggctcactaccacctcaacctccggggctcaagcaattctcccatctgagcctc

SEQ ID NO: 36686 - DNA, 201 bp, Homo sapiens
atttactatgtctcattaaaattgtcattggtaagcaaatgaatcagctacccaaatgataaaacagttatttaaaataaaattggagataagcattcatytaacatagcatcttgtatgcagtgagtgttacgaattttctttttgttaaaatgaatttttatcaaacgtttcttttttccctctaaaagtgtgtggatt

SEQ ID NO: 36687 - DNA, 201 bp, Homo sapiens
gttgttgttgttgttgttatatatttaatgcctctttagtgatagtgttctggcacttttacagaaggaaaatgaaaatgatactaacatttcaaatggtrtctgccacctttgctttgtcatgtattctagtgctaaaggtagttattctgattaggaatagctgaactccagtaatggtatcatttaatgaatgcttat

SEQ ID NO: 36688 - DNA, 201 bp, Homo sapiens
tcattaaggaaagaccctagaagctctcaggccctttctattactggtcaaaataatataaagcaagtttcacacagatgcctgaccaaacaatggaaaargggaaagggcttataccaattatactggcatataccaattataattcatcatctggggtaaaacaaattgccactacccagaaatagggtctgtcaatga

SEQ ID NO: 36689 - DNA, 201 bp, Homo sapiens
ctgcataagaaagaaatccccttaacaaatggcagtttctgtgtctggaggtttaaatttttgctgtattcctgtgtatgcatctaactcttttgttactktccataaatactgaaaagttcaatgagtatggttcaaatgccattcacaatttttacctcccaaaacaataagtgtagaacaacttaggtttttcatttt

SEQ ID NO: 36690 - DNA, 201 bp, Homo sapiens
tttcctcgggtggggggacgagacggtgcctcagcatgacgggaatcaggttgtggatcttctcggtggtgctctgagtgccaaaatcaaaaggctcatcrgaggcgaaggcctcccccaggatgaggatggcatccaagtgggcgtcttccatgacctggggcaagagaggaaggataaatggcggcgagacaccagagc

SEQ ID NO: 36691 - DNA, 201 bp, Homo sapiens
ttataattcatcatctggggtaaaacaaattgccactacccagaaatagggtctgtcaatgaggaagaagggaagattagttgttaggtaactaggcagtytgccacatacgatattcatttgtttaagtaacttacaaagtaacaaggtttaaaatagtgaacaaagcggacttaatccccggaattcttgagttttttt

SEQ ID NO: 36692 - DNA, 201 bp, Homo sapiens
cctgcgactaaaattttccagacctaatttgacgtttataaattaaaagattatttttaaatttctataatccccctgaggtttaaaacttcaaatatgtrttgtctttcttgtatcattttatttaacagttctgtacgaactcagattgcatttctttttttttttttggagacagagtttcactcttgctgcccaggc

SEQ ID NO: 36693 - DNA, 201 bp, Homo sapiens
ctcctcgaacatggccttgcaggggaagcgggccttcagcttggagcagatgaggaaggagccccccatcttcctgtgcagggagtaggtttcctcgggtsgggggacgagacggtgcctcagcatgacgggaatcaggttgtggatcttctcggtggtgctctgagtgccaaaatcaaaaggctcatcagaggcgaaggc

SEQ ID NO: 36694 - DNA, 201 bp, Homo sapiens
tttttggaaatatcccgttgaacagcagtttgaagatctgctgtatatagtttgacctccctttctgcatattagagtagcatttctcttcctccccaccmacccccagtaactggaaacatcctcgttcaacctttgttttcctcttttgtgggctagcctgtggcctatggcaagtccaatggcctggaagtggtctta

SEQ ID NO: 36695 - DNA, 201 bp, Homo sapiens
aaaaggccgattttttaaccagtgatattttctgtgattgtctataatttggtttaaatttatacttaataagggccagaatacatggctatattcttagyatcctttagaacattatttcttagtcaaagtttatgaggcatctagcaacattttacatgatatataaaattggaggtaaatgtgctttttcttgggagg

SEQ ID NO: 36696 - DNA, 201 bp, Homo sapiens
taacttgtttatattattctgtatttatctgtattctgctacaagcaaaagtcagcaggagttttgaacatgccctctagaaattctgtttaatgctgatyatgcagtcactttgtattttgttttatattacaggagttgtagtaaaatctagtaatggaagaactgcctgcatttttatgtagatttgagggaaggatt

SEQ ID NO: 36697 - DNA, 201 bp, Homo sapiens
tgaagtcgtatgaggtatcatctccaaccacaatggaatggagctagaaatcaattacagggaaaaaaaaaacctggaatgctcaaaaatatgtggaaatyaatgaacacactcttaagcaaccataggtcaaagaataaatcaccagggaaattagaaaatacgtgaatgaaaatgaaaatacaatacaccagaacttac

SEQ ID NO: 36698 - DNA, 201 bp, Homo sapiens
agaagaaggaaaataatgggtgaagggaaggttaaaatttcttgctccagcactctctgttctcttccaggccttatcttactccttcagactctgtcttyatttctcatcttttcttctcacttatgcctctgcctttccactctctctttctattggacactttctttctgacaccatggtagctatcactagtggctt

SEQ ID NO: 36699 - DNA, 201 bp, Homo sapiens
agtaaataccgagattgagtttattgtgcagatatttgtttgggatttcttttgagaaatccctacctgtagaagggaagggagggagataggatttgtamagttgtcccatcagcctcagttgattccactgggagctctgtagcagaaatggctcttgagaagtgtcctacattggatcaaaatgtctagacctttata

SEQ ID NO: 36700 - DNA, 201 bp, Homo sapiens
agttgtagggaggaaggaggttggatgggagaattgaaggagactctgttgttggatcttgggctacacagagtagggagaaagatgtaccttgcaaggtwtaccaggcattttgtattggaactttgagttctttttcttctagaattattcatttatctgttcattaaacagtaaacaatgaaccccaggcagtgtttt

SEQ ID NO: 36701 - DNA, 201 bp, Homo sapiens
gtcccatcagcctcagttgattccactgggagctctgtagcagaaatggctcttgagaagtgtcctacattggatcaaaatgtctagacctttatacaccwgcctctactagtcagtggacatgggctacccctgaaggacatggccttggactggtaggctttcttcagctgatgcaaaccctgaaggtgtgacagcatc

SEQ ID NO: 36702 - DNA, 201 bp, Homo sapiens
tcttttcagtttcagagatcttttttatttaacttagaattatttcacttttgaatctcttaatttcagcatctgtatttatttcaaaccttttgggaatraagaggcaacttgttatgttggaaaggcttttggagcctgatagatctgagttttaatcctgtctttgccacttactaggtatttaatattcaggaattt

SEQ ID NO: 36703 - DNA, 201 bp, Homo sapiens
aaaaattgaattaaagtttatacttttttcaatgaagctggatatgttggggaagaattgtgaaaaggatgaataactgggttagctttcattacagctgraagtggcaaaattcaaaataaaacagtataatttaaaatcaaatattttattcaattaacaagtatttatatattctgtttctgagacaagatggaatag

SEQ ID NO: 36704 - DNA, 201 bp, Homo sapiens
gatcacttgagcccaggaggtcgaggctgcagtgagctatcatggtgccactacacttcagcctgggcaacagagcaagaccctgcctcaaataaataatwataataataataataataataataattctatttttaaaatatttactgttaggaaagcagtctgcctaagccatatgattatgccacgaggatcatgttg

SEQ ID NO: 36705 - DNA, 201 bp, Homo sapiens
gtggggggagtataaatacataggcttaaatacatgggtagacttcaaaggatatgtgaaagtaatgaggaaatgtttctctcagtataccacaatatgtstaagatacatgatgacatacctgatgaacaaaacataaaatttagacatctgtcaaaagccaaacaaatcaggttcttacttagttccatattggagaat

SEQ ID NO: 36706 - DNA, 201 bp, Homo sapiens
caccttgatgccaaaatgtcagatttcaaacattataagaactttttttatcagagatccctcctctacattttcttccctcttccttccaccactttaaraaaaaaaaagagataaaaagaaaaaatctgtatcttattttttgttcaaaataaggtctatattgataagcaaaacaagtgaagatagcattttccacag

SEQ ID NO: 36707 - DNA, 201 bp, Homo sapiens
cattttatttaacagttctgtacgaactcagattgcatttctttttttttttttggagacagagtttcactcttgctgcccaggctggagtgcagtggcaygaactcggctcattgcagcctccgcctcctgggttcaagagattctcctgcctcagcctcccagtagctgggattacaggcatgcaccaccacgcccggc

SEQ ID NO: 36708 - DNA, 201 bp, Homo sapiens
tccctcttccttccaccactttaagaaaaaaaaagagataaaaagaaaaaatctgtatcttattttttgttcaaaataaggtctatattgataagcaaaasaagtgaagatagcattttccacagaatcattagactgcttggtttttagtgtttgttgtcacctgattttgttaacacatgataatcgttctttttggca

SEQ ID NO: 36709 - DNA, 201 bp, Homo sapiens
tttatttaacagttctgtacgaactcagattgcatttctttttttttttttggagacagagtttcactcttgctgcccaggctggagtgcagtggcacgawctcggctcattgcagcctccgcctcctgggttcaagagattctcctgcctcagcctcccagtagctgggattacaggcatgcaccaccacgcccggctaa

SEQ ID NO: 36710 - DNA, 201 bp, Homo sapiens
cagctctgatatcagatactattccatttgttctgtgtgcatgttttgtgaaatgtgaatccattttcatcaccttattgccttttttcatctttcttttstttttgatagccaggtttcccttatccatcccctcatcatcactccggtctgatctcctctccgatcaactttgaacacatctatcacatgactgttaat

SEQ ID NO: 36711 - DNA, 201 bp, Homo sapiens
tttcactcttgctgcccaggctggagtgcagtggcacgaactcggctcattgcagcctccgcctcctgggttcaagagattctcctgcctcagcctcccartagctgggattacaggcatgcaccaccacgcccggctaattttgtatttttagtagagatgaggtttctccatgttggccaggttggtctcgaactccca

SEQ ID NO: 36712 - DNA, 201 bp, Homo sapiens
tattctaaattataatgttttaaatgttactgacatttaaattattatatcacttaaatatcttatctgacaaaattaaattaaccacgataaaataagcytgagtttgcttagactgcagggagtggattccagaggaattttgtatatgttaatcaggaacttttcactgggcatgatggctcatacatgtaatcccag

SEQ ID NO: 36713 - DNA, 201 bp, Homo sapiens
gcctcctgggttcaagagattctcctgcctcagcctcccagtagctgggattacaggcatgcaccaccacgcccggctaattttgtatttttagtagagaygaggtttctccatgttggccaggttggtctcgaactcccaacctcaggtgatccacccgccttggcctcccaaagtgctgagattataagcatgagccac

SEQ ID NO: 36714 - DNA, 201 bp, Homo sapiens
gactgcagggagtggattccagaggaattttgtatatgttaatcaggaacttttcactgggcatgatggctcatacatgtaatcccagcactttgggaggmtgaggcaggaggaccacttgagcctaggagtttgagacaagcctgggcaaccatagcgagaccccatttctacaaaaaataaaaataaaaaaattagttg

SEQ ID NO: 36715 - DNA, 201 bp, Homo sapiens
gtttggaggtttttcttctagggaaaaactaaatgctgggtgaaataaagagaaaccaatataacttggtattcataaatacagttttatctttatgtcarcttagatcatgggaaaacaatgcattgttagccatataaaaacttctgaaaaataagttctctgtttttaaaaatgggaatcctatggtgacgttcccta

SEQ ID NO: 36716 - DNA, 201 bp, Homo sapiens
aaatataggaataaatgtagtctttataaataaagcctaaaatcggcctccaggatttttttgggttttgttgttgttttgttttttgttttggttttgcktttttgttttttgttttttgtttttgttttttttgagacagagtctcactctgttggccaagctcgagtgcagtggcacgatcttggctcactgaaacct

SEQ ID NO: 36717 - DNA, 201 bp, Homo sapiens
atatttgtgaggagaggaaaaggtgagttaggagtgaggaagaaggacactagagacaagcagagtgcatgtatacaggcatcaagaaaatttattttctktgttaatgcaattattttttcagtgtattactgagattaaaactaaatttgacaagtgttcgtatacctattattcatttattgcattttttcaataaat

SEQ ID NO: 36718 - DNA, 201 bp, Homo sapiens
aaagagtatatttcccaagaaatatgtcaacaaatgaagaccagtgcatgtggagaaacccagtggtggggatggagtgttaggggaaacgtgtctcctgrggagtgaggttgtcagtgattctcagtccgaggggccttctggaatcatcaggagagcttattattattattattattattattattattattattatta

SEQ ID NO: 36719 - DNA, 201 bp, Homo sapiens
agtcagctttatgagatagtgtcatattattttccaaagtaattgtaccaaccaatactcccatcaacagcataaaggaattcttatcaacatcctagtaytttccattgtcaggattcataggttttgtaaatggttacaaagtagtatttcattgaagtttcagtttgcatgttgctaattaactgtgtagttgaaagt

SEQ ID NO: 36720 - DNA, 201 bp, Homo sapiens
cataggtatacatgtgccatggtagtttgctgcacccatcaacccgtcatctacattaggtatttctcttaatgctatccctcccctaaccccccaccccmcaacaggccccagtgtgtgatattcccctccctgtgtctgggtattctcattgttcaactcccacttatgaatgagaacatgcggtgtttggttttctgt

SEQ ID NO: 36721 - DNA, 201 bp, Homo sapiens
attttaagtagacaaatataagtaaaaatactggcttcaagaaaacacattaaaatgtttagacccattattttggggtagttaatttttatttttatttwatttttttttgcgggggagacggagtctcgctctgttgcgaggctggagtgcagtggcaccatctcagctcactgcaacctctgcctcctgggttcaagc

SEQ ID NO: 36722 - DNA, 201 bp, Homo sapiens
gggctttattccaataaaaacacctgtgttttaaacatttttcatgattattctgcatttccttttgcacctgaacttcagaaatagttaacttcaatcarataccacattaggctttcttttaaggtgaacttaaaaaaatgttacttttcagagattacattttatctacaattttgccattttaaaatacttgattaa

SEQ ID NO: 36723 - DNA, 201 bp, Homo sapiens
cttcacttccaagacccatacttagttttatacaggcatacccccattttattgtgtgccactttatcgtgctccacagatactacattgtttacaagtcrcaggtttatggtaaccctgcctctagtaagtctcagtgccattttcccaacagcgcgtgttgacttcatgtctctgtttcacattttggtaattcttgca

SEQ ID NO: 36724 - DNA, 201 bp, Homo sapiens
ttcagcctttttgttctgttcaggcctttagttgatcacatggggctcacatacattagggagggggttcttctctcactctcccaattcaagtgttacgyagagacaccctcacagacctacccagaataatgtttgacccaatgtctaggcaccttgtggaccagtcaagttgacaatcacatggcccttttatcccta

SEQ ID NO: 36725 - DNA, 201 bp, Homo sapiens
tgttgactaaagtctttggagctttttttagttttgagttattagtcaaattaaataacgaatgtttattaaattctaactagaatgtttgtaaaatttcrgattgctattatagtgagatgaagccaggagaaagtagtcttctaggctctgacagtctttacaaactctctaatatgttagcagtaaaccataacctca

SEQ ID NO: 36726 - DNA, 201 bp, Homo sapiens
gtatttttattaagaaaattaagcttaatttttttcataagctacataaattaactgtggaaaaagtatctaaacagatgccttgtcttacagggaaatgytacgagatccagaaatgagaaataaattaatttctaatccaactaattttaatcacatagcacacatgggtcctggagatggaatacagatcctgaaaga

SEQ ID NO: 36727 - DNA, 201 bp, Homo sapiens
aactccattggaaaggtgggggttgtgatcgggtagggctgtaggggcagggttctgtgttattgcatgttctatttcttgatctgagttttagttatatrttgttcactttatcattgtataaacataatttgttttgtagttgtatgtaggtatgttatgatcaattataaatggtataagataatttaaaaagaaggt

SEQ ID NO: 36728 - DNA, 201 bp, Homo sapiens
acttgctctcaacaaagaaattatgattttaaaagacaaattggaaaaaaccagaagagaaaggtaagaatcacattatttactatacagtaaatacttaytgagtacctgttatgtgtcaagtattggagatacatagacaataaacatatcctagacctaaaggagaccaaagtcaggattggcagatagaaaattata

SEQ ID NO: 36729 - DNA, 201 bp, Homo sapiens
tggtatgtattttttttagacacgtactgttgcacacttaacagactacagtataatgtaaacataatgtatatgcactggaagaccaaaaaaatagtgtracttgctttattttgatatttgttttattatgtggtctcaaattgaacctgcactttttccaaggtatgcctgtattctgtttcttagaggaactccaca

SEQ ID NO: 36730 - DNA, 201 bp, Homo sapiens
tctacatggaataaattttaaactctgttacagtattattcaaaagacttgaaaaccagatacaccctattcaaagatagtacaacatatttgtaacgatrtcagttctccctaatctataaattctatgaaatgtcaatcaaaatccagtggaatattttgagaaatttgaactattaaataatttatgtggagcttctg

SEQ ID NO: 36731 - DNA, 201 bp, Homo sapiens
tagatctgagttttaatcctgtctttgccacttactaggtatttaatattcaggaatttatattatctttctaaaccttttttttttttttctgtaaaatrggaagttcttagtatggtacttggcttagatggctcccaataaaataatgcctgctaagattattattatcacacagaaagtttgtccttagtaccaaat

SEQ ID NO: 36732 - DNA, 201 bp, Homo sapiens
ctgggattacaggtgtatgccaccacaccctgttaatttttgtatttttgttagagacagggtttcaccatgttgcccaggctggtcttgaactcctgtgytcaagcaatctgcccacctcggcatcacagagtactgggattataggcgtgagccactgcgcccggcccatgaaaattttcaaaacacaaatctgttgtt

SEQ ID NO: 36733 - DNA, 201 bp, Homo sapiens
tcaccatgttgcccaggctggtcttgaactcctgtgttcaagcaatctgcccacctcggcatcacagagtactgggattataggcgtgagccactgcgccyggcccatgaaaattttcaaaacacaaatctgttgtttgtagacatatacatgtgtgatcaagtcatataattggactatccactgacttcagattattac

SEQ ID NO: 36734 - DNA, 201 bp, Homo sapiens
acagccagactcaacgatttcatgatgcaaagtcagattgaaacagcggtgctcaccatgcttccttccctccttcctagttcacctgaggaatgagaccygctcctgtcagcagtaggggctcactgggagcctcccagaccctcctggaagtcatgcagaggttggatattgctcatccccaagagatttagggcccag

SEQ ID NO: 36735 - DNA, 201 bp, Homo sapiens
tataggcgtgagccactgcgcccggcccatgaaaattttcaaaacacaaatctgttgtttgtagacatatacatgtgtgatcaagtcatataattggactrtccactgacttcagattattacagcaggggagaaagggaagagaatgggttcacagtttggagtaggaaggatacaatttacatcttatttctttaaaaa

SEQ ID NO: 36736 - DNA, 201 bp, Homo sapiens
tcgagaggctgaggcaggagaatggcgtgaatctgggaggcagagcttgcagtgagctgagatcacgccactgcactccagcctgggcaacagaacaaggstgtgtctcaaaaaaaaaaaaaaagtgttcctatttctccacatcctctccagaatctgttgtttcctgattttttaatgatcaccattctaactggcatg

SEQ ID NO: 36737 - DNA, 201 bp, Homo sapiens
aaatctataaattactttgggcattatggccattttcatgatattgattcttcctatccataagcatggaatgtttttccatttgtttgtgtcctctcttrtttccttgaccagtggtttgtagttttccttgaagaggtccttcacatcccttgtaagttggattcctaggtattttattctgtttgtagcaattgtaat

SEQ ID NO: 36738 - DNA, 201 bp, Homo sapiens
actcattttatgaggccagcatcatcctgataccaaaacctagcaaagacacagcaaaaaaagaaaatttcaagccaatatccctgatgaacattgatgcraaaatcctcaattaaatactagcaaacattccagcagcacatcaaaaagcttatccaccacgatcaagtcggcttcatccctgagatgcaagactggttc

SEQ ID NO: 36739 - DNA, 201 bp, Homo sapiens
tctactaataatgtatgagttctactgtcttcaactcctcaccagaacttatcgtccgcgtttttcacttgtagccattctggtagaagtatagtgatgtyctgccatgattttaatttgcatttccctgatgaataatgaggttgaatatcttttcatgtatttactatccatttggatatctagtcttgtgaagttttg

SEQ ID NO: 36740 - DNA, 201 bp, Homo sapiens
gatttcaaacattataagaactttttttatcagagatccctcctctacattttcttccctcttccttccaccactttaagaaaaaaaaagagataaaaagraaaaatctgtatcttattttttgttcaaaataaggtctatattgataagcaaaacaagtgaagatagcattttccacagaatcattagactgcttggttt

SEQ ID NO: 36741 - DNA, 201 bp, Homo sapiens
gcaaattgttctgggatagggctgggcattggtgtttgtcaagctccatcatacgctaaacagtaaaccaccagtgttgctgatctgcagtcagtcagttmcagtgtcgaggaaatgccagcgagcctgtgactgcagcccaggggcttcgcaaagaagctgaggaagggaggtggaagggggattaccaaggacagagtc

SEQ ID NO: 36742 - DNA, 201 bp, Homo sapiens
aaaaaaatacgaaaaccagtcaggtgtggcggcgcgcctgaggcactcggcaggctgaggcaggagaatcaggcagggaggttgcagtgagccgagatggyagcagtacagtccagctttggctcggcatcagagggagaccgtggaaagagagggagaggaagaccgtggggagagggagagggagagggagagggttga

SEQ ID NO: 36743 - DNA, 201 bp, Homo sapiens
ttaaattaaccacgataaaataagcctgagtttgcttagactgcagggagtggattccagaggaattttgtatatgttaatcaggaacttttcactgggcrtgatggctcatacatgtaatcccagcactttgggaggctgaggcaggaggaccacttgagcctaggagtttgagacaagcctgggcaaccatagcgagac

SEQ ID NO: 36744 - DNA, 201 bp, Homo sapiens
gtggtttctactgacaatgtgtgaggagaggcttgttgtcagccagtgagggttaatgtcctgtctttttctgacatcactcttttttttttttttttttyaatttggagacagagtctcactctgttccccaggctggagtgcagtgacgcgatctcagctcactgcaactaccatctcccaggttcaagcaattcttgt

SEQ ID NO: 36745 - DNA, 201 bp, Homo sapiens
tgtaggaaagctcagtgctgcaaactttctctgagctctaacctctccttggagtgagtttcacaattgcatggcaactgggaactcagtttccagttctrgacttttattataacttaaaaatattttttagccacattagtacatttctttattgcttgtttcttttaacctcaaaagccttaagtatttgtgctgatt

SEQ ID NO: 36746 - DNA, 201 bp, Homo sapiens
gaaatagagaaaggtgccacctctccgcctgtcacttctcttctttctgctggcctccttcctcatccaggctgcttctttatgccgtaaaaggacatggrgttagtttgcccctgtggtttaatctaggactttcttaatttcttccttagctcgggtaagaatgatgttcaattctcctgaagctttcaactcccctct

SEQ ID NO: 36747 - DNA, 201 bp, Homo sapiens
tcagccatagtcataccctggcatataccttcaaatctattgttcctctttctctttgtcaaatacctttggcagaaccccaactgtgtttgaatacaacyttgtatcttcaactatccagctgaagacagcttgcttaaaacacccacaacgtgctgactaatattaattcagattcacagacactcacctcaagtcagc

SEQ ID NO: 36748 - DNA, 201 bp, Homo sapiens
gactttcttaatttcttccttagctcgggtaagaatgatgttcaattctcctgaagctttcaactcccctcttctggccagaacttcgctgttgctgttayttcggtccacaagaccaaaccctggctgcgtgaggtttcctgagtggccctgacagtgtgaatgtgggagcagtttgattttgtgtcacttaaacaagac

SEQ ID NO: 36749 - DNA, 201 bp, Homo sapiens
attgctgaattccattcctaatatatttttaaggatttttgcatctatatacatgaaggatattagtctttagttttccttttttttcttctttttccttycttaccttccttccttccttccttccttccttccttccttccttccttccttccttcctttcttgtactgcctgttttctctgtcaacgtagctggtggc

SEQ ID NO: 36750 - DNA, 201 bp, Homo sapiens
ctcttctggccagaacttcgctgttgctgttacttcggtccacaagaccaaaccctggctgcgtgaggtttcctgagtggccctgacagtgtgaatgtggragcagtttgattttgtgtcacttaaacaagacggactgttactgcttttctggagttagaatggttcatctaagaacatacagggaaggtccaggggtgg

SEQ ID NO: 36751 - DNA, 201 bp, Homo sapiens
atttaaagagccaagacagcccatctccttagaagtgctgaagtgaggctcccatatcactgctgatggcatgcaaacgacagactggagctggcctggcrttcttgtcaaggcccttaacgcattcattgagtttggccttttttatgtccctggttaccagctgcttgtccagtaaagatataagaggaaagaccctct

SEQ ID NO: 36752 - DNA, 201 bp, Homo sapiens
gagttaaaagcagtaagacttgatgatgaattagtcatggaaaagtaagggagagagttaaagatgactcccagacttcctgctagggccttagtatgatmccatttactcccatttaccaccgtttaagaaggggctgaggcaggacattccacgcatgtccaaaggtcccgaggtagcaaaaaaaaaaaaaaatgtatc

SEQ ID NO: 36753 - DNA, 201 bp, Homo sapiens
cttcggtccacaagaccaaaccctggctgcgtgaggtttcctgagtggccctgacagtgtgaatgtgggagcagtttgattttgtgtcacttaaacaagayggactgttactgcttttctggagttagaatggttcatctaagaacatacagggaaggtccaggggtggggttaaaggaactcctgaactggtggcagcta

SEQ ID NO: 36754 - DNA, 201 bp, Homo sapiens
gaaaaaatcttgccaagtgggaaaatgacaaccacttttattaattatctttttattagcgatagctagatttgatgattgatgtaagctgttactaactrtaagttatctagaagtcagttacaaaggttttacaactttaggaattaagtgatggtccataattccttacctgaaacccttgaggccagaatgttttta

SEQ ID NO: 36755 - DNA, 201 bp, Homo sapiens
gttcatctaagaacatacagggaaggtccaggggtggggttaaaggaactcctgaactggtggcagctaagtagttattcggagaatacttccggttccartggcccatggaattgacatttgtggctgatactgttatgttggtttactgtagtgtcagctgtgcagtgctttagaacagggcttggcaacccttttctg

SEQ ID NO: 36756 - DNA, 201 bp, Homo sapiens
tgcctgtaatcccagctactctggtggctgaggcacgagaatcgcctgaacctgggaggcagagattgcagtaagctgagattgagtcactgcactccagyctgggtgacagagtgagactctgtctcaaaaaaaaagatacatttttgtacatctgtacaatgtgtttgtattttaagtgttactacagaagagttcaga

SEQ ID NO: 36757 - DNA, 201 bp, Homo sapiens
cccagtggtggggatggagtgttaggggaaacgtgtctcctgaggagtgaggttgtcagtgattctcagtccgaggggccttctggaatcatcaggagagmttattattattattattattattattattattattattattatactttaagttctgggatacatgtgtagaacatgcaggtttgttacataggtatacat

SEQ ID NO: 36758 - DNA, 201 bp, Homo sapiens
cgggcagaggcgcccctcacctcccagacggggcagctggccgggcggggggctgacccccccacctccctcccagacggggcagccggccaggcagaggrgttcctcagttcccagtaggggtggccgggcagaggtgcccctcgcctcccggacagggcggctggccgggcggggggctgacccccccacctccctccc

SEQ ID NO: 36759 - DNA, 201 bp, Homo sapiens
agatcgagaccatccttgctaagatggtgaaaacctgtctctactaaaaattcaaaaaattagctgggcatggtggcgggcgcctgtagtcccagccactygagaggctgaggcaggagaatggcgtgaatctgggaggcagagcttgcagtgagctgagatcacgccactgcactccagcctgggcaacagaacaaggct

SEQ ID NO: 36760 - DNA, 201 bp, Homo sapiens
tcccaaatctttctgctttttagaatgaagtataaaaatacttttctcacctgaataccaagggttggccctttagttggatcattgtcatatgacttggkagatccttgtcctcagcacctcacgtgagagaagggagtcagccagccggccccctgcttggtgctcgtgaccagctcgcaccccttctgtccacccttc

SEQ ID NO: 36761 - DNA, 201 bp, Homo sapiens
aaaggagagttaaatgaaattgcctgtaggaagtaggaggaatacttctgattttgtcataagcattgtaataccattttactttttcaaccatgtgtatstattaatttgattttaaaaatttaaaacaaaaatgtagaaaaattttttgtgactgggaataaatataagatctcaaatcacaagcataaggtgaaaata

SEQ ID NO: 36762 - DNA, 201 bp, Homo sapiens
ttgagttttgctacatgcttgctaacatttggtactttctgttttttgattagtcattttagtaggtatgaagtggtaggtggttcattgtggctttgatytacttccttaataattactgataacgagcagcttttcatgtgcttattggcaatttgtatatcttctttggagaaatgtctgattaaccctttgcccact

SEQ ID NO: 36763 - DNA, 201 bp, Homo sapiens
aaatctgttgtttgtagacatatacatgtgtgatcaagtcatataattggactatccactgacttcagattattacagcaggggagaaagggaagagaatsggttcacagtttggagtaggaaggatacaatttacatcttatttctttaaaaagatcagaagtaaatatggcaaaatgtagacatttatattatctggat

SEQ ID NO: 36764 - DNA, 201 bp, Homo sapiens
tgtatttctatatactgtttttttgttggaagaattagcattatttttatttaagcattgtttaaatgtaggtttcatatagaaaattaagtgcatttcayacagggtaagttgttcacttgatatgtggtgtttttttttctccctggaaatttgataccttttcattggaattctttatgctttttaataagcaagtca

SEQ ID NO: 36765 - DNA, 201 bp, Homo sapiens
ttttcattggaattctttatgctttttaataagcaagtcaaaactaaatccaaacatttaatttccattggttaagttctatagacggtcttcaggagttyttcatgatacctttaacaccagtaccattcctcttcccttgttcctgttgaagtccagctagtactttaaaattgtgctcaaattcatcttaaaataatc

SEQ ID NO: 36766 - DNA, 201 bp, Homo sapiens
aattgaatagaatgatgttttaactggatttattatacttaatatacaaaattttagggatgaatgtatcatgcaaagataatctgcatgggtttgttaayaacatttgtaagagcaaattaaaacacatcccacatctttgcctagaaaaattatagcaatgtatcatgataattttcaaaatgttttcaaataatgaat

SEQ ID NO: 36767 - DNA, 201 bp, Homo sapiens
gagaagaagaacttggaactactctcagaaatcgaacagctgataaaggacactgaagagcttagatctgaaaagggtatgggagtgtgtgtttgcctcaytcaggacttactgttatgttataaatatattttattacagaagaatcaattcattgcataggtgggagaattgttgacataagcaattctggcactcatt

SEQ ID NO: 36768 - DNA, 201 bp, Homo sapiens
aaattaaaacacatcccacatctttgcctagaaaaattatagcaatgtatcatgataattttcaaaatgttttcaaataatgaataaaatccactatgacrgtgtattctgtaatagataaatttaacactgcagatttgtgcattgcttaaaaatctacattttggtataaatatagaaataattatataattttgtagg

SEQ ID NO: 36769 - DNA, 201 bp, Homo sapiens
ggactcacccttcaggcagtgggcccccctctggcccagagccggtccagaaatggtgtccaagaggctggacttggggatctgaaaagcctgccttttgytctgtcccactgtgatacctgaaagcaagacaaagttccctttacttttccctctgcttttctcagacagaaggagtctttcacagtggccaccacaact

SEQ ID NO: 36770 - DNA, 201 bp, Homo sapiens
acagaaattattagaaaagtaatttttttaagaaaagtattgtttagggccgggcacggtggctcatgcctgtaatcccagcactttgggaggccaaggcrggcggatcatgaggtcaggagatcgagaccatcctggctaacacggtgaaacccggtctctactaaaaatacaaaaaactagccgggtgtggtggtgggc

SEQ ID NO: 36771 - DNA, 201 bp, Homo sapiens
tgtctggggtgagagtgggggaaaaaagtgactctgagggttagggcaatgacctactcacaccccacctggttttgtgtaaaaccagagcagccaatcamgagaaagcgttctaatgattgattaaaaggactgcctttttctttctttaaaccacagcaataaagggttttgctaggctaactttctcagtttggcttg

SEQ ID NO: 36772 - DNA, 201 bp, Homo sapiens
ctctcagacttaggacacacaaaccacattccagttttcccttagaaaacttctcctgttccagcagttatggtcgtggttcctggggaagcaaatgctggctgctgttgttctcctctcccttccccccgcatgctgctgcttgacttgtttggcttgttgttcaagaggaagaggagactgtgagagccctggctgggg

SEQ ID NO: 36773 - DNA, 201 bp, Homo sapiens
gtgcgtgaagactttccaagggatatgcggatgcatatagttttaagggaatcaattttcaggtctttagctttcctaattagtcttctaaaatccatctrtttgagaacagtctgaactctgtggattttctttccactcccatttcacaatgaaccatctcccatttttataaaataaaggcatatttctcacccatct

SEQ ID NO: 36774 - DNA, 201 bp, Homo sapiens
gttagtaagtagcatagcctagattaaaatctaagtcaggcttgtctccagatttatgttctttgcacaacatcatgttttccatagaagactttaatggmggggctttgaaggatgagaagactctgtaggcagataggaagacattcaagataggtgaatggtaggagaaaagcacataagaaggtaaatagtagtttt

SEQ ID NO: 36775 - DNA, 201 bp, Homo sapiens
tctcagacttaggacacacaaaccacattccagttttcccttagaaaacttctcctgttccagcagttatggtcgtggttcctggggaagcaaatgctggctgctgttgttctcctctcccttccccccgcatgctgctgcttgacttgtttggcttgttgttcaagaggaagaggagactgtgagagccctggctggggc

SEQ ID NO: 36776 - DNA, 201 bp, Homo sapiens
tttttgagtcctcttttataagtaacattgtgctaaactatgtggaattgtaagtaagtgggtatagcatatagttgtggcttttgaaaaggtttcagttrtttggaggcacaaaacctaagatagaaataaaacttaaaataccacaagttaaatcatttaaggccaaagtataagagatgatggagtgagtccagactg

SEQ ID NO: 36777 - DNA, 201 bp, Homo sapiens
ctcagacttaggacacacaaaccacattccagttttcccttagaaaacttctcctgttccagcagttatggtcgtggttcctggggaagcaaatgctggctgctgttgttctcctctcccttccccccgcatgctgctgcttgacttgtttggcttgttgttcaagaggaagaggagactgtgagagccctggctggggct

SEQ ID NO: 36778 - DNA, 201 bp, Homo sapiens
caggtcagaaaagaaccaccaccacgagctagaagatacgggtcgtcattctccagaatacagaagagggtacacgcgccaaagcacttcccatgagcatytttattaaattgaaacaagttgttgattcgataattacaagacttgtacaaaaattcacagcgcctgtgaggagcctttggctggaactggtgacacctg

SEQ ID NO: 36779 - DNA, 201 bp, Homo sapiens
gatacagttgtctatttttttcttattttcacacagcccagcatgttttgggagtccctggcagacagttttgtttacttctagatattaaaactgacatyggataagactatcactgggttgctaggtgtatatgattaaacatcatctacccccaagatcagaagaggaaaaatagcgacagattcttaccttttataa

SEQ ID NO: 36780 - DNA, 201 bp, Homo sapiens
taaataaaagtaatgtctccaaatataaagccttcagttaaatatatcttttggaattacaaagaattaaaccacttaatttataatataaattatattaytttaatatgtgaagtaagaaaatgatagttaaatatctcaactttaattttctggtatggtcagacctttacagatatttccatgctattttaactttag

SEQ ID NO: 36781 - DNA, 201 bp, Homo sapiens
tattttatttactatggctttaatcctgtactaaaaatttttatgttaatgttatatgacttaacaaaatctttatttttaatttttgtgggtacataatmggtacacgttatataacttttcactgaaacagtgaatactatttcaatacaataagctgtgatcactgtttgataactgataattgtaaaaccatcctag

SEQ ID NO: 36782 - DNA, 201 bp, Homo sapiens
ggggctggcctgggttcttcccctgctgtttactctgcagggcgatggcttcagatctgagtgctgcagaggagtttgctagacaacagcaaatacccttaagaagagggccacaagagtttcagccagggatctgacagtggtgctgggcgccgctgctagccaggcagcctcacggacgccacccaggcctctccatcc

SEQ ID NO: 36783 - DNA, 201 bp, Homo sapiens
cccacaggcctgggcctcgcaggcttaaggagcacttgttggcactgttagctcagcacctctcccagctccagcccatcggctggagaggaaaagggcasaaaacacaaatctcactctagaaacacatacacacacctactacacagatgataaaatcccacaatcgtatctgttcatgtttctgggttttgcactgaa

SEQ ID NO: 36784 - DNA, 201 bp, Homo sapiens
tccatctttatgctttttaacaaaatggtgggtttttttccctgtgttaattgaaatactattttggcagtcatatctttttttcaattatctgtaaactyagatttgtgcatctatgcactatgcatctgtaaagtgaatagatgcactttaatttcagctgaaagtttgaatcctagcattactgtttttgatttgctg

SEQ ID NO: 36785 - DNA, 201 bp, Homo sapiens
gggctggcctgggttcttcccctgctgtttactctgcagggcgatggcttcagatctgagtgctgcagaggagtttgctagacaacagcaaatacccttaagaagagggccacaagagtttcagccagggatctgacagtggtgctgggcgccgctgctagccaggcagcctcacggacgccacccaggcctctccatcct

SEQ ID NO: 36786 - DNA, 201 bp, Homo sapiens
gtagaaataatgagtggctagtagatttgaaatgctttaagcattaaagatgtcagttcttcccaaattgatctacagacttagtctttattctttatttytttttcatgttctttcatgaggtggcaaatctataggtttattgcagtctctcaaaatcctagcaagattcctttagatagagacaagcttattttaaat

SEQ ID NO: 36787 - DNA, 201 bp, Homo sapiens
ggctggcctgggttcttcccctgctgtttactctgcagggcgatggcttcagatctgagtgctgcagaggagtttgctagacaacagcaaatacccttaagaagagggccacaagagtttcagccagggatctgacagtggtgctgggcgccgctgctagccaggcagcctcacggacgccacccaggcctctccatcctg

SEQ ID NO: 36788 - DNA, 201 bp, Homo sapiens
cagtgttctacctaacctcaggagtgctgtatcaccacttcttcagtatgctgttgatcacacagaccagccctggtactgtgtgggaagggactacataygagtgaatactagaagggacgatcatcttggagcctggctacagacatagagcatgctttcaaggagctttcaattgacaagaagatgttgaaatgtaca

SEQ ID NO: 36789 - DNA, 201 bp, Homo sapiens
atagtgtgacttgctttattttgatatttgttttattatgtggtctcaaattgaacctgcactttttccaaggtatgcctgtattctgtttcttagaggawctccacatatttgtataagattggctccaccttattctcactgtgtgtgactatgctggtcataaatgtgttcatacccactatgtgtctataagacaaa

SEQ ID NO: 36790 - DNA, 201 bp, Homo sapiens
tgaattagaaaaaaaacgacatggacacacgtggagtagttttaaggagcagggagtttaataggcaagagagaagggggaggaaagaaagaaaaagctcscctctacagagacagagggaggggggctccaaagccaagagacagaaccccactttcaggtagtatcaaccagctatactggaaggctggaggaggcagt

SEQ ID NO: 36791 - DNA, 201 bp, Homo sapiens
ggatggctctggttcagggtttctcatcagattgcagttgagctgtctgctggggccacagtcacctcaagactcagctgtgactagggaatcagtttccyggctcacccatgtggttgtggacacgtctgagttcctcaccgactgttggttggaggcttcccgtttttgccaatgtgggcctctccatacccagtgcct

SEQ ID NO: 36792 - DNA, 201 bp, Homo sapiens
ttagatttcaaaacaacatgttttatcattgtgatacggctctgatgagtggaggaacaccagattcttcctcttaagttgaattagaaaaaaaacgacayggacacacgtggagtagttttaaggagcagggagtttaataggcaagagagaagggggaggaaagaaagaaaaagctcgcctctacagagacagagggag

SEQ ID NO: 36793 - DNA, 201 bp, Homo sapiens
ccaagcttattgccagtattgtataactgacactatatatatatttgttgagtatctgcagacaaaaataaaatttttttaaataaaaaattcatacctcrtttaatatttttgtatgagaaaatagaatttttttgtctcctaaatgaaaaatttattataatctataatgtacttctgagactctcgttcttatgttgc

SEQ ID NO: 36794 - DNA, 201 bp, Homo sapiens
ctaagatcagagcagaactgaaggagatagagacacgaaaaacccttcaaaaaatcagtgattccaggagctggttttttgaaaagattaacaaaataggmcgctagccagactaataagaaaagagagaagaatcaaatagacataataaaaaaatgataaaggggagatcaccactgatcccacagaaatagaaactac

SEQ ID NO: 36795 - DNA, 201 bp, Homo sapiens
tgctttcccgggagcatggtacttgcttggagatcagagagagtgtcgatcgagtgtgccagcgtaagtgcagtccccaagtgtaccaggtgcaacttagygaaaccttttttcacctccatgcaaatgaactttaagagaaagtaactgcactaaatccaatttcacatttaaaagtcattgagtcagaaaacttacttg

SEQ ID NO: 36796 - DNA, 201 bp, Homo sapiens
aactccaggaacgagaagacgatgggtgagacaggtagccagtaaaatgccttcaaacaattgcccctgggtttgaggggccagtgactgaagtcccataytcatgtctctctgggcctactaaattttgcatgcctcacatagctcagactgctttgagctctttttcttttctcaatgtattgggcaaaaggaattgca

SEQ ID NO: 36797 - DNA, 201 bp, Homo sapiens
ccatattcatgtgtagaatttgtccagcatagggtaaagtcctcacatgtcccttcccagtttgtaacctaccactatgaaataaacatcatcctaagttstttcaccattaatgaatttttaccggtttttgatcttcatataaatggtatcatacagtatattctcttttgtgtatggcatctttcacttgttttttga

SEQ ID NO: 36798 - DNA, 201 bp, Homo sapiens
ccttgtaattttttgttgaaagacagatatgatgttgttaaccttaaataacaagattagaaaataagtatagactttgagcccaaagcttgaggatggcyaccagagagcatagattctatttgccttgaatatacattctgattagcagtgttacaagtgggtttttaaggaaaaaagaaaaggcagttcctaagttgt

SEQ ID NO: 36799 - DNA, 201 bp, Homo sapiens
aataatgtatgagttctactgtcttcaactcctcaccagaacttatcgtccgcgtttttcacttgtagccattctggtagaagtatagtgatgttctgccrtgattttaatttgcatttccctgatgaataatgaggttgaatatcttttcatgtatttactatccatttggatatctagtcttgtgaagttttggttcga

SEQ ID NO: 36800 - DNA, 201 bp, Homo sapiens
tttaacatattaataatagtttttaaaattcctggtctgataattgcaacattgttgccatatctgactctcattctgatgtctgtccagtctctgtcccrtttttagtatgccttgtaattttttgttgaaagacagatatgatgttgttaaccttaaataacaagattagaaaataagtatagactttgagcccaaagc

SEQ ID NO: 36801 - DNA, 201 bp, Homo sapiens
atattccattgtatggctataccacattctgtttatctgttcatttgttgatggatacttgcgttgtttccaccttttggttattatgaataatgctgcartgaacattggcatacaagtatctgtttgagtccctatttttaactcttttgcatatatgcttaggagtgatatttctgggtcatatagtaattctatgtt

SEQ ID NO: 36802 - DNA, 201 bp, Homo sapiens
tagcatttctgattctttcttagactttccatcttatttatctgttcttgagtgttgcctactttaaccataaaatctttaacatattaataatagttttwaaaattcctggtctgataattgcaacattgttgccatatctgactctcattctgatgtctgtccagtctctgtcccatttttagtatgccttgtaatttt

SEQ ID NO: 36803 - DNA, 201 bp, Homo sapiens
tgaagatatggctagattttacttggctgagatggtgatagcaattgactcagttcatcagctacattatgtacacaggtaaaacagtccttcattgtacytggctgtgagttaccatgtaatatctagcaacagaggcctatttcttgccagatttattaattatggtcttggatacatttatcgtcaacaaaaaaaaat

SEQ ID NO: 36804 - DNA, 201 bp, Homo sapiens
cccatatgtatgatgccttcattaagtcctcattactaacaagttgaattttatagtcctaaatagcacccgtgagctaagaaccatttagttggtatcarctaacccagtttcgtagtactgttttttcttttgagacagagtctcattctgtcacccaggctggagtgcagcgatgcaatcttggctcactgcagcctc

SEQ ID NO: 36805 - DNA, 201 bp, Homo sapiens
ataaggtgtttttttcctctggcttctttcagggtttttttctttatttttttatattctgtagtttgaaaatggtgtgcctaggtatagttttttttttktggggggggcgggtgggggggtgccatttatccttcttgatattttttgaatttcctggctctgtggtttgatgtaggaaaattttggggaattatcaga

SEQ ID NO: 36806 - DNA, 201 bp, Homo sapiens
taaaattcatctaataattttatttcatctagaataatgatttgcaaacaaaaacctagcttttacatggaaataagttataaaatgtctcaagtttttcyatattgttcctatcttgtgatgaaatcttcataaaggagtttgtggcccctgctcttgcaagagaggtggcatatggttatgaattatgagctattaagg

SEQ ID NO: 36807 - DNA, 201 bp, Homo sapiens
tactgttttccaaatgatatagtacttctgtaatactgtttttgtatcataagttcaattaacagaaataaatatatcactaaaagatttgagtttatacktgttctcaatacaaaatattaaattaccttctactttgttttcaaaatacttctagctagaggataaagaaaattgatagaaactggattttggccaggc

SEQ ID NO: 36808 - DNA, 201 bp, Homo sapiens
agttattctgattaggaatagctgaactccagtaatggtatcatttaatgaatgcttattttattggtgagtgctaagcaaactaacataatcatgaaacyagcataaagggtgtctgttttctaatatcatgaatattgattaaattgttctaggtcacagcttcccagctctcagcatctaataacaaatgttcaatcc

SEQ ID NO: 36809 - DNA, 201 bp, Homo sapiens
ggtatatattattcagaattgacatttcttccagggtattttcttttatattatattaatgaattttaaaaaaatcttacaatgattttggcatgaggatrtatttaattgatattactgtagctaccttaagtttcttttctttatcatatgcctgatatatccctttccatccatttacttttaactttcctgcgtcct

SEQ ID NO: 36810 - DNA, 201 bp, Homo sapiens
atttgcaaatacttttcccattctatgggttgtcttttctctctctccatatgaattttaggatgagtttttctatttctgtaatgccattgtaattttgrtagggattgctttgaatctgtggattgctttgggtaacattgtcatattaacaatattaagtcttcttccaatctagaatactggatgtcttttcattta

SEQ ID NO: 36811 - DNA, 201 bp, Homo sapiens
ctcactttcagcttgcatctcctttcactgaaaggattgaggcaaaccgcagacaacttccacaagctccagttaccatatttaccgcctacttattgttrgacccaaattctctgttcttttcatggatgaactgtgcaagcctctagtaaggccagtatcttccatcccttcctggctagtctagtgcatgttttgctt

SEQ ID NO: 36812 - DNA, 201 bp, Homo sapiens
gctttgaatctgtggattgctttgggtaacattgtcatattaacaatattaagtcttcttccaatctagaatactggatgtcttttcatttatttaagtcktctttaatttttatcagcaatattctgtagtttccaatgtacaagtctttcacctcattggttaaatttatctttaagtactttattcttttggatgctg

SEQ ID NO: 36813 - DNA, 201 bp, Homo sapiens
acccccactcccgcccctagtgagcactaatgggaattggaatgtgtggcttctcctcactttgtttacactttagagtacagaaagaaccagggtggtcyttgtataagttcagcttagttcacatcatactttgccccaaacatttttcttatgactactataaatttagatttaaatgaaaataataggtaagtctga

SEQ ID NO: 36814 - DNA, 201 bp, Homo sapiens
tcattaattcagctaatgtttattgagtagctatagattcccaattactaggtgtgtactagtgaacaaataggaaaaaaaaatccctgccctcattagcktatattgtagtgaatgaagcaaacaatgaacaaagtacttaaatagaatacatagttcatgaaataatgacaactaatggtaaagggaagcaaagaaatg

SEQ ID NO: 36815 - DNA, 201 bp, Homo sapiens
ttcctcttttgtgggctagcctgtggcctatggcaagtccaatggcctggaagtggtcttacagattatctggttaaactgaagcagagagatagaaatgwaatcaatttgttgagagtgagaaagggattttatttattgtatttgatagtttttgatctgcaattgaaatataaaatacagaaatagatgttccttttt

SEQ ID NO: 36816 - DNA, 201 bp, Homo sapiens
gcccattctgatatttttacagtattagaaatgggaagagacacatatggtgataattactatattctacgtagtagtggtttctaaatgctgatctatargctgatgctggttctaataaagttcttactgatccaaggtgaaataaggaaaacataatgataatatgaatttctttcaatgtagggactatcctgtatt

SEQ ID NO: 36817 - DNA, 201 bp, Homo sapiens
tgttcagtttcttagtgatagtagatattgagtttgaattccagggcagaaaagttggaaagggggattaatgtgtaattaccaactaatacagtgttcaraaataccaactaatacagcgttcacaaataccaactaatacagcattcacaaatacagttattagtttggcacatgttcactaactttttcatctggcaa

SEQ ID NO: 36818 - DNA, 201 bp, Homo sapiens
tttctttttattttagtcattggttctagttttgcttttagagtcacatataatttatttctcttctagttatcatgctttctgaagtcttctttaggttraacatctaaacatctctagtttctctgttataacaatttgtatacacttcctaccttccttgtcttaaccccccaccacacactctgcccattcctacac

SEQ ID NO: 36819 - DNA, 201 bp, Homo sapiens
tattttagtcattggttctagttttgcttttagagtcacatataatttatttctcttctagttatcatgctttctgaagtcttctttaggttgaacatctraacatctctagtttctctgttataacaatttgtatacacttcctaccttccttgtcttaaccccccaccacacactctgcccattcctacacctcttctc

SEQ ID NO: 36820 - DNA, 201 bp, Homo sapiens
tcctgagtagctgggattacagtcatgcgccatgaagcctggctaattttttgtgcttttagtagaggtgggttttctccatgttggtcgggttggtctcraactccctacctcaggtgatcttcccgcctcagcctctgaaagtgctgggattacaggcatgagccaccgtgcccggccttgaatttctttttattttag

SEQ ID NO: 36821 - DNA, 201 bp, Homo sapiens
aagctggagtgccgtggtgcgatcttggctcactgcaacctccgcctcctgggttcaagcgattcttctgcctcagcctcctgagtagctgggattacagkcatgcgccatgaagcctggctaattttttgtgcttttagtagaggtgggttttctccatgttggtcgggttggtctcgaactccctacctcaggtgatct

SEQ ID NO: 36822 - DNA, 201 bp, Homo sapiens
ttttgctcttgttgcccaagctggagtgccgtggtgcgatcttggctcactgcaacctccgcctcctgggttcaagcgattcttctgcctcagcctcctgrgtagctgggattacagtcatgcgccatgaagcctggctaattttttgtgcttttagtagaggtgggttttctccatgttggtcgggttggtctcgaactc

SEQ ID NO: 36823 - DNA, 201 bp, Homo sapiens
cttgattggggcttgagattctccatatctaagttcctaggggatgctcatgtcacttgtctggggatggtacttagagcagagatccccaattctcgggygacaaactggtaccagcagactgggccgcacagcaggaggtgaatggcaggtgagtgagcattagcgcctgagctccacctcctgtcagatcagcggtgg

SEQ ID NO: 36824 - DNA, 201 bp, Homo sapiens
gcagaagtgctgattcagtgggttgggtcgggctggggaattgccatctctaacaagttgccaggtggtgatgctgctgctggtgtagtgaccacactctsagaactatgctctaagacagcagtgactgtttcttttaagttttgggtggtgagagtgatctctgagaagaacatgaatgtggcaaggagtagaatgttt

SEQ ID NO: 36825 - DNA, 201 bp, Homo sapiens
gacctgcctgatgagtagccccaactttaatttggctctgaagaaaaaaatatatataccttcaaagaaaaaatatatacctccaaagaaaaatacatacytctgaataatatatacctctgaagaaaaaaaatatacctccaaagaaaaaataccttcaatctgtcattcctccagatacttcttgagcaaagtctttgt

SEQ ID NO: 36826 - DNA, 201 bp, Homo sapiens
ttttctctaaaataaaggatgtaacatattttacttacatattttgtgaatgaaggaatgtatttatggacaaataatcaggaacttttgtaactaatcaragttttacaatcacaaaactttactgtcatacttttagaggcccagtagagaaaaaggctgtgtagacatcaatagaatggactattttctgtttttccg

SEQ ID NO: 36827 - DNA, 201 bp, Homo sapiens
gagcttgcagtgagccgagatcccgccactgcactccagcctgggtgacagagcgagactctgtctacaaaaaaaaaaaaaaaaaaaaaagttctcacttmcagtcagcatttctagaaatcacttcttaaaaaaccactcttgtttaaatgtacatatgaattccatctcaaaaggagtatgcattggtcagtttcctta

SEQ ID NO: 36828 - DNA, 201 bp, Homo sapiens
ctgaggcaggataatggcgtgaacgtgggaggcggagcttgcagtgagccgagatcccgccactgcactccagcctgggtgacagagcgagactctgtctmcaaaaaaaaaaaaaaaaaaaaaagttctcacttacagtcagcatttctagaaatcacttcttaaaaaaccactcttgtttaaatgtacatatgaattcca

SEQ ID NO: 36829 - DNA, 201 bp, Homo sapiens
ctccacctcctgtcagatcagcggtggcattagattctcatgggaccgtgaaccctattgtgaactgctcatgcgagggatctaggttgcatgcctcttaygagaatctgactaatgcctgatgatctgaggtagaacagtttcatcccgaaaccatctcccggactcctgggctgtggaaaaattgtcttccacaaaact

SEQ ID NO: 36830 - DNA, 201 bp, Homo sapiens
actaaaaatacaaaaaaaattagccgggcgtggtggcgggcacctgtagtcccagctactcggagaggctgaggcaggataatggcgtgaacgtgggaggyggagcttgcagtgagccgagatcccgccactgcactccagcctgggtgacagagcgagactctgtctacaaaaaaaaaaaaaaaaaaaaaagttctcact

SEQ ID NO: 36831 - DNA, 201 bp, Homo sapiens
cgtctctactaaaaatacaaaaaaaattagccgggcgtggtggcgggcacctgtagtcccagctactcggagaggctgaggcaggataatggcgtgaacgygggaggcggagcttgcagtgagccgagatcccgccactgcactccagcctgggtgacagagcgagactctgtctacaaaaaaaaaaaaaaaaaaaaaagt

SEQ ID NO: 36832 - DNA, 201 bp, Homo sapiens
ccgtctctactaaaaatacaaaaaaaattagccgggcgtggtggcgggcacctgtagtcccagctactcggagaggctgaggcaggataatggcgtgaacstgggaggcggagcttgcagtgagccgagatcccgccactgcactccagcctgggtgacagagcgagactctgtctacaaaaaaaaaaaaaaaaaaaaaag

SEQ ID NO: 36833 - DNA, 201 bp, Homo sapiens
tcttgctgttttgcccaggcaggagtgcagtggtatgatcatgactcattgcagcctcgaatacctgggctcaagttatcctcctgccttagcctcctgtstagctaaggactacaggcatatgccaccacgttcagctaatttttttctctttctcttctctgttgtgtcaattccagatagaaatcctctctctctttc

SEQ ID NO: 36834 - DNA, 201 bp, Homo sapiens
agtaatcccacagttcttggatattctgttctgttttttttttttccagtcttctctttgcttttttcattttgaagtttctattatattctcaagctcaragattcttttctaagtggtgtctagtctactaatgagctcatcaaaaatattatttatttctgttagtgtttttgatctctagcatttctgattctttct

SEQ ID NO: 36835 - DNA, 201 bp, Homo sapiens
cccaggcaggagtgcagtggtatgatcatgactcattgcagcctcgaatacctgggctcaagttatcctcctgccttagcctcctgtgtagctaaggactrcaggcatatgccaccacgttcagctaatttttttctctttctcttctctgttgtgtcaattccagatagaaatcctctctctctttcctttccttacaaa

SEQ ID NO: 36836 - DNA, 201 bp, Homo sapiens
agcactttgggaggccaaggcgggcggatcatgaggtcaggagatcgagaccatcctggctaacacggtgaaacccggtctctactaaaaatacaaaaaaytagccgggtgtggtggtgggcgcctgtagtcccaggtactggggaggctgaggcaggaggatggcctgaaccctggaggcggagcttgcagtgagctgag

SEQ ID NO: 36837 - DNA, 201 bp, Homo sapiens
acagagatacagaccaatggaacagaatagagcccctagaaataataccacacatctacaatctgatctttgacaaaccggacaaaaacaagaaatggggraaggattccctatttaataaatggtgctgggaaaaccggctagccatatgtaaaaagctgaaactggatcccttccttacatcttatacaaaaattaatt

SEQ ID NO: 36838 - DNA, 201 bp, Homo sapiens
atagcaaagtgtgcaagcattctacttttaagtataagcctaataaatatttgtatatgtatacactgatgtaaccttcacccatattcatgtgtagaatwtgtccagcatagggtaaagtcctcacatgtcccttcccagtttgtaacctaccactatgaaataaacatcatcctaagttctttcaccattaatgaattt

SEQ ID NO: 36839 - DNA, 201 bp, Homo sapiens
tttttcaaaaaatatatgattgctactcacttctagagattatgactcagttaactcaggatggaagtcagtgtatgtgagtttttaaaatgcttccctgktaattccaatgtgttcttctgattaagaatcatagttccagaccatttaatgttagcttagtccttttataagttttggactctccattaatgaaactgt

SEQ ID NO: 36840 - DNA, 201 bp, Homo sapiens
taccagtgatgcttaataaattacaaatgagcagcaaaattccttattttttatttgtgtattgttgatgctttaaaacaattttttcagaggtttatgtmcaacttatttaccttattctgtttcaagccatatgtcaaatatataattaatgatatacgggttactcaaaggtgctaggaagcctcctctcttttctat

SEQ ID NO: 36841 - DNA, 201 bp, Homo sapiens
aagcatagtgtgttccaaaaaaaatgaattttatctgctctatgcatttgctgtgatttttttgatattatttcttcaaatttacaaacagaaaaacttayaaaataaattatgtgtgaatgcaaataatcaccaataggaaaggtagggagagcgtacagcactttttcatcttcttaaattcaatgttttgaagtctgt

SEQ ID NO: 36842 - DNA, 201 bp, Homo sapiens
acctttttataaaaccttttaaaaacattttatttattgaggcagagtcttgctctgttgtccaggctggagtgcagtgttaggatcttggctcactgcarcctctgcctcctgggctcaagggatcctcccaccttagcctgggagtagctgggactacaggcacatgccaccacactcagctaatttttgtattttctt

SEQ ID NO: 36843 - DNA, 201 bp, Homo sapiens
tagtttggctagagaaaagagttcatgttgagtttagtaggagattaatttgtaaagagattttggttcttatcatggaactcttgaatgtcacagacttwgtatcttggtagctaataaactacaatgaatttcaggcaatgaaatttgaaggtaaacttcatgtcttagagttttatgaaatttatcaaatttccaaat

SEQ ID NO: 36844 - DNA, 201 bp, Homo sapiens
tattcctcccttcccgctaacccctggacatgactgatctttttactgtctcataggtttgccttttccagaatatcatatagttggaatcgtacagtttrtagacttttcagattggcttctctcgcttagcaatatttaaggtttgatagctcatttctttttagtgagtaacattctattgtcggcatgtaccatagt

SEQ ID NO: 36845 - DNA, 201 bp, Homo sapiens
cctgaaatatagttttcctggcaacaaatcccctcagtttttgtttgtctgagaatgtatttctctttcacttttgaaggataattctgcagtatatgaartcataggttggtgaggctttttttttcttttaaatatttcacttcactctcttcttacttgcatgatttttaaggaatcagatataattcttatctttgt

SEQ ID NO: 36846 - DNA, 201 bp, Homo sapiens
atgttttaactggatttattatacttaatatacaaaattttagggatgaatgtatcatgcaaagataatctgcatgggtttgttaacaacatttgtaagarcaaattaaaacacatcccacatctttgcctagaaaaattatagcaatgtatcatgataattttcaaaatgttttcaaataatgaataaaatccactatga

SEQ ID NO: 36847 - DNA, 201 bp, Homo sapiens
agtgatcttaagattgataaaatataccctttatgagacccttgtttgctccttctttagttggtgacttctgttgtactttagatatttcaaagttcacygggggtaaaagaactaagtctcacatagaaaaagaaaacgcagctttgcccgcacttttacttttttgtctttctttcctaaattgcttagttattctaa

SEQ ID NO: 36848 - DNA, 201 bp, Homo sapiens
ataattttcaaaatgttttcaaataatgaataaaatccactatgacggtgtattctgtaatagataaatttaacactgcagatttgtgcattgcttaaaartctacattttggtataaatatagaaataattatataattttgtaggtatattaatagaaataaagtacccaaataccaaattttatatagcaaaaaaagc

SEQ ID NO: 36849 - DNA, 201 bp, Homo sapiens
tgtgtttctactatctttttttctgtttgtcatgatttttgcatgctgctttttatttcctttcttcccttctcaaaagtttttaactgtggtaaaatacrtataacataaaattaccatctaaacaattttcaagtgcacagttaagtaatgttaagtgtatttacattcttgtgcagcagtctccagaactctttttgt

SEQ ID NO: 36850 - DNA, 201 bp, Homo sapiens
gaactgctcatgcgagggatctaggttgcatgcctcttatgagaatctgactaatgcctgatgatctgaggtagaacagtttcatcccgaaaccatctccyggactcctgggctgtggaaaaattgtcttccacaaaactggtccctggtgccaaaaaggttgggtattgctgacttagagtaataatgtgtaaagaacag

SEQ ID NO: 36851 - DNA, 201 bp, Homo sapiens
cactttccagactgggcagccaggcagaggggctcctcacatcccagacgatgggcggccaggcagagacgctcctcacttcccagacggggtggcggccrggcagaggctgcaatctcggctctttgggaggccaaggcaggcggctgggaggtagatgttgtagcgagccgagatcacgccactgcactccagcctggg

SEQ ID NO: 36852 - DNA, 201 bp, Homo sapiens
ccacggtgaaactccgtctctactaaaaatacaaaaaaaattagccgggcgtggtggcgggcacctgtagtcccagctactcggagaggctgaggcaggakaatggcgtgaacgtgggaggcggagcttgcagtgagccgagatcccgccactgcactccagcctgggtgacagagcgagactctgtctacaaaaaaaaaa

SEQ ID NO: 36853 - DNA, 201 bp, Homo sapiens
caagaccatcctgggcaacgtggtgaaaccccgtctctactaaaaatacaaaaattagctgggtgtggtggtgcgtgcctgtaatcccagctacttgggargctgaggcatgagaatcacttgaacccaggaggcaggggttgcagtgaaccaagattgcgccactgcactccagcctggcgacagagcaagactctgtct

SEQ ID NO: 36854 - DNA, 201 bp, Homo sapiens
tcaaaagtaaattgtcaggatagggtcagttcaacgttagggtaccccgacgtggtggctcacgcctgtaatcccagcactttgggacgcccaggtcaggrgatcaagaccatcctgggcaacgtggtgaaaccccgtctctactaaaaatacaaaaattagctgggtgtggtggtgcgtgcctgtaatcccagctacttg

SEQ ID NO: 36855 - DNA, 201 bp, Homo sapiens
tcacactttaatcaaaagtaaattgtcaggatagggtcagttcaacgttagggtaccccgacgtggtggctcacgcctgtaatcccagcactttgggacgyccaggtcaggagatcaagaccatcctgggcaacgtggtgaaaccccgtctctactaaaaatacaaaaattagctgggtgtggtggtgcgtgcctgtaatc

SEQ ID NO: 36856 - DNA, 201 bp, Homo sapiens
gctctaaagattgactgttaatctctttgttatggcagcatgagaattaaaagagtttcctgatattcctacgaagacttctagaattatatctgttcctygaaatgctcattttgggacacataactcatttattgcatgttttcagatgttttagcattgtttccttggactggagctctttaaaaaaaaaaatcccca

SEQ ID NO: 36857 - DNA, 201 bp, Homo sapiens
tcaagttagttacaagcaacattttttttctttctttctttctttcttttcttttttttttttttgtttgctggatcttgctctgttgcccaattagagcwaactgctgtatctgattcctgggctcaagcagccctcccacctcagcctcttgagtaactgggactacaggtgtgtgccactgtgccccactaacttaat

SEQ ID NO: 36858 - DNA, 201 bp, Homo sapiens
ataatgtttttttaaactacagattgtgacccattagtgggtaataaaatcaagttagttacaagcaacattttttttctttctttctttctttcttttcwtttttttttttttgtttgctggatcttgctctgttgcccaattagagctaactgctgtatctgattcctgggctcaagcagccctcccacctcagcctct

SEQ ID NO: 36859 - DNA, 201 bp, Homo sapiens
gaggcccagtagagaaaaaggctgtgtagacatcaatagaatggactattttctgtttttccgtaagttgttaagatctctgcatatgaattacttccctyttgtgactgaaatttttctgtttcttttttttcctgtggtgatacacatatagcaaagtgtgcaagcattctacttttaagtataagcctaataaatatt

SEQ ID NO: 36860 - DNA, 201 bp, Homo sapiens
taccatctttacctaaaataaaattaaaggtttttccaaccccactggaaacaaggaaaaaaaataaaggtttatgcaactctataatgctcatggggttyatctgatttcaggccagatctaggtgttcaaacagtgtcattactagtcttttatatcccttacatgcttatagagtataataatgtttttttaaactac

SEQ ID NO: 36861 - DNA, 201 bp, Homo sapiens
tgtaacctaccactatgaaataaacatcatcctaagttctttcaccattaatgaatttttaccggtttttgatcttcatataaatggtatcatacagtatrttctcttttgtgtatggcatctttcacttgttttttgaaattcacccatgttttgtatatatcagcagtttgctcttttttttttttgtactgctgttta

SEQ ID NO: 36862 - DNA, 201 bp, Homo sapiens
gactcggtctcaaaaaaaaaaaaacacatttaaatatgttacatggactgtaccatctttacctaaaataaaattaaaggtttttccaaccccactggaamcaaggaaaaaaaataaaggtttatgcaactctataatgctcatggggtttatctgatttcaggccagatctaggtgttcaaacagtgtcattactagtct

SEQ ID NO: 36863 - DNA, 201 bp, Homo sapiens
ataaaaaattacccagtctgttgttggtaaatatttgggttatttccagatgttgactactgtgagtaaagttcgtgcaaatatacttatctatttatttyggtggtcctatgtactatttctctcagatatatacctgggagtacaatttctgggccatatagtagaggattttcagctttagaagatattttcaaagag

SEQ ID NO: 36864 - DNA, 201 bp, Homo sapiens
acggtgaaaccccgtctctactaaaaatacaaaaaaattagccgggcatggtggtgggcacctgtagtcccagctactcgggaggctgaggcaggagaatrgcctgaacctgggaggcagagcttgcagtgataatgccactgcactccagcctgggtgacagagcaagactcggtctcaaaaaaaaaaaaacacatttaa

SEQ ID NO: 36865 - DNA, 201 bp, Homo sapiens
tgggccaaaatgtgtcttgagtcccattttcttctactttttcttttcctggtcaaaatttactatcaggaaaggaaataatataacttagcctccttgawtattaaattactttgagtaaattactctgctgtggagatgcctctggtaggacaaaaatagtgctgaatttggacttgagatgggatacaggcctggctc

SEQ ID NO: 36866 - DNA, 201 bp, Homo sapiens
ggtgaaagacatgatagaagtatctcagcaataaaataaaaactataaaagaaacaaatggaaattttaggacggaaaaatacagtattggaaaaaaaaaytaaatgtctttgagaggacaaaggagattacataggaataaagtatattcaaattcaatttggatatagatcaataaaaattatcccatgaaaaacagac

SEQ ID NO: 36867 - DNA, 201 bp, Homo sapiens
agctgccttacaggctacatttttactcttaattatgagaaataacaaaagtaaattaatatttactttagaaattgttgaaatccgggcaaggggcagtrgctcatgcccgtaatcccagcactttgggaggctgaggcgggcggatcacctgaggtcaggagtttgagaccagcctggtcaacatggtgaaaccccatc

SEQ ID NO: 36868 - DNA, 201 bp, Homo sapiens
gcttacatcattctttcttggtggaattaggacagcccagcatacatatatgatagtgcttaccgagtattgccagccagggaagcccacctaagcctttrgtttttatagtttttttagggtggcctcaattacttactgcctgtgtgactgtctttagtctccagcccttcccaaatgttgggctgatagctttagtct

SEQ ID NO: 36869 - DNA, 201 bp, Homo sapiens
tactttcttattaattgtttcctgattagttactttatggttgaggaaaaaaaggaaaatatcttgcactgacatatgtaacttgtttaaaaggtgaaagwtacttgaattttaaattaattgtagtaactcatatgaactctaaattctttataggaatccaatttgtgaagacagaaattattagaaaagtaatttttt

SEQ ID NO: 36870 - DNA, 201 bp, Homo sapiens
gtatgactcaaataaattacatgtatcataaattacattggtagattgtctagtagtcaaagacactcctatcagttgtgctattccaggagcctagcgaycatcttccagtagctgaggataaaagccagacctctctttgggcaagattaggccttcactatacagataattccgtggtctttaggcaagctttcctat

SEQ ID NO: 36871 - DNA, 201 bp, Homo sapiens
ctagtttattaacatgacatacagcttctctgctctttggacccttcagcaccatttcttgctactccctgttgtgctctttatgttcctaggaaaggaarctgcttattgtcctgtgtatcttctcccccacacatatttcctgcctgtgtgccttgcttatgctgtccctacttcccaaactatcccatcctcagtcac

SEQ ID NO: 36872 - DNA, 201 bp, Homo sapiens
ctcaggattaagaaactcactcaaaaccgcacaactacttggaaactgaacaacctgctcttgaatgactactgggtaaataacgaaatgaaggcagaaayaaataagttctttaagaccaatgagaacaaagacacaacataccagaatctcttgagacacagctaaagcaatgtttagagggaaatttatagcactaaa

SEQ ID NO: 36873 - DNA, 201 bp, Homo sapiens
tcttttatatgatgtttttactgtatcttttctatatttagagacacaagtgtttactgttgtgttacagttccctgcagtattcaggacagtaccatacygtacaggtttgtaacctgggagcaataggctataccctatagcctaggtgtgtagtaggctgtaccatctaggtttgtggaagtacaacttatgttcaca

SEQ ID NO: 36874 - DNA, 201 bp, Homo sapiens
aggccaaggcgggaggatcatgaggttaggagattgagaccatcctagctaacacggtgaaaccccgtctctactaaaaatacaaaaaaattagccgggcrtggtggtgggcacctgtagtcccagctactcgggaggctgaggcaggagaatagcctgaacctgggaggcagagcttgcagtgataatgccactgcactc

SEQ ID NO: 36875 - DNA, 201 bp, Homo sapiens
ataaattatagtgcattcaaacaatggtatgccatagcagttaaaagaagaacagtcattcttgagaaaaaaaaaaaatcaaattgcaaaaggataaaatkataccattcacatagattttttttgtttttgttttctttctttctttcgttttttttttgttgttgtttttttttttaaggcaaggtctcactctgtcac

SEQ ID NO: 36876 - DNA, 201 bp, Homo sapiens
atatatttgttgagtatctgcagacaaaaataaaatttttttaaataaaaaattcatacctcatttaatatttttgtatgagaaaatagaatttttttgtytcctaaatgaaaaatttattataatctataatgtacttctgagactctcgttcttatgttgccttgaggttggggatatgtgcctctgtgtactgtttct

SEQ ID NO: 36877 - DNA, 201 bp, Homo sapiens
tattccaacattgtataataataatacaaaactggaaataacctgtgtttccaccgttgggggttgcataaataaattatagtgcattcaaacaatggtaygccatagcagttaaaagaagaacagtcattcttgagaaaaaaaaaaaatcaaattgcaaaaggataaaattataccattcacatagattttttttgtttt

SEQ ID NO: 36878 - DNA, 201 bp, Homo sapiens
tattctacaacctgtaacttaagaatgaacataaaatactgttacagcattctgtaactgcaatttgtaactagtttgtagcttcaaatgataatacattstgtttaagaactgatttgtatacatttgtcacttagtgattatttctgtagtgtttacagaaataattcttgaattattattacaggttttctaacatca

SEQ ID NO: 36879 - DNA, 201 bp, Homo sapiens
agaaaaaagaaccaaagcatagtgttgtatagattttagtaatttaattgttttgtggatcatggctgttgaattttccttgtgggaaataataatcactyattatatatagcatactgtgtgataatgtttttagtgtatctggaatatggtgtagccattaagaaaaaattaggtagatttctgtgtactgatacggaa

SEQ ID NO: 36880 - DNA, 201 bp, Homo sapiens
gagatcgagaccatcctggctaacacagtgaaaccccatctctactaaaaatacaaaaaattagctgggcctggtggcactcacctgtagtcccagctackcaggaggctaaggcaggagaattgctcacacccggaggcagaggttgcagtgagctgagatcacgccactgcactccagcctgggcgacagagcgagaaa

SEQ ID NO: 36881 - DNA, 201 bp, Homo sapiens
ttgaagcaaaaacgtagcctgtgctttatatctagactcaggattcaaggcattgataggaatcatttaatagctagatatttatggataaaatcatatgmtgtctggggtttgcttaaaaatatgtatatgctcctgtgtgtgtggtgctaggggatggtagtaagtaggtgagggtctaaatgaaataagattgaccaa

SEQ ID NO: 36882 - DNA, 201 bp, Homo sapiens
tgtattgttttttcacttctatgtatttaatacatttataatatctcattctttgttaatagcttcattatactgaatggctctctgtgtgtgtgtgtgtrtatatatatatatatatatattttttttttttttttgagacagagtctcactctgttgcctaggctggagtgcagtggctagatcttggctcactgcagc

SEQ ID NO: 36883 - DNA, 201 bp, Homo sapiens
tgaccattcagaggagtcagtagcacagctcacagataaagtattttattactatctgaagttttcttttgttttcatgcaggacattttaaaaacgtatrtggcagcagaaacttgtttctcaatagaaaaaatacattcagaggcatttctgggatagtctatctgtgttagtatttggtgctatctatgtccagccaa

SEQ ID NO: 36884 - DNA, 201 bp, Homo sapiens
gtgctgggtcagacctgaagccagcacagcactgggccttgcccaaggcccttcccttcagggtggtgagtttccccaggccccgggtgtgtccagagatsctgtctggtagcctgcgattctagttaaaaaccttagcaatctacctgatgttttatttttactacgtctgtgctggcattcaaaccacaatacaaaaag

SEQ ID NO: 36885 - DNA, 201 bp, Homo sapiens
gtaagggtttcttatttatcctcaacagaaaattttattataatgaaatcatattacaaggctgatttttcatattgctttttcactaaaatatgtattgktttttcacttctatgtatttaatacatttataatatctcattctttgttaatagcttcattatactgaatggctctctgtgtgtgtgtgtgtgtatatat

SEQ ID NO: 36886 - DNA, 201 bp, Homo sapiens
cctgttacctccagaagcttctgagaagaatgatgtgaaaagacagggagtgggttctaggcaaagaaaacataatgaccattcagaggagtcagtagcamagctcacagataaagtattttattactatctgaagttttcttttgttttcatgcaggacattttaaaaacgtatatggcagcagaaacttgtttctcaat

SEQ ID NO: 36887 - DNA, 201 bp, Homo sapiens
agtaagggtttcttatttatcctcaacagaaaattttattataatgaaatcatattacaaggctgatttttcatattgctttttcactaaaatatgtattkttttttcacttctatgtatttaatacatttataatatctcattctttgttaatagcttcattatactgaatggctctctgtgtgtgtgtgtgtgtatata

SEQ ID NO: 36888 - DNA, 201 bp, Homo sapiens
tgtaggaaggcgtgtagtgaggcttacaaattttgaacttgggaatgtctgtctgcctccgtcacatgggagctgagagccatattgaaatggtgctcacrtggtggatagaatagggtcttcaggctacgtgggagtcatagaggctacctgagagagaacaggcttttcttggttcagaaattctaggtttgagaagga

SEQ ID NO: 36889 - DNA, 201 bp, Homo sapiens
ctgcacattgtgcacatgtaccctaaaacttaaagtataataataataaaataaaataataaaaaagataagtagtccccatgcatatagatgcaaatatycttaacaaaatattagcaaatacaatttagcaatatgttaaaagaattatataccatgcccaagtgtgatttattgttgggatgcaagactgattccata

SEQ ID NO: 36890 - DNA, 201 bp, Homo sapiens
acttaaaagttcagggtgccttaattagaaataggattggctacatcttttagaaaattcaaattaataatggtccaaatgtatgaggagggctagtgacwgaatgaggtccttctgggctacggccctcacagaagcaactaaaaatctgagcatagcacaaagaccattatcctaaaggcactaaagagtgaacagaag

SEQ ID NO: 36891 - DNA, 201 bp, Homo sapiens
acagtttgcagtttaaatgtgtttaatcagctgattaaaaaaagaaagaaaaaaatgctaactggagaaaaattaaagaatccagagtttcagaaatttarcatttattatgttcagggaacattcagaattacccaatgtataaagaaaaaggagtatgtaactcctttacaagagaaaagagtatccctgaaatgaccc

SEQ ID NO: 36892 - DNA, 201 bp, Homo sapiens
ttccttggctctgcattatttatcatatgtatgttctccatctttgaaaattgtgttgacacccatcatcttccattgtcttttcttacattcacttgtgrgtttctaccttttagttcttgtattgtcattttactgtagttctggagggagcagagataaacatgtttactcccataaatatttttggggtgatgaggg

SEQ ID NO: 36893 - DNA, 201 bp, Homo sapiens
ttttaagataaagaataaaatattttttcctcatctaaaaatggtcttagtaattgctaagcttccttccagaactaaactgtacttctttgatgtttccyctacagcagatctttttcaacaggttagaatacagtcaaatgttgaggattataaagctaataccctatacagattgttgttttcaatcaccctgtctct

SEQ ID NO: 36894 - DNA, 201 bp, Homo sapiens
caaatacaaaagctggtatatgatatagtttagatttgggtatcttacacaccattgacttaacatccaaagacaatgaaagctttaaataatatagacartctattaggcagttgttttagttcttctgtaaaatcaactttatgaagcaatttctttgtgttgtcatgacctgcagtaattgagactttatctatctgc

SEQ ID NO: 36895 - DNA, 201 bp, Homo sapiens
actgacaatagccccgagattccccagggtgttctgggtcttcccttttcttcctgtgaatgctgctggtccactgttacctaccccaactctgagaacamaatagagagtgagtttgaagaaaacctcacttttattttacatctcaggctctttgccctgtgaagtaaaagtacttttatgttttctttatggttttat

SEQ ID NO: 36896 - DNA, 201 bp, Homo sapiens
agcttcagcagtgtggtacagcctcccgggggctggggcagtgacaccgcaacctctcctcctgttctccacccctcccacctcccttcttacagggaacrgggctgagccttccaggttcagggccaagggcctcacgctgaaccagtcccaacccttgcaaatgggctgtgacactgaacctgctgaccgtcaggtcag

SEQ ID NO: 36897 - DNA, 201 bp, Homo sapiens
aataataaagagtagagcacagctaaataaaataaagactagaaaataatagaatcaataaaacaaaaagttagttggttagaagtcaacaaaattgacarcctttaattagactgaccccttcccaataaaaagagctaaagagagagagatgttgcaaataactaaaatcagaagtataagggaaaattttattactga

SEQ ID NO: 36898 - DNA, 201 bp, Homo sapiens
atttgcagactgtcatctgaagacacctaccatagtgtttctccaggatgctaatgtgccctctcactggtgtatttattaatgccttggtgaaaggagtsctttgtgggtggctgaccaggttgcacataataggtccactctgacattctcatctctttgagccagtagaccctttatgctcagtaagtcaaatatctc

SEQ ID NO: 36899 - DNA, 201 bp, Homo sapiens
aaagcagtgacctgttgcttcctagtccatccccttatgactaagaatttcctatgttttgggttttttttaaatgttttgaattctttaatttgttcttrgtatttttacatgtgtagtatcgtttgcacagagcaaagtgaacaaaaatgtaagatcattgccttttggtatgaatacttgtttcatagcagtgacata

SEQ ID NO: 36900 - DNA, 201 bp, Homo sapiens
ggtgaaattattgttaggcaatattttggtaggtgccttttatctgattgaagatattgtcttctgttactataatagtttgctgagcatttaaaaaatawagttattgataggtgctgaattctgtcatatgctttttctgtatctattgaaatcattatatggattttttctttcagttagttgacatagtggattact

SEQ ID NO: 36901 - DNA, 201 bp, Homo sapiens
ttcatgttcccatttgcttaacttttgctaaccctaaacccgtcagttggttttttttgtttacttaatagctgggcatggtggtgcgtgcctgtagtccyagctactgaggagtctgaggtgggaggatctcctgagcatgggaggcagaggttgcagtgagccaagattgcaccactgcactccagcctgggcaacagt

SEQ ID NO: 36902 - DNA, 201 bp, Homo sapiens
ggttaacactattacagctttatatgttactggaggtcctagatagtccattaagaaaagaaatagaggccgggcgtggtggctcatgcctgtaatcctakcactttgggaggccaaggtgggcggatcacaaggtcaggagattgagaccatcctggccaacgtggtgaaattctgtaacatctctactaaaataaaaat

SEQ ID NO: 36903 - DNA, 201 bp, Homo sapiens
ttatatgttactggaggtcctagatagtccattaagaaaagaaatagaggccgggcgtggtggctcatgcctgtaatcctagcactttgggaggccaaggkgggcggatcacaaggtcaggagattgagaccatcctggccaacgtggtgaaattctgtaacatctctactaaaataaaaataaaaataaaaaaatagcgg

SEQ ID NO: 36904 - DNA, 201 bp, Homo sapiens
cacccttaaatatgaagcctgttacctccagaagcttctgagaagaatgatgtgaaaagacagggagtgggttctaggcaaagaaaacataatgaccattyagaggagtcagtagcacagctcacagataaagtattttattactatctgaagttttcttttgttttcatgcaggacattttaaaaacgtatatggcagca

SEQ ID NO: 36905 - DNA, 201 bp, Homo sapiens
gtttttttttgagacagagtctcgatctatcacccaggctgggtgtagtggcatgatctcagctcactgcaacctctgcctcccaggttcaagcgtttctyctgcctcagcctcccgagtagctggtattacaggcatgcaccaccatgcgtggctaatttttgtatttttagtagagacggggtttcaccatgttggcca

SEQ ID NO: 36906 - DNA, 201 bp, Homo sapiens
tggcacatgtatacatgtgtaacaaacctgcacattgtgcacatgtaccctaaaacttaaagtataataataataaaataaaataataaaaaagataagtwgtccccatgcatatagatgcaaatatccttaacaaaatattagcaaatacaatttagcaatatgttaaaagaattatataccatgcccaagtgtgattta

SEQ ID NO: 36907 - DNA, 201 bp, Homo sapiens
tcttttttatttaacttagaattatttcacttttgaatctcttaatttcagcatctgtatttatttcaaaccttttgggaataaagaggcaacttgttatrttggaaaggcttttggagcctgatagatctgagttttaatcctgtctttgccacttactaggtatttaatattcaggaatttatattatctttctaaacc

SEQ ID NO: 36908 - DNA, 201 bp, Homo sapiens
ggagggatagcattaggagatatacctaatgctaaatgacgagttaatgggtgcagcacaccaacatggcacatgtatacatgtgtaacaaacctgcacawtgtgcacatgtaccctaaaacttaaagtataataataataaaataaaataataaaaaagataagtagtccccatgcatatagatgcaaatatccttaaca

SEQ ID NO: 36909 - DNA, 201 bp, Homo sapiens
gtgactgaatgaggtccttctgggctacggccctcacagaagcaactaaaaatctgagcatagcacaaagaccattatcctaaaggcactaaagagtgaayagaagcggggagaacctgattgggaatacatcctcaaagaagatggaggtatatgaaatgacatctcatgttttgcagctctcagcctggggctgggtga

SEQ ID NO: 36910 - DNA, 201 bp, Homo sapiens
ggggggaggggggagggatagcattaggagatatacctaatgctaaatgacgagttaatgggtgcagcacaccaacatggcacatgtatacatgtgtaacwaacctgcacattgtgcacatgtaccctaaaacttaaagtataataataataaaataaaataataaaaaagataagtagtccccatgcatatagatgcaaa

SEQ ID NO: 36911 - DNA, 201 bp, Homo sapiens
gtggggtggggggaggggggagggatagcattaggagatatacctaatgctaaatgacgagttaatgggtgcagcacaccaacatggcacatgtatacatrtgtaacaaacctgcacattgtgcacatgtaccctaaaacttaaagtataataataataaaataaaataataaaaaagataagtagtccccatgcatatag

SEQ ID NO: 36912 - DNA, 201 bp, Homo sapiens
agatttccaaatgaaacacaaatagatgttattaagtatacgttcattgaactcattaaaagtaaatgagtgtgacttttaattttaagggaaaggatgargatttggaagcatcaggctataagtaaagcagatggtgcaatagccaatctggaatactgttattttcaataaaatcaggcaatgcagttccattctggc

SEQ ID NO: 36913 - DNA, 201 bp, Homo sapiens
catttattcattcagtaatattttttaacctaccatatctgacgcactgttgtagggactggtacaaaaagacaataacaatgaaaaaaattcctgtcccrtagaactttctataagtaaaacatagaatacattagataatgataaatgctaagaacaaaaaagtaagaggaaatccgttctatgaagcattcaagggag

SEQ ID NO: 36914 - DNA, 201 bp, Homo sapiens
cacactccgggggactgttgtggggtggggggaggggggagggatagcattaggagatatacctaatgctaaatgacgagttaatgggtgcagcacaccarcatggcacatgtatacatgtgtaacaaacctgcacattgtgcacatgtaccctaaaacttaaagtataataataataaaataaaataataaaaaagataa

SEQ ID NO: 36915 - DNA, 201 bp, Homo sapiens
aaaactacacctgaatattgagtcaacacattaaaccacaaatcctagatgagtatgtgcatttgataaatttggctgtatttaattttttatttacccaycttggggtaacacccttctgacctgaaggaagaagctgaggcacaggatatgtttaaagagtttgtttgagccaaagtgaggacagctgccaggaacaca

SEQ ID NO: 36916 - DNA, 201 bp, Homo sapiens
gaacatcacactccgggggactgttgtggggtggggggaggggggagggatagcattaggagatatacctaatgctaaatgacgagttaatgggtgcagcrcaccaacatggcacatgtatacatgtgtaacaaacctgcacattgtgcacatgtaccctaaaacttaaagtataataataataaaataaaataataaaaa

SEQ ID NO: 36917 - DNA, 201 bp, Homo sapiens
tggacacaggaaggggaacatcacactccgggggactgttgtggggtggggggaggggggagggatagcattaggagatatacctaatgctaaatgacgakttaatgggtgcagcacaccaacatggcacatgtatacatgtgtaacaaacctgcacattgtgcacatgtaccctaaaacttaaagtataataataataaa

SEQ ID NO: 36918 - DNA, 201 bp, Homo sapiens
agaacacatggacacaggaaggggaacatcacactccgggggactgttgtggggtggggggaggggggagggatagcattaggagatatacctaatgctaratgacgagttaatgggtgcagcacaccaacatggcacatgtatacatgtgtaacaaacctgcacattgtgcacatgtaccctaaaacttaaagtataata

SEQ ID NO: 36919 - DNA, 201 bp, Homo sapiens
taggtgagaattgaacaatgagaacacatggacacaggaaggggaacatcacactccgggggactgttgtggggtggggggaggggggagggatagcattrggagatatacctaatgctaaatgacgagttaatgggtgcagcacaccaacatggcacatgtatacatgtgtaacaaacctgcacattgtgcacatgtacc

SEQ ID NO: 36920 - DNA, 201 bp, Homo sapiens
gacaaaaaaccaaacaccgcatgttctcactcataggtgagaattgaacaatgagaacacatggacacaggaaggggaacatcacactccgggggactgtkgtggggtggggggaggggggagggatagcattaggagatatacctaatgctaaatgacgagttaatgggtgcagcacaccaacatggcacatgtatacat

SEQ ID NO: 36921 - DNA, 201 bp, Homo sapiens
aaagacatattacgtacagaggagaaatggtaaggactactgacctgtcatgagaaatcatggagtgatgtctttaaagtgctgaaggaaaaaaatgtgtwaactgaggtttctgtattaagaaaaatatccctcaaaaatgagagtgaattagacatcttcagataaatggaagatgagaaaaattaatctctagcaggc

SEQ ID NO: 36922 - DNA, 201 bp, Homo sapiens
catatgcaataaataagtgggtaaataaaatgtctatactgtctttcttatttaatttacataaaaggtacctaactgttaaaagcaaaaataatgtaatrtgtaattatttgtaatgtgggtttatgacatgtagaagtaaaggatatgacaatagtcacataaacaatggaagatatgtatatggaattatactgctct

SEQ ID NO: 36923 - DNA, 201 bp, Homo sapiens
gcataggtactatcctaggactacctttcatcgtcttcatggaatttatgttgttctctagtattggactctgtttcctggatcctgtgtggtgatagctrcctgaggaaggttccattggaagtaaatatttcataatcttccatgtctgaaaaatgccttcatattgtattgatagtttgtctggacatagtattctag

SEQ ID NO: 36924 - DNA, 201 bp, Homo sapiens
atggtgaggtgtttgctataattctttttcttgctctaaaattatcttggctattcttggcccttcatttttctatgtgattgttagaattagcatattgrtttatatccatacatgtacatacatgtgaacaatccttcataaacactggcttatgtatttaagacctgctttgaaattagcttaattttgggaacattt

SEQ ID NO: 36925 - DNA, 201 bp, Homo sapiens
ttgtgtttctttttattgtttcaggttttatgtctgttaatacagttccatgatgtttactattaatccattacctagatgagttagatttgctcctaaaygacttatggattttttaatgttacctgtattataaatgatacttgtttaaatttgcagtttaatagtgtgttgctcttctttaggattagaattgatttt

SEQ ID NO: 36926 - DNA, 201 bp, Homo sapiens
tgtgtgtatatatatatatgtatatatatatatacacacacactatatatatacacatactatatatatacacacactatacacacactatatatacacayatatatatacactatatatatacagaaaaaagtatacatatatacatacacatacaaaatacacatataaatgtgtattaatgggtatgtctgtctcctc

SEQ ID NO: 36927 - DNA, 201 bp, Homo sapiens
taatgatatacaagtttttcattttgatgaaatccaatttgtccctttttttttttcttgtgcttttggtgtgatatttaagaatccattgccaaatccartgtcatattggtttaccctttgcttttttccaaaagtttttttttttttttttttgatgtggggagagtctctctctgtttcccaggctggagtgcagtg

SEQ ID NO: 36928 - DNA, 201 bp, Homo sapiens
gatttgctagttctatcagattttttctcatcatttgttgctcaggaaactgccagttttaggtatcgaggaccaagaattgcttagctccttttgccctrtcttgatgagtcaagaagtctttgcataataattgttatgagagaccatcatggctcactacagcctcaacctcctgggctcaggatcctcctgtctcag

SEQ ID NO: 36929 - DNA, 201 bp, Homo sapiens
ctccaaacttcccatgtttggagaaatacatgaatttgtagaataaaaaattgcatagtgttacagctcttttagaattgcaccagaaccctcccctgccstccaccccacggaagaaaattgcagcaaacccaaaacaacataaattctgggaaaaccacacctagctcatcaaaatcaaagtacagaatacaatggata

SEQ ID NO: 36930 - DNA, 201 bp, Homo sapiens
attaactattacaattttattctctacctgtacagttccaaatgactagaaaaaatagctgactattcttactggtctactttaaattcatgattaccaayctcaagtcccccttgtctgacaaatgtactgtattaccctagtatattcactcttccactcacctagtaactattttttactttctttttttttaagaga

SEQ ID NO: 36931 - DNA, 201 bp, Homo sapiens; identical to SEQ ID NO: 5605

SEQ ID NO: 36932 - DNA, 201 bp, Homo sapiens
ttcttctcacaattctttaccatggattatttaccattaacaccccaaattcacttcctcgcctctcttcatttgcttatattgttccctcttgcctggartatctacattgtcaaacccaggcaaagcagcaagattctatttagtcctcaaggttcaatttatctgttatctcctttgtgtgaagcattagtatccaca

SEQ ID NO: 36933 - DNA, 201 bp, Homo sapiens
aagactaagagtttcttgaaggaaagtatcatatcataatcaaatttttaaaaactccagtcattgccaccatgctttgtatactgtagacgtttgctaaygcattttaaaggaacaaatgaatgagcgtgaaagaaacatgagtttacttggtgggaattgctgaagagctctctggtgccatgaaatctgcttttattt

SEQ ID NO: 36934 - DNA, 201 bp, Homo sapiens
atcgcaaggacaaaaaaccaaacaccgcatgttctcactcataggtgagaattgaacaatgagaacacatggacacaggaaggggaacatcacactccggrggactgttgtggggtggggggaggggggagggatagcattaggagatatacctaatgctaaatgacgagttaatgggtgcagcacaccaacatggcacat

SEQ ID NO: 36935 - DNA, 201 bp, Homo sapiens
atgtcctttgtagggacatggatgaaactggaaaccatcattctcagcaaactatcgcaaggacaaaaaaccaaacaccgcatgttctcactcataggtgrgaattgaacaatgagaacacatggacacaggaaggggaacatcacactccgggggactgttgtggggtggggggaggggggagggatagcattaggagat

SEQ ID NO: 36936 - DNA, 201 bp, Homo sapiens
gcagccataaaaagtgaagagttcatgtcctttgtagggacatggatgaaactggaaaccatcattctcagcaaactatcgcaaggacaaaaaaccaaacmccgcatgttctcactcataggtgagaattgaacaatgagaacacatggacacaggaaggggaacatcacactccgggggactgttgtggggtggggggag

SEQ ID NO: 36937 - DNA, 201 bp, Homo sapiens
gtagggacatagatgaaattggaaatcatcattcttagtaaactatcgcaagaacaaaaaaccaaacaccgcatattcttactcattggtgggaattgaayagtgagatcacagggacacaggaaggggaatatcacattctggggactgtggtggggtggggggaggggggagggatagcattgggagatatacctaatg

SEQ ID NO: 36938 - DNA, 201 bp, Homo sapiens
tcctttgtagggacatagatgaaattggaaatcatcattcttagtaaactatcgcaagaacaaaaaaccaaacaccgcatattcttactcattggtgggamttgaacagtgagatcacagggacacaggaaggggaatatcacattctggggactgtggtggggtggggggaggggggagggatagcattgggagatatac

SEQ ID NO: 36939 - DNA, 201 bp, Homo sapiens
cccagccatcccattactgggtatatacccaaaggactataaatcatgctgctataaagacacatgcacacgtatgtttattgcggcattattcacaatarcaaagacttggaaccaacccagatgtccaacaatgatagactggattaagaaaatgtggcacatatacaccatggaatactatgcagccataaaaaatga

SEQ ID NO: 36940 - DNA, 201 bp, Homo sapiens
aactatactacaaggctacagtaaccaaaacagcatggtactggtaccaaaacagagatatagatcagtggaacagaacagagccctcagaaataatgccrcatatctacaactatctgatctttgacaaacctgagaaaaacaagcaatggggaaaggattccctatttaataaatggtgctgggaaaactggctagcca

SEQ ID NO: 36941 - DNA, 201 bp, Homo sapiens
accttgggaggggaagacacctaagttttggagtctttcagctattcttccctcaatcagaataagagggtgtaagtcatagtgttctgtgtgttttcccygccctaaattgagtcttgtatagcttagtgctcctgtccctctatccatgtgcactcccagttgtgcagggtttgattttagagtctaagcaatagctca

SEQ ID NO: 36942 - DNA, 201 bp, Homo sapiens
tggcttcagaatccatgctatcaccactccccaaaacagccacaataaatgctagctaagtgtttgagtgttcaataaatattaggcgtcatcattattcstactgcacagttgcatattccagaggtggttttggttccaatatttttggattttagaaagataatttagtttgtatactctattttatgtaacattctc

SEQ ID NO: 36943 - DNA, 201 bp, Homo sapiens
acctttgctttgtcatgtattctagtgctaaaggtagttattctgattaggaatagctgaactccagtaatggtatcatttaatgaatgcttattttattrgtgagtgctaagcaaactaacataatcatgaaactagcataaagggtgtctgttttctaatatcatgaatattgattaaattgttctaggtcacagcttc

SEQ ID NO: 36944 - DNA, 201 bp, Homo sapiens
atgtagaaaagcaagtagaaattgcatcacttagaaatacctgatcttttgataaagcatagaaatttatggtacatattttatgtgtgtgtgtgtgtatrtatatatagagagagagaaaaagtcacagtgtacatactttaataaacttatttgtttaacattatactgtgaacttttccgtattaacattcctcagta

SEQ ID NO: 36945 - DNA, 201 bp, Homo sapiens
atgtaaaatggtaaaaaatgttttctttgttccatgtcttttgatgatatctgggaataagcctcaatagagttattgtttttttaaaaccttgtattttytaattagaagtgcaagataaattaatattttctattttaactaaatattttagctaaattgttgagccatggttacctgtagctgggcctcaactttcag

SEQ ID NO: 36946 - DNA, 201 bp, Homo sapiens
atagagttattgtttttttaaaaccttgtattttctaattagaagtgcaagataaattaatattttctattttaactaaatattttagctaaattgttgarccatggttacctgtagctgggcctcaactttcagacataaaatttggaaggccagcatttctgcatatgtatattaacatgcctaactctccatttgtaa

SEQ ID NO: 36947 - DNA, 201 bp, Homo sapiens
ctaaattgttgagccatggttacctgtagctgggcctcaactttcagacataaaatttggaaggccagcatttctgcatatgtatattaacatgcctaacyctccatttgtaaaccagattcagttcttcgtatagcatctgactgacataccaggcttttgagttatcacatggtgatgttcctactaggagaaaaagga

SEQ ID NO: 36948 - DNA, 201 bp, Homo sapiens
aatggctgtggtgagaactgaaattaacactatattgaaacaaatcagtaaaaatatccttaaagcttttagaagctatcccctgtgatatcatctgttayaaactttatatggtagagaaattttatgaaatactgaattttttgtttctcagagctgttgaaataagtcagtaacaataatttctgaaaaaacaacatg

SEQ ID NO: 36949 - DNA, 201 bp, Homo sapiens
acatagctgtgcatacagtaaacctgtatatgtctaagaagttcagactaactactctcttcatgagcaaacagaagtaggactgtagtatttacagttayatataagaccgtttctaaagtgttaccaatcatttttaaagagatacataaaatgttcagaattatatgtaaaacaaagtagagcttctttgatgtctta

SEQ ID NO: 36950 - DNA, 201 bp, Homo sapiens
aaatgtagaaaagcaagtagaaattgcatcacttagaaatacctgatcttttgataaagcatagaaatttatggtacatattttatgtgtgtgtgtgtgtrtatatatatagagagagagaaaaagtcacagtgtacatactttaataaacttatttgtttaacattatactgtgaacttttccgtattaacattcctcag

SEQ ID NO: 36951 - DNA, 201 bp, Homo sapiens
caccacacccagccaatttttgtatttttagtagagatggggtttcattatgttggccagactggtctcgaactcctgacctcaggtgatccacccacctsggcttcccaaagtgctgggattacagacatgagccatgtaatagtagcttggaatgggttggaacagaggagatatggtgaatgaattcttgctatatgc

SEQ ID NO: 36952 - DNA, 201 bp, Homo sapiens
agccaggtacatattctggttctattacttattaattttgtcactatgagtaagttaattaacttctccaaacattagtttactaatttaagtggggattrtagaatctgctttagattggtgtaaggattaaatgaggggtaatatatgtaatatgcttagcccagtgctaggcacagaataagctttttataaataaga

SEQ ID NO: 36953 - DNA, 201 bp, Homo sapiens
ttggaatatagataaatattccctctggaaatataagcccagagtctcctgctccatcaaaggaagcccccttggtccaggctcctactctctcccacccyaccttgaaatgtaaacacataacctccagaaggtaaatctcttagttttctcactactaaatcagttataagttactttttaagactttcatttagccca

SEQ ID NO: 36954 - DNA, 201 bp, Homo sapiens
atgcctggttttaattacctgttttctaattaaacctaacctgctataacaagtactcaactttttttctctattggaactttagattttgaaggatatayctcttcttttatagttttttaaattagtaagtagtttgttgtacattattgacgtgtattttcttaggtttctattaaggagtttgaacataatctccag

SEQ ID NO: 36955 - DNA, 201 bp, Homo sapiens
gtatatatatattcttatatatattattccttacataatatatatttccttatatataaccttattttatatatatccatatatgtatgtgtgtgtgtgtrtatatatatatatatatatatatatatataacatgactttttttcattaaagagactgaagaaaaaaagggatttgaaaaattacttgtagttgctcatt

SEQ ID NO: 36956 - DNA, 201 bp, Homo sapiens
taagttggacatcatctgtagtggtatagttagaactcttctagaaaggtaatagtgatagtgctgagcaaggattggttagagaaggggacaaagggagrtgctagatttctcactctctagtctccatatctcaccagtcactgactcagtatttcttcagtttcttcctctttttcttagttagatcctctcacctca

SEQ ID NO: 36957 - DNA, 201 bp, Homo sapiens
gtttctctgcattcctaaagtctttttatttgtaaacatgatatctctccatatatttaaagttcttttaaaatgttcttccataaaatttcatacagaaragactttcatttcttttcttgttttactgtattagctagaacctcagtacagtgttgactagaaatgataatagcaggcatccccatcttgttccccgat

SEQ ID NO: 36958 - DNA, 201 bp, Homo sapiens
ttgtttgccctcatgactgcgtgagagctgtggctcgctgcaactgaccagcatcctgaaagagtctcatatggctttctattgaattcatgttgtttttkcaccatctgtaaagttgaaaaattgaaaaatcatcagttgaactattgtaagttggacatcatctgtagtggtatagttagaactcttctagaaaggtaa

SEQ ID NO: 36959 - DNA, 201 bp, Homo sapiens
tgtgactatgcaaaaaaatcttacaggataagctttttgcattggaacattttgttgttatataattattcttcagtaagtatcaagttaatgctcattcrtccaccaacaacaacaaatatgagatgactaattacattttatttttatatttatatatctccaatctgcacatcagtggtagagttctggacctcaacg

SEQ ID NO: 36960 - DNA, 201 bp, Homo sapiens
tattaatcatctactgtaatccagtaatttacatgcccttgagtagggttgcagtttaatcagcaagggggagaggtacacaggattgatacccacttctrtaatttgagggatatttttccaattttatttctattcacaggtaacaaaattgatgtagttttataaacattaatataatgaacttttcttaccaaatat

SEQ ID NO: 36961 - DNA, 201 bp, Homo sapiens
ttcttctagtaaaattatgtcctactgtgtttataatcaagtaaaagtgaaagtatattttgtaagctatgtttactttcagcatattatctgtttacatmggttctgttaaatattatttactgggttatcaacacaacatttaaaaaccagaattgcatgtacttgtactatcaatgtttgtactgtcttggaggttaa

SEQ ID NO: 36962 - DNA, 201 bp, Homo sapiens
gcctcccgggttcacaccattctcctgcctcagcctcctgagtagctgggactgcaggcatccaccaccatgcctggctaatttttttgtgtttttagtaragatggggtttcactgtgttagacagggtgtttgtctagcattttaagagtttgtaatggaagggttttcaagtcatttaatctcagtattgctaaaatg

SEQ ID NO: 36963 - DNA, 201 bp, Homo sapiens
atcctggaagttttgatactttccatctatggactatgatataattgcatcctgtttgagctgtaaggaggtgaggttcaaacctcttctctttgcttctsggttttaactagtatactagagctagatcaggttcaaaattaccggattttctgttaaaagagatcaagacttaaacctggagccaaactggagatttcc

SEQ ID NO: 36964 - DNA, 201 bp, Homo sapiens
ctcatcttctaccctctattaatgcaacatgagctcagtataaatataaaagtaaattttattgcactgcaagggaactcctagtatgaagtaaaaaggarctgagttcacaagagctgccaaatcttttatttatattccacctcctaaaaggcatgatttcccactcatgtgctttctaagctccattctcccaattta

SEQ ID NO: 36965 - DNA, 201 bp, Homo sapiens
aacagtgtatgtaatgccgtcagtaataatgcccttattacttttaataagctggttccctccctttctgtattctctttagcttcttttctcatccatcrgttcagtttcacttaaatgctttcttagctcttcatcactcagtcatctatccaccaccaatattttatggcacaaactttgtgtttctctttagagttt

SEQ ID NO: 36966 - DNA, 201 bp, Homo sapiens
taagtcagtaacaataatttctgaaaaaacaacatgttagagaagaacacttcagaagtagaagaaagaaagtgtgctcagaatggattactaaatgtacyatattgctactctaaattgattttccttaaccataagattagattaaaatgaaccaggaagtgacagaagtcagctgccttacaggctacatttttactc

SEQ ID NO: 36967 - DNA, 201 bp, Homo sapiens
gaatctctctttgtaaaaaagttcttttatatgtttatacaaataattgttatattttatctagctttttttttttttttttttttttttttgcttttgaraccgagtcttgctctgtcgcccaggctggagtgcagtggcgcaatcttggcttactgcaagctccgcctcccgggttcacaccattctcctgcctcagcc

SEQ ID NO: 36968 - DNA, 201 bp, Homo sapiens
tgattctcaagcatttcttgattactgacctctaagaatctctctttgtaaaaaagttcttttatatgtttatacaaataattgttatattttatctagcyttttttttttttttttttttttttttgcttttgagaccgagtcttgctctgtcgcccaggctggagtgcagtggcgcaatcttggcttactgcaagctcc

SEQ ID NO: 36969 - DNA, 201 bp, Homo sapiens
ccgtttttcttacagtatacgttttaaggcaaaaggtatgtatatagggcagcctttgtcttcaaactcgccccctcatgtaagctaaggataaggtcttktcttttgttcttacctcatataagcataaggtactcgcttttgtgtatgttaaaatttgagtacctaggaaatgaaaaccaacaattccccaaccctact

SEQ ID NO: 36970 - DNA, 201 bp, Homo sapiens
tgccttaccgttttgattcgatttacctcttaaaaccatattttaaaataaggttacattctgaagtactggtggttagggcttcaacataggaatttgarggtaatacagttcaacccatacacttacatttttcacttaatagtgtaataagcatttttactttcattaccaaattgtcacaaacataattttaatgat

SEQ ID NO: 36971 - DNA, 201 bp, Homo sapiens
cagaagcggtgtgcatttgaatcccaaatgttgagactatgtgatgtaatgttacgaatttctacaggaacaatatttttcattcatcacacattagtcamgatagatgaaatgtcttgtccgtctctgctttgtggcagatttttataatgtaccgtttttcttacagtatacgttttaaggcaaaaggtatgtatatag

SEQ ID NO: 36972 - DNA, 201 bp, Homo sapiens
tggcagagaggctcggggaggcgtgtccgccattgctgaggcttgagtagctttgaagggagtagtgcttctcccagcaaggagtttgagatctgagaatrgacagactgcctcctcaagtgggtccctgacacacgagtagcctaactgggagacacctcccagtaggggccgactgacacctcatacagccgggtttcc

SEQ ID NO: 36973 - DNA, 201 bp, Homo sapiens
gttcctggatcagcattttttgggcagacccattttcttaacaaactgtactctctgaggcagcttggatctatccaggaaagtttccactagttaatttkcatagctcatgttggcattatggagactcaacagtttatctgcagggtgtgaaattggggtattagtcagcaccgtaaggcagaaaaggtggccagaccc

SEQ ID NO: 36974 - DNA, 201 bp, Homo sapiens
atataggcccagtgggtaggctcacctctgcatgaatatttgataggagcatttctatcagttatgctctttcttaaaaaaaaacatgaaaataaacgcaycatttatgtaactcttataagaaatgcataaatcatgggaaacagtgagcaagatataattgaaattcagcagctcagtgagttacgaaccttctctcta

SEQ ID NO: 36975 - DNA, 201 bp, Homo sapiens
tggccactgttcctggatcagcattttttgggcagacccattttcttaacaaactgtactctctgaggcagcttggatctatccaggaaagtttccactarttaatttgcatagctcatgttggcattatggagactcaacagtttatctgcagggtgtgaaattggggtattagtcagcaccgtaaggcagaaaaggtgg

SEQ ID NO: 36976 - DNA, 201 bp, Homo sapiens
attgtcaccctagtcagttttctaggaattgacagtcagccagtagggggtggcagtcttcattctcccagaccaggctgcagatggtgtaggttctcctyatttctttggtgtcatgttggacccttcagactttgattgctggaaatcagcatacacagagaaggctccatctgctggaccattcttgtaaatatcagc

SEQ ID NO: 36977 - DNA, 201 bp, Homo sapiens
tgctaaatctaatgatcacttgtcagtcctagtcttacttatttgcttagtctcatcttatttgccacagctccatacttttaaaataccaccttctcctrtcttctaaggcacttgactgagtttctctcaccttgctggtcattccttctcagtctccatacctgatccctcctgatttccctggcttgttaatatcag

SEQ ID NO: 36978 - DNA, 201 bp, Homo sapiens
tctaacaagtgttagaaatgttcattcacagaatcacctgaggtacatagaaaataaagcttctattaaaagaattatgctacagaaaagaacagagaggrtatatatacaacacaggaagactcagctgattcagggaccccaggagaaagtggctttcttcatttaaaaagctacttaccatctctcctgttaacttat

SEQ ID NO: 36979 - DNA, 201 bp, Homo sapiens
ggtggcgagtgtctgtaatcccagctgctcgggaggctgaggcaggagaattgcttgaacctggaaggcggaggttgcagtgagccgatatcacaccatarctctccagcctgggtgatagagcaagactccgtctccaaaaaaaaaaaaaagaaaaaaaagaaattgttggtatcctaaaaatgttaaaaacttaaacta

SEQ ID NO: 36980 - DNA, 201 bp, Homo sapiens
tctcaacaatatacaacactttgtgcactggttcccacacattaatgtacaaatgaatgacttgaggatactgtatagattctgcttcattaggtcttgaytggggcttgagattctccatatctaagttcctaggggatgctcatgtcacttgtctggggatggtacttagagcagagatccccaattctcgggcgacaa

SEQ ID NO: 36981 - DNA, 201 bp, Homo sapiens
atacatatttagagagaatttttcaaaacttctcatttgattaaaattgtgttgcagtctaatacatccatgagaaatggacatacttaggcctagtataygtaatgaagcctccttgatgaggcctgaaggatagtttgtttttaaaaaaaaaaaaaaaaaaaaaaaacggaattacccattcttgctaaattgaaagat

SEQ ID NO: 36982 - DNA, 201 bp, Homo sapiens
aggatactgtatagattctgcttcattaggtcttgattggggcttgagattctccatatctaagttcctaggggatgctcatgtcacttgtctggggatgktacttagagcagagatccccaattctcgggcgacaaactggtaccagcagactgggccgcacagcaggaggtgaatggcaggtgagtgagcattagcgcc

SEQ ID NO: 36983 - DNA, 201 bp, Homo sapiens
ctgatttttaggtttaggtcattttagccttataaaataaacagaggacccatattttccccttacccattttggctctagaacagtttatagtacagttrtctgttaacttatgtcattggtagaatttacttttaaatcaccttagcctgggtgaagttttgttttcttctattttattttgttttgcagatagatttt

SEQ ID NO: 36984 - DNA, 201 bp, Homo sapiens
tttaaaattcactggatgaggttaaaagtggactagagataggagaagaaacagccagtgaacttgaagacagatgagtagagatgagccaatgtgaaaawcagagaaaaatattgagactaaataaatagaggcttagggatccatatagaagaagagagtgagatgtggggaaaaaaaaatgtgtacgtaatggctcaa

SEQ ID NO: 36985 - DNA, 201 bp, Homo sapiens
attttaggcatgagccaccatgcccgtcctcccattttgctttttaaaattttgataaaggaataattaaaatgccatttattggtaaataataactgaartgcatagctatactaatataaggatgtaaataactattttactattaacatacatttgtatcttactgatagtattttattatattgggattgaagatgc

SEQ ID NO: 36986 - DNA, 201 bp, Homo sapiens
tatcccaatagtccattaaggataaaatttaaataatatagactgaatattttttaaaaaggaaaactgtataacagttgaaaacatcactgtggcaagcygaatgtttggatgaacatttggttgagaaagtgagtgaatccgaggaagtgatatgatctacagtagcccttcctacatgtttgttattaatacattctt

SEQ ID NO: 36987 - DNA, 201 bp, Homo sapiens
agagtgaagtctttattcctactaaatgataagccaaagtagatataatcatcagtggattttgtttctttttaactcatgctttccaagtatctgtgcarttttgatgagcagtataagcttgttagtctgatgagtgcatcttatcaatacgatgaagagaatcctgtgtcaactttccagaattaccatttatgtatg

SEQ ID NO: 36988 - DNA, 201 bp, Homo sapiens
gtcattttatgagactagaatgaccttgattctaaaacctgacatgaagcaacataggaaagaatacatatgagacgctttttttttttttttttttttgkggagaccgggtctcattctgtcatcgaggctggagtgcagtggcacaattacagctcactgtagcctcgacctcttgagctcagttgatcctcatacctc

SEQ ID NO: 36989 - DNA, 201 bp, Homo sapiens
ccgcgcctggccaataaaacttttaataaatggtcctgagacaactggataaccatttggaaaagtccatttgtggaacaagttaaaactcttacatattmcaggacaaaccacagatggatcaaaattcaagtgtaaaaaataagagaaacacaacccaaatatctgacattaggcaaccggttgaataaactattggta

SEQ ID NO: 36990 - DNA, 201 bp, Homo sapiens
atattgttaatatttattgttctgtgttcatatttaccccaaattagaatagtcaataggtataatttacctgaagtgtcagctctgcagcacactttttytgaatttctgatttagtctgggtgggggagctaggtttcggtttaaggatgcctttgttttgtgattttgtgatatagtagaaatcaaaactgcttttaa

SEQ ID NO: 36991 - DNA, 201 bp, Homo sapiens
agacatgtgccaccatgtccagctaatttttgtattttttgtagagatgtggtttcacgatgttgcccaggctggtctccaacttctgagctcaagtgaamcacccgcctcagcttcccaaagtggtgggattactggtgtgagccactgcgctcaacctcttctaagtactttatgcccttcctgcatccaggaattcga

SEQ ID NO: 36992 - DNA, 201 bp, Homo sapiens
cgccctctaagcttactgcagccttcatctcctgggctaaagtggccctcccacttcagtctcctgagtagctgggactgcaggcacaagccaccgtgtcyggccgatttttatatttgtatttttgtagagacagagttttgccacgttgcccacgctggtcttgaactcttagactcaagcaatccgtctgctttggcc

SEQ ID NO: 36993 - DNA, 201 bp, Homo sapiens
cagacatgtgccaccatgtccagctaatttttgtattttttgtagagatgtggtttcacgatgttgcccaggctggtctccaacttctgagctcaagtgawacacccgcctcagcttcccaaagtggtgggattactggtgtgagccactgcgctcaacctcttctaagtactttatgcccttcctgcatccaggaattcg

SEQ ID NO: 36994 - DNA, 201 bp, Homo sapiens
aaatggtgtcacaagggtggacatccttaccttattcctgaactgagggaggaagaattcagtgttttactgttaagtatggtgaaattattgttaggcartattttggtaggtgccttttatctgattgaagatattgtcttctgttactataatagtttgctgagcatttaaaaaatatagttattgataggtgctgaa

SEQ ID NO: 36995 - DNA, 201 bp, Homo sapiens
taatgtggatcggtcatgccctaaacttcagcatcatataatatactcaggtaacaaacctgcacgtgtacccacaaatctaaaataagagttgaaattatttttttttgagtacttagtatgtaccaggtactgtttgaaaggctttgtttatattaatactcatttaaccactccgttaggtagatactattatttatc

SEQ ID NO: 36996 - DNA, 201 bp, Homo sapiens
agtaagtaatataaattgattttttaagccatgaatagtgcatgaactttaacagttatttccattgaaataagactaacaatatttgaactttatccaarcaggtcaataattgttatttcatgtgttgactaatttgattacaaaatttaatgtcattttgtcctataagacagaattttaagattctgttgagttacc

SEQ ID NO: 36997 - DNA, 201 bp, Homo sapiens
ctaatgtttgtacttttagtagagttggaatttcaccgtgttggccaggctggtcttgaactcctgacctcaagcaatccgcccacctcagcctcccaaartgctgggattacaggcgtgagccaccatgcctggccacatgagccactgcgcccagcccagaagttttaataattctacttaaatttaaataataagggc

SEQ ID NO: 36998 - DNA, 201 bp, Homo sapiens
cctcctgggttcaaacaattctcctgcctcagcctcctgagttgctgggactacaggcgcacaccaccacacccagctaatgtttgtacttttagtagagwtggaatttcaccgtgttggccaggctggtcttgaactcctgacctcaagcaatccgcccacctcagcctcccaaaatgctgggattacaggcgtgagcca

SEQ ID NO: 36999 - DNA, 201 bp, Homo sapiens
cagtggaataaatgctgtcttgtaactgaatcagataataattatgattattctaatgtagagtcagagttggaatgtctgacttttttgtgtagctcttycaataattccctttgtaaccttagtttaagtaaaccattgaatctttctttgcttgtgtcaccatttgttgatattcattctttcaacaagtgtatattg

SEQ ID NO: 37000 - DNA, 201 bp, Homo sapiens
ctaattcctagcaagcagttgtaaaaatcctaatattaaccagaagtttattgtttgtttgttttgatacagtctcgctctgtcgcccaggctggagtgcrgtggtgcaatctcgtctcactgcaacttccgcctcctgggttcaaacaattctcctgcctcagcctcctgagttgctgggactacaggcgcacaccacca

SEQ ID NO: 37001 - DNA, 201 bp, Homo sapiens
tcagtggaataaatgctgtcttgtaactgaatcagataataattatgattattctaatgtagagtcagagttggaatgtctgacttttttgtgtagctctktcaataattccctttgtaaccttagtttaagtaaaccattgaatctttctttgcttgtgtcaccatttgttgatattcattctttcaacaagtgtatatt

SEQ ID NO: 37002 - DNA, 201 bp, Homo sapiens
tacttaaaggaatttttttcccacttagtatctcaaatttcccaacttcccaccattctgcatttcttgtgctaattcctagcaagcagttgtaaaaatcstaatattaaccagaagtttattgtttgtttgttttgatacagtctcgctctgtcgcccaggctggagtgcggtggtgcaatctcgtctcactgcaacttc

SEQ ID NO: 37003 - DNA, 201 bp, Homo sapiens
gaaaatggtttaaattataatggaacatatatttttttaaatgtttcagaagaatacttttttaaaaaatcaaatgaaatttgtcattacaacactacctyatatgaggggacttcaaaaagcttgtggaaaagtagaatttaaaaataaaaataaacaatataaactttttttttagcataagctccattaagttcaaga

SEQ ID NO: 37004 - DNA, 201 bp, Homo sapiens
tttatttcactctccatccatattagtccattttggggttactataaaggaatacctgagactgggtaatttacaaataaaatagatttattttggcttayggttctgcaggttgtacaggaagtgtggtgccagcatctacttctggtgagagtctcaggaagcttccaatcatggcagaaggtgcaagggcaagggagg

SEQ ID NO: 37005 - DNA, 201 bp, Homo sapiens
ctctgtgagagcagtagctgtcaagacctgcaacaattccttggcacctagtaagcactccataaatagttggtaaatgaatgaacaaatcagtattattrtaatataaattcctggaacatgctttcaccaggcctgtcattatatataaacaagctgtattctatggggacaacatttctgcagttcaatctgatattt

SEQ ID NO: 37006 - DNA, 201 bp, Homo sapiens
actaatcaaaaggactaaaagagaacgctattaaagaatagattgaaatagaccagtacatttttactttctgcttaatgcggtttcaagcaatttttttrtataggtccatttaaattcattgccaatttaataatatttgtcatttaaaactgttagtgttctattcgctttaataatattatagtaatattaatggtt

SEQ ID NO: 37007 - DNA, 201 bp, Homo sapiens
ctgcctctaccagaatataagctctgtgagagcagtagctgtcaagacctgcaacaattccttggcacctagtaagcactccataaatagttggtaaatgratgaacaaatcagtattattgtaatataaattcctggaacatgctttcaccaggcctgtcattatatataaacaagctgtattctatggggacaacattt

SEQ ID NO: 37008 - DNA, 201 bp, Homo sapiens
gcatgtgaagcaaatggcaattattattttcattttggtccattatcaaccttgatgtacgttctctgactatataatctaaagtagccaccctctcccaratactttttgcattgccatatatatacaatttagaacttattatctgaaattagttcattttactcactcttcattggcagtctgcctctaccagaatat

SEQ ID NO: 37009 - DNA, 201 bp, Homo sapiens
gttgttgaagaatgtttgttgaactgaaaaaatgtccataatatattgctaattgcaagcaagaggctataaaactcttttattatgtatcatttttgttmaagtgcataggaaaaagacttgaataataaacaccaaaatattgcttattatctgtgttaggattaaacttttctactacttttagaattagacaacaca

SEQ ID NO: 37010 - DNA, 201 bp, Homo sapiens
ttcttttcttgttttactgtattagctagaacctcagtacagtgttgactagaaatgataatagcaggcatccccatcttgttccccgattttaaagaaaytgcctctgatatttcatcgctaataatgtttgctgtaagtttttaataaataatttttatcaggttaaagaagttaccttctattcctattttgttaata

SEQ ID NO: 37011 - DNA, 201 bp, Homo sapiens
atgaacatcattgtacagatatctgtttgaatctcttcttttgattctcttgggtacataggaatggaattgctgggatatgttggtaaatctatgtttarctttttgaggaactacccaactgttttacaaagcagcagtaacattttatatcccctctagcaatgaatgagggttccagtttctccacatcctcttcat

SEQ ID NO: 37012 - DNA, 201 bp, Homo sapiens
ccttatcttactccttcagactctgtcttcatttctcatcttttcttctcacttatgcctctgcctttccactctctctttctattggacactttctttctgacaccatggtagctatcactagtggcttgcaatctatgttcctaccacctggccagtagttgtagggaggaaggaggttggatgggagaattgaaggag

SEQ ID NO: 37013 - DNA, 201 bp, Homo sapiens
gccttatcttactccttcagactctgtcttcatttctcatcttttcttctcacttatgcctctgcctttccactctctctttctattggacactttctttctgacaccatggtagctatcactagtggcttgcaatctatgttcctaccacctggccagtagttgtagggaggaaggaggttggatgggagaattgaagga

SEQ ID NO: 37014 - DNA, 201 bp, Homo sapiens
ggccttatcttactccttcagactctgtcttcatttctcatcttttcttctcacttatgcctctgcctttccactctctctttctattggacactttctttctgacaccatggtagctatcactagtggcttgcaatctatgttcctaccacctggccagtagttgtagggaggaaggaggttggatgggagaattgaagg

SEQ ID NO: 37015 - DNA, 201 bp, Homo sapiens
aggccttatcttactccttcagactctgtcttcatttctcatcttttcttctcacttatgcctctgcctttccactctctctttctattggacactttctttctgacaccatggtagctatcactagtggcttgcaatctatgttcctaccacctggccagtagttgtagggaggaaggaggttggatgggagaattgaag

SEQ ID NO: 37016 - DNA, 201 bp, Homo sapiens
tatttttctttatttctaattcttggggatttctcttcctttcttctccttcattagtttgattgtatatttaaaatctctcatggttgtttgttttattyagcatttctatgtgtatttgtgtatgtgtgggtctgtgttactgcttactgtgttgtcaagcccatatatgcacaaggactattttgaaactttgtttaa

SEQ ID NO: 37017 - DNA, 201 bp, Homo sapiens
tagccaggctggtcttgaactactgacctcaagtgatctgcccacctctacctcacagggtgctaggattacaggcatgagccactgcacccagccaaaartgatttcataaaaattgttaaaaatctgtagctgctttgttaccttcattaactctttgtgattaaagttgcaagtttattgcagtaatgggaatgtgtt

SEQ ID NO: 37018 - DNA, 201 bp, Homo sapiens
gagacagagtcttgctctgtcatccaggctggagtgcagtggcacgatcttggctttctgcagcctcagctcccgggttccagtgattctcttgcctcagyctcccaagtagctgggattacaggcgtgtgccaccatgcctggctaatttttgtatttttagtagagacgagatttcaccatgttagccaggctggtctt

SEQ ID NO: 37019 - DNA, 201 bp, Homo sapiens
tttctccccctctcccatctctcctcccctgatattttcatagtattttattttatgtatgaatgtatgtatgtatgtatgtatgtatgtatgtatttatktatttatttatttttgagatggagtttccctctgttgcccaggctggagcgcagtggcatgatcttggctcactacaacctccacctcccggattcaagt

SEQ ID NO: 37020 - DNA, 201 bp, Homo sapiens
tttagtagagacggggtttcactgtgttacctaggatggcctcgatctcctgacctcgtgatccacccgtctcagcctcccaaagtgctgggattacaggkgtgagccaccgtgcccagccaggacaacctgcattcttcaagtcaaaagaaaaataaaggtgttgcaggggaacctataaataaaatagacttaaaagat

SEQ ID NO: 37021 - DNA, 201 bp, Homo sapiens
tggccaacatggtgaaaccccgtctctactaaaaatacaaaaattagccgggcatggtggtgggctcctgtaatcccagctacttgggagcctgaggcagragaatcacctgaacctgggaggcggagactgcagtgagccaagatcatgccattacactgcagcctgggtgcagagcgagactccgtttcaaaaaaaaaa

SEQ ID NO: 37022 - DNA, 201 bp, Homo sapiens
aatatatttgccttttaatgcctgtcttactttacttagcatgttttcaagatttatccacattatagcacgtatcagaccttaacttcattttaaagctrcttaacatactggtgtgtgtgtgtgtgtgtgtgtgtgtgtgtgtgtgtgtgtgtgtgtgtctgtatatatatatcacattttgtttatctgttcatctct

SEQ ID NO: 37023 - DNA, 201 bp, Homo sapiens
agacagagcatgaacaagattaattttttccctggcaaattaatgtggaaggtttgctactgcaggtttcatctttgacatcatcttatcccttcttaaawtgagttatccatttgtaaactgctgatttctttaaggcattgtatttgtctcttctcacattgctaataaagatatacccaagactgcataatttataaa

SEQ ID NO: 37024 - DNA, 201 bp, Homo sapiens
ctgcaggtttcatctttgacatcatcttatcccttcttaaaatgagttatccatttgtaaactgctgatttctttaaggcattgtatttgtctcttctcamattgctaataaagatatacccaagactgcataatttataaaggaaagaggtttaattgactcagttccacatgactggggaggcctcacaatcatggtgg

SEQ ID NO: 37025 - DNA, 201 bp, Homo sapiens
catggtggaaggtgaaagaggagcaaagtcacgtcttacatgtcggcaggcaagagagcatgtgcaggggaactcctcagatttcacgagacttaatcactatcaccagagcagcacagagagacctgcccccatgattcaattacctcccactgtgtccctcccatgacacatgggaattatgggagctacaattcaaga

SEQ ID NO: 37026 - DNA, 201 bp, Homo sapiens
ttattttgatatttgttttattatgtggtctcaaattgaacctgcactttttccaaggtatgcctgtattctgtttcttagaggaactccacatatttgtrtaagattggctccaccttattctcactgtgtgtgactatgctggtcataaatgtgttcatacccactatgtgtctataagacaaaacctattctgacttg

SEQ ID NO: 37027 - DNA, 201 bp, Homo sapiens
aggtgaaagaggagcaaagtcacgtcttacatgtcggcaggcaagagagcatgtgcaggggaactcctcagatttcacgagacttaatcactatcaccagwgcagcacagagagacctgcccccatgattcaattacctcccactgtgtccctcccatgacacatgggaattatgggagctacaattcaagatgagatttg

SEQ ID NO: 37028 - DNA, 201 bp, Homo sapiens
gtgttcagtaactgttagtataatagtattatgtatattacagtgagtgaattaagatcaaattgacgtgatatttttaccatactaagtaatagtctgartgtggtatctgccttttatcttttttgactggaaactttttccatcctgttttctctgctatatctgtcagcccccatttcacctacttcttttaggacc

SEQ ID NO: 37029 - DNA, 201 bp, Homo sapiens
gcaggcccatgaattcagtttttaatggtgtgtagtcatagtccttaaactgcaattgtttatctttttaatcaaatcaaaggccagatacatgatacttstgttggattataaacttttggtttataagctttttgctataaataatgcagacattgtatgttttacttaaatgtgcttatgtggcattgaggaggggaa

SEQ ID NO: 37030 - DNA, 201 bp, Homo sapiens
ctgttaagttaatgaatgaatcatgtggtagaattggtcagagcttactttgtctgacaattgaatttcagtggttgcaagtcaaattcctttgctgtaartagaaatataaactcttgattttattcttgtttttgttttgggagttttagttcatcatgaattcatagtcctggttagctttacgaagtagagatgtgt

SEQ ID NO: 37031 - DNA, 201 bp, Homo sapiens
gatctctcatattgatgtatcttatgaaaaagacaagaaaatagttgctaactcaaattctaatactagttgccatttcctgtctcttctgctgttagaaygggaagggaccttaaaggaaatgtagcccatccccatcagatgcatgtgtttcctttataatagacttgtagttagcctgtatctgagtactttgagtaa

SEQ ID NO: 37032 - DNA, 201 bp, Homo sapiens
tacatgaatttgtagaataaaaaattgcatagtgttacagctcttttagaattgcaccagaaccctcccctgccgtccaccccacggaagaaaattgcagyaaacccaaaacaacataaattctgggaaaaccacacctagctcatcaaaatcaaagtacagaatacaatggatagagaaaaagtcttgaaagcaccagag

SEQ ID NO: 37033 - DNA, 201 bp, Homo sapiens
tcatcaacagatggataaagaaaatgtggtatataaatacaatggagtatcatttatctatgaaaaggaatgaagtcatgatacatgctacaacatggctraatctcgaaaacgtactaagtaaaagaagccagacacaacaggacaaatactatatgattccacttatatgaaataatttagaataggcaaattcaggcc

SEQ ID NO: 37034 - DNA, 201 bp, Homo sapiens
ttgttcagagtttttgggaggccagataataatcatagaggacaatctagtttcattgtttaaagacagacagcatataggggaataaaattagttttctygcttatttttttttttttttttttggtagagatagggtctcactatgttgtccacgctggtcttgaactcctagcctcaagcaattctctgaccttggcc

SEQ ID NO: 37035 - DNA, 201 bp, Homo sapiens
cttacataatatatatttccttatatataaccttattttatatatatccatatatgtatgtgtgtgtgtgtatatatatatatatatatatatatatatawaacatgactttttttcattaaagagactgaagaaaaaaagggatttgaaaaattacttgtagttgctcattaggatatgtaaggcagttacttaaggaca

SEQ ID NO: 37036 - DNA, 201 bp, Homo sapiens
atttaagaatccattgccaaatccaatgtcatattggtttaccctttgcttttttccaaaagtttttttttttttttttttgatgtggggagagtctctcwctgtttcccaggctggagtgcagtggcacaatgtcggctctctgcatcctccgcctcctgagttcaagcgattttcctgcttcagcctcccaagtagctg

SEQ ID NO: 37037 - DNA, 201 bp, Homo sapiens
ttgctgggatcttagtacacagcatgttaaagtttctgttaaaatttggtactgttagttttaccttggatacaatgcaatgcaggatttttttcctgctrcgtccatgaagccaaatcctcagtgtgatgacagaaattgcagaaagaatgtaagaaaaaggtagcagcactgcccaaatgaggttatacaagaagagga

SEQ ID NO: 37038 - DNA, 201 bp, Homo sapiens
atattttatgtttctcaagaaaatactttcaaggattgtatgtgccaaaagagatttttttttgtatgaaagtgataattttaatgttcatggagtaattrtaaactattaatactttatatttaaaaattttaaaaataccagcatgaatttggaaggacacacaaaaaataagaaataaattaaggatatattggatga

SEQ ID NO: 37039 - DNA, 201 bp, Homo sapiens
gttttgcacagctcttttgtagctttgctgttaggtatatattattcagaattgacatttcttccagggtattttcttttatattatattaatgaattttwaaaaaatcttacaatgattttggcatgaggatatatttaattgatattactgtagctaccttaagtttcttttctttatcatatgcctgatatatccctt

SEQ ID NO: 37040 - DNA, 201 bp, Homo sapiens
tcacaggcagtgttgagttttgagagagctgttttcttgagatggtggaggcagaagccagattttggtgtggtggagagcaactaagcgatgaaaaagtrgttacagaatctgtttcaggatgcttaccagtgagtgggaagacaaggatttaggaaatgaattgtgacacagggtatggggagagtttctttattttta

SEQ ID NO: 37041 - DNA, 201 bp, Homo sapiens
tatcagatttttttggcattttttgaaatttgctttgtgattttgtaacaggccagtttttatatgttctatgtttatttgaaaagaatacttttttttttctaacttttgggtacagatgtatatgcccataagattaaaattgctaattttgtcattcagtttttttgtgttcttaaccattttatttctctgatctat

SEQ ID NO: 37042 - DNA, 201 bp, Homo sapiens
acattgagtttagcaatatgaaggtcattggtgcctttgataagaacaattttgtggaaaagtagaggcagagaccccacagtaggatcaaaagagactgkaaggagagcagttagaggcagaacatagaggtaaaactattgtactttgttgtgtgggtgtgtgtgtgtgttttaagatggaaaaaataacagcatgctt

SEQ ID NO: 37043 - DNA, 201 bp, Homo sapiens
ccgggcagaggggctcctcacatcccagacgatgggcagccaggcagagacgctcctcacttcccagagggggtggcggctgggcagaggctgccatctcrgcactttgggaggccaaggcaggtggctgggaggtggaggttgtagcgagccgagatcaggccactgcactccagcctgggcaacattgagcactgagtg

SEQ ID NO: 37044 - DNA, 201 bp, Homo sapiens
cctaaaaatacatgtacattcaacctatccaaaactgtggctttatatgtatgtttatatactttgtctgttaatacaatagtagtccttgagagtcttawgtgtgtaaatatttgtaacatgtcctattctcctttctctgttgaagcgctctccatcctgtactccagctagcaaaggcagacgtgtaagagacttttg

SEQ ID NO: 37045 - DNA, 201 bp, Homo sapiens
ctgcttatgtctgcctgactgcctactgtaacactggaaaccaagtgaagaaagcatataaagtctgtcagcatgtcaaataaaatgagttctgaatcaartgagataaggactaaataatgacattgagtttagcaatatgaaggtcattggtgcctttgataagaacaattttgtggaaaagtagaggcagagacccca

SEQ ID NO: 37046 - DNA, 201 bp, Homo sapiens
gaatttttcttagtatagaacaaaatggagtctcctatgtccacttctttctacacagacacagcaacaatctgatctctctttcctttccccacatttcycccctttctattagacaaaaccgccatcgtcatcatggcccgctctcaaggagctgttgggcacacctcccagacggggcggcggctgggcagaggcgcc

SEQ ID NO: 37047 - DNA, 201 bp, Homo sapiens
cacctgatcatcacctgatgtggccattcctggttgggggtgtcctcctgtcctgcttatgtctgcctgactgcctactgtaacactggaaaccaagtgargaaagcatataaagtctgtcagcatgtcaaataaaatgagttctgaatcaaatgagataaggactaaataatgacattgagtttagcaatatgaaggtca

SEQ ID NO: 37048 - DNA, 201 bp, Homo sapiens
tatgtcaaatatataattaatgatatacgggttactcaaaggtgctaggaagcctcctctcttttctatacctgggcagaaaggtataataatataataattgtccaataatttcacagatttatcatttacaaactttgctagtttatcaccaataactctacaagttcatcatttacagactttgctagtttatcaaca

SEQ ID NO: 37049 - DNA, 201 bp, Homo sapiens
ccaaggcagaagaatttttcttagtatagaacaaaatggagtctcctatgtccacttctttctacacagacacagcaacaatctgatctctctttcctttycccacatttcccccctttctattagacaaaaccgccatcgtcatcatggcccgctctcaaggagctgttgggcacacctcccagacggggcggcggctgg

SEQ ID NO: 37050 - DNA, 201 bp, Homo sapiens
tttttctgtttactctcttaatgtccataattgtacacattttttctttttctttttttttttttttttagtatttattgatcattcttgggtgtttctcrgagagggggatttggcagggtcataggacaatagtggagggaaggttagcagataaacatgtgaacaagggtctctggttttcctaggcagaggaccctg

SEQ ID NO: 37051 - DNA, 201 bp, Homo sapiens
caaaaaagaatacagtgacctccagatcttgattctttgttgtccctaaacttaagtgcatagattcttttagttttaaaagttttattgcaactggggasacagataagatataacaaattaatgacctttggaaaattacaaagcttaggaaatcttacagtcataatctgtagtctgtatgtttctgtttacccttta

SEQ ID NO: 37052 - DNA, 201 bp, Homo sapiens
gtttattggcgtacattttttcacaatgattgtttttctgtttactctcttaatgtccataattgtacacattttttctttttctttttttttttttttttagtatttattgatcattcttgggtgtttctcggagagggggatttggcagggtcataggacaatagtggagggaaggttagcagataaacatgtgaacaa

SEQ ID NO: 37053 - DNA, 201 bp, Homo sapiens
attgcagtggacacgccagggctatttctctggcccacatcacttcctttgctctttttaaattatatacttcaaacatgaaggagtcagggtatttttcmttctactttaagtcaactacgcttaccagtttttattgcccttatgactgacttcaaaaaagaatacagtgacctccagatcttgattctttgttgtccc

SEQ ID NO: 37054 - DNA, 201 bp, Homo sapiens
agtttattggcgtacattttttcacaatgattgtttttctgtttactctcttaatgtccataattgtacacattttttctttttctttttttttttttttttagtatttattgatcattcttgggtgtttctcggagagggggatttggcagggtcataggacaatagtggagggaaggttagcagataaacatgtgaaca

SEQ ID NO: 37055 - DNA, 201 bp, Homo sapiens
gtattttttcgataaatggttaatattgcagtggacacgccagggctatttctctggcccacatcacttcctttgctctttttaaattatatacttcaaayatgaaggagtcagggtatttttccttctactttaagtcaactacgcttaccagtttttattgcccttatgactgacttcaaaaaagaatacagtgacctc

SEQ ID NO: 37056 - DNA, 201 bp, Homo sapiens
aagtttattggcgtacattttttcacaatgattgtttttctgtttactctcttaatgtccataattgtacacattttttctttttctttttttttttttttttagtatttattgatcattcttgggtgtttctcggagagggggatttggcagggtcataggacaatagtggagggaaggttagcagataaacatgtgaac

SEQ ID NO: 37057 - DNA, 201 bp, Homo sapiens
aaacagaacatcaaactaaaagtgttcttttctttaagtagttagaaaaatgcaagaatagtacgggtcagtggtaagtgccacagatgtcaatttagttmtcattttcatagcgatgcttcagagcaagaatctgccttgctctggttcttctcaagttaagcagacttttgcatgttaggctgcctcataaaccattgg

SEQ ID NO: 37058 - DNA, 201 bp, Homo sapiens
gctttaactctctatgtaattgctcttacctgtgcattaattttattctgcagtgtagtttctccattttcttttctctccatctaaccctattctgttcrtccttagatttcaggaattctttaaaatatctaatcagctgatgttactcttactactttccagtttattatggtttatttttgacaacttatattgtct

SEQ ID NO: 37059 - DNA, 201 bp, Homo sapiens
gatttttatctctcctttccctgtagtactgttatggtactgtctgtgtactactgtttaggtgtgttttgcacaatggactgtgagaatttggggggcargaacttgtgggggccaagggtccagcccttgttattggtccaacctttggctctctgaaagtttgctgaaaaatgaacatgcacaaggcagattaatagg

SEQ ID NO: 37060 - DNA, 201 bp, Homo sapiens
tattttgttgcttccactgccctttgcttgtaagtaaaacaaatcataacttgctagatactccacttaaaactgaattgaaggccgggcgcggtggctcaacgcctgtaatctcagcactttgggaggcccaggcgggcggatcacgaggtcaggagatcgagaccatcctggctaacacggtgaaaccccgtctctact

SEQ ID NO: 37061 - DNA, 201 bp, Homo sapiens
cactcaccttattccagaaaagattttaggtagctcatgaaactgttataagataggtttgaaaatgttttccaccctgcagcagcatggcattcctgatraccacatacatgtgtagtctcattttagccatgatcagttataccacaataccttgataattagcggtcatttcatgaccaggatgtgatgtgtggtatc

SEQ ID NO: 37062 - DNA, 201 bp, Homo sapiens
tttagtagtagtttaagtatatgtaataataactcctaaaatttacctttaacttgtacttttttagtcattgaaaaactccattttcaaggattggtagrgtttgccaaaccgaagatgtcaggtagcttaatgcccactagtgacccttgcaacagaaatttcaaggcagataccaagttgcagtgggatgaagagcaa

SEQ ID NO: 37063 - DNA, 201 bp, Homo sapiens
ttttcatttaacagtatgcattagagatgtttctattaattcatgtgggtctacttcattttatttgctgcatatgtttcattgtatggatatatgtgggyatagtgttttgtggcatggatatcccgtaatttatataccatttcggtatttcctaggtagtttccagtttttcattctaacatacagtatttcagggct

SEQ ID NO: 37064 - DNA, 201 bp, Homo sapiens
tagaatattacttttaaaataagttgagatttttttctgacaaaaagaatatcttaccaaacaatgaattgtttatttttccactaaaaattgaatttatktattttttcagagacattaaacctgacaatatactgatggatatgaatggacatattcggttagcagattttggttcttgtctgaagctgatggaagatg

SEQ ID NO: 37065 - DNA, 201 bp, Homo sapiens
tttaattttaaagtttattggcgtacattttttcacaatgattgtttttctgtttactctcttaatgtccataattgtacacattttttctttttcttttyttttttttttttagtatttattgatcattcttgggtgtttctcggagagggggatttggcagggtcataggacaatagtggagggaaggttagcagataa

SEQ ID NO: 37066 - DNA, 201 bp, Homo sapiens
ttatcaataagtgatatgcatctgtaaccataattgttggtatctttgttaggttttgatttcaggggaatttttttttcttgaaacttactgtacatgckgctgccatcccaacagtcatcacaataaacagaacatcaaactaaaagtgttcttttctttaagtagttagaaaaatgcaagaatagtacgggtcagtgg

SEQ ID NO: 37067 - DNA, 201 bp, Homo sapiens
tgtctccaaatataaagccttcagttaaatatatcttttggaattacaaagaattaaaccacttaatttataatataaattatattactttaatatgtgargtaagaaaatgatagttaaatatctcaactttaattttctggtatggtcagacctttacagatatttccatgctattttaactttaggatataaaacagt

SEQ ID NO: 37068 - DNA, 201 bp, Homo sapiens
ctcagagttttgataagtatttaattctgctttcttttggatgtttgttgggtctaaaaataattaactgtttaatctattaggagtttgttttgctaaayggtatgacatgagattgatttttgttattttattgctagctggtgattccaatttcatttattaatcattgccttacccaatgactgaagatgtctcata

SEQ ID NO: 37069 - DNA, 201 bp, Homo sapiens
catgagaattgcttgaatcctggaggtggaggttgcagtgaggtgagatcacaccactgcactccagcctgggcaacagagcgagactctgtctcaaaaaraaaaagaaaaactcaattattctgttaaaaaattttaatatgaaagatactggtgcttaaaggtgaataatactgtttttaaccttcatgtgtctgtgat

SEQ ID NO: 37070 - DNA, 201 bp, Homo sapiens
caggctaagaaactgatctctgtctcagctaaaacaatccttcttgcatactgcagacgatccctattaggaaacagaacttccagaatgcagtccatttktaagtttttatcattcatttataccggagagtcaattaagatcagattttttttgttaaaatataaattggcaattttagtttttaaaagatctactaaa

SEQ ID NO: 37071 - DNA, 201 bp, Homo sapiens
ctaatttatgtgataaatcccacaaatctttgcaaatacgagaggccaaaaaagttgtacctctttatttcttggtttattagtggattgttttattaatmatattttctgttcataaattctctctttatttgctaatttaatttagtagtcttaatgtttttcttaccaattcataaaactctctgcacagtaaaaatt

SEQ ID NO: 37072 - DNA, 201 bp, Homo sapiens
tgcctgtagtcgtagctacccaggaggctgagtcaggagaatcacttgaatccgggaggtagaggttgtggtgagccgagatcatgccattgcactccagsctgggcaacaagagtgaaactgcatctcaaaaaacaacaacaaaaaagacaagacataccccaagactgggcaatttataaaagaaagaggtttaattgg

SEQ ID NO: 37073 - DNA, 201 bp, Homo sapiens
tcctgattgactgctctggttttacccagagccaggtaggttttccccttcccattttgttattaagggacatgtgcagaggttcaggactcctgagtctytgggcagtgctgatctcactcctctgctcagcctcatgctttgtcttaaaacttaattgtctgagttggagcacttgcaaaagctctaactcaggctagt

SEQ ID NO: 37074 - DNA, 201 bp, Homo sapiens
aaagaggttagtagtcaggcaaattttgtagtgcccatgggatagtgattaaagctgctttttgagactagtaatataatatataatttttaaaatatttytaaagttatttttatagttcattaatattatttaatatggatttaaacatttgaattatcttcctgttacaaggtaaattctcattgggataaatgtttt

SEQ ID NO: 37075 - DNA, 201 bp, Homo sapiens
gtggaggggtggggcacaatctcgggcttattgcaagctcccccttccgggttcacgccgttctcctgcctcaacctcctgagtagctggaactgtaggcrtgcgccaccacacctgggtaacttttatgtttttagtagagacggggtttcaccgtgttagccagaatggtcttgatctcctgaccttgtgatccgccct

SEQ ID NO: 37076 - DNA, 201 bp, Homo sapiens
agctcaagaaatgagtaataagtttatttctaatgatcagttctaatccttatttaactctttgtactattcactgtattctaacacaaattctgtgattyagatgtcatctaaaatcgacgttgccccattttatagatgaggaaacccagcttcagagacattagttagtaagtagcatagcctagattaaaatctaag

SEQ ID NO: 37077 - DNA, 201 bp, Homo sapiens
taatctctgttctcaccctaagaatattaattctgccattctaggtaatgtttactctaattcacttaaaatttttcttttccctttttttttttttttttgagacggagttttgcttttgttgcccaggctggagtgcaatggcgcaatctcgactcaccacaacctctgcctcccgggttcaagtgattctcctgcctc

SEQ ID NO: 37078 - DNA, 201 bp, Homo sapiens
tccaagtactcaggagtaggcagagttacagttttaactagggtttgctgacataatttgaattgttcagaaatgaggtggctcctttttttacactagcrtgagacagagaaacaggtggagattttgtggattttattctcattcgataatcccatggtaaaccctaaatgatcctctttctagtgacaggaccatcta

SEQ ID NO: 37079 - DNA, 201 bp, Homo sapiens
atctagctccccctgcacttgtccattgttgacattggtgacatggggccagttttttttttttctgtgatgtttatctcaagtagaattgttactttctrtgagttgtctgtctttctggtctacccctttcctaatcctttggctagaaagagcaggcttttgttggggctttttctctttacagctgttgtcatttat

SEQ ID NO: 37080 - DNA, 201 bp, Homo sapiens
ggccaggcctagggcttcaactgccttgtgccgactcaggatgctgttcttctctctgactccagctggattaataaaagcatgattgtgattttttttttctttacctatatccaagtactcaggagtaggcagagttacagttttaactagggtttgctgacataatttgaattgttcagaaatgaggtggctcctttt

SEQ ID NO: 37081 - DNA, 201 bp, Homo sapiens
gaatgacaaatctgatcctggaatctttttcttttcagtaatcccttgtgtctgttgcctgagggacatggacaataaagcagtacatgatcctcagatayagggagaaggacaaggcatatagcttatttattagagccagcaagcatctgctcattatgtttggaattgctttctataagaaaattttgccctctacta

SEQ ID NO: 37082 - DNA, 201 bp, Homo sapiens
acctgccaccacacctggccaattttgtatttttagtagagacggggtttcaccacgttggccaggctggtctcgaactcctgacctcaggtgatctgccygcctcagccttccaaagtgttgggattgcaggcatgagccaccacacctggccttaaaaattttttttttgagaccgagtcttggtctgtcacccaggct

SEQ ID NO: 37083 - DNA, 201 bp, Homo sapiens
aaatgttaccaactgatattgtgtgtccttcagtgacttagatcttaccttgattctgtttgtggtatagtttcctacaatatcaccatttaaacaatgtkgcacactttgccttcaaactggaaggaccctattagaagccattttgattgagaagggtcattgctggttggcgtattggtctgttaaagagaatcttta

SEQ ID NO: 37084 - DNA, 201 bp, Homo sapiens
ggacctttgtagcagtacacgtgagagagagagtagtgccttgaagttgggctgtagtaggggagatggagatttgtgatatcattttatttaattttttwattttgaattattattattattatttttgaaacaagagttttgctctttttgcccaggctggagtacaatgacatgatctctccccactgcagcctccac

SEQ ID NO: 37085 - DNA, 201 bp, Homo sapiens
agctattgttccaataaaattatcttctataaaagttggactattatctttgcactcatagtatgtaaacatgtctgttttctcacacacttggcagttgyggatgttaccaaattatttctatatttaaaattacatttaaaactttttactgaaaaataagttaaaaatgatacatctcatgtttgatttggccatgaa

SEQ ID NO: 37086 - DNA, 201 bp, Homo sapiens
ttgtcatgtgaataaaatcatgccagttaggacctttgtagcagtacacgtgagagagagagtagtgccttgaagttgggctgtagtaggggagatggagrtttgtgatatcattttatttaatttttttattttgaattattattattattatttttgaaacaagagttttgctctttttgcccaggctggagtacaatg

SEQ ID NO: 37087 - DNA, 201 bp, Homo sapiens
cccctttatatgtaccaacggacttcatgtgctttttgtgtgttgataggatctttgcacctgtgttcttcagataaattggcctgtaattttcctacttygaatgttctgatcagattttggtatcttggttatactggtcttacaagaagagggaaatgttccctcctttagtattctccagaagagttagtgaagatt

SEQ ID NO: 37088 - DNA, 201 bp, Homo sapiens
ggtgtttggtgcagttaagctttgggtatgtgttatttggatacacaccccaaaccacacacacatagccacatatagtaacttttaatgctttgcttttygttcagggatgaagaattttctgtgagttcagtcttggcttctgatgttatccatgcaagtcggaaagatataccctgtatatttagggtaagtgtgtat

SEQ ID NO: 37089 - DNA, 201 bp, Homo sapiens
ttaaaatacttgattaagtaatggtactagctccagtgcctgggacatggtaggtgtacaataaatacgtgctactagtatgaattgtccaagattctttstcccatgtcttttgtctggtgatatggtttagctctgtgtccccacccgaatctcatttcgaattgttaccccctcgtattgagggagggacctggtggg

SEQ ID NO: 37090 - DNA, 201 bp, Homo sapiens
tgttttttaaaataaaaataaattctgctctctactttctaaataatgtggaaagggttatttagcaaccatcaataccctggactgtgggtggtacccargcgctaatagaataggtaaagaactgacagcttgactcttttgttaaaaaaaaaaaaagtatctacatctcatatacttccattgtcaattagcatttag

SEQ ID NO: 37091 - DNA, 201 bp, Homo sapiens
ggaggaagagagagaagggggagatgctacacgcttttaaacaaccagatcttgtgagaactcactcactatcacaacacaaaggggaagtctgcccccaygatccagtcacctcccgccaggtccctcctccaacactgggattacagtttgacatgagatttgggtgacggcacaaatccaaaccatgtcaagggtctt

SEQ ID NO: 37092 - DNA, 201 bp, Homo sapiens
aggaattgcagtaagtgggccttgagtgatgtagtggcaaggggcgtgtgtgtgcatgtatgtgttggtaaggggccattctgtggtcctatgattaggtyccaatctttagtgaggctttgagactgcacagtgaacaccagggcttctcagcttctcagtacccctgccacctctgtacctcccttcctgccttcctgc

SEQ ID NO: 37093 - DNA, 201 bp, Homo sapiens
aaatgatttatgcaaaaacaggttggttgcctcaggttatagctgctttgaggaaggggatgagattgcttctacctgcagaggtttgaagcaatacgagrgttcagagttctcagcactgtcttttgctgcctgaaggttccaatatgttgtccaaaagacagaaactgagacaaaattaatatagagtttatttgggcc

SEQ ID NO: 37094 - DNA, 201 bp, Homo sapiens
aaacaggttggttgcctcaggttatagctgctttgaggaaggggatgagattgcttctacctgcagaggtttgaagcaatacgagggttcagagttctcascactgtcttttgctgcctgaaggttccaatatgttgtccaaaagacagaaactgagacaaaattaatatagagtttatttgggccaaggttgaggactgc

SEQ ID NO: 37095 - DNA, 201 bp, Homo sapiens
ttccaatatgttgtccaaaagacagaaactgagacaaaattaatatagagtttatttgggccaaggttgaggactgcagcccaggaaacacagagaagtgmtccagagaacaaaaaagaggctcaggtttttaaagaaaaatcaggagagggaacatacaaaagtctttggtcaggagttctcactggtttgcagaaataa

SEQ ID NO: 37096 - DNA, 201 bp, Homo sapiens
gtagggggtgcctgcagtcccagctacttgggaggctgcagcaggagaatggtgtgaacccgggaagcagagcttgcagtgagctgagattgtgccactgyattccagcctgggcaacagagcaagacttgtctcaaaaaaaaaaaaaaaaagaaaagaaaattagctggatgtgatggcatgtgcctgtagtcccagcta

SEQ ID NO: 37097 - DNA, 201 bp, Homo sapiens
caggccatccaagaagagttgaataaagttaaagcatctaatatcataacagaatggtaagattgaatcatatagtcccactagaataatttctaagtttrtcataattatttggagagaagttacatgtttagtttccattgcttgcttttagaaaaatgatggccaaatatgttacaaagatttgaaaataactagatg

SEQ ID NO: 37098 - DNA, 201 bp, Homo sapiens
tcacgcctgtaatcccagcatttgaggcgggaggatcatttgaggtcaggagttcaagaccagcctggccaacatagccctgtcactactaaaaatacaaraaaattagccagatgtgggccaggcgcggtggctcacacctgtaatcccagcactttgggaggctgaggcgggcagatcacaaggtcaggagatcgagac

SEQ ID NO: 37099 - DNA, 201 bp, Homo sapiens
aaagggaaaataaaaaccaggcagtcagtagaaacagacccgcaggagttcgcagtatgaaatttttatgaatggactttaatcgtgtgatttgttcaagraagtagacatatgaaggatttcagcaaacaactggaatctatacaaaactgtcaaatagaatttccaggagcaaaaaattaaataactaaaagactcaat

SEQ ID NO: 37100 - DNA, 201 bp, Homo sapiens
actaactactctcttcatgagcaaacagaagtaggactgtagtatttacagttatatataagaccgtttctaaagtgttaccaatcatttttaaagagatrcataaaatgttcagaattatatgtaaaacaaagtagagcttctttgatgtcttaagtatttaaaaagatcctctactattccacctaaaatcgtaagatc

SEQ ID NO: 37101 - DNA, 201 bp, Homo sapiens
atatgtaaagaactcttaaggtggacgtggtggttcatacctataatcccagcactttgggagtctaaggcatgaggatcacttaagcccaggagttcaaraccaatctgggaaatatggtgagaccttatctctacacaaaatcttttttaaatattagctgggtgaggtggtgcatgcctgtagtcccagttacctgga

SEQ ID NO: 37102 - DNA, 201 bp, Homo sapiens
gttaggattctgtttaggaagacggaatggattctgtctagacaacaaacagtctcccctatagttggcattgtggcctacagtttatttgtatcattttmgaaaggaatttttagtgctatagtaaagctttatgctatactttgtgtttccccttcccaccccaccacctgtaactaacaccttccctaataatgtgtt

SEQ ID NO: 37103 - DNA, 201 bp, Homo sapiens
actcccgacctcaggtgatccgtccacctaggcctccccaaagtgctgggattacaggcgtgagccactgcacccagcaatagatctttttttttttttttaatgactttaccatagtagctttgtatatgaatctgatggcaattgggatgtagatatcttttgcaataaataataatagtcacagattgtataaccagt

SEQ ID NO: 37104 - DNA, 201 bp, Homo sapiens
ctccagctgtagaagtatttcctttgcaacagtgtttctcatttatgtttcagttctcagatatacaaagatgattgctgtgagagggcattagttttttracagacaattaaattcagtttttgaaaaccctaattgtttagtgttcgtcaaccctaagaatttttacataaagctgcttaaatattagttaaaaagtca

SEQ ID NO: 37105 - DNA, 201 bp, Homo sapiens
ccaagcatagaggtgaaccataacagacaggatgcagttcagaaggtttcaggacagacttaagtatctgatatggatgaacatcttgagaggagattagraaatctggggagggtttaaggttgcttaggaaatgaagcaaatgagaaaacaataagaaaaatagaaattaggaaaggaaaagtaataacttatatggtt

SEQ ID NO: 37106 - DNA, 201 bp, Homo sapiens
caccaagcatagaggtgaaccataacagacaggatgcagttcagaaggtttcaggacagacttaagtatctgatatggatgaacatcttgagaggagattwgaaaatctggggagggtttaaggttgcttaggaaatgaagcaaatgagaaaacaataagaaaaatagaaattaggaaaggaaaagtaataacttatatgg

SEQ ID NO: 37107 - DNA, 201 bp, Homo sapiens
tcaaagtaattttttccttttaaaattatttaataattagaaatagtgataataaaaattcaaaagtggtttttgtgtttttctttttttgttttttttttgagatagaatcttgctttgttgcccaggctggagtgcagtggtgtgatctgggctcactgcaacctctacctcctgggtttaagcaattcttctgcctca

SEQ ID NO: 37108 - DNA, 201 bp, Homo sapiens
tgcccatggtaagaggaattaagagtgagtgtaaaaaagggcgggtgtggggggagtataaatacataggcttaaatacatgggtagacttcaaaggataygtgaaagtaatgaggaaatgtttctctcagtataccacaatatgtgtaagatacatgatgacatacctgatgaacaaaacataaaatttagacatctgtc

SEQ ID NO: 37109 - DNA, 201 bp, Homo sapiens
accaacggacttcatgtgctttttgtgtgttgataggatctttgcacctgtgttcttcagataaattggcctgtaattttcctacttcgaatgttctgatyagattttggtatcttggttatactggtcttacaagaagagggaaatgttccctcctttagtattctccagaagagttagtgaagattgttattatttttt

SEQ ID NO: 37110 - DNA, 201 bp, Homo sapiens
ggagacatttggtaatgtaggttgaatgaattatgccgttatacttgttatatgcagggctagaagcagtagctctaatcttgaaacattgtatgaaactsatatttttaatgccagggacttgtttcttctttgatttaccctattttatttcaaagtaattttttccttttaaaattatttaataattagaaatagtga

SEQ ID NO: 37111 - DNA, 201 bp, Homo sapiens
agcaataacaacttccttattacatgtacctctaacttgaaaatactgtgaattctacacatccaagacctttgtagaaggaagcaaaaaaaaaaaaaaaaccacttagaacatgatcctttgatcatgtcaacatcctgcttaatatacttcagtgactactgaaagctttcagaatgacatttgaactcctctttagca

SEQ ID NO: 37112 - DNA, 201 bp, Homo sapiens
aagcaataacaacttccttattacatgtacctctaacttgaaaatactgtgaattctacacatccaagacctttgtagaaggaagcaaaaaaaaaaaaaaaaccacttagaacatgatcctttgatcatgtcaacatcctgcttaatatacttcagtgactactgaaagctttcagaatgacatttgaactcctctttagc

SEQ ID NO: 37113 - DNA, 201 bp, Homo sapiens
atcgatattgtcatggctgtgaaatagaacaatgctaattagattttatgaaagttttgtaaaagcagtatagttatcttgctacagcaagaatcccatcyttaagtatcatcgtttacttagagtggctaatgcaatgccccaagttgactcagatactattaaaagcactcaagcatctacttagaagtggtatgccct

SEQ ID NO: 37114 - DNA, 201 bp, Homo sapiens
gtgaattgctttaagttcagcttttcatttcaaggagaataaaatataaaaaattaaatcattactttttaggaaatgcaaattcttatatttttagttayaaaatatcaaaatatcctatttaatactcatcaaaccataccatcatgacatttgatgtgtcaagacaaagcattaatagaagatagtttatggattatt

SEQ ID NO: 37115 - DNA, 201 bp, Homo sapiens
atcatgacatttgatgtgtcaagacaaagcattaatagaagatagtttatggattattcattagttatttaaaacaatctagtaaagcacttaattaaaawgtatatatattttttgagatatagtctgtgttgcccagactggagtgcagtggtgtgatcttgtctcactgcagcccactccacctcttgggttcaagca

SEQ ID NO: 37116 - DNA, 201 bp, Homo sapiens
tatgatgggttggataatctttttttcctgtgacttctgatgtcttattcttccgtatgtgcatctgtaagttgacttacatccttttgagtataattggratatgattaatcaataaaactatattttgatttattattctttctgtgtttagaaattattagagttggtgacaataagaagattcatcagattgaactc

SEQ ID NO: 37117 - DNA, 201 bp, Homo sapiens
tcatgacatttgatgtgtcaagacaaagcattaatagaagatagtttatggattattcattagttatttaaaacaatctagtaaagcacttaattaaaaartatatatattttttgagatatagtctgtgttgcccagactggagtgcagtggtgtgatcttgtctcactgcagcccactccacctcttgggttcaagcag

SEQ ID NO: 37118 - DNA, 201 bp, Homo sapiens; identical to SEQ ID NO: 5596

SEQ ID NO: 37119 - DNA, 201 bp, Homo sapiens
tagtctgtgttgcccagactggagtgcagtggtgtgatcttgtctcactgcagcccactccacctcttgggttcaagcagttcttgtgccccagcctcccsagtgctgggattacagtcatgcgccaccatgcccagctaatttgggcaaaatcccggccaacatggcaaaatcccatctcaaactcctggcctcaagtga

SEQ ID NO: 37120 - DNA, 201 bp, Homo sapiens
tggcggatcactcgcggttaggagctggagaccagcccggccaacacagcgaaaccccgtctccaccaaaaaaatacgaaaaccagtcaggtgtggcggcrcgcctgaggcactcggcaggctgaggcaggagaatcaggcagggaggttgcagtgagccgagatggcagcagtacagtccagctttggctcggcatcaga

SEQ ID NO: 37121 - DNA, 201 bp, Homo sapiens
tcccgagtgctgggattacagtcatgcgccaccatgcccagctaatttgggcaaaatcccggccaacatggcaaaatcccatctcaaactcctggcctcargtgaactgcctgccctggcctcccaaagtgctgagattacaggcgtgagccaccatgcctggcctaataaagcattaacaaaaaatttagatgcaagggt

SEQ ID NO: 37122 - DNA, 201 bp, Homo sapiens
actgcctgccctggcctcccaaagtgctgagattacaggcgtgagccaccatgcctggcctaataaagcattaacaaaaaatttagatgcaagggtacatrtgcttatttattacatggatattacatgcataatggtggggggttgggcttccgtactcatcacccaaatactgggcattgtatccattggtaatttttc

SEQ ID NO: 37123 - DNA, 201 bp, Homo sapiens
agttataaaatatcaaaatatcctatttaatactcatcaaaccataccatcatgacatttgatgtgtcaagacaaagcattaatagaagatagtttatggwttattcattagttatttaaaacaatctagtaaagcacttaattaaaaagtatatatattttttgagatatagtctgtgttgcccagactggagtgcagtg

SEQ ID NO: 37124 - DNA, 201 bp, Homo sapiens
ttattacatggatattacatgcataatggtggggggttgggcttccgtactcatcacccaaatactgggcattgtatccattggtaatttttccaccctcygtacttctgtcctctttcctttggagtctcgagtttttttcctccatttttatctccatatgtaccctttgtttagctcccacttataaagcattttgaa

SEQ ID NO: 37125 - DNA, 201 bp, Homo sapiens
gctaagctagtgattttgtttttttccagtaaagctttattatgttctaatccagttacctctctaaccattggtacagaatttgggatcgatattgtcayggctgtgaaatagaacaatgctaattagattttatgaaagttttgtaaaagcagtatagttatcttgctacagcaagaatcccatccttaagtatcatcg

SEQ ID NO: 37126 - DNA, 201 bp, Homo sapiens
ccatattttcttttgcttatactccaaagacaatctcccatctaagaggagagagcaacaagcctcttttaaagggcctctttaagatatatataaatttsactcctcaggagtttacattctaagagatactaaagcagagctcaggagttaaacatgtctgctgtatgcatcggatacatgctgatttacctgaaatat

SEQ ID NO: 37127 - DNA, 201 bp, Homo sapiens
gaaatcttattatttagaaaacctcacacatttgtgcatctgtgttaattgttagatttaaagagtgttaattctgtgtttcaagggtgaagttttaatartgtatcagctatgagtaacttggacttttgtaaacatcacctgctctaccatgtacataaaagaacagttccataaacctcttcccagttgttgacaggt

SEQ ID NO: 37128 - DNA, 201 bp, Homo sapiens
acaaaaattagccagatgtggtggtgtgcgtctatagtcccagttgctctggaggctaaggtgggaggatcgcttgagcctgggcagtgtaggttgtaatragctgagatcacaccactgtaccctagcctgggtgagaacctgtatcaaaaagaaaaaattatatttcatatatatgtattgtgaatttgactttaaaat

SEQ ID NO: 37129 - DNA, 201 bp, Homo sapiens
atcgcttgagcctgggcagtgtaggttgtaataagctgagatcacaccactgtaccctagcctgggtgagaacctgtatcaaaaagaaaaaattatatttmatatatatgtattgtgaatttgactttaaaattatttttccttagtatgtaatactaaaacgttctttaacttaaatgtagcctcaacatttttttaaaa

SEQ ID NO: 37130 - DNA, 201 bp, Homo sapiens
gatagccaaaaaagttttttttttttttatgttaaacattttagcactttttacatgggtggtaatatactgggcataatggatacaaagacaaagcagaygtggaaatggacctcaaagtacttattttataattagaaaaataattatatagttacacactatgcaatgtggaaagcaataaatgccatgagaaatacc

SEQ ID NO: 37131 - DNA, 201 bp, Homo sapiens
atatatacaataacccggaggggcctcaagggtgttatgctttgtgagaagaattaaatctcaaaatgttacatactgtatgtttccatttatataacatwcttgaatgacaaaattacagagatagagaacagatgaataatttccaggggacagggcctggggaaaatgaatgggggagtaagtagaaatacaaagagg

SEQ ID NO: 37132 - DNA, 201 bp, Homo sapiens
atgtggaaagcaataaatgccatgagaaatacctaggctaagtactatggacattcagaaggattcattcaatatttattgagaatatttaagtttgaagkcttatgctaagcaaaatacaatacttcctgcccttaagcgtaatatttcctgcccttaagcataatacaatatttcctgccctgacagtctaattggaaa

SEQ ID NO: 37133 - DNA, 201 bp, Homo sapiens
ttgaaggtaaacttcatgtcttagagttttatgaaatttatcaaatttccaaatgtgttataattcatgaacttaaaatatagggatgtggagaatacaasaagggactagtgagactgttgtgtttaaggaaggagatactctcctttttcttgtgttctttttaaggaaatatatttctagacttgtaaaagtatgttg

SEQ ID NO: 37134 - DNA, 201 bp, Homo sapiens
aaatgccatgagaaatacctaggctaagtactatggacattcagaaggattcattcaatatttattgagaatatttaagtttgaagtcttatgctaagcawaatacaatacttcctgcccttaagcgtaatatttcctgcccttaagcataatacaatatttcctgccctgacagtctaattggaaagacaaatatataac

SEQ ID NO: 37135 - DNA, 201 bp, Homo sapiens
tatgtaaagtgctttctgttttccccttaaaaagaaccagagcggccgggtgtggtggctcacgcctgtaatcccagctctttggaaggccgaggtgggcrgatcacgaggtcaggagatcgagaccatcctggctaacacagtgaaaccccatctctactaaaaatacaaaaaattagctgggcctggtggcactcacct

SEQ ID NO: 37136 - DNA, 201 bp, Homo sapiens
taagcttctatgattttgcatggaggcttatcatattagaaaaaagagatttaaaaaacactataataaatccaattacttatatcagtttgtttagactytgagcctactaaagagttttttatgagaaaactattagtttgggtcttttccagtttagaaaaacataacacacagctggttaactataataatttaaat

SEQ ID NO: 37137 - DNA, 201 bp, Homo sapiens
caatattaagttggtgtggagttttgcatggggtgtatatatctttacaaagaaaggacagtgagacttgatacatgacttcgaggagtttatatgtgcamttcttggtttgcaaagatgcacctgctaagctagtgattttgtttttttccagtaaagctttattatgttctaatccagttacctctctaaccattggta

SEQ ID NO: 37138 - DNA, 201 bp, Homo sapiens
tatatttttaaaaggtactattccagtagcccagtttctgagggtggtttgaaacttgtgttattgaaatgtcttataatatcaggtgtattccttttccmgaacagaaataatataataaacatagtaattctttgtatatttcctagttttacataaagtatgctctaaaaattttctttttgcgtttcagacagcatg

SEQ ID NO: 37139 - DNA, 201 bp, Homo sapiens
ttaataaagtcttctaacacataaattgtcacaatttatatcaatttccaaacaaaggcaaaggtttgaaggtttgcctttatcctttccatattttttarcgtatctgtttatgtcatctaagcaatattaagttggtgtggagttttgcatggggtgtatatatctttacaaagaaaggacagtgagacttgatacatg

SEQ ID NO: 37140 - DNA, 201 bp, Homo sapiens
ctttgggaggccgaggtgggcggatcacgaggtcaggagattgagaccatcctggctaacatggtgaaaccgcgtctctactaaaaattcaaaaaaaaaaattagccgggcgcggtgacgggtgcctgtagtcccagctactcaggaggctgaggtgggagaatggcgtgaacccaggagtcagagcttgcagtgagccga

SEQ ID NO: 37141 - DNA, 201 bp, Homo sapiens
tcaggatcctcctgtctcagcttaccaagtagctggagctacaagcatgtgccaccatgcccagctaattaaaaaatttttgtgtgtgtggagatggggggtctcattatgttgtcctgactggtctcaaactcctgccctcaagtgatccgcctgccttgggcttccaaagtgttggaattgcaagtgtgatcatctgca

SEQ ID NO: 37142 - DNA, 201 bp, Homo sapiens
gaatgagtagggagagggagacagagaatgagaatgaatactgtgttcctgagttgctacttcagtctgacttgttgaatgatagggtattttttttttttatgattgggtatttttaatttaaaagaacttaatgggcaggggagttaatttcactcttgtatttctttcaatggtttattgtctcttcctttgtttttt

SEQ ID NO: 37143 - DNA, 201 bp, Homo sapiens
gccttaagactatagatcacatttaaatttaataagatgtattatttttcatttatagtaaatagtatttgaaagactatgttttttgtctgcttagttttaagttgttgaaatgattatggtttgtatgtttgtgtatacagtaatagtcgatgtcagcataactctagaataaattacagtggagttgtagaagtaaaa

SEQ ID NO: 37144 - DNA, 201 bp, Homo sapiens
tgccttaagactatagatcacatttaaatttaataagatgtattatttttcatttatagtaaatagtatttgaaagactatgttttttgtctgcttagttttaagttgttgaaatgattatggtttgtatgtttgtgtatacagtaatagtcgatgtcagcataactctagaataaattacagtggagttgtagaagtaaa

SEQ ID NO: 37145 - DNA, 201 bp, Homo sapiens
gacattgaagagttaggtatttattgtagactttgcagtctgggcttgtttgtacctgtctttcttgggaaagcattccaggtatttgaagggacttgggytcaaaggccaataacacagtggtttttgcagtcttatataggtattgtcttggtggtcttggataagatccaaaagttttctctggattaccaggcaaaa

SEQ ID NO: 37146 - DNA, 201 bp, Homo sapiens
gtgccttaagactatagatcacatttaaatttaataagatgtattatttttcatttatagtaaatagtatttgaaagactatgttttttgtctgcttagttttaagttgttgaaatgattatggtttgtatgtttgtgtatacagtaatagtcgatgtcagcataactctagaataaattacagtggagttgtagaagtaa

SEQ ID NO: 37147 - DNA, 201 bp, Homo sapiens
agtgccttaagactatagatcacatttaaatttaataagatgtattatttttcatttatagtaaatagtatttgaaagactatgttttttgtctgcttagttttaagttgttgaaatgattatggtttgtatgtttgtgtatacagtaatagtcgatgtcagcataactctagaataaattacagtggagttgtagaagta

SEQ ID NO: 37148 - DNA, 201 bp, Homo sapiens
aagtgccttaagactatagatcacatttaaatttaataagatgtattatttttcatttatagtaaatagtatttgaaagactatgttttttgtctgcttagttttaagttgttgaaatgattatggtttgtatgtttgtgtatacagtaatagtcgatgtcagcataactctagaataaattacagtggagttgtagaagt

SEQ ID NO: 37149 - DNA, 201 bp, Homo sapiens
tgtttacttctagatattaaaactgacatcggataagactatcactgggttgctaggtgtatatgattaaacatcatctacccccaagatcagaagaggaraaatagcgacagattcttaccttttataaaggaagggtagtggaagcacagctccttctttttactccgtatctcatagactgaaccttgcaaaggaaat

SEQ ID NO: 37150 - DNA, 201 bp, Homo sapiens
atttaaaaaatacttgtttgaaaagattaggaaaagcccccgcaatgaaacagtgactaaagcccctttttgagattgtattgctagctacctgtgatctkgccctgagctaaaagcataactaacaaacatttaacaacagactaagttcgggtatgtagtgaagctgacatatgatatcataaagcttttccatactct

SEQ ID NO: 37151 - DNA, 201 bp, Homo sapiens
aacggctatataatctgaatcatggtataccagttcctcatttacgatatatgttctgtttgcttcaaaaatgttttgatttggctactatatgatagccmcataggatttgggtgggattccactctacagttatttagtgtagacctttcaaaatatttggggtttaatagttaaaagtaatccgcaagctgccccccc

SEQ ID NO: 37152 - DNA, 201 bp, Homo sapiens
agtttgttgactacttctgttgctcaaggtcgtttttattttccagactgtgggtcatttattttgttcatgattgcatacctaaaaatttatcttgcatyttatctaaagggaaaaacatcaaaatagtagcaaagccataaaaaatttacataataaatctgtaatcattttagtttctaaatttaatgtctttgctga

SEQ ID NO: 37153 - DNA, 201 bp, Homo sapiens
ttttgttcagcttagttttgattaattttccttttttatggatattgaattatctttataattcagtgaaaaggcagtgtttgagatatttcatgtgcttkcttctctgtaaagttctcagtttttgtcactgaaacctataagccactgagcggctgctgtctgtatctgcttatgccagatagtccttggctttcattt

SEQ ID NO: 37154 - DNA, 201 bp, Homo sapiens
ctttataattcagtgaaaaggcagtgtttgagatatttcatgtgctttcttctctgtaaagttctcagtttttgtcactgaaacctataagccactgagckgctgctgtctgtatctgcttatgccagatagtccttggctttcatttgccagaatgcagcaagctttttgttatatagcttcaaatggcttttttcctta

SEQ ID NO: 37155 - DNA, 201 bp, Homo sapiens
atatatttcaaaaataagatggcaggtaagaaaatacatatattcatagggatagcttcattggaaatattatttctaagctaactgcccaaggtcacatwaataataagtgccagagtccagatttcaacacaggtgtatcttactccaagtctatgatgttggccactatcacattcttaatatattagaataaattac

SEQ ID NO: 37156 - DNA, 201 bp, Homo sapiens
attatttctaagctaactgcccaaggtcacattaataataagtgccagagtccagatttcaacacaggtgtatcttactccaagtctatgatgttggccaytatcacattcttaatatattagaataaattactgggcaaaaagtcgttctgtttaagctcacttaagtatttgattctgatgtaccttgttatttttctg

SEQ ID NO: 37157 - DNA, 201 bp, Homo sapiens
agtcagtagcacagctcacagataaagtattttattactatctgaagttttcttttgttttcatgcaggacattttaaaaacgtatatggcagcagaaacytgtttctcaatagaaaaaatacattcagaggcatttctgggatagtctatctgtgttagtatttggtgctatctatgtccagccaagttatctaccctca

SEQ ID NO: 37158 - DNA, 201 bp, Homo sapiens
tatgctaagttcttatgctaaaatatctgttcccaagtaaaactttattttcctgaagtaaaagtcaagtgctgattgtgtctttttttttttttttttttggatttgaaatttattcaaagttagtttctcaggtaaaccactgatacaagaatgtctacacgtaataactttaattattcaatttgccagtataagaag

SEQ ID NO: 37159 - DNA, 201 bp, Homo sapiens
ttatgctaagttcttatgctaaaatatctgttcccaagtaaaactttattttcctgaagtaaaagtcaagtgctgattgtgtctttttttttttttttttttggatttgaaatttattcaaagttagtttctcaggtaaaccactgatacaagaatgtctacacgtaataactttaattattcaatttgccagtataagaa

SEQ ID NO: 37160 - DNA, 201 bp, Homo sapiens; identical to SEQ ID NO: 5617

SEQ ID NO: 37161 - DNA, 201 bp, Homo sapiens
agccatgaaaatgtcacattactctagaccagtaattttaactttggaaaaattttattattttttttttagacaaagtctctgttgcctaggctggagtscagaggcgccatcttagctcactgcaacctccgcctcctgagttcaagtgattcttctgcctcagcctcccaagtagttgggatacaggcaagcaccacc

SEQ ID NO: 37162 - DNA, 201 bp, Homo sapiens
agtttgagaccagcttaagcaacatagtgatactctgtctctgttttaaagaaaaaaaaaagtttatatgccacagttttattctgtttttttttttttttaacttcatttttttctggccatataggagaggtccaaaaatatatcagtttaattgacagaaactttttggaggacagtttagtataatacattccaaaa

SEQ ID NO: 37163 - DNA, 201 bp, Homo sapiens
ccaggagtttgagaccagcttaagcaacatagtgatactctgtctctgttttaaagaaaaaaaaaagtttatatgccacagttttattctgtttttttttytttttaacttcatttttttctggccatataggagaggtccaaaaatatatcagtttaattgacagaaactttttggaggacagtttagtataatacattc

SEQ ID NO: 37164 - DNA, 201 bp, Homo sapiens
gcaatacctaaatgaatgggcatggctgtgtttcaataaaactttatttacaaaaacaggcagcaaaccagatttggccgtgggccataatttactaactygtgatatacaacacactcagagaaattgcttcagtaatcaaagtaatactgttataatattttacccttattatgggtggtaaaactgaagcatagagat

SEQ ID NO: 37165 - DNA, 201 bp, Homo sapiens
tggaaacacacacatatgtttggaaacacacaaatatacacacacatatatgtttggaaacacacacacacacacacacacacacacacacacatatatatttattttattttatttttttcttttggagacagtttctcattccatcacccaggctggagtgtagtgacacagtcacggctcactgcagccttgacctcc

SEQ ID NO: 37166 - DNA, 201 bp, Homo sapiens
tgtcactctgtcacccaggctagagtgcagtggcacgatctcagctcactgcaacctccgcctcctaagttcaagccattctcttgcctcaaccttctgaktagctgggattacaggcgtgcaccatcatgcctggctaatttttgtatttttttaaaaatagagatagggtttcaccatgttggccaggctggtctttga

SEQ ID NO: 37167 - DNA, 201 bp, Homo sapiens
ttggaaacacacacatatgtttggaaacacacaaatatacacacacatatatgtttggaaacacacacacacacacacacacacacacacacacatatatatttattttattttatttttttcttttggagacagtttctcattccatcacccaggctggagtgtagtgacacagtcacggctcactgcagccttgacctc

SEQ ID NO: 37168 - DNA, 201 bp, Homo sapiens
atatgtttggaaacacacacatatgtttggaaacacacaaatatacacacacatatatgtttggaaacacacacacacacacacacacacacacacacacatatatatttattttattttatttttttcttttggagacagtttctcattccatcacccaggctggagtgtagtgacacagtcacggctcactgcagcctt

SEQ ID NO: 37169 - DNA, 201 bp, Homo sapiens
agtttgctgagaatgattgtttccagcttcatccatgtccctgtaaaggacatgaactcatccttttttatggttgcatagtattccatggtgtatatgtrccacattttctttatccagtctatcattgatgggtatttgggttggttccaaatctttgctatggtgaatagtgctgcaataaacatacgtgtgcatgtg

SEQ ID NO: 37170 - DNA, 201 bp, Homo sapiens
actgggattataggcctgagccatcacgcctggccagtatttaaaataattttaagtagacaaatataagtaaaaatactggcttcaagaaaacacattaraatgtttagacccattattttggggtagttaatttttatttttattttatttttttttgcgggggagacggagtctcgctctgttgcgaggctggagtgc

SEQ ID NO: 37171 - DNA, 201 bp, Homo sapiens
gcaaaaagccacagagagatagaaaagaggagatagaggagaaaattagaggaccaattgaggaggcctgaataataatctgatgaatgataggaattctraaagagcactttgaaagaacagagggggaaaaaaatcatcaatacaagaaaatgttgtagaaccaaaggacacgagttcctagatagaaggggcctacca

SEQ ID NO: 37172 - DNA, 201 bp, Homo sapiens
ggtataagataatttaaaaagaaggtttaataattatggaacatatgtcttacaaattatttttaaaatatatacactaacacttgatagatggaacttgyatgaggaaatacaaaaactttgaatagtttaagattagcacttttaatattcctatatcataaattgataagcagataaaaaatcaagacatagaggtat

SEQ ID NO: 37173 - DNA, 201 bp, Homo sapiens
tggagtgcagtggcaccatctcagctcactgcaacctctgcctcctgggttcaagcgattctcctgcctcagcctcctgagtagctgggattacaggcacrcaccaccatgcccagctaatttttttgtatttttagtagagacggggtttcaccatgttggccaggatgatctccatctcctgacctcgtgtcccaccca

SEQ ID NO: 37174 - DNA, 201 bp, Homo sapiens
ccgcctcctggattcaagcgattctcctgcctcagcctcctgagtagctgggatgacaggcgcgtgccaccatgcctgggtaatttttgtatttttagtaragacggggtttcaccatgttagacaggctggttttgaactcctgacctcaagtgatccgcctgcttcggcctcccaaactgctgggattacaggcatgag

SEQ ID NO: 37175 - DNA, 201 bp, Homo sapiens
tttcttcataagaagataatagaatcaatactctctataacatcttattcacaatgacaaggattcaaaaaaaaaaatcactgaaccaaacaaaaatgggsatgtggatagtgatacagagtcagataaaagcagtcagtagaggcctggctggcacacatgttggacttagcagacagagaattaaagaagtgatcatag

SEQ ID NO: 37176 - DNA, 201 bp, Homo sapiens
tcaattatttttttgttcaaatacaaaatttgggagtagaggttatttctaatgacttaacagcatcatgtggtatgtctgattaaggttgattaaagttkatgccaaataggttgtggtaatgtaaggcctaatttcaggttgaaaaaaaaaaggccccaagttatttctaaccatgtttaaactcagcactagacttgc

SEQ ID NO: 37177 - DNA, 201 bp, Homo sapiens
cacacaacagaatgaaaggttatttattatacatcatttattgttaaaacatgctaagagaattaatttggaaaacaaaggaatattccaaagagataaartctacatttgcttaccaccatgtaaatcaggtaagactaagatacctttaactatggtgtattcaataagaaatttcaatctgccatctgtctctggaat

SEQ ID NO: 37178 - DNA, 201 bp, Homo sapiens
tatcatttgaagtcaggtaatatgattcttccagttttgttctttttgcttgggatagctttggctattctgggtcttttgtaattccatataaattttargattattttttctatttctgtgaaagaatgtcattaatactttgacagggattgcattgaatctgtagattgctttgggcaatatggatattttaacagt

SEQ ID NO: 37179 - DNA, 201 bp, Homo sapiens
tttaaaatttaattttagaattactatcactttctattcaaaatcaagataaaattaagtaagatgacgtcatggatgtggagaaacaggcagcttcacasgtggatactggaagtataaacgggtacagccattctggagagaacctagacagtgtagagtcatacgtaagctgtatgactcagcaatctcatttcatca

SEQ ID NO: 37180 - DNA, 201 bp, Homo sapiens
aaatatcacccacagattaaacagatacgaaaattttgcttgtttttcaggtttttattcaaaaatatttcagaaacagttgaaacatcctcgtgtatacygttccccactcttctttcccagacatatctaaatatcctgaagctgatgtgcatcttccctttcttggttttagatgttcatttcatttgtatccacaaa

SEQ ID NO: 37181 - DNA, 201 bp, Homo sapiens
tataatgatgtatccctaacgtgaatattcaaactaaagtttgttatcctcctttctcaagaaatgttgtcataatcatgccttacagaaatttgctaagmctgcacattgttgaaaagtgattttttgggtttttatttttcccgacttattttcctagactgatcccgttgagaacacatatgtatggaacccgagcgt

SEQ ID NO: 37182 - DNA, 201 bp, Homo sapiens
tatatgtttggaaacacacacatatgtttggaaacacacaaatatacacacacatatatgtttggaaacacacacacacacacacacacacacacacacacatatatatttattttattttatttttttcttttggagacagtttctcattccatcacccaggctggagtgtagtgacacagtcacggctcactgcagcct

SEQ ID NO: 37183 - DNA, 201 bp, Homo sapiens
aaactgataggttaggttttttttactttcagttaatgagtagtaaaagaccaaacttcattcttatcaaggacaaagttatctttaatctgccgtatgtrtctctattaagtacccggcatttatttcacatgtatgattccttttgtgaaataaaaagttccatgtggaataccaacatagaatgtgcagtaggaccag

SEQ ID NO: 37184 - DNA, 201 bp, Homo sapiens
tatgactactataaatttagatttaaatgaaaataataggtaagtctgaaggaaaaaggaaacctcagaaggccaagctatagtcttggtcaaatgttttmttttgctcgaggtgataaagtatgtgaatttatgtaagttttacgccttactttcacctggtaatttagtgaaatattcaggccagctagatggaaaagc

SEQ ID NO: 37185 - DNA, 201 bp, Homo sapiens
gcttatgtctgcctgactgcctactgtaacactggaaaccaagtgaagaaagcatataaagtctgtcagcatgtcaaataaaatgagttctgaatcaaatragataaggactaaataatgacattgagtttagcaatatgaaggtcattggtgcctttgataagaacaattttgtggaaaagtagaggcagagaccccaca

SEQ ID NO: 37186 - DNA, 201 bp, Homo sapiens
tgaaatctaagaaatgacaggtacttccaaggaaaagatcattgaggtacaaaggagagcagagagctgcatattaagaaagggcagcattaggggaatgsaaattatgcttctgggaaaagaggaaccaggaaaggaaactgagaagcattaattttagatgggagaaaaaatagagaagaaagtggtatagttgggaga

SEQ ID NO: 37187 - DNA, 201 bp, Homo sapiens
tagaacaggagtgaaagtttgttaaaaagctttagaacaggaataaaaggaagcaaagtacacttggaattgggctaagtgggtgacttgagagattcaartgtatgatttaacctttgacttggtgtttaacctttgacttggcatgcttctgtggggttgcatcccttctctgattcttcccttggggtgggctgtcca

SEQ ID NO: 37188 - DNA, 201 bp, Homo sapiens
taacatggtgaaaccctgcctctactaaaaatacaaaattagccaggcttagtggcgggcacctgtaatcccagctactcaggaggctgagggcaggagcmttgcttgaacccaggaggtggaggtttcagtgagccaagatcatgccactgcacttgagcctgggtgacagagtgagactccgtctaaaaaaaaaaaaga

SEQ ID NO: 37189 - DNA, 201 bp, Homo sapiens
ttacccaatgtataaagaaaaaggagtatgtaactcctttacaagagaaaagagtatccctgaaatgacccagatgtagaaattattaatagcagactagratttttaagtggctgttaacaactattctcagtaaaggtaaataaaatgtgttcacaatatatgaaaaaataggaaatctcagcacagaactagaaacaa

SEQ ID NO: 37190 - DNA, 201 bp, Homo sapiens
cattgagggagaagataatacatctctgtccaccatacaccctgaaacactatagtgactaatataaaacaacaacaattttttttttcttttttttttttgctcatgagtctgaaatttgggcaggactaggcagcacctaattgtatcttctctatgcagcatgagttgcagtagctcacctgtggttggaagaatcac

SEQ ID NO: 37191 - DNA, 201 bp, Homo sapiens
ttatgggggtaatatttgtaataatcatgcttttggtactgatgttctagtgaagttaaaaaaaaaatcacccatagaatgttgccctttcaatgtaatckttgttttagaatgctttttttttgagacaggatcttgctctgtcacccaggctagagtgtagtggcatcatcacggctcactacagctttgacctcctgg

SEQ ID NO: 37192 - DNA, 201 bp, Homo sapiens
ctttctggctaaaggatgtctctctcgcttttgtttatagaaccctcggcctcaggaaagtcggacagtattcagtggctcagtcagtattccatctatcrccaaatcccgccctgagccaggccgctccatgagtgctagcagtggcttgtcagcaagtaagtgccggggctacaggaaggtgcctctgagacagggtga

SEQ ID NO: 37193 - DNA, 201 bp, Homo sapiens
tatatgatagtgcttaccgagtattgccagccagggaagcccacctaagcctttggtttttatagtttttttagggtggcctcaattacttactgcctgtstgactgtctttagtctccagcccttcccaaatgttgggctgatagctttagtctccagtcctttccagaggcaaaacatagtatgactcaaataaattac

SEQ ID NO: 37194 - DNA, 201 bp, Homo sapiens
  misc_feature (101)..(101): n is a, c, g, or t
aatactgtatatatatatattttttttttcttacatctttaaaatatatggctttaaagtaaaagttgtttttgtgggatattgaatgaatacataatgtntatgacagctatgagataatcgagagaggtagggcataaacaaattctagaataattatttacctttaaagttaaaaaaaaaagtagggggcataaagag

SEQ ID NO: 37195 - DNA, 201 bp, Homo sapiens
gcctcccatggtgctgggattacaggtgtgagccaccgtgcttggcccaaaatagctattttgaattctgtgtctgaaatgtcatgtgtctctgtttctcyaggattgatccccagtgccttatttagttcatttggtgaggtcaggttttttggatagtgttgatgcttttagatgttttcggtgtctggacattgaaga

SEQ ID NO: 37196 - DNA, 201 bp, Homo sapiens
aggtgaaagacatgatagaagtatctcagcaataaaataaaaactataaaagaaacaaatggaaattttaggacggaaaaatacagtattggaaaaaaaaattaaatgtctttgagaggacaaaggagattacataggaataaagtatattcaaattcaatttggatatagatcaataaaaattatcccatgaaaaacaga

SEQ ID NO: 37197 - DNA, 201 bp, Homo sapiens
acgtgtctgcataatccagttctagggtctgaaaggagaattacctttagccattcattcttctttaaaagatcttttactttggccctcctggcattcaygggagagtaagaagttatattgcatgattcacctttgatggtgctagtcttcagtctgtaggggcaaactggtgtgggcatactgtattttatagccagt

SEQ ID NO: 37198 - DNA, 201 bp, Homo sapiens
aaatatgaagcctgttacctccagaagcttctgagaagaatgatgtgaaaagacagggagtgggttctaggcaaagaaaacataatgaccattcagaggartcagtagcacagctcacagataaagtattttattactatctgaagttttcttttgttttcatgcaggacattttaaaaacgtatatggcagcagaaactt

SEQ ID NO: 37199 - DNA, 201 bp, Homo sapiens
atttaaacctctgagactgtatgaaaacacttagtgaatggatatagatagaaaaaaatttcttagaactgagccttggggtactccaatttttggaagtyaagagatgatgaggaaccagcagagtggatagagaaagggcagtgagaatgacagcataataacaggcaaatttagtgtccttgtgttagcagcgccgaa

SEQ ID NO: 37200 - DNA, 201 bp, Homo sapiens
atttttatctcctcctcttcaatactttatttctccctttcctgctttatgttttctccttagcatttaacattttctaatgtaatgaatatctccattaktttctttatttctgtctcagtcactggaatataagctctatatgggcaaggatttttgtctgttttgttcaccaccaaatgtccagcagtttcagcattt

SEQ ID NO: 37201 - DNA, 201 bp, Homo sapiens
ctggattcggggttgagctcagggcaaaggtactacagttggacttactgcgcttcaggggaggagtggtctggggcctgcaaaggatggcctgtcagctyagcagtctgtgtgctttctagagtattgtcccctctgcatatgtaaaattttgcctgcatgatgtactgtagggtcatccgcacagaatggcagcgcatt

SEQ ID NO: 37202 - DNA, 201 bp, Homo sapiens
gactttatcaagatgttatattgcagtattttaacacattcctagttgactctactactattttatatagtattgttacctggcattcatacatgacattrgtcatatctcagactggagtataattttttttccttaaattgttcttgtctgatttttaggtttaggtcattttagccttataaaataaacagaggaccc

SEQ ID NO: 37203 - DNA, 201 bp, Homo sapiens
tgtgaagaaaactttttaaaaacagcaacaaagacagactattaaggaatgtaaactgaggaaaatatttgcaatatatggcaggcaaaaagttagtagayttaacatagaattttatttttgttaggatgtacaaaaaatgcagttatatgaatactcatttatattacagaaagaagttatttaaatattttattattc

SEQ ID NO: 37204 - DNA, 201 bp, Homo sapiens
ttagcttttggtatatatatcttatcaaattaagaaatcccttctcatttctgattaccagagtttttttgttatgattctggttgtaactaaattacttytctgcatccatcaagatgatgttaggttgtttttcctttaatcagttaatctgataaatgacagcttttccattgttaaatcattcattctttgagtaaa

SEQ ID NO: 37205 - DNA, 201 bp, Homo sapiens
ctgtggctgaagtcctgagattccccgggaagctgctggtgcaagtccaaaggctggtgaacctggagtctgatgtcccagggcagggaaagcggaagcargcttcatgcactggaagaagaaagagccagaagactcagcaagcagaattatcccaccttctaacacctgcttgcccacattgagggtgggtcttcctct

SEQ ID NO: 37206 - DNA, 201 bp, Homo sapiens
gagtagtattccatggtatgtgtgtatatatataccatatattctttatccctacattggttgatgggcacttaggttggttccatatctttacaattgtkaattgtgttgcaataaacatatgtgtgcaggtgtgtttttgatgtaatgacttattttcctttgagtagatacccagcagtgggattgctggatcaaatg

SEQ ID NO: 37207 - DNA, 201 bp, Homo sapiens
acacgccagggctatttctctggcccacatcacttcctttgctctttttaaattatatacttcaaacatgaaggagtcagggtatttttccttctactttwagtcaactacgcttaccagtttttattgcccttatgactgacttcaaaaaagaatacagtgacctccagatcttgattctttgttgtccctaaacttaag

SEQ ID NO: 37208 - DNA, 201 bp, Homo sapiens
taaggtgtttttttcctctggcttctttcagggtttttttctttatttttttatattctgtagtttgaaaatggtgtgcctaggtatagtttttttttttkggggggggcgggtgggggggtgccatttatccttcttgatattttttgaatttcctggctctgtggtttgatgtaggaaaattttggggaattatcagac

SEQ ID NO: 37209 - DNA, 201 bp, Homo sapiens
aatccggctgggcacagtggctcatgcctgtaatcccagcattttgggaggccgaggtgggcagatcacgaggtcaagagattgagaccatcctagccaayatagtgaaaccctgtctgtactaaaaatacaaaaattagctgggcatggtggcacatgcctgtagtcccagctaccctggaggctgaggcaggagaatcg

SEQ ID NO: 37210 - DNA, 201 bp, Homo sapiens
taccatagttttccatttacctacttaaggacatcttggttgcttctaagttttgggaattgtgaatgaagctgcattttatatgattgctttttttttttccctctctctctttttagcatttcaattatacttctattttttaacttttcttaatggttaccctagagtttgcaatataaatttacaactaatctcagc

SEQ ID NO: 37211 - DNA, 201 bp, Homo sapiens
gtaccacacactgggtggcttaaaacacagaactgtctcagttctggaggctagaagttcaaaatcaagatattggtatggttggcttctggtggcatgcygacagtctttggtattgcttggcttgtaagatacatcaccctgatctctgctttcatgttcacatggagttctccctgtgtgtctgtgtccagatttctc

SEQ ID NO: 37212 - DNA, 201 bp, Homo sapiens
ccataaaactggacaaaattatcaaaatcaaccatgtcagggcctgatacaacaattgaagagaaataaattgagaagcatttatttgtgaaaaactgctkaactttagtttaaagtcacatataccacacacgtccatccccactactgacttggtctgggacagtagtactagtagcatggaactggatagaaaaatca

SEQ ID NO: 37213 - DNA, 201 bp, Homo sapiens
aaatctaagtcaggcttgtctccagatttatgttctttgcacaacatcatgttttccatagaagactttaatggcggggctttgaaggatgagaagactctgtaggcagataggaagacattcaagataggtgaatggtaggagaaaagcacataagaaggtaaatagtagttttggaaaatacttaatagactagtttgg

SEQ ID NO: 37214 - DNA, 201 bp, Homo sapiens
aaaatctaagtcaggcttgtctccagatttatgttctttgcacaacatcatgttttccatagaagactttaatggcggggctttgaaggatgagaagactctgtaggcagataggaagacattcaagataggtgaatggtaggagaaaagcacataagaaggtaaatagtagttttggaaaatacttaatagactagtttg

SEQ ID NO: 37215 - DNA, 201 bp, Homo sapiens
gaagaatgttactaaacatagagtcttaggcttgtggaattgagagatttcacccagtttatatgtaattcttgagaaggaataactgcttctgaaaattrtatgcctagattggtgaaagtaaatatgaggtatttgtagtatctttcattctgccaggcttgttagagatactgttatgtggactgaaaaccatttcaa

SEQ ID NO: 37216 - DNA, 201 bp, Homo sapiens
tggaggcatggaccaaggaagtgatgccccagcgagggactttgacggagaggtgagtgggcagggttccggagacgtcatgtatcagaaagactagggcwtcttcccaggcaatcccaccaccttgggattggcctcagctgcagcagggttcggggtcaggggccagcattcactcttggccagcgggcagctaggcca

SEQ ID NO: 37217 - DNA, 201 bp, Homo sapiens
tatagaatgagaaacgaaagtgctattttgtggcttaaacagtaatccaaaatcctagctgaggactatcatttaaaaatacttacagaaaatactattttcgttgaatatttgaagaatgttactaaacatagagtcttaggcttgtggaattgagagatttcacccagtttatatgtaattcttgagaaggaataactg

SEQ ID NO: 37218 - DNA, 201 bp, Homo sapiens
aaaggctacttacctcaaaatgagagaaatgtacagatgggacatctggctgatttaaaaaagtaaattttactcccgtcaaattcactgcgatctaagayatttcctggattataagcagtgcgattgtagattatcaagtgatcattgtagcttcacttggggaagaatgttcttggctgaaggttgcttttctgtaac

SEQ ID NO: 37219 - DNA, 201 bp, Homo sapiens
gacccaatctttcaatgggagtgtcgaatttatgacaagtttttcaaaccatcatagatagtatttttggccttaagactaattgagatcacctaggtaaygggtgtagctagaaaagaggtgaagttctgagccctgggccactccagtatttgaagatcaagaagataaggatcatccagcgaaggagactgagaaaga

SEQ ID NO: 37220 - DNA, 201 bp, Homo sapiens
aagtcataggttcatttgctaaataagtcctgtattatatattttatgtttctcaagaaaatactttcaaggattgtatgtgccaaaagagatttttttttgtatgaaagtgataattttaatgttcatggagtaattgtaaactattaatactttatatttaaaaattttaaaaataccagcatgaatttggaaggacac

SEQ ID NO: 37221 - DNA, 201 bp, Homo sapiens
taactgcaagatattcagatctgtgttttaaatgagcaatttaaaaatgtttttgccataaatgtggagtcagttaaaaacaatttttaaaaaatgttaaygtttttcttcaagctttttatcacagtatgaacctacatttttttttcttttcttcagtgtactttctgatcggagctgtttaagagttacggctggtcc

SEQ ID NO: 37222 - DNA, 201 bp, Homo sapiens
acagatacatcgaattttgatgtagatgatgattgtttaaaaaattctgtaagtatgacactgtgaagaagttctgtccctctgtttctttctactatggktatatagtaattttttggtttataagtattttgctaggatgattttacaatgatcagttattagtcagtgatcatggcttccggtgcttattctgtcaca

SEQ ID NO: 37223 - DNA, 201 bp, Homo sapiens
ttgagatcacctaggtaatgggtgtagctagaaaagaggtgaagttctgagccctgggccactccagtatttgaagatcaagaagataaggatcatccagygaaggagactgagaaagagtggccagtgaggtaggagaaaatcaggagagtgcggaaattaagtgaaggaaagtgttttagttaagagaagtgatcagca

SEQ ID NO: 37224 - DNA, 201 bp, Homo sapiens
gtacaacattggagaactattctgttttaacaatatgaagattaggctctcagaccggtcatgtttaaattaagaatattagtggaattagccaggctctktacatttcagtaccatagttctctcagcatactattaaaactttaaaaatgacccttttgattggtagtgatagctgctaaattttgcgcagaattttaa

SEQ ID NO: 37225 - DNA, 201 bp, Homo sapiens
acattatcaacactacagtgatagaagatataaacatctatcactgacagagaaattgattgataatataattcggtgtgcagtcaagtttctttaaattaaaaaaaacgccttttaaagggaggtttgcatttatttcatgggaagaaaacatatctgcattcaagtctgagttcttcattgtaaatatctcagttcatc

SEQ ID NO: 37226 - DNA, 201 bp, Homo sapiens
actttggtaatgtggaagtcactggcaatcttggccagagcaatttccagagtgtggtaactgaattcgtcaactttcacctccttggctgccagcctctrtaggtcctgggtgtgtcacctccactcccacctcaggaccgaaggttcacactggcttaattggtttggttttgtcaccacacgttgcaatacagtcttt

SEQ ID NO: 37227 - DNA, 201 bp, Homo sapiens
gatattaacaggcattttatagaagaggaatgtaaaatgaccaatgataccagtgataatatgaaaaagattctcaactgtattcgtaatcatgctagcamagttgaagatgtccatatctttcatctcagaaatttcacttctacatctatagtctggagaagcattcatatatgagtactagaagacatttattaaaat

SEQ ID NO: 37228 - DNA, 201 bp, Homo sapiens
tcattgtacctggctgtgagttaccatgtaatatctagcaacagaggcctatttcttgccagatttattaattatggtcttggatacatttatcgtcaacmaaaaaaaattattttgagatgattttggttgttttgctttgttgttattattatttgtcagcattacagaaccgatgtgcctgcttatacatacatgtac

SEQ ID NO: 37229 - DNA, 201 bp, Homo sapiens
taccaccttctcctgtcttctaaggcacttgactgagtttctctcaccttgctggtcattccttctcagtctccatacctgatccctcctgatttccctgrcttgttaatatcagagtgtcctatggctcagtctttggacttctcttttccatctaaactctgtagtgttctcccaaagatttgctgatgactcctaaac

SEQ ID NO: 37230 - DNA, 201 bp, Homo sapiens
tatacttttctatcatgtttaaaagctatactatttttttttcaacctttttctgggagtgagatctcagatttctctccatccttttcccattaggaacwtttgcttaaagtcctgagtctggttttcctttaacctcagaagtaaacatagcataactatagagtccaaagcatgttgtttttccttatggaaggtggg

SEQ ID NO: 37231 - DNA, 201 bp, Homo sapiens
ctattcatagtgataacacttaatccagtttccttagagtttccatggtgaatatctacaagtagaacacctaacctgaaatgtttctgttctaaaccaayatactggaaaagagcaaggggttttggattaagactgactgctttgattattaactgggtgatttagttatttaacctccctatgtctctttatgaaaaa

SEQ ID NO: 37232 - DNA, 201 bp, Homo sapiens
ttatgggtggtaaaactgaagcatagagatcttaaatggcattattcaggttaaagtagccctcccatattcctgtaatttacatggcaatgtaatttttwaaaaaatatataggttctccagagattctttttctccctctaaaagtagagtgagttgggtgggtataatctcttagttattcacaattacaacctttac

SEQ ID NO: 37233 - DNA, 201 bp, Homo sapiens
cctttcactgtaaagattgtcaactgaaaaaaaatagagtaatacagtaatatttttgctcttcttgagagtcctgaaacacacccactaaatttatgacstatgtggtattagataatagtggtgaaaggatatcattcagtaaatggtgctggggtagaaagaaatgtaactgccctttatctcacactacacacaaaa

SEQ ID NO: 37234 - DNA, 201 bp, Homo sapiens
ggcaattattaataggctccctttcactgtaaagattgtcaactgaaaaaaaatagagtaatacagtaatatttttgctcttcttgagagtcctgaaacamacccactaaatttatgacctatgtggtattagataatagtggtgaaaggatatcattcagtaaatggtgctggggtagaaagaaatgtaactgcccttta

SEQ ID NO: 37235 - DNA, 201 bp, Homo sapiens
cccatagaatgttgccctttcaatgtaatcgttgttttagaatgctttttttttgagacaggatcttgctctgtcacccaggctagagtgtagtggcatcrtcacggctcactacagctttgacctcctgggcacaggtgatcctctgacctcagcctcttgggtagctgggaccactagcgcaggcgtggaccactattc

SEQ ID NO: 37236 - DNA, 201 bp, Homo sapiens
tgaagaaaaaaaatatacctccaaagaaaaaataccttcaatctgtcattcctccagatacttcttgagcaaagtctttgtgtatacaaatacccaccatyaatgactgtttctcttgtgtttcccagcagcagtgttctccaatatttttaagtttctggaaaaaaatgcgacagttttataattattgacaacttcttt

SEQ ID NO: 37237 - DNA, 201 bp, Homo sapiens
tatcctactcatggtaggacttcttccttccgtctcagtgggcagtggtttaatctgcattttattgccccattactccccgcttttctcttctttttctmatttgctgaatttgaatgtttattttcataattacacataatttgaatttcatagtagtctttctttgaattacattttaaatgtggtatgtgggttgtt

SEQ ID NO: 37238 - DNA, 201 bp, Homo sapiens
tcctgaggaagtttttttcttcacatttcggagtcgtcttatgtttgttttatgtataatgtcttagggttttaagttatacttaaaatgggaagaatggraaatatatctattccttcttcccagaacttgaagtctccagagtaagcttttaaagtataagtctgttgaggtcacagcttcaacatacctatcttcagt

SEQ ID NO: 37239 - DNA, 201 bp, Homo sapiens
acttaagatcaggaattcgagaccagcctggctaacatggtgaaaccctgtctctactacagatacaaaaattagcccggtatggtatcacacgcctgtartcccagctactcaaggagctgaggcccaagaatcgcttgaacctgggaggcggaggttgcagtgagccaagatcgcaccactgcactttatgtcagtatg

SEQ ID NO: 37240 - DNA, 201 bp, Homo sapiens
aaaactcaccgttatgttgtttatcaggtcccagtgtcctgaggaagtttttttcttcacatttcggagtcgtcttatgtttgttttatgtataatgtctyagggttttaagttatacttaaaatgggaagaatgggaaatatatctattccttcttcccagaacttgaagtctccagagtaagcttttaaagtataagtc

SEQ ID NO: 37241 - DNA, 201 bp, Homo sapiens
gagaatatatttctgagcacttctgaccttaaaacaagtcacaagtcagtatggtgtggcgcttaagagcatgggcacaagatcccagacttgtagttgtrtgtccttggagaaatgatttaatttctttgcatcaccatttttttcatatataaaataaggatataatgacagtacatcctaaatcatgacgatgttaac

SEQ ID NO: 37242 - DNA, 201 bp, Homo sapiens
agagccagtggattagaggggagagaaaactactttatcattagacttcccagtgatgaagctttatgataaagatttataataccctagaaaagaaaatrtgaacaaaacagactttcaggtataaaaggcatgtacaaatgttatcaaatacaagaattttaggaatgttgtttccatgaattcctcttgaagaagata

SEQ ID NO: 37243 - DNA, 201 bp, Homo sapiens
taattctgggatatatgaaccaagaagaaaccccagaaaactcaccgttatgttgtttatcaggtcccagtgtcctgaggaagtttttttcttcacatttyggagtcgtcttatgtttgttttatgtataatgtcttagggttttaagttatacttaaaatgggaagaatgggaaatatatctattccttcttcccagaac

SEQ ID NO: 37244 - DNA, 201 bp, Homo sapiens
tacacagtttcttgttaattagcagcatatgtaattaactgcataaatatttgacccagtcctgttgaccttgggatacagtatattgatttttcacccttattagtttactgagtacattttatttttttcattcacagtacctggttatggattattatgttggtggggatttgcttactctactcagcaaatttgaag

SEQ ID NO: 37245 - DNA, 201 bp, Homo sapiens
ctcttaccaattttttataaatagaattatatttactgttaacaaattatgaatcattccaaattaaatacatagtacagttgatcctaattattcatggwggttatgttctatatagttgccttgaacactgttagctaatattgaaccaatgctctgagggaaatacagggttaggtttctgtgagcctctgatcaact

SEQ ID NO: 37246 - DNA, 201 bp, Homo sapiens
aaaaaatttgcaattatagcaagtagactttttgtgtgtttcagaaaaaggcacataatttaatgaatggtagatattattatgtgattagatctttttttctttaagaaaagctcattaaatacaaagctgcttagttatatcaacattgacacataaaatttttatcacttacataacactagaatataatgaaccagt

SEQ ID NO: 37247 - DNA, 201 bp, Homo sapiens
aggaaaatcatgatagctgagagcatacctacaatgtcttacggaaaataaaagtaatcattttccccttatatttaattacattaatgtcttaatggatrcatttcaggcaaacatttattatgtttttcctgtggatgctagtgtcctgggtgttggaggttgaagtagggaaggctgtagggtattgcctgcttttat

SEQ ID NO: 37248 - DNA, 201 bp, Homo sapiens
gcaggagaatagcctgaacctgggaggcagagcttgcagtgataatgccactgcactccagcctgggtgacagagcaagactcggtctcaaaaaaaaaaamacacatttaaatatgttacatggactgtaccatctttacctaaaataaaattaaaggtttttccaaccccactggaaacaaggaaaaaaaataaaggttt

SEQ ID NO: 37249 - DNA, 201 bp, Homo sapiens
ctcttcccaataggactaacatattaacactgcttcatttattgaaagcatcagtctcaacaatatacaacactttgtgcactggttcccacacattaatktacaaatgaatgacttgaggatactgtatagattctgcttcattaggtcttgattggggcttgagattctccatatctaagttcctaggggatgctcatg

SEQ ID NO: 37250 - DNA, 201 bp, Homo sapiens
cctccttggctgccagcctctgtaggtcctgggtgtgtcacctccactcccacctcaggaccgaaggttcacactggcttaattggtttggttttgtcacyacacgttgcaatacagtctttatcaaatgttttctgctgatagaatttatgaaagaatgccacttatctttgcagtgttcaaatttgctaagtagctcta

SEQ ID NO: 37251 - DNA, 201 bp, Homo sapiens
actcctgtgttcaagcaatctgcccacctcggcatcacagagtactgggattataggcgtgagccactgcgcccggcccatgaaaattttcaaaacacaamtctgttgtttgtagacatatacatgtgtgatcaagtcatataattggactatccactgacttcagattattacagcaggggagaaagggaagagaatggg

SEQ ID NO: 37252 - DNA, 201 bp, Homo sapiens
tgggttcaagcaattctcccgtcttagcctcctgagtggctgggattacaggtgtatgccaccacaccctgttaatttttgtatttttgttagagacaggktttcaccatgttgcccaggctggtcttgaactcctgtgttcaagcaatctgcccacctcggcatcacagagtactgggattataggcgtgagccactgcg

SEQ ID NO: 37253 - DNA, 201 bp, Homo sapiens
tattttagcttagtccagttcaaattacctaataaaaatgtttaaagaccataaactataagaagatgtaatgagaaatggaaataattcattctattcckatttagaaaacattctagaaagtggtatggggcataaggactcacattatggaaatcttttaaacaatctgtgtgtttttttatcaatttgttttgcagc

SEQ ID NO: 37254 - DNA, 201 bp, Homo sapiens
ttgtttttgttttctttctttctttcgttttttttttgttgttgtttttttttttaaggcaaggtctcactctgtcacccaggttggagtgcagtggtgcratcttggcccactgcaacctgtgcctcctgggttcaagcaattctcccgtcttagcctcctgagtggctgggattacaggtgtatgccaccacaccctgt

SEQ ID NO: 37255 - DNA, 201 bp, Homo sapiens
aaaaaaaaatcaaattgcaaaaggataaaattataccattcacatagattttttttgtttttgttttctttctttctttcgttttttttttgttgttgttkttttttttaaggcaaggtctcactctgtcacccaggttggagtgcagtggtgcaatcttggcccactgcaacctgtgcctcctgggttcaagcaattctc

SEQ ID NO: 37256 - DNA, 201 bp, Homo sapiens
cttgagaaaaaaaaaaaatcaaattgcaaaaggataaaattataccattcacatagattttttttgtttttgttttctttctttctttcgttttttttttkttgttgtttttttttttaaggcaaggtctcactctgtcacccaggttggagtgcagtggtgcaatcttggcccactgcaacctgtgcctcctgggttcaa

SEQ ID NO: 37257 - DNA, 201 bp, Homo sapiens
tcttgagaaaaaaaaaaaatcaaattgcaaaaggataaaattataccattcacatagattttttttgtttttgttttctttctttctttcgttttttttttgttgttgtttttttttttaaggcaaggtctcactctgtcacccaggttggagtgcagtggtgcaatcttggcccactgcaacctgtgcctcctgggttca

SEQ ID NO: 37258 - DNA, 201 bp, Homo sapiens
atttttctgaatatacacacagatttccagaatagaacggattgttattacttacatacagcaaagaataactacatggctcccttctgtgccaagtcttrccccaagagaaataccctgagagctggcaggataaaaccctacacataaggagtctgtgttgtaaatgaggagccttgaaaacatttatgcaggtgctta

SEQ ID NO: 37259 - DNA, 201 bp, Homo sapiens
tcatggctggaaatgactgaccttttgtttgaatctaagtatcattcatgtcaagaccgcattgaaaataatgctgttcttaagccaggcaagtgtagacsttgtagatttcataaaagattcacactatttcatgaatcacaacttgaatcgacttctgttagccttcattttacgtctaggccctcatttctaattctt

SEQ ID NO: 37260 - DNA, 201 bp, Homo sapiens
tatctggaatatggtgtagccattaagaaaaaattaggtagatttctgtgtactgatacggaaggatgttcaaattcattgttacttgaaaaaaaaaaaaacttacagagcactataatctcatttgtataaagaccaaaaaatataggggaggtgggataccatgtgaatatataatctgtgtgtgtgtgtgtgtgtgtg

SEQ ID NO: 37261 - DNA, 201 bp, Homo sapiens
ctttttcatatacctattggccatttgtatgtcgtcttagagaaatgtccactgaggtcctttgcccattttttgattgagttagcaaatattctgatttyttataatgccaaactgttttctagcataccaacttccatttccacgagtagtgtagagtttctgtgttcatatttccagatttattacttttggccaatc

SEQ ID NO: 37262 - DNA, 201 bp, Homo sapiens
tgctagggccttagtatgataccatttactcccatttaccaccgtttaagaaggggctgaggcaggacattccacgcatgtccaaaggtcccgaggtagcaaaaaaaaaaaaaaatgtatctgtttgattcactgaaagaaggccaggaatggattcaagaatataccctttactacaataaagataacattcatgcagta

SEQ ID NO: 37263 - DNA, 201 bp, Homo sapiens
cagggttgggggtaaggtcacagatcaataggatcccaaggcagaagaatttttcttagtacagaacaaaatgaaaagtctcccatgtctacttctctctrcacagacacggcaaccatccgatttctcaatcttttccccacccttcccccctttctattccacaaaaccgccattgtcatcatggcccgttctcaatga

SEQ ID NO: 37264 - DNA, 201 bp, Homo sapiens
cgtctcaaatcaaaaaactgtagtataggctttccaccccagctctgccccgcccatatagatacctattacagaaggagggaaatagcttttaaaaaagragagttaaatgaaattgcctgtaggaagtaggaggaatacttctgattttgtcataagcattgtaataccattttactttttcaaccatgtgtatgtatt

SEQ ID NO: 37265 - DNA, 201 bp, Homo sapiens
cttcttcgggaatacttcctgaaggacctgcctgaggttgttttacagttaacttttaaaaaaatattaagtagaagccgtatactctaagataacgatamgaagtatagtaaatatataaaccagtaacacagtcatttattattaagtattaggtactgtacataattgtatgtgctatacttttatactgccgacagc

SEQ ID NO: 37266 - DNA, 201 bp, Homo sapiens
ccagatggggtcgtggccgggcagaggggctcctcacttcccagtaggggcggccgggcagaagcgcccctcacctcccggatggggcagctggccaggcsgggggctgtccgcccccacctcctcccggactgggcggctggccgggcagaggggctcctcacttcccagtaggggcggccgggcagaggcgcccctcac

SEQ ID NO: 37267 - DNA, 201 bp, Homo sapiens
tgtgtcttgtactcactagccttcatgctaagtgctacattatcattattgtagttaggtagatgagaaaatgaaatgtcacagagattaatttttcaacrtccacttacaacatggagtcagtatttgaatacaggtttctctgactacaaaacccatttttccactatgtctagttttctccctcacttaaaaataata

SEQ ID NO: 37268 - DNA, 201 bp, Homo sapiens
cagcatgtattaattggctgattgtgttcccgcttatgtgaattatctgttaatattcttagcctagttttgttggattgtttgtccctctcttaacaatyggaaggggctctttattttaggattatatccttgacctattatgaatattacctctcagtctatgttttttaaaaacttgtataaatataccttagctac

SEQ ID NO: 37269 - DNA, 201 bp, Homo sapiens
tttaaccagtgattcctcaaatcaatgattgttgctttggctttcatttccctagtgactattgaggttcagcatgtattaattggctgattgtgttccckcttatgtgaattatctgttaatattcttagcctagttttgttggattgtttgtccctctcttaacaatcggaaggggctctttattttaggattatatcc

SEQ ID NO: 37270 - DNA, 201 bp, Homo sapiens
agaatgaaaattaccacactactttttatctctagaagaatactgaaattacatgtgtttgagaaagttttaatatgaatcagaaccaggatttgaattartaaagtaattaaatagattttcttagaatattacttttaaaataagttgagatttttttctgacaaaaagaatatcttaccaaacaatgaattgtttatt

SEQ ID NO: 37271 - DNA, 201 bp, Homo sapiens
tcctcactttccagactgggcagccaggcagaggggctcctcacatcccagacgatgggcggccaggcagagacgctcctcacttcccagacggggtggcrgccaggcagaggctgcaatctcggctctttgggaggccaaggcaggcggctgggaggtagatgttgtagcgagccgagatcacgccactgcactccagcc

SEQ ID NO: 37272 - DNA, 201 bp, Homo sapiens
atatatatattcttatatatattattccttacataatatatatttccttatatataaccttattttatatatatccatatatgtatgtgtgtgtgtgtatrtatatatatatatatatatatatatataacatgactttttttcattaaagagactgaagaaaaaaagggatttgaaaaattacttgtagttgctcattag

SEQ ID NO: 37273 - DNA, 201 bp, Homo sapiens
aattatatctgttccttgaaatgctcattttgggacacataactcatttattgcatgttttcagatgttttagcattgtttccttggactggagctctttwaaaaaaaaaatccccaaagctgccatggtctttttagtaatttaaccagtgattcctcaaatcaatgattgttgctttggctttcatttccctagtgact

SEQ ID NO: 37274 - DNA, 201 bp, Homo sapiens
tcctacgaagacttctagaattatatctgttccttgaaatgctcattttgggacacataactcatttattgcatgttttcagatgttttagcattgtttcmttggactggagctctttaaaaaaaaaaatccccaaagctgccatggtctttttagtaatttaaccagtgattcctcaaatcaatgattgttgctttggct

SEQ ID NO: 37275 - DNA, 201 bp, Homo sapiens
tcatcatatattcattcatctcaagagtcagaggtcttggttatcatcaaaggttgccttttgaacatttatacaatattagaaaaaatcattaaaaaatrtcgacaaagctaattttagataccaaaaaaggaaattttattatatataattgtttttcaaagtaacttttaaccctgatagcttttaaattgccaagta

SEQ ID NO: 37276 - DNA, 201 bp, Homo sapiens
gtttctttaggggagccttcatcatatattcattcatctcaagagtcagaggtcttggttatcatcaaaggttgccttttgaacatttatacaatattagmaaaaatcattaaaaaatgtcgacaaagctaattttagataccaaaaaaggaaattttattatatataattgtttttcaaagtaacttttaaccctgatag

SEQ ID NO: 37277 - DNA, 201 bp, Homo sapiens
attctttatgctttttaataagcaagtcaaaactaaatccaaacatttaatttccattggttaagttctatagacggtcttcaggagtttttcatgatacytttaacaccagtaccattcctcttcccttgttcctgttgaagtccagctagtactttaaaattgtgctcaaattcatcttaaaataatcatttccagaat

SEQ ID NO: 37278 - DNA, 201 bp, Homo sapiens
atgtcaaatatataattaatgatatacgggttactcaaaggtgctaggaagcctcctctcttttctatacctgggcagaaaggtataataatataataattgtccaataatttcacagatttatcatttacaaactttgctagtttatcaccaataactctacaagttcatcatttacagactttgctagtttatcaacag

SEQ ID NO: 37279 - DNA, 201 bp, Homo sapiens
ctaactagaatgtttgtaaaatttcggattgctattatagtgagatgaagccaggagaaagtagtcttctaggctctgacagtctttacaaactctctaawatgttagcagtaaaccataacctcaggttggttaaatcataaaacaggacttggtagtaagtatgtaaagtgctttctgttttccccttaaaaagaacca

SEQ ID NO: 37280 - DNA, 201 bp, Homo sapiens
atatgtcaaatatataattaatgatatacgggttactcaaaggtgctaggaagcctcctctcttttctatacctgggcagaaaggtataataatataataattgtccaataatttcacagatttatcatttacaaactttgctagtttatcaccaataactctacaagttcatcatttacagactttgctagtttatcaac

SEQ ID NO: 37281 - DNA, 201 bp, Homo sapiens
agctaatttttgtattttctttagagatggggtctcactatattgctcaggctagtctcaaactcctaggctcaagtgatctgcctgcctcagcctcccawagtgctgggattacaggtgtgagccactgcactgggctgagagttaaacctttctaaggctcaattttctcatgtataaactgaagataataaggtctca

SEQ ID NO: 37282 - DNA, 201 bp, Homo sapiens
catatgtcaaatatataattaatgatatacgggttactcaaaggtgctaggaagcctcctctcttttctatacctgggcagaaaggtataataatataataattgtccaataatttcacagatttatcatttacaaactttgctagtttatcaccaataactctacaagttcatcatttacagactttgctagtttatcaa

SEQ ID NO: 37283 - DNA, 201 bp, Homo sapiens
ggaagggccctacagggatcaggtgccctagctattcagcgatttgcctttgcttccctaattcctgcattgtgccactgggttacaagtgtgtgtgcgcrtgcacacaggggtgtaggtttgatgacagtggtgaactgccttgactgccttcacaggctgaatcccccgcaggcagtaaccatggctagggaaaaacag

SEQ ID NO: 37284 - DNA, 201 bp, Homo sapiens
cagccaaaaaacacatgaaaaaatgctcgtcatcactggccatcagagaaatgcaaatcaaaaccacaatgagataccatctcacaccagttagaatggcratcattaaaaagtcaggaaacaacaggtgctggagaggatgtggagaaataggaacacttttacactgttggtgggactgtaaactagttcaaccattgt

SEQ ID NO: 37285 - DNA, 201 bp, Homo sapiens
agataagatttcatatatttatttatgtgtatatgtacacacatatatacatacatacatacatatatgtatacacacatcacattttcttcagtcctgcrttaatggacagcaagattgagtctgtgactttgctattgggaatagtgctgtgataaacatataagtacaggtatctttttgatataatgattttttttc

SEQ ID NO: 37286 - DNA, 201 bp, Homo sapiens
cttttggccttttgaattttgttattgtagatttgttttctggttctttaatttctgcactttataatattttctttggttttatcttgctattctttttytgatttttcaaaatagcattgatatctagcccttcttttcaaacctgtgtttaaggctatatgttttcctctaagcatttttagctatagcagacatatt

SEQ ID NO: 37287 - DNA, 201 bp, Homo sapiens
tgtaattatatggtcatgttacttttattgcagtctgatccaaatataaatttattaaataaccttgatatgcacatttgctattaagtttttttttttttgcacttgaatttaaacctatactctgtttttggaaatatcccgttgaacagcagtttgaagatctgctgtatatagtttgacctccctttctgcatatta

SEQ ID NO: 37288 - DNA, 201 bp, Homo sapiens
actcttgttttgcaggaacacttcaagcactgtacagctgctgggctgtgcctttctttggcttaagaccggtttcattaacaagcatgttcacacttcarccggaacatttaaaataacacccgcacaatgtgtttagtgtctagttaattattaagtctctgagcttgaattattcaagcaaaattgattgggttcaag

SEQ ID NO: 37289 - DNA, 201 bp, Homo sapiens
ttttaatttttttattttcttagagaaaaaaaaagcatttgctttaaataacgcaccaagaattacatggactttgcaaatttggtagatgaaccaaattsatgtagatggcatgtagatggcagcagttaaatttggggccaactagttgccaactttcagtatgtgcgattcttcaaaatgtatgctttggagcttttc

SEQ ID NO: 37290 - DNA, 201 bp, Homo sapiens
tttctatccatatttctatgtgaatatatttgtcataagtctaaaattacagaaagttagaaattaaagagatgaaagatttttttattttggtagttaaactgaagaaattgagagttatattctttgccacatattagaggtagagttggcagtgaagagattgggctgtaatgtgcttagtgcaatgcctggcacata

SEQ ID NO: 37291 - DNA, 201 bp, Homo sapiens
ctgtgccatcaaatgaaagtctcaccctaatcttatacatatttgtaccttgaaaggaccagaggcttaggttacttgtcactttataatgaagtttattwaactctagcggactgaatgataaactgttttttaacaaaacttttttttgtcattcctttattacttcagcctaagtaataaagctactaagttgttact

SEQ ID NO: 37292 - DNA, 201 bp, Homo sapiens
ggcagtagaaaatgatttttctccacattccttgccaacacttgttatcctttgtcttttaaaaaaaatagccattccaatagatgtgaagtgacagctcrttatggttttgatgtttacttctcttatgactagtgatgttgaatactttttcatatacctattggccatttgtatgtcgtcttagagaaatgtccactg

SEQ ID NO: 37293 - DNA, 201 bp, Homo sapiens
gtatttctatccatatttctatgtgaatatatttgtcataagtctaaaattacagaaagttagaaattaaagagatgaaagatttttttattttggtagttaaactgaagaaattgagagttatattctttgccacatattagaggtagagttggcagtgaagagattgggctgtaatgtgcttagtgcaatgcctggcac

SEQ ID NO: 37294 - DNA, 201 bp, Homo sapiens
tatgggaatttaaatcctccttgttaggaattccactagcaattcttttggaaaacctgaaatcaaaccatttaggttctcacagagttttactctctggrgatgctctggttgggaggttggttggagtaggagttggagcagcaagcattgcgtagaatgctagtctgtgtgaaagtccttattaggaaattaaaaggg

SEQ ID NO: 37295 - DNA, 201 bp, Homo sapiens
ggactataggtgcacaccaccatgcctagcttttttttttttttttttgtagagacagggtctcaccatgttgcccaggctggtctggaactcctagcccyagtagtcttcccactttggcatcccatgtatttctttttaaagcaagaagacttggaaattattttccgccgaaacataagtacccttaagattcgttgt

SEQ ID NO: 37296 - DNA, 201 bp, Homo sapiens
gggtatttctatccatatttctatgtgaatatatttgtcataagtctaaaattacagaaagttagaaattaaagagatgaaagatttttttattttggtagttaaactgaagaaattgagagttatattctttgccacatattagaggtagagttggcagtgaagagattgggctgtaatgtgcttagtgcaatgcctggc

SEQ ID NO: 37297 - DNA, 201 bp, Homo sapiens
agaatgatcttttgcaaatcaactatttaagtaactggcaagagtattacaaaatttaactttctaagacctaaaagtatttcattaaggattcagctctsatatcagatactattccatttgttctgtgtgcatgttttgtgaaatgtgaatccattttcatcaccttattgccttttttcatctttcttttgtttttga

SEQ ID NO: 37298 - DNA, 201 bp, Homo sapiens
agtacaaatattttatgattccacttatgtgagataactatagtaatcaagttcaaagaaacaaagtacaatggtggcttccagggtctaggggaaggggraatgggggaattactgatgggtacagagttaaaattttccaagatgaaaaaattttagagaaggatggtggggactggttgcacaacagtgtgaaggtac

SEQ ID NO: 37299 - DNA, 201 bp, Homo sapiens
atcataaagagtttatattgtttattttcttattttaattaatgtttttgaagagacagtcttgctctgtggcccaggttagagtgcgatggtgtgatcakagctcacttcagcctcaaactcctaggctcatgtgatctttctgcctcagccttccaagtagctaggactacagaggtgcatgccaccagcctggctgat

SEQ ID NO: 37300 - DNA, 201 bp, Homo sapiens
ctgcagcctcccaaagtgctgagattataagcatgagccaccatggctggcaataatttctttgtagccagtttttataccaaaaggctgagggaaaactrgagtaatatttttaggttttatggctggctttgaggaaagggagttctagtttctgtgacctagagaagagggattctagtttctatggcttaccttggg

SEQ ID NO: 37301 - DNA, 201 bp, Homo sapiens
atagttcctgcgtaatcggaagtagttcttttatctctaaaaatagtccttggattcaaaagcttttttctatatctttgatattacattatttcattttwaaaaaatatacctgaacattgaagggaagatttttaccttgttaagaaaacaaacatgttctttttgggtgtctaaatggagataagcttgggctgctta

SEQ ID NO: 37302 - DNA, 201 bp, Homo sapiens
aattgtttgctttttgaatgtggaaggagaagtgaggctaagggagtcatattcctctatcagatgcaaacctttatttgtatctaagtgagccaagacartataagcattaatataagatggtgtgtgtggcttataaatagatgctatattcattttcttgaatttttaaaataatttaccgttttaatacatggttgc

SEQ ID NO: 37303 - DNA, 201 bp, Homo sapiens
gacaacaggcagcataatactattatccctgacataaatgaactcgtgaggtattcctcacgattgcgcaaagactggggcagttcctgactctgatgcasaaagctagagtgaaagcagagctggactacctgcagcagctggaatatgcagggcttggcattggagaggagggaattgtgcagagagagggcataaagt

SEQ ID NO: 37304 - DNA, 201 bp, Homo sapiens
cagaaccattttatatatgattatttttctaaggtttgcattcacatgcaaaaacaaatacaaaagctggtatatgatatagtttagatttgggtatcttmcacaccattgacttaacatccaaagacaatgaaagctttaaataatatagacaatctattaggcagttgttttagttcttctgtaaaatcaactttatga

SEQ ID NO: 37305 - DNA, 201 bp, Homo sapiens
acagaaccattttatatatgattatttttctaaggtttgcattcacatgcaaaaacaaatacaaaagctggtatatgatatagtttagatttgggtatctwacacaccattgacttaacatccaaagacaatgaaagctttaaataatatagacaatctattaggcagttgttttagttcttctgtaaaatcaactttatg

SEQ ID NO: 37306 - DNA, 201 bp, Homo sapiens
ctaaaggctacttacctcaaaatgagagaaatgtacagatgggacatctggctgatttaaaaaagtaaattttactcccgtcaaattcactgcgatctaaratatttcctggattataagcagtgcgattgtagattatcaagtgatcattgtagcttcacttggggaagaatgttcttggctgaaggttgcttttctgta

SEQ ID NO: 37307 - DNA, 201 bp, Homo sapiens
gggataagatgaattcactttgcgaaacagagtaggtaataaagagagtgcaggaccgatgagccatgaggactccaggtgttagagactggatagattargagtagccaataaagaaaactaagaaggagcagtcagaggttaggaggaaaatcatgatagctgagagcatacctacaatgtcttacggaaaataaaagt

SEQ ID NO: 37308 - DNA, 201 bp, Homo sapiens
ttatttctgtagtgtttacagaaataattcttgaattattattacaggttttctaacatcatgtttttactatgaagtctttcaagacattgctagtgttwttaaaaatatatctttgttctgtgttaaactatagtcttgcagttcatactaaatgtacttttaattttgatcaagctaaacaagaaaggacattttaac

SEQ ID NO: 37309 - DNA, 201 bp, Homo sapiens
tttaaatgtggcatcttccatgagaattttataaagggagctctcctaaaaccgagattcacaaaaacctggaagggccctacagggatcaggtgccctakctattcagcgatttgcctttgcttccctaattcctgcattgtgccactgggttacaagtgtgtgtgcgcatgcacacaggggtgtaggtttgatgacagt

SEQ ID NO: 37310 - DNA, 201 bp, Homo sapiens
gttcttactatctatatttattactatttttctgaatatacacacagatttccagaatagaacggattgttattacttacatacagcaaagaataactacrtggctcccttctgtgccaagtcttaccccaagagaaataccctgagagctggcaggataaaaccctacacataaggagtctgtgttgtaaatgaggagcc

SEQ ID NO: 37311 - DNA, 201 bp, Homo sapiens
cactccagcctgatcaacagagcaagaccctatctcagggggaaaaaaatgcactgaatttataggtcaatttagggagaattaacatcattacaatattrtctttaagttcttactatctatatttattactatttttctgaatatacacacagatttccagaatagaacggattgttattacttacatacagcaaagaa

SEQ ID NO: 37312 - DNA, 201 bp, Homo sapiens
taatatgaatttctttcaatgtagggactatcctgtattccaagttttttctttcattgtttttttgggggagggggtggattcaaatgttcattcttctraaatcttggaaagctgtgttccattgttgtaggtgaagatgataataatgatgatattagctctttgcaaaatacaacaatggtaaccctgtgttgttct

SEQ ID NO: 37313 - DNA, 201 bp, Homo sapiens
ctttacattctctttctttttccaaaatctaatttggaagaacttttaaaaagataaacaaagtggccaaactttgcttttcacttttgtcatattttaarcatatgaaagagttaaacattaatttataatagtgttcttaccagctggatagaaatacatttacttagtacctatatttattttttctttctttgtaat

SEQ ID NO: 37314 - DNA, 201 bp, Homo sapiens
tattatgtaaaatttatggtgaaccagttgttgatttatacattattagtggtgtgataactgaggatgctcgaaagaaggcatgtaatgagattgttgcyatgggaagattgagtaggtaactacccagaatgtttcccatttctagtacaatatctggtattgaataggtgctcagtaaagagttaaatacatgaagag

SEQ ID NO: 37315 - DNA, 201 bp, Homo sapiens
acccagaatgtttcccatttctagtacaatatctggtattgaataggtgctcagtaaagagttaaatacatgaagagttaaatgaataatgaagacttttkttgggtgaatttactaagctcgtaatttcagccttattgatcagaatcagagatacaagtatattcagtagtcttatttataggaggcaaagtagatgaa

SEQ ID NO: 37316 - DNA, 201 bp, Homo sapiens
agtacaatatctggtattgaataggtgctcagtaaagagttaaatacatgaagagttaaatgaataatgaagactttttttgggtgaatttactaagctcktaatttcagccttattgatcagaatcagagatacaagtatattcagtagtcttatttataggaggcaaagtagatgaactagaatgccagttaggaattt

SEQ ID NO: 37317 - DNA, 201 bp, Homo sapiens
agtcaagtttaggccagcaagtcacatactatgtttaggccttataatattaatgagggttaataatatgtaccttatggattttatgataactaaattaygtattagtttggaagctaaccgtgtctagttgtgagctaaaaaccaagtatttagtgtaagattcaggcttgttcgggaaatacaaggcagggatgcaat

SEQ ID NO: 37318 - DNA, 201 bp, Homo sapiens
aactaaattacgtattagtttggaagctaaccgtgtctagttgtgagctaaaaaccaagtatttagtgtaagattcaggcttgttcgggaaatacaaggcrgggatgcaatcaaatgtcaggaatcgccagaacaccgggaataaggaagctatcggaacacttccttttctcattgtctttgcctttctctatgcatctg

SEQ ID NO: 37319 - DNA, 201 bp, Homo sapiens
atcggaacacttccttttctcattgtctttgcctttctctatgcatctgctttgtttttctctttcattatgtggaactgattttctcttttgcttttagmgtcatagtaggatgtttgcctcaacacttgctgagtttgtatgttaattcttgtaatcatctgcagagactgactctgagttaggtttgaaattacttgt

SEQ ID NO: 37320 - DNA, 201 bp, Homo sapiens
cggagcttgtatgttccgtgcctcttcctcagctcatagaaggggctttataccgacagtgaggccgccccatggggttatttggtcagggtggctggagrgggcggtggtaatctgagccccttctgcctccctttctccccctccttctcattaatgttttactttgggccttacaggactctgactctccgaggcatt

SEQ ID NO: 37321 - DNA, 201 bp, Homo sapiens
ctcacttatgtataaaatacttatcttgccaatacgtttgagttagtaaatagtttagtctctgcaaagaaatggagaattagataggttaagtaacttayttaatgatggagccaggttttgcagtcaactttttctgactctgaaaccatatctctcaattacttgatatacttcattaaaaaaataattattctgttc

SEQ ID NO: 37322 - DNA, 201 bp, Homo sapiens
gaactatacatgtacacacatgtacatttttaaaatggcatgtactaggcttctccagagagacagaaccagtaggatatatgtatatataaaagggagtsagttagggagaattaactgacacgattacaaggtgaagtcctatgataggatatctgcaagctggggaaagagagaagccagtaatggctcagtccgagt

SEQ ID NO: 37323 - DNA, 201 bp, Homo sapiens
ggtagtaagtatgtaaagtgctttctgttttccccttaaaaagaaccagagcggccgggtgtggtggctcacgcctgtaatcccagctctttggaaggccraggtgggcggatcacgaggtcaggagatcgagaccatcctggctaacacagtgaaaccccatctctactaaaaatacaaaaaattagctgggcctggtgg

SEQ ID NO: 37324 - DNA, 201 bp, Homo sapiens
tgaaaccccgtctctactaaaaatacaaaaattagctgaacgtggtggcgcatgcctgtaatcccagctactctggtggctgaggcacgagaatcgcctgracctgggaggcagagattgcagtaagctgagattgagtcactgcactccagcctgggtgacagagtgagactctgtctcaaaaaaaaagatacatttttg

SEQ ID NO: 37325 - DNA, 201 bp, Homo sapiens
aagaaatgcagacgttttcttgagaaattctaaaatgtggaatttgtcttactaaatataatttgaaaactttctgtctaaaattataattgtatcgttasctagatagccttaagacagtaagtagaaattaggttttggtagactttaatcttccctctttgttattttattgatcatttcagaaaacagaagagctta

SEQ ID NO: 37326 - DNA, 201 bp, Homo sapiens
tccacccgtctcagcctcccaaagtgctgggattacaggtgtgagccaccgtgcccagccaggacaacctgcattcttcaagtcaaaagaaaaataaaggkgttgcaggggaacctataaataaaatagacttaaaagatgtatcgggccaggcatgctggtgcatgcctgtaatcacagtaatttgggaggccacagcgg

SEQ ID NO: 37327 - DNA, 201 bp, Homo sapiens
ttcttcctgagaataggaccttcttttttagattcttgtagatatgctggactcctcccctcaccttctccccacttgagggaagtgtaagaaatgcagaygttttcttgagaaattctaaaatgtggaatttgtcttactaaatataatttgaaaactttctgtctaaaattataattgtatcgttagctagatagcctt

SEQ ID NO: 37328 - DNA, 201 bp, Homo sapiens
aggctgcagtgagccatgatcatgtcactgcactccagcctgatcaacagagcaagaccctatctcagggggaaaaaaatgcactgaatttataggtcaayttagggagaattaacatcattacaatattgtctttaagttcttactatctatatttattactatttttctgaatatacacacagatttccagaatagaac

SEQ ID NO: 37329 - DNA, 201 bp, Homo sapiens
gtaacttcaagggaacattttctgaagttagttttgcaggtaataaaatgtttatattgtatcatgcaaaccacttcccataatgtcccctaacttacaayaatagtagatcaatttttgtatttatatatgtagaaattttccaattagaaaattagctgtaggatgggaagtttattttttgttgtttgtattataaaa

SEQ ID NO: 37330 - DNA, 201 bp, Homo sapiens
agaaaggaggatctaagacatagaggatgtgatgaaaagttctaacatacaaataattggtttcccaaaaggcaaggagagagatggtggcagtgcaatayttgaagagtgtttatggcccagaatttttccaaacctatgagaaacatttagccacaaattcaagaaataccacaaaccctaaaagtgaaataattaata

SEQ ID NO: 37331 - DNA, 201 bp, Homo sapiens
cgaaaaccagtcaggtgtggcggcgcgcctgaggcactcggcaggctgaggcaggagaatcaggcagggaggttgcagtgagccgagatggcagcagtacwgtccagctttggctcggcatcagagggagaccgtggaaagagagggagaggaagaccgtggggagagggagagggagagggagagggttgaatttcttaa

SEQ ID NO: 37332 - DNA, 201 bp, Homo sapiens
tataagatgccaaacttaattgataaatgtgtgtgttctgactgttccaccaagcagctgttccctggtctccctccctctcattgggcctctctattctytgagaaccaacaatagtgaaatagcccaattaatagccctgcaatagactcttaagtgttcaactgaagagtcgcacatctcttactttaaatcaaaagc

SEQ ID NO: 37333 - DNA, 201 bp, Homo sapiens
gcatacccccattttattgtgtgccactttatcgtgctccacagatactacattgtttacaagtcgcaggtttatggtaaccctgcctctagtaagtctcrgtgccattttcccaacagcgcgtgttgacttcatgtctctgtttcacattttggtaattcttgcaatatttcaaactttttcactgttattctgtctgtt

SEQ ID NO: 37334 - DNA, 201 bp, Homo sapiens
cttgtataatgtgccactaggaagttattcttgataaattatttggggcactattaattacaatgggggaaaattaatttttttaaaaaattaaatttggstgtttggtgcagttaagctttgggtatgtgttatttggatacacaccccaaaccacacacacatagccacatatagtaacttttaatgctttgcttttcg

SEQ ID NO: 37335 - DNA, 201 bp, Homo sapiens
tgtgggtaagccagcaatgatttctagctcttgtataatgtgccactaggaagttattcttgataaattatttggggcactattaattacaatgggggaarattaatttttttaaaaaattaaatttgggtgtttggtgcagttaagctttgggtatgtgttatttggatacacaccccaaaccacacacacatagccaca

SEQ ID NO: 37336 - DNA, 201 bp, Homo sapiens
cctggctaattttttgtatttttagtagagacaaggtttcaccatgtaagccaggatagtctcgatctcctgacctcgtgatccgcccgtctcagcctccmtaagtgctgggattacaggcaagagccactgtgcctgcccctaaattgcatttttaattagactcaaccctacctttgatttcaaatgcccagaatcggg

SEQ ID NO: 37337 - DNA, 201 bp, Homo sapiens
tatttttttcctgatatgcttacaagatttaactggtgaagcctctgagaccagaggttgctagtgaaaaagttttaaataatgtttaatttctttaatgkaaataaaatgacttgttctgtgtatgtattagttttgctaggtttatccatttcatctaatttttaaaacttgttactgtattgatcatttctctctctt

SEQ ID NO: 37338 - DNA, 201 bp, Homo sapiens
ggtttatcagtttattatcttttccatgaattaacttttggccttttgaattttgttattgtagatttgttttctggttctttaatttctgcactttatartattttctttggttttatcttgctattctttttctgatttttcaaaatagcattgatatctagcccttcttttcaaacctgtgtttaaggctatatgttt

SEQ ID NO: 37339 - DNA, 201 bp, Homo sapiens
atggctagccagttttcccaacaccatttattaaatagggaatcctttccccgttgcttgtttttgtcaggtttgtcaaagatcagatggttgtagatacrtggcattacttctgaggcctctattgtgttccattggtctatatctctgttttggtaccagtaccttgttgttttggttactgtagccttgtagtatagt

SEQ ID NO: 37340 - DNA, 201 bp, Homo sapiens
acatcccttgtaagttggattcctaggtattttattctgtttgtagcaattgtaatgggagttcactcatgatttggctctctattattggtgtgtaggawtgcttgtgatttttgcacactggttcaagcggacctaatacacacctacagaactctccaccccaaatccacggaatatacattcttctcagcaccacat

SEQ ID NO: 37341 - DNA, 201 bp, Homo sapiens
gagagagatgttgcaaataactaaaatcagaagtataagggaaaattttattactgaccaacagaaaacaaaagaattataagaggaacaactgtatgccmacagagtagataacctagatgaaatggacaaattcttagaaggatacaaataacccagtatgactcatggcaaaatagaaaatctctgcagacctataac

SEQ ID NO: 37342 - DNA, 201 bp, Homo sapiens
gttcaacccatacacttacatttttcacttaatagtgtaataagcatttttactttcattaccaaattgtcacaaacataattttaatgattttaagtagytcaagaagaattttcacatacctagttatttctatttgttattacaaaattatcacaaacataattttagtgattataaataattcaagaagactatccg

SEQ ID NO: 37343 - DNA, 201 bp, Homo sapiens
tgccggacggcggggctcctcacttctcagacagggcggctgccgggcggaggggctcctcacctctcagtcggggcggttgccaggcagagggtctcctyacttctcagacggggcggccgggcagagacgctcctcacctcccagacggggttgcggccgggcagaggcgctcctcacatcccagacggggcggcgggg

SEQ ID NO: 37344 - DNA, 201 bp, Homo sapiens
acttaattagttctaccagaacaaggaaggggacaaggaaagagagacatgaggtctatagaagaaggaattgtacacagaccggttaagagaaagactgkaataggaaaccagagggcttcagcagggttgtcttcaggtcaatagaaaggggtaagggggctgaaaggcttccagtgtgtttgaccatgtggtaaatag

SEQ ID NO: 37345 - DNA, 201 bp, Homo sapiens
caagaagggtgggaataatcagttaaactagactgtgtgttctgaaaaccctgagtttagtaaaatatcctacacctagtttgaccaaattggagaatttwtgtaaaagaatagtaggaaataagagtaataaagttactgcaacacagttgtcatgaatactaggtaagaattttaccttcacttatttgtaagatggag

SEQ ID NO: 37346 - DNA, 201 bp, Homo sapiens
tcagtaataatgcccttattacttttaataagctggttccctccctttctgtattctctttagcttcttttctcatccatcagttcagtttcacttaaatrctttcttagctcttcatcactcagtcatctatccaccaccaatattttatggcacaaactttgtgtttctctttagagtttgtacctatgatctcccttc

SEQ ID NO: 37347 - DNA, 201 bp, Homo sapiens
gttcatagaggctttatttgtaatagcagaataccggaaacaacacaggtatccttcagtgggtgaatagttaacaaaactggtatatccatgcagtggartactactgaacaataaaaaggaatgaacttctgatatatacaataacccggaggggcctcaagggtgttatgctttgtgagaagaattaaatctcaaaat

SEQ ID NO: 37348 - DNA, 201 bp, Homo sapiens
agtgtctgggattacaggcatgcgccaccacgcccggctaattttgtatttttttagtagagatggggtttctccatgttgtcaggctggtctcgaattcscaatcctcaggtgatctgcccgccttggaggcgtgagccaccatgcccggccttttttttgagacagagtctcattctgtcacccaggctggagtgcagt

SEQ ID NO: 37349 - DNA, 201 bp, Homo sapiens
gaagcttttagaatgttttatttattcccaatgtcctgaaatgttatgattgttgactttgtgtgggtcattatttattatctggacagctgcctcaaatmtacgagcttttcccaagtttgtgactttcaaattaagtttcaacttactttttctgttatatctcggtcaaaaccataccagctgaatcaatttacctta

SEQ ID NO: 37350 - DNA, 201 bp, Homo sapiens
ttagttttcttgcttatttttttttttttttttttggtagagatagggtctcactatgttgtccacgctggtcttgaactcctagcctcaagcaattctcygaccttggcctccccaaagtgctgggattacagatgtgagcagccgcacctggccttttttcttttttctgatttagatttatttttctctttaactctt

SEQ ID NO: 37351 - DNA, 201 bp, Homo sapiens
tgggtgtagctagaaaagaggtgaagttctgagccctgggccactccagtatttgaagatcaagaagataaggatcatccagcgaaggagactgagaaagagtggccagtgaggtaggagaaaatcaggagagtgcggaaattaagtgaaggaaagtgttttagttaagagaagtgatcagcactgtgaaatactgttaaa

SEQ ID NO: 37352 - DNA, 201 bp, Homo sapiens
atgggtgtagctagaaaagaggtgaagttctgagccctgggccactccagtatttgaagatcaagaagataaggatcatccagcgaaggagactgagaaagagtggccagtgaggtaggagaaaatcaggagagtgcggaaattaagtgaaggaaagtgttttagttaagagaagtgatcagcactgtgaaatactgttaa

SEQ ID NO: 37353 - DNA, 201 bp, Homo sapiens
ctgttagttttaccttggatacaatgcaatgcaggatttttttcctgctgcgtccatgaagccaaatcctcagtgtgatgacagaaattgcagaaagaatrtaagaaaaaggtagcagcactgcccaaatgaggttatacaagaagaggaagagataatccatgaatataccgagtggggtattgagctggtatctgaggt

SEQ ID NO: 37354 - DNA, 201 bp, Homo sapiens
aatgggtgtagctagaaaagaggtgaagttctgagccctgggccactccagtatttgaagatcaagaagataaggatcatccagcgaaggagactgagaaagagtggccagtgaggtaggagaaaatcaggagagtgcggaaattaagtgaaggaaagtgttttagttaagagaagtgatcagcactgtgaaatactgtta

SEQ ID NO: 37355 - DNA, 201 bp, Homo sapiens
taatgggtgtagctagaaaagaggtgaagttctgagccctgggccactccagtatttgaagatcaagaagataaggatcatccagcgaaggagactgagaaagagtggccagtgaggtaggagaaaatcaggagagtgcggaaattaagtgaaggaaagtgttttagttaagagaagtgatcagcactgtgaaatactgtt

SEQ ID NO: 37356 - DNA, 201 bp, Homo sapiens
aactaacacctcagggttgttagatgccaaagtgtgcacttttagcacgctttggtgtttgtgctgctggtcttcctaccactgtggaagtggttgctggratcttagtacacagcatgttaaagtttctgttaaaatttggtactgttagttttaccttggatacaatgcaatgcaggatttttttcctgctgcgtccat

SEQ ID NO: 37357 - DNA, 201 bp, Homo sapiens
catgaccctgtgagggttatgaggtataggtacctgtacaggtagggaaacgaagccttttgtgtctaaataacttctcaaggtctcacagctactaagcrgcaatcaaactaacacctcagggttgttagatgccaaagtgtgcacttttagcacgctttggtgtttgtgctgctggtcttcctaccactgtggaagtgg

SEQ ID NO: 37358 - DNA, 201 bp, Homo sapiens
ttttgaaaagtgactgaagtataaaacagggaaatttgacatatattctctaacaactccattgcaaagcagccagaatgaaatggctgtggtgagaactraaattaacactatattgaaacaaatcagtaaaaatatccttaaagcttttagaagctatcccctgtgatatcatctgttacaaactttatatggtagaga

SEQ ID NO: 37359 - DNA, 201 bp, Homo sapiens
tattaaatcctcatgaccctgtgagggttatgaggtataggtacctgtacaggtagggaaacgaagccttttgtgtctaaataacttctcaaggtctcacrgctactaagcggcaatcaaactaacacctcagggttgttagatgccaaagtgtgcacttttagcacgctttggtgtttgtgctgctggtcttcctaccac

SEQ ID NO: 37360 - DNA, 201 bp, Homo sapiens
aggggttatcttttccaacacttcttaatctagtacattattttttacttctcataattcacatactgttgtttaaatgaatgttttgagcttttttcacwtttgaaaagtgactgaagtataaaacagggaaatttgacatatattctctaacaactccattgcaaagcagccagaatgaaatggctgtggtgagaactg

SEQ ID NO: 37361 - DNA, 201 bp, Homo sapiens
ctttatctaaatgtcatggctaattgtgttgggtatttataatagtctctggatttctttcagaattatagccatatttgctatttgttgtagtgaaagtwaaggctctgctgccttactcattttatagtatttgaccaaagttcagagcattctggatttttcgtgatatggggttttcatcttttgggaatgcaacat

SEQ ID NO: 37362 - DNA, 201 bp, Homo sapiens
aggaatctcccaaactaattatctagatctgaggaaataatgttaataataaagcctttctattctaagataattccaagatttaaaaaatatcagtaacwttatttatatatgtattattaacaaactgtaaatatcttcctatactaatcctagctctgtgtttctcaacttgaaatgagtcagccactacctctgtgc

SEQ ID NO: 37363 - DNA, 201 bp, Homo sapiens
taaataaaaataaaaaaaaactataatgaagaaactttattttatttcagatttttaaattaatttttagattttattgtcttattttttgaggcagggtyttgctctatcacccacgcaagttcagtggtgctttgagcatttcatttacttacatatttcccataaccatatttgtgctgctgtctcttgattatttat

SEQ ID NO: 37364 - DNA, 201 bp, Homo sapiens
ctaaaactactataacaatattgggaaaaatgaaaaaagggagtagatagtgtaaaagggccatatccttctctaccatagcaggaagtgaacagataacrtctcaaatcaaaaaactgtagtataggctttccaccccagctctgccccgcccatatagatacctattacagaaggagggaaatagcttttaaaaaagga

SEQ ID NO: 37365 - DNA, 201 bp, Homo sapiens
ctgaacaataatttggataatttattaaaattctgaagctaagatttatgagccccccaaaaaagctattgtttattttatatacttttaaaatggcattsaagagcaattatcatttaacttcttaattattttagcttagtccagttcaaattacctaataaaaatgtttaaagaccataaactataagaagatgtaat

SEQ ID NO: 37366 - DNA, 201 bp, Homo sapiens
attattttaaacgtagatataataggcttggttatctgctttcctggcctccttcaatttttctttggttaagtatctcacaaaaaaagtcagccactgaraagtaatagtgcctgtgaagatgcttgaagaattacaaattactcagctgttaaatagaagcatctcagtggtatagtgtagaacctcagtgttccctgg

SEQ ID NO: 37367 - DNA, 201 bp, Homo sapiens
caagaaaagagttactaatttgtgtagttgcaaattaaattgatagtgtatttttcctttctccaatatcccactgtcataataccacattttcataggaycagcaaacatgctggtaaatgttttaacaaccagctctgggactagagaaagccctgctttttaggttcactgatttcatgatataaccttccattagtc

SEQ ID NO: 37368 - DNA, 201 bp, Homo sapiens
ctgccttcacaggctgaatcccccgcaggcagtaaccatggctagggaaaaacaggcagccgcgaggacagttccggaggagacaacaccaggctcccgtrgggaaacttttgggaatggagatgggggattccatcctttgcgtgcagacccaagacttcgatggtagctcggacaagtctgtcattgtttttgtcctgg

SEQ ID NO: 37369 - DNA, 201 bp, Homo sapiens
tttagggctttataaatttatctcaataccgttttgtagtgttcattcagtatagaagacctccacatctttcagcagatttattcctggatatgtgataktcttgatattattttaattagaattgtttgtgaaatttcatttcttaattgttttcttggtagtagttagaagtagaatttaattttattgatcttatac

SEQ ID NO: 37370 - DNA, 201 bp, Homo sapiens
aagtctagctccactgctatgggtcatactcttcagcctcccaacagggcagagagagagagctactgaggcttgtctaggttgccaggctaactgggcgrcttgtccatattcaccccatggattgcaccatggcactctttgatttttccactgcaatggcaagtaatctcatcagtcataatagagcagtcccgaatg

SEQ ID NO: 37371 - DNA, 201 bp, Homo sapiens
ttagagacacaagtgtttactgttgtgttacagttccctgcagtattcaggacagtaccatactgtacaggtttgtaacctgggagcaataggctataccmtatagcctaggtgtgtagtaggctgtaccatctaggtttgtggaagtacaacttatgttcacacaaggacaaaatcacctaatgagatgcatttctcaga

SEQ ID NO: 37372 - DNA, 201 bp, Homo sapiens
accagagggcttcagcagggttgtcttcaggtcaatagaaaggggtaagggggctgaaaggcttccagtgtgtttgaccatgtggtaaatagattccaggrgattttacagttccttagaagagtctggaagatttagtgatagagatacagaaaggtaaaagtcgagggtgggaggggaactattaattttagaaaaatc

SEQ ID NO: 37373 - DNA, 201 bp, Homo sapiens
agggacacgaagacacagaccctgggaaaatcaagccatgatttgccatgttctcatgccccatgtctcagtgtgaatgggtgagcacggggagtcattcmtcacaatactgtaaaaatcaaaataggtacaaaagaataagtatgtgtggccagcttcagagccagctttacttggggattaaagtcatttgcaatccag

SEQ ID NO: 37374 - DNA, 201 bp, Homo sapiens
gccattcacaatttttacctcccaaaacaataagtgtagaacaacttaggtttttcattttgtttcatcatttattaaacatttacttctttttgtaagtmttgatatggattattctttaataattgttctattttagaagacatgagagatttaccagtataatctgaaaggaaatagtgtaaactgttattgtaattc

SEQ ID NO: 37375 - DNA, 201 bp, Homo sapiens
ttttcaaaaattgtgttgccatggtttatttaaatgaactaatttcgtattttctaatttgctaatattgctatagaaacagaattgaaaataggaagtamggtgtatttataggacaggttggtatgtgtgttgagtgtgaggggctaggagttaaggaaaaagaagttggtgtcccaaagacctgtgtaaatggggtaa

SEQ ID NO: 37376 - DNA, 201 bp, Homo sapiens
tttaaaatggcattgaagagcaattatcatttaacttcttaattattttagcttagtccagttcaaattacctaataaaaatgtttaaagaccataaactrtaagaagatgtaatgagaaatggaaataattcattctattcctatttagaaaacattctagaaagtggtatggggcataaggactcacattatggaaatc

SEQ ID NO: 37377 - DNA, 201 bp, Homo sapiens
ggaaaattgaagagacatgactactaaatgcaacacatgtttctcagttggatcctgggcttcataagaaaaggagacatggtagggataacttgaattgkgtctgtgaattcagatggtaagtgttctagtaatgttgatttttttaaattgagaggattgcttcgtgattatggtagagtgtccttgactttgaaagat

SEQ ID NO: 37378 - DNA, 201 bp, Homo sapiens
agtctatcaccgtttaactctgctatttataccctcatttttcgttctctggtcagccatagtcataccctggcatataccttcaaatctattgttcctcwttctctttgtcaaatacctttggcagaaccccaactgtgtttgaatacaactttgtatcttcaactatccagctgaagacagcttgcttaaaacacccac

SEQ ID NO: 37379 - DNA, 201 bp, Homo sapiens
aacacattggacttcacagtttcttggaaatgtgcataaactaagatctctgagccatggtagatactaaaccagcactaggtgagacctgttagcctggrcacttaaaggataatacagttttctttattgttactatataagtatcttttttgtattctaaaaaagataatcttccttcatcccaatttattctctaca

SEQ ID NO: 37380 - DNA, 201 bp, Homo sapiens
tggctaagctgttccaagagctttgggttatttgtgttttttttttttttttccttgtttcttccattcttttcctttggtgcttatctgagaattcctasggaactttgaggaagtgtcatcagtatttcacagttagaatgaactattgtcctaacatttcatggaggttcaggaccatggacagatcacatgtgctac

SEQ ID NO: 37381 - DNA, 201 bp, Homo sapiens
gagacagagtctcattctgtcacccaggctggagtgcagtggtgcaatctcgactcactgcaacctctgcctcccgggttcaagcagttctcctgcctcarcctcccgagtagctgagattacaggcatgcgccaccatgcctggctaatttttgtatttttggtagagatggggtttcaccatgtttgccaggctggtct

SEQ ID NO: 37382 - DNA, 201 bp, Homo sapiens
tgagaccagcttgggcaacatgccaagaccccatctgtacaaaaaaatttaaaaaataaaaaaataaaaaattagctggatactaattttttttagctgtratcccagctactagggaggctgaagtgggaggattgcttgagcctaggaggtggaggttgtaataagctgagatcacaccactgcactccagcctgggtg

SEQ ID NO: 37383 - DNA, 201 bp, Homo sapiens
ctgaattccattcctaatatatttttaaggatttttgcatctatatacatgaaggatattagtctttagttttccttttttttcttctttttcctttcttwccttccttccttccttccttccttccttccttccttccttccttccttccttcctttcttgtactgcctgttttctctgtcaacgtagctggtggctcct

SEQ ID NO: 37384 - DNA, 201 bp, Homo sapiens
attcctagtgccaagcttattgccagtattgtataactgacactatatatatatttgttgagtatctgcagacaaaaataaaatttttttaaataaaaaaktcatacctcatttaatatttttgtatgagaaaatagaatttttttgtctcctaaatgaaaaatttattataatctataatgtacttctgagactctcgtt

SEQ ID NO: 37385 - DNA, 201 bp, Homo sapiens
tcacatagctcagactgctttgagctctttttcttttctcaatgtattgggcaaaaggaattgcagtaagtgggccttgagtgatgtagtggcaaggggcrtgtgtgtgcatgtatgtgttggtaaggggccattctgtggtcctatgattaggtcccaatctttagtgaggctttgagactgcacagtgaacaccagggc

SEQ ID NO: 37386 - DNA, 201 bp, Homo sapiens
caggctacatttttactcttaattatgagaaataacaaaagtaaattaatatttactttagaaattgttgaaatccgggcaaggggcagtggctcatgccygtaatcccagcactttgggaggctgaggcgggcggatcacctgaggtcaggagtttgagaccagcctggtcaacatggtgaaaccccatctctactaaaa

SEQ ID NO: 37387 - DNA, 201 bp, Homo sapiens
gaacatttgtttccaattttttggctattagaaataaagctgatatgaatattctcctacaggtttttatggaaatatgtttttgttttctttgggtaaawaaccagaagtggaactgctatgctaggcagtagttgcatgtttaaatttaaaagaaactggcatactacttccagttggattgtaccatttttatattcc

SEQ ID NO: 37388 - DNA, 201 bp, Homo sapiens
ttaaatttaaaagaaactggcatactacttccagttggattgtaccatttttatattcctacttatgccctgttcttgcctaatattttttgttgttaatmttaattttagccattctagtgggtatgtagtggtattctgtggtcttaattttcattgttgtttgcatttgtgttatatatcagcataatcatggggttt

SEQ ID NO: 37389 - DNA, 201 bp, Homo sapiens
tgtttgtatttttattgttgagctgtaggagttctttgtcagatgttttagcaatattttctcagactgtgtggtttgttcattttttaaaaaaattatcrtttagagcagaagttttcaattttgaaggtataattttatcaattgttttctattacagttagtattttctgtgttctaagaaatccttgtttatactca

SEQ ID NO: 37390 - DNA, 201 bp, Homo sapiens; identical to SEQ ID NO: 5615

SEQ ID NO: 37391 - DNA, 201 bp, Homo sapiens
aacttatttttcagccctaaggtggttactcctgcctctttttctagtccttgtcctccttcttcttcattatgttatccaattaaccaccatttaaatgwattagtaaagtttactaatatctttgttcataattgcttctagtatcacattcttccatcttggttaaatttcttgttttccgaagtataccctttagtg

SEQ ID NO: 37392 - DNA, 201 bp, Homo sapiens; identical to SEQ ID NO: 5616

SEQ ID NO: 37393 - DNA, 201 bp, Homo sapiens
aattgttgaagttgagttcattagtaggagggggtttttatactagtttctctacccttgtatacgtttgaaattttgtatcataaagagtttatattgtwtattttcttattttaattaatgtttttgaagagacagtcttgctctgtggcccaggttagagtgcgatggtgtgatcatagctcacttcagcctcaaact

SEQ ID NO: 37394 - DNA, 201 bp, Homo sapiens
aaactgttggaagaaaatattggagaacattttctggatctagggcttggtaaggagtttttagatatgacaaaaaaaatcaataaaaatgaataaatggkacttcattaaaattaaaattatgtgctcaatgaaagaccctggtaagactataaaaagacaagctacaaagtgggagaaaatagttgtcaacatacctta

SEQ ID NO: 37395 - DNA, 201 bp, Homo sapiens
tatatttaaggccactagtactagtcattgtgttttcaaggaaatcagaggtattccctgcttcactaaatgtatttgtcatgaccaattgcttctttaarattatcccatatttggaaatcagtgaaagaattgcggcagaaagaaatcagtgaaggaactgaatacaagaataaagtcaggagatgaatgagtttatga

SEQ ID NO: 37396 - DNA, 201 bp, Homo sapiens
tggtagagatggggtttcaccatgtttgccaggctggtctcaaactcctgatctcaccttaggtgatccacccaccttggcctcccaaagtgctgggattrcaggcgtgagccaccgtgcccaacccctctttgaagtttttatctcacttatgtataaaatacttatcttgccaatacgtttgagttagtaaatagttta

SEQ ID NO: 37397 - DNA, 201 bp, Homo sapiens
cctctactgtgcacaaaagactgctacctaaatttctcactcacagattttctctactgataatatctgcctcctggccacgtactttctttagctgtgtsattagctcaccattagatcttgctctgatttagtcataattatttaaaagaaaatacacaagttgtacatgaatatatgtttatttaaaaaacagtataa

SEQ ID NO: 37398 - DNA, 201 bp, Homo sapiens
taaaaattatcccatgaaaaacagacaaaaagattgaaaaaatgagcagattctcaggaatgaaaaggtgtaacatgcaagtaattggagttccaggtagwgagaatagagacaataggacagaaaagaataatagctccaaacttcccatgtttggagaaatacatgaatttgtagaataaaaaattgcatagtgttaca

SEQ ID NO: 37399 - DNA, 201 bp, Homo sapiens
gagggtctaaatgaaataagattgaccaagaaaataattgttgaagttgagttcattagtaggagggggtttttatactagtttctctacccttgtatacrtttgaaattttgtatcataaagagtttatattgtttattttcttattttaattaatgtttttgaagagacagtcttgctctgtggcccaggttagagtgc

SEQ ID NO: 37400 - DNA, 201 bp, Homo sapiens
ttgaattctaaaatcaaaattctaactttgttaaaactttacttgtgaagagaattatcagggtaagaggtattttaattgaattattaatattaattgarttattatcattccttctggacttccagaaggatagtagattttcagcataaattatattatttgcagaaatagttcaggtacagtgagccattcttacca

SEQ ID NO: 37401 - DNA, 201 bp, Homo sapiens
tacaaaatcaatgtacaaaaatcacaagcattcttatacaccaacaacagacaaacagagagccaaatcatgagtgaactcccattcacaattgcttcaargagaataaaatacttaggaatccaacttacaagggaagtgaaggacctcttcaaggagaactacaaaccactgctcaaggaaataaaagagtatacaaac

SEQ ID NO: 37402 - DNA, 201 bp, Homo sapiens
agtgggcgcatcacctgaggtcaggagttcgagaccagcctagccaacatgatgaaaccccatctctactaaacatacaaaattagccggggtggtggcaygcacctgtaatcccagctacttgggaggctgaggcaggagaattgcttgaacctgagaggcagaggttgcagtgagctgagactgcaccattgcactcca

SEQ ID NO: 37403 - DNA, 201 bp, Homo sapiens
gtcagcagactgacacacaagacaaatctggcctactgccttgtttttgtaaatacagatttattggaacatagccccacctatttgtttacatactgttyttgttttgattatgcaagggctgagttgaatagttggcacagagactaaagagctcacaaagcctgcaatatttactgtggcctttacagaaaaggtttg

SEQ ID NO: 37404 - DNA, 201 bp, Homo sapiens
ttcacagaaccaagtcactgtaggttgtaagggaaaagcaaaggtagcaggagaattcagagtacttgatatccaaattcagtgagcaaaagggattattrtaataagacaggcatttttgggtagatgatgttgagtaatcaaatttgacaatacctgtctgaacacctcgaattcttggtcctaaaagtcatgcatgtc

SEQ ID NO: 37405 - DNA, 201 bp, Homo sapiens
gaggaactgttctagaccaaggaaaattgaagagacatgactactaaatgcaacacatgtttctcagttggatcctgggcttcataagaaaaggagacatkgtagggataacttgaattgtgtctgtgaattcagatggtaagtgttctagtaatgttgatttttttaaattgagaggattgcttcgtgattatggtagag

SEQ ID NO: 37406 - DNA, 201 bp, Homo sapiens
tcagtctcctgagtagctgggactgcaggcacaagccaccgtgtccggccgatttttatatttgtatttttgtagagacagagttttgccacgttgcccaygctggtcttgaactcttagactcaagcaatccgtctgctttggcctcccaaagtattgggatacaggcgtgaaccaccacacccggccccatttttagtt

SEQ ID NO: 37407 - DNA, 201 bp, Homo sapiens
aacaaaagtaaattaatatttactttagaaattgttgaaatccgggcaaggggcagtggctcatgcccgtaatcccagcactttgggaggctgaggcgggsggatcacctgaggtcaggagtttgagaccagcctggtcaacatggtgaaaccccatctctactaaaaatacaagaattagccagacgtggtggcgagtgt

SEQ ID NO: 37408 - DNA, 201 bp, Homo sapiens
gaaccagcagagtggatagagaaagggcagtgagaatgacagcataataacaggcaaatttagtgtccttgtgttagcagcgccgaatccatatgtgtttrcagcagcctcaattcttgcctcctcagaataaagaattagaccaaggggcataagacagggagagactgaggcaagttttagaacaggagtgaaagtttg

SEQ ID NO: 37409 - DNA, 201 bp, Homo sapiens
ctttttctactgaagtcaagatttcatttcttaatccagtataatagatggcctttaactggttactaatgtatatggatgtgtttctactatcttttttyctgtttgtcatgatttttgcatgctgctttttatttcctttcttcccttctcaaaagtttttaactgtggtaaaatacgtataacataaaattaccatct

SEQ ID NO: 37410 - DNA, 201 bp, Homo sapiens
agtaggatatatgtatatataaaagggagtcagttagggagaattaactgacacgattacaaggtgaagtcctatgataggatatctgcaagctggggaargagagaagccagtaatggctcagtccgagtttgaaagccggaaaaccagggaagccgacatggcagccttcagtctgtggctgaagtcctgagattcccc

SEQ ID NO: 37411 - DNA, 201 bp, Homo sapiens
ctgagattccccgggaagctgctggtgcaagtccaaaggctggtgaacctggagtctgatgtcccagggcagggaaagcggaagcaagcttcatgcactgraagaagaaagagccagaagactcagcaagcagaattatcccaccttctaacacctgcttgcccacattgagggtgggtcttcctctttcagtccgttgac

SEQ ID NO: 37412 - DNA, 201 bp, Homo sapiens
tttatgtcagtatgaacttctgcagtatttcatacacacacccagtacaccatacatacagctctgtgtggtgaaaataactagaaacagtgaccagcacrtagcagtgagcatccctattgacagattatcgtcctcacatacgatttcctactgcagggaaaacaggctacttggagaaattgctgactcaagatctag

SEQ ID NO: 37413 - DNA, 201 bp, Homo sapiens
agaccactccaagttctgacaccaattggaagttcgaggggttcccaaaaccacctcttagttttgataatttgcaagactcacagaactcactgaatgckgttatacttaacagttgtattttattacatggaataccgattttattacatggataccgatttaaatcagccagaggaagaagtattaatatatagggta

SEQ ID NO: 37414 - DNA, 201 bp, Homo sapiens
tttctgaacatactgccttacctgataactgtgttatattattagatagtaatatgaaaaacacaaatcagctgatgtcaattcctaaggatatggaagtraaaaatgtgggattggctgttttctggtttttttctacctagtatttttatttgtatgttgtaagaattacttgggaaattgtgcatttaaagttaatgc

SEQ ID NO: 37415 - DNA, 201 bp, Homo sapiens
tactggtataaaatgtatcaattctgctttgcttctcagttccattttaactaaagcccctctccatggacacctaattcttgcaatgtgtataatcttaygaaaactaggaggaggagatttttagaaactaaaagacatttctgccatattcccaactcagagtcatatttcatatttataatctaaactgattacttt

SEQ ID NO: 37416 - DNA, 201 bp, Homo sapiens
taatgatttttcagtttttaaattccattatgtggtgattaacattgaagtttgaatattaaatcagttttaaattcctggattaaactcatcttgattgygatggataacgtatttctggatttgatttactaatgctttgattaggatattttttggattatgtttgccagagagattagtctgtagtcttgtaatact

SEQ ID NO: 37417 - DNA, 201 bp, Homo sapiens
gttaaatattttagagtcataagtgatagagtacaatgtaaacccaggttttctaactttcattcacatgatttatctaatggtttgctttttattttttyctacaataaacattacttcattggagactctgtatcatgtttacctacttgccaaacacatctctgtgtcatttagaaatttgagataatataacaccta

SEQ ID NO: 37418 - DNA, 201 bp, Homo sapiens
gagcacagggttgggggtaaggttatagattaacagcatcccaaggcagaagaatttttcttagtatagaacaaaatggagtctcctatgtccacttcttyctacacagacacagcaacaatctgatctctctttcctttccccacatttcccccctttctattagacaaaaccgccatcgtcatcatggcccgctctcaa

SEQ ID NO: 37419 - DNA, 201 bp, Homo sapiens; identical to SEQ ID NO: 5602

SEQ ID NO: 37420 - DNA, 201 bp, Homo sapiens
gtcctactttgttctttttcaagattgttttaattattcgaagacttttgcattttagaatcaatatatcaatttttataaaagcctactgatgtaattgrgtatgcactgagtacatagataaattttgggaggaccaatatcttaataatgttgagtctgttagtctctgaagcagatatttctctttgttttttgaag

SEQ ID NO: 37421 - DNA, 201 bp, Homo sapiens
agaaatattaagacataataaattattgaatactttttttttttttttgagagatggagtcttgctctgtcacccaggatagagtacagtggtatcgtcayagcccactgcagcctccaactcttacactgaagcagtcctcctacttcagcctcccgagtagctgggacagcaggtgcacaccaccacacccagcttatg

SEQ ID NO: 37422 - DNA, 201 bp, Homo sapiens
tgctaataccacagtcttgattcctatagctttatactaatgttgagattgtgtaatgaactctgagtgtatggagtcctactttgttctttttcaagatygttttaattattcgaagacttttgcattttagaatcaatatatcaatttttataaaagcctactgatgtaattgagtatgcactgagtacatagataaat

SEQ ID NO: 37423 - DNA, 201 bp, Homo sapiens
attagttgttcaggctggtctcaaattcttgtcctcaagcaatcctcccaacttggcttcccaaagcactgagattataggcttgactcaccacacccagrctcattgaatacttttaattatagaatactttggttattgaaaataatccaattattattgaatatgtgccattgaatatgagttaacagcaatgagtaa

SEQ ID NO: 37424 - DNA, 201 bp, Homo sapiens
gtactttttgttttttttgtttttttttttttgagacagggtttcactcttgtcgcccaggctggagtgcagtgatgccatctctgctcactgcaacctcracttcccaggctcaagcaatcctcccacctcagcctcccgagttgctggtagtacagacatgtgccaccatgtccagctaatttttgtattttttgtaga

SEQ ID NO: 37425 - DNA, 201 bp, Homo sapiens
ccaacttggcttcccaaagcactgagattataggcttgactcaccacacccagactcattgaatacttttaattatagaatactttggttattgaaaatartccaattattattgaatatgtgccattgaatatgagttaacagcaatgagtaaaatagatacagtcttaaccccacagagcatggggtgcagtggaaaag

SEQ ID NO: 37426 - DNA, 201 bp, Homo sapiens
tgggcacaggtgatcctctgacctcagcctcttgggtagctgggaccactagcgcaggcgtggaccactattcttggctaatttttgtagtttttgtagcratgaggttgctcacgctggtcataaactcctggactcaagtgttccactggccttgcctcccaaagttctgggattataggcgtgagccattgtgcccag

SEQ ID NO: 37427 - DNA, 201 bp, Homo sapiens
ttattttaaaactaaaatcataaaacttttaacccaaatcttatttacttttgtttagggacaaggaaaattattcattttagaaactttaattagtgtayatgttttgactaatattcaaattatggaaaacttgaataatgtttttacagtaatagatattttatctcttccaaacatttctcagttttcatgaattat

SEQ ID NO: 37428 - DNA, 201 bp, Homo sapiens
aatccttcaaattctgcctcataccagcattatctattatattgcctcacccccaaaacaaaaataaaacttaaatattttcaaacacaacagatgactakggagaagaaatagcccaccctcctgaggcctcgttatttcgaaggttaggagagtttccgtctgcccaaatagtgaccattttaagaacagagacttcag

SEQ ID NO: 37429 - DNA, 201 bp, Homo sapiens
cttaaatattttcaaacacaacagatgactagggagaagaaatagcccaccctcctgaggcctcgttatttcgaaggttaggagagtttccgtctgcccaratagtgaccattttaagaacagagacttcagccatggaataaaatgagtaaggatgtggagtgagtcagtaggctacatactttattaaatgtataattg

SEQ ID NO: 37430 - DNA, 201 bp, Homo sapiens
ttatttatcatatgtatgttctccatctttgaaaattgtgttgacacccatcatcttccattgtcttttcttacattcacttgtgggtttctaccttttarttcttgtattgtcattttactgtagttctggagggagcagagataaacatgtttactcccataaatatttttggggtgatgagggaataagaagaaggat

SEQ ID NO: 37431 - DNA, 201 bp, Homo sapiens; identical to SEQ ID NO: 27539

SEQ ID NO: 37432 - DNA, 201 bp, Homo sapiens; identical to SEQ ID NO: 3718

SEQ ID NO: 37433 - DNA, 201 bp, Homo sapiens; identical to SEQ ID NO: 27555

SEQ ID NO: 37434 - DNA, 201 bp, Homo sapiens; identical to SEQ ID NO: 27556

SEQ ID NO: 37435 - DNA, 201 bp, Homo sapiens; identical to SEQ ID NO: 3714

SEQ ID NO: 37436 - DNA, 201 bp, Homo sapiens; identical to SEQ ID NO: 27317

SEQ ID NO: 37437 - DNA, 201 bp, Homo sapiens; identical to SEQ ID NO: 5646

SEQ ID NO: 37438 - DNA, 201 bp, Homo sapiens; identical to SEQ ID NO: 3715

SEQ ID NO: 37439 - DNA, 201 bp, Homo sapiens; identical to SEQ ID NO: 3716

SEQ ID NO: 37440 - DNA, 201 bp, Homo sapiens; identical to SEQ ID NO: 27147

SEQ ID NO: 37441 - DNA, 201 bp, Homo sapiens; identical to SEQ ID NO: 3719

SEQ ID NO: 37442 - DNA, 201 bp, Homo sapiens; identical to SEQ ID NO: 3717

SEQ ID NO: 37443 - DNA, 201 bp, Homo sapiens; identical to SEQ ID NO: 3720

SEQ ID NO: 37444 - DNA, 201 bp, Homo sapiens; identical to SEQ ID NO: 27020

SEQ ID NO: 37445 - DNA, 201 bp, Homo sapiens; identical to SEQ ID NO: 27518

SEQ ID NO: 37446 - DNA, 201 bp, Homo sapiens; identical to SEQ ID NO: 3722

SEQ ID NO: 37447 - DNA, 201 bp, Homo sapiens; identical to SEQ ID NO: 27520

SEQ ID NO: 37448 - DNA, 201 bp, Homo sapiens; identical to SEQ ID NO: 3723

SEQ ID NO: 37449 - DNA, 201 bp, Homo sapiens; identical to SEQ ID NO: 5644

SEQ ID NO: 37450 - DNA, 201 bp, Homo sapiens; identical to SEQ ID NO: 3725

SEQ ID NO: 37451 - DNA, 201 bp, Homo sapiens; identical to SEQ ID NO: 27525

SEQ ID NO: 37452 - DNA, 201 bp, Homo sapiens; identical to SEQ ID NO: 3726

SEQ ID NO: 37453 - DNA, 201 bp, Homo sapiens; identical to SEQ ID NO: 3727

SEQ ID NO: 37454 - DNA, 201 bp, Homo sapiens; identical to SEQ ID NO: 3846

SEQ ID NO: 37455 - DNA, 201 bp, Homo sapiens; identical to SEQ ID NO: 27348

SEQ ID NO: 37456 - DNA, 201 bp, Homo sapiens; identical to SEQ ID NO: 27349

SEQ ID NO: 37457 - DNA, 201 bp, Homo sapiens; identical to SEQ ID NO: 27350

SEQ ID NO: 37458 - DNA, 201 bp, Homo sapiens; identical to SEQ ID NO: 27601

SEQ ID NO: 37459 - DNA, 201 bp, Homo sapiens; identical to SEQ ID NO: 27454

SEQ ID NO: 37460 - DNA, 201 bp, Homo sapiens; identical to SEQ ID NO: 3840

SEQ ID NO: 37461 - DNA, 201 bp, Homo sapiens; identical to SEQ ID NO: 3842

SEQ ID NO: 37462 - DNA, 201 bp, Homo sapiens; identical to SEQ ID NO: 3724

SEQ ID NO: 37463 - DNA, 201 bp, Homo sapiens; identical to SEQ ID NO: 27356

SEQ ID NO: 37464 - DNA, 201 bp, Homo sapiens; identical to SEQ ID NO: 27357

SEQ ID NO: 37465 - DNA, 201 bp, Homo sapiens; identical to SEQ ID NO: 5645

SEQ ID NO: 37466 - DNA, 201 bp, Homo sapiens; identical to SEQ ID NO: 27359

SEQ ID NO: 37467 - DNA, 201 bp, Homo sapiens; identical to SEQ ID NO: 5647

SEQ ID NO: 37468 - DNA, 201 bp, Homo sapiens; identical to SEQ ID NO: 27360

SEQ ID NO: 37469 - DNA, 201 bp, Homo sapiens; identical to SEQ ID NO: 27175

SEQ ID NO: 37470 - DNA, 201 bp, Homo sapiens; identical to SEQ ID NO: 5649

SEQ ID NO: 37471 - DNA, 201 bp, Homo sapiens; identical to SEQ ID NO: 30225

SEQ ID NO: 37472 - DNA, 201 bp, Homo sapiens; identical to SEQ ID NO: 30227

SEQ ID NO: 37473 - DNA, 201 bp, Homo sapiens; identical to SEQ ID NO: 29226

SEQ ID NO: 37474 - DNA, 201 bp, Homo sapiens; identical to SEQ ID NO: 30230

SEQ ID NO: 37475 - DNA, 201 bp, Homo sapiens; identical to SEQ ID NO: 29227

SEQ ID NO: 37476 - DNA, 201 bp, Homo sapiens; identical to SEQ ID NO: 30232

SEQ ID NO: 37477 - DNA, 201 bp, Homo sapiens; identical to SEQ ID NO: 30233

SEQ ID NO: 37478 - DNA, 201 bp, Homo sapiens; identical to SEQ ID NO: 30235

SEQ ID NO: 37479 - DNA, 201 bp, Homo sapiens; identical to SEQ ID NO: 30020

SEQ ID NO: 37480 - DNA, 201 bp, Homo sapiens; identical to SEQ ID NO: 30021

SEQ ID NO: 37481 - DNA, 201 bp, Homo sapiens; identical to SEQ ID NO: 30022

SEQ ID NO: 37482 - DNA, 201 bp, Homo sapiens; identical to SEQ ID NO: 30023

SEQ ID NO: 37483 - DNA, 201 bp, Homo sapiens; identical to SEQ ID NO: 30024

SEQ ID NO: 37484 - DNA, 201 bp, Homo sapiens; identical to SEQ ID NO: 30026

SEQ ID NO: 37485 - DNA, 201 bp, Homo sapiens; identical to SEQ ID NO: 30028

SEQ ID NO: 37486 - DNA, 201 bp, Homo sapiens; identical to SEQ ID NO: 30030

SEQ ID NO: 37487 - DNA, 201 bp, Homo sapiens; identical to SEQ ID NO: 30032

SEQ ID NO: 37488 - DNA, 201 bp, Homo sapiens; identical to SEQ ID NO: 30034

SEQ ID NO: 37489 - DNA, 201 bp, Homo sapiens; identical to SEQ ID NO: 29243

SEQ ID NO: 37490 - DNA, 201 bp, Homo sapiens; identical to SEQ ID NO: 29244

SEQ ID NO: 37491 - DNA, 201 bp, Homo sapiens; identical to SEQ ID NO: 29111

SEQ ID NO: 37492 - DNA, 201 bp, Homo sapiens; identical to SEQ ID NO: 29245

SEQ ID NO: 37493 - DNA, 201 bp, Homo sapiens; identical to SEQ ID NO: 30050

SEQ ID NO: 37494 - DNA, 201 bp, Homo sapiens; identical to SEQ ID NO: 29720

SEQ ID NO: 37495 - DNA, 201 bp, Homo sapiens; identical to SEQ ID NO: 29129

SEQ ID NO: 37496 - DNA, 201 bp, Homo sapiens; identical to SEQ ID NO: 29131

SEQ ID NO: 37497 - DNA, 201 bp, Homo sapiens; identical to SEQ ID NO: 29133

SEQ ID NO: 37498 - DNA, 201 bp, Homo sapiens; identical to SEQ ID NO: 30062

SEQ ID NO: 37499 - DNA, 201 bp, Homo sapiens; identical to SEQ ID NO: 30064

SEQ ID NO: 37500 - DNA, 201 bp, Homo sapiens; identical to SEQ ID NO: 29134

SEQ ID NO: 37501 - DNA, 201 bp, Homo sapiens; identical to SEQ ID NO: 30065

SEQ ID NO: 37502 - DNA, 201 bp, Homo sapiens; identical to SEQ ID NO: 30066

SEQ ID NO: 37503 - DNA, 201 bp, Homo sapiens; identical to SEQ ID NO: 30172

SEQ ID NO: 37504 - DNA, 201 bp, Homo sapiens; identical to SEQ ID NO: 30174

SEQ ID NO: 37505 - DNA, 201 bp, Homo sapiens; identical to SEQ ID NO: 30067

SEQ ID NO: 37506 - DNA, 201 bp, Homo sapiens; identical to SEQ ID NO: 30176

SEQ ID NO: 37507 - DNA, 201 bp, Homo sapiens; identical to SEQ ID NO: 30068

SEQ ID NO: 37508 - DNA, 201 bp, Homo sapiens; identical to SEQ ID NO: 29426

SEQ ID NO: 37509 - DNA, 201 bp, Homo sapiens; identical to SEQ ID NO: 30070

SEQ ID NO: 37510 - DNA, 201 bp, Homo sapiens; identical to SEQ ID NO: 29137

SEQ ID NO: 37511 - DNA, 201 bp, Homo sapiens; identical to SEQ ID NO: 5653

SEQ ID NO: 37512 - DNA, 201 bp, Homo sapiens; identical to SEQ ID NO: 30180

SEQ ID NO: 37513 - DNA, 201 bp, Homo sapiens; identical to SEQ ID NO: 30181

SEQ ID NO: 37514 - DNA, 201 bp, Homo sapiens; identical to SEQ ID NO: 29965

SEQ ID NO: 37515 - DNA, 201 bp, Homo sapiens; identical to SEQ ID NO: 29966

SEQ ID NO: 37516 - DNA, 201 bp, Homo sapiens; identical to SEQ ID NO: 30195

SEQ ID NO: 37517 - DNA, 201 bp, Homo sapiens; identical to SEQ ID NO: 29550

SEQ ID NO: 37518 - DNA, 201 bp, Homo sapiens; identical to SEQ ID NO: 30197

SEQ ID NO: 37519 - DNA, 201 bp, Homo sapiens; identical to SEQ ID NO: 29554

SEQ ID NO: 37520 - DNA, 201 bp, Homo sapiens; identical to SEQ ID NO: 5652

SEQ ID NO: 37521 - DNA, 201 bp, Homo sapiens; identical to SEQ ID NO: 29199

SEQ ID NO: 37522 - DNA, 201 bp, Homo sapiens; identical to SEQ ID NO: 29200

SEQ ID NO: 37523 - DNA, 201 bp, Homo sapiens; identical to SEQ ID NO: 30110

SEQ ID NO: 37524 - DNA, 201 bp, Homo sapiens; identical to SEQ ID NO: 29201

SEQ ID NO: 37525 - DNA, 201 bp, Homo sapiens; identical to SEQ ID NO: 29984

SEQ ID NO: 37526 - DNA, 201 bp, Homo sapiens; identical to SEQ ID NO: 29202

SEQ ID NO: 37527 - DNA, 201 bp, Homo sapiens; identical to SEQ ID NO: 29985

SEQ ID NO: 37528 - DNA, 201 bp, Homo sapiens; identical to SEQ ID NO: 29204

SEQ ID NO: 37529 - DNA, 201 bp, Homo sapiens; identical to SEQ ID NO: 29986

SEQ ID NO: 37530 - DNA, 201 bp, Homo sapiens; identical to SEQ ID NO: 29205

SEQ ID NO: 37531 - DNA, 201 bp, Homo sapiens; identical to SEQ ID NO: 29206

SEQ ID NO: 37532 - DNA, 201 bp, Homo sapiens; identical to SEQ ID NO: 29207

SEQ ID NO: 37533 - DNA, 201 bp, Homo sapiens; identical to SEQ ID NO: 29987

SEQ ID NO: 37534 - DNA, 201 bp, Homo sapiens; identical to SEQ ID NO: 29988

SEQ ID NO: 37535 - DNA, 201 bp, Homo sapiens; identical to SEQ ID NO: 30281

SEQ ID NO: 37536 - DNA, 201 bp, Homo sapiens; identical to SEQ ID NO: 29989

SEQ ID NO: 37537 - DNA, 201 bp, Homo sapiens; identical to SEQ ID NO: 29208

SEQ ID NO: 37538 - DNA, 201 bp, Homo sapiens; identical to SEQ ID NO: 29991

SEQ ID NO: 37539 - DNA, 201 bp, Homo sapiens; identical to SEQ ID NO: 29993

SEQ ID NO: 37540 - DNA, 201 bp, Homo sapiens; identical to SEQ ID NO: 5650

SEQ ID NO: 37541 - DNA, 201 bp, Homo sapiens; identical to SEQ ID NO: 29997

SEQ ID NO: 37542 - DNA, 201 bp, Homo sapiens; identical to SEQ ID NO: 29213

SEQ ID NO: 37543 - DNA, 201 bp, Homo sapiens; identical to SEQ ID NO: 29214

SEQ ID NO: 37544 - DNA, 201 bp, Homo sapiens; identical to SEQ ID NO: 29215

SEQ ID NO: 37545 - DNA, 201 bp, Homo sapiens; identical to SEQ ID NO: 29216

SEQ ID NO: 37546 - DNA, 201 bp, Homo sapiens; identical to SEQ ID NO: 29217

SEQ ID NO: 37547 - DNA, 201 bp, Homo sapiens; identical to SEQ ID NO: 30014

SEQ ID NO: 37548 - DNA, 201 bp, Homo sapiens; identical to SEQ ID NO: 29484

SEQ ID NO: 37549 - DNA, 201 bp, Homo sapiens; identical to SEQ ID NO: 30290

SEQ ID NO: 37550 - DNA, 201 bp, Homo sapiens; identical to SEQ ID NO: 29485

SEQ ID NO: 37551 - DNA, 201 bp, Homo sapiens; identical to SEQ ID NO: 29682

SEQ ID NO: 37552 - DNA, 201 bp, Homo sapiens; identical to SEQ ID NO: 29486

SEQ ID NO: 37553 - DNA, 201 bp, Homo sapiens; identical to SEQ ID NO: 29685

SEQ ID NO: 37554 - DNA, 201 bp, Homo sapiens; identical to SEQ ID NO: 29487

SEQ ID NO: 37555 - DNA, 201 bp, Homo sapiens; identical to SEQ ID NO: 29688

SEQ ID NO: 37556 - DNA, 201 bp, Homo sapiens; identical to SEQ ID NO: 29488

SEQ ID NO: 37557 - DNA, 201 bp, Homo sapiens; identical to SEQ ID NO: 29489

SEQ ID NO: 37558 - DNA, 201 bp, Homo sapiens; identical to SEQ ID NO: 29045

SEQ ID NO: 37559 - DNA, 201 bp, Homo sapiens; identical to SEQ ID NO: 29932

SEQ ID NO: 37560 - DNA, 201 bp, Homo sapiens; identical to SEQ ID NO: 29398

SEQ ID NO: 37561 - DNA, 201 bp, Homo sapiens; identical to SEQ ID NO: 29400

SEQ ID NO: 37562 - DNA, 201 bp, Homo sapiens; identical to SEQ ID NO: 29401

SEQ ID NO: 37563 - DNA, 201 bp, Homo sapiens; identical to SEQ ID NO: 5658

SEQ ID NO: 37564 - DNA, 201 bp, Homo sapiens; identical to SEQ ID NO: 29402

SEQ ID NO: 37565 - DNA, 201 bp, Homo sapiens; identical to SEQ ID NO: 29404

SEQ ID NO: 37566 - DNA, 201 bp, Homo sapiens; identical to SEQ ID NO: 29405

SEQ ID NO: 37567 - DNA, 201 bp, Homo sapiens; identical to SEQ ID NO: 29697

SEQ ID NO: 37568 - DNA, 201 bp, Homo sapiens; identical to SEQ ID NO: 29935

SEQ ID NO: 37569 - DNA, 201 bp, Homo sapiens; identical to SEQ ID NO: 29936

SEQ ID NO: 37570 - DNA, 201 bp, Homo sapiens; identical to SEQ ID NO: 29507

SEQ ID NO: 37571 - DNA, 201 bp, Homo sapiens; identical to SEQ ID NO: 29937

SEQ ID NO: 37572 - DNA, 201 bp, Homo sapiens; identical to SEQ ID NO: 29938

SEQ ID NO: 37573 - DNA, 201 bp, Homo sapiens; identical to SEQ ID NO: 29939

SEQ ID NO: 37574 - DNA, 201 bp, Homo sapiens; identical to SEQ ID NO: 29941

SEQ ID NO: 37575 - DNA, 201 bp, Homo sapiens; identical to SEQ ID NO: 29069

SEQ ID NO: 37576 - DNA, 201 bp, Homo sapiens; identical to SEQ ID NO: 29942

SEQ ID NO: 37577 - DNA, 201 bp, Homo sapiens; identical to SEQ ID NO: 29943

SEQ ID NO: 37578 - DNA, 201 bp, Homo sapiens; identical to SEQ ID NO: 29944

SEQ ID NO: 37579 - DNA, 201 bp, Homo sapiens; identical to SEQ ID NO: 29945

SEQ ID NO: 37580 - DNA, 201 bp, Homo sapiens; identical to SEQ ID NO: 29946

SEQ ID NO: 37581 - DNA, 201 bp, Homo sapiens; identical to SEQ ID NO: 29871

SEQ ID NO: 37582 - DNA, 201 bp, Homo sapiens; identical to SEQ ID NO: 29948

SEQ ID NO: 37583 - DNA, 201 bp, Homo sapiens; identical to SEQ ID NO: 29523

SEQ ID NO: 37584 - DNA, 201 bp, Homo sapiens; identical to SEQ ID NO: 30317

SEQ ID NO: 37585 - DNA, 201 bp, Homo sapiens; identical to SEQ ID NO: 5657

SEQ ID NO: 37586 - DNA, 201 bp, Homo sapiens; identical to SEQ ID NO: 29427

SEQ ID NO: 37587 - DNA, 201 bp, Homo sapiens; identical to SEQ ID NO: 30318

SEQ ID NO: 37588 - DNA, 201 bp, Homo sapiens; identical to SEQ ID NO: 29428

SEQ ID NO: 37589 - DNA, 201 bp, Homo sapiens; identical to SEQ ID NO: 30319

SEQ ID NO: 37590 - DNA, 201 bp, Homo sapiens; identical to SEQ ID NO: 29429

SEQ ID NO: 37591 - DNA, 201 bp, Homo sapiens; identical to SEQ ID NO: 29952

SEQ ID NO: 37592 - DNA, 201 bp, Homo sapiens; identical to SEQ ID NO: 29430

SEQ ID NO: 37593 - DNA, 201 bp, Homo sapiens; identical to SEQ ID NO: 30320

SEQ ID NO: 37594 - DNA, 201 bp, Homo sapiens; identical to SEQ ID NO: 29431

SEQ ID NO: 37595 - DNA, 201 bp, Homo sapiens; identical to SEQ ID NO: 29432

SEQ ID NO: 37596 - DNA, 201 bp, Homo sapiens; identical to SEQ ID NO: 29434

SEQ ID NO: 37597 - DNA, 201 bp, Homo sapiens; identical to SEQ ID NO: 29145

SEQ ID NO: 37598 - DNA, 201 bp, Homo sapiens; identical to SEQ ID NO: 29961

SEQ ID NO: 37599 - DNA, 201 bp, Homo sapiens; identical to SEQ ID NO: 29146

SEQ ID NO: 37600 - DNA, 201 bp, Homo sapiens; identical to SEQ ID NO: 29964

SEQ ID NO: 37601 - DNA, 201 bp, Homo sapiens; identical to SEQ ID NO: 29967

SEQ ID NO: 37602 - DNA, 201 bp, Homo sapiens; identical to SEQ ID NO: 29968

SEQ ID NO: 37603 - DNA, 201 bp, Homo sapiens; identical to SEQ ID NO: 29969

SEQ ID NO: 37604 - DNA, 201 bp, Homo sapiens; identical to SEQ ID NO: 5655

SEQ ID NO: 37605 - DNA, 201 bp, Homo sapiens; identical to SEQ ID NO: 5656

SEQ ID NO: 37606 - DNA, 201 bp, Homo sapiens; identical to SEQ ID NO: 29973

SEQ ID NO: 37607 - DNA, 201 bp, Homo sapiens; identical to SEQ ID NO: 29896

SEQ ID NO: 37608 - DNA, 201 bp, Homo sapiens; identical to SEQ ID NO: 29458

SEQ ID NO: 37609 - DNA, 201 bp, Homo sapiens; identical to SEQ ID NO: 5659

SEQ ID NO: 37610 - DNA, 201 bp, Homo sapiens; identical to SEQ ID NO: 5662

SEQ ID NO: 37611 - DNA, 201 bp, Homo sapiens; identical to SEQ ID NO: 29459

SEQ ID NO: 37612 - DNA, 201 bp, Homo sapiens; identical to SEQ ID NO: 29195

SEQ ID NO: 37613 - DNA, 201 bp, Homo sapiens; identical to SEQ ID NO: 5663

SEQ ID NO: 37614 - DNA, 201 bp, Homo sapiens; identical to SEQ ID NO: 29460

SEQ ID NO: 37615 - DNA, 201 bp, Homo sapiens; identical to SEQ ID NO: 29461

SEQ ID NO: 37616 - DNA, 201 bp, Homo sapiens; identical to SEQ ID NO: 29462

SEQ ID NO: 37617 - DNA, 201 bp, Homo sapiens; identical to SEQ ID NO: 29982

SEQ ID NO: 37618 - DNA, 201 bp, Homo sapiens; identical to SEQ ID NO: 29464

SEQ ID NO: 37619 - DNA, 201 bp, Homo sapiens; identical to SEQ ID NO: 29465

SEQ ID NO: 37620 - DNA, 201 bp, Homo sapiens; identical to SEQ ID NO: 29467

SEQ ID NO: 37621 - DNA, 201 bp, Homo sapiens; identical to SEQ ID NO: 29990

SEQ ID NO: 37622 - DNA, 201 bp, Homo sapiens; identical to SEQ ID NO: 5661

SEQ ID NO: 37623 - DNA, 201 bp, Homo sapiens; identical to SEQ ID NO: 29992

SEQ ID NO: 37624 - DNA, 201 bp, Homo sapiens; identical to SEQ ID NO: 29995

SEQ ID NO: 37625 - DNA, 201 bp, Homo sapiens; identical to SEQ ID NO: 29998

SEQ ID NO: 37626 - DNA, 201 bp, Homo sapiens; identical to SEQ ID NO: 29999

SEQ ID NO: 37627 - DNA, 201 bp, Homo sapiens; identical to SEQ ID NO: 29912

SEQ ID NO: 37628 - DNA, 201 bp, Homo sapiens; identical to SEQ ID NO: 29913

SEQ ID NO: 37629 - DNA, 201 bp, Homo sapiens; identical to SEQ ID NO: 29914

SEQ ID NO: 37630 - DNA, 201 bp, Homo sapiens; identical to SEQ ID NO: 5660

SEQ ID NO: 37631 - DNA, 201 bp, Homo sapiens; identical to SEQ ID NO: 29841

SEQ ID NO: 37632 - DNA, 201 bp, Homo sapiens; identical to SEQ ID NO: 29843

SEQ ID NO: 37633 - DNA, 201 bp, Homo sapiens; identical to SEQ ID NO: 29844

SEQ ID NO: 37634 - DNA, 201 bp, Homo sapiens; identical to SEQ ID NO: 29845

SEQ ID NO: 37635 - DNA, 201 bp, Homo sapiens; identical to SEQ ID NO: 29846

SEQ ID NO: 37636 - DNA, 201 bp, Homo sapiens; identical to SEQ ID NO: 29847

SEQ ID NO: 37637 - DNA, 201 bp, Homo sapiens; identical to SEQ ID NO: 29848

SEQ ID NO: 37638 - DNA, 201 bp, Homo sapiens; identical to SEQ ID NO: 29849

SEQ ID NO: 37639 - DNA, 201 bp, Homo sapiens; identical to SEQ ID NO: 29850

SEQ ID NO: 37640 - DNA, 201 bp, Homo sapiens; identical to SEQ ID NO: 29851

SEQ ID NO: 37641 - DNA, 201 bp, Homo sapiens; identical to SEQ ID NO: 5668

SEQ ID NO: 37642 - DNA, 201 bp, Homo sapiens; identical to SEQ ID NO: 29168

SEQ ID NO: 37643 - DNA, 201 bp, Homo sapiens; identical to SEQ ID NO: 29497

SEQ ID NO: 37644 - DNA, 201 bp, Homo sapiens; identical to SEQ ID NO: 29498

SEQ ID NO: 37645 - DNA, 201 bp, Homo sapiens; identical to SEQ ID NO: 29499

SEQ ID NO: 37646 - DNA, 201 bp, Homo sapiens; identical to SEQ ID NO: 29500

SEQ ID NO: 37647 - DNA, 201 bp, Homo sapiens; identical to SEQ ID NO: 29501

SEQ ID NO: 37648 - DNA, 201 bp, Homo sapiens; identical to SEQ ID NO: 29502

SEQ ID NO: 37649 - DNA, 201 bp, Homo sapiens; identical to SEQ ID NO: 29118

SEQ ID NO: 37650 - DNA, 201 bp, Homo sapiens; identical to SEQ ID NO: 29854

SEQ ID NO: 37651 - DNA, 201 bp, Homo sapiens; identical to SEQ ID NO: 29855

SEQ ID NO: 37652 - DNA, 201 bp, Homo sapiens; identical to SEQ ID NO: 29856

SEQ ID NO: 37653 - DNA, 201 bp, Homo sapiens; identical to SEQ ID NO: 29857

SEQ ID NO: 37654 - DNA, 201 bp, Homo sapiens; identical to SEQ ID NO: 29858

SEQ ID NO: 37655 - DNA, 201 bp, Homo sapiens; identical to SEQ ID NO: 29860

SEQ ID NO: 37656 - DNA, 201 bp, Homo sapiens; identical to SEQ ID NO: 29861

SEQ ID NO: 37657 - DNA, 201 bp, Homo sapiens; identical to SEQ ID NO: 29862

SEQ ID NO: 37658 - DNA, 201 bp, Homo sapiens; identical to SEQ ID NO: 29803

SEQ ID NO: 37659 - DNA, 201 bp, Homo sapiens; identical to SEQ ID NO: 29863

SEQ ID NO: 37660 - DNA, 201 bp, Homo sapiens; identical to SEQ ID NO: 29866

SEQ ID NO: 37661 - DNA, 201 bp, Homo sapiens; identical to SEQ ID NO: 29804

SEQ ID NO: 37662 - DNA, 201 bp, Homo sapiens; identical to SEQ ID NO: 29805

SEQ ID NO: 37663 - DNA, 201 bp, Homo sapiens; identical to SEQ ID NO: 29806

SEQ ID NO: 37664 - DNA, 201 bp, Homo sapiens; identical to SEQ ID NO: 29807

SEQ ID NO: 37665 - DNA, 201 bp, Homo sapiens; identical to SEQ ID NO: 29875

SEQ ID NO: 37666 - DNA, 201 bp, Homo sapiens; identical to SEQ ID NO: 29440

SEQ ID NO: 37667 - DNA, 201 bp, Homo sapiens; identical to SEQ ID NO: 29813

SEQ ID NO: 37668 - DNA, 201 bp, Homo sapiens; identical to SEQ ID NO: 29814

SEQ ID NO: 37669 - DNA, 201 bp, Homo sapiens; identical to SEQ ID NO: 29815

SEQ ID NO: 37670 - DNA, 201 bp, Homo sapiens; identical to SEQ ID NO: 29816

SEQ ID NO: 37671 - DNA, 201 bp, Homo sapiens; identical to SEQ ID NO: 29817

SEQ ID NO: 37672 - DNA, 201 bp, Homo sapiens; identical to SEQ ID NO: 29818

SEQ ID NO: 37673 - DNA, 201 bp, Homo sapiens; identical to SEQ ID NO: 5669

SEQ ID NO: 37674 - DNA, 201 bp, Homo sapiens; identical to SEQ ID NO: 5670

SEQ ID NO: 37675 - DNA, 201 bp, Homo sapiens; identical to SEQ ID NO: 5664

SEQ ID NO: 37676 - DNA, 201 bp, Homo sapiens; identical to SEQ ID NO: 5665

SEQ ID NO: 37677 - DNA, 201 bp, Homo sapiens; identical to SEQ ID NO: 30347

SEQ ID NO: 37678 - DNA, 201 bp, Homo sapiens; identical to SEQ ID NO: 29354

SEQ ID NO: 37679 - DNA, 201 bp, Homo sapiens; identical to SEQ ID NO: 30350

SEQ ID NO: 37680 - DNA, 201 bp, Homo sapiens; identical to SEQ ID NO: 29355

SEQ ID NO: 37681 - DNA, 201 bp, Homo sapiens; identical to SEQ ID NO: 30351

SEQ ID NO: 37682 - DNA, 201 bp, Homo sapiens; identical to SEQ ID NO: 5666

SEQ ID NO: 37683 - DNA, 201 bp, Homo sapiens; identical to SEQ ID NO: 29832

SEQ ID NO: 37684 - DNA, 201 bp, Homo sapiens; identical to SEQ ID NO: 29833

SEQ ID NO: 37685 - DNA, 201 bp, Homo sapiens; identical to SEQ ID NO: 29834

SEQ ID NO: 37686 - DNA, 201 bp, Homo sapiens; identical to SEQ ID NO: 29835

SEQ ID NO: 37687 - DNA, 201 bp, Homo sapiens; identical to SEQ ID NO: 29155

SEQ ID NO: 37688 - DNA, 201 bp, Homo sapiens; identical to SEQ ID NO: 29836

SEQ ID NO: 37689 - DNA, 201 bp, Homo sapiens; identical to SEQ ID NO: 29156

SEQ ID NO: 37690 - DNA, 201 bp, Homo sapiens; identical to SEQ ID NO: 29837

SEQ ID NO: 37691 - DNA, 201 bp, Homo sapiens; identical to SEQ ID NO: 29838

SEQ ID NO: 37692 - DNA, 201 bp, Homo sapiens; identical to SEQ ID NO: 29839

SEQ ID NO: 37693 - DNA, 201 bp, Homo sapiens; identical to SEQ ID NO: 29840

SEQ ID NO: 37694 - DNA, 201 bp, Homo sapiens; identical to SEQ ID NO: 30370

SEQ ID NO: 37695 - DNA, 201 bp, Homo sapiens; identical to SEQ ID NO: 30371

SEQ ID NO: 37696 - DNA, 201 bp, Homo sapiens; identical to SEQ ID NO: 29372

SEQ ID NO: 37697 - DNA, 201 bp, Homo sapiens; identical to SEQ ID NO: 30372

SEQ ID NO: 37698 - DNA, 201 bp, Homo sapiens; identical to SEQ ID NO: 29373

SEQ ID NO: 37699 - DNA, 201 bp, Homo sapiens; identical to SEQ ID NO: 30373

SEQ ID NO: 37700 - DNA, 201 bp, Homo sapiens; identical to SEQ ID NO: 29374

SEQ ID NO: 37701 - DNA, 201 bp, Homo sapiens; identical to SEQ ID NO: 29375

SEQ ID NO: 37702 - DNA, 201 bp, Homo sapiens; identical to SEQ ID NO: 30374

SEQ ID NO: 37703 - DNA, 201 bp, Homo sapiens; identical to SEQ ID NO: 29376

SEQ ID NO: 37704 - DNA, 201 bp, Homo sapiens; identical to SEQ ID NO: 30375

SEQ ID NO: 37705 - DNA, 201 bp, Homo sapiens; identical to SEQ ID NO: 30377

SEQ ID NO: 37706 - DNA, 201 bp, Homo sapiens; identical to SEQ ID NO: 30378

SEQ ID NO: 37707 - DNA, 201 bp, Homo sapiens; identical to SEQ ID NO: 29221

SEQ ID NO: 37708 - DNA, 201 bp, Homo sapiens; identical to SEQ ID NO: 29654

SEQ ID NO: 37709 - DNA, 201 bp, Homo sapiens; identical to SEQ ID NO: 29627

SEQ ID NO: 37710 - DNA, 201 bp, Homo sapiens; identical to SEQ ID NO: 29656

SEQ ID NO: 37711 - DNA, 201 bp, Homo sapiens; identical to SEQ ID NO: 29630

SEQ ID NO: 37712 - DNA, 201 bp, Homo sapiens; identical to SEQ ID NO: 29659

SEQ ID NO: 37713 - DNA, 201 bp, Homo sapiens; identical to SEQ ID NO: 29662

SEQ ID NO: 37714 - DNA, 201 bp, Homo sapiens; identical to SEQ ID NO: 29382

SEQ ID NO: 37715 - DNA, 201 bp, Homo sapiens; identical to SEQ ID NO: 29385

SEQ ID NO: 37716 - DNA, 201 bp, Homo sapiens; identical to SEQ ID NO: 29230

SEQ ID NO: 37717 - DNA, 201 bp, Homo sapiens; identical to SEQ ID NO: 29780

SEQ ID NO: 37718 - DNA, 201 bp, Homo sapiens; identical to SEQ ID NO: 29925

SEQ ID NO: 37719 - DNA, 201 bp, Homo sapiens; identical to SEQ ID NO: 29234

SEQ ID NO: 37720 - DNA, 201 bp, Homo sapiens; identical to SEQ ID NO: 29295

SEQ ID NO: 37721 - DNA, 201 bp, Homo sapiens; identical to SEQ ID NO: 29296

SEQ ID NO: 37722 - DNA, 201 bp, Homo sapiens; identical to SEQ ID NO: 29263

SEQ ID NO: 37723 - DNA, 201 bp, Homo sapiens; identical to SEQ ID NO: 30368

SEQ ID NO: 37724 - DNA, 201 bp, Homo sapiens; identical to SEQ ID NO: 29265

SEQ ID NO: 37725 - DNA, 201 bp, Homo sapiens; identical to SEQ ID NO: 29609

SEQ ID NO: 37726 - DNA, 201 bp, Homo sapiens; identical to SEQ ID NO: 29809

SEQ ID NO: 37727 - DNA, 201 bp, Homo sapiens; identical to SEQ ID NO: 29610

SEQ ID NO: 37728 - DNA, 201 bp, Homo sapiens; identical to SEQ ID NO: 29549

SEQ ID NO: 37729 - DNA, 201 bp, Homo sapiens; identical to SEQ ID NO: 29645

SEQ ID NO: 37730 - DNA, 201 bp, Homo sapiens; identical to SEQ ID NO: 29612

SEQ ID NO: 37731 - DNA, 201 bp, Homo sapiens; identical to SEQ ID NO: 29696

SEQ ID NO: 37732 - DNA, 201 bp, Homo sapiens; identical to SEQ ID NO: 29614

SEQ ID NO: 37733 - DNA, 201 bp, Homo sapiens; identical to SEQ ID NO: 29646

SEQ ID NO: 37734 - DNA, 201 bp, Homo sapiens; identical to SEQ ID NO: 29616

SEQ ID NO: 37735 - DNA, 201 bp, Homo sapiens; identical to SEQ ID NO: 29874

SEQ ID NO: 37736 - DNA, 201 bp, Homo sapiens; identical to SEQ ID NO: 29647

SEQ ID NO: 37737 - DNA, 201 bp, Homo sapiens; identical to SEQ ID NO: 29618

SEQ ID NO: 37738 - DNA, 201 bp, Homo sapiens; identical to SEQ ID NO: 29271

SEQ ID NO: 37739 - DNA, 201 bp, Homo sapiens; identical to SEQ ID NO: 29648

SEQ ID NO: 37740 - DNA, 201 bp, Homo sapiens; identical to SEQ ID NO: 29621

SEQ ID NO: 37741 - DNA, 201 bp, Homo sapiens; identical to SEQ ID NO: 29649

SEQ ID NO: 37742 - DNA, 201 bp, Homo sapiens; identical to SEQ ID NO: 30153

SEQ ID NO: 37743 - DNA, 201 bp, Homo sapiens; identical to SEQ ID NO: 29194

SEQ ID NO: 37744 - DNA, 201 bp, Homo sapiens; identical to SEQ ID NO: 29624

SEQ ID NO: 37745 - DNA, 201 bp, Homo sapiens; identical to SEQ ID NO: 30155

SEQ ID NO: 37746 - DNA, 201 bp, Homo sapiens; identical to SEQ ID NO: 29651

SEQ ID NO: 37747 - DNA, 201 bp, Homo sapiens; identical to SEQ ID NO: 29225

SEQ ID NO: 37748 - DNA, 201 bp, Homo sapiens; identical to SEQ ID NO: 29578

SEQ ID NO: 37749 - DNA, 201 bp, Homo sapiens; identical to SEQ ID NO: 29579

SEQ ID NO: 37750 - DNA, 201 bp, Homo sapiens; identical to SEQ ID NO: 30229

SEQ ID NO: 37751 - DNA, 201 bp, Homo sapiens; identical to SEQ ID NO: 30291

SEQ ID NO: 37752 - DNA, 201 bp, Homo sapiens; identical to SEQ ID NO: 30234

SEQ ID NO: 37753 - DNA, 201 bp, Homo sapiens; identical to SEQ ID NO: 30292

SEQ ID NO: 37754 - DNA, 201 bp, Homo sapiens; identical to SEQ ID NO: 30293

SEQ ID NO: 37755 - DNA, 201 bp, Homo sapiens; identical to SEQ ID NO: 29492

SEQ ID NO: 37756 - DNA, 201 bp, Homo sapiens; identical to SEQ ID NO: 29695

SEQ ID NO: 37757 - DNA, 201 bp, Homo sapiens; identical to SEQ ID NO: 29493

SEQ ID NO: 37758 - DNA, 201 bp, Homo sapiens; identical to SEQ ID NO: 29495

SEQ ID NO: 37759 - DNA, 201 bp, Homo sapiens; identical to SEQ ID NO: 29112

SEQ ID NO: 37760 - DNA, 201 bp, Homo sapiens; identical to SEQ ID NO: 29114

SEQ ID NO: 37761 - DNA, 201 bp, Homo sapiens; identical to SEQ ID NO: 29116

SEQ ID NO: 37762 - DNA, 201 bp, Homo sapiens; identical to SEQ ID NO: 29246

SEQ ID NO: 37763 - DNA, 201 bp, Homo sapiens; identical to SEQ ID NO: 29117

SEQ ID NO: 37764 - DNA, 201 bp, Homo sapiens; identical to SEQ ID NO: 29247

SEQ ID NO: 37765 - DNA, 201 bp, Homo sapiens; identical to SEQ ID NO: 29119

SEQ ID NO: 37766 - DNA, 201 bp, Homo sapiens; identical to SEQ ID NO: 29120

SEQ ID NO: 37767 - DNA, 201 bp, Homo sapiens; identical to SEQ ID NO: 29121

SEQ ID NO: 37768 - DNA, 201 bp, Homo sapiens; identical to SEQ ID NO: 29795

SEQ ID NO: 37769 - DNA, 201 bp, Homo sapiens; identical to SEQ ID NO: 29122

SEQ ID NO: 37770 - DNA, 201 bp, Homo sapiens; identical to SEQ ID NO: 30248

SEQ ID NO: 37771 - DNA, 201 bp, Homo sapiens; identical to SEQ ID NO: 29705

SEQ ID NO: 37772 - DNA, 201 bp, Homo sapiens; identical to SEQ ID NO: 29123

SEQ ID NO: 37773 - DNA, 201 bp, Homo sapiens; identical to SEQ ID NO: 5673

SEQ ID NO: 37774 - DNA, 201 bp, Homo sapiens; identical to SEQ ID NO: 29413

SEQ ID NO: 37775 - DNA, 201 bp, Homo sapiens; identical to SEQ ID NO: 29061

SEQ ID NO: 37776 - DNA, 201 bp, Homo sapiens; identical to SEQ ID NO: 29717

SEQ ID NO: 37777 - DNA, 201 bp, Homo sapiens; identical to SEQ ID NO: 30299

SEQ ID NO: 37778 - DNA, 201 bp, Homo sapiens; identical to SEQ ID NO: 29064

SEQ ID NO: 37779 - DNA, 201 bp, Homo sapiens; identical to SEQ ID NO: 30255

SEQ ID NO: 37780 - DNA, 201 bp, Homo sapiens; identical to SEQ ID NO: 30164

SEQ ID NO: 37781 - DNA, 201 bp, Homo sapiens; identical to SEQ ID NO: 29173

SEQ ID NO: 37782 - DNA, 201 bp, Homo sapiens; identical to SEQ ID NO: 29135

SEQ ID NO: 37783 - DNA, 201 bp, Homo sapiens; identical to SEQ ID NO: 29136

SEQ ID NO: 37784 - DNA, 201 bp, Homo sapiens; identical to SEQ ID NO: 29527

SEQ ID NO: 37785 - DNA, 201 bp, Homo sapiens; identical to SEQ ID NO: 29723

SEQ ID NO: 37786 - DNA, 201 bp, Homo sapiens; identical to SEQ ID NO: 29138

SEQ ID NO: 37787 - DNA, 201 bp, Homo sapiens; identical to SEQ ID NO: 29139

SEQ ID NO: 37788 - DNA, 201 bp, Homo sapiens; identical to SEQ ID NO: 29725

SEQ ID NO: 37789 - DNA, 201 bp, Homo sapiens; identical to SEQ ID NO: 29726

SEQ ID NO: 37790 - DNA, 201 bp, Homo sapiens; identical to SEQ ID NO: 29533

SEQ ID NO: 37791 - DNA, 201 bp, Homo sapiens; identical to SEQ ID NO: 29141

SEQ ID NO: 37792 - DNA, 201 bp, Homo sapiens; identical to SEQ ID NO: 29729

SEQ ID NO: 37793 - DNA, 201 bp, Homo sapiens; identical to SEQ ID NO: 29638

SEQ ID NO: 37794 - DNA, 201 bp, Homo sapiens; identical to SEQ ID NO: 30269

SEQ ID NO: 37795 - DNA, 201 bp, Homo sapiens; identical to SEQ ID NO: 29443

SEQ ID NO: 37796 - DNA, 201 bp, Homo sapiens; identical to SEQ ID NO: 30271

SEQ ID NO: 37797 - DNA, 201 bp, Homo sapiens; identical to SEQ ID NO: 29444

SEQ ID NO: 37798 - DNA, 201 bp, Homo sapiens; identical to SEQ ID NO: 29147

SEQ ID NO: 37799 - DNA, 201 bp, Homo sapiens; identical to SEQ ID NO: 29642

SEQ ID NO: 37800 - DNA, 201 bp, Homo sapiens; identical to SEQ ID NO: 30338

SEQ ID NO: 37801 - DNA, 201 bp, Homo sapiens; identical to SEQ ID NO: 29643

SEQ ID NO: 37802 - DNA, 201 bp, Homo sapiens; identical to SEQ ID NO: 29191

SEQ ID NO: 37803 - DNA, 201 bp, Homo sapiens; identical to SEQ ID NO: 29742

SEQ ID NO: 37804 - DNA, 201 bp, Homo sapiens; identical to SEQ ID NO: 30200

SEQ ID NO: 37805 - DNA, 201 bp, Homo sapiens; identical to SEQ ID NO: 29650

SEQ ID NO: 37806 - DNA, 201 bp, Homo sapiens; identical to SEQ ID NO: 29283

SEQ ID NO: 37807 - DNA, 201 bp, Homo sapiens; identical to SEQ ID NO: 29652

SEQ ID NO: 37808 - DNA, 201 bp, Homo sapiens; identical to SEQ ID NO: 30107

SEQ ID NO: 37809 - DNA, 201 bp, Homo sapiens; identical to SEQ ID NO: 29284

SEQ ID NO: 37810 - DNA, 201 bp, Homo sapiens; identical to SEQ ID NO: 29747

SEQ ID NO: 37811 - DNA, 201 bp, Homo sapiens; identical to SEQ ID NO: 29285

SEQ ID NO: 37812 - DNA, 201 bp, Homo sapiens; identical to SEQ ID NO: 29657

SEQ ID NO: 37813 - DNA, 201 bp, Homo sapiens; identical to SEQ ID NO: 29466

SEQ ID NO: 37814 - DNA, 201 bp, Homo sapiens; identical to SEQ ID NO: 30205

SEQ ID NO: 37815 - DNA, 201 bp, Homo sapiens; identical to SEQ ID NO: 29471

SEQ ID NO: 37816 - DNA, 201 bp, Homo sapiens; identical to SEQ ID NO: 29469

SEQ ID NO: 37817 - DNA, 201 bp, Homo sapiens; identical to SEQ ID NO: 30278

SEQ ID NO: 37818 - DNA, 201 bp, Homo sapiens; identical to SEQ ID NO: 29473

SEQ ID NO: 37819 - DNA, 201 bp, Homo sapiens; identical to SEQ ID NO: 29472

SEQ ID NO: 37820 - DNA, 201 bp, Homo sapiens; identical to SEQ ID NO: 29084

SEQ ID NO: 37821 - DNA, 201 bp, Homo sapiens; identical to SEQ ID NO: 29086

SEQ ID NO: 37822 - DNA, 201 bp, Homo sapiens; identical to SEQ ID NO: 29088

SEQ ID NO: 37823 - DNA, 201 bp, Homo sapiens; identical to SEQ ID NO: 30364

SEQ ID NO: 37824 - DNA, 201 bp, Homo sapiens; identical to SEQ ID NO: 29670

SEQ ID NO: 37825 - DNA, 201 bp, Homo sapiens; identical to SEQ ID NO: 30366

SEQ ID NO: 37826 - DNA, 201 bp, Homo sapiens; identical to SEQ ID NO: 30285

SEQ ID NO: 37827 - DNA, 201 bp, Homo sapiens; identical to SEQ ID NO: 5672

SEQ ID NO: 37828 - DNA, 201 bp, Homo sapiens; identical to SEQ ID NO: 30209

SEQ ID NO: 37829 - DNA, 201 bp, Homo sapiens; identical to SEQ ID NO: 30210

SEQ ID NO: 37830 - DNA, 201 bp, Homo sapiens; identical to SEQ ID NO: 30211

SEQ ID NO: 37831 - DNA, 201 bp, Homo sapiens; identical to SEQ ID NO: 29480

SEQ ID NO: 37832 - DNA, 201 bp, Homo sapiens; identical to SEQ ID NO: 29273

SEQ ID NO: 37833 - DNA, 201 bp, Homo sapiens; identical to SEQ ID NO: 29430

SEQ ID NO: 37834 - DNA, 201 bp, Homo sapiens; identical to SEQ ID NO: 29431

SEQ ID NO: 37835 - DNA, 201 bp, Homo sapiens; identical to SEQ ID NO: 30224

SEQ ID NO: 37836 - DNA, 201 bp, Homo sapiens; identical to SEQ ID NO: 29432

SEQ ID NO: 37837 - DNA, 201 bp, Homo sapiens; identical to SEQ ID NO: 29434

SEQ ID NO: 37838 - DNA, 201 bp, Homo sapiens; identical to SEQ ID NO: 29921

SEQ ID NO: 37839 - DNA, 201 bp, Homo sapiens; identical to SEQ ID NO: 29922

SEQ ID NO: 37840 - DNA, 201 bp, Homo sapiens; identical to SEQ ID NO: 29923

SEQ ID NO: 37841 - DNA, 201 bp, Homo sapiens; identical to SEQ ID NO: 29924

SEQ ID NO: 37842 - DNA, 201 bp, Homo sapiens; identical to SEQ ID NO: 29926

SEQ ID NO: 37843 - DNA, 201 bp, Homo sapiens; identical to SEQ ID NO: 29785

SEQ ID NO: 37844 - DNA, 201 bp, Homo sapiens; identical to SEQ ID NO: 29927

SEQ ID NO: 37845 - DNA, 201 bp, Homo sapiens; identical to SEQ ID NO: 5676

SEQ ID NO: 37846 - DNA, 201 bp, Homo sapiens; identical to SEQ ID NO: 29928

SEQ ID NO: 37847 - DNA, 201 bp, Homo sapiens; identical to SEQ ID NO: 29789

SEQ ID NO: 37848 - DNA, 201 bp, Homo sapiens; identical to SEQ ID NO: 29929

SEQ ID NO: 37849 - DNA, 201 bp, Homo sapiens; identical to SEQ ID NO: 29790

SEQ ID NO: 37850 - DNA, 201 bp, Homo sapiens; identical to SEQ ID NO: 29930

SEQ ID NO: 37851 - DNA, 201 bp, Homo sapiens; identical to SEQ ID NO: 29791

SEQ ID NO: 37852 - DNA, 201 bp, Homo sapiens; identical to SEQ ID NO: 29932

SEQ ID NO: 37853 - DNA, 201 bp, Homo sapiens; identical to SEQ ID NO: 29792

SEQ ID NO: 37854 - DNA, 201 bp, Homo sapiens; identical to SEQ ID NO: 29396

SEQ ID NO: 37855 - DNA, 201 bp, Homo sapiens; identical to SEQ ID NO: 29398

SEQ ID NO: 37856 - DNA, 201 bp, Homo sapiens; identical to SEQ ID NO: 29400

SEQ ID NO: 37857 - DNA, 201 bp, Homo sapiens; identical to SEQ ID NO: 29401

SEQ ID NO: 37858 - DNA, 201 bp, Homo sapiens; identical to SEQ ID NO: 29896

SEQ ID NO: 37859 - DNA, 201 bp, Homo sapiens; identical to SEQ ID NO: 29458

SEQ ID NO: 37860 - DNA, 201 bp, Homo sapiens; identical to SEQ ID NO: 29251

SEQ ID NO: 37861 - DNA, 201 bp, Homo sapiens; identical to SEQ ID NO: 29252

SEQ ID NO: 37862 - DNA, 201 bp, Homo sapiens; identical to SEQ ID NO: 29506

SEQ ID NO: 37863 - DNA, 201 bp, Homo sapiens; identical to SEQ ID NO: 5674

SEQ ID NO: 37864 - DNA, 201 bp, Homo sapiens; identical to SEQ ID NO: 29254

SEQ ID NO: 37865 - DNA, 201 bp, Homo sapiens; identical to SEQ ID NO: 29256

SEQ ID NO: 37866 - DNA, 201 bp, Homo sapiens; identical to SEQ ID NO: 29257

SEQ ID NO: 37867 - DNA, 201 bp, Homo sapiens; identical to SEQ ID NO: 29510

SEQ ID NO: 37868 - DNA, 201 bp, Homo sapiens; identical to SEQ ID NO: 29898

SEQ ID NO: 37869 - DNA, 201 bp, Homo sapiens; identical to SEQ ID NO: 29899

SEQ ID NO: 37870 - DNA, 201 bp, Homo sapiens; identical to SEQ ID NO: 29901

SEQ ID NO: 37871 - DNA, 201 bp, Homo sapiens; identical to SEQ ID NO: 29902

SEQ ID NO: 37872 - DNA, 201 bp, Homo sapiens; identical to SEQ ID NO: 29937

SEQ ID NO: 37873 - DNA, 201 bp, Homo sapiens; identical to SEQ ID NO: 29903

SEQ ID NO: 37874 - DNA, 201 bp, Homo sapiens; identical to SEQ ID NO: 29938

SEQ ID NO: 37875 - DNA, 201 bp, Homo sapiens; identical to SEQ ID NO: 29905

SEQ ID NO: 37876 - DNA, 201 bp, Homo sapiens; identical to SEQ ID NO: 29939

SEQ ID NO: 37877 - DNA, 201 bp, Homo sapiens; identical to SEQ ID NO: 29941

SEQ ID NO: 37878 - DNA, 201 bp, Homo sapiens; identical to SEQ ID NO: 29906

SEQ ID NO: 37879 - DNA, 201 bp, Homo sapiens; identical to SEQ ID NO: 29942

SEQ ID NO: 37880 - DNA, 201 bp, Homo sapiens; identical to SEQ ID NO: 29069

SEQ ID NO: 37881 - DNA, 201 bp, Homo sapiens; identical to SEQ ID NO: 29770

SEQ ID NO: 37882 - DNA, 201 bp, Homo sapiens; identical to SEQ ID NO: 29943

SEQ ID NO: 37883 - DNA, 201 bp, Homo sapiens; identical to SEQ ID NO: 5675

SEQ ID NO: 37884 - DNA, 201 bp, Homo sapiens; identical to SEQ ID NO: 29772

SEQ ID NO: 37885 - DNA, 201 bp, Homo sapiens; identical to SEQ ID NO: 29944

SEQ ID NO: 37886 - DNA, 201 bp, Homo sapiens; identical to SEQ ID NO: 29945

SEQ ID NO: 37887 - DNA, 201 bp, Homo sapiens; identical to SEQ ID NO: 29870
  misc_feature (101)..(101): n is a, c, g, or t

SEQ ID NO: 37888 - DNA, 201 bp, Homo sapiens; identical to SEQ ID NO: 30005

SEQ ID NO: 37889 - DNA, 201 bp, Homo sapiens; identical to SEQ ID NO: 29159

SEQ ID NO: 37890 - DNA, 201 bp, Homo sapiens; identical to SEQ ID NO: 29521

SEQ ID NO: 37891 - DNA, 201 bp, Homo sapiens; identical to SEQ ID NO: 29161

SEQ ID NO: 37892 - DNA, 201 bp, Homo sapiens; identical to SEQ ID NO: 29427

SEQ ID NO: 37893 - DNA, 201 bp, Homo sapiens; identical to SEQ ID NO: 29428

SEQ ID NO: 37894 - DNA, 201 bp, Homo sapiens; identical to SEQ ID NO: 29429

SEQ ID NO: 37895 - DNA, 201 bp, Homo sapiens; identical to SEQ ID NO: 29272

SEQ ID NO: 37896 - DNA, 201 bp, Homo sapiens; identical to SEQ ID NO: 30013

SEQ ID NO: 37897 - DNA, 201 bp, Homo sapiens; identical to SEQ ID NO: 29626

SEQ ID NO: 37898 - DNA, 201 bp, Homo sapiens; identical to SEQ ID NO: 30322

SEQ ID NO: 37899 - DNA, 201 bp, Homo sapiens; identical to SEQ ID NO: 30086

SEQ ID NO: 37900 - DNA, 201 bp, Homo sapiens; identical to SEQ ID NO: 30091

SEQ ID NO: 37901 - DNA, 201 bp, Homo sapiens; identical to SEQ ID NO: 29386

SEQ ID NO: 37902 - DNA, 201 bp, Homo sapiens; identical to SEQ ID NO: 29449

SEQ ID NO: 37903 - DNA, 201 bp, Homo sapiens; identical to SEQ ID NO: 29387

SEQ ID NO: 37904 - DNA, 201 bp, Homo sapiens; identical to SEQ ID NO: 29388

SEQ ID NO: 37905 - DNA, 201 bp, Homo sapiens; identical to SEQ ID NO: 5679

SEQ ID NO: 37906 - DNA, 201 bp, Homo sapiens; identical to SEQ ID NO: 30336

SEQ ID NO: 37907 - DNA, 201 bp, Homo sapiens; identical to SEQ ID NO: 29391

SEQ ID NO: 37908 - DNA, 201 bp, Homo sapiens; identical to SEQ ID NO: 29392

SEQ ID NO: 37909 - DNA, 201 bp, Homo sapiens; identical to SEQ ID NO: 30340

SEQ ID NO: 37910 - DNA, 201 bp, Homo sapiens; identical to SEQ ID NO: 29393

SEQ ID NO: 37911 - DNA, 201 bp, Homo sapiens; identical to SEQ ID NO: 29395

SEQ ID NO: 37912 - DNA, 201 bp, Homo sapiens; identical to SEQ ID NO: 29397

SEQ ID NO: 37913 - DNA, 201 bp, Homo sapiens; identical to SEQ ID NO: 30346

SEQ ID NO: 37914 - DNA, 201 bp, Homo sapiens; identical to SEQ ID NO: 29399

SEQ ID NO: 37915 - DNA, 201 bp, Homo sapiens; identical to SEQ ID NO: 30041

SEQ ID NO: 37916 - DNA, 201 bp, Homo sapiens; identical to SEQ ID NO: 30043

SEQ ID NO: 37917 - DNA, 201 bp, Homo sapiens; identical to SEQ ID NO: 30044

SEQ ID NO: 37918 - DNA, 201 bp, Homo sapiens; identical to SEQ ID NO: 29589

SEQ ID NO: 37919 - DNA, 201 bp, Homo sapiens; identical to SEQ ID NO: 30045

SEQ ID NO: 37920 - DNA, 201 bp, Homo sapiens; identical to SEQ ID NO: 29591

SEQ ID NO: 37921 - DNA, 201 bp, Homo sapiens; identical to SEQ ID NO: 29592

SEQ ID NO: 37922 - DNA, 201 bp, Homo sapiens; identical to SEQ ID NO: 29594

SEQ ID NO: 37923 - DNA, 201 bp, Homo sapiens; identical to SEQ ID NO: 5678

SEQ ID NO: 37924 - DNA, 201 bp, Homo sapiens; identical to SEQ ID NO: 29596

SEQ ID NO: 37925 - DNA, 201 bp, Homo sapiens; identical to SEQ ID NO: 30250

SEQ ID NO: 37926 - DNA, 201 bp, Homo sapiens; identical to SEQ ID NO: 29564

SEQ ID NO: 37927 - DNA, 201 bp, Homo sapiens; identical to SEQ ID NO: 29597

SEQ ID NO: 37928 - DNA, 201 bp, Homo sapiens; identical to SEQ ID NO: 29598

SEQ ID NO: 37929 - DNA, 201 bp, Homo sapiens; identical to SEQ ID NO: 30113

SEQ ID NO: 37930 - DNA, 201 bp, Homo sapiens; identical to SEQ ID NO: 29600

SEQ ID NO: 37931 - DNA, 201 bp, Homo sapiens; identical to SEQ ID NO: 29422

SEQ ID NO: 37932 - DNA, 201 bp, Homo sapiens; identical to SEQ ID NO: 29367

SEQ ID NO: 37933 - DNA, 201 bp, Homo sapiens; identical to SEQ ID NO: 29423

SEQ ID NO: 37934 - DNA, 201 bp, Homo sapiens; identical to SEQ ID NO: 29368

SEQ ID NO: 37935 - DNA, 201 bp, Homo sapiens; identical to SEQ ID NO: 29424

SEQ ID NO: 37936 - DNA, 201 bp, Homo sapiens; identical to SEQ ID NO: 29369

SEQ ID NO: 37937 - DNA, 201 bp, Homo sapiens; identical to SEQ ID NO: 29425

SEQ ID NO: 37938 - DNA, 201 bp, Homo sapiens; identical to SEQ ID NO: 29370

SEQ ID NO: 37939 - DNA, 201 bp, Homo sapiens; identical to SEQ ID NO: 29371

SEQ ID NO: 37940 - DNA, 201 bp, Homo sapiens; identical to SEQ ID NO: 5680

SEQ ID NO: 37941 - DNA, 201 bp, Homo sapiens; identical to SEQ ID NO: 30075

SEQ ID NO: 37942 - DNA, 201 bp, Homo sapiens; identical to SEQ ID NO: 29620

SEQ ID NO: 37943 - DNA, 201 bp, Homo sapiens; identical to SEQ ID NO: 29623

SEQ ID NO: 37944 - DNA, 201 bp, Homo sapiens; identical to SEQ ID NO: 30221

SEQ ID NO: 37945 - DNA, 201 bp, Homo sapiens; identical to SEQ ID NO: 30222

SEQ ID NO: 37946 - DNA, 201 bp, Homo sapiens; identical to SEQ ID NO: 29693

SEQ ID NO: 37947 - DNA, 201 bp, Homo sapiens; identical to SEQ ID NO: 30025

SEQ ID NO: 37948 - DNA, 201 bp, Homo sapiens; identical to SEQ ID NO: 29248

SEQ ID NO: 37949 - DNA, 201 bp, Homo sapiens; identical to SEQ ID NO: 29249

SEQ ID NO: 37950 - DNA, 201 bp, Homo sapiens; identical to SEQ ID NO: 29313

SEQ ID NO: 37951 - DNA, 201 bp, Homo sapiens; identical to SEQ ID NO: 29314

SEQ ID NO: 37952 - DNA, 201 bp, Homo sapiens; identical to SEQ ID NO: 5682

SEQ ID NO: 37953 - DNA, 201 bp, Homo sapiens; identical to SEQ ID NO: 5683

SEQ ID NO: 37954 - DNA, 201 bp, Homo sapiens; identical to SEQ ID NO: 5684

SEQ ID NO: 37955 - DNA, 201 bp, Homo sapiens; identical to SEQ ID NO: 5685

SEQ ID NO: 37956 - DNA, 201 bp, Homo sapiens; identical to SEQ ID NO: 29421

SEQ ID NO: 37957 - DNA, 201 bp, Homo sapiens; identical to SEQ ID NO: 29319

SEQ ID NO: 37958 - DNA, 201 bp, Homo sapiens; identical to SEQ ID NO: 29321

SEQ ID NO: 37959 - DNA, 201 bp, Homo sapiens; identical to SEQ ID NO: 29323

SEQ ID NO: 37960 - DNA, 201 bp, Homo sapiens; identical to SEQ ID NO: 29325

SEQ ID NO: 37961 - DNA, 201 bp, Homo sapiens; identical to SEQ ID NO: 29264

SEQ ID NO: 37962 - DNA, 201 bp, Homo sapiens; identical to SEQ ID NO: 30311

SEQ ID NO: 37963 - DNA, 201 bp, Homo sapiens; identical to SEQ ID NO: 29631

SEQ ID NO: 37964 - DNA, 201 bp, Homo sapiens; identical to SEQ ID NO: 29633

SEQ ID NO: 37965 - DNA, 201 bp, Homo sapiens; identical to SEQ ID NO: 29635

SEQ ID NO: 37966 - DNA, 201 bp, Homo sapiens; identical to SEQ ID NO: 29144

SEQ ID NO: 37967 - DNA, 201 bp, Homo sapiens; identical to SEQ ID NO: 29636

SEQ ID NO: 37968 - DNA, 201 bp, Homo sapiens; identical to SEQ ID NO: 29336

SEQ ID NO: 37969 - DNA, 201 bp, Homo sapiens; identical to SEQ ID NO: 30333

SEQ ID NO: 37970 - DNA, 201 bp, Homo sapiens; identical to SEQ ID NO: 29338

SEQ ID NO: 37971 - DNA, 201 bp, Homo sapiens; identical to SEQ ID NO: 29339

SEQ ID NO: 37972 - DNA, 201 bp, Homo sapiens; identical to SEQ ID NO: 29341

SEQ ID NO: 37973 - DNA, 201 bp, Homo sapiens; identical to SEQ ID NO: 29342

SEQ ID NO: 37974 - DNA, 201 bp, Homo sapiens; identical to SEQ ID NO: 29343

SEQ ID NO: 37975 - DNA, 201 bp, Homo sapiens; identical to SEQ ID NO: 29344

SEQ ID NO: 37976 - DNA, 201 bp, Homo sapiens; identical to SEQ ID NO: 29346

SEQ ID NO: 37977 - DNA, 201 bp, Homo sapiens; identical to SEQ ID NO: 29974

SEQ ID NO: 37978 - DNA, 201 bp, Homo sapiens; identical to SEQ ID NO: 30343

SEQ ID NO: 37979 - DNA, 201 bp, Homo sapiens; identical to SEQ ID NO: 30190

SEQ ID NO: 37980 - DNA, 201 bp, Homo sapiens; identical to SEQ ID NO: 29976

SEQ ID NO: 37981 - DNA, 201 bp, Homo sapiens; identical to SEQ ID NO: 29186

SEQ ID NO: 37982 - DNA, 201 bp, Homo sapiens; identical to SEQ ID NO: 30192

SEQ ID NO: 37983 - DNA, 201 bp, Homo sapiens; identical to SEQ ID NO: 29977

SEQ ID NO: 37984 - DNA, 201 bp, Homo sapiens; identical to SEQ ID NO: 30193

SEQ ID NO: 37985 - DNA, 201 bp, Homo sapiens; identical to SEQ ID NO: 29978

SEQ ID NO: 37986 - DNA, 201 bp, Homo sapiens; identical to SEQ ID NO: 30194

SEQ ID NO: 37987 - DNA, 201 bp, Homo sapiens; identical to SEQ ID NO: 29979

SEQ ID NO: 37988 - DNA, 201 bp, Homo sapiens; identical to SEQ ID NO: 30196

SEQ ID NO: 37989 - DNA, 201 bp, Homo sapiens; identical to SEQ ID NO: 29980

SEQ ID NO: 37990 - DNA, 201 bp, Homo sapiens; identical to SEQ ID NO: 30198

SEQ ID NO: 37991 - DNA, 201 bp, Homo sapiens; identical to SEQ ID NO: 30106

SEQ ID NO: 37992 - DNA, 201 bp, Homo sapiens; identical to SEQ ID NO: 29281

SEQ ID NO: 37993 - DNA, 201 bp, Homo sapiens; identical to SEQ ID NO: 30199

SEQ ID NO: 37994 - DNA, 201 bp, Homo sapiens; identical to SEQ ID NO: 30201

SEQ ID NO: 37995 - DNA, 201 bp, Homo sapiens; identical to SEQ ID NO: 29653

SEQ ID NO: 37996 - DNA, 201 bp, Homo sapiens; identical to SEQ ID NO: 29655

SEQ ID NO: 37997 - DNA, 201 bp, Homo sapiens; identical to SEQ ID NO: 29658

SEQ ID NO: 37998 - DNA, 201 bp, Homo sapiens; identical to SEQ ID NO: 29562

SEQ ID NO: 37999 - DNA, 201 bp, Homo sapiens; identical to SEQ ID NO: 29661

SEQ ID NO: 38000 - DNA, 201 bp, Homo sapiens; identical to SEQ ID NO: 29665

SEQ ID NO: 38001 - DNA, 201 bp, Homo sapiens; identical to SEQ ID NO: 5687

SEQ ID NO: 38002 - DNA, 201 bp, Homo sapiens; identical to SEQ ID NO: 29669

SEQ ID NO: 38003 - DNA, 201 bp, Homo sapiens; identical to SEQ ID NO: 29363

SEQ ID NO: 38004 - DNA, 201 bp, Homo sapiens; identical to SEQ ID NO: 29365

SEQ ID NO: 38005 - DNA, 201 bp, Homo sapiens; identical to SEQ ID NO: 5686

SEQ ID NO: 38006 - DNA, 201 bp, Homo sapiens; identical to SEQ ID NO: 30007

SEQ ID NO: 38007 - DNA, 201 bp, Homo sapiens; identical to SEQ ID NO: 30212

SEQ ID NO: 38008 - DNA, 201 bp, Homo sapiens; identical to SEQ ID NO: 30213

SEQ ID NO: 38009 - DNA, 201 bp, Homo sapiens; identical to SEQ ID NO: 30214

SEQ ID NO: 38010 - DNA, 201 bp, Homo sapiens; identical to SEQ ID NO: 30216

SEQ ID NO: 38011 - DNA, 201 bp, Homo sapiens; identical to SEQ ID NO: 30217

SEQ ID NO: 38012 - DNA, 201 bp, Homo sapiens; identical to SEQ ID NO: 30008

SEQ ID NO: 38013 - DNA, 201 bp, Homo sapiens; identical to SEQ ID NO: 30218

SEQ ID NO: 38014 - DNA, 201 bp, Homo sapiens; identical to SEQ ID NO: 30010

SEQ ID NO: 38015 - DNA, 201 bp, Homo sapiens; identical to SEQ ID NO: 30219

SEQ ID NO: 38016 - DNA, 201 bp, Homo sapiens; identical to SEQ ID NO: 30220

SEQ ID NO: 38017 - DNA, 201 bp, Homo sapiens; identical to SEQ ID NO: 30225

SEQ ID NO: 38018 - DNA, 201 bp, Homo sapiens; identical to SEQ ID NO: 30227

SEQ ID NO: 38019 - DNA, 201 bp, Homo sapiens; identical to SEQ ID NO: 29226

SEQ ID NO: 38020 - DNA, 201 bp, Homo sapiens; identical to SEQ ID NO: 30230

SEQ ID NO: 38021 - DNA, 201 bp, Homo sapiens; identical to SEQ ID NO: 29227

SEQ ID NO: 38022 - DNA, 201 bp, Homo sapiens; identical to SEQ ID NO: 30232

SEQ ID NO: 38023 - DNA, 201 bp, Homo sapiens; identical to SEQ ID NO: 29228

SEQ ID NO: 38024 - DNA, 201 bp, Homo sapiens; identical to SEQ ID NO: 30233

SEQ ID NO: 38025 - DNA, 201 bp, Homo sapiens; identical to SEQ ID NO: 29229

SEQ ID NO: 38026 - DNA, 201 bp, Homo sapiens; identical to SEQ ID NO: 30235

SEQ ID NO: 38027 - DNA, 201 bp, Homo sapiens; identical to SEQ ID NO: 30020

SEQ ID NO: 38028 - DNA, 201 bp, Homo sapiens; identical to SEQ ID NO: 5693

SEQ ID NO: 38029 - DNA, 201 bp, Homo sapiens; identical to SEQ ID NO: 30237

SEQ ID NO: 38030 - DNA, 201 bp, Homo sapiens; identical to SEQ ID NO: 30021

SEQ ID NO: 38031 - DNA, 201 bp, Homo sapiens; identical to SEQ ID NO: 5694

SEQ ID NO: 38032 - DNA, 201 bp, Homo sapiens; identical to SEQ ID NO: 30240

SEQ ID NO: 38033 - DNA, 201 bp, Homo sapiens; identical to SEQ ID NO: 29233

SEQ ID NO: 38034 - DNA, 201 bp, Homo sapiens; identical to SEQ ID NO: 30022

SEQ ID NO: 38035 - DNA, 201 bp, Homo sapiens; identical to SEQ ID NO: 29235

SEQ ID NO: 38036 - DNA, 201 bp, Homo sapiens; identical to SEQ ID NO: 30023

SEQ ID NO: 38037 - DNA, 201 bp, Homo sapiens; identical to SEQ ID NO: 30024

SEQ ID NO: 38038 - DNA, 201 bp, Homo sapiens; identical to SEQ ID NO: 29237

SEQ ID NO: 38039 - DNA, 201 bp, Homo sapiens; identical to SEQ ID NO: 30026

SEQ ID NO: 38040 - DNA, 201 bp, Homo sapiens; identical to SEQ ID NO: 29238

SEQ ID NO: 38041 - DNA, 201 bp, Homo sapiens; identical to SEQ ID NO: 30028

SEQ ID NO: 38042 - DNA, 201 bp, Homo sapiens; identical to SEQ ID NO: 30030

SEQ ID NO: 38043 - DNA, 201 bp, Homo sapiens; identical to SEQ ID NO: 30032

SEQ ID NO: 38044 - DNA, 201 bp, Homo sapiens; identical to SEQ ID NO: 30138

SEQ ID NO: 38045 - DNA, 201 bp, Homo sapiens; identical to SEQ ID NO: 30034

SEQ ID NO: 38046 - DNA, 201 bp, Homo sapiens; identical to SEQ ID NO: 30139

SEQ ID NO: 38047 - DNA, 201 bp, Homo sapiens; identical to SEQ ID NO: 30140

SEQ ID NO: 38048 - DNA, 201 bp, Homo sapiens; identical to SEQ ID NO: 29243

SEQ ID NO: 38049 - DNA, 201 bp, Homo sapiens; identical to SEQ ID NO: 30142

SEQ ID NO: 38050 - DNA, 201 bp, Homo sapiens; identical to SEQ ID NO: 29244

SEQ ID NO: 38051 - DNA, 201 bp, Homo sapiens; identical to SEQ ID NO: 29245

SEQ ID NO: 38052 - DNA, 201 bp, Homo sapiens; identical to SEQ ID NO: 29059

SEQ ID NO: 38053 - DNA, 201 bp, Homo sapiens; identical to SEQ ID NO: 29258

SEQ ID NO: 38054 - DNA, 201 bp, Homo sapiens; identical to SEQ ID NO: 29259

SEQ ID NO: 38055 - DNA, 201 bp, Homo sapiens; identical to SEQ ID NO: 30050

SEQ ID NO: 38056 - DNA, 201 bp, Homo sapiens; identical to SEQ ID NO: 30051

SEQ ID NO: 38057 - DNA, 201 bp, Homo sapiens; identical to SEQ ID NO: 30052

SEQ ID NO: 38058 - DNA, 201 bp, Homo sapiens; identical to SEQ ID NO: 30053

SEQ ID NO: 38059 - DNA, 201 bp, Homo sapiens; identical to SEQ ID NO: 30054

SEQ ID NO: 38060 - DNA, 201 bp, Homo sapiens; identical to SEQ ID NO: 30055

SEQ ID NO: 38061 - DNA, 201 bp, Homo sapiens; identical to SEQ ID NO: 30056

SEQ ID NO: 38062 - DNA, 201 bp, Homo sapiens; identical to SEQ ID NO: 30058

SEQ ID NO: 38063 - DNA, 201 bp, Homo sapiens; identical to SEQ ID NO: 30059

SEQ ID NO: 38064 - DNA, 201 bp, Homo sapiens; identical to SEQ ID NO: 30061

SEQ ID NO: 38065 - DNA, 201 bp, Homo sapiens; identical to SEQ ID NO: 30063

SEQ ID NO: 38066 - DNA, 201 bp, Homo sapiens; identical to SEQ ID NO: 29134

SEQ ID NO: 38067 - DNA, 201 bp, Homo sapiens; identical to SEQ ID NO: 29269

SEQ ID NO: 38068 - DNA, 201 bp, Homo sapiens; identical to SEQ ID NO: 29270

SEQ ID NO: 38069 - DNA, 201 bp, Homo sapiens; identical to SEQ ID NO: 29137

SEQ ID NO: 38070 - DNA, 201 bp, Homo sapiens; identical to SEQ ID NO: 30321

SEQ ID NO: 38071 - DNA, 201 bp, Homo sapiens; identical to SEQ ID NO: 30323

SEQ ID NO: 38072 - DNA, 201 bp, Homo sapiens; identical to SEQ ID NO: 30270

SEQ ID NO: 38073 - DNA, 201 bp, Homo sapiens; identical to SEQ ID NO: 30092

SEQ ID NO: 38074 - DNA, 201 bp, Homo sapiens; identical to SEQ ID NO: 30093

SEQ ID NO: 38075 - DNA, 201 bp, Homo sapiens; identical to SEQ ID NO: 30094

SEQ ID NO: 38076 - DNA, 201 bp, Homo sapiens; identical to SEQ ID NO: 30095

SEQ ID NO: 38077 - DNA, 201 bp, Homo sapiens; identical to SEQ ID NO: 30096

SEQ ID NO: 38078 - DNA, 201 bp, Homo sapiens; identical to SEQ ID NO: 30097

SEQ ID NO: 38079 - DNA, 201 bp, Homo sapiens; identical to SEQ ID NO: 30099

SEQ ID NO: 38080 - DNA, 201 bp, Homo sapiens; identical to SEQ ID NO: 30098

SEQ ID NO: 38081 - DNA, 201 bp, Homo sapiens; identical to SEQ ID NO: 5689

SEQ ID NO: 38082 - DNA, 201 bp, Homo sapiens; identical to SEQ ID NO: 5691

SEQ ID NO: 38083 - DNA, 201 bp, Homo sapiens; identical to SEQ ID NO: 5692

SEQ ID NO: 38084 - DNA, 201 bp, Homo sapiens; identical to SEQ ID NO: 30195

SEQ ID NO: 38085 - DNA, 201 bp, Homo sapiens; identical to SEQ ID NO: 5695

SEQ ID NO: 38086 - DNA, 201 bp, Homo sapiens; identical to SEQ ID NO: 29550

SEQ ID NO: 38087 - DNA, 201 bp, Homo sapiens; identical to SEQ ID NO: 30197

SEQ ID NO: 38088 - DNA, 201 bp, Homo sapiens; identical to SEQ ID NO: 29556

SEQ ID NO: 38089 - DNA, 201 bp, Homo sapiens; identical to SEQ ID NO: 29557

SEQ ID NO: 38090 - DNA, 201 bp, Homo sapiens; identical to SEQ ID NO: 29558

SEQ ID NO: 38091 - DNA, 201 bp, Homo sapiens; identical to SEQ ID NO: 29560

SEQ ID NO: 38092 - DNA, 201 bp, Homo sapiens; identical to SEQ ID NO: 29983

SEQ ID NO: 38093 - DNA, 201 bp, Homo sapiens; identical to SEQ ID NO: 30357

SEQ ID NO: 38094 - DNA, 201 bp, Homo sapiens; identical to SEQ ID NO: 30110

SEQ ID NO: 38095 - DNA, 201 bp, Homo sapiens; identical to SEQ ID NO: 5690

SEQ ID NO: 38096 - DNA, 201 bp, Homo sapiens; identical to SEQ ID NO: 29201

SEQ ID NO: 38097 - DNA, 201 bp, Homo sapiens; identical to SEQ ID NO: 29202

SEQ ID NO: 38098 - DNA, 201 bp, Homo sapiens; identical to SEQ ID NO: 29204

SEQ ID NO: 38099 - DNA, 201 bp, Homo sapiens; identical to SEQ ID NO: 29205

SEQ ID NO: 38100 - DNA, 201 bp, Homo sapiens; identical to SEQ ID NO: 29206

SEQ ID NO: 38101 - DNA, 201 bp, Homo sapiens; identical to SEQ ID NO: 29207

SEQ ID NO: 38102 - DNA, 201 bp, Homo sapiens; identical to SEQ ID NO: 30281

SEQ ID NO: 38103 - DNA, 201 bp, Homo sapiens; identical to SEQ ID NO: 29208

SEQ ID NO: 38104 - DNA, 201 bp, Homo sapiens; identical to SEQ ID NO: 30114

SEQ ID NO: 38105 - DNA, 201 bp, Homo sapiens; identical to SEQ ID NO: 30115

SEQ ID NO: 38106 - DNA, 201 bp, Homo sapiens; identical to SEQ ID NO: 29997

SEQ ID NO: 38107 - DNA, 201 bp, Homo sapiens; identical to SEQ ID NO: 30116

SEQ ID NO: 38108 - DNA, 201 bp, Homo sapiens; identical to SEQ ID NO: 30117

SEQ ID NO: 38109 - DNA, 201 bp, Homo sapiens; identical to SEQ ID NO: 30118

SEQ ID NO: 38110 - DNA, 201 bp, Homo sapiens; identical to SEQ ID NO: 30120

SEQ ID NO: 38111 - DNA, 201 bp, Homo sapiens; identical to SEQ ID NO: 30122

SEQ ID NO: 38112 - DNA, 201 bp, Homo sapiens; identical to SEQ ID NO: 30125

SEQ ID NO: 38113 - DNA, 201 bp, Homo sapiens; identical to SEQ ID NO: 30127

SEQ ID NO: 38114 - DNA, 201 bp, Homo sapiens; identical to SEQ ID NO: 30129

SEQ ID NO: 38115 - DNA, 201 bp, Homo sapiens
taccggagagaactgctcagagaatctgcaacatccggttcctggagacagctaaggaaagaagctggggcgcatgtttctgcccaaagccgggttttggmcgaggtgactacacaccccctttcctggctcccataggctaagtgcctggcttcttgagaagcctgcttcttgagaacaaaaaagtgatttaaagcctca

SEQ ID NO: 38116 - DNA, 201 bp, Homo sapiens
catgggctccttcttttatgaacactagcttatggttaagttcagatatatatatatgtgtatgtatatatatatgtatgtgtgtgtgtatatatatatatgtgtgtgtgtgtgtgtgtatatatatatatatatatatatatatgacaaacctaataacctaaataagaggctttggtcaggtattatggttttcagcat

SEQ ID NO: 38117 - DNA, 201 bp, Homo sapiens
atgggctccttcttttatgaacactagcttatggttaagttcagatatatatatatgtgtatgtatatatatatgtatgtgtgtgtgtatatatatatatgtgtgtgtgtgtgtgtgtatatatatatatatatatatatatatgacaaacctaataacctaaataagaggctttggtcaggtattatggttttcagcatt

SEQ ID NO: 38118 - DNA, 201 bp, Homo sapiens
gggctccttcttttatgaacactagcttatggttaagttcagatatatatatatgtgtatgtatatatatatgtatgtgtgtgtgtatatatatatatgtrtgtgtgtgtgtgtgtatatatatatatatatatatatatatgacaaacctaataacctaaataagaggctttggtcaggtattatggttttcagcattca

SEQ ID NO: 38119 - DNA, 201 bp, Homo sapiens
ctgtgagcagctgccaggctccggccaggatcccttccttctcctcattggctgatggatcccaaggggctcctctccttgaccttcgtgctgtttctctycctggcttttggggcaagctacggaacaggtgagtgttcatctgcctgatggtttgagtcccatgttagctgccaggaatcagcgtatcttcgtggatgg

SEQ ID NO: 38120 - DNA, 201 bp, Homo sapiens
tctgtccatgtgacaacttcactgttagcataaccagcatttgagaaaacctgtgcactaaacaaaactacaaccaaggactctcacagaatccacttcaytgccctgctaccttcactggagtaggtgctcgtatccgtggttgagagacctgaaaatagatcacaacacaggactctttgcagacactccccagtacca

SEQ ID NO: 38121 - DNA, 201 bp, Homo sapiens
tgtccaaggatagtctgagctcagacatgctcaactctgcccccacctgatggtctttttctgccagccctggtagctgaagacaaaagacataatcttgygggagccctatggccctcccatcacctgagaaacccaaatacttatccaggtgaccttagggcaagcttgtattcccccgtactgctgcagctgatgctc

SEQ ID NO: 38122 - DNA, 201 bp, Homo sapiens
gttgctgccacagagcctgtcccagagtctgtccaggtgaggcatctctctgcctactctccgtagagagggaatacatgaaggaggggaaaatgaggaakttttttttttttaaggtgggaagagggagaggatcagggaaaatagctattgggcactaggcttcatacctaggtgacaaaatactgtgtataacaaatc

SEQ ID NO: 38123 - DNA, 201 bp, Homo sapiens
ttagactgtgggaggtagcctggagtagaagaggtggcattacggacacggggggaaatcctgaggcccagggtgttttaagcttggggttttcaagaccrcaaatccaatatggacttttccaggaaaagcaccgtgatatgccagggatgtgggggtgctgcacaatggatgtgtcttttaccagacagccagacgaac

SEQ ID NO: 38124 - DNA, 201 bp, Homo sapiens
cctggtgagctctgagaaaactaaatacgcttctatataccaagaagtagatctgtcaaaggtggccacctggtcacttaagcatggcccaaacctgccartgacacccaagtttacctaaatattagaattacccgggaaactttttaaaaaataatgatgaccaaatctaacctgaaaccaaaatgagatctgggttga

SEQ ID NO: 38125 - DNA, 201 bp, Homo sapiens
gttctactcaatgcttcactcattcaacaaagttattaagttcctactaagtgtttggcttgtcatccagcaggagatacaaagaacacaggcaattgaaktattataacaggtagatcactatgtgatctactgagaaccattggaaaataaaagaagatgctattaataattaccctggggcaggggatggcagctagg

SEQ ID NO: 38126 - DNA, 201 bp, Homo sapiens
aacaagatccccaagtaattcatatgcataataaaagtcagcagcactggtctagaccatgcccaagcacttataactataggagctcattgcctgccaakgcaattcatcccacatttgaacatcttttaccattagaaagatcttcattatattgaatcaaaatattttccccaaatcctaatcttggtttaaacctga

SEQ ID NO: 38127 - DNA, 201 bp, Homo sapiens
tctcggtttgaagggactgatgttctgaagtacaactgggcacagtcccaggctcttcaggacgcttcctccattcacacagcggggatgtgattgttacwgcgggtggtgtgtgctggctgagaagccactgtgaattgattcttcttctgaagtttatgtttctactttttggaaatgaataaattacagccagtccat

SEQ ID NO: 38128 - DNA, 201 bp, Homo sapiens
gaacactagcttatggttaagttcagatatatatatatgtgtatgtatatatatatgtatgtgtgtgtgtatatatatatatgtgtgtgtgtgtgtgtgtrtatatatatatatatatatatatatgacaaacctaataacctaaataagaggctttggtcaggtattatggttttcagcattcattcattgaacagatat

SEQ ID NO: 38129 - DNA, 201 bp, Homo sapiens
tttgcattctgtgaagtgagtatccagtccctctactcacagacttctgctttgtccccaggaaacaaattccatcacagtctatgctagtgtgacacttmcagagagctgacaccagagaccaacaaagggactttctgaaggaaaatggaaaaaccaaaatgaacactgaacttggccacaggccccaagtttcctctg

SEQ ID NO: 38130 - DNA, 201 bp, Homo sapiens
tcggtttgaagggactgatgttctgaagtacaactgggcacagtcccaggctcttcaggacgcttcctccattcacacagcggggatgtgattgttacagygggtggtgtgtgctggctgagaagccactgtgaattgattcttcttctgaagtttatgtttctactttttggaaatgaataaattacagccagtccatca

SEQ ID NO: 38131 - DNA, 201 bp, Homo sapiens
ccttcccccaactaaactccatttaaatagatgagaatcccaagagtaaccctttcaccccacgctctcatctgcctgtttaggtaaccaggttcaccttkaccatagtgtcttccctcactactctatcctatgctgctagcatccctcttttttactgtgaagcatgacatatggtagtcactagccacatgtagcttt

SEQ ID NO: 38132 - DNA, 201 bp, Homo sapiens
gaaaccaatcttcaacttgaggtccattctcacttcactgtcatatctaagaaggaagtaaaaatataaacctgacttcaaagcttcaaaaaaatacatakatttttaatgaagtttacttaaggacaaaaacagtatgctatagttaacattttatggcaaaacccttaaattctattttctttgtttctttgacatgag

SEQ ID NO: 38133 - DNA, 201 bp, Homo sapiens
atgcttagagaaatgcaaaatacactgaaaagttttaacaatagaatggaacaagtagaagaaagaacctcagagctcaaagacaatgctattgaattaayccaatctaacacagacaaagaaaaaaaaatttttttaatgaacaaagcctccagccaatttgggattatgttaaatgaccaaacctaagaataatttgtg

SEQ ID NO: 38134 - DNA, 201 bp, Homo sapiens
acactagcttatggttaagttcagatatatatatatgtgtatgtatatatatatgtatgtgtgtgtgtatatatatatatgtgtgtgtgtgtgtgtgtatrtatatatatatatatatatatatgacaaacctaataacctaaataagaggctttggtcaggtattatggttttcagcattcattcattgaacagatattt

SEQ ID NO: 38135 - DNA, 201 bp, Homo sapiens
ttacctaaacacacaggtttaggtaatctaaaccatcaggttatctaaagtcaagatgaaggaatgaatcttaagagctgtgaggcaaaagcatcaggtawcctataaaggaaaacctataagattaacagcagattcctcagcagaaatcctacaagctagaagggattggggtcctatctttcatatccttaaactaag

SEQ ID NO: 38136 - DNA, 201 bp, Homo sapiens
agatatatatatatgtgtatgtatatatatatgtatgtgtgtgtgtatatatatatatgtgtgtgtgtgtgtgtgtatatatatatatatatatatatatrtgacaaacctaataacctaaataagaggctttggtcaggtattatggttttcagcattcattcattgaacagatatttattaaatgcctcctatatacta

SEQ ID NO: 38137 - DNA, 201 bp, Homo sapiens
caaggacatcaggaagggcgagtggagccctaacaatattggtagaagaggcctaaaaagcaaattcttattttctattttatcccaaggtggtcttagawaggatgtagtggggcatgatggacagtgtgaagcaatagattccccactagaaataaatcacattgagggggagggaaaatgccattaggctgtactttg

SEQ ID NO: 38138 - DNA, 201 bp, Homo sapiens
ttcttatcctagtattagagtgatttctccagtggttcctagtgtcgatatcataaaccttgaatgaatcaatctgtctcaaacacacacatacacacatmcacacacacacacacacacacacacacactcctgcacagagggttctcagtgaccataagtcactcagagtggagctgctccttcctccagcatcagcaa

SEQ ID NO: 38139 - DNA, 201 bp, Homo sapiens
cttatcctagtattagagtgatttctccagtggttcctagtgtcgatatcataaaccttgaatgaatcaatctgtctcaaacacacacatacacacatacwcacacacacacacacacacacacacactcctgcacagagggttctcagtgaccataagtcactcagagtggagctgctccttcctccagcatcagcaatg

SEQ ID NO: 38140 - DNA, 201 bp, Homo sapiens
gcagcacattccaccatgctcaccacatacacactgggcctttcccttccaaagaaaaatgtgcctctcctaaaaatgctatttcctcagagatgtgccttttttttttttttttttttttgagatagattcttgctctgtcactcaggctggagtgcaatggcatgatctcggctcactgcaacctctgtctcctgggct

SEQ ID NO: 38141 - DNA, 201 bp, Homo sapiens
ccaccatgcctggctaatttttgtatttttagtagagacagggtttccccatgttggccaggctggtctcaaactcctgacctcgtgatctgcccacctcrgcctcccatagtgctgtgattataggcgtgagccactgcacccagcccagttttttaagagaataaattaactggtgttaaaataagtctaccttaaagg

SEQ ID NO: 38142 - DNA, 201 bp, Homo sapiens
tgttttttgacagagtcttgctttatcgcccaggctggagtgcagtggtgtgatctgggctcactacaacctccgcctcctgggttcaagtgattctcctrcctcagccttccaagtagctgagattacaggcacctgccaccacacccagctaatttttgtatctttagtagagatggggtttcaccatgttggccaggc

SEQ ID NO: 38143 - DNA, 201 bp, Homo sapiens
attgactagataaggccgagctgtttttcaaagtgggcgtatccatttacttttctatcagctacatatgagagtctcaattgctatgccttttttttttwaatttttttttgagacagagtttcactctgttgcctaggctggggtgcagtggcgtgatcttgtcttactgcaacctccgcctcctgggttcaagccatt

SEQ ID NO: 38144 - DNA, 201 bp, Homo sapiens; identical to SEQ ID NO: 5701

SEQ ID NO: 38145 - DNA, 201 bp, Homo sapiens
tgctgacacgatgttgtctaaaggccttaataataagggactctcttctcctccctcccacaggtgggcgcatgatgaactgcccaaagattctccggcakttgggaagcaaagtgctgctgcccctgacatatgaaaggataaataagagcatgaacaaaagcatccacattgtcgtcacaatggcaaaatcactggaga

SEQ ID NO: 38146 - DNA, 201 bp, Homo sapiens
gctggctgagaagccactgtgaattgattcttcttctgaagtttatgtttctactttttggaaatgaataaattacagccagtccatcaaggaaattgcamttttgtcttgtgtttcctaaaggatttataacacagtaatatggcatgatgtgtttcctggccttatgtctccatgccatagttatgaaatgctgaagga

SEQ ID NO: 38147 - DNA, 201 bp, Homo sapiens
cataaatcagacagcctctgctgcatgacacgaagcttgcttctgcctggcatctgtgagcagctgccaggctccggccaggatcccttccttctcctcaktggctgatggatcccaaggggctcctctccttgaccttcgtgctgtttctctccctggcttttggggcaagctacggaacaggtgagtgttcatctgcct

SEQ ID NO: 38148 - DNA, 201 bp, Homo sapiens
ccttcccagctcaggacccttgcaccaccatatatgttgctgccacagagcctgtcccagagtctgtccaggtgaggcatctctctgcctactctccgtasagagggaatacatgaaggaggggaaaatgaggaagttttttttttttaaggtgggaagagggagaggatcagggaaaatagctattgggcactaggcttc

SEQ ID NO: 38149 - DNA, 201 bp, Homo sapiens
agcaaaacaaatggttttccttacaaggggatggaaggggagagggcaaagagggagacagggcactgagtgctggtcctcagatcatgctccccataatrgcatgcttatgcttggaagggagctgtggcccttgttgcaggtggagaagcagtgtgggaacccaagtgctgtcccagcaaggccctgtctgtgacagac

SEQ ID NO: 38150 - DNA, 201 bp, Homo sapiens
gaaagaatgattttgagatctctgagttttgaacagtggactggaaaccatgtaagagccttaaaagtacagttctgtgcaaatggcattcagttttaaakaaaaacgtagcaaatgtttgatggtgctgttacaaaggagcttggaatactcagaggaacttgtcccatggtgatttttcacttctcaaaatgatgttta

SEQ ID NO: 38151 - DNA, 201 bp, Homo sapiens
tccatcacatgacaaaattccaagttttctcgcattaaaacacatgtggtgtggcttcaagtctggctctatacccagggagagtggacagcagcattatyccataaccagtgtccccaaaatgtgttgaattaatgacttccctattgtaagtgatggcatccgcatcttacaaggatgtggtctcaatttattttgagg

SEQ ID NO: 38152 - DNA, 201 bp, Homo sapiens
aaaaatcctgaagtgaacatttaagcacacacagagtcttaataggactatgggtgacttcttttacatatttttctcctttctaaaacttctgaattaaygttaaaaatgtaagttatttgcctccttctgcctctaggtcaggttatgctaaagttctcccaaacaggaagaccagcagaggttgcatctgttgataaa

SEQ ID NO: 38153 - DNA, 201 bp, Homo sapiens
gtctattagctcatcaaaatgcagttatctaagttcagctgtgaactgccaaatttgaggagtgatccaatgaaacatcttttctttgcaatccaagaagwcttaccggagagaactgctcagagaatctgcaacatccggttcctggagacagctaaggaaagaagctggggcgcatgtttctgcccaaagccgggtttt

SEQ ID NO: 38154 - DNA, 201 bp, Homo sapiens
tatactaacttattatatttatgtttaaaataattccctatgcctggataaaaatcctgaagtgaacatttaagcacacacagagtcttaataggactatrggtgacttcttttacatatttttctcctttctaaaacttctgaattaatgttaaaaatgtaagttatttgcctccttctgcctctaggtcaggttatgct

SEQ ID NO: 38155 - DNA, 201 bp, Homo sapiens
caatttttgccttcatcttcacatgacctccctctctgtgtcttcttcttttccatctcttataaggacactcatcatcagacttcggacttattctaatycaggatgaccttattttgaaatccttatcttgacatctgtgaagacctttattcaaataaagtcacattttgacattctgcctggacatatcttttgggg

SEQ ID NO: 38156 - DNA, 201 bp, Homo sapiens
tggggtatatgttagtttcctagggatgccttaacaaattactggaaacttggtggcttaaaacaacagaaatttattctctaacagttctggaggtcagragtccaaaatcaaggaggcacatcctcagggccacactccatctggaggctttaagagaaaatcctctttgcctcttccagcatctggtggctccaggct

SEQ ID NO: 38157 - DNA, 201 bp, Homo sapiens
acatcttttctttgcaatccaagaagacttaccggagagaactgctcagagaatctgcaacatccggttcctggagacagctaaggaaagaagctggggcrcatgtttctgcccaaagccgggttttggccgaggtgactacacaccccctttcctggctcccataggctaagtgcctggcttcttgagaagcctgcttct

SEQ ID NO: 38158 - DNA, 201 bp, Homo sapiens
agcctccattgcctctgcctggactttgcaataatcccataataaacctccatccttcagtctgccactttcccaccatccttactgctgcatgatgtatwcaaaggatactgtgcaactttagaaagaatgagataggtctactgtgctaacatgaaaaatgtcctcaatacattttaagtgaaaagatcaagttacaga

SEQ ID NO: 38159 - DNA, 201 bp, Homo sapiens
aaggtcttaattttgttgtagaccaatttagtctagtcctttttaagcattactggattttatttgctaatattttgttaagagtttggttttccacttawgtttctgagtgaaattggcctgtaattctcttgtataatgcctttttttttttaagaaggcactgcagtggctggtatatagcattcttgtgaatatatc

SEQ ID NO: 38160 - DNA, 201 bp, Homo sapiens
cttctgcctggcatctgtgagcagctgccaggctccggccaggatcccttccttctcctcattggctgatggatcccaaggggctcctctccttgaccttmgtgctgtttctctccctggcttttggggcaagctacggaacaggtgagtgttcatctgcctgatggtttgagtcccatgttagctgccaggaatcagcgt

SEQ ID NO: 38161 - DNA, 201 bp, Homo sapiens
aggcatgagccaccactcctggcctcaattgctatgcattctaatgaaaacttggtattaacagtctaattttagtcctactgttggatgtgtcttattakgcttttattccacatctctgtaattattaaggaagttgaacaacttttcatatgtttattggccatattaaaattctttcttaaagtgcccatttaatct

SEQ ID NO: 38162 - DNA, 201 bp, Homo sapiens
cctccgcctcctgggttcaagccattctcctgtctcggcctcccaagcagctgggattacaggtacgcaccaccacacctggctcattgttgtatttttastagagacagtatttcaccatgttggccagggtggtctcgaactcctgatctcaggagatctgcccgcctcagcatcccaaagtgctgggattacaggcat

SEQ ID NO: 38163 - DNA, 201 bp, Homo sapiens
gactagataaggccgagctgtttttcaaagtgggcgtatccatttacttttctatcagctacatatgagagtctcaattgctatgccttttttttttaaatttttttttgagacagagtttcactctgttgcctaggctggggtgcagtggcgtgatcttgtcttactgcaacctccgcctcctgggttcaagccattctc

SEQ ID NO: 38164 - DNA, 201 bp, Homo sapiens
cacctcttgatttaagtgaccgttttgtcattatttgaatttcatatatattttaaacacacaagacataattattattgttttatatatataaaatatayacttacccacattttcacaattttctttgttcatatttgcgatgtctttattatatcattataaagactgtaataatgtagacaattatttaaaaactaa

SEQ ID NO: 38165 - DNA, 201 bp, Homo sapiens
agttatttgcctccttctgcctctaggtcaggttatgctaaagttctcccaaacaggaagaccagcagaggttgcatctgttgataaaggtctctcttcttttttttttttttggtgaggcggagtctcactctgtcgccaggctagagtgctgtggcgccatctcagctcactgcaacctccagctccctggttcaaggg

SEQ ID NO: 38166 - DNA, 201 bp, Homo sapiens
gcctgaacaaggtccctaggtagagcgcccagggtgccatgaagcctggagtcactatcttcctaagcaggccagcataagcttgtgccatcattatgcarcatgcaagaaggaatgagccccagaacttggagtcaagtcccaggacttgccataaaagccaagacatgtaacggactatctggctcctggagagattta

SEQ ID NO: 38167 - DNA, 201 bp, Homo sapiens
gcctctaggtcaggttatgctaaagttctcccaaacaggaagaccagcagaggttgcatctgttgataaaggtctctcttcttttttttttttttggtgakgcggagtctcactctgtcgccaggctagagtgctgtggcgccatctcagctcactgcaacctccagctccctggttcaagggattctcctgcctccgcct

SEQ ID NO: 38168 - DNA, 201 bp, Homo sapiens
atcacttcctgactccacattcctcagatttttctgttttcctcatgatctgaaatgcttcctgggctcatgagctcagaatcacttttatttgctctccrtccttcatcctgtatattcaatggtggaaaaaaccctggtagaggaattagcagaactgaattctaatcctgactctgccacttactagttagggaagcc

SEQ ID NO: 38169 - DNA, 201 bp, Homo sapiens
catacctaggtgacaaaatactgtgtataacaaatcctcatgacacaagtttacctatgtaacaaaccagcacatgtacgcctgaacttaaaataaaagtaaaaaaaaaaaaattaaaacaaaaacaaattaaatgaaacagattgatgagtcctggactggggaagggaggccacagcatgcaggcaaaaaggagtctct

SEQ ID NO: 38170 - DNA, 201 bp, Homo sapiens
ctggctggaggccaatcaagtcaagccattatagcaactcataacaaaatagccctgctccaaggaaggagaaaacaacagctaattccaccacttgtaaygtcctggctaaccagaggtcctgagtctgtccatgtgacaacttcactgttagcataaccagcatttgagaaaacctgtgcactaaacaaaactacaacc

SEQ ID NO: 38171 - DNA, 201 bp, Homo sapiens
taacttgatgtgtgaaaggcctaaggagaaaaagaatcttttcaaatccagaaggcaacttcttgccagctatcaggctggaggcccctttggatcttgtrggctgcattttatgaattcattgagactgtctgtatctttggtcaactctgtaaacatctgattgtgtccaccatgattctttcctttggaacccgacta

SEQ ID NO: 38172 - DNA, 201 bp, Homo sapiens
aatctcagcactttgggaggccgaggcgggcggatcacaaggtcaggagatcgagaccatcctggctatggtggtgaaaccccatctctactaaaaatacaaaaaaaaaaaaaaattagctcagcatggtggtgggcacctgtagtcccagctactcgggaggctgaggcaggagaatggcgtgaacccaggaggtggagc

SEQ ID NO: 38173 - DNA, 201 bp, Homo sapiens
cacaagacataattattattgttttatatatataaaatatatacttacccacattttcacaattttctttgttcatatttgcgatgtctttattatatcawtataaagactgtaataatgtagacaattatttaaaaactaacaatgcctttattcttatttttaatggctataaaataatcttataaagaatataataac

SEQ ID NO: 38174 - DNA, 201 bp, Homo sapiens
aacaacttttttcagtctttttagtggctaccctagaaattataaaatacaactttgacttaccaaagtctaaggtttacttccctcctgcataatacttyaagtccacaataatttcacctcttgatttaagtgaccgttttgtcattatttgaatttcatatatattttaaacacacaagacataattattattgtttt

SEQ ID NO: 38175 - DNA, 201 bp, Homo sapiens
ggcatttgttggcttgtagttgtgtatctgcaatttttgccttcatcttcacatgacctccctctctgtgtcttcttcttttccatctcttataaggacastcatcatcagacttcggacttattctaatccaggatgaccttattttgaaatccttatcttgacatctgtgaagacctttattcaaataaagtcacattt

SEQ ID NO: 38176 - DNA, 201 bp, Homo sapiens
gcttaaaacaacagaaatttattctctaacagttctggaggtcagaagtccaaaatcaaggaggcacatcctcagggccacactccatctggaggctttargagaaaatcctctttgcctcttccagcatctggtggctccaggctctccgtggcatttgttggcttgtagttgtgtatctgcaatttttgccttcatctt

SEQ ID NO: 38177 - DNA, 201 bp, Homo sapiens
gccactatacacctaggagagtgctgggcaggcatgtcttactttgcaaacactcgaggggactaacttccacctcctctgctacttccagctgcttctartcacacttttagtcctctcctccattttacacacacacacacacacactcactctcacatacacacactcatgcatacccactcctcagtaaggatcaac

SEQ ID NO: 38178 - DNA, 201 bp, Homo sapiens
cacactcactctcacatacacacactcatgcatacccactcctcagtaaggatcaactctgaccaaaaaaatacacaacacattaatgtcagctcagtgarttacccttaaacacatatctcgatatttggtaaagcaagtcttcctaatttgtttttctgcaaaagtttttggctattcttgttcctttatactttcata

SEQ ID NO: 38179 - DNA, 201 bp, Homo sapiens
aaatggatacaggacacattagcaatcttaagatggagaaactgggcagagagattgacttaggagagatgaagataatttaatgttagacatgtggtagytgagttaaaaataaagcatttggatagaaaaatcttcatgaaattaagaatgtgaaagtatagtgagagaaattagaataagaaaacagatacaaaaatt

SEQ ID NO: 38180 - DNA, 201 bp, Homo sapiens
agataggtctactgtgctaacatgaaaaatgtcctcaatacattttaagtgaaaagatcaagttacagagaagtgtgtgcagaatgacacctcttgtgtgraaaaaagtctatataagtatagcaaatatccaaaactgcattgtctaatatggtagtcactagccacatgtggctttttaaatttaaattaatttgaatt

SEQ ID NO: 38181 - DNA, 201 bp, Homo sapiens
cagtgagattccttgggctaacttgatgtgtgaaaggcctaaggagaaaaagaatcttttcaaatccagaaggcaacttcttgccagctatcaggctggargcccctttggatcttgtgggctgcattttatgaattcattgagactgtctgtatctttggtcaactctgtaaacatctgattgtgtccaccatgattctt

SEQ ID NO: 38182 - DNA, 201 bp, Homo sapiens
cactctcatattgaccagggtggcatttttatgctcagttcacagttgacgaaaccaacaggaggtgatagagccagacccagagcctaagtctccaaggygtagccttctctgcctcttgccttgactccaacctgcaaggttggctgggtgagggattgcaggtgggagggcctggctcccaagtctatgctccactaa

SEQ ID NO: 38183 - DNA, 201 bp, Homo sapiens; identical to SEQ ID NO: 5708

SEQ ID NO: 38184 - DNA, 201 bp, Homo sapiens
aagtttaccatgtgcatttagtgagctcactctcatattgaccagggtggcatttttatgctcagttcacagttgacgaaaccaacaggaggtgatagagmcagacccagagcctaagtctccaaggcgtagccttctctgcctcttgccttgactccaacctgcaaggttggctgggtgagggattgcaggtgggagggc

SEQ ID NO: 38185 - DNA, 201 bp, Homo sapiens
caaggtcatttcttcaaatagggagttcccattgtttcagagtcacttagatgttccaggcactaagacaggtctctctctagggtcttcccaatttagcsagcgtaaaaacaatggtggaaaggaaaaacctggaaactttgcacagcccagagcctggtcatgggccacacccgctataagggaagctgagacacatag

SEQ ID NO: 38186 - DNA, 201 bp, Homo sapiens
gcccagagcctggtcatgggccacacccgctataagggaagctgagacacatagctcctagctgagcagctacatgcccagaaaagactcgtattaccacraaagcatgagcgcaatctcactggagctagtagcctctgcaatgctgggtgggataggcaggttgtaagtgatttttctggaagctgtgaactccgtaaa

SEQ ID NO: 38187 - DNA, 201 bp, Homo sapiens
ttatgaccctggagaaaaatgtttcagttcagcgcttttgcctgcagttgaggctttatggtaataatggcggcttccccagtccacactaaagggccaargtgctcctttgaccaagaatttaggtctctcttaaaagcaaagggtattcagaattggaagtaactagaatgatcttctagtttgggggtatttaaacct

SEQ ID NO: 38188 - DNA, 201 bp, Homo sapiens
gagcaaccctatcagcaacaattcccagaccttcagcccgtggcccggatgcaggacagacccctcaggtgagtacactggtggcagcctgtgtgccaccytaatgagcatgggctcagtcttcacatggtccaattgctccccagccatggcattcaccttagtaacaatactttacattttctttatagtttgcaaaag

SEQ ID NO: 38189 - DNA, 201 bp, Homo sapiens
gcaggggggctgggactcagggctttgtttccattgtgcccttggggaaagtgggtatgcaaaggacagtaaagaccaggtctgagtaaggagctcctgckggggaccagagggagataaccattatggtttcttttcaccaggtaaaacgaaccattaccagacaacagtggaaaaaaaaagccttacgatctatgccca

SEQ ID NO: 38190 - DNA, 201 bp, Homo sapiens
ttatgaaagttgcagctgtgaacattcatatgcaagtcgttaagtggacatgtgcacatatttttttgggtatatacctagatatacctggaagtagaacwgctgaatcgtagagtatgcatacctccaaattgactagataaggccgagctgtttttcaaagtgggcgtatccatttacttttctatcagctacatatga

SEQ ID NO: 38191 - DNA, 201 bp, Homo sapiens
gtttgaggctattatgaaagttgcagctgtgaacattcatatgcaagtcgttaagtggacatgtgcacatatttttttgggtatatacctagatatacctrgaagtagaactgctgaatcgtagagtatgcatacctccaaattgactagataaggccgagctgtttttcaaagtgggcgtatccatttacttttctatca

SEQ ID NO: 38192 - DNA, 201 bp, Homo sapiens
gatggacatgtgggttatttccagtttgaggctattatgaaagttgcagctgtgaacattcatatgcaagtcgttaagtggacatgtgcacatattttttkgggtatatacctagatatacctggaagtagaactgctgaatcgtagagtatgcatacctccaaattgactagataaggccgagctgtttttcaaagtggg

SEQ ID NO: 38193 - DNA, 201 bp, Homo sapiens
agatataatgcattctttttcattgcttcatagaatataaacgtatgaatatactagagtttatttatccagttgactattgatggacatgtgggttattwccagtttgaggctattatgaaagttgcagctgtgaacattcatatgcaagtcgttaagtggacatgtgcacatatttttttgggtatatacctagatata

SEQ ID NO: 38194 - DNA, 201 bp, Homo sapiens
ttattcttttttctctcatgtctgatttattttgctcagtattatctttatgagattcatatatgtctttgaatttagatataatgcattctttttcattrcttcatagaatataaacgtatgaatatactagagtttatttatccagttgactattgatggacatgtgggttatttccagtttgaggctattatgaaagt

SEQ ID NO: 38195 - DNA, 201 bp, Homo sapiens
agctgtgagtgaagcaacatactaccagctggaaaatacaaaagaggtataaacaactagccctgccctcaaagaacttagaatcctattaggagaccagrtatgcacattgagcaacagagattaaagtaattgaatggtacaccaatgagaaaaacacctaatgcgtattgggcatttgttatgcaccaggcagtgttc

SEQ ID NO: 38196 - DNA, 201 bp, Homo sapiens
gggcaacagaatgacattgttgctttattttctaaatagtcccaggtggaacatccctcttacacgtccccccgcccttacctcccacacatcaattcccscagaaatagggaggtgagaaagctgtgagtgaagcaacatactaccagctggaaaatacaaaagaggtataaacaactagccctgccctcaaagaactta

SEQ ID NO: 38197 - DNA, 201 bp, Homo sapiens
tttttgagatagattcttgctctgtcactcaggctggagtgcaatggcatgatctcggctcactgcaacctctgtctcctgggctcaagcagttcttctgyctcagcctcctgagtagctgaaattataagcgcgtgccaccatgcctggctaatttttgtatttttagtagagacagggtttccccatgttggccaggct

SEQ ID NO: 38198 - DNA, 201 bp, Homo sapiens
tcaacccagcattccctttccttcaaacagtgcctgcggaattcccatggccctcccccaggtacctgagagtcatttccagcagtggctccaggcacgaytgccatgagcgtggaggctgcacatgatgcattttccaaaacggtgtggatgccagacattctgtcctttggttcctatgtttcctgtttttgtcacatc

SEQ ID NO: 38199 - DNA, 201 bp, Homo sapiens
tggggatgggacaggaattcccacctaaccagcatttctttgaaattctcaaatatctagagggaaggcagcaatactctcaccaatcctccctcaacccmgcattccctttccttcaaacagtgcctgcggaattcccatggccctcccccaggtacctgagagtcatttccagcagtggctccaggcacgactgccatg

SEQ ID NO: 38200 - DNA, 201 bp, Homo sapiens
gagagaggagggggaaaggcaggttgtgggtttgaggagagaggaggtgtgaaataatcagcagcaggaaccctcatagtggtttgaaaggctcttggtatttttttttttaaccttgttgttggctcagcttttttggaaaagagaaatacagtaatatctcactgtcgacattattaactatctcagggtgtttggaga

SEQ ID NO: 38201 - DNA, 201 bp, Homo sapiens
cagaatacaacacagccccaattaaattaaaatggcttttatccaaaagacaggtaataacaaatgctgacaaggatgtggagaaaaagtacccttgtacrctgttgttgggaatataagttagtacaaccactgtggagaatggtttgaaggttcctcaaaaaactaaaaatagagctaccatatgatccacaatctcac

SEQ ID NO: 38202 - DNA, 201 bp, Homo sapiens
tcaataatggactatggttttattctatcggtgctagaaagccacagaaatttaaaagcaggagagagacaaaataggacatggtttttaaagatgattcyatctattgtatgaatgcagggagatcagctggaagaagacggcagtacccaggcctgggatgatggtggtggaaatgcaggaggtgaaaagggttcagat

SEQ ID NO: 38203 - DNA, 201 bp, Homo sapiens
agctaaaaaagaattagatcctgtcattcacaatgacatggatggaattgaagatcattatgttacgtgaaataagccaggcacagacagacaaactttgyacgttctcacttgcttgtgagaggtaaaaattaaaacaattgaacttgtgggcatagagagtagaaggatggttaccagaggctgaagggtagtgggggt

SEQ ID NO: 38204 - DNA, 201 bp, Homo sapiens
ctaatagtctaagatagaaagacccagcagtgccaaataataaaaataggactttgactgatggggatacagtttaaaaagcaaacacagacaagatgtcytttctttctgagcctaaatttaccaaaagaactgtggggtctgtaagttctgttccttctgtacctgaaagaatactgtagcaagatgctaaaagcacat

SEQ ID NO: 38205 - DNA, 201 bp, Homo sapiens
taggtaattgctctgatccaaacgaataataaaatttttcccgagaggagcaaatggttatagcctgaacaaggtccctaggtagagcgcccagggtgccrtgaagcctggagtcactatcttcctaagcaggccagcataagcttgtgccatcattatgcaacatgcaagaaggaatgagccccagaacttggagtcaag

SEQ ID NO: 38206 - DNA, 201 bp, Homo sapiens
caataatttcacctcttgatttaagtgaccgttttgtcattatttgaatttcatatatattttaaacacacaagacataattattattgttttatatatawaaaatatatacttacccacattttcacaattttctttgttcatatttgcgatgtctttattatatcattataaagactgtaataatgtagacaattattt

SEQ ID NO: 38207 - DNA, 201 bp, Homo sapiens
tgctgaactgtgaactggacttttccatctctgtgcttgctagcctcttggccagcctggcccatagcatcttaggcactgctgaccaatagctcgtcttrttgaggctttggaagtcgccggtcagggagaagcaacccagccccacaaggcaagtctatccaatcggaggctgctcacttcattgcatgttttcttctt

SEQ ID NO: 38208 - DNA, 201 bp, Homo sapiens
taatttttgtatttttagtagagacagggtttccccatgttggccaggctggtctcaaactcctgacctcgtgatctgcccacctcagcctcccatagtgytgtgattataggcgtgagccactgcacccagcccagttttttaagagaataaattaactggtgttaaaataagtctaccttaaaggctgtgattttctgg

SEQ ID NO: 38209 - DNA, 201 bp, Homo sapiens
gctcgtacttcccaaggtctaggggaggaagaactgagctcggggctcagaaaaccaaatcgagccactttaagtggtcacagggaaagccaagcctccgytgttgcaaccaatttgtgactgcaccatttctggagcacctcttggtgactgtaaggtgtgatggagtgatggtgctgaactgtgaactggacttttcca

SEQ ID NO: 38210 - DNA, 201 bp, Homo sapiens
agtcctggactggggaagggaggccacagcatgcaggcaaaaaggagtctctgtggctttggttttccagtttccatgaagcccccaatacctgctcacayggggccactgctaaccccctgctggccagtgtttccctgagagttgtccaaggaccacatcagaatcagccagcgtacttgttaaaaataaagattccta

SEQ ID NO: 38211 - DNA, 201 bp, Homo sapiens
ggagaattcccacctgagaaggaggttggaccaaatgactggaaggaactttctgcctcaagtcttcttgagtctgtgcttctctatcggagagttgggtragaactagctctctctgttcagctaatctgctttctttgcttctcttgtagcctcttcagaagaaacttgactccttcccagctcaggacccttgcacca

SEQ ID NO: 38212 - DNA, 201 bp, Homo sapiens
gctttctttgcttctcttgtagcctcttcagaagaaacttgactccttcccagctcaggacccttgcaccaccatatatgttgctgccacagagcctgtcycagagtctgtccaggtgaggcatctctctgcctactctccgtagagagggaatacatgaaggaggggaaaatgaggaagttttttttttttaaggtggga

SEQ ID NO: 38213 - DNA, 201 bp, Homo sapiens
taagcattactggattttatttgctaatattttgttaagagtttggttttccacttatgtttctgagtgaaattggcctgtaattctcttgtataatgcctttttttttttaagaaggcactgcagtggctggtatatagcattcttgtgaatatatctaactgggatacaagttgaggtagaaatatttcaaatgtcctt

SEQ ID NO: 38214 - DNA, 201 bp, Homo sapiens
tgcctacaagtcaggtatgtagccaccaaaggggtcacattatctagacagtcaggcatccataagtgtggtggaagaaaatccaacatgcttcccagtayattaatgtaaaaacaaccaccaccaccacaataactataatgttcctcatgtcatcaagcagcaggggagagcactctgttttaagcttaatatattcgc

SEQ ID NO: 38215 - DNA, 201 bp, Homo sapiens
aatctttgctccatttgggctctttcagaagagagcccaggatgatagaggcacaaaggtcacacaaatgcctgcatccaccttatttttcaaagctcctrccgcacacacactcatccagaaatgcctgggcaggtgccctatatttcaagatgaaaccaatcttcaacttgaggtccattctcacttcactgtcatatc

SEQ ID NO: 38216 - DNA, 201 bp, Homo sapiens
actttccatacattactatatgggtttctcagaacaacactgtgaacttattgttatgctcattttacagatgaggaagttgaagccacagagggtatgartagcttatctgtagtcacagagctatcaagtggtagacccagaatttgaacttatctatctggctccaaataccatcactgaaaatggtctgcatggtaa

SEQ ID NO: 38217 - DNA, 201 bp, Homo sapiens
agtttttaaaaaaaagtttttttggtttgtttgtggaaactgattgtattagtccgctctcatcctgccaataaagacatacctgagactgggtgatttayaaaggaaagaggtttaattggctcatagttccacatggctggagaggcctcacaatcatggttgaaggcgaatgaggagcaaaatcatgtcttacgtggc

SEQ ID NO: 38218 - DNA, 201 bp, Homo sapiens
agagagagagagagagacacgcttctgtgtttctgtgacaacactttcagagacaagaaaaaaaacgccctctggctttttccttggatgtgtgactgtcygccaagttatcacgtttaaaccacagacaataggtggagagggcccagggtggagactcgagcaaagcactcttcccaaatggcatgtgagttattgacc

SEQ ID NO: 38219 - DNA, 201 bp, Homo sapiens
ttctgaaatagatatggctgtgctagaatgaaggaatctagaaaggaatgcccctggaagctcatcttgaagagaggatctttttcagcagatcagcaaamcgctggctcagcacctctgagttagctcagtgaaagaaaaggctgacgcctgccagtgagctccggaggcttcccctttctaacaaggtcatttcttcaa

SEQ ID NO: 38220 - DNA, 201 bp, Homo sapiens
gtccgagggtttattagaggttgatttgccatctgtcatcaggacagtgattttaagacatttttcattttcattaatgaaaacctcacagcggttaatgrtgtgatgagacggaatgcaatgtgatgtgagcactgaatcttgacaggactcacttaagcgaaactgtgcaaaaacttatatgttccttgaaatcttttt

SEQ ID NO: 38221 - DNA, 201 bp, Homo sapiens
catttaccctgtgtgattattacatattgcatgcctctatcaacatatctcatataccccatacaaatatatgcataccccatacatatatatatacatayacacacacacacacacacacacacacacacacacacacatatatgtatatctactatgtacccacagacgttaaaaattagaggagaaaacacacacaca

SEQ ID NO: 38222 - DNA, 201 bp, Homo sapiens
gcttaaacaatcaaaatgtattggctctcagttctggaggctagaagtctaaagtcaaggtgtcagcaggattgttcttctctgagggctgtcagagaagkatctctcccaggcgcctctccctggcttgtaaatggctgtcttctccttgtctcttcatatcatcttctctctatgtgtatttctgtgtccaaatttcct

SEQ ID NO: 38223 - DNA, 201 bp, Homo sapiens
cagatttactgagtaggaagctggttcttgtgaggagtggagggacaggaagcagtagaaacctggcaccacaggaagggccctgtcaggatctcggctcrgtttgtaagagaactgtccagccgttcccctctcttgggtctctgtttcatccccagtaaaatgaaaagggcgaacaaatgaagtccctcccagagtaga

SEQ ID NO: 38224 - DNA, 201 bp, Homo sapiens
gctgctgtaaaaaattatcacaagcctgatgacttaaaacaacagaaattcattctcccaccgttctgtaggcacaaggtctaaaattaacatattggcargacctgctccttctgaaagctcaaggggagaatctttctctgcctcttccagcgtctggtggtctctggtgttcgttgaattgtggctgcatagctctag

SEQ ID NO: 38225 - DNA, 201 bp, Homo sapiens; identical to SEQ ID NO: 5703

SEQ ID NO: 38226 - DNA, 201 bp, Homo sapiens
ataaagcttatactaagggcactcagctcaggacgttctaagaaaacatgtgaagatggacttacccatctaagccactctgaggaccaagaatgcaccartgggaaccagatttactgagtaggaagctggttcttgtgaggagtggagggacaggaagcagtagaaacctggcaccacaggaagggccctgtcaggatc

SEQ ID NO: 38227 - DNA, 201 bp, Homo sapiens
gatatgccagggatgtgggggtgctgcacaatggatgtgtcttttaccagacagccagacgaacagggcttgctcagcccactttcttttggaatctgcaratccatggctcgtacttcccaaggtctaggggaggaagaactgagctcggggctcagaaaaccaaatcgagccactttaagtggtcacagggaaagccaa

SEQ ID NO: 38228 - DNA, 201 bp, Homo sapiens
gagcagttttaggttcacagcaaagttgggcagaaagaacagagatttcccatatgccctctgccccatacatacatagcctcccctattatcaatatccyccaccaggatggtacatttgttataattgatgaccttatgtcaatgagttttttttattcctccatgcagttcctctgcacccccttcacacactttggg

SEQ ID NO: 38229 - DNA, 201 bp, Homo sapiens
agcacttaaaatgccttataaaccataataaaaatgtaatttttattataaaagctacaaaaatataatgtattttttaattgtaaatgaggaagcagtakcccttacctcagcacagccctctctgggtatagctgccctattagagtacaaaaacagggcactgaatattttaccctggcctaacccaaaaaaggggca

SEQ ID NO: 38230 - DNA, 201 bp, Homo sapiens
ttttatggaatggactgtgaatcccatagcagggccaggggagtcagaacgagagactaagacctggactgtgaagtttgaggaaaaataataaattgcayagcgcttcatcattagcaaagcactctcaactgtgtaatctcttttgatcctcacaataaccttgccagataggtgttatactttcattttacagatgag

SEQ ID NO: 38231 - DNA, 201 bp, Homo sapiens
ctttcactgtctccctcactggactggaaatcagagtatcagggctaattggtttaatccatagatttgactttgaatgatcccattcagcaactattaargacacatgatgtggcagccactgtgcaagggtgcaaggtgtggggaaaacaaaatgaacaacagccactgcccagcacctgacactgtgtctgtactgag

SEQ ID NO: 38232 - DNA, 201 bp, Homo sapiens
gtgaaaaggcgggcacccacccactgaacccagccaacagctcccacctcctgtccctcaccctcggcccccagcatgctgacaatatctacatctgcacygtgagcaaccctatcagcaacaattcccagaccttcagcccgtggcccggatgcaggacagacccctcaggtgagtacactggtggcagcctgtgtgcca

SEQ ID NO: 38233 - DNA, 201 bp, Homo sapiens
cctttaaagaccttgcctccaaatacggtcatattctgaggtccttggggttagagcttcaacatagaaatttgggggaggggagacaaaattcagcccawaacatctccctaatgacctcagttttactcaattaactctgtgaagacgctatgtccaaataaggaaatcaacatatgaatttgggaaaacacaattcaa

SEQ ID NO: 38234 - DNA, 201 bp, Homo sapiens
gcctagactctgtgcagccccatttaatcagaatatttaggggtggagatctgcataggtgttaagcctagaagagaatatggggtgcagctcaaaatgakacttgcatattctaccctattgcaagatcagcagggactaagtttacttcggacaggaatctttcctttactgaatgaatagaaataaattctgggctga

SEQ ID NO: 38235 - DNA, 201 bp, Homo sapiens
tgtaacggactatctggctcctggagagatttatctacctaccaaagtgttggaataaggagcagacctttaagacggggaggggggatagctgcctcctycctcttttataggtagggaaaataatttgtccttgtttcttacctatggagtgtctgtttactcacatagagcaattgaccttgctcttatcacatcatc

SEQ ID NO: 38236 - DNA, 201 bp, Homo sapiens
ttctaccctattgcaagatcagcagggactaagtttacttcggacaggaatctttcctttactgaatgaatagaaataaattctgggctgaaatctttgcwccatttgggctctttcagaagagagcccaggatgatagaggcacaaaggtcacacaaatgcctgcatccaccttatttttcaaagctcctaccgcacaca

SEQ ID NO: 38237 - DNA, 201 bp, Homo sapiens
agccattttggggagtggtggcgatgggttatggcctgaaaatgggattttttattctttttttctccctatcaaagttggtctttaaaaatcaacactamgctagcaatttttaatcttgttttgaatctcagatccctttaagagatggcatttatggatgtgctcccagaaaaatatgtatacgctcatctatacaac

SEQ ID NO: 38238 - DNA, 201 bp, Homo sapiens
tgtttgctttcatattggcttaattcatatccacagccaaactgtgtttacaagtgacaaaggaatgtagttccaacatgaatgttggttaatgtcttttytgaagttaaagaaatgtgaaacaacaaaaacatatgttggaacatcacttgctcatcagtgacactagtgactttttgctgaatcagatgatagtttttg

SEQ ID NO: 38239 - DNA, 201 bp, Homo sapiens
ctcctacatgaggacagtgaaatctaaccagaagcggttagcacatttacacacatttgtgtaggtgtttcactgcactgggggttctggataaagatggytaaaattcagcccacacaccacttgttaagccctgcattccggcaccagatcatacctacttggtggaagaagtgccttttggcatttaaacaaaggctt

SEQ ID NO: 38240 - DNA, 201 bp, Homo sapiens
tgcaccaaacaggaaaactcttcatatagtgcctagcattagctcagttatctgtgtagaggggatccaggagatcagagtggagaggcctcatagcgagkctagagaaggtctaattctggaaatgagaggaagggcaaagtaaacaagagaataagtgtctgtctttgagagaggaaggtttgacatgaatagacagca

SEQ ID NO: 38241 - DNA, 201 bp, Homo sapiens
agtcttttagttgctgtacttaaactaggaaccaagtccacctgaatccaaggccagtgcttttttgagcctttttaactaccagtccctcttgagtgcasccagggattgtgtctcttaggcccagagactcatctgaattcccagggatcctgatagccacatggggctttcctgcttcttcaaaatgacttccttatc

SEQ ID NO: 38242 - DNA, 201 bp, Homo sapiens
tttcccttcccgcaaggccatatttcagactgtcacatggggagaaaccttggacaatacctggctttcctaggcagaggtccctgtgggcttccgcagtrtattgtgtctctgggtacttgagagtagggagtggtgacgactttcaacaagcatgctgccttcaagcatttgtttaacaaagcacatcctgcacagccc

SEQ ID NO: 38243 - DNA, 201 bp, Homo sapiens
tcatattggattagggcccacctgtctcagtttgctagggctgccataataaagtacaacagattgggtggtttaaataacagaaatttatttttctcctrgttctggaggctagaagtttgaggtcaaggtgttggcaggtttggtgtcttctgaggcctctcgccttagcttgcatatggctaccttctcactgtgttc

SEQ ID NO: 38244 - DNA, 201 bp, Homo sapiens
ccagccctaaggtggttttctcctatctcagtagatggaatatacaatcagcttttacaccgagacattccattgcccagggacgagcaggagacagatgyttttctcttatctcaactgcaaagaggccttcctcttttactaatcctcctcagcacagaccctttacaggtgtcacgctgggggacggtcaggtctttc

SEQ ID NO: 38245 - DNA, 201 bp, Homo sapiens
ttcaaaaaaatacatagatttttaatgaagtttacttaaggacaaaaacagtatgctatagttaacattttatggcaaaacccttaaattctattttcttkgtttctttgacatgagagatctttgcgcataaccctcttctccccttcctctctcctgccaataccacttttctcttctccctttgagtcccactagact

SEQ ID NO: 38246 - DNA, 201 bp, Homo sapiens; identical to SEQ ID NO: 5709

SEQ ID NO: 38247 - DNA, 201 bp, Homo sapiens
gtttctcgtcgggtggaatgagagacttgagaaaagaaagagacacagagaaaaagtatagagaaagaaaagtgggcccaggggaccagcgctcagcatayggaggacccgcaccagcaccagtctctgagttcccttagtatttattgatcattatcaggtgtttctcagagagggggatgtggcaggacaatagggtaa

SEQ ID NO: 38248 - DNA, 201 bp, Homo sapiens
gcctccattgcctctgcctggactttgcaataatcccataataaacctccatccttcagtctgccactttcccaccatccttactgctgcatgatgtatamaaaggatactgtgcaactttagaaagaatgagataggtctactgtgctaacatgaaaaatgtcctcaatacattttaagtgaaaagatcaagttacagag

SEQ ID NO: 38249 - DNA, 201 bp, Homo sapiens
tgattttgagatctctgagttttgaacagtggactggaaaccatgtaagagccttaaaagtacagttctgtgcaaatggcattcagttttaaagaaaaacrtagcaaatgtttgatggtgctgttacaaaggagcttggaatactcagaggaacttgtcccatggtgatttttcacttctcaaaatgatgtttaaatccca

SEQ ID NO: 38250 - DNA, 201 bp, Homo sapiens
atcctagtattagagtgatttctccagtggttcctagtgtcgatatcataaaccttgaatgaatcaatctgtctcaaacacacacatacacacatacacayacacacacacacacacacacacactcctgcacagagggttctcagtgaccataagtcactcagagtggagctgctccttcctccagcatcagcaatgatt

SEQ ID NO: 38251 - DNA, 201 bp, Homo sapiens
cctagtattagagtgatttctccagtggttcctagtgtcgatatcataaaccttgaatgaatcaatctgtctcaaacacacacatacacacatacacacayacacacacacacacacacacactcctgcacagagggttctcagtgaccataagtcactcagagtggagctgctccttcctccagcatcagcaatgattca

SEQ ID NO: 38252 - DNA, 201 bp, Homo sapiens
gctggtctcaaactcctgacctcgtgatctgcccacctcagcctcccatagtgctgtgattataggcgtgagccactgcacccagcccagttttttaagaraataaattaactggtgttaaaataagtctaccttaaaggctgtgattttctgggtccagcctccattgcctctgcctggactttgcaataatcccataat

SEQ ID NO: 38253 - DNA, 201 bp, Homo sapiens
ttcatatatattttaaacacacaagacataattattattgttttatatatataaaatatatacttacccacattttcacaattttctttgttcatatttgygatgtctttattatatcattataaagactgtaataatgtagacaattatttaaaaactaacaatgcctttattcttatttttaatggctataaaataatc

SEQ ID NO: 38254 - DNA, 201 bp, Homo sapiens; identical to SEQ ID NO: 5705

SEQ ID NO: 38255 - DNA, 201 bp, Homo sapiens
ttaatgacttccctattgtaagtgatggcatccgcatcttacaaggatgtggtctcaatttattttgaggtctttgtccaggaattgtggattttaattcrttcaaagtaacatcaacaaatatcagctgaagagtttatttttatgtgtccaatactgttctgtggggagtacaaaaatatatggcttatttctcaagga

SEQ ID NO: 38256 - DNA, 201 bp, Homo sapiens; identical to SEQ ID NO: 5707

SEQ ID NO: 38257 - DNA, 201 bp, Homo sapiens
ccagagaaaggtgaaaaccaacttaaagaaatttttaaaataatacaagatatggacaaaaacactgtaaagaaatagatattataaataaaaaacaatargaacttctggaaataaaagacatgcttagagaaatgcaaaatacactgaaaagttttaacaatagaatggaacaagtagaagaaagaacctcagagctca

SEQ ID NO: 38258 - DNA, 201 bp, Homo sapiens
cccttcaccaaaggtcaggaaccaccctccacatggagaactgtgttgaaaggattgtttaatttttgtcactgccagagtaattcccttccctgaactcygccaaattccccttgtggacaaaatctagagcagggtttctcaactgccacactattgacatttggggctggataatttttttgtcatggggctgtcctg

SEQ ID NO: 38259 - DNA, 201 bp, Homo sapiens
ctatggttataattgaggacctatcactatctcagacacacaaaagcacttactacacacccacccactcactcacccatgcgcccgtgtacatgcgcgcrcgcgcacgcacacacatacacacacacaccctcccacacacatcacgatagatgaaatcccaccactaaaaagccattcttttaggtctaggaagtaaca

SEQ ID NO: 38260 - DNA, 201 bp, Homo sapiens
tcagacacacaaaagcacttactacacacccacccactcactcacccatgcgcccgtgtacatgcgcgcgcgcgcacgcacacacatacacacacacaccytcccacacacatcacgatagatgaaatcccaccactaaaaagccattcttttaggtctaggaagtaacaacgtaagccaactaaaaaccatggtggatta

SEQ ID NO: 38261 - DNA, 201 bp, Homo sapiens
ctgatggtctttttctgccagccctggtagctgaagacaaaagacataatcttgtgggagccctatggccctcccatcacctgagaaacccaaatacttayccaggtgaccttagggcaagcttgtattcccccgtactgctgcagctgatgctctcttgaaatcgccaccttctggctggaggccaatcaagtcaagcca

SEQ ID NO: 38262 - DNA, 201 bp, Homo sapiens
taatggattcaaaccaagaagaaatctctgaattgccagaaaaagaattcagaaggttgattattaagctactcaagtaggcaccagagaaaggtgaaaamcaacttaaagaaatttttaaaataatacaagatatggacaaaaacactgtaaagaaatagatattataaataaaaaacaataggaacttctggaaataaa

SEQ ID NO: 38263 - DNA, 201 bp, Homo sapiens
acctgtttatagtgggtccaaggaaaaatgggtctggaaatgggaaaagaaactataaacacacattaaagcactttgctgtaaaggaaaacagaaatggrgaggtatctggggatggacctgggatcaggggagatagttttaatataaggaaactacaagtttatatgttgtgtattgatggaaataacctagtaaaaa

SEQ ID NO: 38264 - DNA, 201 bp, Homo sapiens; identical to SEQ ID NO: 5697

SEQ ID NO: 38265 - DNA, 201 bp, Homo sapiens
ggttggaagcgacctaagcgtctatcaccgatgagtggataaagaaaatgtggtacatatacacaatgaagtactattcagctaaaaaagaattagatccwgtcattcacaatgacatggatggaattgaagatcattatgttacgtgaaataagccaggcacagacagacaaactttgcacgttctcacttgcttgtgag

SEQ ID NO: 38266 - DNA, 201 bp, Homo sapiens; identical to SEQ ID NO: 5698

SEQ ID NO: 38267 - DNA, 201 bp, Homo sapiens
catctgtcatcaggacagtgattttaagacatttttcattttcattaatgaaaacctcacagcggttaatggtgtgatgagacggaatgcaatgtgatgtragcactgaatcttgacaggactcacttaagcgaaactgtgcaaaaacttatatgttccttgaaatctttttctttaggtgacatttgttcaggtcatgta

SEQ ID NO: 38268 - DNA, 201 bp, Homo sapiens
atggatacaggacacattagcaatcttaagatggagaaactgggcagagagattgacttaggagagatgaagataatttaatgttagacatgtggtagttsagttaaaaataaagcatttggatagaaaaatcttcatgaaattaagaatgtgaaagtatagtgagagaaattagaataagaaaacagatacaaaaatttt

SEQ ID NO: 38269 - DNA, 201 bp, Homo sapiens
atgatatgaaggagtgcgttcattgtccattggaagtctgtgacaggaaaacccaacctaagtcaggagtcaggaaagtcttccctatgaaagagatgtcmaaatggagaccagaaagatggaagttgttagctaggcaaataaagagtggttatagcctctaaggctagggaacgtacatactaatagtctaagatagaa

SEQ ID NO: 38270 - DNA, 201 bp, Homo sapiens
ttggccagcctggcccatagcatcttaggcactgctgaccaatagctcgtcttattgaggctttggaagtcgccggtcagggagaagcaacccagccccayaaggcaagtctatccaatcggaggctgctcacttcattgcatgttttcttctttgaatcttcacaaaagtttttcagtgtttttatttttaaatacacac

SEQ ID NO: 38271 - DNA, 201 bp, Homo sapiens
caataaacagaaagaatgattttgagatctctgagttttgaacagtggactggaaaccatgtaagagccttaaaagtacagttctgtgcaaatggcattcmgttttaaagaaaaacgtagcaaatgtttgatggtgctgttacaaaggagcttggaatactcagaggaacttgtcccatggtgatttttcacttctcaaaa

SEQ ID NO: 38272 - DNA, 201 bp, Homo sapiens
ggtctttcctaggcactttctactccctgcatacctctcctcacactaaatttatcctctagtagaaaattaagttattttggtctaacagcttcaaatcyttgaatgctcaataacttattttgcaagctgcaggcagaaagagactttttaagtaaagtcctttgttttttcctattctctgcttttagacaggctgtc

SEQ ID NO: 38273 - DNA, 201 bp, Homo sapiens
accacgaaagcatgagcgcaatctcactggagctagtagcctctgcaatgctgggtgggataggcaggttgtaagtgatttttctggaagctgtgaactcygtaaaaatgtttacttggatggtcccagaacttaaattagtatatggttcatgaggatccttccccacccccagttctgaatggaaactgccacgaacaa

SEQ ID NO: 38274 - DNA, 201 bp, Homo sapiens; identical to SEQ ID NO: 5710

SEQ ID NO: 38275 - DNA, 201 bp, Homo sapiens
tcaaaatgtattggctctcagttctggaggctagaagtctaaagtcaaggtgtcagcaggattgttcttctctgagggctgtcagagaaggatctctcccrggcgcctctccctggcttgtaaatggctgtcttctccttgtctcttcatatcatcttctctctatgtgtatttctgtgtccaaatttcctcttctcataa

SEQ ID NO: 38276 - DNA, 201 bp, Homo sapiens
aacttattttgcaagctgcaggcagaaagagactttttaagtaaagtcctttgttttttcctattctctgcttttagacaggctgtcctcaatttaagccytgctttttcttattgtttcttatataaacttggtaagtactgtaagaaacagccactatcataccattgcataataaggagcaccaacttcccagctcaa

SEQ ID NO: 38277 - DNA, 201 bp, Homo sapiens
atggcactatggggagcgggagcttgccttttcctcagacttaaaacaataagttttccccgtgtttcccctctaatgctgttttcttttgaccaagcatrtctgaattctagagaagtcaggaggaacacacccattctcggtttgaagggactgatgttctgaagtacaactgggcacagtcccaggctcttcaggacg

SEQ ID NO: 38278 - DNA, 201 bp, Homo sapiens
ggaagacatttaaaacatttgagaagcactgacaatggatgaggctgccttgggaggttgtgcaccccaagacgccacttggggagtccaagcaaagcctsgggaattgagttccagagaatttgggggagaattcccacctgagaaggaggttggaccaaatgactggaaggaactttctgcctcaagtcttcttgagtc

SEQ ID NO: 38279 - DNA, 201 bp, Homo sapiens
gttgtgaggcaaatgagaagacatatgtgaggaggaggaagagtaggaatggcagtgtgggatgcaagaattctgcatgtagccggtgatatgagtgagamggactaaattctgttgctattctgtcccctccagctgcccctgtaagagccacaccaatttcagtttcttgtgaggaagacatttaaaacatttgagaag

SEQ ID NO: 38280 - DNA, 201 bp, Homo sapiens; identical to SEQ ID NO: 5700

SEQ ID NO: 38281 - DNA, 201 bp, Homo sapiens
cttgctctgtattatcttgtaggtgataggaactaataaagagttttagatagaggagtgacaccatcagtcttgcttttcaaagaggaactccagtagtrtagagaacagactggggcagggaagtggggaagaaagagaaaccagttcctgggggccattattgcagtcatccatcaaaatgatgggacccgagccaaa

SEQ ID NO: 38282 - DNA, 201 bp, Homo sapiens
attattgcagtcatccatcaaaatgatgggacccgagccaaagcagcaactgtcagttaacaaagacatttttcctagggcatacaaaggaaaaccccagscttgggatgaaagggtggggtccgagggtttattagaggttgatttgccatctgtcatcaggacagtgattttaagacatttttcattttcattaatgaa

SEQ ID NO: 38283 - DNA, 201 bp, Homo sapiens
cagcaactgtcagttaacaaagacatttttcctagggcatacaaaggaaaaccccagccttgggatgaaagggtggggtccgagggtttattagaggttgmtttgccatctgtcatcaggacagtgattttaagacatttttcattttcattaatgaaaacctcacagcggttaatggtgtgatgagacggaatgcaatgt

SEQ ID NO: 38284 - DNA, 201 bp, Homo sapiens
atttaccctgtgtgattattacatattgcatgcctctatcaacatatctcatataccccatacaaatatatgcataccccatacatatatatatacatatmcacacacacacacacacacacacacacacacacacacatatatgtatatctactatgtacccacagacgttaaaaattagaggagaaaacacacacacaa

SEQ ID NO: 38285 - DNA, 201 bp, Homo sapiens
tttaccctgtgtgattattacatattgcatgcctctatcaacatatctcatataccccatacaaatatatgcataccccatacatatatatatacatatacacacacacacacacacacacacacacacacacacacatatatgtatatctactatgtacccacagacgttaaaaattagaggagaaaacacacacacaac

SEQ ID NO: 38286 - DNA, 201 bp, Homo sapiens
tctttttttttttttttttttttgagatggagtctcgttctgtcacccaggctggagtgcagtggtgcgatctcggctcactgcaacctccgcctcccagsttcatgcaattctgcctcagccttccaagtagctgggattacaggcgcacaccaccacacctggctaatttttttttttttttttttttttgtattttta

SEQ ID NO: 38287 - DNA, 201 bp, Homo sapiens
agtaattattaaaacagtaaatgcatagagctttgcacagcaatctgtatccatgagccagttccaccactagtaccttcatctgtggcttatccagcaaratgtttcatttcctgtgtgccctggcaggaaagaggttggtaaatagtgaattaaagggatgatcataaaatttaacctggttaaaaagcaccttatttg

SEQ ID NO: 38288 - DNA, 201 bp, Homo sapiens
aagaagaatggaatgaacataatgccaaaataattaaatatataagaactaagacaaagccccatttgttttatattcctggaagaatgtgtccagctacycaaaaactaatagaagagtcacagagaaaaatgaacggtaagtatgcgaagaggtccattgaattgttcatagtgggtaaggtaatatgttcatatgcac

SEQ ID NO: 38289 - DNA, 201 bp, Homo sapiens
aggcttctcaggttggcacaggtctgtccagtgcatggctcaagtgctggaagtgccagcaaaactaagtaggctctgcagttaaccctctcgtaaataayggcagggacaacactaaaagtaccaaaatctgtggcgtgcaagacaaacgtacgggaatagacaaaagagaatcaaatagaagaagatacgaaagagaaa

SEQ ID NO: 38290 - DNA, 201 bp, Homo sapiens
tgtgaagaagtatttccagttagtttttgtgtgtatataactcacttgtgtaagtggatgtgttaaaagatctctttttaaaaatccttttattggagtarttattaaaacagtaaatgcatagagctttgcacagcaatctgtatccatgagccagttccaccactagtaccttcatctgtggcttatccagcaaaatgt

SEQ ID NO: 38291 - DNA, 201 bp, Homo sapiens
ctttatacaaattaagttttgtctactgatttgtacctggaaaatctgaacaatattcatgttgcttacagaaaaggctagtattggcttgaagctctackataggaggggtagtaatgggggtataatgaatgcttgaggggaaagtaattttcagtaatttcagttaagcgctactgatcatagtatgtgaaaggaatt

SEQ ID NO: 38292 - DNA, 201 bp, Homo sapiens
cctagcttactgctgatacacaatggaagctctaaaagattgctggattaaagtggtagcttgagttaattaatacactgggcccactaattctttgtacraggaagatagatgcctggctgagattatttaaagcattgtttctgtgggaaagtgttttgtttttttgtttgtttgggacggagtctcactctgtcgcac

SEQ ID NO: 38293 - DNA, 201 bp, Homo sapiens
ggggatagagatggtgagttaggactgaaatcagtttagagctgtattaggaaagacaggctgggtgctatggctcacacctgtaatcccagcaatttggkaggctgagggtagaggatggatggcttgaagccaggagttcaagactgacctgggcatcagcaagaatctatctctacaaaaaatagaaaaatttagcca

SEQ ID NO: 38294 - DNA, 201 bp, Homo sapiens
gaggctgagggtagaggatggatggcttgaagccaggagttcaagactgacctgggcatcagcaagaatctatctctacaaaaaatagaaaaatttagccrtgtgtgtacctgtagttctagttacttcgggggctgaggtgggaggattgcttgaacccaggagtttgaggttatagtgagctttgatggcaccactgca

SEQ ID NO: 38295 - DNA, 201 bp, Homo sapiens
ccattctatccctgtggctaagagaccgaggtattcacacgacttcccaaaggctggtactgaaatgagtctggtactggagagagcccacacttcggggmtaccaaatcctagggccgaacgaaagtctgacgggagctctaaccaaagccaaccagctgagatgcgatccggccgctgggcgggggcgaaaaaaacaac

SEQ ID NO: 38296 - DNA, 201 bp, Homo sapiens
gatggcaccactgcactccgtactggtgacagactgtctaaaaaaaaaattggcagagatgtctaaggggctattaaggaaacatcttttaagataccaasgtttgggtaaccaccaaaataaagatagtttgaacttcaatgagctgtatttccaatctagggtccttctacacactatctgtagaatgataacaattta

SEQ ID NO: 38297 - DNA, 201 bp, Homo sapiens
gcgtggtggtgggcacctgtagtcccagctactcgggaggctgaggcaggagaatggcatgaacccgggaggcggagcttgcagtgagccgagatggcacyactgcactccagcctgggggacagagcgagactccatcaaaaaaaaaaaaaatccttggtgttaagtggcttggtctctctttcccactttctttcctct

SEQ ID NO: 38298 - DNA, 201 bp, Homo sapiens
ctcgggaggctgaggcaggagaatggcatgaacccgggaggcggagcttgcagtgagccgagatggcaccactgcactccagcctgggggacagagcgagrctccatcaaaaaaaaaaaaaatccttggtgttaagtggcttggtctctctttcccactttctttcctctctttcagcacatccaaatatgtttgaaacaa

SEQ ID NO: 38299 - DNA, 201 bp, Homo sapiens; identical to SEQ ID NO: 5727

SEQ ID NO: 38300 - DNA, 201 bp, Homo sapiens; identical to SEQ ID NO: 5729

SEQ ID NO: 38301 - DNA, 201 bp, Homo sapiens; identical to SEQ ID NO: 5728

SEQ ID NO: 38302 - DNA, 201 bp, Homo sapiens; identical to SEQ ID NO: 5731

SEQ ID NO: 38303 - DNA, 201 bp, Homo sapiens; identical to SEQ ID NO: 5730

SEQ ID NO: 38304 - DNA, 201 bp, Homo sapiens
tgcaaataaatgtggcttagacttgtgtgactgcttaagactagtacttgtattaactttctgatgctttatacaagagagcacttaaattgcatccttcyttgagtttaacactgtagctttagccttgactttgaatattcattttgccttcccttgacaagtaaatggttacagtgaaaatgtgaagaagtatttcca

SEQ ID NO: 38305 - DNA, 201 bp, Homo sapiens
ggcccggaactgcagcacaaagccccttcccgctccggcggacacccggcccgttgctggccccgagaccctgccgggacgcaacaagccgccttaccccrgcttcctgtccacgtgcagcctcctcggggatggcgggatggggacctgatccaggcttgttaatgtgtgggggcatcgaggtgaatataatttctgtga

SEQ ID NO: 38306 - DNA, 201 bp, Homo sapiens
gcccggaactgcagcacaaagccccttcccgctccggcggacacccggcccgttgctggccccgagaccctgccgggacgcaacaagccgccttaccccarcttcctgtccacgtgcagcctcctcggggatggcgggatggggacctgatccaggcttgttaatgtgtgggggcatcgaggtgaatataatttctgtgac

SEQ ID NO: 38307 - DNA, 201 bp, Homo sapiens
cctgttgtcgccgaggtggagaggccccaggtcccctccgtagagcgctggtctcaggtccctgaggaaggagagcgaggcctgggtgcgccggcatgctktcttggcctgtgagaagacccggactgctgattcccgctctcggccctgcaggcccggaactgcagcacaaagccccttcccgctccggcggacacccgg

SEQ ID NO: 38308 - DNA, 201 bp, Homo sapiens
gagcgaggcctgggtgcgccggcatgctttcttggcctgtgagaagacccggactgctgattcccgctctcggccctgcaggcccggaactgcagcacaawgccccttcccgctccggcggacacccggcccgttgctggccccgagaccctgccgggacgcaacaagccgccttaccccagcttcctgtccacgtgcagc

SEQ ID NO: 38309 - DNA, 201 bp, Homo sapiens
ttttgagacagagttttgctcttgttgcccaggctggagtgcaatggcactatctcagctcactgcaaccccgcctcccgggttcaagtgattctcctgcytcagcttcccgagtaggtgggattacaggcatgcaccaccaagcccagctcattttgtatttttagtagagacggggtttctccatgttggtcaggctga

SEQ ID NO: 38310 - DNA, 201 bp, Homo sapiens
gccatggtaatcttaatttttccagcactaaattttcagttatgcgaaatcaggtcctttatgtctagatgacattcttgccctcatcactaccatcaagmaaaaggagtccaagtccaccacacaagtcaaaaagtaagtaaatggccaatttatcaaagttgacttctccaaccacaataacatgaggcttttaaagta

SEQ ID NO: 38311 - DNA, 201 bp, Homo sapiens
agtgagccgagattgtgtcaccacactctagtctgggcaacagagtgagactccgtctcaaaaaaaaaaaaaaaaaaaaaaaaacctacaaaatgctattytcatgcaaatgatgtgataattgggtcaccagggaaggctttgcaggtgaagtgacctggaagaataaagaaaagctatttaatagctcttgagcatatg

SEQ ID NO: 38312 - DNA, 201 bp, Homo sapiens
cctcagcctccctaagtgctgggattacgggcgtgagccactgtgcctggcctgtgaaaaaatgttttctgagcttcaatttgtatatatatttatagaayaaaactagttcctacattggcagtgcaggtagggcagaaccagaagcgggacaacacacacagacaccactaacaacagggccgctcccttaggtctggt

SEQ ID NO: 38313 - DNA, 201 bp, Homo sapiens
atttggcttgttgatgggtacccttcaaaaatttaaacaagaatccactgttgctactgaaagggtatttatccaagttttgttttgcatcatatatttaagttatcaaagtagtagattaatgttttttttaaaaaatccttaaagctcttttaagacctaactgtaaacctgaaacaaagccaagtaaaaacttggttt

SEQ ID NO: 38314 - DNA, 201 bp, Homo sapiens
ccctaaatactgtgaggcaggagtattattttatttaatttatctagcagtgtcagcagtgacaggcccacaatgattgaataaggactcccacatattakaagtaaccgctacatactatcacatttcggattaaattagattaaaaaaaaatctctacaaggatggggccattgtttcattcactactatatccctggc

SEQ ID NO: 38315 - DNA, 201 bp, Homo sapiens
gtgaggcaggagtattattttatttaatttatctagcagtgtcagcagtgacaggcccacaatgattgaataaggactcccacatattagaagtaaccgcyacatactatcacatttcggattaaattagattaaaaaaaaatctctacaaggatggggccattgtttcattcactactatatccctggcacctagaaatc

SEQ ID NO: 38316 - DNA, 201 bp, Homo sapiens
aagtaattcagagaggtaatagtcaatgaaaatggctgaggatttgctacaacaggagaaacacaacaagcctatggtcttgaacccaacttggataaatrtcgacaaccaaaataagtgactgagacctaagtcttagtcatcgaggtttattgagctagcttgtgggcatgcccggtggaaaaaaaaacttgtaaaaac

SEQ ID NO: 38317 - DNA, 201 bp, Homo sapiens
tgtacctgtagttctagttacttcgggggctgaggtgggaggattgcttgaacccaggagtttgaggttatagtgagctttgatggcaccactgcactccrtactggtgacagactgtctaaaaaaaaaattggcagagatgtctaaggggctattaaggaaacatcttttaagataccaaggtttgggtaaccaccaaaa

SEQ ID NO: 38318 - DNA, 201 bp, Homo sapiens
aaatatgttggtttgaacaaaacctgtgataaaatcaataacccagtgtttgtcgtctttgttttgtttaatgttgtaatagactagatttctgtataaawatagttatcctgaaaaactggaggttgaagaatatattaagtttaccaattttgagtgaacttaattcttataaagtaacactataaaagcattttggaa

SEQ ID NO: 38319 - DNA, 201 bp, Homo sapiens
aatatgttggtttgaacaaaacctgtgataaaatcaataacccagtgtttgtcgtctttgttttgtttaatgttgtaatagactagatttctgtataaatrtagttatcctgaaaaactggaggttgaagaatatattaagtttaccaattttgagtgaacttaattcttataaagtaacactataaaagcattttggaat

SEQ ID NO: 38320 - DNA, 201 bp, Homo sapiens; identical to SEQ ID NO: 5732

SEQ ID NO: 38321 - DNA, 201 bp, Homo sapiens
cagccaaacagagagaccttgaaggggcagtcagtaggtaggtttaaaaaaagattcctgaaggcttctttagtttctgaggtaccacacaaatataaatrtttattaacaataattctgtttcagcaatattaaaattgagtggtatgccactccctgccccccccaagttctgttggtatttgactgaacagttgacta

SEQ ID NO: 38322 - DNA, 201 bp, Homo sapiens; identical to SEQ ID NO: 5733

SEQ ID NO: 38323 - DNA, 201 bp, Homo sapiens; identical to SEQ ID NO: 5735

SEQ ID NO: 38324 - DNA, 201 bp, Homo sapiens
aaggactcccacatattagaagtaaccgctacatactatcacatttcggattaaattagattaaaaaaaaatctctacaaggatggggccattgtttcatkcactactatatccctggcacctagaaatcgctctgacataagggcactaaataaatactttctgaaataattaatttaaattatgttccctaattatcct

SEQ ID NO: 38325 - DNA, 201 bp, Homo sapiens
tctgagcatgcgcaccaacagaatagccgcgccctttcctaattaaatcattaaccaaggtgagggtaaggaagaaaaggaggcttggctaagtcccactstgatgtgatcacgttaaaacggtgtaaggcacattacatcataggttaaaaggcctagaaaactccgcgctccccttgccagaactgcagactcgcgagc

SEQ ID NO: 38326 - DNA, 201 bp, Homo sapiens
caggcccatccaagccagattgctggccctttctggtcctggtggaggtagaggacgtggtagtttattactgaggtaagatttcctttggactttactcrtgctgaaactactggtactttactaaatatgttggtttgaacaaaacctgtgataaaatcaataacccagtgtttgtcgtctttgttttgtttaatgttg

SEQ ID NO: 38327 - DNA, 201 bp, Homo sapiens
ggggtttctccatgttggtcaggctgatctcgaactcgtgacctcaggtgatccgcctgcctcggcctcccaaagtgctgggattacagacttgagccackgtgcccagctgtgtgtgttttgttttgtttgagacagagtctcactgttgcccaggccagagtgcagtggcatgatcttggctcactgcatgcaacctcc

SEQ ID NO: 38328 - DNA, 201 bp, Homo sapiens
tcttgaactcccaatctcaagtgatccgcccaccaaggcctcccaaaatcctgggattaccgggccgaccatacatgcaaacattcttacacttgctgaayacgctctactattatcacactctcatgcctcaggtactgcctaaggttgtacacagacctgtaataagatcaatgaggctaagtatgctcacaatcagaa

SEQ ID NO: 38329 - DNA, 201 bp, Homo sapiens
tgaagaatatattaagtttaccaattttgagtgaacttaattcttataaagtaacactataaaagcattttggaatgaatgcccgtttaaggctactttasttggaaagatttttgaaagtttaaccatattctcttgtcaaatggaaataccatttatcttgtatttcaagtgttttatgttgaacattttaaatttcag

SEQ ID NO: 38330 - DNA, 201 bp, Homo sapiens
caataattctgtttcagcaatattaaaattgagtggtatgccactccctgccccccccaagttctgttggtatttgactgaacagttgactatcagttccytcaaaacgcagttctgcactcatgataacctaaattttatccaaataaaggtcatgtgaagagtaaaattggaaaaattgtcaattagtaccattttttc

SEQ ID NO: 38331 - DNA, 201 bp, Homo sapiens
ctatctttttggaacttttgtgattttttctccttatgatccacatctctgaaagtatttgggtgcgactgtgtgtgtctacatatgattttgcactgatwtgtaaatcttttacaggcccatccaagccagattgctggccctttctggtcctggtggaggtagaggacgtggtagtttattactgaggtaagatttcct

SEQ ID NO: 38332 - DNA, 201 bp, Homo sapiens
acgacttcccaaaggctggtactgaaatgagtctggtactggagagagcccacacttcggggctaccaaatcctagggccgaacgaaagtctgacgggagstctaaccaaagccaaccagctgagatgcgatccggccgctgggcgggggcgaaaaaaacaacttccggtcccctctaccccggcattcggccagctctat

SEQ ID NO: 38333 - DNA, 201 bp, Homo sapiens
aatgaaatagtacttcctgtcctgtttcagacatttagatttatttgaaactatctttttggaacttttgtgattttttctccttatgatccacatctctraaagtatttgggtgcgactgtgtgtgtctacatatgattttgcactgatttgtaaatcttttacaggcccatccaagccagattgctggccctttctggt

SEQ ID NO: 38334 - DNA, 201 bp, Homo sapiens
gaggaagttaaatgaaatagtacttcctgtcctgtttcagacatttagatttatttgaaactatctttttggaacttttgtgattttttctccttatgatycacatctctgaaagtatttgggtgcgactgtgtgtgtctacatatgattttgcactgatttgtaaatcttttacaggcccatccaagccagattgctggc

SEQ ID NO: 38335 - DNA, 201 bp, Homo sapiens
cagtgtttgtcgtctttgttttgtttaatgttgtaatagactagatttctgtataaatatagttatcctgaaaaactggaggttgaagaatatattaagtktaccaattttgagtgaacttaattcttataaagtaacactataaaagcattttggaatgaatgcccgtttaaggctactttagttggaaagatttttgaa

SEQ ID NO: 38336 - DNA, 201 bp, Homo sapiens
agaccgaggtattcacacgacttcccaaaggctggtactgaaatgagtctggtactggagagagcccacacttcggggctaccaaatcctagggccgaackaaagtctgacgggagctctaaccaaagccaaccagctgagatgcgatccggccgctgggcgggggcgaaaaaaacaacttccggtcccctctaccccggc

SEQ ID NO: 38337 - DNA, 201 bp, Homo sapiens
aacttgaagttcaggcagaagaagagagaaagcaggttgaaaatgaaaggagagaactgtttgaagagaggcgtgctaaacagacagaactgcggcttttrgaacagaaagttgagcttgcgcagctggtgagtggtaatttggaattctaagattggtaatcctttgtgtttacaaaagcactgaccctttaccttttct

SEQ ID NO: 38338 - DNA, 201 bp, Homo sapiens
atataccttttgttgtaactatttcaacacgtaagtattaaagcaggctacttaacttttagcaaaagcggcgccaggaaattgaacaaaaacttgaagtkcaggcagaagaagagagaaagcaggttgaaaatgaaaggagagaactgtttgaagagaggcgtgctaaacagacagaactgcggcttttggaacagaaag

SEQ ID NO: 38339 - DNA, 201 bp, Homo sapiens
ttttacaggcccatccaagccagattgctggccctttctggtcctggtggaggtagaggacgtggtagtttattactgaggtaagatttcctttggacttwactcatgctgaaactactggtactttactaaatatgttggtttgaacaaaacctgtgataaaatcaataacccagtgtttgtcgtctttgttttgtttaa

SEQ ID NO: 38340 - DNA, 201 bp, Homo sapiens
aatgatgggtttaaatgaaatggatcctgttgacagtaaattttcttattctgttctttaggaaccggcgaatatttggcttgttgatgggtacccttcaraaatttaaacaagaatccactgttgctactgaaagggtatttatccaagttttgttttgcatcatatatttaagttatcaaagtagtagattaatgtttt

SEQ ID NO: 38341 - DNA, 201 bp, Homo sapiens
gaggctaaggcaggagaatcacttgaacctgggaggtggaggttgcagtgagccgagattgtgtcaccacactctagtctgggcaacagagtgagactccrtctcaaaaaaaaaaaaaaaaaaaaaaaaacctacaaaatgctattctcatgcaaatgatgtgataattgggtcaccagggaaggctttgcaggtgaagtg

SEQ ID NO: 38342 - DNA, 201 bp, Homo sapiens
ttcttagaaaatgatgggtttaaatgaaatggatcctgttgacagtaaattttcttattctgttctttaggaaccggcgaatatttggcttgttgatgggyacccttcaaaaatttaaacaagaatccactgttgctactgaaagggtatttatccaagttttgttttgcatcatatatttaagttatcaaagtagtagat

SEQ ID NO: 38343 - DNA, 201 bp, Homo sapiens
aatggcatgaacccgggaggcggagcttgcagtgagccgagatggcaccactgcactccagcctgggggacagagcgagactccatcaaaaaaaaaaaaaatccttggtgttaagtggcttggtctctctttcccactttctttcctctctttcagcacatccaaatatgtttgaaacaatgagccaagtcacatcctgaa

SEQ ID NO: 38344 - DNA, 201 bp, Homo sapiens
caaaggtatttccctgggggaaaaaaactctagtgaaataatgcagttataaggaaaatcaagggattgttcaagcatcctgtagtatttcttagaaaatsatgggtttaaatgaaatggatcctgttgacagtaaattttcttattctgttctttaggaaccggcgaatatttggcttgttgatgggtacccttcaaaaa

SEQ ID NO: 38345 - DNA, 201 bp, Homo sapiens
gttaagcgctactgatcatagtatgtgaaaggaatttttcttatatggaatgcttgatgaatttgcatgtcatccttgtgcaggggccattttaatctttyttttttttttttttttctcggagacagggtcttagtctgtcacccaggctggagtgcagtggcacaaacaatctgactgcagcctcgacctcctgggttc

SEQ ID NO: 38346 - DNA, 201 bp, Homo sapiens; identical to SEQ ID NO: 5723

SEQ ID NO: 38347 - DNA, 201 bp, Homo sapiens
cacccacctcagcctcccagagtgctgggatgacaggtgtgagccactgtgcccggcctgcagatacctttacatagtgaaaaaaaaaaaaaaaaaaaaawttttttttgagatggagtttggctcttcttgctcaggctggagtgtagtggcgtgatctcagctcactgcaacctccgcctctggggttcaagtgatttc

SEQ ID NO: 38348 - DNA, 201 bp, Homo sapiens
gctgggcgtggtggctcacgcctgtaatcccagcaccctgggaggtcgaggcaggcgaatcacctgaggtcaggagttcgagaccagcctgcccaacatgstggaatccggtctctaataatacaaaaattagccaggcgtgttggcgcgcgcctgtagtcccaggtactcaggaggctgaggcaggagaatcgcttgaac

SEQ ID NO: 38349 - DNA, 201 bp, Homo sapiens
accctggaggtgaggttgcaatgagccaagatcacactattgtaccccagcctgggcaacaggcgcaaaactccatctcaaaaaaagaaaaaatgtgaagsatatgcagataccttttttttttctttttctttttttttgtagagatggggttttatcatgttgcccaggctggtctgagctcaaagcaatccacccacc

SEQ ID NO: 38350 - DNA, 201 bp, Homo sapiens
ggctgggcgtggtggctcacgcctgtaatcccagcaccctgggaggtcgaggcaggcgaatcacctgaggtcaggagttcgagaccagcctgcccaacatsgtggaatccggtctctaataatacaaaaattagccaggcgtgttggcgcgcgcctgtagtcccaggtactcaggaggctgaggcaggagaatcgcttgaa

SEQ ID NO: 38351 - DNA, 201 bp, Homo sapiens
aactggggagggagatgactgcctggctgacttttcattggctcagagtcacaaaggctgcaggttcttcccccttccggtcgctgagtggttgaggccgraagacaacgctcatcgtcattggctgagcccggctgtcagtcctttcgcgcctcggcggcgcggcatagcccggctcggcctgtaaagcagtctcaagcc

SEQ ID NO: 38352 - DNA, 201 bp, Homo sapiens
ctcgcgagcctaagtctccgagaactcagggattgtgaaacccgccccgactctgcgctagcagcgggatccaggcacccgcagctaactggggagggagrtgactgcctggctgacttttcattggctcagagtcacaaaggctgcaggttcttcccccttccggtcgctgagtggttgaggccggaagacaacgctcat

SEQ ID NO: 38353 - DNA, 201 bp, Homo sapiens
ggcttgttgatgggtacccttcaaaaatttaaacaagaatccactgttgctactgaaagggtatttatccaagttttgttttgcatcatatatttaagttatcaaagtagtagattaatgttttttttaaaaaatccttaaagctcttttaagacctaactgtaaacctgaaacaaagccaagtaaaaacttggtttaact

SEQ ID NO: 38354 - DNA, 201 bp, Homo sapiens
tggcttgttgatgggtacccttcaaaaatttaaacaagaatccactgttgctactgaaagggtatttatccaagttttgttttgcatcatatatttaagttatcaaagtagtagattaatgttttttttaaaaaatccttaaagctcttttaagacctaactgtaaacctgaaacaaagccaagtaaaaacttggtttaac

SEQ ID NO: 38355 - DNA, 201 bp, Homo sapiens
ttggcttgttgatgggtacccttcaaaaatttaaacaagaatccactgttgctactgaaagggtatttatccaagttttgttttgcatcatatatttaagttatcaaagtagtagattaatgttttttttaaaaaatccttaaagctcttttaagacctaactgtaaacctgaaacaaagccaagtaaaaacttggtttaa

SEQ ID NO: 38356 - DNA, 201 bp, Homo sapiens
tttggcttgttgatgggtacccttcaaaaatttaaacaagaatccactgttgctactgaaagggtatttatccaagttttgttttgcatcatatatttaagttatcaaagtagtagattaatgttttttttaaaaaatccttaaagctcttttaagacctaactgtaaacctgaaacaaagccaagtaaaaacttggttta

SEQ ID NO: 38357 - DNA, 201 bp, Homo sapiens
atgacagctcactgcagtctcaaactcctggactcaaacaatcatcccgcctcagcctctccagtacaatttttaaaatttttatttttagagacaggatygttgctatgttgcccaggctggtcttaactcctgggctgtagcgattctcccacctcagtctcccaagtatctgggattacaggcacaatccactggact

SEQ ID NO: 38358 - DNA, 201 bp, Homo sapiens
cctgggctgtagcgattctcccacctcagtctcccaagtatctgggattacaggcacaatccactggacttgctcagagatctttattgtacactgatatrcccaagtgcctagaatagcacctggcacatagtgggccctcagtatttgttgaactaatgaatgatcattgctcctttggaagcctacaaaccccacaga

SEQ ID NO: 38359 - DNA, 201 bp, Homo sapiens
caggaaagaggttggtaaatagtgaattaaagggatgatcataaaatttaacctggttaaaaagcaccttatttgatgacagtttgtatgcactaaaatcstttatacaaattaagttttgtctactgatttgtacctggaaaatctgaacaatattcatgttgcttacagaaaaggctagtattggcttgaagctctacg

SEQ ID NO: 38360 - DNA, 201 bp, Homo sapiens
ctagcttactgctgatacacaatggaagctctaaaagattgctggattaaagtggtagcttgagttaattaatacactgggcccactaattctttgtacamggaagatagatgcctggctgagattatttaaagcattgtttctgtgggaaagtgttttgtttttttgtttgtttgggacggagtctcactctgtcgcaca

SEQ ID NO: 38361 - DNA, 201 bp, Homo sapiens
atatatatgattttatgccaaaactggttctgttttacagaagttttatttttcatcagacataaagattgatctgttttcttcatcagttagaaaatgtstagttctgtctgccacaatttctagtatgtagatttcccatggatctttgcttttataattttatgtcagtttgtggttacttaattgccataatctttt

SEQ ID NO: 38362 - DNA, 201 bp, Homo sapiens
ccggctgtcagtcctttcgcgcctcggcggcgcggcatagcccggctcggcctgtaaagcagtctcaagcctgccgcagggagaagatggcggtcgccgtragaactttgcaggaacagctggaaaaggccaaagagagtcttaagaacgtggatgagaacattcgcaagctcaccgggcgggatccgaatgacgtgaggt

SEQ ID NO: 38363 - DNA, 201 bp, Homo sapiens; identical to SEQ ID NO: 5736

SEQ ID NO: 38364 - DNA, 201 bp, Homo sapiens
aattggtttgggcgttagttcacacattgtagtatcctttctctgctggaggaaagaataaaatgggatggagacttgatagaacaaagcttctggaaacragtcctagaagagagggcatttgcccttggtgtgcagttacataaatacctcagtggtcatttaaattaatttttggccaggcacagtggctcatccctg

SEQ ID NO: 38365 - DNA, 201 bp, Homo sapiens
tttaaacaagaatccactgttgctactgaaagggtatttatccaagttttgttttgcatcatatatttaagttatcaaagtagtagattaatgtttttttwaaaaaatccttaaagctcttttaagacctaactgtaaacctgaaacaaagccaagtaaaaacttggtttaacttcttatagaacagctttacttaaacat

SEQ ID NO: 38366 - DNA, 201 bp, Homo sapiens; identical to SEQ ID NO: 5737

SEQ ID NO: 38367 - DNA, 201 bp, Homo sapiens
gttgttgatatcatagctaatagccttgaaatttagatatgtgaaaaaaaaaagcctcaagtctccatttccttaaagacaaattacagtcagtaccaagkgctaagttctagttagttggtatcctgaattgaaaatgtgaagcggccaggtgcagtggctcatgcctgtaatcccagcactttgggaggctgaggcagg

SEQ ID NO: 38368 - DNA, 201 bp, Homo sapiens; identical to SEQ ID NO: 5739

SEQ ID NO: 38369 - DNA, 201 bp, Homo sapiens; identical to SEQ ID NO: 5738

SEQ ID NO: 38370 - DNA, 201 bp, Homo sapiens; identical to SEQ ID NO: 5741

SEQ ID NO: 38371 - DNA, 201 bp, Homo sapiens
cctgctccgcggacttgtacactccagacaccatctcgttatggagaagcaaaaacaacgcctcatccgccatttcctgctaattcttccaagcttcgagktttggctcccgtttgagctggtctgggggttccagctcgcgcctcagcgacttcgccggcgccgcggctccgtcaggccgccattctatccctgtggcta

SEQ ID NO: 38372 - DNA, 201 bp, Homo sapiens
ttggcctgtgagaagacccggactgctgattcccgctctcggccctgcaggcccggaactgcagcacaaagccccttcccgctccggcggacacccggccygttgctggccccgagaccctgccgggacgcaacaagccgccttaccccagcttcctgtccacgtgcagcctcctcggggatggcgggatggggacctgat

SEQ ID NO: 38373 - DNA, 201 bp, Homo sapiens
gatttcctttggactttactcatgctgaaactactggtactttactaaatatgttggtttgaacaaaacctgtgataaaatcaataacccagtgtttgtcrtctttgttttgtttaatgttgtaatagactagatttctgtataaatatagttatcctgaaaaactggaggttgaagaatatattaagtttaccaattttg

SEQ ID NO: 38374 - DNA, 201 bp, Homo sapiens
ggcttggctaagtcccactctgatgtgatcacgttaaaacggtgtaaggcacattacatcataggttaaaaggcctagaaaactccgcgctccccttgccrgaactgcagactcgcgagcctaagtctccgagaactcagggattgtgaaacccgccccgactctgcgctagcagcgggatccaggcacccgcagctaact

SEQ ID NO: 38375 - DNA, 201 bp, Homo sapiens
acaaaggctgcaggttcttcccccttccggtcgctgagtggttgaggccggaagacaacgctcatcgtcattggctgagcccggctgtcagtcctttcgcrcctcggcggcgcggcatagcccggctcggcctgtaaagcagtctcaagcctgccgcagggagaagatggcggtcgccgtgagaactttgcaggaacagct

SEQ ID NO: 38376 - DNA, 201 bp, Homo sapiens; identical to SEQ ID NO: 5717

SEQ ID NO: 38377 - DNA, 201 bp, Homo sapiens
ctgagatgcgatccggccgctgggcgggggcgaaaaaaacaacttccggtcccctctaccccggcattcggccagctctatgatcactgagttcctctctyccaagcccggagaggccagcgcccagatatgaggaaggttcccctctcaccacgatgtcgggggcagagcaagataaaataagacctaaagctcccgcct

SEQ ID NO: 38378 - DNA, 201 bp, Homo sapiens; identical to SEQ ID NO: 5718

SEQ ID NO: 38379 - DNA, 201 bp, Homo sapiens
agggcggccagccttaagaagactggaacctcgaggcctgttcgcggggcggcgggtaaaaccctgttgtcgccgaggtggagaggccccaggtcccctcsgtagagcgctggtctcaggtccctgaggaaggagagcgaggcctgggtgcgccggcatgctttcttggcctgtgagaagacccggactgctgattcccgc

SEQ ID NO: 38380 - DNA, 201 bp, Homo sapiens
actaactattgaacacagcatcctacttatccttctccataaagttaaattgccaaggctcctaggaatagatcctatggaagcaaggacagtgagtgtgtgtgtgtgtgtgtgtgtgtgtgtgtgttttgagacagagttttgctcttgttgcccaggctggagtgcaatggcactatctcagctcactgcaaccccgcc

SEQ ID NO: 38381 - DNA, 201 bp, Homo sapiens
tactaactattgaacacagcatcctacttatccttctccataaagttaaattgccaaggctcctaggaatagatcctatggaagcaaggacagtgagtgtgtgtgtgtgtgtgtgtgtgtgtgtgtgttttgagacagagttttgctcttgttgcccaggctggagtgcaatggcactatctcagctcactgcaaccccgc

SEQ ID NO: 38382 - DNA, 201 bp, Homo sapiens
gaactcgggaggcggaggttgcggtgagctgagatcgcgccactgcactccagcctgggcaacaagagtgaaactccgtctcaaaaaaaaaaaaaaaaaaagagctcccgcggccacctccttgttaattagcaatagaagttaaaaaaattcttttggcttcatcaaaagcatccacttcctgccatatgttcttcaaat

SEQ ID NO: 38383 - DNA, 201 bp, Homo sapiens; identical to SEQ ID NO: 5724

SEQ ID NO: 38384 - DNA, 201 bp, Homo sapiens
gcggggcctggtggtgcatgcctgtaatcccagctactcgggagtctgaggcaggagaatcgcttgaactcgggaggcggaggttgcggtgagctgagatsgcgccactgcactccagcctgggcaacaagagtgaaactccgtctcaaaaaaaaaaaaaaaaaaagagctcccgcggccacctccttgttaattagcaat

SEQ ID NO: 38385 - DNA, 201 bp, Homo sapiens; identical to SEQ ID NO: 5725

SEQ ID NO: 38386 - DNA, 201 bp, Homo sapiens; identical to SEQ ID NO: 5726

SEQ ID NO: 38387 - DNA, 201 bp, Homo sapiens
tggtctgagctcaaagcaatccacccacctcagcctcccagagtgctgggatgacaggtgtgagccactgtgcccggcctgcagatacctttacatagtgraaaaaaaaaaaaaaaaaaaaattttttttgagatggagtttggctcttcttgctcaggctggagtgtagtggcgtgatctcagctcactgcaacctccgc

SEQ ID NO: 38388 - DNA, 201 bp, Homo sapiens
tgagtggtatgccactccctgccccccccaagttctgttggtatttgactgaacagttgactatcagttccctcaaaacgcagttctgcactcatgataasctaaattttatccaaataaaggtcatgtgaagagtaaaattggaaaaattgtcaattagtaccattttttctgacttgtacttgaaaaacttaaccagtt

SEQ ID NO: 38389 - DNA, 201 bp, Homo sapiens
gaaccagaagcgggacaacacacacagacaccactaacaacagggccgctcccttaggtctggtcttaaccagctctaggccaggtgaagaggctaactcraccatgactgcgtgtctgtctcgccattgctttcttttctctagtatagatgctcagcgtctaatcagagactgattctcaactggcgtgaccaaaggac

SEQ ID NO: 38390 - DNA, 201 bp, Homo sapiens
aggtccattgaattgttcatagtgggtaaggtaatatgttcatatgcacacgtttgttttctaaaataattatgattcagtgattggtttgctgtgtttgstttttttttttaaataagataataagatattctaggccgggcgtggtggctcacgcctgtaatcccagcactttgggaggctgaggcaggcagatcatga

SEQ ID NO: 38391 - DNA, 201 bp, Homo sapiens
aaccagaagcgggacaacacacacagacaccactaacaacagggccgctcccttaggtctggtcttaaccagctctaggccaggtgaagaggctaactcarccatgactgcgtgtctgtctcgccattgctttcttttctctagtatagatgctcagcgtctaatcagagactgattctcaactggcgtgaccaaaggaca

SEQ ID NO: 38392 - DNA, 201 bp, Homo sapiens
tatatatgattttatgccaaaactggttctgttttacagaagttttatttttcatcagacataaagattgatctgttttcttcatcagttagaaaatgtgyagttctgtctgccacaatttctagtatgtagatttcccatggatctttgcttttataattttatgtcagtttgtggttacttaattgccataatcttttg

SEQ ID NO: 38393 - DNA, 201 bp, Homo sapiens; identical to SEQ ID NO: 5740

SEQ ID NO: 38394 - DNA, 201 bp, Homo sapiens; identical to SEQ ID NO: 5742

SEQ ID NO: 38395 - DNA, 201 bp, Homo sapiens; identical to SEQ ID NO: 5743

SEQ ID NO: 38396 - DNA, 201 bp, Homo sapiens; identical to SEQ ID NO: 5744

SEQ ID NO: 38397 - DNA, 201 bp, Homo sapiens
gatagagatggtgagttaggactgaaatcagtttagagctgtattaggaaagacaggctgggtgctatggctcacacctgtaatcccagcaatttgggagkctgagggtagaggatggatggcttgaagccaggagttcaagactgacctgggcatcagcaagaatctatctctacaaaaaatagaaaaatttagccatgt

SEQ ID NO: 38398 - DNA, 201 bp, Homo sapiens
ctcccaaagtgctgggattacaggcatgagccacggcgcccggctaacacgcagtagtcttcctactggagattacaaattagtgtttatggttgagtgcrgtggcctgtaattcccaacactttgggaggctgaggtggaaagattgcttgagcccaggagccagagaccaacctcggcaacatggcaaaaaactgtcta

SEQ ID NO: 38399 - DNA, 201 bp, Homo sapiens
tccccaggttgctcacagccttctcagagagaaaagacacccacacatgcaatgatgagaaaccaactctaatcataatgataatgcaatgaagggctcaktaaatgttagtatgcaccaggcattgttctgaactcattcaactacctaatattatggggtaggtatcagctaccccataataacatcccatttacagat

SEQ ID NO: 38400 - DNA, 201 bp, Homo sapiens
ctccacagcctgggtgacaaagtgagactccatctcaaaaaaaaaaaacaaaacaaaacaaggaggagtgtgtgaaggaaactttttggcccatgcctagytatggctcttatctcttctgatcactttcccctggagagaacttgtcacatgaccatacccgcctgcaagagagcctgggaagtacaactggacaggcat

SEQ ID NO: 38401 - DNA, 201 bp, Homo sapiens
ttggggccagatgcttcctcatttacatccagcacaggagggagccggagccagcgggcttccatggcccatctacagaagcaagaagccttttcccagayaccatcatgtttcagtggcccaaactcagtctcacatgcccattcctcagtcactgtggcaaaggagactgtaatggctttatgccagtcagagtggagt

SEQ ID NO: 38402 - DNA, 201 bp, Homo sapiens
agtcccagctactcaggaggctgaggcaggagcatggcgtgaacccgggaggcggagcttgcagtgagccgagatcgcgccactgcactccagcctgggtracagagcgagacttcatctcaaaaaaaaaaaaaaaaaaagaaaagaaaaaagaaaaaagaagactgtgcaaagttggcagggacctggggcagagaaaga

SEQ ID NO: 38403 - DNA, 201 bp, Homo sapiens
tccccttctggaaaactggcaggctggactcaatcactaagtgaccttccagctccaccatcgatgaaatgtataaatcagaccctgttcagagagattgmtctggtgtctcacccacctcctgtcagcctcaggctgcctagaccttagggggctctggaatgcagatgccgacgtaagcaggccttctgctggcaccgg

SEQ ID NO: 38404 - DNA, 201 bp, Homo sapiens
aagaagtctgaggcccagcatgaacagccggaagatggatgcccctttggtgccctgacgcagcgcctcctgcaggccctggtggaggtgagcagcctaasccaaaagaggaaccatatttactttgtgttttaatgtgttatgcttattttttatcggaatttatcatacatttattaggttggtgcaaaaataggttgg

SEQ ID NO: 38405 - DNA, 201 bp, Homo sapiens
gtgtgagtgatgacccagcgtgtctgcatgcacagactgagtgcagggttgttcagcacagaactgttcataccataaataacccaaatgtcctgctgaargggaatggttggctaaattggcataactccatatgatgaaataacttggggctattaatcatatagctgcaagtatagagaaatatagttaaatgacatg

SEQ ID NO: 38406 - DNA, 201 bp, Homo sapiens
ttgtccctgggaatccatggaccctccttgaggaaggctatgactcaagttgtattttagcatctaagaacctgggtaactgattgagagaaggcatctcmgtagtggtgacatcgaagtgaaggtttgctgagaggactcttctgttaaacagtatgtgactggcatgggtgatacagaagtgaatcagtatagatgaac

SEQ ID NO: 38407 - DNA, 201 bp, Homo sapiens
aattgaccagtgttttaggacatgttcttttgggaatccatcacagtgcctgccattcatttgatgtcaactcccatccatcttgttctgcattgatcacragggtataggtgacatcttgaggaagactgtggaatagctaccctttaggtaaagagatagggaagcaacccgaacaagtctctttgcttctcacagaca

SEQ ID NO: 38408 - DNA, 201 bp, Homo sapiens
ttcaggggccctgtctttatacctgctggttgaccttagacacaccctcacactctttcacctcattgagactcagttttctattctggctcaaacacaakagtttatctcatggaacagtctgggtacatgttgcaggttatctaaggtaggggaaggggcaggtctctatctcatatcatcagacagggaccccagctg

SEQ ID NO: 38409 - DNA, 201 bp, Homo sapiens
gccttaagcaactgtagggtcaggaaggcagaagaggacaaagggcgtatgtcgtgaagttccactgtggataggcaggtggacttgcttcatgcctcagmggctaagaggccgactacgtaccctcgaaatgctccaaagagcctaggagaccccacttccgggttcctacagggctcaggaaaagcccctacctgcttc

SEQ ID NO: 38410 - DNA, 201 bp, Homo sapiens
acgatctcgactcactgcaagctctgctttctgggttcacgccattctcctgcctcagcctcctgagtagctgggactacaggtgcccaccaccacgcccrgctaattttttgcatttttagtagagaagaggtttcaccgtgttagccaggatggtctcgatctcctgacgtcgtgatccgcccgcctctgcctcccaaa

SEQ ID NO: 38411 - DNA, 201 bp, Homo sapiens
ccgaactggacactaaaggtaggcctctcacctccctgccaaccccaggtcaggacttgaattccagaacttcagcccacctcccctcctttcctgtgccygcttagatgtggatgccctgctgaagaagtctgaggcccagcatgaacagccggaagatggatgcccctttggtgccctgacgcagcgcctcctgcaggc

SEQ ID NO: 38412 - DNA, 201 bp, Homo sapiens
gtattttggttgcagtagtggttacacaacttgactttttttttttaagacacgggatcttgctatattgtccaggctgaagtgcagtggctattcacagsagtgatcacagtgtactacggcctcgaacttctgggctcaagtgatcctcctgcctcagtgtcctgagcggatggtactacaggcgcatgccaccatacc

SEQ ID NO: 38413 - DNA, 201 bp, Homo sapiens
ttgtctggggtgggaaggagaggactgattacaaaagggcttgagggaactttttggggtgacggaaatgttctgtattttggttgcagtagtggttacayaacttgactttttttttttaagacacgggatcttgctatattgtccaggctgaagtgcagtggctattcacaggagtgatcacagtgtactacggcctcg

SEQ ID NO: 38414 - DNA, 201 bp, Homo sapiens
catcctggctaacacggtgaaaccccgtctctactaaaaatagaaaaaattagccgggcgtggtggcgggcgcctgtagtcccagctgctcgggaggctamggcaggagaatggcgtgaacccgggaggcggagcttgcagtgagctgagattgtgccactgcactccagcctgggtgacagagcaagactctgtctcaaa

SEQ ID NO: 38415 - DNA, 201 bp, Homo sapiens
tggggaggcatcggttgcaatgagccaagatcgtgccactgtattccagcctgggtgacagaaggagattccatccattaaaaaaaaaaaagccgggtgcrgtggctcaagcctgtaatcccagccctttgggaggccgaggcgggcagatcacaaggtcaggagattgagaccatcctggctaacacggtgaaaccccgt

SEQ ID NO: 38416 - DNA, 201 bp, Homo sapiens
tgtggcaggcagatcatctgaggtcaggagttcaagaccagcctgaccaacatggtgaaacgccgtctctactaaaaatacaaaaattagcctggcacggkggcatgcacctgtaatcctggctactcgggaggctgagccaggaaaatcacctgaactggggaggcatcggttgcaatgagccaagatcgtgccactgta

SEQ ID NO: 38417 - DNA, 201 bp, Homo sapiens
agaatggggtgcttggaactcaaagtcttagcagaacccaagagaaatagaagggaaggaaagagcatcagaaaggcgaggcaaggcatagcagtatagcvtggtgatcagggtgcagactcaagactagcggggttcaaattgcatcttggaagcataggcacatacccacccttacagagtctcagtttctttctctgt

SEQ ID NO: 38418 - DNA, 201 bp, Homo sapiens
tacaaaaaaattagccgggcatagtggcaggcgcctgtagtcccaactacttgggaggctgaggcaggagaatggcatgaacccaggaggcggagcttgcrgtaagccgaaattgtgccactgcactccacagcctgggtgacaaagtgagactccatctcaaaaaaaaaaaacaaaacaaaacaaggaggagtgtgtgaa

SEQ ID NO: 38419 - DNA, 201 bp, Homo sapiens
cacagtgtactacggcctcgaacttctgggctcaagtgatcctcctgcctcagtgtcctgagcggatggtactacaggcgcatgccaccatacccagcaartttttgcaacgcttttttttttgagacggagtcttactctgttgcccagtctggtgtgcagtggcacgatctcgactcactgcaagctctgctttctggg

SEQ ID NO: 38420 - DNA, 201 bp, Homo sapiens
cccctattccagctcccatgaagccaggtagcactgagggtgcaaggctcttaagacactactgtgaacagaacagactaggccttcgagacgccttccarggtgtagagtggtagttttcaacaggagacaattttgcctgccagggtacatttggtaatgtcgagacatttcctttctttcttttttaacctggggtca

SEQ ID NO: 38421 - DNA, 201 bp, Homo sapiens
ggcggatcacaaggtcaggagatcgagaccatcctggctaacatgatgaaaccccgtctctactaaaaatacaaaaaaattagccgggcatagtggcaggygcctgtagtcccaactacttgggaggctgaggcaggagaatggcatgaacccaggaggcggagcttgcagtaagccgaaattgtgccactgcactccaca

SEQ ID NO: 38422 - DNA, 201 bp, Homo sapiens
tttggattagggggtcagagtgtctaggctggtaggtaaaaaaaaaatccctgatcattacattagaaaagtatggagatgggaaaaaaaaaaaaaaaaaagaaaagtatggagatggaatctcagataacaattatctgaccattccttaaactaccagtgttttcaacaatgccacaggagagacttcatcaacagccc

SEQ ID NO: 38423 - DNA, 201 bp, Homo sapiens
ctgggcgtaattgtcactccagtcccacagaataagagcaaggaggccgggcgcggtggctcacgcctgtaatcccagcactttgggaggctgaggcgggyggatcacaaggtcaggagatcgagaccatcctggctaacatgatgaaaccccgtctctactaaaaatacaaaaaaattagccgggcatagtggcaggcgc

SEQ ID NO: 38424 - DNA, 201 bp, Homo sapiens
ggcatcatctcttaatcctcagaacatcccagggaggtaggtactattgttatccccatttttcagattcagacttttaatggggaaacagaccgagactwcttttgtccccattttacagatggaaaaactgagactgaaaaaggtcaaataacatgttcaggggcatataagtagagaatggtaaagcctgggcttgaa

SEQ ID NO: 38425 - DNA, 201 bp, Homo sapiens
gggcatcatctcttaatcctcagaacatcccagggaggtaggtactattgttatccccatttttcagattcagacttttaatggggaaacagaccgagacktcttttgtccccattttacagatggaaaaactgagactgaaaaaggtcaaataacatgttcaggggcatataagtagagaatggtaaagcctgggcttga

SEQ ID NO: 38426 - DNA, 201 bp, Homo sapiens
aaaattaaatcgtatcatttaatgttgtaacccagattatctcagttatgtatgtaccagaatgaattttattttattttattttattttattttatttttgagacgaagtcttgctctgctgccaggctggagtgcggtggcacgatcttggctcactgcaacctccgcctcccaggttcaagcaattctcctgcctcag

SEQ ID NO: 38427 - DNA, 201 bp, Homo sapiens
aaaaattaaatcgtatcatttaatgttgtaacccagattatctcagttatgtatgtaccagaatgaattttattttattttattttattttattttatttttgagacgaagtcttgctctgctgccaggctggagtgcggtggcacgatcttggctcactgcaacctccgcctcccaggttcaagcaattctcctgcctca

SEQ ID NO: 38428 - DNA, 201 bp, Homo sapiens
gaagttgcagtgagccgagatcacgccactgcactccagcctgggcaacagagcaagactccgtctccaaaaaaaaaaaaaagatataaaagtcacctcaygcctgtaatcccaacactttgggaggctgtggcaggcagatcatctgaggtcaggagttcaagaccagcctgaccaacatggtgaaacgccgtctctact

SEQ ID NO: 38429 - DNA, 201 bp, Homo sapiens
accgaactggacactaaaggtaggcctctcacctccctgccaaccccaggtcaggacttgaattccagaacttcagcccacctcccctcctttcctgtgcycgcttagatgtggatgccctgctgaagaagtctgaggcccagcatgaacagccggaagatggatgcccctttggtgccctgacgcagcgcctcctgcagg

SEQ ID NO: 38430 - DNA, 201 bp, Homo sapiens; identical to SEQ ID NO: 5746

SEQ ID NO: 38431 - DNA, 201 bp, Homo sapiens
aagtttagcttttctcttaagggggtaaggaactactggggctttctgaggaggaagttcatgactgcagctgcatgatggctctgtggagaatgatttgragagggaagtgagacatacagcagactgtatcacaagcaaagagtatcacaagcgttggactgacattagatggagtggataatggaactgaaaaaaaac

SEQ ID NO: 38432 - DNA, 201 bp, Homo sapiens
gtttatctcatggaacagtctgggtacatgttgcaggttatctaaggtaggggaaggggcaggtctctatctcatatcatcagacagggaccccagctgayggtggccttgcagtctgcacaaggtcactctgggcgtaattgtcactccagtcccacagaataagagcaaggaggccgggcgcggtggctcacgcctgta

SEQ ID NO: 38433 - DNA, 201 bp, Homo sapiens
caccgacccactgccctgaggccgaacagccgggggtccctggccgggggcccggctctctcaccatcgcgggcgctggctgggccggaaagcggaagtayggaagtggccagccccgcgatgcctgccctttcgcgagaagcgcagctacggtctccgcccggacttccggacggtaccatctatgctccgagcggggta

SEQ ID NO: 38434 - DNA, 201 bp, Homo sapiens; identical to SEQ ID NO: 5750

SEQ ID NO: 38435 - DNA, 201 bp, Homo sapiens
agaaaatttagaaaatacagaaaaatgttgagggagaatcctcccataggtgagctgtcatgatcagatgtgctcatgacatggcgctgcatccaggcctktcttcctcccgttatctacaggatcaagtccacgcatcccagtccttgctggcacagctccagtgcccctctccattttcctcggccatatccctcttca

SEQ ID NO: 38436 - DNA, 201 bp, Homo sapiens; identical to SEQ ID NO: 5745

SEQ ID NO: 38437 - DNA, 201 bp, Homo sapiens
taaaaattaaatcgtatcatttaatgttgtaacccagattatctcagttatgtatgtaccagaatgaattttattttattttattttattttattttatttttgagacgaagtcttgctctgctgccaggctggagtgcggtggcacgatcttggctcactgcaacctccgcctcccaggttcaagcaattctcctgcctc

SEQ ID NO: 38438 - DNA, 201 bp, Homo sapiens
ttaaaaattaaatcgtatcatttaatgttgtaacccagattatctcagttatgtatgtaccagaatgaattttattttattttattttattttattttatttttgagacgaagtcttgctctgctgccaggctggagtgcggtggcacgatcttggctcactgcaacctccgcctcccaggttcaagcaattctcctgcct

SEQ ID NO: 38439 - DNA, 201 bp, Homo sapiens
aattaaaaattaaatcgtatcatttaatgttgtaacccagattatctcagttatgtatgtaccagaatgaattttattttattttattttattttattttatttttgagacgaagtcttgctctgctgccaggctggagtgcggtggcacgatcttggctcactgcaacctccgcctcccaggttcaagcaattctcctgc

SEQ ID NO: 38440 - DNA, 201 bp, Homo sapiens
cactttgggaggccgaggcgggcggatcacgaggtcaggagatcgagactatcctggctaacatggtgaaaccccttcgctactaaaaatacaacaaattwgccgggcgtggtggcgggcacctgtagtcccagctactcaggaggctgaggcaggagcatggcgtgaacccgggaggcggagcttgcagtgagccgagat

SEQ ID NO: 38441 - DNA, 201 bp, Homo sapiens; identical to SEQ ID NO: 5757

SEQ ID NO: 38442 - DNA, 201 bp, Homo sapiens
ggattataggcatgagcccagccaaaaaaaaaaaaaaaattactcaaacatcttggagcatatagccttgtcctaatttaggattacttctctgaaattgwttgccagaagaggagtccctgaatcaaaaggcctcgacattatttaagcctttgatgcatattgccaaattgctttccaaaggatctttagcaaatcatt

SEQ ID NO: 38443 - DNA, 201 bp, Homo sapiens
tcataccttgtgttaaccaatcttgtcttttcccctgggttctgtcctgccaacccactgaccctattttcttaactccaaattgggaatcaccattcagytggcagcaagacaaaatgtcaactgcagctttcctgactactgcaggacataagttcatggcaccttctagacagcagccatctctgtgtgctgcacccc

SEQ ID NO: 38444 - DNA, 201 bp, Homo sapiens
tactgtgctgacatcaccagcgaggaggtccgcacacttgaggagttactgaagcccccagaagatgaggctgagcattacaaggtagaaactctgggccytgatagacatgatgcggaacaagagagttcagaggtgcctgagaagtaaagctaccaaagccatgcatcatcttccttccccaaccctgcccagtctgct

SEQ ID NO: 38445 - DNA, 201 bp, Homo sapiens
tgtcttggccctagaaagcatctgtcttgcacatcatggtctccccagagttccaaatgccttacagctgactttcagcaacaccagggtgagtgagaacrgggagggtgagctctgacccacagtgggtccccagcccctgtctgctcctgagtactctgggcaccaagtgctctgggtcccagttggctcctgctgaaa

SEQ ID NO: 38446 - DNA, 201 bp, Homo sapiens
ttactaggtaaaaagaggatggggaaagacccaggagcctctgtagattctagatcctaatttattcactagaggaaagagatattctgtgttttcccttstccccctcagtgacactttctgtaaatttcagatcctcaccgactggcaggataagaaaggtgacagacgattcctgaagctgggtcgagaccatgaact

SEQ ID NO: 38447 - DNA, 201 bp, Homo sapiens
tgcctcccactaggtgctgggccaagctgctgcaatttctcagtgactcattgtccccaggttgctcacagccttctcagagagaaaagacacccacacakgcaatgatgagaaaccaactctaatcataatgataatgcaatgaagggctcagtaaatgttagtatgcaccaggcattgttctgaactcattcaactacc

SEQ ID NO: 38448 - DNA, 201 bp, Homo sapiens
atgaggctgagcattacaaggtagaaactctgggccttgatagacatgatgcggaacaagagagttcagaggtgcctgagaagtaaagctaccaaagccaygcatcatcttccttccccaaccctgcccagtctgctgtctgctccatcagtgcctccagacacctaggcccaaactcagctttctccgtgcactgcctcc

SEQ ID NO: 38449 - DNA, 201 bp, Homo sapiens
tctgaagtttgcctttcatttttggctaccatttcggagtagagtagggttttcactttttgaaaaaaagttaaaaaaaagtaacaaaagttaaagttttktttttttttttttttttttgagacagagtctggctctgtcattctggctggagtgcaatggtgcaatctcagctcaatgcagtctccgcctaccaggttc

SEQ ID NO: 38450 - DNA, 201 bp, Homo sapiens
tgtcttgacaacaacccaggagggaggagctattttcgttgtttaccagatgaggaaataaaggcccagtgaagcgaaatgctctgctgaaggtcacacastcaataaacagcaagctgagacttgaacctgtggttgaatcaaagcctctttctataatagtttgttttctctgaaaggtgagaagaagaaaacacagat

SEQ ID NO: 38451 - DNA, 201 bp, Homo sapiens; identical to SEQ ID NO: 5747

SEQ ID NO: 38452 - DNA, 201 bp, Homo sapiens
tggactgccagcaacagcatcacttaggaaattgataaaaatgcaaattctcaggccacagacctactgaatcaacagctctgggtgtatagtcaggcgcygtggctcacacctgtaatcccagcactttgggaggccaaggaaggcggatcatctgaggtcaggagttcaagaccagcctggccaatatggtgaaaccct

SEQ ID NO: 38453 - DNA, 201 bp, Homo sapiens
aagctagaaagtaggttgaagaccaggctgggcaagggtttgaatggcagattaaggagcatggactttattctctagacaatggtgctccaagtgtggtycctggactgccagcaacagcatcacttaggaaattgataaaaatgcaaattctcaggccacagacctactgaatcaacagctctgggtgtatagtcaggc

SEQ ID NO: 38454 - DNA, 201 bp, Homo sapiens; identical to SEQ ID NO: 5754

SEQ ID NO: 38455 - DNA, 201 bp, Homo sapiens
gaaaatttagaaaatacagaaaaatgttgagggagaatcctcccataggtgagctgtcatgatcagatgtgctcatgacatggcgctgcatccaggccttycttcctcccgttatctacaggatcaagtccacgcatcccagtccttgctggcacagctccagtgcccctctccattttcctcggccatatccctcttcat

SEQ ID NO: 38456 - DNA, 201 bp, Homo sapiens
gactgcagatgtgaacccccatgtgcagccaagactttattcttctagagcagttttaagttcacaacaaaattgagagaaaggtacagagaattcccgtrtctccctgtccccacatgtgcacagcctcccccgtgatcaacatgagttaatatttttcaggagcttaagatagtgccatgtaagtgtaggtcagtaact

SEQ ID NO: 38457 - DNA, 201 bp, Homo sapiens
aggcgtgtgccaccacgcccagctaatttttgtatttttagtagagacagggtctcaccatgttggtgagaactcctgggctcaagtgatcctcctgcctyggcctcccaaagtgctgggattataggcatgagcccagccaaaaaaaaaaaaaaaattactcaaacatcttggagcatatagccttgtcctaatttagga

SEQ ID NO: 38458 - DNA, 201 bp, Homo sapiens
actaaaaatttttaaaaatcagctaggcatggtggcacatgcctatagtcctactcaggaggctgatgtgggaggattgcttgatcctgggaggtagaggytgcagtgagcttgatcaggccactgtactccagcctgggtgacagagtgagacctgtctcaaaaaaaaaaaaaaaaaaaaaaaaagaagtaatgggcaat

SEQ ID NO: 38459 - DNA, 201 bp, Homo sapiens
ccgcctcccgggttcaggcagttctcctgcctcagcctcctgagtagttgggattacaggcatgcactaccatgccaggctaatcatttggccattcttaytgtctcttagatattgtgctgggggccagcaagagaggcagagcaagggacttgcagattactagcagatgatcagtaaagataagtgccattaaaagga

SEQ ID NO: 38460 - DNA, 201 bp, Homo sapiens
cttttgggaatccatcacagtgcctgccattcatttgatgtcaactcccatccatcttgttctgcattgatcacgagggtataggtgacatcttgaggaasactgtggaatagctaccctttaggtaaagagatagggaagcaacccgaacaagtctctttgcttctcacagacaagtgctgtgtcttaacttcatagagc

SEQ ID NO: 38461 - DNA, 201 bp, Homo sapiens
aaaatttgatacacacagaaaatctgaaagaatcatacaataaacatcagtatattctccacctagactaattaactgttaacattttgttggagatctgkgatttttatttgctcatcacaagaaattgaccagtgttttaggacatgttcttttgggaatccatcacagtgcctgccattcatttgatgtcaactccca

SEQ ID NO: 38462 - DNA, 201 bp, Homo sapiens
ccaaagggaaaggcaggttttcactgaccttgggaagccctgggaacctccaaggtgggcccttctccaagctggctcttgagtctgacgggcctgcctcycgctgcagtgtgccgcatactaagtccctggagagccgcatcaaggaggagctaattgcccagggccttttggagtctgaggaccgccccgcagaggact

SEQ ID NO: 38463 - DNA, 201 bp, Homo sapiens
ctaacacggtgaaaccccgtctctactaaaaatagaaaaaattagccgggcgtggtggcgggcgcctgtagtcccagctgctcgggaggctaaggcaggaraatggcgtgaacccgggaggcggagcttgcagtgagctgagattgtgccactgcactccagcctgggtgacagagcaagactctgtctcaaaaaaaaaag

SEQ ID NO: 38464 - DNA, 201 bp, Homo sapiens; identical to SEQ ID NO: 5756

SEQ ID NO: 38465 - DNA, 201 bp, Homo sapiens
cattgtctacaaaacatttccccagtctgaagtttgcctttcatttttggctaccatttcggagtagagtagggttttcactttttgaaaaaaagttaaamaaaagtaacaaaagttaaagttttgtttttttttttttttttttgagacagagtctggctctgtcattctggctggagtgcaatggtgcaatctcagctc

SEQ ID NO: 38466 - DNA, 201 bp, Homo sapiens
tgttgcccaggctggagtgcagtggcataatctaaatcactgcaacctcagcctcccaggttcaagtgattctcctgcctcaacctcccgagtagctgggrttacaggcgtgtgccaccacgcccagctaatttttgtatttttagtagagacagggtctcaccatgttggtgagaactcctgggctcaagtgatcctcct

SEQ ID NO: 38467 - DNA, 201 bp, Homo sapiens; identical to SEQ ID NO: 5751

SEQ ID NO: 38468 - DNA, 201 bp, Homo sapiens
gtgaacccgggaggcggagcttgcagtgagccgagatcgcgccactgcactccagcctgggtaacagagcgagacttcatctcaaaaaaaaaaaaaaaaaaagaaaagaaaaaagaaaaaagaagactgtgcaaagttggcagggacctggggcagagaaagacttaacaacagcttagagggtcaggaaaggcttcaggg

SEQ ID NO: 38469 - DNA, 201 bp, Homo sapiens
tggactaatatatagcaaaagattgggaataatatataacttgtgcacctaatagaaaagtgcacagatcataaatgtacagttttcacaaatgagcttgyattaccagcctggagattacaaaatgaaacattactatatcctagaagcccctctcatgcccctgtttttctccaactttccccaaaggtagccttactc

SEQ ID NO: 38470 - DNA, 201 bp, Homo sapiens
gggcggatcacgaggtcaggagatcgagactatcctggctaacatggtgaaaccccttcgctactaaaaatacaacaaattagccgggcgtggtggcgggyacctgtagtcccagctactcaggaggctgaggcaggagcatggcgtgaacccgggaggcggagcttgcagtgagccgagatcgcgccactgcactccagc

SEQ ID NO: 38471 - DNA, 201 bp, Homo sapiens
ctccaggcagagggcagcctgcaatgtggcccgcacggcactcaggtaggggcggagagtggcagtctataggaaataacacagaggaaagggaagatcaraatctgtcacgccaaacccaccgatcccctattccagctcccatgaagccaggtagcactgagggtgcaaggctcttaagacactactgtgaacagaaca

SEQ ID NO: 38472 - DNA, 201 bp, Homo sapiens
agacagacaatcaaaacactaggccgcaagagcaataagaagactgcaggccgggcacggtggctcacgcctgtaatcccagcactttgggaggccgaggygggcggatcacgaggtcaggagatcgagactatcctggctaacatggtgaaaccccttcgctactaaaaatacaacaaattagccgggcgtggtggcggg

SEQ ID NO: 38473 - DNA, 201 bp, Homo sapiens
ccgcagcgaggaggtagagggggcgggggtcgcactagggtgtccctagagaacgaggactctgaaggcgggacatttgggcgacccccgggcggggccarccattaaacagtcccacttctgtgccagacactgaactgggctcttgacgggcatcatctcttaatcctcagaacatcccagggaggtaggtactattgt

SEQ ID NO: 38474 - DNA, 201 bp, Homo sapiens; identical to SEQ ID NO: 5753

SEQ ID NO: 38475 - DNA, 201 bp, Homo sapiens; identical to SEQ ID NO: 5748

SEQ ID NO: 38476 - DNA, 201 bp, Homo sapiens; identical to SEQ ID NO: 5755

SEQ ID NO: 38477 - DNA, 201 bp, Homo sapiens
gggcggagagtggcagtctataggaaataacacagaggaaagggaagatcaaaatctgtcacgccaaacccaccgatcccctattccagctcccatgaagmcaggtagcactgagggtgcaaggctcttaagacactactgtgaacagaacagactaggccttcgagacgccttccaaggtgtagagtggtagttttcaac

SEQ ID NO: 38478 - DNA, 201 bp, Homo sapiens
cccgtatctccctgtccccacatgtgcacagcctcccccgtgatcaacatgagttaatatttttcaggagcttaagatagtgccatgtaagtgtaggtcastaactgctttttggtcacgactgtatgacacaatccacaggcatgccagcctgggctggtgggtaggctcggtcttgaagagggaggggttgttctctgg

SEQ ID NO: 38479 - DNA, 201 bp, Homo sapiens
caagtctctttgcttctcacagacaagtgctgtgtcttaacttcatagagccctgacaggacagggcacattcattcatttggccttttttttttttttttgagacggtgtctcactctgttgcccaggctggagtgcagtgccatgatctcggctcactgcaacctccgcctcccgggttcaggcagttctcctgcctca

SEQ ID NO: 38480 - DNA, 201 bp, Homo sapiens
aagtaacaaaagttaaagttttgtttttttttttttttttttgagacagagtctggctctgtcattctggctggagtgcaatggtgcaatctcagctcaaygcagtctccgcctaccaggttcaagtgattctcctgcatcagcctcccgagtagctgggactacaggcatgcgccaccacacctggctaatttttgtatt

SEQ ID NO: 38481 - DNA, 201 bp, Homo sapiens
agactagatcggtatcaccagggaaggtgtgacgaagagggagatggtcatccaaagtcacaactcccaggaatgcccacacgtatgaaaaaggcccacaygtatgaaaaaggcccacatgtatgaaaaagggaggacttccaggaagggagggatgagcagtatcacagctaacatacactaaggctgacacagttcagt

SEQ ID NO: 38482 - DNA, 201 bp, Homo sapiens
aattagccgggcatagtggcaggcgcctgtagtcccaactacttgggaggctgaggcaggagaatggcatgaacccaggaggcggagcttgcagtaagccraaattgtgccactgcactccacagcctgggtgacaaagtgagactccatctcaaaaaaaaaaaacaaaacaaaacaaggaggagtgtgtgaaggaaactt

SEQ ID NO: 38483 - DNA, 201 bp, Homo sapiens
tcgggaggctaaggcaggagaatggcgtgaacccgggaggcggagcttgcagtgagctgagattgtgccactgcactccagcctgggtgacagagcaagaytctgtctcaaaaaaaaaagaagatataaaactatgttttaatgatgaaaataaataaaacatgctccattaaagaaaatttagaaaatacagaaaaatgt

SEQ ID NO: 38484 - DNA, 201 bp, Homo sapiens
gaaagttatcgaagccaggagactagatcggtatcaccagggaaggtgtgacgaagagggagatggtcatccaaagtcacaactcccaggaatgcccacaygtatgaaaaaggcccacatgtatgaaaaaggcccacatgtatgaaaaagggaggacttccaggaagggagggatgagcagtatcacagctaacatacact

SEQ ID NO: 38485 - DNA, 201 bp, Homo sapiens; identical to SEQ ID NO: 5749

SEQ ID NO: 38486 - DNA, 201 bp, Homo sapiens
ctgctggagccaaaagatgcctcctttatgagtgtggaggaagctgggttgtcatgaggagggcggattagttccagtacctcaagtctccaaatttaatwcaaaacaattctgattccttatcactagtttggaggcaaagccttttgtgtcttggccctagaaagcatctgtcttgcacatcatggtctccccagagtt

SEQ ID NO: 38487 - DNA, 201 bp, Homo sapiens
cgggcgtggtggcgggcgcctgtagtcccagctgctcgggaggctaaggcaggagaatggcgtgaacccgggaggcggagcttgcagtgagctgagattgygccactgcactccagcctgggtgacagagcaagactctgtctcaaaaaaaaaagaagatataaaactatgttttaatgatgaaaataaataaaacatgct

SEQ ID NO: 38488 - DNA, 201 bp, Homo sapiens
actgtgccaggccctttacccacccctcctatctgatgcttaccatgcacctccaaggagagtaatattccagcctgcagatgacacagagactcaaagaratgctgtgccttgctgaggccatgcagccttgatgcaggaatagttgctgcccccaggtagcaccatccctggcagagttcttacaatcatatcagtgtc

SEQ ID NO: 38489 - DNA, 201 bp, Homo sapiens
tcattgtccccaggttgctcacagccttctcagagagaaaagacacccacacatgcaatgatgagaaaccaactctaatcataatgataatgcaatgaagkgctcagtaaatgttagtatgcaccaggcattgttctgaactcattcaactacctaatattatggggtaggtatcagctaccccataataacatcccattt

SEQ ID NO: 38490 - DNA, 201 bp, Homo sapiens
gtaactgctttttggtcacgactgtatgacacaatccacaggcatgccagcctgggctggtgggtaggctcggtcttgaagagggaggggttgttctctgraggtgggctgaccctggcacctggctggctggtccccacaggctggcaaaggaggaggtgagccggcaggagctgaggcagcgggtgcgcatggctgaca

SEQ ID NO: 38491 - DNA, 201 bp, Homo sapiens
atgcagatgccgacgtaagcaggccttctgctggcaccggaacacctgaaacaacagtgtttaaaaacaagagtttggccccagcctgctccagatctccycctcactaactgtgggatcctgggatcatctttgagcctcattttcctcacgggtaacatatgaataatagtacatattttgcagggttgttaggattaa

SEQ ID NO: 38492 - DNA, 201 bp, Homo sapiens
taccagggagtacccccactcgccccttcctcacctcgggcccccgccccgtctctttttcccaccctcatcgtgtccccacaacccccggacatccctcrgccccgcgcccctgcggcaaagccacatctcccaccgacccactgccctgaggccgaacagccgggggtccctggccgggggcccggctctctcaccatc

SEQ ID NO: 38493 - DNA, 201 bp, Homo sapiens
gaatgaattttattttattttattttattttattttatttttgagacgaagtcttgctctgctgccaggctggagtgcggtggcacgatcttggctcactrcaacctccgcctcccaggttcaagcaattctcctgcctcagcctcccgagtagctgggactacaggtgcataccaccatgcccagcttatttttgtattt

SEQ ID NO: 38494 - DNA, 201 bp, Homo sapiens
cgtgttagccaggatggtctcgatctcctgacgtcgtgatccgcccgcctctgcctcccaaagtgctgggattacaagcgtgagccaccacgcctggcctytgtcaacagttatagaaagtaaacctaaaaagggtgactggctccgtgacgcctgtcctttcatgaataaaacagatgtagtctcatgtaatacctcaat

SEQ ID NO: 38495 - DNA, 201 bp, Homo sapiens
tctgctttctgggttcacgccattctcctgcctcagcctcctgagtagctgggactacaggtgcccaccaccacgcccggctaattttttgcatttttagyagagaagaggtttcaccgtgttagccaggatggtctcgatctcctgacgtcgtgatccgcccgcctctgcctcccaaagtgctgggattacaagcgtgag

SEQ ID NO: 38496 - DNA, 201 bp, Homo sapiens
actttcccctggagagaacttgtcacatgaccatacccgcctgcaagagagcctgggaagtacaactggacaggcattgcctagctgccgtggaggaaagragagtatggcattcggacagctagcatctccgccacagcaggcctagcacactgcctggtgcgttgcagacgcttcacaaaccttagctgttcattacca

SEQ ID NO: 38497 - DNA, 201 bp, Homo sapiens
gagcgcggtggcacgatctcggctcactgcaagctccacctcccgggttcatgcccttctcctgcctcagcctcccaagtagctgggactacaggcgcccrccaccacacccggctaactttttgtatttttagtagagacagggtttcacggtgttagccaggatggtctcaatctcctgaccttgtaatctgcccgcct

SEQ ID NO: 38498 - DNA, 201 bp, Homo sapiens
gatcacttgagcccaggatttcaagaccagcctgggcaacatggcaaaaccctgtctctacaaaatatgcaaaaaaaaattagccaggtgtggtggcatgygcctgtagtcccagctacttgggaggctgaggtgggaggatgatctgagctcaggaagcagatattgtagtgagccgagatcttgccactgcactccagc

SEQ ID NO: 38499 - DNA, 201 bp, Homo sapiens
tctatctaaacatcagaattacttggagcttgttaaaaatacagctattggccgggcatggtggtcacacctgtaatcccagagctttgggaggctaaggytggcagatcacttgaggtcaagagttcgagatcagcctggccaacataaccaaaccctgtctctactaaaaatacaaaaaaattagcaggtcatggtggc

SEQ ID NO: 38500 - DNA, 201 bp, Homo sapiens
ggctggcgggatcctccatatgctgaacgctggtcccctgggcccccttatttctttctctatactttgtctctgtgtctttttcttttccaagtctctcrttccacctaacaagaaacacccacaggtgtggagggacaacccaccccttcagaaagtaatagtttatttcatttatttatattttttctctccttttca

SEQ ID NO: 38501 - DNA, 201 bp, Homo sapiens
tcaaagaaggggaaaccttacttgtttctcaggagttggtctaggttatagtcctggtgttagtgtttggcctgaagcaggtcagtgttcctaagagtttmctttttagtgggcgagttcaagggactttaacttgtgtgatttgtctgcttattccagagaaagctctgggcttgtactcctctccagctgtccccagac

SEQ ID NO: 38502 - DNA, 201 bp, Homo sapiens
ctgtgccctccagccctgaccccgtgctcagcactgtccactgggtgtgagtcacaggtcgaggcccacctttcttggcttcaggatgctgggtgccaccytgaaatcaaggttcggtgggagggaaatgaagaccttagccgtgggtagagtcctcaaggccttgcctgtggtcgacagggccttagtgcccaccagctt

SEQ ID NO: 38503 - DNA, 201 bp, Homo sapiens
aggctgaggcaggtggatcacgaggtcaggagttcaagaccagtctggccaagatggtgaaaccctgtttcaactaaaaactacaaaaattagctgggcayggtggcaggcgcctgtaaaaccagctactcgggaggctgaggcaggagaatcgcttgaacctgggaggcagaagttgcaatgagccaagatcatgccact

SEQ ID NO: 38504 - DNA, 201 bp, Homo sapiens
cctcttgtaatttttctttcttactttccaggaaaaccaggagagctgacgttgttctcagtgctgccagagctgagccagtccctagggctcagggagcrggagcttcaggttgtccgagcatctgggaagtaagtggtaggggtgacaggaagctaggagtacaggcatccatctgtggtggggaaacagctgcttggg

SEQ ID NO: 38505 - DNA, 201 bp, Homo sapiens
ggcagggggaaggcacgtgcgggatctggatcaggtagatgttacccgaaaacagccccgttggcctctctgagcctcggtgccctccgctgtagaatggraccggtcgtacctgaattttcgaggtcagcccagacattgtgaggcatttgtcagaggccgcaggatttgggaagaggcgtccggagataggaatgggtg

SEQ ID NO: 38506 - DNA, 201 bp, Homo sapiens
gcccaaaggcccacagccacctactggtgagaggtgctgggaggttcctagagtggtggggaggtcccagcaagccaccctgtgacctcctcctgcccctktctcagtgctgtcactgatgggatcccagctgcttctgaggggaagatccaggctgccctgaaactggaacacattgatggggtcaatctcgtgagtccg

SEQ ID NO: 38507 - DNA, 201 bp, Homo sapiens
acttcacttgtttctttttatttggtgttggatccaggacaagggcagtggggaatcgaagcaggggcttccctagcttcatatcccccaggcccctgcgyctctggaatgtaccaacaaggggcaggggtttcagggggctcagcctcttcatggggcaggcctcagccctgggtttgtcacagtctggccttgaatttg

SEQ ID NO: 38508 - DNA, 201 bp, Homo sapiens
gctctccctaaaagcataggaaggcatttctgcatttccttcctgggcggaggaaaagccccgcctcctcaggctctgagtcccgcccggtcaccattccsattgacactccagctgaccaatcagcgcgctggctggagcgcgggtctgcccctctggacgcacatgcgcgctgtcctggctcgggagatggacggccgc

SEQ ID NO: 38509 - DNA, 201 bp, Homo sapiens
ttctgtccatgtgttcaataagggagttgatgtggctaatttctaaagccctcttaagtctgccattctttgagtctggtacaaagggtcaaaggcatgcrtgtattaggacaccagatgcctctacctgctctaacacactaagcccagactaccagagtcttcacacaagaactgtgccctcatgttaaggtcaaataa

SEQ ID NO: 38510 - DNA, 201 bp, Homo sapiens
cagtttcttcatctgtaaagtgaaggctcacgctccccacccctggatcggagatgctgggggagtccctaaataggaagccccatgtctgtccttaggtsggaattctgggcctcgctgcacggaggagctgctgatggcctcaggctcttgctgtggaccctggggtacacggcctcgccccatccactcttgaccctc

SEQ ID NO: 38511 - DNA, 201 bp, Homo sapiens
cttgctgaagaagggatagacccatgccctctgcagaagggctgaggtttaggcaaggccaattccttcccctgtctcatggcattaacgttcctatgccyggtaggtgtcattctgctagcttggcttgttctctggggttggggggctcccagtgctcggcagttctggcaatatgtccctgcgtcgactcactgccac

SEQ ID NO: 38512 - DNA, 201 bp, Homo sapiens
tttcaggacctctagtgacgttgaacaagccacagggtctaccagtgacaggtatgggccggggatgtgggaagggaatgcagcggaagggggtttcgtgwctgagggagggaaaagtgaaggcatgaagctttggcctcttgtaatttttctttcttactttccaggaaaaccaggagagctgacgttgttctcagtgct

SEQ ID NO: 38513 - DNA, 201 bp, Homo sapiens
gatgtttcatttttaggtgaccttggccccttgctgaagaagggatagacccatgccctctgcagaagggctgaggtttaggcaaggccaattccttcccytgtctcatggcattaacgttcctatgcccggtaggtgtcattctgctagcttggcttgttctctggggttggggggctcccagtgctcggcagttctggc

SEQ ID NO: 38514 - DNA, 201 bp, Homo sapiens
cgcttcctgggttcaagcgattctcgtgcctcagtctcccaagtagctgggattataggcacctgcccctacactcggctaatttttgtattttttagtasagatggggtttcaccatgttggccaggctggtctcgaactcctgacctcaagtgatctgcccgcctcggcctcccaaagtgctttttttgtgtctttgtt

SEQ ID NO: 38515 - DNA, 201 bp, Homo sapiens
gcaccccaacaggaaagaacagtccttaggcccggtggcttcagcaattaaatcagggttgcatctcatcatgagtggatcccacagccaggcagattgayagctgtgatcgtcctgacgtgttatgtgtccctctctggatgcaggggccatagtactgacctcactgaaacatatgatctgagaaagggggtggtgttt

SEQ ID NO: 38516 - DNA, 201 bp, Homo sapiens
aaaaacctcagtcgggaggagctggttgatgcgctgcgggcagccgtggtggaccggaaaggtgaggggtgagaggcacggccgcacaaggaccgggaggrgactgcctcggcgtgcagttgggctctccattgaagccacgggatcagccctgcttctgcctcccactagcagcatgagctgggacaagccacctaattt

SEQ ID NO: 38517 - DNA, 201 bp, Homo sapiens
acccagctaattttctgtagaaacggtttcaccatgttgcccagactggtcttgaacttgcgggctcaagcgatctcctgccttggcctctcaaagtgctrggataacaggtgtgagccaccatacccagctacaaagactcttttcccacataaggtcacattcacagggtccaagtagacatctcttttcaggggacca

SEQ ID NO: 38518 - DNA, 201 bp, Homo sapiens
ggcctcccgagtagctaggactacaggtgtgtgccaccacacccagctaattttctgtagaaacggtttcaccatgttgcccagactggtcttgaacttgygggctcaagcgatctcctgccttggcctctcaaagtgctgggataacaggtgtgagccaccatacccagctacaaagactcttttcccacataaggtcac

SEQ ID NO: 38519 - DNA, 201 bp, Homo sapiens
ttctgaggggaagatccaggctgccctgaaactggaacacattgatggggtcaatctcgtgagtccgggtctgggaagaggaggggtgcttctagatataktacccctacagagaggagtcaggggtatggatttgggatggctggctctcctgtcccctaaaacaggcaagtgaccactgcctatactgtggccctgccc

SEQ ID NO: 38520 - DNA, 201 bp, Homo sapiens
taaaaaatacaaaaaattaggcaggtatgatggtgcatgcctgtagtatcagctacttgggaggctggggcaggagaattgcttgaacccaggaggcagasgttgcagtgagccaagatcgtgccactgaactccagcccgggtgacagagtgagactccatctcgaaggaaaaaaaaaaagaagtgtctgtcaaaggccc

SEQ ID NO: 38521 - DNA, 201 bp, Homo sapiens
cgggccccatcctgcctctgctgacccccactcccctggggcctgctctctgggtcaggacccgcatggaaaccaggggcaggccatcccaacacctcccrgaggctgccggcagctcaggctggttttcctgtgaccagtgcaagtgttcttttcagttatctgacttccttccggggcattctgagcccacccatagct

SEQ ID NO: 38522 - DNA, 201 bp, Homo sapiens
taattttgtaatataatttttgcaaaggcggcttcaggttttttgctaagacaggttttttgatcagatcaaattcttctgctacagcgctctccctaaawgcataggaaggcatttctgcatttccttcctgggcggaggaaaagccccgcctcctcaggctctgagtcccgcccggtcaccattccgattgacactcca

SEQ ID NO: 38523 - DNA, 201 bp, Homo sapiens
gggactacaggcgcccgccaccacgcccggctaatttttttgtatttttggtggagacgtggtttcaccgtgttagccaggatggtctcgatctcctgacytcgaggggccacaggactagtagagccaagagttgagggtccgggtggggtgatccggccgtcagaaatgcaaaagcctggaaagacatctccaaaggcc

SEQ ID NO: 38524 - DNA, 201 bp, Homo sapiens
cccaggctcagagcgcagtggcgtgatcacagctcaccacagttttgatcttcccaggctcaggtaatcctcccacctaggcctcccgagtagctaggacyacaggtgtgtgccaccacacccagctaattttctgtagaaacggtttcaccatgttgcccagactggtcttgaacttgcgggctcaagcgatctcctgcc

SEQ ID NO: 38525 - DNA, 201 bp, Homo sapiens
ttggtgtggaggctggggaagtggtgacgggctgtgggagcaagagaagctgtgaggccctggggtggggcccaaggtggcctagctgccctaacaggtaygtgtggaggatggggggatatggagggaatggggtgaaggccgacggagccctcccggttcctcctccagaggcagtgagaagaaaacagggtagagtcc

SEQ ID NO: 38526 - DNA, 201 bp, Homo sapiens
atgccacctccagatgccatcaccttggggatgaggtgtcaacacatgagtttggggggacacagacatttgttcatgtggtaagtggctccaatgctggmctgcctctgaggcctggcctcctggtggagggccgtgcaggcacagggctctcgtgcactggggtccccggggacacctcccacccctgcccaggctcta

SEQ ID NO: 38527 - DNA, 201 bp, Homo sapiens
ctcccaaagtgctttttttgtgtctttgtttttaagacagcatctcgctctgtctcccaggctggagtgcagaggtgcgatcataactcactgcagccttracctcccgggctcaagcgatcctcattagcctcgcgagtagcctggaccacaggctcacaccaccgtgcccagctaatttggctgtgtatttttaaacaa

SEQ ID NO: 38528 - DNA, 201 bp, Homo sapiens
ggcccactttctgggtcatgcctgccatcttcccactgtggtcacatggcggaaggggcgagggagctctctggggcctcttgtataagggcgctaatccyaaccacaagggccccaccctcatgaccccatcacctcccaaagatgccacctccagatgccatcaccttggggatgaggtgtcaacacatgagtttgggg

SEQ ID NO: 38529 - DNA, 201 bp, Homo sapiens
gcttctcactgtgccccaggctcctggccccagtgcctttcctagaagctgacctgtgggtaggggtccccgagtccttgccttccccagagcctcgctgrgtcagcagagggactgctgggcggacccccatccgccgatgacacatcgccatgggcttcttgatggtgaagccctctaccaggagccggatgcccacat

SEQ ID NO: 38530 - DNA, 201 bp, Homo sapiens
gatctctttcgctgtcataattttgtaatataatttttgcaaaggcggcttcaggttttttgctaagacaggttttttgatcagatcaaattcttctgctrcagcgctctccctaaaagcataggaaggcatttctgcatttccttcctgggcggaggaaaagccccgcctcctcaggctctgagtcccgcccggtcacca

SEQ ID NO: 38531 - DNA, 201 bp, Homo sapiens
tgggccttggtgtggaggctggggaagtggtgacgggctgtgggagcaagagaagctgtgaggccctggggtggggcccaaggtggcctagctgccctaamaggtacgtgtggaggatggggggatatggagggaatggggtgaaggccgacggagccctcccggttcctcctccagaggcagtgagaagaaaacagggta

SEQ ID NO: 38532 - DNA, 201 bp, Homo sapiens
agacaaggcccactcagtcagtggtactggaatccttggcccagcgggacccagagtagagatgggtggaattactttctgaggcacctggtcaaagaggygtttctgagctgagaaatggaaagcccacctctgagtcagtacctagagtcacagagctccaggaattgctagcccagaggaagggggaatcctagccat

SEQ ID NO: 38533 - DNA, 201 bp, Homo sapiens
cccaggagacagaagttgcagtgagccgagatcgcaccattgtactccagcctgggtgaaaagagcgaaactccgtctcaaaaaaaaaaaaaaaaaaaaaatgcagctattgccgggcgcggtggctctctgggaggccaagacaggcggatcagctgaggtcaggaattggagaccagcctggccaacatggcgaaaccc

SEQ ID NO: 38534 - DNA, 201 bp, Homo sapiens
ttccctagcttcatatcccccaggcccctgcgcctctggaatgtaccaacaaggggcaggggtttcagggggctcagcctcttcatggggcaggcctcagycctgggtttgtcacagtctggccttgaatttgcctttggccttgaccttccgacaggtgctaggaattgttccgacttcaaagggcagaggcaacaaggc

SEQ ID NO: 38535 - DNA, 201 bp, Homo sapiens
acacctgtaaagggtctgtgctgaggaggattagtaaaagaggaaggcatgcctctttgcagttgagacaagaggaaggcatctgtctcctgcccgtcccygggcaatggaatgtcccctgggcaatggaatgtctcggtataaaacccgattgtatgttccatctactgagataggggaaaaccgccttagggctggagg

SEQ ID NO: 38536 - DNA, 201 bp, Homo sapiens
gtggggtggctgatccaggtggttgggaggggcctggagagcaggaataaatcgccttggaacactcgggtgttttgggggaatggtcttacccagggccygggggttcttcggactcagtggcaatctgttcaagtggtggggttgcctgtccccactagaaaaggtcatggtgaaaatgcagcccatcctggtgctggg

SEQ ID NO: 38537 - DNA, 201 bp, Homo sapiens
cggacccccatccgccgatgacacatcgccatgggcttcttgatggtgaagccctctaccaggagccggatgcccacatattgaggcacctccacagcagkctgtgggcaagaagaggagacaaggcccactcagtcagtggtactggaatccttggcccagcgggacccagagtagagatgggtggaattactttctgag

SEQ ID NO: 38538 - DNA, 201 bp, Homo sapiens
caagaacgggccatgatgatgatggcagttttgtcgaaaagaaaagggggaaatgtggggaaaagagagatcagattgttactgtgtcgtgtagaaataaktagacataggagactccattttgctctgtactaagaaaaattattctgccttgagatgctgttaatctataaccttacccccaaccccgtgctctctgaa

SEQ ID NO: 38539 - DNA, 201 bp, Homo sapiens
agtgctcgggtggctgagatgggagaatcacctgagctcagaagatggcagctgcaataagctgagatcccgccactgtacgcaagcctaaacaacctgartgagaccccgtctcaaaaaaacaaaacaaaacaaataccctccctgagcttcagttcccctaatggtaaaatagagaaaataatacctatgctcagtgtg

SEQ ID NO: 38540 - DNA, 201 bp, Homo sapiens
aatttatttacatctgcaaagacctttttttttttttttgatttagggtttcactctgtctcccaggctcagagcgcagtggcgtgatcacagctcaccayagttttgatcttcccaggctcaggtaatcctcccacctaggcctcccgagtagctaggactacaggtgtgtgccaccacacccagctaattttctgtaga

SEQ ID NO: 38541 - DNA, 201 bp, Homo sapiens
tggatcacctgaggtcgggagtttgagaccagcctggtcaacatggtgaaaccccatctctactaaaaaatacaaaaaattaggcaggtatgatggtgcaygcctgtagtatcagctacttgggaggctggggcaggagaattgcttgaacccaggaggcagaggttgcagtgagccaagatcgtgccactgaactccagc

SEQ ID NO: 38542 - DNA, 201 bp, Homo sapiens
ttccagtctaacggttcctttacaaagttgtgtaaagcccccttatatgctagttgtaggaaatatagttattaaaccagactctcaaactataacctgtraaaagtagatagtttacttgcattgattcgacttttaatcggcagcaccgtattctgctggtgagagcaagagagggcgtgtggatccctgtgtccatgg

SEQ ID NO: 38543 - DNA, 201 bp, Homo sapiens
ctgggaaagccaggtattgtccaaggtttctccccatgtgatagtctgaaatatggcctcgtgggaagggaaagacctgaccgtcccccagcccgacaccygtaaagggtctgtgctgaggaggattagtaaaagaggaaggcatgcctctttgcagttgagacaagaggaaggcatctgtctcctgcccgtccctgggca

SEQ ID NO: 38544 - DNA, 201 bp, Homo sapiens
ccctcggggaccagcccttcgcggggctgctgccaaaaaacctcagtcgggaggagctggttgatgcgctgcgggcagccgtggtggaccggaaaggtgargggtgagaggcacggccgcacaaggaccgggaggggactgcctcggcgtgcagttgggctctccattgaagccacgggatcagccctgcttctgcctccc

SEQ ID NO: 38545 - DNA, 201 bp, Homo sapiens
tcctgcctctgctgacccccactcccctggggcctgctctctgggtcaggacccgcatggaaaccaggggcaggccatcccaacacctcccggaggctgcyggcagctcaggctggttttcctgtgaccagtgcaagtgttcttttcagttatctgacttccttccggggcattctgagcccacccatagcttttggcatg

SEQ ID NO: 38546 - DNA, 201 bp, Homo sapiens
gccaatcagattctctgcacagagaatttgagttacgccacccagacaagtaagaggtttggagcctgcctagagcctcgtgtgaatccaggttatggggwagcagaaactaagaaccttaaagaagacagtctgtggagagaatgaagtaacgaatatgcagaggaaggcagagagaagggtccaggagagggactccct

SEQ ID NO: 38547 - DNA, 201 bp, Homo sapiens
ctcacaagcagaccgggccccatcctgcctctgctgacccccactcccctggggcctgctctctgggtcaggacccgcatggaaaccaggggcaggccatmccaacacctcccggaggctgccggcagctcaggctggttttcctgtgaccagtgcaagtgttcttttcagttatctgacttccttccggggcattctgag

SEQ ID NO: 38548 - DNA, 201 bp, Homo sapiens
gcccggtcaccattccgattgacactccagctgaccaatcagcgcgctggctggagcgcgggtctgcccctctggacgcacatgcgcgctgtcctggctcsggagatggacggccgccgtgttttgggccggttctggagtggctggcggcggggcctgggtgtccgcccagtgcccgaggacgcaggctttggcaccgaa

SEQ ID NO: 38549 - DNA, 201 bp, Homo sapiens
gaactattatagattgggcaccttgaggtcaattctaccacaattgctcagggcaaactcagtcatgtcccagggcacaagtgagtccagctgttgaaagygacttaacagaaagtttagacaaacataagcataaaaaattacagtctttctatccctgggaatggggagaaaaaggaatctctaccccaagaccaaaaa

SEQ ID NO: 38550 - DNA, 201 bp, Homo sapiens
ggtgctgggaggttcctagagtggtggggaggtcccagcaagccaccctgtgacctcctcctgcccctttctcagtgctgtcactgatgggatcccagctscttctgaggggaagatccaggctgccctgaaactggaacacattgatggggtcaatctcgtgagtccgggtctgggaagaggaggggtgcttctagatat

SEQ ID NO: 38551 - DNA, 201 bp, Homo sapiens
aaggaccgggaggggactgcctcggcgtgcagttgggctctccattgaagccacgggatcagccctgcttctgcctcccactagcagcatgagctgggacragccacctaatttgcaccctctccccgcttttaaccctactgccatgatgcagtagggttaagagtggggagaagatgcaaataactaccgagccttgca

SEQ ID NO: 38552 - DNA, 201 bp, Homo sapiens
gtggctgagatgggagaatcacctgagctcagaagatggcagctgcaataagctgagatcccgccactgtacgcaagcctaaacaacctgaatgagacccygtctcaaaaaaacaaaacaaaacaaataccctccctgagcttcagttcccctaatggtaaaatagagaaaataatacctatgctcagtgtgcagtcattt

SEQ ID NO: 38553 - DNA, 201 bp, Homo sapiens
ttagtacagatggggtttcaccatgttggccaggctggtctcgaactcctgacctcaagtgatctgcccgcctcggcctcccaaagtgctttttttgtgtytttgtttttaagacagcatctcgctctgtctcccaggctggagtgcagaggtgcgatcataactcactgcagccttgacctcccgggctcaagcgatcct

SEQ ID NO: 38554 - DNA, 201 bp, Homo sapiens
taatcccggcactttagggtgctgacgcgggcggatcacctgaggtcaggagttcgagactagcctggccaacatggtgaaaccccgtctctactaaaaayacaaaaattagccaggtgtggcggcgtccgcctgtaatcccagctactcgggaggctgaggcaggagagtcacttgaacccggatagcagaggttgcagt

SEQ ID NO: 38555 - DNA, 201 bp, Homo sapiens
ctggaggccaaggcaagaggatcacttgagcccaggagttcgagaccagcctgggcaaaatagaccccatctctggaaaaacaacaacaaaactttccgcrtggtggctcatgcctataatcaataggactttgggaggccgaggtgggaggattgcttgagtccagaagttcaagaccagcctgggcaacatggcaaaac

SEQ ID NO: 38556 - DNA, 201 bp, Homo sapiens
accgagccttgcacatagccggcgctcagttacgggagttgctatactagattattgtttattggccgcggtggctcacgcctgtaatcccggcactttasggtgctgacgcgggcggatcacctgaggtcaggagttcgagactagcctggccaacatggtgaaaccccgtctctactaaaaacacaaaaattagccagg

SEQ ID NO: 38557 - DNA, 201 bp, Homo sapiens
tgcccctctggacgcacatgcgcgctgtcctggctcgggagatggacggccgccgtgttttgggccggttctggagtggctggcggcggggcctgggtgtscgcccagtgcccgaggacgcaggctttggcaccgaagcccggtgattaagtaccccctctctcatgcgggacggaggctagggcagggggaaggcacgtg

SEQ ID NO: 38558 - DNA, 201 bp, Homo sapiens
aacacattgatggggtcaatctcgtgagtccgggtctgggaagaggaggggtgcttctagatatagtacccctacagagaggagtcaggggtatggatttrggatggctggctctcctgtcccctaaaacaggcaagtgaccactgcctatactgtggccctgcccggagtctattgggagcagggagggtctgggtatag

SEQ ID NO: 38559 - DNA, 201 bp, Homo sapiens
ccgaggctctgaggtggcagaggaacagaaagaagttgaatttggtgtggggtagttaactcatgtctgagagtcatgatggggacatgtgctaagatgcrtgagaaagtgctctggaaactctttagtgctgcataaagggttaccgttgcttttgctgatgttcgtgtgatgtatgtttcaggacctctagtgacgttg

SEQ ID NO: 38560 - DNA, 201 bp, Homo sapiens; identical to SEQ ID NO: 5800

SEQ ID NO: 38561 - DNA, 201 bp, Homo sapiens
gagtcttgctctgtcgctcaggctggagtgcagtggcctgatctccactcactgcaagctccgcctcccaggttcacaccattctcctgcctcagcctccygagtagctgggactacaggcgctcaccaccacaccctgctaattttttgtatttttagtagagacggggtttcaccgtgttagccaggatggtctcaatc

SEQ ID NO: 38562 - DNA, 201 bp, Homo sapiens
attattaatcacaaattaataaacaatataactatgtggttataatatataattgtaaatacaaatatataattatataaacaacaaattaatgatattartgtaataaagttactaacaaatatcaattaagaagatattaattaaatagataattaggattgactacctgttagatcatagggtaaatctcaacaacta

SEQ ID NO: 38563 - DNA, 201 bp, Homo sapiens
tttattctatttactttcattaaatgaccgtgctacaggtttcaaaggattttaagattgatttttgaaagatcacaatattaaaagtataactggaaaayctatgttgaaatcaaccaaacatgtcgtggactgaatgataaccttttctttcttcatataggctgatcagctgaccgaagaacagattgctggtaagtt

SEQ ID NO: 38564 - DNA, 201 bp, Homo sapiens
tttattggttccccttggagctggacttggtcgtaggccgtccacgggcaggggctccggccgcaactgcagcgggggtttctgcatccaatccccctgcyccccgcccagccccgcacccactgcatccactagcgccgcacccgggctgcctgcagcgcagcgtttcggcctgggagccgggcggggccgggcactaga

SEQ ID NO: 38565 - DNA, 201 bp, Homo sapiens
tttcacagctagaaggaatttctacatcaagtacaaaactcttgttacatctgtgtcctttctgtcagattcagagggttagagtgatttggttagtgacrgaaatgatacttaaacatgagattcctggcttgaggctgcatcgtttttacttttcttccatttacttttatcttatttaaataacttcctatagaacaa

SEQ ID NO: 38566 - DNA, 201 bp, Homo sapiens
cgaggcaggtggatcacttgaagtcaggagttcgagaccagcctggccaacatggtgaaaccccatctctactaaaaatacaaaaattagccaggcgtggwggcaggcacctgtacctgtaatcccagctactcagggggctgaggcaggagaatcgcttgaacccacaaggcgaaggttgcagtgagctgagattgcacc

SEQ ID NO: 38567 - DNA, 201 bp, Homo sapiens
tgcagaacctaacggaaagggaagctgtaaggtgcagggccagagggaaccagcagtaaccctgatagcggtctgtcatctgttcctctcgactctacagmagcggacaacagaactttgattgctgatttccatcagtaagcaggctttgaagcacacttccccacccctaaaaaaaaaccacgtattttggtaaatcct

SEQ ID NO: 38568 - DNA, 201 bp, Homo sapiens; identical to SEQ ID NO: 5803

SEQ ID NO: 38569 - DNA, 201 bp, Homo sapiens
agctagaaggaatttctacatcaagtacaaaactcttgttacatctgtgtcctttctgtcagattcagagggttagagtgatttggttagtgacggaaatkatacttaaacatgagattcctggcttgaggctgcatcgtttttacttttcttccatttacttttatcttatttaaataacttcctatagaacaatttcct

SEQ ID NO: 38570 - DNA, 201 bp, Homo sapiens
ctaaaaatacaaaaattagccaggcgtggaggcaggcacctgtacctgtaatcccagctactcagggggctgaggcaggagaatcgcttgaacccacaagrcgaaggttgcagtgagctgagattgcaccactgcactccagcctgggcaacagagtgaggctctgtctcaaaaaaaaaagaaaaaatgtatttcactaac

SEQ ID NO: 38571 - DNA, 201 bp, Homo sapiens
attatgtgaaattgccctgtgaagtgtttgaacgttttagacctgcagatgattgaacctagtaagatagtctgcccctttgtcctagtacatgtttaccrttccgtacagtggttctgaaatgattactgcagagcagcgttaatggagtgcttactttacatgagctttttgttttttaattcgaggtaatggcaccat

SEQ ID NO: 38572 - DNA, 201 bp, Homo sapiens
cagaacctaacggaaagggaagctgtaaggtgcagggccagagggaaccagcagtaaccctgatagcggtctgtcatctgttcctctcgactctacagcarcggacaacagaactttgattgctgatttccatcagtaagcaggctttgaagcacacttccccacccctaaaaaaaaaccacgtattttggtaaatcctat

SEQ ID NO: 38573 - DNA, 201 bp, Homo sapiens; identical to SEQ ID NO: 5795

SEQ ID NO: 38574 - DNA, 201 bp, Homo sapiens; identical to SEQ ID NO: 5807

SEQ ID NO: 38575 - DNA, 201 bp, Homo sapiens; identical to SEQ ID NO: 5808

SEQ ID NO: 38576 - DNA, 201 bp, Homo sapiens; identical to SEQ ID NO: 5811

SEQ ID NO: 38577 - DNA, 201 bp, Homo sapiens
gcactgatgatgagtttgaaattatgtgaaattgccctgtgaagtgtttgaacgttttagacctgcagatgattgaacctagtaagatagtctgccccttygtcctagtacatgtttaccgttccgtacagtggttctgaaatgattactgcagagcagcgttaatggagtgcttactttacatgagctttttgtttttta

SEQ ID NO: 38578 - DNA, 201 bp, Homo sapiens; identical to SEQ ID NO: 5814

SEQ ID NO: 38579 - DNA, 201 bp, Homo sapiens; identical to SEQ ID NO: 5813

SEQ ID NO: 38580 - DNA, 201 bp, Homo sapiens; identical to SEQ ID NO: 5812

SEQ ID NO: 38581 - DNA, 201 bp, Homo sapiens
atgtcgtggactgaatgataaccttttctttcttcatataggctgatcagctgaccgaagaacagattgctggtaagttgacaactccaaggagtccccaraaggccagaactaggcactgactcagttttggtgactcctctgttcctccccgctacagtctgggcagttttctaagaatttatttaaataagaacagta

SEQ ID NO: 38582 - DNA, 201 bp, Homo sapiens
caataagatgggaattttagatgacaaccaagatgataccttggttcatgtcaagagcgggacagctgaggaaagtggggtgggatgcaagtacaatttargaccttggcattgaagccttccccttagtcaacactggcccagaccctggttcttagatgtagcaggagaggctgcctgcttctgccccctttgcttcca

SEQ ID NO: 38583 - DNA, 201 bp, Homo sapiens
tttattttattttaattaattaattaattaattaattagagacagagtctcactctgtcgcccaggttggagtgcagtggcgcaatcgccactcactgcarcctctgcctcctgggttcaagtgattctcctgcctcagcctcctgagtagctgggattacaagcgcccgccaccacgcctggctaattttttgtattttt

SEQ ID NO: 38584 - DNA, 201 bp, Homo sapiens
aacttgaagtgagcagatgttgtcacttccttgtaatcctttgttaaaatagcataaggagttttctttattctatttactttcattaaatgaccgtgctrcaggtttcaaaggattttaagattgatttttgaaagatcacaatattaaaagtataactggaaaatctatgttgaaatcaaccaaacatgtcgtggactg

SEQ ID NO: 38585 - DNA, 201 bp, Homo sapiens
actctgattaaatcaagtggcagttttcctcatgagaattatgttctttgtgtcaggaaccttaggaatgagtgtgaattgacacattcagattgtggggttttttttttctcttttgaggtggggtctcattctcactcaggctggagtgcagtggcacaatcacagctcactgcagcctccacctcccaggttcaaatg

SEQ ID NO: 38586 - DNA, 201 bp, Homo sapiens
agagtctcactctgtcgcccaggttggagtgcagtggcgcaatcgccactcactgcaacctctgcctcctgggttcaagtgattctcctgcctcagcctcmtgagtagctgggattacaagcgcccgccaccacgcctggctaattttttgtatttttagtagagatggggtttcactatgttggccaggctggtcttgaa

SEQ ID NO: 38587 - DNA, 201 bp, Homo sapiens
ctgatctccactcactgcaagctccgcctcccaggttcacaccattctcctgcctcagcctcccgagtagctgggactacaggcgctcaccaccacacccygctaattttttgtatttttagtagagacggggtttcaccgtgttagccaggatggtctcaatctcctgaccttgtgatccacccgcctcagcctccccaa

SEQ ID NO: 38588 - DNA, 201 bp, Homo sapiens
gcagtgaggccaagatcgtgccactgtgctccagcctgggctacacagcaagactccgtctccaaaaaaaaaaaaaaaaaatcatgggacactaaacagaygccttatatgctaaaatggataatatttttctcatggtaagttgtcatggcctaacacttgcttattatgttctgatggtaacatattttcaaatttaaa

SEQ ID NO: 38589 - DNA, 201 bp, Homo sapiens
caaaactttttgtaataatcctgaatagaatttaatgaaatgtaaatccaaacacaaacagcaagaatctgttctggcaattggagatgattagtgaagcrgagaatcctgaatggtggatattcatctaagtactattggaccacggggtggagaaggagggagtcgaggatggtgaagaggtattactgactctcaaac

SEQ ID NO: 38590 - DNA, 201 bp, Homo sapiens
gtgtcgtggacgccgtgccgttactcgtagtcaggcggcggcgcaggcggcggcggcggcatagcgcacagcgcgccttagcagcagcagcagcagcagcrgcatcggaggtacccccgccgtcgcagcccccgcgctggtgcagccaccctcgctccctctgctcttcctcccttcgctcgcaccatggtaggtcgggag

SEQ ID NO: 38591 - DNA, 201 bp, Homo sapiens
ttttaagctgctttaactgtgagcacattcttactaggctggaatctgcttccttttaaccccacccattggtgctattgcagcttgtggagctaactctrgacatctaatcctgtttccacaaggcagaccttggtcttcctcactgtcatggacccctcccgacttgtcaggcttaacattttgctccttttttatttt

SEQ ID NO: 38592 - DNA, 201 bp, Homo sapiens
attattgggtaagaagtatctctttataaaccaaattttcatcttaatctttgccacttctgcctcctaccccaaattaaaataaaaataaattctactamattgcaggagatagttataatgtaatgcttaagtgcttgggctctcagctagatttttgggttccacttaaattaggcaagtcactgactcgttcagtgc

SEQ ID NO: 38593 - DNA, 201 bp, Homo sapiens
cagagtcttgtactgttgcccaggctggagtgcagtggtgcgatctctgctgactgcaacatctgcctcccaggttcaagcgattctcctgccttagtctyctgaatagctgggattacaggtgcctgccaccacgcccagcttattttttgtatttttagtagagacagggtttcactatgttggccaggctggtcttga

SEQ ID NO: 38594 - DNA, 201 bp, Homo sapiens
atggatataaaagcctgttaatccaacccaatgccattatgtaacgccagtttggagatttcgagggcctggagcagtgcgcaaggtgcgctgaaagcctkcccctggatgagatccttatcctggctgtgatggcagtggcagtgggctgggtcccttgttgagtggaaagggggactgcggtgtccatggtgcagtagg

SEQ ID NO: 38595 - DNA, 201 bp, Homo sapiens
gcagtggtgcgatctctgctgactgcaacatctgcctcccaggttcaagcgattctcctgccttagtctcctgaatagctgggattacaggtgcctgccaycacgcccagcttattttttgtatttttagtagagacagggtttcactatgttggccaggctggtcttgaactcctgacctcatgatccacatgcctcagc

SEQ ID NO: 38596 - DNA, 201 bp, Homo sapiens
aatatattatctaaattagagcccctgagcaaggactcaagctctattttatgccccatccctgactcacagtaagatcctgggcaagtcacttgaccttyttatatttcagagtgtcaaactgtgaaaagcatgtccataaaactgtgcaagcatgacctcattataaacccgatgaacttgaaagcaaagatgtgcttt

SEQ ID NO: 38597 - DNA, 201 bp, Homo sapiens
caatatcatatcttagttttattttcagttttacaaaggctaaaaggaaaatccagagtttcctctagcaatataattatttgaacattttgttacaacawgatctttagatcctggctgtatgtaagcatgtttgcttttaaactgatttttcattttgagtctttgtatacccttcaagttgtgattttttttaagtta

SEQ ID NO: 38598 - DNA, 201 bp, Homo sapiens
agacctgcagatgattgaacctagtaagatagtctgcccctttgtcctagtacatgtttaccgttccgtacagtggttctgaaatgattactgcagagcascgttaatggagtgcttactttacatgagctttttgttttttaattcgaggtaatggcaccattgacttccccgaatttttgactatgatggctagaaaaa

SEQ ID NO: 38599 - DNA, 201 bp, Homo sapiens
tgcagttttgtaacacttcatttgtaagatggtaccattttttcctggcttctgaatcataggatagtttgacccagggcattagccattgtaatggtagscttttaacaaataactgcctaatttaaaggattggaaagcatttgttacatggaaatgaagttggtggcgtacccagttgctgtatctttattttttcta

SEQ ID NO: 38600 - DNA, 201 bp, Homo sapiens
gttagctctccttgaggtctcgagttccctcggctggaggcacaggttcagtggagaccaaataatgcaggtgaattaccttcgtggccattactgcctcsaacgaagtgtgtttattaagaacagttcttatgtcattcttaaggtaggtagggttaatactctccagcaaatttagtagatactctttgccagaaaaga

SEQ ID NO: 38601 - DNA, 201 bp, Homo sapiens
aaaatagtaggggagaaatattcaggcatcctaaaaaatattcagtggaaacgtaaaaacattaaagactgattaaacatcgcagcatgacacagatttarcaactgagcataaataatttgactcggatactgctccaaaatccgaagaggaccaatttcttccaggaggacaactacctcgtcctctgcagacccctct

SEQ ID NO: 38602 - DNA, 201 bp, Homo sapiens; identical to SEQ ID NO: 5794

SEQ ID NO: 38603 - DNA, 201 bp, Homo sapiens; identical to SEQ ID NO: 5806

SEQ ID NO: 38604 - DNA, 201 bp, Homo sapiens
tccattttaagctgctttaactgtgagcacattcttactaggctggaatctgcttccttttaaccccacccattggtgctattgcagcttgtggagctaaytctagacatctaatcctgtttccacaaggcagaccttggtcttcctcactgtcatggacccctcccgacttgtcaggcttaacattttgctcctttttta

SEQ ID NO: 38605 - DNA, 201 bp, Homo sapiens
cgtcttgtctaaggttatcccaagaagtcctgtggcatttgcaatgtgcctgtacatttttccttttttaaaaaacatattcctgcagactttgttgaaascagaaacaaacacaagcaagcaaagccctttctagcacagcatgttaatcacacactttgccatattctgtgaaacagtaagcaaatgataacctccaac

SEQ ID NO: 38606 - DNA, 201 bp, Homo sapiens; identical to SEQ ID NO: 5809

SEQ ID NO: 38607 - DNA, 201 bp, Homo sapiens; identical to SEQ ID NO: 5815

SEQ ID NO: 38608 - DNA, 201 bp, Homo sapiens
cggggcgcagactcgcgctccggcagtggtgctgggagtgtcgtggacgccgtgccgttactcgtagtcaggcggcggcgcaggcggcggcggcggcatakcgcacagcgcgccttagcagcagcagcagcagcagcagcatcggaggtacccccgccgtcgcagcccccgcgctggtgcagccaccctcgctccctctgc

SEQ ID NO: 38609 - DNA, 201 bp, Homo sapiens
ccttcgcctcctgggttcaagcaattctcctgcctcagcctcctgagtagctgggactacaggcgcacaccaccacgtctggctaatttttgtatttttartagagacggagtttcactatgttggcgaggctggttttgaactcctgacctcaggtcatctgtccgccttggcctcccaaagtgctgggattataggcat

SEQ ID NO: 38610 - DNA, 201 bp, Homo sapiens
cggctccgccgcggcggagggatacggcgcaccatatatatatcgcggggcgcagactcgcgctccggcagtggtgctgggagtgtcgtggacgccgtgcygttactcgtagtcaggcggcggcgcaggcggcggcggcggcatagcgcacagcgcgccttagcagcagcagcagcagcagcagcatcggaggtacccccg

SEQ ID NO: 38611 - DNA, 201 bp, Homo sapiens
cttaggaaagaagcagttttagtattattattattattggatggagtctcgctctgtcaccaggctggaatgcgatggcgctatcttggctcactgcaacstccgatgccctggttcaagggattctcctgcctcagcctactgaaagtagctgagattacaggcacgcgccaccacacccagctaatttttgtattttta

SEQ ID NO: 38612 - DNA, 201 bp, Homo sapiens
gtcttcgcccccgcccagggtgggcgtctcctgaggactccccgccacacctgacccgagaccgcgcgcccagcctagaacgcttccccgacccagcgtakggccgccgcgactggcgcgcagggggcggcgggaggcctggcgaacccgggggcgggaccaggcgggcaaggcccggctgccgcagcgccgctctgcgcg

SEQ ID NO: 38613 - DNA, 201 bp, Homo sapiens
taattggggcggggggggggggcggcgggggaggagggaactggcgcgcggcttggtttccattagagacgcaaagtttctgctccgggaggaggcggcgrcgccgcgggctcgtcgcctgggggagcagaagcgggtgggaggtgcgggtggccttggcctcagccctggtgcgcgggggccgggggtggtgaccctcct

SEQ ID NO: 38614 - DNA, 201 bp, Homo sapiens
attagagacgcaaagtttctgctccgggaggaggcggcggcgccgcgggctcgtcgcctgggggagcagaagcgggtgggaggtgcgggtggccttggcckcagccctggtgcgcgggggccgggggtggtgaccctcctggccgaggaggggcggcgtccagacgcccgctcgggggccgccttcccccccacgcctgcc

SEQ ID NO: 38615 - DNA, 201 bp, Homo sapiens
ggcggcatagcgcacagcgcgccttagcagcagcagcagcagcagcagcatcggaggtacccccgccgtcgcagcccccgcgctggtgcagccaccctcgytccctctgctcttcctcccttcgctcgcaccatggtaggtcgggagtggcaaatgccggcgtagcagctgcccgagatttcttcccagatttctagttgt

SEQ ID NO: 38616 - DNA, 201 bp, Homo sapiens
gccattactgcctcgaacgaagtgtgtttattaagaacagttcttatgtcattcttaaggtaggtagggttaatactctccagcaaatttagtagatactstttgccagaaaagagaggagtatatatagtttgataattattgtgtagttttctgtgtacttaatttttgcagttttgtaacacttcatttgtaagatgg

SEQ ID NO: 38617 - DNA, 201 bp, Homo sapiens
gccagtactttatagatgaggtgaaaggaagtaaaactaaggatgcccacatgttaaactctggagaatttgaccatgtttcacaatgtgcaaagtttgcrtatgattaattgtactgagcctgctactcagcggtttagtttacaattcttatgccatgggtctttcagtaatctgccacgaaagcttgtgctcgctatc

SEQ ID NO: 38618 - DNA, 201 bp, Homo sapiens
tagtagagatggggttttgccatgttagccaggctggtcttgaactcttacctcaggtgatccacctgtctcggtctcccaaagtgctgggattacaggcrcgagccactgcacccagcttcttttttactttttctactgaacatttctccatcgctttacattcttgaatataatttttaagatctggctgtattaata

SEQ ID NO: 38619 - DNA, 201 bp, Homo sapiens
gtgtggtggcaggcacctgtagtcccagctactcaggaggctgaggcatgagaatcgcttgaacctgggcagtggaggttgcagtgatctgagattgtgcygctgctctccagcctgggcaacagagcaagactccatctaaaaaaaaaaatttatagccttaaaatgcttataatggaaaagtagaaaggctaaaaataa

SEQ ID NO: 38620 - DNA, 201 bp, Homo sapiens
tagtgttttggaaagaaaaggttgtccatagttctctagtttgctaagatgatcagctacccaggaacgtggagtaacttcctcttgtttgtgggagcccygggaatctgtgcctggggaggggagaagtctgttaggctcttggattgtgtggaagaaggagaagttgtgccaggctacagaatcctgtgtttgcactga

SEQ ID NO: 38621 - DNA, 201 bp, Homo sapiens
atatatgacagaggttatatatgtatatgttataatcatataacctcagacacagggtttcacagctagaaggaatttctacatcaagtacaaaactcttsttacatctgtgtcctttctgtcagattcagagggttagagtgatttggttagtgacggaaatgatacttaaacatgagattcctggcttgaggctgcatc

SEQ ID NO: 38622 - DNA, 201 bp, Homo sapiens
ggtagaaagaaagatccgtttataatttgtaaaaacaaattttcacccagaatcaatatattggaacaccattcctactgttaaagttttcacttaagagyataaacttcatcagctttctattaggacttattttgtaattggcttcttaggcatccttctttaaaagagaaatccacgttagctctccttgaggtctcg

SEQ ID NO: 38623 - DNA, 201 bp, Homo sapiens
cttccagtccgcagagagatgccctccacgtttctgctttctctgcagcctctagattgccagatgcgactgtgcgcctcgctgggtgtgttttccacagmcccttcctcctcggcgtgcagggctgacatcaccgactgcgtttctggtttggcgggtggggagatggttccccgcagggttctggtacacctttgcccc

SEQ ID NO: 38624 - DNA, 201 bp, Homo sapiens
gacctgagtgatttccctaactcagggatggcagtcgggggcgctttcttccctcggagtggaaagattcagcctgcggagtggtgtatgctatttttctyttgaactgtacagcccttcatgacccttccatgggcttgaatccagatgtgcagtttcctttgtataattaaatactatcctgggcactgatgatgagtt

SEQ ID NO: 38625 - DNA, 201 bp, Homo sapiens
aagttgcccttcaccatggctatttgaaaaggagatgtacttggacgtttctgtaaatcttgagataaactgtttggagatttaaccacctctctgatggrggaccaactctatggaaattgtaaatacgttttatttataaacctggcactgtattcaataaacatttctgcagcctttcatctctaactgcgaactgtg

SEQ ID NO: 38626 - DNA, 201 bp, Homo sapiens
ataagcatactattctttagtatgtacaattacatgttgtatatatacgaatatattacaatcttcttactccttataactttttctcctcacgatataayttatgtaccataaaattcaccttttaaaaatacacaatttggtggtttttagtatattgacagggttgtacaaccatcaccactatataattttagaaca

SEQ ID NO: 38627 - DNA, 201 bp, Homo sapiens
aggcaaatccatcaccacagctactagcaaaacaagcacaaatcctgtgaatggaggataagatatgttttctcctataaaaagcaaagtgtttcaaaataaaaaaaaaaaacaagaatgaggcactcaaagctagtgaatggtgctgtttggaaatactgcacttcagactactgagtatactggtgaccatcacaagct

SEQ ID NO: 38628 - DNA, 201 bp, Homo sapiens
tagtctggctatgagtcatttgaaatcatgggacactagccgggtgcggtggctcacgcctgtaatcccagcactttgggaggcggaggcaggcggatcaygaggtcaggagattgagaccatcctggctaacacggtgaaaccccatctctactgaaaatacaaaaaaattagccaggcatggtggcgggtgcctgttgt

SEQ ID NO: 38629 - DNA, 201 bp, Homo sapiens
gattgagaccatcctggctaacacggtgaaaccccatctctactgaaaatacaaaaaaattagccaggcatggtggcgggtgcctgttgtcccagctactyaggaggctgaggcaggagaatggcgtgaacccggcaggcggagcttgcagtgaggccaagatcgtgccactgtgctccagcctgggctacacagcaagac

SEQ ID NO: 38630 - DNA, 201 bp, Homo sapiens
ctactgaaaatacaaaaaaattagccaggcatggtggcgggtgcctgttgtcccagctactcaggaggctgaggcaggagaatggcgtgaacccggcaggyggagcttgcagtgaggccaagatcgtgccactgtgctccagcctgggctacacagcaagactccgtctccaaaaaaaaaaaaaaaaaatcatgggacact

SEQ ID NO: 38631 - DNA, 201 bp, Homo sapiens
aggcaggagaatggcgtgaacccggcaggcggagcttgcagtgaggccaagatcgtgccactgtgctccagcctgggctacacagcaagactccgtctccaaaaaaaaaaaaaaaaaatcatgggacactaaacagacgccttatatgctaaaatggataatatttttctcatggtaagttgtcatggcctaacacttgct

SEQ ID NO: 38632 - DNA, 201 bp, Homo sapiens
attggatttagtcccttgaacctgggaggcaggggttgtagtgagctgagattgcaccactgcactccaatctcggtgacagagcgagactccattgtttaaaaaaaaaaaaagattggatttaggactaatttaagcatgttccagcttagccgccttgaaacctttgggaatattgtggtgtgtggcactgtttattgg

SEQ ID NO: 38633 - DNA, 201 bp, Homo sapiens
tgatgggccttgcgtccatcctgcttagtgtctagaatgttttctgcatgggatcactattgttttcttcctgcttggtgcgacctagagctcaaatctatttttttttttttttttggagacggagtctcgccctgtcgcccaggctggagtggcactggcgcgatctcggctcactgcaacctctgcctcttgggttcc

SEQ ID NO: 38634 - DNA, 201 bp, Homo sapiens
tcttgaggggggaggtgaaattaaatagccatagaaagtgctttttaacaaacttactgtgtttaaagaggaggaggaacccccagatgaagtaggtgacragcactcttagaagttaccataaaagtgagtacagtgtgagctgtagatgtgtttgctgcagaggagcatgtgaggtttggaggcggatgtgtggtgact

SEQ ID NO: 38635 - DNA, 201 bp, Homo sapiens
agccttttaacaaataactgcctaatttaaaggattggaaagcatttgttacatggaaatgaagttggtggcgtacccagttgctgtatctttattttttstacttaattatttctcataaaatggatataaaagcctgttaatccaacccaatgccattatgtaacgccagtttggagatttcgagggcctggagcagtg

SEQ ID NO: 38636 - DNA, 201 bp, Homo sapiens
gagattacaggcacgcgccaccacacccagctaatttttgtatttttagtagagacaaggtttcactatgttggccaggatggtctcgatctcctgacctygtgatccgcctgcttcggcctccccaagtgctgggattacaggtgtgagccaccgcgcccggccaagatgcagttttaataaggagtttggccatttagg

SEQ ID NO: 38637 - DNA, 201 bp, Homo sapiens
cgggaccaggcgggcaaggcccggctgccgcagcgccgctctgcgcgaggcggctccgccgcggcggagggatacggcgcaccatatatatatcgcggggygcagactcgcgctccggcagtggtgctgggagtgtcgtggacgccgtgccgttactcgtagtcaggcggcggcgcaggcggcggcggcggcatagcgcac

SEQ ID NO: 38638 - DNA, 201 bp, Homo sapiens
gagggatacggcgcaccatatatatatcgcggggcgcagactcgcgctccggcagtggtgctgggagtgtcgtggacgccgtgccgttactcgtagtcagkcggcggcgcaggcggcggcggcggcatagcgcacagcgcgccttagcagcagcagcagcagcagcagcatcggaggtacccccgccgtcgcagcccccgc

SEQ ID NO: 38639 - DNA, 201 bp, Homo sapiens
tgaggctcaagtcatgggtccagtctcattaatggccagttattttgctctgttcttattctatatcccggaccccactttctgtgttgcatatttatgaygttggtcacgagggtggcttgaccagagagggaacagaggaaggcaaatccatcaccacagctactagcaaaacaagcacaaatcctgtgaatggaggat

SEQ ID NO: 38640 - DNA, 201 bp, Homo sapiens
atttttatttttatttttttgagatggagtcttgctctgtcgctcaggctggagtgcagtggcctgatctccactcactgcaagctccgcctcccaggttyacaccattctcctgcctcagcctcccgagtagctgggactacaggcgctcaccaccacaccctgctaattttttgtatttttagtagagacggggtttca

SEQ ID NO: 38641 - DNA, 201 bp, Homo sapiens; identical to SEQ ID NO: 5819

SEQ ID NO: 38642 - DNA, 201 bp, Homo sapiens
tgtttagcagcatctctggcctgcacccactagatgccaactgagactaccgaaactgtctccagatattgacaaatgtcccctggaagtggggaaacagygggagggaaacaaaattcccctcagttgagaattgctgctttgaagggtaagatgtcatgtgactgtattttttataatgcaatatttaataagcacttt

SEQ ID NO: 38643 - DNA, 201 bp, Homo sapiens
tttttactgaattgtttttgagctaaaatgccaaggttagagttgttatccccagctcaagaggtataagttctaacacaaggtaggggcaaaataagcckacaaggaaaggagttaagtcgatatttttaaaaagatctaggaaataagcttttaagttgctgtcctgacctaccaatgacttctcggctctagatgtgg

SEQ ID NO: 38644 - DNA, 201 bp, Homo sapiens; identical to SEQ ID NO: 5820

SEQ ID NO: 38645 - DNA, 201 bp, Homo sapiens
ttccctttcttccccgtagactccagcagcaggtcctgtcacagggttccgggcgggcactacgggcggagggcgacggcacgccagaggtgctgggcgtygccaccagcccggccgccagtctatccagcaaggcggccacttcagccatctccatcacgtccagcgacagcgagtgcgacatctgagttgcccatccag

SEQ ID NO: 38646 - DNA, 201 bp, Homo sapiens
taatctttccaatcttcccaaggacatttaaagggtttctttttaagactttttccatatcagcttcattctggtcttcagggttttggggggaaaaaaartccaggtaatggcaaggctgaaggtttctgaatttggcaaaatctctatataatgggtttccttcctttcttttcctgcaattcttctgtcacaatttcc

SEQ ID NO: 38647 - DNA, 201 bp, Homo sapiens
ccccctacctcaactgctaccctgtcattccacaaagcctaccccacctccactaagttttccgtgagccagtgagctccacacagataatgtgccaccamcttttttaatgctcccaccgcaccttatctaaacgtctgttttagcgctctaacacttttgctcatttatttgtctgtctgacttcccccttcagccttt

SEQ ID NO: 38648 - DNA, 201 bp, Homo sapiens
tatttacaagctttataagtatttggttatcctaagtatcatttacagtaaattttaagaaaaaacaaaattacagtaagctcttaggaacagattttatyaacatggcctagacccaagatgaaattgaaagtgctctgagtcctttgtaaatgcttcaactccacaataaaccaaattttagcaggttttgtatgtctg

SEQ ID NO: 38649 - DNA, 201 bp, Homo sapiens
cttcagtaacaccagactccaccagtttccacccccgctcaaaaaacaacaaaaatcccagagacacatttttgattcaagggtttttagggcttgcaagsgttataccacctgacaagacccagaagtgtaagtctctctgaggtccttgaactagagtgcaccaaactctgaaagtcacaacagcatgaaatagtactg

SEQ ID NO: 38650 - DNA, 201 bp, Homo sapiens
aattgctgctttgaagggtaagatgtcatgtgactgtattttttataatgcaatatttaataagcactttttgctaactagctggatcaactcaaagaatktaaggtatttgttgaaggctgatgcctctatttgactttatagtacttagaaggaaattatgatttactacacatgtaatacaaacagttgatacaatgt

SEQ ID NO: 38651 - DNA, 201 bp, Homo sapiens
gtcatttaaaaatagctgatgaagaataataacaaaatatactaatctcttaaaattaggtcaatattttaattgtaatacttttttgccaattaatttawcaacactaggaaatctacaaacattgctcaaatggtgtttgttctcagaaatatacaattaaagagccttctctgttctttgttacaaggtgcacaatgg

SEQ ID NO: 38652 - DNA, 201 bp, Homo sapiens
gatttactacacatgtaatacaaacagttgatacaatgtatgacacatacagtttaatgtgaataatatttggtgcatccgagaggacattaaacaaactyacattctttcacatcattgaattttaagtttctatgtgtattttagaaggatatttcgatcttagatttgaaaattgtcaaaaataacctgctgctgtga

SEQ ID NO: 38653 - DNA, 201 bp, Homo sapiens
aaaattaggtcaatattttaattgtaatacttttttgccaattaatttaacaacactaggaaatctacaaacattgctcaaatggtgtttgttctcagaartatacaattaaagagccttctctgttctttgttacaaggtgcacaatggcaggggaggaatgcatgaaatagtgcaatctaccttggcagtttattagta

SEQ ID NO: 38654 - DNA, 201 bp, Homo sapiens; identical to SEQ ID NO: 5826

SEQ ID NO: 38655 - DNA, 201 bp, Homo sapiens
accatgcttaggctcacctaggggggataaacagttttcattaaaatattttttttttttgagacggagtctcgctctgtcgcccaggctggagtgcagtrgcgggatctggactcactgcaagctctgcctcccaggttcacgccattctcctgcctcagcctcccgagtagctgggactacaggcgcccgccaccccgc

SEQ ID NO: 38656 - DNA, 201 bp, Homo sapiens
gtccgctcccaaagagaagcccagactgggcccacagtacccgggaaggtgagtccttactcgggggcccagatctccccacggaggccacagatctgggyccccgaggaaggagagccccccttttcgcgcacccaccttttccatccagcgccccgcgaactcgcggacgtgtaggcctcgagccactcctactgttgg

SEQ ID NO: 38657 - DNA, 201 bp, Homo sapiens; identical to SEQ ID NO: 5823

SEQ ID NO: 38658 - DNA, 201 bp, Homo sapiens; identical to SEQ ID NO: 5824

SEQ ID NO: 38659 - DNA, 201 bp, Homo sapiens
gccaaggttagagttgttatccccagctcaagaggtataagttctaacacaaggtaggggcaaaataagccgacaaggaaaggagttaagtcgatattttwaaaaagatctaggaaataagcttttaagttgctgtcctgacctaccaatgacttctcggctctagatgtggctatgctgcactttgttcaagtccattaa

SEQ ID NO: 38660 - DNA, 201 bp, Homo sapiens
acaaacagggaggacactgcaagcccagtatataaaagacctgggagctgcggcgctgagaaagggcgcgaatcatggtggggcacaacagtagggacccrcggaggggcggccgcggactcctgcccgacctctgtcgccttgccgagtaatcctcgccttaactgctggggtcttcggaagaacctctagccgccgggc

SEQ ID NO: 38661 - DNA, 201 bp, Homo sapiens
acttaaagcattttccatggcattgggtatactcctgactttctataaattcctggtaaattacgtatttgaactgaagacctacgcatgtatatcttatytaaagaaattatttttgcagatacttgtaactgtatgaactggatttgtccatttaaaatagaaagcaagtgggaaaaagaaaactatactggaaacagt

SEQ ID NO: 38662 - DNA, 201 bp, Homo sapiens
gagttttcctcttcccatgcgctgcctgccactcttgtctcaaaacagcaaactagtccgtgggccgaggcttttcgtttcccggagtgtggatctcgatyagccaaacattttgcggaagagcccggcctcatcccccaggcccaaatgctccttacaatcctttttgcctttaggtcgggccgacccgatccaacgcga

SEQ ID NO: 38663 - DNA, 201 bp, Homo sapiens
attcctgctttgacaaaagcctttaaactacagctaccatttacttaaattaacaagctgcctacattttaaagtagctattctgtttcaacaatctggakatttatttatttaatttcactttagaatcttaagggggtgacacattacttgtaagatttttttaaatgtttatctgtaatgtgatggcacctaattgcc

SEQ ID NO: 38664 - DNA, 201 bp, Homo sapiens
aatagtgcaatctaccttggcagtttattagtatagttagtagtactttaaaagtaggatattgaattcattccaaaatctgaaggtctgtactaccaaayacataaacaaacacacatctatatttatgcatatgatatacctgaaaatcagaatgccaaataaataaatgtttgaaagtgtaaatttttaatagtgtaa

SEQ ID NO: 38665 - DNA, 201 bp, Homo sapiens
ggtttcagggcttttttcttcccctctgctatttttttcgagtgaactgtgaagatctgtgaaaataatatcagggttttccgtcagaacgagctttgccytgcactcaggcgtggcgtgatctgacccgacacctccaaccatctgtgctatctatctgccttctgatttaccagatctgtacaagccgcatacaaattg

SEQ ID NO: 38666 - DNA, 201 bp, Homo sapiens
tttcagtttggcccagtcctctttgtcctctggagacctctcgaccgagacaacgcatcgccccaaagtgaattcctgaattcctgtggcatcactgcctmtttggtgggaaaaagggagggaggggtagagcggggtgggggagggaggagtagtgaacgctgccgcactcgcctctctttttctcccagacactcgcat

SEQ ID NO: 38667 - DNA, 201 bp, Homo sapiens
cgcgatcgcgggagcacttgctcaggcgtaagccccaggcagacgcaccgttagaaatggtatcccatgtccctgggaccgatctgtccttgtcacccacrcttcgtttatttcctgacagtcctgtaaatctcccaaaagtgcacaacaaacagggaggacactgcaagcccagtatataaaagacctgggagctgcggc

SEQ ID NO: 38668 - DNA, 201 bp, Homo sapiens
gtataagttctaacacaaggtaggggcaaaataagccgacaaggaaaggagttaagtcgatatttttaaaaagatctaggaaataagcttttaagttgctrtcctgacctaccaatgacttctcggctctagatgtggctatgctgcactttgttcaagtccattaaactgggggagggggagaaagtatatttctccccc

SEQ ID NO: 38669 - DNA, 201 bp, Homo sapiens
cttcctcagtacttaattttgtttcctagagccccaggtagttcctagaatgctaacgaggggctggcgaggactagagtgaggccaggaggggactcackgtcaaggttatgcaagtgcagcaagtgcaaggcacatgagattgagtgcctccttaaattttgcactctaagtgcctcctttgcctcatcctagtcctta

SEQ ID NO: 38670 - DNA, 201 bp, Homo sapiens; identical to SEQ ID NO: 5821

SEQ ID NO: 38671 - DNA, 201 bp, Homo sapiens; identical to SEQ ID NO: 5822

SEQ ID NO: 38672 - DNA, 201 bp, Homo sapiens
cctgccttgtcgtatttcaagaaaatgaactcttagaaaagaaagcctctccgttgaggcggttggcaatctcacagaaatgatgtaaatggtttcagggyttttttcttcccctctgctatttttttcgagtgaactgtgaagatctgtgaaaataatatcagggttttccgtcagaacgagctttgccctgcactcagg

SEQ ID NO: 38673 - DNA, 201 bp, Homo sapiens
gacttaggaaaagtcaaagaaaagataagattggaacccagaggtaggaaagtattgacttctaagcactgctctcctctggcaaatgtgagcagggtgtraccaggattccacctgtcctctactctagagaggaaaatcagtaggggcagagcgaggagtgagatccccatatgtgcagaagtcccacactgaactcca

SEQ ID NO: 38674 - DNA, 201 bp, Homo sapiens
agacccatggcatcacccggctgggcccctactctctggacaaagacagcctctaccttaacggtgagcagctatcagccccatctccctgccccaccccycagcccccactgcagtccaggagggtgtctgtttgccggttctctagggaaagacttggggttcaagtcttggcattaccactggccctcccataaccac

SEQ ID NO: 38675 - DNA, 201 bp, Homo sapiens; identical to SEQ ID NO: 5832

SEQ ID NO: 38676 - DNA, 201 bp, Homo sapiens; identical to SEQ ID NO: 5836

SEQ ID NO: 38677 - DNA, 201 bp, Homo sapiens; identical to SEQ ID NO: 5837

SEQ ID NO: 38678 - DNA, 201 bp, Homo sapiens
ttgatcctcaattgtaacactaattgaagtagagattattagaagcctattttggagatgaagacatttaggcacagggagattaagtaactttcttaagkccatatagctagaaagcaatagaactaggataagaactcaaattgtgtgtcactaggaactcatgctcctaactgctgggctaaacaggagtggtcagag

SEQ ID NO: 38679 - DNA, 201 bp, Homo sapiens; identical to SEQ ID NO: 5839

SEQ ID NO: 38680 - DNA, 201 bp, Homo sapiens; identical to SEQ ID NO: 5842

SEQ ID NO: 38681 - DNA, 201 bp, Homo sapiens; identical to SEQ ID NO: 5849

SEQ ID NO: 38682 - DNA, 201 bp, Homo sapiens; identical to SEQ ID NO: 5851

SEQ ID NO: 38683 - DNA, 201 bp, Homo sapiens; identical to SEQ ID NO: 5852

SEQ ID NO: 38684 - DNA, 201 bp, Homo sapiens
tggtcaggctggtctcaaactcctgacctcaggtggtccacacgccttggcctcccaaagtgctgggattacaagtgtgagacactgtgcccggccatatstgttagatcttactaatcctgtcaagaggattcagtgtccttttttttttttctttcttttttttgatagagtctccctctggcacccaggctggagtgc

SEQ ID NO: 38685 - DNA, 201 bp, Homo sapiens
tggtaatgatgatatgactatggtgataatgatgtttgtggtagtattgatggggattatcgttgtggtgatggtcttggtgctgatgctgacaataatgrtgatgatgatgatgatgatgataatggtgatgacaaaggtaacaggtaatatctgatatttttcagcactgaatatgcaccaaaagctgggctcagaatc

SEQ ID NO: 38686 - DNA, 201 bp, Homo sapiens
taggttgggtccatacctttgctgtgaatagtgctgcaataaacatacacgtgcaggtgtcttttttatataatgatttctttttttctttctttttttttgatataacgatttcttttattgggtagatccccaatagtgggattgctgggtcaaatggtagttctacatttttgttctttgagaaatcctcataccatt

SEQ ID NO: 38687 - DNA, 201 bp, Homo sapiens
ggtgtctccatgttgatcaggctggtcttgaactcctgacttcaggtgatccaccctcctcagcctcccaaagtgctgggattacaggcgtgagccaccayatctggccccattctttttttttaaatgaatttaaggagtgcaaatgcagtttttgttacatgcatatattccatagtgaagtctgcagacagtagactt

SEQ ID NO: 38688 - DNA, 201 bp, Homo sapiens
taggatgctgaccgtggtaccgatgatattgatgttggtcgtggttatgttgatgacaatgacaatgatggtgatgaggataatgccagtgatggtgtggkgttatgatgatgatgatgtgttgaatgtggtgatgataatgttcgtggtggtcgtgatgggcattactatggcagtgatggtcataataatgatggtgat

SEQ ID NO: 38689 - DNA, 201 bp, Homo sapiens
tgcactctagcctgggcgacaaagtgagactctgtctcaaacaaaaacaaaacaaaaaaacaaaaacaaaaaacaaaaccaaaccaaaacaaaaaaaaaaaccttaactcatactttcataaagttccacacacagggagtgattagaaagcatttgctgatatattttatataataaacatgtacaccatattgacctgt

SEQ ID NO: 38690 - DNA, 201 bp, Homo sapiens
aaaaaatggatgaaagaaaaaaggaggaggaaagatggataagtagatggaaggaagaaaagagaggtgtaagaaaggaaagattgatgatggatggatgratggatcagtgggtgagtgggtgaagggatgaatggatggatggacagatggatgaacagatgggtgggtggatagatggatggatggataaatgggtag

SEQ ID NO: 38691 - DNA, 201 bp, Homo sapiens
ttcctggagcggtgtaggaccaatactgtatatatggaaggaaggcaaggtggatagatggaaggaagaagtgacagatggaaagaagaagtgataaatgraaggaggaagggagagaggatggatgagtggattgaagaaagaaaaaaatggatgaaagaaaaaaggaggaggaaagatggataagtagatggaaggaag

SEQ ID NO: 38692 - DNA, 201 bp, Homo sapiens
aggcactctggctgcagactgccacagccggtgtgttgggctgtggggacaagtcttgggaccaagccgtccagcctacccggctctagcaggggaaaagyacagcctggagctattgaaaggggtgccgcccttcccccgcccagggagcttagcgtgttaggcagttgtgagtccagtgctggctgtcgccccttcccc

SEQ ID NO: 38693 - DNA, 201 bp, Homo sapiens
aaacagggtctccctctgttgcccaggctggagtgcaatggcgtgttcatggttcactgcagcctcagcctcctcagtctcaagcaatcctccaacttcarcctcccccaacagctagaactgcaggtgatcatcaccaattagcctggttaattgtgtgtgtatttcttaaattttttgtagagatagttctcactatat

SEQ ID NO: 38694 - DNA, 201 bp, Homo sapiens; identical to SEQ ID NO: 5855

SEQ ID NO: 38695 - DNA, 201 bp, Homo sapiens
ggacagtctctatgtcaatggtgagtagttgtgatgtggttggagtctcttcctccttgctgggcagcctctactctctgccttgaggtcacgctccctgyctggctattgaatgctcatccatgttgtctgtatgtgatggctgaggttggaacttcatggtttctatttcatcttggactgagttcatcctcaggatct

SEQ ID NO: 38696 - DNA, 201 bp, Homo sapiens
atggggcagccaccaaagtggatgccatctgcacctaccgccctgatcccaaaagccctggactggacagagagcagctatactgggagctgagccagctracccacagcatcactgagctgggcccctacaccctggacagggacagtctctatgtcaatggtgagtagttgtgatgtggttggagtctcttcctccttg

SEQ ID NO: 38697 - DNA, 201 bp, Homo sapiens
agccttggcaacataatgagacccccatctctactaaaagaaaaaaatagctggatgtggtggcacacacctatagtcccagctactagggaggcggaggmaggaagatcccttgagcccaggaggttgaggctgcagtatgattgcaccactgcactccaagtctgggcaacacagtgagaccccatctctaaaaaaaaa

SEQ ID NO: 38698 - DNA, 201 bp, Homo sapiens
acctcattctaccccactcaccatgtttagtcctgcccacctcacctattgcagagcatggaagatctcatctacctcatcttgcccccagatatgcatascccaaccactgatgccagccccaccaactgttgccagccctgcccacctcccttctaccacacccctatgacttcagtcctcccactcacctccctctcc

SEQ ID NO: 38699 - DNA, 201 bp, Homo sapiens
gctggtggtgtaatgatgatgatgggtggggatcatagggactatgatggtcatggttttggtgctgatgctggtggtgatgacaataatgatagcgatgktcacagtgttgctgatgttgatgatgatcgtggtgttggcaaaggtagtagataatgtctagtagtatggaatactgaatatgcaccaagagctatgctt

SEQ ID NO: 38700 - DNA, 201 bp, Homo sapiens
acattaatcctagcagtgcctgtgcctttgccaacaacagaaattccggacactttcatatcctatgacaattgttgcaagcacttttaaaaatcatgtaygactttattcataattatagtggttattaggcttttcaatagatcttatttaatgagttagtaaaagaagtgcctgtattattgtattacatttgtttat

SEQ ID NO: 38701 - DNA, 201 bp, Homo sapiens
gggattatgaatatggttcgggtctctgactggtggtggtgatgacaataatgaaaatgatggtcacagtgttggtgatgatgatggtggtgataacaaargtaatagatagtgtctagtattatggaacacagaacatcaccaaaggttatgctcagcatctaactattattatttagcatgctctatgaaaaactttga

SEQ ID NO: 38702 - DNA, 201 bp, Homo sapiens
tcctccacagctaaggcccttgttcaagaacaccagtgttggccctctgtactctggctgcaggctgaccttgctcaggtgagaactgagaataaccagtstggctgccccaagtgttcccaggcccaaggagtttcatcagctttcttccttccctccctatggaagtcctcagcacaagtggaattcaggcgttggtgg

SEQ ID NO: 38703 - DNA, 201 bp, Homo sapiens; identical to SEQ ID NO: 5866

SEQ ID NO: 38704 - DNA, 201 bp, Homo sapiens; identical to SEQ ID NO: 5867

SEQ ID NO: 38705 - DNA, 201 bp, Homo sapiens; identical to SEQ ID NO: 5868

SEQ ID NO: 38706 - DNA, 201 bp, Homo sapiens
atagttatatatatagtttctatatctgtaactatatatagttatatatgtatgtttctctgtatataaatatatatatttctatatatatagttatacamattatatatataactgggagatgttggtaaaggatggcgtgaggaaacctggagcagtcatggtaatcctcgctctgctccgaactcctcaagagcagga

SEQ ID NO: 38707 - DNA, 201 bp, Homo sapiens; identical to SEQ ID NO: 5869

SEQ ID NO: 38708 - DNA, 201 bp, Homo sapiens; identical to SEQ ID NO: 5870

SEQ ID NO: 38709 - DNA, 201 bp, Homo sapiens
atcaacgacagtgacaatgatggtgatgaggatgatgtcggtgatggtggtggggttatgatggtaatgatatgttgaatgtgatgatggtgatgatgatrtttgtggttcatgatggggattgtcatggtggtgctggtggtacttgtgatgacaataatgataataatgatgacaatgatagtgatgatggtgatggtg

SEQ ID NO: 38710 - DNA, 201 bp, Homo sapiens; identical to SEQ ID NO: 5871

SEQ ID NO: 38711 - DNA, 201 bp, Homo sapiens
tgtggagaggagggtcttgccatgttgcccaggtggccttgaactcctgggctcaaggaatcctcccaccttggcctcccaaaatcctgggattacaggtrtgagccatcacgcccggctacagggcatttttgacttatgacattttcagttcacaatggatttgtcagggctgggcatgatggctcacacctgtcatcc

SEQ ID NO: 38712 - DNA, 201 bp, Homo sapiens; identical to SEQ ID NO: 5877

SEQ ID NO: 38713 - DNA, 201 bp, Homo sapiens
tataatggtgttagtgaccatgtgctagtggtgattatatggatgatgatggttgtggtgctggtggtgtaatgatgatgatgggtggggatcatagggaytatgatggtcatggttttggtgctgatgctggtggtgatgacaataatgatagcgatgttcacagtgttgctgatgttgatgatgatcgtggtgttggca

SEQ ID NO: 38714 - DNA, 201 bp, Homo sapiens; identical to SEQ ID NO: 5879

SEQ ID NO: 38715 - DNA, 201 bp, Homo sapiens
gaatgtgacttcttatgggctttctctattataccacatgtgggtttttgttttgttttgttttgtttttgtcctcggatccattctccaacctcctccarccttcccgtgctctgtgggatagacgtctgactcatgaaaactacatttcccaggctcccatgctaactagcttcctgttaggttcagccaataggaggc

SEQ ID NO: 38716 - DNA, 201 bp, Homo sapiens
tacttctcccacttttttgaactcatttgtttatattctgttgtctgcttctcttttataggaatgtgacttcttatgggctttctctattataccacatrtgggtttttgttttgttttgttttgtttttgtcctcggatccattctccaacctcctccaaccttcccgtgctctgtgggatagacgtctgactcatgaa

SEQ ID NO: 38717 - DNA, 201 bp, Homo sapiens
gcccgctcactcaccacctcccttggctggaaggagggggttccccttccccgtgtgtctctcaggtgggccaccacaccacactgctcttccttctctcygtgggtcactgccagccttctagtcaattttgatgagggaacctggacattttggttgccaggaaggatcacacacttattacagtttttttcaatgtga

SEQ ID NO: 38718 - DNA, 201 bp, Homo sapiens
gggccactgcatccagccgaaggcctcccattttgatcagaacccttctctagactgagggtgggtgcctctagatcttttgctctttaaagacagcaacygatgaccctgctgatgctgagtactggctgaattcctgtggtctctgtccctaggatggactccgtgttggtcactgtcaaggcattgttctcctccaat

SEQ ID NO: 38719 - DNA, 201 bp, Homo sapiens
tgggctcaccaccagcagtgagtattcaactcatgtccacatgcccctgattctacaccaagcggaacaggagctactcctcctcataaacccataggtcytcttcttcagcaaaggagataagagggcagcagttactcaagctctgctctgccccagctccaaagactgacccatctctagccacacaggcagcggacc

SEQ ID NO: 38720 - DNA, 201 bp, Homo sapiens
tttttttttttctttcttttttttgatagagtctccctctggcacccaggctggagtgcagtggtacggtcttggctcactgcagcctccacctcccagaytgaagcgattctcctgcctcagcctcccgaatagctgggactacaggcgcgtgccaccacgcccagctaatttttgcatttttagtagagatgggatttc

SEQ ID NO: 38721 - DNA, 201 bp, Homo sapiens
taaacccataagtcctcctcttgagcaaaggagctgggaaggcagaagttattgaagctcccttccaccctagctccaaagacaggcccagctcatgcccrtatgcagcagacctcataatagtctaccttcttgccatttctgccatgagattattttctgctttcactgatgagcactttttctcagctcctgggacct

SEQ ID NO: 38722 - DNA, 201 bp, Homo sapiens
gcaggtttcacccatcggagctctgggctcaccaccagcagtgagtattcaactcatgtccacatgcccctgattctacaccaagcggaacaggagctacycctcctcataaacccataggtcctcttcttcagcaaaggagataagagggcagcagttactcaagctctgctctgccccagctccaaagactgacccatc

SEQ ID NO: 38723 - DNA, 201 bp, Homo sapiens
tttttttccactggcatcagcggcccctccacccccaagaggcctccatctcacccactctccctacccatctttctaggtcaccacactctacaaaggcmgtcaactacatgacacattccgcttctgcctggtcaccaacttgacgtaagttctgaaggtcataagcagtgaccaagcttgtggctgtgtctctgagca

SEQ ID NO: 38724 - DNA, 201 bp, Homo sapiens
aggtggccttcatcccccaaagctgcacctctccctcctcaggtctgtgaagaacggtgctgagacacgggtggacctcctctgcacctacctgcagcccytcagcggcccaggtctgcctatcaagcaggtgttccatgagctgagccagcagacccatggcatcacccggctgggcccctactctctggacaaagacag

SEQ ID NO: 38725 - DNA, 201 bp, Homo sapiens
agagtctcaatctgtcacccaggctggagtggagtggtgcaatctcggctcactgcagcctctgcctctgggttcaagcgattctcctgcctcagcctccygagtagctggcattataggtgcctgccaccatgcccagctaatttttgtatttttaatatagatggggtttcaccatgttggccaggctggtcttgaact

SEQ ID NO: 38726 - DNA, 201 bp, Homo sapiens; identical to SEQ ID NO: 5895

SEQ ID NO: 38727 - DNA, 201 bp, Homo sapiens
ctccctctctctgcaggcttcacccatcggagctctgtgccaaccaccagtagtgagtattttactgatgttccagtccccccaatcctacaccaagcagkgcaggagctgaccttacctcttatccccttacatcctcttcttatgggaaaaggcttggagggcacaatttatttccttttccctgtgtcctagcttcat

SEQ ID NO: 38728 - DNA, 201 bp, Homo sapiens
tgacccatggtgtcacccaactgggcttctatgtcctggacagggatagcctcttcatcaatggtgagtgtcaggctgaacttggatttacagtgactttkggggagttggtttctttgtttttgagatggagtctcactctatcacccaggctggagtgcaatggtgcaatcttggctctgcaacagtgattctcctgcc

SEQ ID NO: 38729 - DNA, 201 bp, Homo sapiens
agcaaattaaagatttgtgtctctgctgtaactcacattcattaattcattcattcagcaaacatatatgggtggctgttctgccccaagccttgtactgrgtctggagatagaagacacatttttctgtctctgaaaaactcatactcaagttaacaacaaattacgggcacaacaaagaccccactgctgttattaaca

SEQ ID NO: 38730 - DNA, 201 bp, Homo sapiens; identical to SEQ ID NO: 5905

SEQ ID NO: 38731 - DNA, 201 bp, Homo sapiens; identical to SEQ ID NO: 5904

SEQ ID NO: 38732 - DNA, 201 bp, Homo sapiens
cttgttctttttaaattttttatttttttacttaatttttttcacccaagccttaaggccaatttggaccagatagtgagaccccacctctataaaaaaawttttttaaaaaaaaataagttgggcatcgtgcaggcctgtagtccctgctactcgagaggccaaggtgggaggacagcttgctgctgactaaaagtgctg

SEQ ID NO: 38733 - DNA, 201 bp, Homo sapiens
tggtggttgtggtggtgattgacaatgtggtggtgatattgacaatgaggatgatgatgatagtggtggtggttatgatggttaaggatgatgtgatgatrgtgttggtgatcacggtactagtggtggtgatgtggaccgtcatggttgtggttgtggtggtgatggtggtgatcatgatgataatgaggatgatggtgg

SEQ ID NO: 38734 - DNA, 201 bp, Homo sapiens
tttttaaattttttatttttttacttaatttttttcacccaagccttaaggccaatttggaccagatagtgagaccccacctctataaaaaaaattttttwaaaaaaaataagttgggcatcgtgcaggcctgtagtccctgctactcgagaggccaaggtgggaggacagcttgctgctgactaaaagtgctgcttattg

SEQ ID NO: 38735 - DNA, 201 bp, Homo sapiens
caagctggacagtagtcagtgcactcagagaatctaagtgtggcttctcatctgtgtaccaggcttctcatttcctgtggccccttcttgtccttccctcmgcaatcttgggactcctccctagacaaaactttattattattcccctcacctgccctctccaggcctgaaaaggatgggacagccactggagtggatgcc

SEQ ID NO: 38736 - DNA, 201 bp, Homo sapiens
agactccagctcaaaaataaataaataaataatatatatatatatattttatttaaataaaatatactatatatatatgtatatatatgtatgtgtatatrtatatatatgtatatatatatatatatatatatatatagagagagagagagagagagagagagagagagagagagacagagtatgtctgaaaatgcatcc

SEQ ID NO: 38737 - DNA, 201 bp, Homo sapiens
agagcaagactccagctcaaaaataaataaataaataatatatatatatatattttatttaaataaaatatactatatatatatgtatatatatgtatgtrtatatatatatatatgtatatatatatatatatatatatatatagagagagagagagagagagagagagagagagagagagacagagtatgtctgaaaat

SEQ ID NO: 38738 - DNA, 201 bp, Homo sapiens; identical to SEQ ID NO: 5919

SEQ ID NO: 38739 - DNA, 201 bp, Homo sapiens
tgcttgaacccaaaaggcagaggttgcagtgagctgagatcacaccactgcacttcagcctgagcaacagagcaagactccgtctcaaaaaaaaaaaaaawatatatatatatatatagttaactctctaaagaaaatcctaactctgccacttcctggttctgggacctgaggcttgtcatttcacctccttagacttca

SEQ ID NO: 38740 - DNA, 201 bp, Homo sapiens
gcagagcaagactccagctcaaaaataaataaataaataatatatatatatatattttatttaaataaaatatactatatatatatgtatatatatgtatrtgtatatatatatatatgtatatatatatatatatatatatatatagagagagagagagagagagagagagagagagagagagacagagtatgtctgaaa

SEQ ID NO: 38741 - DNA, 201 bp, Homo sapiens
gcagaggttgcagtgagctgagatcacaccactgcacttcagcctgagcaacagagcaagactccgtctcaaaaaaaaaaaaaaaatatatatatatatawagttaactctctaaagaaaatcctaactctgccacttcctggttctgggacctgaggcttgtcatttcacctccttagacttcagtttcttcagctgtaa

SEQ ID NO: 38742 - DNA, 201 bp, Homo sapiens
ctccagcctgggtggcagagcaagactccagctcaaaaataaataaataaataatatatatatatatattttatttaaataaaatatactatatatatatrtatatatatgtatgtgtatatatatatatatgtatatatatatatatatatatatatatagagagagagagagagagagagagagagagagagagagaca

SEQ ID NO: 38743 - DNA, 201 bp, Homo sapiens
actccagcctgggtggcagagcaagactccagctcaaaaataaataaataaataatatatatatatatattttatttaaataaaatatactatatatataygtatatatatgtatgtgtatatatatatatatgtatatatatatatatatatatatatatagagagagagagagagagagagagagagagagagagagac

SEQ ID NO: 38744 - DNA, 201 bp, Homo sapiens
ttgaacccaggaggtagaggctgcagtgagctgagattgtgccaatgcactccagcctgggtggcagagcaagactccagctcaaaaataaataaataaawaatatatatatatatattttatttaaataaaatatactatatatatatgtatatatatgtatgtgtatatatatatatatgtatatatatatatatatat

SEQ ID NO: 38745 - DNA, 201 bp, Homo sapiens
aatacaaaatgctgggcctgctgcataggaagtatttaataaatggtagttgttactataaagtcgttcctactatagagctactcacaaccctgggacayagggaaagagcccgtttccctctaatcactcaatagtgggtggctaggtaggtgagtccacatcctgtggccgggaacaggtgctgagacatgaagacct

SEQ ID NO: 38746 - DNA, 201 bp, Homo sapiens; identical to SEQ ID NO: 5923

SEQ ID NO: 38747 - DNA, 201 bp, Homo sapiens; identical to SEQ ID NO: 5924

SEQ ID NO: 38748 - DNA, 201 bp, Homo sapiens; identical to SEQ ID NO: 5931

SEQ ID NO: 38749 - DNA, 201 bp, Homo sapiens
gtccccaggatttctcacaagacaagcatgcctcatccacttgctttcatccccaattccagctcttcatctgtctcatgtctgagtactcttgtctccaygccatgagaatgcaggctttactttgcaattttataaaaagttcttgcatctatgactctgttcacagtcctgggctggctggcagccgggacactcaga

SEQ ID NO: 38750 - DNA, 201 bp, Homo sapiens
ttgcatatgattaaaaataaacttattgcaaactcttcaagtctattgcaaaagtcgagaaacttgaggagtttgcaatagacttatttttaactatatgmaacagattaaaaatacaaacaaacacaatagtgtttgtttccccaccttttactacagccactggccctgtcctgctgccattcaccctcaattttacca

SEQ ID NO: 38751 - DNA, 201 bp, Homo sapiens
tattgcaaaagtcgagaaacttgaggagtttgcaatagacttatttttaactatatgaaacagattaaaaatacaaacaaacacaatagtgtttgtttccmcaccttttactacagccactggccctgtcctgctgccattcaccctcaattttaccatcattaacctgcagtatgaggaggacatgcatcgccctggctc

SEQ ID NO: 38752 - DNA, 201 bp, Homo sapiens
atatggaggctggaaagttgaaatccagaggggcacacctggtgagagccctgttgctggtggggactctgtggcatccagaggtagacagggcatcacaygtcaagacagctgagtgcgctaatgtgatagcacaggtctcacttcctattttaaagcttttcttttctttttttttttgagatggagtctcaatctgtc

SEQ ID NO: 38753 - DNA, 201 bp, Homo sapiens
agattaaaaatacaaacaaacacaatagtgtttgtttccccaccttttactacagccactggccctgtcctgctgccattcaccctcaattttaccatcaytaacctgcagtatgaggaggacatgcatcgccctggctccaggaagttcaacaccacggagagggtccttcagggtctggtgagacccctgtccaactta

SEQ ID NO: 38754 - DNA, 201 bp, Homo sapiens
caccatgcatggcctaaagcttcttttaaagccaccaagtcccttcccatgttagcccactaatccatgggttagtcatgaatggattaatctattcatayggacagagccctcatcacccaatcacctcttaaaggccccacctctcaatactgccacactggggattaagtttcaacagagttttggaggggacattca

SEQ ID NO: 38755 - DNA, 201 bp, Homo sapiens
gaagggaggaaagacaaaaggaagaatgggtgatagaaggaaagaataaaaggaagaaaaaatggaagaatagatgatcagatctagggatgaatgaaagraaggatggacaaatctataggtaggtggatggatctatggacaggtgtggccacttatggcacatagtcccagctccagttcatactgatggacttgagg

SEQ ID NO: 38756 - DNA, 201 bp, Homo sapiens
gtgtttgtttccccaccttttactacagccactggccctgtcctgctgccattcaccctcaattttaccatcattaacctgcagtatgaggaggacatgcrtcgccctggctccaggaagttcaacaccacggagagggtccttcagggtctggtgagacccctgtccaacttactctgcccctcccacgttacctggtcc

SEQ ID NO: 38757 - DNA, 201 bp, Homo sapiens
ggttcctaggctgggtgtggtggcttacgcccgtaatcccagcactttgggaggctgaggtgggcggatcacgaggtcaggagtttgagaccagcctggcyaacatagtgaaaccctgtctctactaaaaatacaaaaaattagctgggcatagtggcacacacctgtaatcccagctactcgggaggctgaggaaggaga

SEQ ID NO: 38758 - DNA, 201 bp, Homo sapiens
aaaataggttcctaggctgggtgtggtggcttacgcccgtaatcccagcactttgggaggctgaggtgggcggatcacgaggtcaggagtttgagaccagyctggccaacatagtgaaaccctgtctctactaaaaatacaaaaaattagctgggcatagtggcacacacctgtaatcccagctactcgggaggctgagga

SEQ ID NO: 38759 - DNA, 201 bp, Homo sapiens
taggttttaaaataggttcctaggctgggtgtggtggcttacgcccgtaatcccagcactttgggaggctgaggtgggcggatcacgaggtcaggagtttragaccagcctggccaacatagtgaaaccctgtctctactaaaaatacaaaaaattagctgggcatagtggcacacacctgtaatcccagctactcgggag

SEQ ID NO: 38760 - DNA, 201 bp, Homo sapiens
ctaggttttaaaataggttcctaggctgggtgtggtggcttacgcccgtaatcccagcactttgggaggctgaggtgggcggatcacgaggtcaggagttygagaccagcctggccaacatagtgaaaccctgtctctactaaaaatacaaaaaattagctgggcatagtggcacacacctgtaatcccagctactcggga

SEQ ID NO: 38761 - DNA, 201 bp, Homo sapiens
gcaaggactaggttttaaaataggttcctaggctgggtgtggtggcttacgcccgtaatcccagcactttgggaggctgaggtgggcggatcacgaggtcrggagtttgagaccagcctggccaacatagtgaaaccctgtctctactaaaaatacaaaaaattagctgggcatagtggcacacacctgtaatcccagcta

SEQ ID NO: 38762 - DNA, 201 bp, Homo sapiens; identical to SEQ ID NO: 5941

SEQ ID NO: 38763 - DNA, 201 bp, Homo sapiens
ggcaaggactaggttttaaaataggttcctaggctgggtgtggtggcttacgcccgtaatcccagcactttgggaggctgaggtgggcggatcacgaggtmaggagtttgagaccagcctggccaacatagtgaaaccctgtctctactaaaaatacaaaaaattagctgggcatagtggcacacacctgtaatcccagct

SEQ ID NO: 38764 - DNA, 201 bp, Homo sapiens
taaaaagaggttaagaatccatgctctaaacagaatattactccattttatttcatttatttttaaagagacagtctcactctgtcatccaggctggagtrcagtggagtgatcatagctcattgcaaccctgaactcttgggcacaagcaattctcctgcttcatcctccagaggagctgggactacaggtgcacatcac

SEQ ID NO: 38765 - DNA, 201 bp, Homo sapiens; identical to SEQ ID NO: 5943

SEQ ID NO: 38766 - DNA, 201 bp, Homo sapiens
ctataacaagtgttggtgaaaatgtgacagaactggaactctcataaagtgaaagtggaaaatagcttggccatttctttgaaaattacacacacctaccrtaagaccctaccatcccactactagtaatttatctaagagaaataaaaacatatgtctatatgaagacttgtacacaagtaaatgttcataacagctttg

SEQ ID NO: 38767 - DNA, 201 bp, Homo sapiens
attttatttaaataaaatatactatatatatatgtatatatatgtatgtgtatatatatatatatgtatatatatatatatatatatatatatagagagakagagagagagagagagagagagagagagagacagagtatgtctgaaaatgcatcccaatagttctagcaaatgtaggaaaaggaagtataaattaacagc

SEQ ID NO: 38768 - DNA, 201 bp, Homo sapiens
gtttccaactgcgatgatccattctctccaccactgcccttgggcccagcccaatttaggtccaccatgcccagaggcatgaatttaacttatgacactcytgtggtggaataatggctttgggcttatgtagccatgtgtcatttttttagagatacaaattgaaatatttggggtgagatgtcatggtgtctactggcc

SEQ ID NO: 38769 - DNA, 201 bp, Homo sapiens
ctttttatctgcaacctcagcagcatggttttatttctctttatggctgaatagtgttccattgtgcatatataccacactttctttatggattcatctgytgatggacatataggttgattccacatctctgctattgtgaatagtgctgtgataaacacacaggtgcgggttgggtcttgatgatctcagttaacatcc

SEQ ID NO: 38770 - DNA, 201 bp, Homo sapiens
ttgctattgtgaatagtgcttcagtgaacaggtgtctttatgatagaaaaatttatatgcctttgggcatatatgcagtgatgagattgctgggtcagacrgtagttctgtttttagctctttgaggaatcatcctgctgctttctacagtggatgaactaatttacactcccaccaacagtgtataaacactccttttta

SEQ ID NO: 38771 - DNA, 201 bp, Homo sapiens
atgtcacaggggtttgttgtacagattatttcatcaccacccaagtattaagcctagtacccattagttattttttctgatcctctccctcctcccaccckccacccgccacccgccaccctccaacctcaggtaggccccagtgtgtgttgttcccctctatgtgtccatgtgttctcatcatttagctcccacttataa

SEQ ID NO: 38772 - DNA, 201 bp, Homo sapiens
ggtggtatcaccttatggttttgatttccctggtcattagtgatgttgaacatttttttcatatgttcattagccatttgtatatattctttcaacaactrtctatttatgtccttagcccactttttgatgggattgtttttttcttgccaatttgtttgagttcgttgtagattctagatattagtcctttgttggata

SEQ ID NO: 38773 - DNA, 201 bp, Homo sapiens; identical to SEQ ID NO: 5944

SEQ ID NO: 38774 - DNA, 201 bp, Homo sapiens; identical to SEQ ID NO: 5945

SEQ ID NO: 38775 - DNA, 201 bp, Homo sapiens
ataacaccactcctctaccattcccaccaaccatgtataagagttccttttcttgcatccttgccaacttgacttctttgggtcagtttgcactctcttgstatttactatttacttctccatttatatttttagtcaactgatgcccatggcaccgctcctctgaggcaggtgctgggtactagagtgataagacagatg

SEQ ID NO: 38776 - DNA, 201 bp, Homo sapiens; identical to SEQ ID NO: 5946

SEQ ID NO: 38777 - DNA, 201 bp, Homo sapiens; identical to SEQ ID NO: 5948

SEQ ID NO: 38778 - DNA, 201 bp, Homo sapiens; identical to SEQ ID NO: 5954

SEQ ID NO: 38779 - DNA, 201 bp, Homo sapiens
tgatggtaatgatgatatgactatggtgataatgatgtttgtggtagtattgatggggattatcgttgtggtgatggtcttggtgctgatgctgacaatartggtgatgatgatgatgatgatgataatggtgatgacaaaggtaacaggtaatatctgatatttttcagcactgaatatgcaccaaaagctgggctcaga

SEQ ID NO: 38780 - DNA, 201 bp, Homo sapiens
atgatggtaatgatgatatgactatggtgataatgatgtttgtggtagtattgatggggattatcgttgtggtgatggtcttggtgctgatgctgacaatratggtgatgatgatgatgatgatgataatggtgatgacaaaggtaacaggtaatatctgatatttttcagcactgaatatgcaccaaaagctgggctcag

SEQ ID NO: 38781 - DNA, 201 bp, Homo sapiens
cagagagcagctgtatttggagctgagccagctgacccacagcatcactgagctgggcccctacacactggacagggacagtctctatgtcaatggtgagyggctgtgatgtggttggagattcttcctctttgctggacagcttcttactctctgacttgaggtcacactccctgactggccattgacgtcttggctatg

SEQ ID NO: 38782 - DNA, 201 bp, Homo sapiens
tttcacccatcgaagctctatgcccaccaccagcagtgagtattcaactcatgtccacatgcccatgatcctacaccaagcaaagcaggagctgcccctcytcataaacccataagtcctcctcttgagcaaagtagctgggaaggcagaagttattcaagctcccctctgccccagtttcaaagacagactcagctcaag

SEQ ID NO: 38783 - DNA, 201 bp, Homo sapiens; identical to SEQ ID NO: 5959

SEQ ID NO: 38784 - DNA, 201 bp, Homo sapiens
catccttgttacctgtctcttctcccacagaacccacagccagaagaaagagttctccagaaacatgggcaagctctatttcagttcctgccaagacctcsttggttgaaagtaagaatgccctgctccttccccaagtgtgctggggatgaatctggaaataaactacatcttttttattttttaaacttttatatttga

SEQ ID NO: 38785 - DNA, 201 bp, Homo sapiens
aagaggcctccatctcacccactctccctacccatctttctaggtcaccacactctacaaaggcagtcaactacatgacacattccgcttctgcctggtcrccaacttgacgtaagttctgaaggtcataagcagtgaccaagcttgtggctgtgtctctgagcacccttgagctagacgtccccagtggggtacccattc

SEQ ID NO: 38786 - DNA, 201 bp, Homo sapiens; identical to SEQ ID NO: 5971

SEQ ID NO: 38787 - DNA, 201 bp, Homo sapiens; identical to SEQ ID NO: 5978

SEQ ID NO: 38788 - DNA, 201 bp, Homo sapiens; identical to SEQ ID NO: 5981

SEQ ID NO: 38789 - DNA, 201 bp, Homo sapiens; identical to SEQ ID NO: 5984

SEQ ID NO: 38790 - DNA, 201 bp, Homo sapiens; identical to SEQ ID NO: 5987

SEQ ID NO: 38791 - DNA, 201 bp, Homo sapiens; identical to SEQ ID NO: 5834

SEQ ID NO: 38792 - DNA, 201 bp, Homo sapiens
aatagttctagcaaatgtaggaaaaggaagtataaattaacagcctttatgtatgccctggttgaaaaacagacataactctcttgtaagagaaacttcamaaaaatatctaggattatatctcccatgatgaaaaatttggaactgtacattttttttaactgtcacttaaataaagaagatgggtgagctcctgggtta

SEQ ID NO: 38793 - DNA, 201 bp, Homo sapiens; identical to SEQ ID NO: 5838

SEQ ID NO: 38794 - DNA, 201 bp, Homo sapiens
ggatttttttggttttgttttcttttgtgttttgagatggagtctcactctgttgcccaggctggagtgcaatggcacgatctcagctcactgcaaccacygcctcccaggttcaagcgattctcctgcctcagcctcctgagtagctgagattacaggtgggtgccaccatacccagctaatttttgtatttttagtaga

SEQ ID NO: 38795 - DNA, 201 bp, Homo sapiens; identical to SEQ ID NO: 5850

SEQ ID NO: 38796 - DNA, 201 bp, Homo sapiens
ggtgagactttagaagagccagcctgggtgcccaacttgttcccactctaaaagactttgcactgcttccttgctgcacttcctaggtatatcttcaccamaaggggaattcaggagtcattggcttgagaaccagttgtttcctgatagtaacacccccatgccccaactcaacatgcaaaatcttcatggttcatcatc

SEQ ID NO: 38797 - DNA, 201 bp, Homo sapiens
cttgcccacaaaagatgcaagccctgctcactgaggccagccatgcccactggtgcctgctccacccacctgacttctgccccacacacatgcaccttagmcctcctactcactttcctctcgctcctccacagcttggtcccatattcaagaacaccagtgttggccctctgtactctggctgcagactgacctctctca

SEQ ID NO: 38798 - DNA, 201 bp, Homo sapiens
aatttatcaatccggggcgagtaccagataaatttccacattgtcaactggaacctcagtaatccagaccccacatcctcagagtacatcaccctgctgarggacatccaggacaaggtggggcatctctcacccctcccgtcttctctgtcctgtgtgcttctctccctcttctacctgatttctctgttaagtgatcac

SEQ ID NO: 38799 - DNA, 201 bp, Homo sapiens; identical to SEQ ID NO: 5862

SEQ ID NO: 38800 - DNA, 201 bp, Homo sapiens
ctcacctcccctctccttccttgcagctcaaacccttgttcaggaatagcagtctggaatacctctattcaggctgcagactagcctcactcaggtgagaygctccttaagaaaaacacagcccaacaggtgaatatgaccctagtctctgggctccctgactctgttcatacttggaacaactattgcccatggatacta

SEQ ID NO: 38801 - DNA, 201 bp, Homo sapiens
tctgctctcactaatgaggacttctcctcagctcctgggacctccacagtggatgtgggaacctcagggactccatcctccagccccagccccacgagtawgtaccagtcaatggcatctctattagagcatgctatctctgtcatttttactcagatgaagatggaaaatcatagcaaatctactgatagtgagtggacc

SEQ ID NO: 38802 - DNA, 201 bp, Homo sapiens
accatgtatcaggaatataacagagagtaactgtttgctctttcaccactatattccaagaaccccatattctgcctggcacataataaacactcaagtcmtatttgcagaaggaataactagatttcatacaaggttcttttcaagtcaaatgcgaataacgttttagacgggaccttccaatgcctgtgtgcactgtcc

SEQ ID NO: 38803 - DNA, 201 bp, Homo sapiens; identical to SEQ ID NO: 5876

SEQ ID NO: 38804 - DNA, 201 bp, Homo sapiens; identical to SEQ ID NO: 5878

SEQ ID NO: 38805 - DNA, 201 bp, Homo sapiens; identical to SEQ ID NO: 5880

SEQ ID NO: 38806 - DNA, 201 bp, Homo sapiens; identical to SEQ ID NO: 5881

SEQ ID NO: 38807 - DNA, 201 bp, Homo sapiens; identical to SEQ ID NO: 5882

SEQ ID NO: 38808 - DNA, 201 bp, Homo sapiens; identical to SEQ ID NO: 5884

SEQ ID NO: 38809 - DNA, 201 bp, Homo sapiens
ggagccattcacactgaacttcaccatcaacaacctgcgctacatggcggacatgggccaacccggctccctcaagttcaacatcacagacaacgtcatgmagcacctggtgagaggcctgcctcccgctgcagccctgccatgcccatcctagggctgttgcctgcctgcctctgaccaacccaagctcccttctccctc

SEQ ID NO: 38810 - DNA, 201 bp, Homo sapiens; identical to SEQ ID NO: 5885

SEQ ID NO: 38811 - DNA, 201 bp, Homo sapiens
acatacatacatagtaaataaaaatgagagtataacatgaaaaagaaaaaatctcctttccctgcccacctgaaacccaatctctcacctcaaaaagaaaytattgtctttattcccttgtgtcacacaaaggagtgtaattttttgttttgttttgttttgtttttgaaacagagtctcaatctgtcacccaggctggag

SEQ ID NO: 38812 - DNA, 201 bp, Homo sapiens; identical to SEQ ID NO: 5886

SEQ ID NO: 38813 - DNA, 201 bp, Homo sapiens
aaaaaacctcattggggacactgcaaagagatgttaataaaggattacactttatttcatctgcactatcttccctttttttcttagcgtttttcaggacrgccttcttggtctctcactttctctgcctcattagcgagtccatccgcaatcagtgctattgcgagtctctctctgactgtcttcactttcccttcctgt

SEQ ID NO: 38814 - DNA, 201 bp, Homo sapiens; identical to SEQ ID NO: 5887

SEQ ID NO: 38815 - DNA, 201 bp, Homo sapiens; identical to SEQ ID NO: 5888

SEQ ID NO: 38816 - DNA, 201 bp, Homo sapiens; identical to SEQ ID NO: 5889

SEQ ID NO: 38817 - DNA, 201 bp, Homo sapiens; identical to SEQ ID NO: 5891

SEQ ID NO: 38818 - DNA, 201 bp, Homo sapiens; identical to SEQ ID NO: 2607

SEQ ID NO: 38819 - DNA, 201 bp, Homo sapiens; identical to SEQ ID NO: 5893

SEQ ID NO: 38820 - DNA, 201 bp, Homo sapiens; identical to SEQ ID NO: 5896

SEQ ID NO: 38821 - DNA, 201 bp, Homo sapiens; identical to SEQ ID NO: 5897

SEQ ID NO: 38822 - DNA, 201 bp, Homo sapiens; identical to SEQ ID NO: 5898

SEQ ID NO: 38823 - DNA, 201 bp, Homo sapiens; identical to SEQ ID NO: 5900

SEQ ID NO: 38824 - DNA, 201 bp, Homo sapiens
atttgcatatactccactgacttactttctaatcacaggcacatccccaggaagcccagaaatgtctaccactctcaaaatcatgagctccaaggaacccrgcatcagcccagagatcaggtccactgtgagaaattctccttggaagactccagaaacaactgttcccatggagaccacagtggaaccagtcacccttca

SEQ ID NO: 38825 - DNA, 201 bp, Homo sapiens
caacattttctttcccagagaaggaggaaatagttttaattgaaatcccgggaggaaatgaatgatagtgtcaaaccaaaaaacttcatcttctgtaccayttgcatatactccactgacttactttctaatcacaggcacatccccaggaagcccagaaatgtctaccactctcaaaatcatgagctccaaggaacccag

SEQ ID NO: 38826 - DNA, 201 bp, Homo sapiens; identical to SEQ ID NO: 5902

SEQ ID NO: 38827 - DNA, 201 bp, Homo sapiens
aatattttatattgttattttatgttttattctatatttttattttaatttataaaggaattcatatggttcacaagcctgtcaaagggacctataataaraagaggttaagaatccatgctctaaacagaatattactccattttatttcatttatttttaaagagacagtctcactctgtcatccaggctggagtacag

SEQ ID NO: 38828 - DNA, 201 bp, Homo sapiens; identical to SEQ ID NO: 5908

SEQ ID NO: 38829 - DNA, 201 bp, Homo sapiens; identical to SEQ ID NO: 5909

SEQ ID NO: 38830 - DNA, 201 bp, Homo sapiens; identical to SEQ ID NO: 5911

SEQ ID NO: 38831 - DNA, 201 bp, Homo sapiens
aagctctaacttcaccatctcccttggaatgtttaatgtgttccctggtgtccagaggcttaaagtgtgagaattaaaagctcaacattttctttcccagrgaaggaggaaatagttttaattgaaatcccgggaggaaatgaatgatagtgtcaaaccaaaaaacttcatcttctgtaccatttgcatatactccactga

SEQ ID NO: 38832 - DNA, 201 bp, Homo sapiens
agtttgagaccagcctggccaacatagtgaaaccctgtctctactaaaaatacaaaaaattagctgggcatagtggcacacacctgtaatcccagctactygggaggctgaggaaggagaatcacttgaacctgggaggcggaggttgcagtgagccgagatcacgccattgctctccagcctgggtgacagagcaagact

SEQ ID NO: 38833 - DNA, 201 bp, Homo sapiens
cactatattgcttgggctggtctcaaactcctggactcaagtgattcacctacctcggcctccctaagcactgggattacaggcttgagccaccacacccrgcaaggactaggttttaaaataggttcctaggctgggtgtggtggcttacgcccgtaatcccagcactttgggaggctgaggtgggcggatcacgaggtc

SEQ ID NO: 38834 - DNA, 201 bp, Homo sapiens
ctttttaaattttttatttttttacttaatttttttcacccaagccttaaggccaatttggaccagatagtgagaccccacctctataaaaaaaatttttwaaaaaaaaataagttgggcatcgtgcaggcctgtagtccctgctactcgagaggccaaggtgggaggacagcttgctgctgactaaaagtgctgcttatt

SEQ ID NO: 38835 - DNA, 201 bp, Homo sapiens
tcttttcttttcttttcttttcttttcttttctttctctccctttctttctttctttctttctttctttctttctttctttctttctttctttctttctttctttctttctttctttctttctttctttctttctttctttctctttctttcttctttctctctctctctttctttctttctcttgttctttttaaatttt

SEQ ID NO: 38836 - DNA, 201 bp, Homo sapiens
ttcttttcttttcttttcttttcttttcttttctttctctccctttctttctttctttctttctttctttctttctttctttctttctttctttctttctttctttctttctttctttctttctttctttctttctttctttctctttctttcttctttctctctctctctttctttctttctcttgttctttttaaattt

SEQ ID NO: 38837 - DNA, 201 bp, Homo sapiens
tagaccttgtttccatttctgctctgctaatgccacccaagcctttcttttcttttcttttcttttcttttcttttcttttcttttcttttctttctctccctttctttctttctttctttctttctttctttctttctttctttctttctttctttctttctttctttctttctttctttctttctttctttctttcttt

SEQ ID NO: 38838 - DNA, 201 bp, Homo sapiens
atatagaccttgtttccatttctgctctgctaatgccacccaagcctttcttttcttttcttttcttttcttttcttttcttttcttttcttttctttctytccctttctttctttctttctttctttctttctttctttctttctttctttctttctttctttctttctttctttctttctttctttctttctttctttc

SEQ ID NO: 38839 - DNA, 201 bp, Homo sapiens; identical to SEQ ID NO: 5917

SEQ ID NO: 38840 - DNA, 201 bp, Homo sapiens
tgggattataggcatgagccaccacgccaggcccactctctaaattttgaccaccctgccttgagtggtcttctagcaccctaacctctgtctaacctcgrgagctttgcactagcgattcctggggaccagctatggttggtatcttctcaactttctaatttttttaaaattattattattattattattattttaaat

SEQ ID NO: 38841 - DNA, 201 bp, Homo sapiens
caggtaaatatagaccttgtttccatttctgctctgctaatgccacccaagcctttcttttcttttcttttcttttcttttcttttcttttcttttcttttctttctctccctttctttctttctttctttctttctttctttctttctttctttctttctttctttctttctttctttctttctttctttctttctttct

SEQ ID NO: 38842 - DNA, 201 bp, Homo sapiens
cagtccagcaggtaaatatagaccttgtttccatttctgctctgctaatgccacccaagcctttcttttcttttcttttcttttcttttcttttcttttcytttcttttctttctctccctttctttctttctttctttctttctttctttctttctttctttctttctttctttctttctttctttctttctttctttct

SEQ ID NO: 38843 - DNA, 201 bp, Homo sapiens
tcttctagcaccctaacctctgtctaacctcgagagctttgcactagcgattcctggggaccagctatggttggtatcttctcaactttctaatttttttwaaattattattattattattattattttaaatggagtctcgctctgtcacccaggctggagtgcagtggcaccatctcggctcattgcaacctctacctc

SEQ ID NO: 38844 - DNA, 201 bp, Homo sapiens
gagacatagtcttgctctgtcacccaggctagaatgcaatggcgtgatctcagcccactgcaacctctgcctcctaggttcaagcgattctcctgcctccrcctcctgagtagctgggattacaggtgcatgccaccatgcccagctaatttttatatttttagtagaggtggagcttcaccatattggtcaaactgatct

SEQ ID NO: 38845 - DNA, 201 bp, Homo sapiens; identical to SEQ ID NO: 5926

SEQ ID NO: 38846 - DNA, 201 bp, Homo sapiens; identical to SEQ ID NO: 5927

SEQ ID NO: 38847 - DNA, 201 bp, Homo sapiens
actaatacagcaaaccttctcctcagctcctgatacctccacaatgcacctggcaacctcgagaactccagcctccctgtctggacctacgagtgagtacyattcagtgtcatctctattacagcatgcctgaggagtgtcaacatctctgccattttcttttctttcttttttttcttttttgagacatagtcttgctct

SEQ ID NO: 38848 - DNA, 201 bp, Homo sapiens; identical to SEQ ID NO: 5929

SEQ ID NO: 38849 - DNA, 201 bp, Homo sapiens
ttgctgctttcactaatacagcaaaccttctcctcagctcctgatacctccacaatgcacctggcaacctcgagaactccagcctccctgtctggacctaygagtgagtaccattcagtgtcatctctattacagcatgcctgaggagtgtcaacatctctgccattttcttttctttcttttttttcttttttgagacat

SEQ ID NO: 38850 - DNA, 201 bp, Homo sapiens; identical to SEQ ID NO: 5930

SEQ ID NO: 38851 - DNA, 201 bp, Homo sapiens
gtttgctgctttcactaatacagcaaaccttctcctcagctcctgatacctccacaatgcacctggcaacctcgagaactccagcctccctgtctggaccyacgagtgagtaccattcagtgtcatctctattacagcatgcctgaggagtgtcaacatctctgccattttcttttctttcttttttttcttttttgagac

SEQ ID NO: 38852 - DNA, 201 bp, Homo sapiens
ttctatgcccctatatcctcttcatgagggaaggaagagagagcacaagttattcccctttccctctggcccagctccagatggagatactgccccacatkcagcaagggccataaatactcctacctgctggtgtttctgccatgagagggtttgctgctttcactaatacagcaaaccttctcctcagctcctgatacc

SEQ ID NO: 38853 - DNA, 201 bp, Homo sapiens
gggattacaggtgtgaaccatcatgccctgttctgagcttccttacttaggtgctctttccatccttttctcctcacaggaactcacgagcctggggagarttcgtcatccccacatggaacctcagtatggccaacaggcagccctctggtggaaaaatcaacaatcagtcctgcaggtatgctccaatctcatctcctc

SEQ ID NO: 38854 - DNA, 201 bp, Homo sapiens
ctctcgtccctccatctcaatgcaggtttcacccatcagagctctatgacgaccaccagaagtgagtattaactgatgttccagtgctcctgatcctacaycataaagggcaggagcttacctctccttctatgcccctatatcctcttcatgagggaaggaagagagagcacaagttattcccctttccctctggcccag

SEQ ID NO: 38855 - DNA, 201 bp, Homo sapiens
ggcccctacaccctggacaggcacagtctctatgtcaatggtgagcaactttgatgtggttggagtctcttcctccttgctggacagcctctattctctgrcctgaggtcacacttcccgtctggctattgaaggctcaaccatgttgtctgtatgtggtggctaaggtcaaaacttcgtggtttcttcttcatctcaaac

SEQ ID NO: 38856 - DNA, 201 bp, Homo sapiens
accagtccagcaggtaaatatagaccttgtttccatttctgctctgctaatgccacccaagcctttcttttcttttcttttcttttcttttcttttctttycttttcttttctttctctccctttctttctttctttctttctttctttctttctttctttctttctttctttctttctttctttctttctttctttcttt

SEQ ID NO: 38857 - DNA, 201 bp, Homo sapiens
ggaccagtccagcaggtaaatatagaccttgtttccatttctgctctgctaatgccacccaagcctttcttttcttttcttttcttttcttttcttttctyttcttttcttttctttctctccctttctttctttctttctttctttctttctttctttctttctttctttctttctttctttctttctttctttctttct

SEQ ID NO: 38858 - DNA, 201 bp, Homo sapiens
cggggaccagtccagcaggtaaatatagaccttgtttccatttctgctctgctaatgccacccaagcctttcttttcttttcttttcttttcttttcttttcttttcttttcttttctttctctccctttctttctttctttctttctttctttctttctttctttctttctttctttctttctttctttctttctttctt

SEQ ID NO: 38859 - DNA, 201 bp, Homo sapiens
ctactgaaggacgcttggttatggtcagtactttggacacttcaagccaaccaggcaggacatcttcatcacccattttggataccagaatgacagagagygttgagctgggaacagtgacaagtgcttatcaagttccttcactctcaacacggttgacaagtaaggacccacagcccctacaatcccattattgggggc

SEQ ID NO: 38860 - DNA, 201 bp, Homo sapiens
ggagacggggaccagtccagcaggtaaatatagaccttgtttccatttctgctctgctaatgccacccaagcctttcttttcttttcttttcttttcttttcttttcttttcttttcttttctttctctccctttctttctttctttctttctttctttctttctttctttctttctttctttctttctttctttctttct

SEQ ID NO: 38861 - DNA, 201 bp, Homo sapiens
aggagacggggaccagtccagcaggtaaatatagaccttgtttccatttctgctctgctaatgccacccaagcctttcttttcttttcttttcttttcttttcttttcttttcttttcttttctttctctccctttctttctttctttctttctttctttctttctttctttctttctttctttctttctttctttctttc

SEQ ID NO: 38862 - DNA, 201 bp, Homo sapiens
gaggagacggggaccagtccagcaggtaaatatagaccttgtttccatttctgctctgctaatgccacccaagcctttcttttcttttcttttcttttcttttcttttcttttcttttcttttctttctctccctttctttctttctttctttctttctttctttctttctttctttctttctttctttctttctttcttt

SEQ ID NO: 38863 - DNA, 201 bp, Homo sapiens
cagaggagacggggaccagtccagcaggtaaatatagaccttgtttccatttctgctctgctaatgccacccaagcctttcttttcttttcttttcttttcttttcttttcttttcttttcttttctttctctccctttctttctttctttctttctttctttctttctttctttctttctttctttctttctttctttct

SEQ ID NO: 38864 - DNA, 201 bp, Homo sapiens
gcagaggagacggggaccagtccagcaggtaaatatagaccttgtttccatttctgctctgctaatgccacccaagcctttcttttcttttcttttcttttcttttcttttcttttcttttcttttctttctctccctttctttctttctttctttctttctttctttctttctttctttctttctttctttctttctttc

SEQ ID NO: 38865 - DNA, 201 bp, Homo sapiens
ctttcagcaactgatggaacgctagtgaccaccataaagatgtcaagccaggcagcacaaggaaattccacgtggcctgccccagcagaggagacggggascagtccagcaggtaaatatagaccttgtttccatttctgctctgctaatgccacccaagcctttcttttcttttcttttcttttcttttcttttcttttc

SEQ ID NO: 38866 - DNA, 201 bp, Homo sapiens; identical to SEQ ID NO: 5942

SEQ ID NO: 38867 - DNA, 201 bp, Homo sapiens
tccagaggtagacagggcatcacatgtcaagacagctgagtgcgctaatgtgatagcacaggtctcacttcctattttaaagcttttcttttctttttttktttgagatggagtctcaatctgtcacccaggatggagtgcagtgctgcgatcttggctcactgcaacctccacctcctgggttcaagtgattttcctctc

SEQ ID NO: 38868 - DNA, 201 bp, Homo sapiens
ctcctccaccttgatcctgtaagagcccagctggagtttgcagacgacggggaaagaaatgggtgagggagggtcctatggttgagtctccgcagtgggcmctgggtgcccagttcaccctcctccccttcattttctccatcatgacaactcaaggcaaattctcagtttccatgggccagtggaatccactgacttcat

SEQ ID NO: 38869 - DNA, 201 bp, Homo sapiens
cagctcaaaaataaataaataaataatatatatatatatattttatttaaataaaatatactatatatatatgtatatatatgtatgtgtatatatatatrtatgtatatatatatatatatatatatatatagagagagagagagagagagagagagagagagagagagacagagtatgtctgaaaatgcatcccaatag

SEQ ID NO: 38870 - DNA, 201 bp, Homo sapiens
caaattgcttagaaaaatgtgaaatatggtccctaggagtgctcttgggatgtcacatttttctcactcctttgacaggtagatgttattttcctgaaggmcagggaaaggattcagagggaggaatgaatttgaaagaaaatgaaggtgacgagaaagaatgagctcatctcccttatcctctttcttctcaaatcctta

SEQ ID NO: 38871 - DNA, 201 bp, Homo sapiens; identical to SEQ ID NO: 5949

SEQ ID NO: 38872 - DNA, 201 bp, Homo sapiens
ctgaccacacctgggatgtccaccttggcctctgagagtgtgacctcaagaacaagtaagaataacttttttattgtggtaaaatataaatactataaaamttgccattctaaacattttaattgtacaactcagcagtactaatacattcacattgttgtgcaaccctcaccactatctgttttcaaaactttttttatc

SEQ ID NO: 38873 - DNA, 201 bp, Homo sapiens
tctcccttatcctctttcttctcaaatccttaagtagctttgcagtgaactaagatttgggggaacctagaggaggctgaaagttggaagctgaaattggyttggcaagggcaagctccaaagacaaaagtggaaatagtttgggggtagcctcttgcatgggtgaagtcctggttcatcacatcctcccttatgcaaaga

SEQ ID NO: 38874 - DNA, 201 bp, Homo sapiens
cccttatcctctttcttctcaaatccttaagtagctttgcagtgaactaagatttgggggaacctagaggaggctgaaagttggaagctgaaattggtttrgcaagggcaagctccaaagacaaaagtggaaatagtttgggggtagcctcttgcatgggtgaagtcctggttcatcacatcctcccttatgcaaagagcc

SEQ ID NO: 38875 - DNA, 201 bp, Homo sapiens
gatttgggggaacctagaggaggctgaaagttggaagctgaaattggtttggcaagggcaagctccaaagacaaaagtggaaatagtttgggggtagcctyttgcatgggtgaagtcctggttcatcacatcctcccttatgcaaagagcccttttatatggggcatggggaaaaactgagctaaaggtgataatttctcc

SEQ ID NO: 38876 - DNA, 201 bp, Homo sapiens
tagaggaggctgaaagttggaagctgaaattggtttggcaagggcaagctccaaagacaaaagtggaaatagtttgggggtagcctcttgcatgggtgaartcctggttcatcacatcctcccttatgcaaagagcccttttatatggggcatggggaaaaactgagctaaaggtgataatttctcctgagcaagccagat

SEQ ID NO: 38877 - DNA, 201 bp, Homo sapiens; identical to SEQ ID NO: 5950

SEQ ID NO: 38878 - DNA, 201 bp, Homo sapiens; identical to SEQ ID NO: 5951

SEQ ID NO: 38879 - DNA, 201 bp, Homo sapiens; identical to SEQ ID NO: 5953

SEQ ID NO: 38880 - DNA, 201 bp, Homo sapiens
ttgaggtcacactccctgactggccattgacgtcttggctatgttgtctgtatgtgatgactgatgtctgaacttcatagtttcttcatcttggactgagytcatcctcagtaccttcttccctgatctgagggtactgatagagaatcttcaaaggcccctgttccttgaaacttcttccattccactagggtatctgtg

SEQ ID NO: 38881 - DNA, 201 bp, Homo sapiens
cccttctgcactccctggagatgtccgcagccaggtggaatccaggaggcagtggctctaagaccaatgtgcttcctgttcccaccacctcccacctcaamtgagagatgcagagcccatcagcaggactgagcttctaccttggtcatccctctgaattccctcctttcccctacctgcctttccacaagtggttcaatt

SEQ ID NO: 38882 - DNA, 201 bp, Homo sapiens
agtgctgggattacaggcatgagccaccgtgcccagcctggttcctggtttctaagacatcacacacacacacacacacacacacacacacacacacacamtcacacactcagagagagagagagagaggatcattaagacatgatacactaagaaattctattctgcagacactgagaatccgttaaaaagtttgaaggg

SEQ ID NO: 38883 - DNA, 201 bp, Homo sapiens
ttccactttgcaattttataaaaatccttgcatccatgattctgctcatagttgctaagagtcagtgcactcagagaatggaagtatggcttctcacttckctaccaggcttctcatttcctctggccccctcctgtcctgccctgtgggatctcagaacccctccctaggcaatccgtgtattgtctttccccaatcttg

SEQ ID NO: 38884 - DNA, 201 bp, Homo sapiens
cgatgttcacagtgttgctgatgttgatgatgatcgtggtgttggcaaaggtagtagataatgtctagtagtatggaatactgaatatgcaccaagagctrtgcttagcatctaactactattatttagtatgctctatgagaactatgtaccattacagtgaagggaggcgtgaaaaccttttattttgtcactttaaat

SEQ ID NO: 38885 - DNA, 201 bp, Homo sapiens; identical to SEQ ID NO: 5957

SEQ ID NO: 38886 - DNA, 201 bp, Homo sapiens; identical to SEQ ID NO: 5958

SEQ ID NO: 38887 - DNA, 201 bp, Homo sapiens
ctctggctttggccatattctcacccctgtggtctcctctccctggacggctgaccagtccattctcacgcctcctcctcaccctcataggtgaccacccrccggcggaagaaggaaggagaatacaacgtccagcaacagtgcccaggctactaccagtcacacctagacctggaggatctgcaatgactggaacttgcc

SEQ ID NO: 38888 - DNA, 201 bp, Homo sapiens
aaaggtgataatttctcctgagcaagccagatggtcaaagctctaacttcaccatctcccttggaatgtttaatgtgttccctggtgtccagaggcttaamgtgtgagaattaaaagctcaacattttctttcccagagaaggaggaaatagttttaattgaaatcccgggaggaaatgaatgatagtgtcaaaccaaaaa

SEQ ID NO: 38889 - DNA, 201 bp, Homo sapiens; identical to SEQ ID NO: 5961

SEQ ID NO: 38890 - DNA, 201 bp, Homo sapiens
gaagattagaatagcatttcaatcagacacctgccctcgtggagtcccagattttatgaaataaatagaccatcataatgtcagatgttttggggtgagayacctggcatagttgggaaggaggagggctttctggagaaagtttcacctgaactgagtctttaaggatgactaagagtgattcaggcaaatagggcatga

SEQ ID NO: 38891 - DNA, 201 bp, Homo sapiens; identical to SEQ ID NO: 5964

SEQ ID NO: 38892 - DNA, 201 bp, Homo sapiens; identical to SEQ ID NO: 5965

SEQ ID NO: 38893 - DNA, 201 bp, Homo sapiens; identical to SEQ ID NO: 5969

SEQ ID NO: 38894 - DNA, 201 bp, Homo sapiens; identical to SEQ ID NO: 5970

SEQ ID NO: 38895 - DNA, 201 bp, Homo sapiens
agccgagatcgcgccactgcactccagcctgggcgacagatggagactctgtctcaaaaataaataaataaataaaaataaaaaataaataaacaatggargtaaacacgtactgataacacagtgtgatcattgctatgataagggaatttcaggggcctgtgggagccccaaggaggaacacacaaccttgtcttggaa

SEQ ID NO: 38896 - DNA, 201 bp, Homo sapiens; identical to SEQ ID NO: 5975

SEQ ID NO: 38897 - DNA, 201 bp, Homo sapiens; identical to SEQ ID NO: 5979

SEQ ID NO: 38898 - DNA, 201 bp, Homo sapiens; identical to SEQ ID NO: 5980

SEQ ID NO: 38899 - DNA, 201 bp, Homo sapiens
agctcccacttatgattgagaacatgtgatatttgtctgtctgtgtctgacttgtttcacttaaggtaacttcagtttcatccatgttgctgcaaaagacrtggattcattctttttttctaacttttaagttcagacatacacgtgcagattttctatatggttaaactcatgtcacaggggtttgttgtacagattatt

SEQ ID NO: 38900 - DNA, 201 bp, Homo sapiens; identical to SEQ ID NO: 5988

SEQ ID NO: 38901 - DNA, 201 bp, Homo sapiens; identical to SEQ ID NO: 5827

SEQ ID NO: 38902 - DNA, 201 bp, Homo sapiens
tccatttagtcctttctcatcatccaccttgctcctaccccctcacccttccaagccccctttatctatcattcccctctctgagttcttgtctacacatkgtttagctcccacttatgattgagaacatgtgatatttgtctgtctgtgtctgacttgtttcacttaaggtaacttcagtttcatccatgttgctgcaaa

SEQ ID NO: 38903 - DNA, 201 bp, Homo sapiens; identical to SEQ ID NO: 5829

SEQ ID NO: 38904 - DNA, 201 bp, Homo sapiens
cagtggtggaaccaggatatgaactccacttgtcagcattcggtgctatgatccactccacatgtttaactcacagaagagtcttcctggtgggggcactygggggacaaaaaacacatttccggctgtgagcagtggctcacacctgtaatcccagcactttgggaggccaaggcgggcggatcacaaggtcaagagatt

SEQ ID NO: 38905 - DNA, 201 bp, Homo sapiens
gttgcagtgagctgagatcacaccactgcacttcagcctgagcaacagagcaagactccgtctcaaaaaaaaaaaaaaaatatatatatatatatagttarctctctaaagaaaatcctaactctgccacttcctggttctgggacctgaggcttgtcatttcacctccttagacttcagtttcttcagctgtaaaatggg

SEQ ID NO: 38906 - DNA, 201 bp, Homo sapiens
ttgcaaaacaatctgtgaagatggtagaaggactcccattgtatcatgttctcatgtcttacttgggtcaaagccattatttaacctggaatgcctcacctactgtcatccccaattccccaattcctttttggtctacaaatcatgctttctttctttctttctttttttttttttgaggccgagtctcgctctgtcgcc

SEQ ID NO: 38907 - DNA, 201 bp, Homo sapiens
tcaaagccattatttaacctggaatgcctcacctactgtcatccccaattccccaattcctttttggtctacaaatcatgctttctttctttctttctttytttttttttgaggccgagtctcgctctgtcgcccaggctggagtgcagtggcatgacctcggctcactgcaacctccgccttctgggttcaagcaattat

SEQ ID NO: 38908 - DNA, 201 bp, Homo sapiens
agaacttcaccctggacaggagcagtgtccttgtggatggtaaagctccctgggtcattgggactgaggtggaagctcccacttcctcacctgggtccttycctgggaatctgaaggcttggggttgattcgtcatcgagctttctcagactgggagaaagtggcttagttctcctaagctttacccatcattgaaggaaa

SEQ ID NO: 38909 - DNA, 201 bp, Homo sapiens
tcgttgcccaggctagagtgcaatggcacgatcttggctcactgcaacctctgcctcccgggttcaagtgattatcctgcctcagcctccccagtagctgkgattacaggcaggcaccaccatgcctggctaattgttttgtatttttagtagagatggggtgtctccatgttgatcaggctggtcttgaactcctgactt

SEQ ID NO: 38910 - DNA, 201 bp, Homo sapiens
tttatgaccatgtacaagtatgcaattctaatctttatcttgttttgagattctaatccagagtagttgggggacaggaagcccagcctataacccctgattttttttttttttttttgagacagagtctcattctgtcacccaggctggagtgcagtggcacaatctcagctgactgcaacccctgcctcccgagtttaa

SEQ ID NO: 38911 - DNA, 201 bp, Homo sapiens; identical to SEQ ID NO: 5848

SEQ ID NO: 38912 - DNA, 201 bp, Homo sapiens
ttatgttgatgacaatgacaatgatggtgatgaggataatgccagtgatggtgtggggttatgatgatgatgatgtgttgaatgtggtgatgataatgttygtggtggtcgtgatgggcattactatggcagtgatggtcataataatgatggtgatggtgacaatgatagcaaggatgatgatggcaataaagatagtac

SEQ ID NO: 38913 - DNA, 201 bp, Homo sapiens
gtccgtgatggtcgtgaagattatgatgataatgatgatgtgttaagtgtgatgatgatgatgactgtggtgatgctgtttaggatgctgaccgtggtacygatgatattgatgttggtcgtggttatgttgatgacaatgacaatgatggtgatgaggataatgccagtgatggtgtggggttatgatgatgatgatgtg

SEQ ID NO: 38914 - DNA, 201 bp, Homo sapiens; identical to SEQ ID NO: 5856

SEQ ID NO: 38915 - DNA, 201 bp, Homo sapiens; identical to SEQ ID NO: 5857

SEQ ID NO: 38916 - DNA, 201 bp, Homo sapiens
aggtgtgtgccaccacacctggctattttttttttaatttttttttttttgtggagaggagggtcttgccatgttgcccaggtggccttgaactcctgggytcaaggaatcctcccaccttggcctcccaaaatcctgggattacaggtgtgagccatcacgcccggctacagggcatttttgacttatgacattttcagt

SEQ ID NO: 38917 - DNA, 201 bp, Homo sapiens
aaccctggcagttgcaagtttctcttccactatttcattctctgaaactcaaatgcaccagaatttccagattagtgttccctgggtggcatattatccayctcacgggtcctctacaatgggaagtagaccaagaagacataaacgggtcagaaatggttctatgggccaggcacagtagctcaaacctgtaatcccagc

SEQ ID NO: 38918 - DNA, 201 bp, Homo sapiens; identical to SEQ ID NO: 5863

SEQ ID NO: 38919 - DNA, 201 bp, Homo sapiens
gtagaatctactacattaagacatcagctactgaaatcaggacccatggaagacgggggaaggaggggactaaaaccagattacttagaatctagcagcckaactgtgcttttcaatgagaggtatcatttccaatggtggggggtaccaatgatttttttttttttgacaactgccttgagaacaggctttcctcactaa

SEQ ID NO: 38920 - DNA, 201 bp, Homo sapiens
aaggcttggggttgattcgtcatcgagctttctcagactgggagaaagtggcttagttctcctaagctttacccatcattgaaggaaagaaaaggacgccygagggatatgggaggcatttgccctcttctggccagctctgtgacctcaggctagtcacatctcctttctggacttcttatctctctgtacttagcaagc

SEQ ID NO: 38921 - DNA, 201 bp, Homo sapiens
acgatttcttttattgggtagatccccaatagtgggattgctgggtcaaatggtagttctacatttttgttctttgagaaatcctcataccattttccatmgattgtactaatttggattcccaccaacagtgtataagagttcccttttcttttattcttgccagcatctggttgtttgttgtttgtttggttggttggt

SEQ ID NO: 38922 - DNA, 201 bp, Homo sapiens
tggatcatgaggtcaggagatcaagaccatcctggctaacacggtgaaaccctgtctctactaaaaatacaaaaaaaatttagtcaggtgtggtggtgcaygcctgtggtcccagctactcaggaggctgaggcaggagaatggcataaaacctgggaggcagagcttgcagtgagccaagatcacaccactgcactctag

SEQ ID NO: 38923 - DNA, 201 bp, Homo sapiens; identical to SEQ ID NO: 5875

SEQ ID NO: 38924 - DNA, 201 bp, Homo sapiens
atctccagtattcaccagatatgggcaagggctcagctacattcaactccaccgagggggtccttcagcacctggtgagaccctggtcccagcagctcctrgtgggataaatcctacccccaacctctgttcctcggcttaccctcttcctccttcctctcaagctcagacccttgttccagaagagcagcatgggcccct

SEQ ID NO: 38925 - DNA, 201 bp, Homo sapiens
atagcaccaacctcacccctgcccctgagagatggaagtcccgcccacagagaccagccctgctcattggtgcctactcctcccacctcacatctgcccckaacacacacactccttagccctcctactcacctctctctccctcctccacagcttggtcccatgttcaagaacaccagtgttggccctctgtactctggc

SEQ ID NO: 38926 - DNA, 201 bp, Homo sapiens
aagcgattcccctgcctcagcctcccgaatagctgggactacaggtatacatcaccacacccagctaagttttgtattttttgtagagacaggtttcaccrtgttggccaggttggtcttgaactcctgatctcaagcaatccacccacctcggcctcccaaagtgctgggattacaggcatgaggcaccgcacctggcct

SEQ ID NO: 38927 - DNA, 201 bp, Homo sapiens
tttgagaaatcctcataccattttccatagattgtactaatttggattcccaccaacagtgtataagagttcccttttcttttattcttgccagcatctgkttgtttgttgtttgtttggttggttggttggtttttgtctttttagtaatagttattctgactggtattaataacttttttatttattcatgacagtttg

SEQ ID NO: 38928 - DNA, 201 bp, Homo sapiens
gcagaagttattcaagctcccctctgccccagtttcaaagacagactcagctcaagcccacatgcagcaaaccctataaaagtctcacctcttggcatttmtgccatggtaatgctttctgctctcactaatgaggacttctcctcagctcctgggacctccacagtggatgtgggaacctcagggactccatcctccagc

SEQ ID NO: 38929 - DNA, 201 bp, Homo sapiens
ttgtgtttttagtagagatggggtttcactgtgttggccaggctggtctcgaactcctgatctcaagtgatccacccgccttggcctcccaaagtgctggrataacaggcatgagccactgtgcctgacctccctgtggctatttttaaatgaattaagtggaataaaattagaaattcagttcttctcccacgctagctg

SEQ ID NO: 38930 - DNA, 201 bp, Homo sapiens
caggcaaatagggcatgaatagtataactgaaagaggggaatctgtgagcaaagcctcagtggccagaaacagcatagagtatagggagaagtgagagaartttggtttgcatgaaacataaagcttaacccagagtggatggataagtgagactgaaaggtcagcaggagccagattgggaagggccttgaatgccaagt

SEQ ID NO: 38931 - DNA, 201 bp, Homo sapiens
caggcatggtggtccacacctgtaatgccagctacttgggaggctgagacaggagaatcacttgaacccaggaagcagaggttgcagtgagccaagatcaygccactgcactccagcctgagtgacagagcaagactctgtctcaaaaaaagaacaagagaaaaaaaaaaaatacctggccaggctcggtggctcacacct

SEQ ID NO: 38932 - DNA, 201 bp, Homo sapiens
gacagaaacagtctctatgtcaatggtgaggagctgcaatatggtaggaatctcttcctccttgctgggcagcctctaatctctggcttgggggcacactycctgcctggccattgaaaattttgtcatgtgctctacatggggtgactaagttctggacttcatggtttcttcatcatcatgaactgcattcccttgggg

SEQ ID NO: 38933 - DNA, 201 bp, Homo sapiens
ccatgacccttattgtgtccctcatatctccttaacgcttaccaagtctcctccctccttctctatgcaggtttcacccatcggacctctgtgcccaccascagcagtgagtattcaactcatgtccacatgcccctgatcctacattaagtggagcaggagctggcccctcctcttaaacccataagtcctcctcttgag

SEQ ID NO: 38934 - DNA, 201 bp, Homo sapiens
tcatttcctctggttctttactgtctttccatcagcagtctcaagacacaacctaagtaatcttttcatagtcattctccccacctaccttccccaggtcygagaaggatggagcagccactggagtggatgccatctgcatccatcatcttgaccccaaaagccctggactcaacagagagcggctgtactgggagctga

SEQ ID NO: 38935 - DNA, 201 bp, Homo sapiens
atgatgataataaagttaacagaaaatgtcagacagtattgagcaataaatattcaccaacagctatgctcagcatctactattatataatatacttttayaaaaataaattatattattataggcaagggaggcatggaaaatattttgtcagtcaatttaaattctgcatatattgaaagataagtctattgcaaactc

SEQ ID NO: 38936 - DNA, 201 bp, Homo sapiens
gggttatgatggtaatgatgatgtgttgagagtgatgatgtttgtggtggtcatgatggggattatcatggtggtgatgatgataataatgatggtgacggtgacaatgatggtgatggtgatgatgatgataataaagttaacagaaaatgtcagacagtattgagcaataaatattcaccaacagctatgctcagcatc

SEQ ID NO: 38937 - DNA, 201 bp, Homo sapiens; identical to SEQ ID NO: 5899

SEQ ID NO: 38938 - DNA, 201 bp, Homo sapiens
attgtgttggccaggctggtctcgaattcctgacctcaagtgatctgcccgccttggcctcccaaagtgctgggattacaggtgtgagccaccgcgcccgrcccatattgcccattgtattacagcggaagaaactgaggtatggacaggtaacatgtccatggtcacttggctggtgaggggcagagaggagatttgaaa

SEQ ID NO: 38939 - DNA, 201 bp, Homo sapiens
aaaatcatagtaaatctagtgatactgagtggacaaatttgtttgtttgttttttctcatccttttcactttttttattatactttaagttttagggtacrtgtgcacaatgtgcagtttagttacacatgtatacatgtgccatgctggtgtgctgcacccatttgctcgtcatttagcattaggtatatgtcctaatgc

SEQ ID NO: 38940 - DNA, 201 bp, Homo sapiens
accccatctctactaaaaatacaaaaactagccaggcttggtggcatgtgcctgtaatcctagctactcgggaggctgaggcaggagaattgcttgaaccygggaggcagaggttgcagtgagctgagattgtgccactgcactccagcctgggcgacagagcaagactccgtctgaaaaaaaaaaaaaaaggaattgtgc

SEQ ID NO: 38941 - DNA, 201 bp, Homo sapiens
ttctttcttccttccttccttccttccttccttccttccttccttccttcctccttccttccttcctttcttcctttcttcctgtctttttctttctttcyttcttttggcagagtctcactctgtcgcccaggctggagtgcaatggtgcaatctcggttcactgcaacctctgcctcccaggttcaagcgattctcatg

SEQ ID NO: 38942 - DNA, 201 bp, Homo sapiens
gttgaggtcagatgatgaccttgttagtctgtacctcctgataagaaaatctcctccaagtgccccagcagaggcttcatggtcaagctgcagactctgckggctactggttttggctaaatttgcccattgcctcatccagtgatccactcgtctatctttccagccatccatttttctatccttccagtcatctctcag

SEQ ID NO: 38943 - DNA, 201 bp, Homo sapiens
atgcttgattaatgatgtcctcactataccaccttggacactttctttttgcctggatttaaagcttccatttctttccttccttccttctttcttctttcttccttccttccttccttccttccttccttccttccttccttcctccttccttccttcctttcttcctttcttcctgtctttttctttctttccttcttt

SEQ ID NO: 38944 - DNA, 201 bp, Homo sapiens; identical to SEQ ID NO: 5903

SEQ ID NO: 38945 - DNA, 201 bp, Homo sapiens; identical to SEQ ID NO: 5907

SEQ ID NO: 38946 - DNA, 201 bp, Homo sapiens
gactccagctcaaaaataaataaataaataatatatatatatatattttatttaaataaaatatactatatatatatgtatatatatgtatgtgtatatayatatatatgtatatatatatatatatatatatatatagagagagagagagagagagagagagagagagagagagacagagtatgtctgaaaatgcatccc

SEQ ID NO: 38947 - DNA, 201 bp, Homo sapiens; identical to SEQ ID NO: 5912

SEQ ID NO: 38948 - DNA, 201 bp, Homo sapiens
acagctaaggcccttgttcaagaacaccagtgttggccctctgtactctggctgcaggctgaccttgctcaggtgagaactgagaataaccagtctggctrccccaagtgttcccaggcccaaggagtttcatcagctttcttccttccctccctatggaagtcctcagcacaagtggaattcaggcgttggtggctccag

SEQ ID NO: 38949 - DNA, 201 bp, Homo sapiens; identical to SEQ ID NO: 5913

SEQ ID NO: 38950 - DNA, 201 bp, Homo sapiens
ttaagctaatgcttgattaatgatgtcctcactataccaccttggacactttctttttgcctggatttaaagcttccatttctttccttccttccttctttcttctttcttccttccttccttccttccttccttccttccttccttccttcctccttccttccttcctttcttcctttcttcctgtctttttctttcttt

SEQ ID NO: 38951 - DNA, 201 bp, Homo sapiens
tttaagctaatgcttgattaatgatgtcctcactataccaccttggacactttctttttgcctggatttaaagcttccatttctttccttccttccttctttcttctttcttccttccttccttccttccttccttccttccttccttccttcctccttccttccttcctttcttcctttcttcctgtctttttctttctt

SEQ ID NO: 38952 - DNA, 201 bp, Homo sapiens
ccaccatgcctggctaattttttgtatttttagtagagacggggtttcaccatgttggccaggctggtcttgaactcctgacctcaagtgatctacccacyttggcctcccaaagtgctgggattataggcatgagccaccacgccaggcccactctctaaattttgaccaccctgccttgagtggtcttctagcacccta

SEQ ID NO: 38953 - DNA, 201 bp, Homo sapiens
cccaccttgtcttgttccacctacgtcacccattccaaggcatggaagaagatctcacccacctcccctcacctgagagatagccccgccccctgattacwgccccttccaccttacatcttcctcacttctatgtcctcagccatcttactcacctccctcttcctcctccacagctaaggcccttgttcaagaacacca

SEQ ID NO: 38954 - DNA, 201 bp, Homo sapiens; identical to SEQ ID NO: 5914

SEQ ID NO: 38955 - DNA, 201 bp, Homo sapiens
atttaagctaatgcttgattaatgatgtcctcactataccaccttggacactttctttttgcctggatttaaagcttccatttctttccttccttccttcyttcttctttcttccttccttccttccttccttccttccttccttccttccttcctccttccttccttcctttcttcctttcttcctgtctttttctttct

SEQ ID NO: 38956 - DNA, 201 bp, Homo sapiens
ttcagagaatcttagtatggcttctcacctgtctaccaggattctcatttcctctgtccccttcctgtcctgcccccaggaatctcaggatgcctccccayaggcaatctatttaatgtcatcccccttatctgccctccctaggccagagaaagatggggaagccaccggagtggatgccatctgcacccaccgccctga

SEQ ID NO: 38957 - DNA, 201 bp, Homo sapiens; identical to SEQ ID NO: 5915

SEQ ID NO: 38958 - DNA, 201 bp, Homo sapiens; identical to SEQ ID NO: 5916

SEQ ID NO: 38959 - DNA, 201 bp, Homo sapiens
aatttaagctaatgcttgattaatgatgtcctcactataccaccttggacactttctttttgcctggatttaaagcttccatttctttccttccttccttctttcttctttcttccttccttccttccttccttccttccttccttccttccttcctccttccttccttcctttcttcctttcttcctgtctttttctttc

SEQ ID NO: 38960 - DNA, 201 bp, Homo sapiens
gtggctgattaattgctgtgtggtctgagtcctgatgcccaccaagtctcagcgtgtccccctctgtccaatctcatccaacaatttaagctaatgcttgwttaatgatgtcctcactataccaccttggacactttctttttgcctggatttaaagcttccatttctttccttccttccttctttcttctttcttccttc

SEQ ID NO: 38961 - DNA, 201 bp, Homo sapiens
ggaatctggcttccagctcccatgaaacgtcggctgccattcagtggctgattaattgctgtgtggtctgagtcctgatgcccaccaagtctcagcgtgtycccctctgtccaatctcatccaacaatttaagctaatgcttgattaatgatgtcctcactataccaccttggacactttctttttgcctggatttaaagc

SEQ ID NO: 38962 - DNA, 201 bp, Homo sapiens
gcccaaggtggtcttaaactcctggctccaagagatcctcccacctcagcctcccaaagtgcagggattacaggtgtgagccactgtgcccagcctagacmgcattttttttttgaaacagggtctccctctgttgcccaggctggagtgcaatggcgtgttcatggttcactgcagcctcagcctcctcagtctcaagca

SEQ ID NO: 38963 - DNA, 201 bp, Homo sapiens
tcctggatctccaccaccagcagtgagtaaacatggccctgaagtccctatgccctgggaattcttcctccctaagcctgccttccaggaggaaagtatcycccattccctaggttctcatccccacagaaactccagaatagcaaaagtctcaggctgagccaaggcacagatgccagtgctcaccaagagtcctattct

SEQ ID NO: 38964 - DNA, 201 bp, Homo sapiens; identical to SEQ ID NO: 5918

SEQ ID NO: 38965 - DNA, 201 bp, Homo sapiens
tcttgtctcaaaaaacaaaacaaacaaacaaaaactaaaccaaacaaaaaaagactagctgttattcatttatttatttatttatttagagacggagtctygctctgtcacccaggctggagtgcagcggcacaatcttggctcactgcaacctctgcctcccaggttcatgtgattctcccgcctcagcctccccagctg

SEQ ID NO: 38966 - DNA, 201 bp, Homo sapiens; identical to SEQ ID NO: 5920

SEQ ID NO: 38967 - DNA, 201 bp, Homo sapiens
gggttgacaaagagtggaaaggaaggacaaaaggatggagaagtggatggactaagcatatgtaggttcttacccaggccagagaaggatagctcagccayggcagtggatgccatctgcacacatcgccctgaccctgaagacctcggactggacagagagcgactgtactgggagctgagcaatctgacaaatggcatc

SEQ ID NO: 38968 - DNA, 201 bp, Homo sapiens
ctctttccctcccctcttattatctcaatttcacacgaaagaattccagaaactatactgccaaaagtctttcctgtctttgaaaagttgggaaagaggaraaactcagacagcaatgacaaaattatacgtaatggatgaaggaaacacaaataaggctggaaacagaaaattttgtccccatcatttatttaatgaagg

SEQ ID NO: 38969 - DNA, 201 bp, Homo sapiens
tgccaccacgcccagctaatttttgcatttttagtagagatgggatttcactatgttggccaggctggtctcaaactcctgatctcaagtgatccgcccargggcctcccaaagtactgggattacaggtaggagccacctcacctggccctattttcggaatggatttttttttaatgtttaaaatgtcacctaagatta

SEQ ID NO: 38970 - DNA, 201 bp, Homo sapiens
agctgggactacaggcgcgtgccaccacgcccagctaatttttgcatttttagtagagatgggatttcactatgttggccaggctggtctcaaactcctgwtctcaagtgatccgcccaagggcctcccaaagtactgggattacaggtaggagccacctcacctggccctattttcggaatggatttttttttaatgttt

SEQ ID NO: 38971 - DNA, 201 bp, Homo sapiens
ttcaagcaattctcctgcatcagcctcctgagtagttgggactacaggtgcacgccaccgtgcctggctaatttttgtatttttagtacagacagggtttyaccatgttggtcaggctggtctcaaactcctgacctcaggtggtccacacgccttggcctcccaaagtgctgggattacaagtgtgagacactgtgcccg

SEQ ID NO: 38972 - DNA, 201 bp, Homo sapiens
atattagtagtaacagtagtaataacagcagtaatgacagagcactaccattactgctgttactctactgtaggtagagtagtaatattaagtggtagtgrtagtaacaatagtaatagcaacagcagtagtaatagtaagtagcagtaaccatagtaataaccatagtgataggtagtaatagttgtggtaacagtagta

SEQ ID NO: 38973 - DNA, 201 bp, Homo sapiens; identical to SEQ ID NO: 5922

SEQ ID NO: 38974 - DNA, 201 bp, Homo sapiens
taatggcagtaatggtatgtagagttgtgttggtagtaacagtagtagtagtaggtagtagcagtggtagtagtgacagtagaaatcataagtaatagtgstagcaacaatagtagtaatagtagtaaccatagtaataacatagtaataaccatagcaataggcagtaatattagtagtaacagtagtaataacagcagt

SEQ ID NO: 38975 - DNA, 201 bp, Homo sapiens
ctatagcaataaccatagcaataagcagtaatactagtagtaatagtagtgataatggcagtaatggtatgtagagttgtgttggtagtaacagtagtagyagtaggtagtagcagtggtagtagtgacagtagaaatcataagtaatagtggtagcaacaatagtagtaatagtagtaaccatagtaataacatagtaat

SEQ ID NO: 38976 - DNA, 201 bp, Homo sapiens
atgtttattttgtagtagaattattagtagtgacagtagtaatggtaagtagtagtggtagtaacaatagcagcaatagcactagtaagtagtagtaactrtagcaataaccatagcaataagcagtaatactagtagtaatagtagtgataatggcagtaatggtatgtagagttgtgttggtagtaacagtagtagtag

SEQ ID NO: 38977 - DNA, 201 bp, Homo sapiens
aaatgtgtttgagttcattgtagattctggatattagccctttgtcagatgagtaggttgtgaaaattttctcccattttataggttgcctgttcactccratggtagtttcttttgctgtgcagaagctctttagtttaattagatcccatttgtcaattttggcttttgttgccattgtttttggtgttttagacatga

SEQ ID NO: 38978 - DNA, 201 bp, Homo sapiens
ttaggttcagccaataggaggcattggtgggacaatggtgggcggggctatggaagggccagagtatttctgtaccccgcccccctgctccccttccaatrttcctggagcggtgtaggaccaatactgtatatatggaaggaaggcaaggtggatagatggaaggaagaagtgacagatggaaagaagaagtgataaatg

SEQ ID NO: 38979 - DNA, 201 bp, Homo sapiens; identical to SEQ ID NO: 5925

SEQ ID NO: 38980 - DNA, 201 bp, Homo sapiens
tagtttacagtcccaccaacagtgtaaaagtgttcctatttctccacatcctctccagcacctgttgtttcctgactttttaatgattgccattctaactrgtgtgagatggtatctcattgtggttttgatttgcatttctctgatagccagtgatggtgagcattttttcatgtgttttttggctgcataaatgtcttc

SEQ ID NO: 38981 - DNA, 201 bp, Homo sapiens; identical to SEQ ID NO: 5928

SEQ ID NO: 38982 - DNA, 201 bp, Homo sapiens
aacatgtggcctggctccaggaagttcaacactacagagagggtccttcagggcctggtgagagccctgcccacctcactctgccctgcccaccttgtctygttccacctacgtcacccattccaaggcatggaagaagatctcacccacctcccctcacctgagagatagccccgccccctgattacagccccttccacc

SEQ ID NO: 38983 - DNA, 201 bp, Homo sapiens
caaatagtgaatgttgtgcccaataagtagtttttcaatcctcacttcactcccagcctcctctattttggagtcccagtgtctattatttctatctttaygtccacatgtacccattggttagctcccacttataagtgagaatgtgcagtatttaattttctgtttttgagttattttgcttaggttgatggccttcag

SEQ ID NO: 38984 - DNA, 201 bp, Homo sapiens; identical to SEQ ID NO: 5933

SEQ ID NO: 38985 - DNA, 201 bp, Homo sapiens; identical to SEQ ID NO: 5932

SEQ ID NO: 38986 - DNA, 201 bp, Homo sapiens
gcccgagaaagatggggcagccactggagtggatgccatctgcacccaccgccttgaccccaaaagccctggactcaacagggagcagctgtactgggagytaagcaaactgaccaatgacattgaagagctgggcccctacaccctggacaggaacagtctctatgtcaatggtgagtggctgtgatgtggttgaaatct

SEQ ID NO: 38987 - DNA, 201 bp, Homo sapiens; identical to SEQ ID NO: 5936

SEQ ID NO: 38988 - DNA, 201 bp, Homo sapiens; identical to SEQ ID NO: 5937

SEQ ID NO: 38989 - DNA, 201 bp, Homo sapiens; identical to SEQ ID NO: 2605

SEQ ID NO: 38990 - DNA, 201 bp, Homo sapiens
agtcagaggagatccacttaagtatacatccatccacatattcattcattcaatcattcaacaaatattagttgagcacttaccgtatgccaaacagtcaracgtgaatagctgttacaaatgagactgtgaaggatggtacaacgcagattcagacagtgtgataaggaaatattgagaagcaaagatgagttctggagt

SEQ ID NO: 38991 - DNA, 201 bp, Homo sapiens
tactaacactttgagatggccattgtacttatccccactttatagacgggaaaatggaggtccagcaatattttttaacttaaagagccacccatctcttyagagaaagagccagaatcccaggcagggctatcttattccagagcccaagctctcaaacacatgatacacaatacttaatctctctcaagtcagaggaga

SEQ ID NO: 38992 - DNA, 201 bp, Homo sapiens
taatagtagtaatgtcttatcgtgacccaggaggcactgtgcttggcgcctttttactaacactttgagatggccattgtacttatccccactttatagaygggaaaatggaggtccagcaatattttttaacttaaagagccacccatctctttagagaaagagccagaatcccaggcagggctatcttattccagagcc

SEQ ID NO: 38993 - DNA, 201 bp, Homo sapiens; identical to SEQ ID NO: 5939

SEQ ID NO: 38994 - DNA, 201 bp, Homo sapiens
aagtgatagtaataacagtagcaatagcaggtcatagtcgtggtaatagtagtaatgtcttatcgtgacccaggaggcactgtgcttggcgcctttttacyaacactttgagatggccattgtacttatccccactttatagacgggaaaatggaggtccagcaatattttttaacttaaagagccacccatctctttaga

SEQ ID NO: 38995 - DNA, 201 bp, Homo sapiens
agcagtagcagtggtagcagtaacagtagcaatagtaatagtggtagtaacagtagtagtagcagtactagtagtagtaatcatagtaataaccattgcartaggtagtagtaacagtagcaataacagcagtaatggtaggtggagaagtgatagtaataacagtagcaatagcaggtcatagtcgtggtaatagtagta

SEQ ID NO: 38996 - DNA, 201 bp, Homo sapiens
tgcagtaatggtaggtagagtggtggtagtagtaacagtagcagtagcagtggtagcagtaacagtagcaatagtaatagtggtagtaacagtagtagtagcagtactagtagtagtaatcatagtaataaccattgcaataggtagtagtaacagtagcaataacagcagtaatggtaggtggagaagtgatagtaataa

SEQ ID NO: 38997 - DNA, 201 bp, Homo sapiens
ctgcagtaatggtaggtagagtggtggtagtagtaacagtagcagtagcagtggtagcagtaacagtagcaatagtaatagtggtagtaacagtagtagtagcagtactagtagtagtaatcatagtaataaccattgcaataggtagtagtaacagtagcaataacagcagtaatggtaggtggagaagtgatagtaata

SEQ ID NO: 38998 - DNA, 201 bp, Homo sapiens
actgcagtaatggtaggtagagtggtggtagtagtaacagtagcagtagcagtggtagcagtaacagtagcaatagtaatagtggtagtaacagtagtagtagcagtactagtagtagtaatcatagtaataaccattgcaataggtagtagtaacagtagcaataacagcagtaatggtaggtggagaagtgatagtaat

SEQ ID NO: 38999 - DNA, 201 bp, Homo sapiens
ataaaatacatatattatatatagacatattttatatacatattgaggcatattttataaacatgtttatagacacatttttatatgcatatgttatataygtatataacatatgttatatataatgtatatattatacatattgttatattgtatacatgttatatatgttatagcatatatagtacaagttatatataa

SEQ ID NO: 39000 - DNA, 201 bp, Homo sapiens
tactcctccctcgcccacttagacaaaccagcccacctcacactgcctcgcccactgatgccagccacgcccacctcatccaaccccagacacctttcccygccccacccactgattttagccaagcccacctcaccccacccagcctactgatgccagccacgcccacctttccctgccccgcccactgatttcagccac

SEQ ID NO: 39001 - DNA, 201 bp, Homo sapiens
gctaatgatctaacctaatgctgaatttgttacttcccttctgaatccacttggagatttcctttatatctgacttgaaatagaggttatatactcctctmtccttgacataggagataatacacagaaagtatttcattgtagtatcaagtacacatcctgttctgtgtccataggattatgactaatttagggcatggc

SEQ ID NO: 39002 - DNA, 201 bp, Homo sapiens
tgaatggcctctatgctaatgatctaacctaatgctgaatttgttacttcccttctgaatccacttggagatttcctttatatctgacttgaaatagaggwtatatactcctctctccttgacataggagataatacacagaaagtatttcattgtagtatcaagtacacatcctgttctgtgtccataggattatgacta

SEQ ID NO: 39003 - DNA, 201 bp, Homo sapiens
gcctgccttggcctcccaaagtgctgggattacaggcatgagccatgatgcccggccatttgctaatggcatctagtaagtagaggccagagatgttgcaraacatccaacaatgcacaaagcagcctcctatcaaaacacattatccagaccaaaatgtcaatagggctgaggttgagcatctgctgtacacagattcca

SEQ ID NO: 39004 - DNA, 201 bp, Homo sapiens
attctcctgcctcagcctcctgagttgctgggattacaggcatgtgccaccatgcccagctaattttgtatttttagtagagatgaggtttctccatgttsgccaggctgctcttgaactcctgacttcaggtgatccgcctgccttggcctcccaaagtgctgggattacaggcatgagccatgatgcccggccatttgc

SEQ ID NO: 39005 - DNA, 201 bp, Homo sapiens
cacacttgttgcccaggctggagtgcagtggcgccatcttggctcactgcaaaatctgcctcctgggttcaagtgattctcctgcctcagcctcctgagtwgctgggattacaggcatgtgccaccatgcccagctaattttgtatttttagtagagatgaggtttctccatgttggccaggctgctcttgaactcctgac

SEQ ID NO: 39006 - DNA, 201 bp, Homo sapiens; identical to SEQ ID NO: 5947

SEQ ID NO: 39007 - DNA, 201 bp, Homo sapiens
aattattactacagctgggcccttgaacagcatgagggttcagggtgctgacccctatgcattcaaaaatccacatataactttttttttttttgagatgkagtttcacacttgttgcccaggctggagtgcagtggcgccatcttggctcactgcaaaatctgcctcctgggttcaagtgattctcctgcctcagcctcc

SEQ ID NO: 39008 - DNA, 201 bp, Homo sapiens
taaccatagtaataaccatagtgataggtagtaatagttgtggtaacagtagtaataactgcagtaatggtaggtagagtggtggtagtagtaacagtagyagtagcagtggtagcagtaacagtagcaatagtaatagtggtagtaacagtagtagtagcagtactagtagtagtaatcatagtaataaccattgcaata

SEQ ID NO: 39009 - DNA, 201 bp, Homo sapiens
ctttctaaatcagagaccatcactgtgttcacagggagggcctaggtgaacctgagatggcaaatgttgcgtttgttactacggaagaagggattatgggytgaagtccttggcagtgccaaattgcttagaaaaatgtgaaatatggtccctaggagtgctcttgggatgtcacatttttctcactcctttgacaggtag

SEQ ID NO: 39010 - DNA, 201 bp, Homo sapiens
tagtaacagtagtaataacagcagtaatgacagagcactaccattactgctgttactctactgtaggtagagtagtaatattaagtggtagtggtagtaayaatagtaatagcaacagcagtagtaatagtaagtagcagtaaccatagtaataaccatagtgataggtagtaatagttgtggtaacagtagtaataactg

SEQ ID NO: 39011 - DNA, 201 bp, Homo sapiens; identical to SEQ ID NO: 5955

SEQ ID NO: 39012 - DNA, 201 bp, Homo sapiens
tatgtagagttgtgttggtagtaacagtagtagtagtaggtagtagcagtggtagtagtgacagtagaaatcataagtaatagtggtagcaacaatagtaktaatagtagtaaccatagtaataacatagtaataaccatagcaataggcagtaatattagtagtaacagtagtaataacagcagtaatgacagagcacta

SEQ ID NO: 39013 - DNA, 201 bp, Homo sapiens
tacatatggctagccagttttcccagcaccatttattaaatagggaatcctttccccattgctcagatttgtcaaagatcagatagttgtagatatgtggyattatttctgagggctctgttctgttccattgatctatatctctgttttggtaccagtaccatgctgttttggttgctgtagccttgtagtatagtttga

SEQ ID NO: 39014 - DNA, 201 bp, Homo sapiens
atgttgaagaaaatgatgctggtgatggtggtgggggttattatggtaataatgatatgttgagtgtgacgatgatggtggtggtgttgatgatgatgatkattattattatgctagtgacattgatgatggtaatggtgatatcaacgacagtgacaatgatggtgatgaggatgatgtcggtgatggtggtggggttat

SEQ ID NO: 39015 - DNA, 201 bp, Homo sapiens
tcaccaacagctatgctcagcatctactattatataatatacttttataaaaataaattatattattataggcaagggaggcatggaaaatattttgtcastcaatttaaattctgcatatattgaaagataagtctattgcaaactcctattttctctgctttgaacatagtgtttatttcccattccagttatggctgc

SEQ ID NO: 39016 - DNA, 201 bp, Homo sapiens
ttgtatatactatataatatagtaatgtataaaatgcaaaacgatatcatatatttctatattaagtttatatttacagatctacattttatatattttaygttatatacaattgtgttatacataatataattagtatagtactgacttggggaattgagcagtaccaacccatagggatgtttgaggatgaaaatatgt

SEQ ID NO: 39017 - DNA, 201 bp, Homo sapiens
ttcccactccagtagattttgctctgcttccttgctgcacctcctagggatatcctcaccaaaaggggaattcaggagtcactggcttctggaccaatgtstttcctgatagtaacactcccacacctcacctcaacagggagaatctgcatggtccatcatcaggattgagcctctatcctgatcatccctcggaattcc

SEQ ID NO: 39018 - DNA, 201 bp, Homo sapiens
tatatataattatatataatatatagttgttatatataattatataattgttatatattatatacaacatataacatacattatatattgttatatataayataatatatacatatataacatatgtataacttttatgttatacataatgtatataacatatatgtgtatgtgtgatgtacataacatatctgacattaa

SEQ ID NO: 39019 - DNA, 201 bp, Homo sapiens
catgcctagcctgagagccacattcttgttaaccacaattttctcagagtctgcattaggggttgacaaagagtggaaaggaaggacaaaaggatggagargtggatggactaagcatatgtaggttcttacccaggccagagaaggatagctcagccacggcagtggatgccatctgcacacatcgccctgaccctgaag

SEQ ID NO: 39020 - DNA, 201 bp, Homo sapiens
caaatagggcatgaatagtataactgaaagaggggaatctgtgagcaaagcctcagtggccagaaacagcatagagtatagggagaagtgagagaaatttrgtttgcatgaaacataaagcttaacccagagtggatggataagtgagactgaaaggtcagcaggagccagattgggaagggccttgaatgccaagtcaag

SEQ ID NO: 39021 - DNA, 201 bp, Homo sapiens
ccagggtccaaacatccctccaccctcagagtctttgcacctggtgttcttgtccttcaaatctcagcttggatcaccctttataaagtagcatttccccygtatacgcatcttgcacacagccaatctctattctacctctatgctcacttccttcctggcaattattactacagctgggcccttgaacagcatgagggt

SEQ ID NO: 39022 - DNA, 201 bp, Homo sapiens
ccactatgcctggctaatttttgtttttttgttttttggggggttttttgagacagagtctcagtctgttgcccaagctggagtgcagtggcatgatctcrggtcactgcaacctccttctcccaggttcaagcgattttcctgcctcagcctcctgagtagctggaactacaggcacgcaccatcacaccggctaatttt

SEQ ID NO: 39023 - DNA, 201 bp, Homo sapiens
tttggcagagtctcactctgtcgcccaggctggagtgcaatggtgcaatctcggttcactgcaacctctgcctcccaggttcaagcgattctcatgccacrtgccactatgcctggctaatttttgtttttttgttttttggggggttttttgagacagagtctcagtctgttgcccaagctggagtgcagtggcatgatc

SEQ ID NO: 39024 - DNA, 201 bp, Homo sapiens
ggtttctccctttgagttgagcaagagacaaaagggataagtgaaaggaaaaagtgaattaatgaaaatagagggaacaaagtacctaagaaggtagaagrcacccagagcctagaaggaggaaacactacttccaagaggtcagtagataaaggaaggaacttcttggggattccattcctctgaaagggttgagcttgg

SEQ ID NO: 39025 - DNA, 201 bp, Homo sapiens; identical to SEQ ID NO: 5962

SEQ ID NO: 39026 - DNA, 201 bp, Homo sapiens; identical to SEQ ID NO: 5963

SEQ ID NO: 39027 - DNA, 201 bp, Homo sapiens; identical to SEQ ID NO: 5966

SEQ ID NO: 39028 - DNA, 201 bp, Homo sapiens; identical to SEQ ID NO: 5967

SEQ ID NO: 39029 - DNA, 201 bp, Homo sapiens; identical to SEQ ID NO: 5968

SEQ ID NO: 39030 - DNA, 201 bp, Homo sapiens
ccatccttctccctattcactggtttgtctttccttctgtccttccaaccatccacccatctctccattcattctcctcttcattcaccatgtttccttayttctgtctcttccatccatccatctatccagacagacatctcctccccccattctcctccccattcactcaattgtccttccttccatctgtccttttat

SEQ ID NO: 39031 - DNA, 201 bp, Homo sapiens
tccatccttctccctattcactggtttgtctttccttctgtccttccaaccatccacccatctctccattcattctcctcttcattcaccatgtttccttmtttctgtctcttccatccatccatctatccagacagacatctcctccccccattctcctccccattcactcaattgtccttccttccatctgtcctttta

SEQ ID NO: 39032 - DNA, 201 bp, Homo sapiens
tccatctctccatccatccaccatccatccatccatccttctccctattcactggtttgtctttccttctgtccttccaaccatccacccatctctccatycattctcctcttcattcaccatgtttccttatttctgtctcttccatccatccatctatccagacagacatctcctccccccattctcctccccattcac

SEQ ID NO: 39033 - DNA, 201 bp, Homo sapiens
tatctgtcttttatccatctctccatccatccaccatccatccatccatccttctccctattcactggtttgtctttccttctgtccttccaaccatccayccatctctccattcattctcctcttcattcaccatgtttccttatttctgtctcttccatccatccatctatccagacagacatctcctccccccattct

SEQ ID NO: 39034 - DNA, 201 bp, Homo sapiens
ctatctgtcttttatccatctctccatccatccaccatccatccatccatccttctccctattcactggtttgtctttccttctgtccttccaaccatccmcccatctctccattcattctcctcttcattcaccatgtttccttatttctgtctcttccatccatccatctatccagacagacatctcctccccccattc

SEQ ID NO: 39035 - DNA, 201 bp, Homo sapiens
tcttcctgcccattcacctgcttgtccttccttctatctgtcttttatccatctctccatccatccaccatccatccatccatccttctccctattcactkgtttgtctttccttctgtccttccaaccatccacccatctctccattcattctcctcttcattcaccatgtttccttatttctgtctcttccatccatcc

SEQ ID NO: 39036 - DNA, 201 bp, Homo sapiens; identical to SEQ ID NO: 5974

SEQ ID NO: 39037 - DNA, 201 bp, Homo sapiens
atcttcctgcccattcacctgcttgtccttccttctatctgtcttttatccatctctccatccatccaccatccatccatccatccttctccctattcacyggtttgtctttccttctgtccttccaaccatccacccatctctccattcattctcctcttcattcaccatgtttccttatttctgtctcttccatccatc

SEQ ID NO: 39038 - DNA, 201 bp, Homo sapiens; identical to SEQ ID NO: 5977

SEQ ID NO: 39039 - DNA, 201 bp, Homo sapiens
ctgcccactcactcgctagcccctccttccttctgtccttccatccatccatccacccatcttcctgcccattcacctgcttgtccttccttctatctgtyttttatccatctctccatccatccaccatccatccatccatccttctccctattcactggtttgtctttccttctgtccttccaaccatccacccatctc

SEQ ID NO: 39040 - DNA, 201 bp, Homo sapiens
acaattgttgcaagcacttttaaaaatcatgtacgactttattcataattatagtggttattaggcttttcaatagatcttatttaatgagttagtaaaakaagtgcctgtattattgtattacatttgtttattaagatcttgataacaacatttcaatataatcatttcctttgttttttaaattttagattcaggggt

SEQ ID NO: 39041 - DNA, 201 bp, Homo sapiens
ctgaggcccctataccaggaagatctatgggatctaatcttcaggcacactgggcctcagcattggtctagaactcaggaaaagatagcatttaagaaggyatcccctaaatggggttctgagaggcaaagcatgaccgtggagaattgacaaaatagctcgcctttcatcccctccaccgccaacccaagaacagtgctt

SEQ ID NO: 39042 - DNA, 201 bp, Homo sapiens
gggatgggcttctctcctacctgaggcccctataccaggaagatctatgggatctaatcttcaggcacactgggcctcagcattggtctagaactcaggawaagatagcatttaagaaggcatcccctaaatggggttctgagaggcaaagcatgaccgtggagaattgacaaaatagctcgcctttcatcccctccaccg

SEQ ID NO: 39043 - DNA, 201 bp, Homo sapiens
tgggaatatggagaaggttaattggaacaaaaaaatgcaaagaatgaataagacctagtatttgctagcacaacagggtgactgtagtcaaaaataacttsactgtacattttaaaatataactaaaggtgtatgcttggattgtttgcaacacaaaggatatatgcttgaggggatggataccccatttaccctgatgat

SEQ ID NO: 39044 - DNA, 201 bp, Homo sapiens; identical to SEQ ID NO: 5982

SEQ ID NO: 39045 - DNA, 201 bp, Homo sapiens; identical to SEQ ID NO: 5983

SEQ ID NO: 39046 - DNA, 201 bp, Homo sapiens
gactttgtatatttctaaacttcaaagatttttgtatttcagctgggaatatggagaaggttaattggaacaaaaaaatgcaaagaatgaataagacctastatttgctagcacaacagggtgactgtagtcaaaaataacttcactgtacattttaaaatataactaaaggtgtatgcttggattgtttgcaacacaaag

SEQ ID NO: 39047 - DNA, 201 bp, Homo sapiens; identical to SEQ ID NO: 5986

SEQ ID NO: 39048 - DNA, 201 bp, Homo sapiens; identical to SEQ ID NO: 5990

SEQ ID NO: 39049 - DNA, 201 bp, Homo sapiens
gctagaatagccagcctagctgtcccaattattctcactccaaaaggctttgcactgcttccttgctgcacttcctagagatatcctcaccaaaggtgggwttcagcagtcactggcttcaggaccagtgtgtctcctgatagtaacacccccacactccacctcaacagagagaatctgcattgtccatcatcagaattg

SEQ ID NO: 39050 - DNA, 201 bp, Homo sapiens; identical to SEQ ID NO: 5828

SEQ ID NO: 39051 - DNA, 201 bp, Homo sapiens
ggagggtcacaggacacagggctgactttgtatatttctaaacttcaaagatttttgtatttcagctgggaatatggagaaggttaattggaacaaaaaamtgcaaagaatgaataagacctagtatttgctagcacaacagggtgactgtagtcaaaaataacttcactgtacattttaaaatataactaaaggtgtatg

SEQ ID NO: 39052 - DNA, 201 bp, Homo sapiens; identical to SEQ ID NO: 5830

SEQ ID NO: 39053 - DNA, 201 bp, Homo sapiens
agtagtccatgcactcagagaatctaagtgtagcttctcacctctttcccaggtttctcatttcctctggttctttactgtctttccatcagcagtctcargacacaacctaagtaatcttttcatagtcattctccccacctaccttccccaggtctgagaaggatggagcagccactggagtggatgccatctgcatcc

SEQ ID NO: 39054 - DNA, 201 bp, Homo sapiens
tacttgggaagaggagggtcacaggacacagggctgactttgtatatttctaaacttcaaagatttttgtatttcagctgggaatatggagaaggttaatkggaacaaaaaaatgcaaagaatgaataagacctagtatttgctagcacaacagggtgactgtagtcaaaaataacttcactgtacattttaaaatataac

SEQ ID NO: 39055 - DNA, 201 bp, Homo sapiens; identical to SEQ ID NO: 5831

SEQ ID NO: 39056 - DNA, 201 bp, Homo sapiens
aggtgagaccttagaagatccagcctggctgccccagttgttcccactccagtagattttgctctgcttccttgctgcacctcctagggatatcctcaccmaaaggggaattcaggagtcactggcttctggaccaatgtctttcctgatagtaacactcccacacctcacctcaacagggagaatctgcatggtccatca

SEQ ID NO: 39057 - DNA, 201 bp, Homo sapiens; identical to SEQ ID NO: 5833

SEQ ID NO: 39058 - DNA, 201 bp, Homo sapiens; identical to SEQ ID NO: 5835

SEQ ID NO: 39059 - DNA, 201 bp, Homo sapiens
gatggctgggtcaaatggtatttctagttctagatccctgaggaatcgccacactgacttccacaatggttgaactagtttacagtcccaccaacagtgtraaagtgttcctatttctccacatcctctccagcacctgttgtttcctgactttttaatgattgccattctaactggtgtgagatggtatctcattgtggt

SEQ ID NO: 39060 - DNA, 201 bp, Homo sapiens
tgtgtctttatagcggcatgatttataatcctttgggtatatacccagtaatgggatggctgggtcaaatggtatttctagttctagatccctgaggaatygccacactgacttccacaatggttgaactagtttacagtcccaccaacagtgtaaaagtgttcctatttctccacatcctctccagcacctgttgtttcc

SEQ ID NO: 39061 - DNA, 201 bp, Homo sapiens
atgtgtctttatagcggcatgatttataatcctttgggtatatacccagtaatgggatggctgggtcaaatggtatttctagttctagatccctgaggaaycgccacactgacttccacaatggttgaactagtttacagtcccaccaacagtgtaaaagtgttcctatttctccacatcctctccagcacctgttgtttc

SEQ ID NO: 39062 - DNA, 201 bp, Homo sapiens
ggtggaattcaggagtcactagcttcaggacccagtgtgtttcctgatagtaacaaccccacacctcacctcaacggaatctgcatggtccatcatcaggrttgagctcctaccctgatcattcctctgaattccctcctttccctccatctccctttcctttaggtgttaaattctgtccccaggatttctctcaagaca

SEQ ID NO: 39063 - DNA, 201 bp, Homo sapiens
caaatcctggggatatggcatggatcatgaaacaattaataatctctcctctcagagagctatttttatgatgatactgatggtggcaatgatgatgatgwtgatggtgattatgaccatgatgacaatggtgatggtggtggtgatgatggtaatgatgatgatggtgatgttggtaatgatggtggtgattatgacaat

SEQ ID NO: 39064 - DNA, 201 bp, Homo sapiens; identical to SEQ ID NO: 5840

SEQ ID NO: 39065 - DNA, 201 bp, Homo sapiens; identical to SEQ ID NO: 5841

SEQ ID NO: 39066 - DNA, 201 bp, Homo sapiens
ttatgagaattgttgtatccatgactctactcacggtcccaagcaagctggtagtctgtgcactcagagaatctaagtgtggcttctcacctctttcccasgtttctcattttctcttctcctttgctgtccttccatcagcaatctcaagacctgtcctaggtaatcttttcattgtcattcccccaacctcctttcccc

SEQ ID NO: 39067 - DNA, 201 bp, Homo sapiens; identical to SEQ ID NO: 5843

SEQ ID NO: 39068 - DNA, 201 bp, Homo sapiens; identical to SEQ ID NO: 5844

SEQ ID NO: 39069 - DNA, 201 bp, Homo sapiens; identical to SEQ ID NO: 5845

SEQ ID NO: 39070 - DNA, 201 bp, Homo sapiens
cactcactgcctggccattgaaagcttgaccatgttgtctatatttgatagttgacgtcagaacatcatggtttcttctttatgttggagactgggtctaycctcagggttttcttccctgatgtgagggtcctgatagaaaatgtccagcagccccggttccatttcaccagggtagccctgacccctattttgttatcc

SEQ ID NO: 39071 - DNA, 201 bp, Homo sapiens; identical to SEQ ID NO: 5846

SEQ ID NO: 39072 - DNA, 201 bp, Homo sapiens
cttgggaggctgagtcaggagaatcgtttgaatccaggaggtggagattgcagtgaggtggagattgcagtgagccgagatggcaccactgcactctagcytggtgacggagcgagactccatctcaataaataaataaataaataaattctgtcatagggaagggatgcatggtaaatatttatttagtcattcaattta

SEQ ID NO: 39073 - DNA, 201 bp, Homo sapiens; identical to SEQ ID NO: 5847

SEQ ID NO: 39074 - DNA, 201 bp, Homo sapiens
ggctggagtgcagtggtacggtcttggctcactgcagcctccacctcccagactgaagcgattctcctgcctcagcctcccgaatagctgggactacaggygcgtgccaccacgcccagctaatttttgcatttttagtagagatgggatttcactatgttggccaggctggtctcaaactcctgatctcaagtgatccgc

SEQ ID NO: 39075 - DNA, 201 bp, Homo sapiens
cggtcttggctcactgcagcctccacctcccagactgaagcgattctcctgcctcagcctcccgaatagctgggactacaggcgcgtgccaccacgcccarctaatttttgcatttttagtagagatgggatttcactatgttggccaggctggtctcaaactcctgatctcaagtgatccgcccaagggcctcccaaagt

SEQ ID NO: 39076 - DNA, 201 bp, Homo sapiens
tgtggtggcgtgtgcctgtaatgacaactacttgggaggctgaggcaggagaatcacttgaacctgggaggcggaggctgcagtgagatgagcttgaaccrctgcactccagcccgggcaacagagagagactcttgtctcaaaaaacaaaacaaacaaacaaaaactaaaccaaacaaaaaaagactagctgttattcat

SEQ ID NO: 39077 - DNA, 201 bp, Homo sapiens
attcctggcctcaagtgatccacctgcctcagcctcctgaagtgctgggattttacaggcatgaaccaccacacatggcctcatttcttttagatatatawgggttgagctattctcagagggtccttttctgcatctatttaagatcacattttttttatattgtggcaaaaatacatgtaacataaaatctgccatttt

SEQ ID NO: 39078 - DNA, 201 bp, Homo sapiens
aattcctggcctcaagtgatccacctgcctcagcctcctgaagtgctgggattttacaggcatgaaccaccacacatggcctcatttcttttagatatatwtgggttgagctattctcagagggtccttttctgcatctatttaagatcacattttttttatattgtggcaaaaatacatgtaacataaaatctgccattt

SEQ ID NO: 39079 - DNA, 201 bp, Homo sapiens
tatatttcattgtatatgtgtatgccacattttctttacccattcatccattgaaggtcatttagcttgtttccatatcttggctattttgaatagtgctrcaatgaacataggagtgcagatatctctttaagatactggtttcatttctttctttcttctcttttttttttttctgagacagagtctgactctgtcgct

SEQ ID NO: 39080 - DNA, 201 bp, Homo sapiens
tttttttttaaatgaatttaaggagtgcaaatgcagtttttgttacatgcatatattccatagtgaagtctgcagacagtagacttccagacagtagcttytggtgtatcacccgaatagtgtacattgtacttattaagtgaggttccccacccttctcccactctcccacctttctgagtatccagtgtctattattcc

SEQ ID NO: 39081 - DNA, 201 bp, Homo sapiens
gaagggaagaagaaaggatggaaagagagaaggaagaatgaacagaaggaagttcaagagtggtgaaaagaagaaaggcagggagagaaggagaagtaaayttttcttctagagatttgtcttaaaccttagcttggctggacactgtggttcacgcctgtaatcccagcactttgggaggccgaggcgggtggatcatga

SEQ ID NO: 39082 - DNA, 201 bp, Homo sapiens
tcctgttaggttcagccaataggaggcattggtgggacaatggtgggcggggctatggaagggccagagtatttctgtaccccgcccccctgctccccttycaatgttcctggagcggtgtaggaccaatactgtatatatggaaggaaggcaaggtggatagatggaaggaagaagtgacagatggaaagaagaagtgat

SEQ ID NO: 39083 - DNA, 201 bp, Homo sapiens
gtgagtattctactaatgttccagtaaccccagtcctactccaagcaggacaggagctgacccccttctcctatgcccctatatcttcttcatgagggaargatctgagagggcacaagtgattccctttccctctggcccagctccagagagacactaatctcaagccccacatgcagaaatattcctatctgctggcat

SEQ ID NO: 39084 - DNA, 201 bp, Homo sapiens; identical to SEQ ID NO: 5853

SEQ ID NO: 39085 - DNA, 201 bp, Homo sapiens; identical to SEQ ID NO: 5854

SEQ ID NO: 39086 - DNA, 201 bp, Homo sapiens
gattttagccaagcccacctcaccccacccagcctactgatgccagccacgcccacctttccctgccccgcccactgatttcagccacgcccacctcaccmtggtccacccctccaatgccccactcttcctggcttcccgcagctgttgtttctcacctcccctctccttccttgcagctcaaacccttgttcaggaata

SEQ ID NO: 39087 - DNA, 201 bp, Homo sapiens
ggttggttccaagtctttgctattgtgaatagtgccacaataaacatacgtgtgcatgtgtctttatagcggcatgatttataatcctttgggtatatacycagtaatgggatggctgggtcaaatggtatttctagttctagatccctgaggaatcgccacactgacttccacaatggttgaactagtttacagtcccac

SEQ ID NO: 39088 - DNA, 201 bp, Homo sapiens
aggaagttcaacgccacagagagagaactgcagggtctggtgagagccccgcccaccgtactcctccctcgcccacttagacaaaccagcccacctcacaytgcctcgcccactgatgccagccacgcccacctcatccaaccccagacacctttccctgccccacccactgattttagccaagcccacctcaccccaccc

SEQ ID NO: 39089 - DNA, 201 bp, Homo sapiens
ttcccccaaagattcccctcatgctagccttcgtaatcatgcccactgagcccaacactattgcatagaatagctattctactctccatctccatctctgkctctacaattttcttttgaagatgttatataaatggaaatgtacaacatgtcacctttgaaattggcttcttttccactcagtgtaatgccctggagatg

SEQ ID NO: 39090 - DNA, 201 bp, Homo sapiens; identical to SEQ ID NO: 5858

SEQ ID NO: 39091 - DNA, 201 bp, Homo sapiens
gtgtgtgcaggcatgtgtgtgcatgcacgcctgtgtgtgcatatgtgcatgtgtgcatgcgtgtgtgcatgtgtgcatgtgtgtgtgcatgcgtgcgtgcrtgcgtgcatctgtgtgcatgtatgcacatgtgtgtgtgtctgtgcacgtgtgtgcatgcatgtgtgtgtgcgtgtgtgttggtagccctatgcaattttt

SEQ ID NO: 39092 - DNA, 201 bp, Homo sapiens
gagccgagatggcaccactgcactctagcttggtgacggagcgagactccatctcaataaataaataaataaataaattctgtcatagggaagggatgcayggtaaatatttatttagtcattcaatttaaatgttgtacatgtttaaagataagtctgttgcaaactcttattttctccactttgaacatagtgtttatt

SEQ ID NO: 39093 - DNA, 201 bp, Homo sapiens; identical to SEQ ID NO: 5859

SEQ ID NO: 39094 - DNA, 201 bp, Homo sapiens
ataaattgtttgcaaatgttatatgcaactctacgtaagaacacctagcacaggggctaccagggaatttggtttaacaaatatttatcaggcacctattstgggctgggcaggggggataagatgttgactaagtcaaatgcagtccctcccctcaccaagtttacagtgtattgggcaagactgaaatggaacaagcaa

SEQ ID NO: 39095 - DNA, 201 bp, Homo sapiens
ggagcgagactccatctcaataaataaataaataaataaattctgtcatagggaagggatgcatggtaaatatttatttagtcattcaatttaaatgttgyacatgtttaaagataagtctgttgcaaactcttattttctccactttgaacatagtgtttatttccccctcccactacagctgctggccctctcctggtg

SEQ ID NO: 39096 - DNA, 201 bp, Homo sapiens; identical to SEQ ID NO: 5860

SEQ ID NO: 39097 - DNA, 201 bp, Homo sapiens
cccaccctgcaacagtccccagagtgtgatgttccccttcctgtgtccacatgttctcattgttcaattcccacctatgagtgagaacatgcggtatttgkttttttgtccttgcgatagtttactgagaatgatgatttccaatttcatccatgtccctacagagacatgaactcatcattttttatggctgcatagtat

SEQ ID NO: 39098 - DNA, 201 bp, Homo sapiens
gataagtctgttgcaaactcttattttctccactttgaacatagtgtttatttccccctcccactacagctgctggccctctcctggtgccattcaccctmaacttcaccatcaccaacctgcagtatgaggaggacatgcatcgccctggatctaggaagttcaacgccacagagagggtcctgcagggtctggttagta

SEQ ID NO: 39099 - DNA, 201 bp, Homo sapiens; identical to SEQ ID NO: 5861

SEQ ID NO: 39100 - DNA, 201 bp, Homo sapiens
ttcaggtttaataatttttttttttttttgagacggagtctcgctctgtcgcccaggctggagtgcagtggcgcgatctcggctcaccgcaagctccgccycctgggttcacgccattctcctgcctcagcctccggagtagctgggattacaggcacccgccaccatgcccggctaattttttgtattttttagtagaga

SEQ ID NO: 39101 - DNA, 201 bp, Homo sapiens
agctgctggccctctcctggtgccattcaccctaaacttcaccatcaccaacctgcagtatgaggaggacatgcatcgccctggatctaggaagttcaacrccacagagagggtcctgcagggtctggttagtaccctgccctcttcactctcccccgccctggatgccgagcccctcatacaacattcatgccagggcaa

SEQ ID NO: 39102 - DNA, 201 bp, Homo sapiens
tggagttatgagatagaacctggtgtcccgtaattaaaattccgccttcaggccttatgttttgtgagtcacaacactgcaaactttttacatgctgtagmcaggatgttcactctccacttcctcactgctctgctctaatcaattcaaccatttatgtgacatgcctaacccctctgggcttgtacgtatgtaacatgt

SEQ ID NO: 39103 - DNA, 201 bp, Homo sapiens
taaacttcaccatcaccaacctgcagtatgaggaggacatgcatcgccctggatctaggaagttcaacgccacagagagggtcctgcagggtctggttagyaccctgccctcttcactctcccccgccctggatgccgagcccctcatacaacattcatgccagggcaatggaagaatatcgcaccaaccttgccctcatc

SEQ ID NO: 39104 - DNA, 201 bp, Homo sapiens
ttaagttttagggtacgtgtgcacaatgtgcagtttagttacacatgtatacatgtgccatgctggtgtgctgcacccatttgctcgtcatttagcattargtatatgtcctaatgctatccctccccccctccccccaccctgcaacagtccccagagtgtgatgttccccttcctgtgtccacatgttctcattgttca

SEQ ID NO: 39105 - DNA, 201 bp, Homo sapiens
atccccagagatgcaagcctcacccactgaggccagccactctcatgggtgtctgccccacccacctcacttttgtccccacacagggaccttagccctcmtacttacctctctctccctcccccacagcttagtcccatattcaagaactccagtgttggccctctgtactctggctgcagactgacctctctcaggtga

SEQ ID NO: 39106 - DNA, 201 bp, Homo sapiens; identical to SEQ ID NO: 5864

SEQ ID NO: 39107 - DNA, 201 bp, Homo sapiens
tctcatgggtgtctgccccacccacctcacttttgtccccacacagggaccttagccctcatacttacctctctctccctcccccacagcttagtcccatwttcaagaactccagtgttggccctctgtactctggctgcagactgacctctctcaggtgaggctagaacagccagcctggctgccccaattattctcacc

SEQ ID NO: 39108 - DNA, 201 bp, Homo sapiens
cccatattcaagaactccagtgttggccctctgtactctggctgcagactgacctctctcaggtgaggctagaacagccagcctggctgccccaattattmtcaccccaatagacttcgcacatcttcctttatacacttcctagggataccctcaccaaaggtggaattcaggagtcactagcttcaggacccagtgtgt

SEQ ID NO: 39109 - DNA, 201 bp, Homo sapiens; identical to SEQ ID NO: 5865

SEQ ID NO: 39110 - DNA, 201 bp, Homo sapiens
ttccttcctccttccttccttcctttcttcctttcttcctgtctttttctttctttccttcttttggcagagtctcactctgtcgcccaggctggagtgcratggtgcaatctcggttcactgcaacctctgcctcccaggttcaagcgattctcatgccacatgccactatgcctggctaatttttgtttttttgttttt

SEQ ID NO: 39111 - DNA, 201 bp, Homo sapiens
gctctttccatccttttctcctcacaggaactcacgagcctggggagagttcgtcatccccacatggaacctcagtatggccaacaggcagccctctggtrgaaaaatcaacaatcagtcctgcaggtatgctccaatctcatctcctccacattgttatggtctcccggagctttgttaatctctttgaagacgaacatt

SEQ ID NO: 39112 - DNA, 201 bp, Homo sapiens
cattcaaaaatccacatataactttttttttttttgagatgtagtttcacacttgttgcccaggctggagtgcagtggcgccatcttggctcactgcaaamtctgcctcctgggttcaagtgattctcctgcctcagcctcctgagttgctgggattacaggcatgtgccaccatgcccagctaattttgtatttttagta

SEQ ID NO: 39113 - DNA, 201 bp, Homo sapiens
aaaggagatgcaatccatgacctagagaaacactcaggacaaattctcttttccccagttcctttcttgctccaatggcaacaccacccctctcatcctgragtctcttgtttttaccaccacacctattttgccaaattttctccaatattccaaaccatatgaaacctttctttctttcttttatttccttcctttcct

SEQ ID NO: 39114 - DNA, 201 bp, Homo sapiens
gtatggattctcccagctgagaccacagctactcctggctcagtgattcagtcattgaggacagtctcctgtgccattcctgagtcaatgcaatgtagacrgtgtagctacttccacccatgctgatgctctacttgcaaaacaatctgtgaagatggtagaaggactcccattgtatcatgttctcatgtcttacttggg

SEQ ID NO: 39115 - DNA, 201 bp, Homo sapiens
acaatctcagctgactgcaacccctgcctcccgagtttaagcaattttggtgtctcagcctcctgagtagctgggattacaggcgcctgccaccacccccrgctaatttttgtattttttggtagagacggagtttcaccatgttggtcaggctggtcttgaactcctgacctcaagtaatctgctctcctcaggactctc

SEQ ID NO: 39116 - DNA, 201 bp, Homo sapiens
tcccaaagtgctgggattacaagcatgagccaccatgcatggcctaaagcttcttttaaagccaccaagtcccttcccatgttagcccactaatccatggrttagtcatgaatggattaatctattcatacggacagagccctcatcacccaatcacctcttaaaggccccacctctcaatactgccacactggggattaa

SEQ ID NO: 39117 - DNA, 201 bp, Homo sapiens
gaggggacattcaaatcatagtaatgcccaaagtgaaaaatcttccctgcacttttccctcaacaaaaacagccagagatagtgagctgccaggaaattctttttttttttcctcttctgtcctaaatcagcatcgctagacctttacatgattcaacctcatcttcttcaccctctgggtcatgaaattttatttattta

SEQ ID NO: 39118 - DNA, 201 bp, Homo sapiens; identical to SEQ ID NO: 5872

SEQ ID NO: 39119 - DNA, 201 bp, Homo sapiens; identical to SEQ ID NO: 5873

SEQ ID NO: 39120 - DNA, 201 bp, Homo sapiens; identical to SEQ ID NO: 5874

SEQ ID NO: 39121 - DNA, 201 bp, Homo sapiens
agctggacagatgtagaggaggaagggagggagagagggggctgagatcaggaccaaaagccagagagaaagagactgagaatgagatgagagagaaatgrtatttagacagaagacaggcgatagatgattgatagttgacagatgattggtggatagctgataggtagatgataaatagattattttgatagataattg

SEQ ID NO: 39122 - DNA, 201 bp, Homo sapiens
cgttattcacaaaagatcttggccccacctcttctcaatgaaatgtccatgacttgttcaactttggccactctgggctgagagatggaggttcccttgcragctgaagtcacacatcgaaggtggaagcccctcccctccctctggctggctgagggatagcccagatgggctcatcatgaaagtttcccattatttcca

SEQ ID NO: 39123 - DNA, 201 bp, Homo sapiens
tggtatttttatttcaggaataataatagtgatgatttccaccattattgtcaaaggacaaagcacaaaatatgtaccaaataaaatatagccattatcckttattcacaaaagatcttggccccacctcttctcaatgaaatgtccatgacttgttcaactttggccactctgggctgagagatggaggttcccttgcaa

SEQ ID NO: 39124 - DNA, 201 bp, Homo sapiens
agagtaagaatcaaactaaattatctttatgggtagaaagcacactcatccatacatgtgtctttccacccttgtaatgtatttattattattgtttgtgyatactagattcccaataaatagggacagctattatggtatttttatttcaggaataataatagtgatgatttccaccattattgtcaaaggacaaagcac

SEQ ID NO: 39125 - DNA, 201 bp, Homo sapiens
gagagtaagaatcaaactaaattatctttatgggtagaaagcacactcatccatacatgtgtctttccacccttgtaatgtatttattattattgtttgtrcatactagattcccaataaatagggacagctattatggtatttttatttcaggaataataatagtgatgatttccaccattattgtcaaaggacaaagca

SEQ ID NO: 39126 - DNA, 201 bp, Homo sapiens
ggattacaggtgtgagccaccaagcccggccccatatgaaccatttctatccctcatttctctgtacttttacctaaaaacaccactcccttcacccatcrcatttttgtcaattctacatcacacacacacacatacacacacacacacacacacacagagaaagtaagttggaaaaaaattatactatcatgaaatttt

SEQ ID NO: 39127 - DNA, 201 bp, Homo sapiens
gctggtcttgaactcctgacctcaagtgatttgcccatcttggtctcccaaagtgctaggattacaggtgtgagccaccaagcccggccccatatgaaccrtttctatccctcatttctctgtacttttacctaaaaacaccactcccttcacccatcgcatttttgtcaattctacatcacacacacacacatacacaca

SEQ ID NO: 39128 - DNA, 201 bp, Homo sapiens
tagtggagacggggtttcgccatgttggccaggctggtcttgaactcctgacctcaagtgatttgcccatcttggtctcccaaagtgctaggattacaggygtgagccaccaagcccggccccatatgaaccatttctatccctcatttctctgtacttttacctaaaaacaccactcccttcacccatcgcatttttgtc

SEQ ID NO: 39129 - DNA, 201 bp, Homo sapiens
cgccacacaacgctaatttttgtgttcttagtggagacggggtttcgccatgttggccaggctggtcttgaactcctgacctcaagtgatttgcccatctyggtctcccaaagtgctaggattacaggtgtgagccaccaagcccggccccatatgaaccatttctatccctcatttctctgtacttttacctaaaaacac

SEQ ID NO: 39130 - DNA, 201 bp, Homo sapiens
agaataaataagctattgcaagtccagtaagtgtaatcattttgttcaaattgtgtgcccattccccaatttacaggactacacacaggagggacaaaaaraatggagaccaccaccacagctctgaagaccaccaccacagctctgaagaccacttccagagccaccttgaccaccagtgtctatactcccactttggga

SEQ ID NO: 39131 - DNA, 201 bp, Homo sapiens
cgatctctgctcactgcaacctccgcctcccaggttcaagagattctcttgcctcagcctcctgagtagctgggattacaggcgcccaccgccacacaacrctaatttttgtgttcttagtggagacggggtttcgccatgttggccaggctggtcttgaactcctgacctcaagtgatttgcccatcttggtctcccaaa

SEQ ID NO: 39132 - DNA, 201 bp, Homo sapiens
gcacgatctctgctcactgcaacctccgcctcccaggttcaagagattctcttgcctcagcctcctgagtagctgggattacaggcgcccaccgccacacmacgctaatttttgtgttcttagtggagacggggtttcgccatgttggccaggctggtcttgaactcctgacctcaagtgatttgcccatcttggtctccc

SEQ ID NO: 39133 - DNA, 201 bp, Homo sapiens
aatttgcaaaatccacaacagccacaccacatagtggatccagatgattcacaacagcagcctcctaaagtcatgaatacagccatgagtatggattctcscagctgagaccacagctactcctggctcagtgattcagtcattgaggacagtctcctgtgccattcctgagtcaatgcaatgtagacggtgtagctactt

SEQ ID NO: 39134 - DNA, 201 bp, Homo sapiens
ggtatctgtgacccctatttgattccccacctctcccttaacccttacccactctcctccctccttctctgtgcaggtttcacccatcggagctctgtacycaccaccagcagtgagtattcaaccgatgctccagtagccccaattatacaccaagcagggcaggagctgtcctgtcttcctatgcccctatgtcctctt

SEQ ID NO: 39135 - DNA, 201 bp, Homo sapiens
acaaaaactaaaccaaacaaaaaaagactagctgttattcatttatttatttatttatttagagacggagtctcgctctgtcacccaggctggagtgcagyggcacaatcttggctcactgcaacctctgcctcccaggttcatgtgattctcccgcctcagcctccccagctgttgttattcatgaatgaacctcagaga

SEQ ID NO: 39136 - DNA, 201 bp, Homo sapiens
acaccctggacaggaacagtctctatgtcaatggtgagtggctgtgatgtggttgaaatctcttcccccttgctgggcagcctctaatctctaactagagrtcacactccctgcctggcctttgaaaattctgtcatgtgctctacatgggatgactaaggtctggacttcatggtttccttaccatcatggactgtgttc

SEQ ID NO: 39137 - DNA, 201 bp, Homo sapiens
tggcacgatctctgctcactgcaacctccgcctcccaggttcaagagattctcttgcctcagcctcctgagtagctgggattacaggcgcccaccgccacrcaacgctaatttttgtgttcttagtggagacggggtttcgccatgttggccaggctggtcttgaactcctgacctcaagtgatttgcccatcttggtctc

SEQ ID NO: 39138 - DNA, 201 bp, Homo sapiens
acagacaacgtcatgcagcacctggtgagaggcctgcctcccgctgcagccctgccatgcccatcctagggctgttgcctgcctgcctctgaccaacccargctcccttctccctctgcagctcagtcctttgttccagaggagcagcctgggtgcacggtacacaggctgcagggtcatcgcactaaggtgagaaactcc

SEQ ID NO: 39139 - DNA, 201 bp, Homo sapiens
tccttcctttccttctttctttcttttttctcttcttttcttttctttttcagacatggtctcactctgttgcacaggctggagtgcaatggcacgatctytgctcactgcaacctccgcctcccaggttcaagagattctcttgcctcagcctcctgagtagctgggattacaggcgcccaccgccacacaacgctaatt

SEQ ID NO: 39140 - DNA, 201 bp, Homo sapiens
atattccaaaccatatgaaacctttctttctttcttttatttccttcctttccttcctttccttctttctttcttttttctcttcttttcttttctttttsagacatggtctcactctgttgcacaggctggagtgcaatggcacgatctctgctcactgcaacctccgcctcccaggttcaagagattctcttgcctcag

SEQ ID NO: 39141 - DNA, 201 bp, Homo sapiens
ggtcttgaactcctgacttcaggtgatccaccctcctcagcctcccaaagtgctgggattacaggcgtgagccaccatatctggccccattcttttttttwaaatgaatttaaggagtgcaaatgcagtttttgttacatgcatatattccatagtgaagtctgcagacagtagacttccagacagtagcttctggtgtat

SEQ ID NO: 39142 - DNA, 201 bp, Homo sapiens
tctcatcctggagtctcttgtttttaccaccacacctattttgccaaattttctccaatattccaaaccatatgaaacctttctttctttcttttatttcmttcctttccttcctttccttctttctttcttttttctcttcttttcttttctttttcagacatggtctcactctgttgcacaggctggagtgcaatggca

SEQ ID NO: 39143 - DNA, 201 bp, Homo sapiens
cttgatattttggtatacattgttaaatcatggccacatttcagctaattaatatatctattatctctacatagttatcatgtttgtaccctttgaccagsatcaccccatttgctcctcctcccagcccctggcaaccaccatcctactctctgcttctatgagtctgacaattttagattccacctataagttagatta

SEQ ID NO: 39144 - DNA, 201 bp, Homo sapiens
ggctgaggcaggagaattgcttgaacctgggaggcagaggttgcagtgagctgagattgtgccactgcactccagcctgggcgacagagcaagactccgtytgaaaaaaaaaaaaaaaggaattgtgccaggaattgtgatgagaactttatatgcattatctcctattaatattacccaaacctccgtgagttactatac

SEQ ID NO: 39145 - DNA, 201 bp, Homo sapiens
cataacagcagctcattttcatcaaaaggaaactgtagggccaggcacagtggctcacacctatattcccagcattttgggaggctgaggcaggcagatcmcctgaggtcaggagttcaagaccagcccagccaacatggtgaaaccccatctctactaaaaatacaaaaactagccaggcttggtggcatgtgcctgtaa

SEQ ID NO: 39146 - DNA, 201 bp, Homo sapiens
tctggccatatcagcttcattttttttttcctccagggtccaaacatccctccaccctcagagtctttgcacctggtgttcttgtccttcaaatctcagcytggatcaccctttataaagtagcatttcccctgtatacgcatcttgcacacagccaatctctattctacctctatgctcacttccttcctggcaattatt

SEQ ID NO: 39147 - DNA, 201 bp, Homo sapiens
cacgcaccatcacaccggctaattttttgtgtttttagtagagacgacggttttgcaatgtgggccaggcttgtctcgaactcctgacctcaagtgatcckccagcctcggcctctcaaagtgctgggattacaagtgtgagccactgcaccaggccaaaaacttgtatttcaatagtcattgaggctgggtgcagtggct

SEQ ID NO: 39148 - DNA, 201 bp, Homo sapiens
gggttggtgcacctgtgttttgagttctacccctccttcctctcttaacttcctcctgtcttctcactctgattcgttcttccttcctctccctctctctytgcaggttataaccatcggtcctggatctccaccaccagcagtgagtaaacatggccctgaagtccctatgccctgggaattcttcctccctaagcctgc

SEQ ID NO: 39149 - DNA, 201 bp, Homo sapiens
aggtgtggtggcgtgtgcctgtaatgacaactacttgggaggctgaggcaggagaatcacttgaacctgggaggcggaggctgcagtgagatgagcttgarccactgcactccagcccgggcaacagagagagactcttgtctcaaaaaacaaaacaaacaaacaaaaactaaaccaaacaaaaaaagactagctgttatt

SEQ ID NO: 39150 - DNA, 201 bp, Homo sapiens
acaggtgattgatagatgattgatggattataaataggagatgattgagaggtgagagataattgatggttattgattggtagataattgattgacaggtwgataaatattgatagctagatgatagataaatagatcattggtagatatgtgatatattgataaagaaattcagaggcaaaaggagagagaaatgaaggg

SEQ ID NO: 39151 - DNA, 201 bp, Homo sapiens; identical to SEQ ID NO: 5906

SEQ ID NO: 39152 - DNA, 201 bp, Homo sapiens; identical to SEQ ID NO: 5910

SEQ ID NO: 39153 - DNA, 201 bp, Homo sapiens
agtgggaactgcatagcacatgcaggaaagctcagctcagaagaatctgtgtaatattccatttttccctctctttggggcaactttctgtctaagagctsctgcaatgcccagcgtgtggacctgaaattgattctgacagtaggcaggggactgctgggcaactttggctctgcattttgtgatcaacatttccccacc

SEQ ID NO: 39154 - DNA, 201 bp, Homo sapiens
ggttctctctcagtttccaaaagtactctcttgactaccattcccatttcacagatgggcaaactgaggctcagaaaggggcgtggtgtgcctagggtcayacagtgctttaggaacagagttaggatttgaactctggtcccctttgctccaagtcctgtgtttttttccactggcatcagcggcccctccacccccaag

SEQ ID NO: 39155 - DNA, 201 bp, Homo sapiens
gaggtggaggttgcagtgagctaagatcgcgccattgcactccagcctgggcgacagagcaagactccatctcaaaaaaagaaaaaagaaattgccatggkggaaaatcaacattccacttcagtgtaaggtctcccacctttgtcactcagtacacacccacccttgactcctataccagccatcacacccatcctgttc

SEQ ID NO: 39156 - DNA, 201 bp, Homo sapiens
gatatatgtgatgaatattcagtaaagagaattggtgttacttggaggggagaagacacatagcttctgacttggatggccacactagttaataatgagcrcagtctgatctagtctcagaccagccctcagttgcagacgtctctcctcccctcctgcagccatggggtaccacctgaagaccctcacactcaacttcac

SEQ ID NO: 39157 - DNA, 201 bp, Homo sapiens
aatctccagtattcaccagatatgggcaagggctcagctacattcaactccaccgagggggtccttcagcacctggtgagaccctggtcccagcagctccyggtgggataaatcctacccccaacctctgttcctcggcttaccctcttcctccttcctctcaagctcagacccttgttccagaagagcagcatgggcccc

SEQ ID NO: 39158 - DNA, 201 bp, Homo sapiens
gggttgccaactgatctccctcaggtgagaccacttcctggccatttgccagtaacaaccaccccttttgtgaccaccccttcctcagctttcccctgctyctccctccactgctctttacctgcagaggtctcgggacctctctagagtcctcaaatgcctctctccccaggcctgagaaggatggggcagccactggtg

SEQ ID NO: 39159 - DNA, 201 bp, Homo sapiens
cttcctggccatttgccagtaacaaccaccccttttgtgaccaccccttcctcagctttcccctgctcctccctccactgctctttacctgcagaggtctygggacctctctagagtcctcaaatgcctctctccccaggcctgagaaggatggggcagccactggtgtggacaccacctgcacctaccaccctgaccctg

SEQ ID NO: 39160 - DNA, 201 bp, Homo sapiens
gtgtctttgaatctagtgcccatttcaatctccatgggtcttggttcaagcttttctcctcattcatgaaggaaggttgccccaaattcgggctggtcccstgaggtggtgaggggcattgtctcagtgggaggaagaatgctgagtccttggcctgtttttagacctgcagccatagtcttggctttgtgaattttccat

SEQ ID NO: 39161 - DNA, 201 bp, Homo sapiens
ccaggctggagtgcaatggtgcaatcttggctctgcaacagtgattctcctgcctcagcctcccaagtagctgggatttacaggtgcatgccaccacgctyagctaatttttgtatttttagtagagatggggtttcaccatgttgcccaggctggtctcgaactcctgacctcaggtgatccacctgccttggcctccca

SEQ ID NO: 39162 - DNA, 201 bp, Homo sapiens
tagattgtactaatttggattcccaccaacagtgtataagagttcccttttcttttattcttgccagcatctggttgtttgttgtttgtttggttggttgkttggtttttgtctttttagtaatagttattctgactggtattaataacttttttatttattcatgacagtttgatttttgacatataaaaattgcttgca

SEQ ID NO: 39163 - DNA, 201 bp, Homo sapiens
ggctgggggacacccttccccaaaccaccaaggggagggtctttcccattattttgagtaaatagcatgaaattctttgaccaaattaatgtcataaattrtttgtctctttctccttcacttttgtttccaacttggttgcggtataactatcaaatacaattgtatgtatttaagatgtataatgcagtgatttaatat

SEQ ID NO: 39164 - DNA, 201 bp, Homo sapiens
atttaagatgtataatgcagtgatttaatatatgtgtagcttatgaaatgattaccatgatcaaattagttaacactgctttcatgtcacatagttaccgygtgtctgtgtgcgtctgtgtgagttagagagaaagagaacatttaaggtctaccctcatagaaaatttcaggtttacaatacagtattattaactataat

SEQ ID NO: 39165 - DNA, 201 bp, Homo sapiens
ttcaaaggcccctgttccttgaaacttcttccattccactagggtatctgtgacccctatttgattccccacctctcccttaacccttacccactctcctycctccttctctgtgcaggtttcacccatcggagctctgtacccaccaccagcagtgagtattcaaccgatgctccagtagccccaattatacaccaagca

SEQ ID NO: 39166 - DNA, 201 bp, Homo sapiens
tggtagctcctgagtagaaaagaagattgggaaagcatgaggaatgaattatagtttcacttaccccaccggcctagggaaaaactcaattcctaggagasgcagcttagaaccaaggtgggcctcatcttgagagaaatccatgagccatgcctatcttagtctgtattgcattgcttatagcagaacagctgaaactgg

SEQ ID NO: 39167 - DNA, 201 bp, Homo sapiens
ccaggtattaagcctagtatccattagttatttttcctgatcttctccctcctcccaccctccaccctccaataggcccttaattaaactaaagagcttcygcacagtaaaggaaactatcaacagagtaaacagacaatctacagaatgggagaaaagctttacaaactttgcatctgacaaaggtctaatatccagcat

SEQ ID NO: 39168 - DNA, 201 bp, Homo sapiens
tgtacaggaagcatgatgtcagcatctgatcagcttctggagaggtctcaggaagcttccaatcatggtgaaggccaagggagggccagcatgtcacaagrgagggccagcatgtcacatggccagagcaggagcaagggagagttggggggagcaaaggtgccacacacttaaccagatctcacaagtacagactccctg

SEQ ID NO: 39169 - DNA, 201 bp, Homo sapiens
gtacccattgagtaatttctcatcatccactctcctccactccccaacccttccaagtttccactgtctattattccactctctatgtccatgcctatgcrttatttagcattgacatgtctatgcattatttagtcaaatacatgtgctatttgacttcctgtatctgagttgtttgacttaagataatgaccttcactt

SEQ ID NO: 39170 - DNA, 201 bp, Homo sapiens
ggcactccacataacacctgcatgtagcatcttctctgctaatgttttgacccagtagacaagagagcgatgcaacagggaaagatcagagcacattctgwactcaaaggaacatcccaaaggtgtgacatcagtgacagcctggctgcccaaagcaccagaaagcctgtcgtcaccagaggaaccaatgagcccagcatt

SEQ ID NO: 39171 - DNA, 201 bp, Homo sapiens
gtacattgtacccattgagtaatttctcatcatccactctcctccactccccaacccttccaagtttccactgtctattattccactctctatgtccatgyctatgcattatttagcattgacatgtctatgcattatttagtcaaatacatgtgctatttgacttcctgtatctgagttgtttgacttaagataatgacc

SEQ ID NO: 39172 - DNA, 201 bp, Homo sapiens
ctgattcaagtgattctcctgcctcagcctcccaagtagctgggattacaggcacgtgccaccacacccagctaatatttgtatggatggtctcaatctcytgacctcgtgatttgtatggatggtctcgatctgacctcatgatccgcctgcctgggcctcccaaagtgctgggattacaggcgtgagccactgtgcccg

SEQ ID NO: 39173 - DNA, 201 bp, Homo sapiens
ctgagtagctgggactacaggcgcctgccaccatgtctggctaattttttttgtatttttagtagaaacagggtttcaccatgttgaccaggatggtctcratctcctgacctcgtgatctgcccacctgggcctcccaaagtgctgggattacaggcgtgagccaccacacccagccccaattttttttttaattaaaat

SEQ ID NO: 39174 - DNA, 201 bp, Homo sapiens
ttttgttttgtttttgttttttatttgtttttattttttctttttttttgagacagagtctcgctctgtcacccaggctggagtgcagtggcacgatctcygcccactgcaagctccgcctcctgggttcatgccattttcctgcctcagcctcctgagtagctgggactacaggcgcctgccaccatgtctggctaattt

SEQ ID NO: 39175 - DNA, 201 bp, Homo sapiens
tctggacttcttatctctctgtacttagcaagccacttggtttttggttcccatcttgcctgccctagatggtattgctcctccacccccaggcagctgcrgtgttaaacaattaccctgattagttattgttgttgtgttgtttgtttgtttttgagacagggtctcactctgtcacctaggctggagtgcagtgacatg

SEQ ID NO: 39176 - DNA, 201 bp, Homo sapiens
tccccagaacttattcatcttgtaactaaaagtttgtattttgtgaccaacatctccccattttctctatcaccacccccatgcccccagcccctgataamcatcatgctactctctgcttctgtaagtttgacttctgatcccacatataagtgagatcatgcagtatttgtttctctctatctggtatatttcacttag

SEQ ID NO: 39177 - DNA, 201 bp, Homo sapiens
tgatatacatacctgggcaagtggttgtcatgacaagaagcaaaatagacggagaagtgtgctcagtggctgaaaattctctgatgctactggggccaggwttctgacctaagaaacatcgccctgtctttcagctcaaccaactcttccgaaacagcagcatcaagagttatttttctgactgtcaagtttcaacattca

SEQ ID NO: 39178 - DNA, 201 bp, Homo sapiens
cattcatttaattaatgaataataaatgattcagtacataattgattaattgatgtaattgagaattgatttaattgattaattgatcaattaaaatgatyaattaaatgaatgaatcagtaaatgaataattcattcattcaataaacaatggaagtaggccgggcatggtggctcacgcctgtaataccagtactttgg

SEQ ID NO: 39179 - DNA, 201 bp, Homo sapiens
ttcccatttaatacacaagcacagagaggttcagtagctgacccaaggtcacacagctaagtcataccctagaagagcatgtcctttgatatacatacctrggcaagtggttgtcatgacaagaagcaaaatagacggagaagtgtgctcagtggctgaaaattctctgatgctactggggccaggattctgacctaagaa

SEQ ID NO: 39180 - DNA, 201 bp, Homo sapiens
tcatgattctgaggctgccagttttcaaagttaccgaggatcttgctggatgcagtggcttgcgactgtaatcccagccctttgggaggccaaggtgggtrgatcgcttgagctcaggagtttgagaccagcctgggcaatatggtgaaaacccatctctacaaaaaatacaaaaatcagctgagcatagtggcatgtgct

SEQ ID NO: 39181 - DNA, 201 bp, Homo sapiens
tttcatttttagttatttgagaaatctccacgtttttcatagagattatactaaattacattcccaccaacagtgtgtaacggttcacttttcttgcatcytttttgacatctgttattttttgtctttttagtaacagccattctgactggcgtaaggtggtatctcatcatggttttaatctgtatttctctgattatt

SEQ ID NO: 39182 - DNA, 201 bp, Homo sapiens
tccatgggtcttggttcaagcttttctcctcattcatgaaggaaggttgccccaaattcgggctggtcccctgaggtggtgaggggcattgtctcagtggsaggaagaatgctgagtccttggcctgtttttagacctgcagccatagtcttggctttgtgaattttccatgtccctctgggttggaggaagaagtttgaa

SEQ ID NO: 39183 - DNA, 201 bp, Homo sapiens
tgaggaataacaagaacaggcagttgtcaattataaattatttgatgtgaacctattcatacatgggtgtggtcatcagggaaggcttcctggaggaaatracattgaaggtgaattctaaaagatgacgataaaaccaccaagtgaaggagagcttaaatgtgtttttaggcagaagaaaaaccttttgggtgaaaattt

SEQ ID NO: 39184 - DNA, 201 bp, Homo sapiens
caaccaccccttttgtgaccaccccttcctcagctttcccctgctcctccctccactgctctttacctgcagaggtctcgggacctctctagagtcctcaratgcctctctccccaggcctgagaaggatggggcagccactggtgtggacaccacctgcacctaccaccctgaccctgtgggccccgggctggacataca

SEQ ID NO: 39185 - DNA, 201 bp, Homo sapiens
gaccaagacaggtggatcacctgaagtcaggagttcaagaacagcctgaccaacataatgaaacccaactccactaaaaatacaaaaaaattagctgggtktagtggtgggtgcctgtaatcccagctactcgggaggctgaggcaggagaatcacttgaatctgagaggtggaggttgcagtgagctaagatcgcgccat

SEQ ID NO: 39186 - DNA, 201 bp, Homo sapiens
acccaggaggcagaggtgggagtatcacctgagcctgggaggttgaggctgcagtgaactgtgattgtaccactgcactccaccctgaatgacagagtgasatcctgtctcaaaaaaaaaaaaaaaaaaaaaaaaaaacaaagaaaaaagaaatacctgagactgggtaatttttaaagaaaagaggtttaattggctcac

SEQ ID NO: 39187 - DNA, 201 bp, Homo sapiens
tcatgccactgcactccagcctgagtgacagagcaagactctgtctcaaaaaaagaacaagagaaaaaaaaaaaatacctggccaggctcggtggctcacrcctgtaatcctagcactatgggaggcctaggcaggcaggttgcttgagtccaagagctcgagaccagcctgggaaacatggcaaaatgctgtctctacaa

SEQ ID NO: 39188 - DNA, 201 bp, Homo sapiens
ttctgaagcctacttctgtcaattcatccatctgatcctccatccagttctgcacccttaatggagagatgttgcggtcatttggaggaaaagaggcactytggccttttgggttttcagcatttttttgttgattatttcccatcttcaggagttttagtttcaggctttgaggctgctgatccttggatggggttttta

SEQ ID NO: 39189 - DNA, 201 bp, Homo sapiens
cgcgccactgcactccagcctgggcgacagatggagactctgtctcaaaaataaataaataaataaaaataaaaaataaataaacaatggaggtaaacacrtactgataacacagtgtgatcattgctatgataagggaatttcaggggcctgtgggagccccaaggaggaacacacaaccttgtcttggaaagttttatg

SEQ ID NO: 39190 - DNA, 201 bp, Homo sapiens
gctaaaaatacaaaaattagccaggcatggtggtgcgtgcctgtaatcccagccacttgggaggctgagagaggagaactgcttgaactcgggaggcggakgttgcagtgagccgagattgtgccattgcactcaagcctgggcaaaaagagcaaaactgcatttcaaaaaaaaaaaaagtggcattttggggcaagttta

SEQ ID NO: 39191 - DNA, 201 bp, Homo sapiens
ccccccatgtagcagggactacaggcatgcgccaccacacccggtgaagttttgtatttttattagagacagggttttgccatgttggtcaggctggtctygaactcccgacctcaggcaatttgcctgcctcggcctcccaaagtgctgagattacaggcttgggccactgcatccagccgaaggcctcccattttgatc

SEQ ID NO: 39192 - DNA, 201 bp, Homo sapiens
tctatataaggatcctctgtgtcagtggttattaccaggggacaattctgcacttctgccccaccccaccccccaactgggagactctaggcaatatccaraatcatttttgggtatcacaactcagggagggaaggagggtgcaactggcacctagtgggtcggtagcccattttccagtgcacaggagacaaccacccc

SEQ ID NO: 39193 - DNA, 201 bp, Homo sapiens
cttctccccattcacctgtttgtccttctttctgtccttccaaccatccatccatccatcatccatccatctatccttttccccattcacctgttttgtcyttccttctgtccttccaaccatccctccatctctccatccatcctcctgcctattcatctgcttgtctttccttccttctgtccttccatccattcatcc

SEQ ID NO: 39194 - DNA, 201 bp, Homo sapiens
ccatccatccatctatccttctccccattcacctgtttgtccttctttctgtccttccaaccatccatccatccatcatccatccatctatccttttcccyattcacctgttttgtccttccttctgtccttccaaccatccctccatctctccatccatcctcctgcctattcatctgcttgtctttccttccttctgtc

SEQ ID NO: 39195 - DNA, 201 bp, Homo sapiens; identical to SEQ ID NO: 5952

SEQ ID NO: 39196 - DNA, 201 bp, Homo sapiens
cccatccatccatccatctatccttctccccattcacctgtttgtccttctttctgtccttccaaccatccatccatccatcatccatccatctatccttytccccattcacctgttttgtccttccttctgtccttccaaccatccctccatctctccatccatcctcctgcctattcatctgcttgtctttccttcctt

SEQ ID NO: 39197 - DNA, 201 bp, Homo sapiens
tccatttctttcatttctagggtattctcccaacagaaatgagcccttaactgggaattctggtaagtctcaaagaagccccagcccagggtagggagggkgtagcctgatggtgctttgccttgtccaagagcaccaggcacacagagtcttggatgaggatcaaaattgccaacccatggcaaagactattgaggcata

SEQ ID NO: 39198 - DNA, 201 bp, Homo sapiens
ccatccacccatccatccatccatctatccttctccccattcacctgtttgtccttctttctgtccttccaaccatccatccatccatcatccatccatcyatccttttccccattcacctgttttgtccttccttctgtccttccaaccatccctccatctctccatccatcctcctgcctattcatctgcttgtctttc

SEQ ID NO: 39199 - DNA, 201 bp, Homo sapiens
agccctgggacgtggcaggaggtggctcaccccagcccttgtctccccagaccttcccttctgggctgtcatcctcatcggcttggcaggactcctgggastcatcacatgcctgatctgcggtgtcctggtgagcaaggaagggttgcttgtcttcttaacaattgggttgtaagagttcttaatatattataaaaccat

SEQ ID NO: 39200 - DNA, 201 bp, Homo sapiens
tccttttatccatccatccacccatccatccatccatctatccttctccccattcacctgtttgtccttctttctgtccttccaaccatccatccatccaycatccatccatctatccttttccccattcacctgttttgtccttccttctgtccttccaaccatccctccatctctccatccatcctcctgcctattcat

SEQ ID NO: 39201 - DNA, 201 bp, Homo sapiens
atacacaagtcctttgctggatatatgttttgcaaatattttctcccagttcacggagtggctttcctattttctttttataattttatttttaattaatygacaaataatgaatgcatatatttaggggatacaatgtgatgctttggtatatgtacaattatggaatgactcaatcaagctaattaatatgtccctcac

SEQ ID NO: 39202 - DNA, 201 bp, Homo sapiens
attttggggcaagtttaagaagattggtgtagctggagcatccactttgatactggagaggtgacagttgaagccaaagatgtgggcagagactttgttgrgcactggaatggcttggggaggaacatgacacactcatgagttctgctttagaaagaaaatgaaatgaattctgctcatcctctgggtgctgtgtgcaga

SEQ ID NO: 39203 - DNA, 201 bp, Homo sapiens
gctaattttttttgtatttttagtagaaacagggtttcaccatgttgaccaggatggtctcgatctcctgacctcgtgatctgcccacctgggcctcccaragtgctgggattacaggcgtgagccaccacacccagccccaattttttttttaattaaaattgttgtcagctcacaagctttctaaaaacaggccatgga

SEQ ID NO: 39204 - DNA, 201 bp, Homo sapiens
ctccctattcactggtttgtctttccttctgtccttccaaccatccacccatctctccattcattctcctcttcattcaccatgtttccttatttctgtcycttccatccatccatctatccagacagacatctcctccccccattctcctccccattcactcaattgtccttccttccatctgtccttttatccatccat

SEQ ID NO: 39205 - DNA, 201 bp, Homo sapiens
cactgagctggttaacacttgagccatccacagacagcaaggctaaggagcacactgtaacacacagccacttgggctttgggagttgcagtctcccaccygtggatgctgccatggggccagagcccagggacactggccccggctcctgcacctgcctgtctgtgtgctccccgtcccataaggggtttgagtcaccca

SEQ ID NO: 39206 - DNA, 201 bp, Homo sapiens
ggatgatgatgatagtggtggtggttatgatggttaaggatgatgtgatgatggtgttggtgatcacggtactagtggtggtgatgtggaccgtcatggtkgtggttgtggtggtgatggtggtgatcatgatgataatgaggatgatggtggtgattgtcatgatggtaaggatgaaacagtgatggtgttggtgaccat

SEQ ID NO: 39207 - DNA, 201 bp, Homo sapiens
gcctcccaaagtgctgggattacaggcatgaggcaccgcacctggcctgcagtgagtcatgatggcaccaccgcactccagcctggactacatacatacayacatagtaaataaaaatgagagtataacatgaaaaagaaaaaatctcctttccctgcccacctgaaacccaatctctcacctcaaaaagaaattattgtc

SEQ ID NO: 39208 - DNA, 201 bp, Homo sapiens
tctctgcctcattagcgagtccatccgcaatcagtgctattgcgagtctctctctgactgtcttcactttcccttcctgtttcctgatatcttcctcagtraccagaaattgtttgcagaggagctgcgagatacccactccctctgcaggaattatctccaccgcatctgaagagcaggcaaggtggggcatggggcagg

SEQ ID NO: 39209 - DNA, 201 bp, Homo sapiens; identical to SEQ ID NO: 5956

SEQ ID NO: 39210 - DNA, 201 bp, Homo sapiens
ctcactctgccctgaccaagatactcagtccctcctacaacatccaagccagggtaatgggagaagaatgtacccacttcgtccttgcccccagagatgcmagactcacccactgaggccagccacgcccactgaagctagcctcacccactaggccctgcctcactcaccttatttctgcacccacacacagggacctta

SEQ ID NO: 39211 - DNA, 201 bp, Homo sapiens
ctacttgggaggctgagacaggagaatcacttgaacccaggaagcagaggttgcagtgagccaagatcatgccactgcactccagcctgagtgacagagcragactctgtctcaaaaaaagaacaagagaaaaaaaaaaaatacctggccaggctcggtggctcacacctgtaatcctagcactatgggaggcctaggcag

SEQ ID NO: 39212 - DNA, 201 bp, Homo sapiens
ggatcacttgaggtcaggagttcaagaccggagcctggccaacttggtgaaaccctgtctctactaaaaatacaataattagccaggcatggtggtccacrcctgtaatgccagctacttgggaggctgagacaggagaatcacttgaacccaggaagcagaggttgcagtgagccaagatcatgccactgcactccagcc

SEQ ID NO: 39213 - DNA, 201 bp, Homo sapiens
aatcagatcagcggttgcctgggaatgaaaatgtgtttgcagtggcagggaaaaaggaattgtaaaagagcaggaagaaagtttttttgttgtttttttttgttttttcttgagacagagtcttagtctatcgcccaagctggagtgcaatggcacgatctcagctcattgcaacctctgcctctcgggttcaagcgtttt

SEQ ID NO: 39214 - DNA, 201 bp, Homo sapiens
tcattcacttgtttaattcccaattccagcttgtcacctgtctcaagtctaggctgtcctgtccccatgccatgagaatgcaagaaccacactgaaatgtkagaaaaattcttttatccacaagtatgctcaccgtcccaagctggacagtagtcagtgcactcagagaatctaagtgtggcttctcatctgtgtaccagg

SEQ ID NO: 39215 - DNA, 201 bp, Homo sapiens
gggaagcagaggttgcagtgagccaagatcacgccactgcactctagcctgggcaacagagcaagactgcatctccagaaaaaaaaaaaaaaaaaaaaaaagacacactcacatgcaccctccatttctttcatttctagggtattctcccaacagaaatgagcccttaactgggaattctggtaagtctcaaagaagccc

SEQ ID NO: 39216 - DNA, 201 bp, Homo sapiens
gggaggctgaagcaggagaattgcttgaacccgggaagcagaggttgcagtgagccaagatcacgccactgcactctagcctgggcaacagagcaagactscatctccagaaaaaaaaaaaaaaaaaaaaaaagacacactcacatgcaccctccatttctttcatttctagggtattctcccaacagaaatgagccctta

SEQ ID NO: 39217 - DNA, 201 bp, Homo sapiens
ttttagttatttgagaaatctccacgtttttcatagagattatactaaattacattcccaccaacagtgtgtaacggttcacttttcttgcatcttttttracatctgttattttttgtctttttagtaacagccattctgactggcgtaaggtggtatctcatcatggttttaatctgtatttctctgattattagtaat

SEQ ID NO: 39218 - DNA, 201 bp, Homo sapiens
tttttttttgttttttgttttgtttttgagatggagtctcgctctgtcaccaggctagagtgcagtggcgtgatctcgtctcactgcaatctctactcccygattcaagtgattctcctgcctcagcctcccaagtagctgggattacaggcacgtgccaccacacccagctaatatttgtatggatggtctcaatctcct

SEQ ID NO: 39219 - DNA, 201 bp, Homo sapiens
ggactaaaaccagattacttagaatctagcagcctaactgtgcttttcaatgagaggtatcatttccaatggtggggggtaccaatgatttttttttttttgacaactgccttgagaacaggctttcctcactaaacaaattctgaatcagaacaaataaagataagccctgagaatagggctttttcaaggagctgccaa

SEQ ID NO: 39220 - DNA, 201 bp, Homo sapiens
ccaggtgcggtggctcacacctgtaatcccagcactttgggaggccaaggcgggtggatcacctgaggtcgggggttcgagaccagtctgaccaacatggwgaaaccctgtctctattaaaaatacaaaaaaaaaaaaaattagccaggcagggtggcgcatgcctgtaatcccgctactcgggaggctgaggcaggagaa

SEQ ID NO: 39221 - DNA, 201 bp, Homo sapiens
ctggacaaagacagcctctaccttaacggtgagcagctatcagccccatctccctgccccaccccccagcccccactgcagtccaggagggtgtctgtttsccggttctctagggaaagacttggggttcaagtcttggcattaccactggccctcccataaccacaatgcaaggttggactttgattaatcccattttac

SEQ ID NO: 39222 - DNA, 201 bp, Homo sapiens
gtagcagggactacaggcatgcgccaccacacccggtgaagttttgtatttttattagagacagggttttgccatgttggtcaggctggtcttgaactccygacctcaggcaatttgcctgcctcggcctcccaaagtgctgagattacaggcttgggccactgcatccagccgaaggcctcccattttgatcagaaccct

SEQ ID NO: 39223 - DNA, 201 bp, Homo sapiens
agcaggtgttccatgagctgagccagcagacccatggcatcacccggctgggcccctactctctggacaaagacagcctctaccttaacggtgagcagctmtcagccccatctccctgccccaccccccagcccccactgcagtccaggagggtgtctgtttgccggttctctagggaaagacttggggttcaagtcttgg

SEQ ID NO: 39224 - DNA, 201 bp, Homo sapiens
gatacaagctggacagatggatggaggaagatcctccatccaatatagagctgttacctaaaaccctccatcccacctttaaaatcctagctcagccaggygcggtggctcacacctgtaatcccagcactttgggaggccaaggcgggtggatcacctgaggtcgggggttcgagaccagtctgaccaacatggagaaac

SEQ ID NO: 39225 - DNA, 201 bp, Homo sapiens
aatcagtaaatgaataattcattcattcaataaacaatggaagtaggccgggcatggtggctcacgcctgtaataccagtactttgggaggcccaggcagrcagatcacgaggtcaggagattgagaccatcctggctaacacggtgaaaccctgtctctactaaaaatacaaaaaaaattagccaggcatggtggtggcc

SEQ ID NO: 39226 - DNA, 201 bp, Homo sapiens; identical to SEQ ID NO: 5972

SEQ ID NO: 39227 - DNA, 201 bp, Homo sapiens
ggatggataccccatttaccctgatgattattatgcattacatgcttgtatcaaaacatctcatataccccataaatataaaaacacctactatgtacccmaaaaaattaaaaacaaataaaatcaaaagtaggctgggcacagtggctcatgcctgtaatcccagcactttgggaggccagggcaggtggatctcttgag

SEQ ID NO: 39228 - DNA, 201 bp, Homo sapiens; identical to SEQ ID NO: 5973

SEQ ID NO: 39229 - DNA, 201 bp, Homo sapiens
ttgatgtagaactcaaaatattagcccaataataatatttaacatcaaccagcctcctctcatttaattctcacaacagaatctatgagttgagtgcaaaratcatccctattgtgcagatgggaaaactgagggtcagaaaagtgaacttcccaagaactgtcaaagttgggatttgaacccaggtctctgatgactgga

SEQ ID NO: 39230 - DNA, 201 bp, Homo sapiens; identical to SEQ ID NO: 5976

SEQ ID NO: 39231 - DNA, 201 bp, Homo sapiens
gagcaggggcagccatagtgagattgtcatttcagaaagattcttcttgtgttcagtatagagaatgtcctttagacagggcatccagtgagtctgccaggtgctaatcagggtgagagaaaataagacctgaactgggataggggaggagagagaggatatatgtgatgaatattcagtaaagagaattggtgttacttg

SEQ ID NO: 39232 - DNA, 201 bp, Homo sapiens
tgtccacatgtacccattggttagctcccacttataagtgagaatgtgcagtatttaattttctgtttttgagttattttgcttaggttgatggccttcakctccagccacgttgctttaaagaacatgatttcattcttttttatggctgcatagtactccgaggtgtatgtgtaccagattttctttatccacaatgat

SEQ ID NO: 39233 - DNA, 201 bp, Homo sapiens
gtgctgggattacaggcatgagccaccgtgcccagcctggttcctggtttctaagacatcacacacacacacacacacacacacacacacacacacacacwcacacactcagagagagagagagagaggatcattaagacatgatacactaagaaattctattctgcagacactgagaatccgttaaaaagtttgaaggga

SEQ ID NO: 39234 - DNA, 201 bp, Homo sapiens
tcaccacccaagtattaagcctagtacccattagttattttttctgatcctctccctcctcccaccctccacccgccacccgccaccctccaacctcaggyaggccccagtgtgtgttgttcccctctatgtgtccatgtgttctcatcatttagctcccacttataagtgagaagaggcagtatttggttttctgttcct

SEQ ID NO: 39235 - DNA, 201 bp, Homo sapiens
aagtgctgggattacaggcatgagccaccgtgcccagcctggttcctggtttctaagacatcacacacacacacacacacacacacacacacacacacacwctcacacactcagagagagagagagagaggatcattaagacatgatacactaagaaattctattctgcagacactgagaatccgttaaaaagtttgaagg

SEQ ID NO: 39236 - DNA, 201 bp, Homo sapiens
tcggcctcccaaagtgctgggattataggtgtgagccactgcacctggcttggattttttttttctatattgtggtaacatacacatcacattaaattgaycattttagctatatttcccgttcagtggcatcaagcacattcacattattgtgcaaccatcaccactatcatccatctccagaactttctcatcttccca

SEQ ID NO: 39237 - DNA, 201 bp, Homo sapiens
gtggctggagcagagagagagcaagaagaaaagagagaaaggatgagactcaagacatcagcaagtttgaagggccttggaggacttggatttttttttttaagacagctttgttcttgttgcccaggcatgatctcggctcaccacaacctccgcctcctgggttcaaacgattcctctgcctcagcctcccgagtagct

SEQ ID NO: 39238 - DNA, 201 bp, Homo sapiens
acccctatttgattccccacctctcccttaacccttacccactctcctccctccttctctgtgcaggtttcacccatcggagctctgtacccaccaccagsagtgagtattcaaccgatgctccagtagccccaattatacaccaagcagggcaggagctgtcctgtcttcctatgcccctatgtcctcttcataaaggaa

SEQ ID NO: 39239 - DNA, 201 bp, Homo sapiens
accctgaaggcggggcttgcagtgagccgagatcgcaccactgcacacttcaacctaggcgacagagcgagactccatctcaaaaaaaaaaaaaaaaaaaaggtttcctttcagtgcatccttgccaacttgagttttctgggttggtttgcactctcatggtatttactagatacttctccatttatatttttactcaac

SEQ ID NO: 39240 - DNA, 201 bp, Homo sapiens; identical to SEQ ID NO: 5985

SEQ ID NO: 39241 - DNA, 201 bp, Homo sapiens
cacaagtatgctcaccgtcccaagctggacagtagtcagtgcactcagagaatctaagtgtggcttctcatctgtgtaccaggcttctcatttcctgtggscccttcttgtccttccctcagcaatcttgggactcctccctagacaaaactttattattattcccctcacctgccctctccaggcctgaaaaggatggga

SEQ ID NO: 39242 - DNA, 201 bp, Homo sapiens; identical to SEQ ID NO: 5989

SEQ ID NO: 39243 - DNA, 201 bp, Homo sapiens
cctcccttctggcttactaccaattttgggaagaagttcagtttttttctttggtacaaatgtttactgactgtagagccaacttccacaccttattggaraaaaaaggatagacaaatagtatttttgtgattttacagtagcttaaaactataggattttttttccccattactttgcaacaactgatacttttgacca

SEQ ID NO: 39244 - DNA, 201 bp, Homo sapiens
gagcataggcagaaaattgcctcccagttggtattcataatattaatacttccataagcataaagcatacctctttcaggattaaggggtcatgctcttctcatgcatgggggtgaacagcatttcctcaggatttgggtggtttgttgagaatggaaactcgttctcatgagcatactgacattgaataagaggacatgt

SEQ ID NO: 39245 - DNA, 201 bp, Homo sapiens
ctgcccagccactcccacttttgctgacatgatttatgcttagcttgggtagtatagacccattccctctctttctttctattacacttctttcctccctkctggcttactaccaattttgggaagaagttcagtttttttctttggtacaaatgtttactgactgtagagccaacttccacaccttattggagaaaaaag

SEQ ID NO: 39246 - DNA, 201 bp, Homo sapiens
gtctttatcctcttctggattgtctgtagtgcccatcatgtgtcctacatgcctatcacagagcctggaatgtagcagatgcccaatatttgcagaatgartgaattcatatgtaagtgactgaaagagttcaacaaatgttagttctctttccctttctcatctcatatttacagaagaatggatacaccagagttatgg

SEQ ID NO: 39247 - DNA, 201 bp, Homo sapiens
ataaaatcagattgtattgatctgagttcccttctgatttatcttaaattagggaacattagtgtaagtcagatgctctcccagagttttcactaacctgytcttggcgctgttccaaaggtgctccagagaagctcctctgggtagctgcctggtggccactgagcaactggagattcctgatgactgcagctgccaggc

SEQ ID NO: 39248 - DNA, 201 bp, Homo sapiens
gggttgtctccagtttggagcaatcgcgaatagagctactataaacattccagtacaggtttttgtgggaatgtaagtttttatttctctaggctaaatawgtaggaataggatcactgggttatatggtaagtatatgtttagctttgtaaaaaagtgccaaactgtttccaagatggctgttcaattttgtgctagtaa

SEQ ID NO: 39249 - DNA, 201 bp, Homo sapiens
ggccactcttgcaaacagccaccacctccctccccacacacttagcatcacgatgtgaggttgatgttatgattgcagggttggacttaggatagtctggrgcctcagcaagggtgggtcgggtgatgtctgaaacataggatagctctgagatgttaagaagtcaatgaaacagggaacaaaggatttcttgtttatact

SEQ ID NO: 39250 - DNA, 201 bp, Homo sapiens
tgtaaatcttccatttgttgagtatctgtgaagcactagcctcctgtatgttacctcaggaaatacccagagatatagggagatatttctgtcatcatttrtagacatggacattttaagtttaaggtttgataagaaagcattactaaatacattatagatgttgcgcttgttaaagtcagagaataatgttcatattgc

SEQ ID NO: 39251 - DNA, 201 bp, Homo sapiens
agaattccttagtaactaatttctgtcatgtgtgttgtactggtagaataagtttttgtgacgaaattggaacattaatggggggaatggttgattagctsgttttatatttttcaaggattactttcttctaatcctttatagtccaaaatctctaaaatatgtgggaaagtactcagattaaagtggtttgcaattatg

SEQ ID NO: 39252 - DNA, 201 bp, Homo sapiens
ataaattattaaattctaaaattttatgcacagttgagtattcagaagagtatttccttataaccacatgaaaaaataagtctcatccatactcaacccaygaatgataagaatgccgacctcatgacgttaataaaaatctacttccttcagacaattggattcttacccaaatcaaacttgtgactgagttagattttt

SEQ ID NO: 39253 - DNA, 201 bp, Homo sapiens
agtttagcataaagtgttactacaaatgtaaaactcttatataaagtactaaattggagtgtcaataaggatatattgctaggtacagcatctctcagcayggtgttccgctggtgcactgttattcattagaggctgctttcttaattagaacacagaaaacctttatcattactattttctgggattatggcatcctaa

SEQ ID NO: 39254 - DNA, 201 bp, Homo sapiens
ataatgaaagtattagtaattaatagtttatgcccaagttgagccaaatgttttagaattagtgtttgttacttgcttatctgtttgtttgctgactgctrtcttttcttggatattgctttttaaatacttgctgatgattactaaacctgggaaagtaattcattaattgtaattgtgggtgttatagtcctaaaatag

SEQ ID NO: 39255 - DNA, 201 bp, Homo sapiens
atcacatgattattcagaaatagaaaaaccactggcacgttactgtaatacttgggtacatttatcatgaataaatgtttgaatataatgaaagtattagyaattaatagtttatgcccaagttgagccaaatgttttagaattagtgtttgttacttgcttatctgtttgtttgctgactgctatcttttcttggatatt

SEQ ID NO: 39256 - DNA, 201 bp, Homo sapiens
ggatctgatgaagttaattatagtcttacacctctggataagacccaaaagcattcaatttcaaacaaaggtcagggatagttagaaagttttatcacacktaagcttgaactcaaacaatgttgcattaaatagtgacggtccagtgagtgtcatatttcatagctgtatcagggacttagacttctttagatcttctaa

SEQ ID NO: 39257 - DNA, 201 bp, Homo sapiens
tggaaatatagatctagagctcagtaaaaaagtcatagttaaggacctggatcttcaaattataaaattttattttttatatcttttaaaatgtgttgtgytttgctcctatgtgttttaaaatggaggaaaagaggacaattgggattcaggggtcaaatgccaggatatgagacttacagtgcatctggtaaaaattaa

SEQ ID NO: 39258 - DNA, 201 bp, Homo sapiens
ggaatctagggatgttttactatcgccttgtttctagaaggatagtggaattgacctcctgaatggccaagtggtatattgcccatcttctgttttaaggrctatctgaacaagttccaccatggcatccattcctgctgctgttttgatagctgtgatgataaggtagatgatccatctagtgcactgatttcttcactt

SEQ ID NO: 39259 - DNA, 201 bp, Homo sapiens
atctattgattaccgagagaagggtgattaggtctccaaatattgtggatttttctatttcttttttcagtctgtcagttttgcttcatgtattttgaagytctgtttggtacatacttgtttaatattttttatgtcttattggtgaattgatgttttcattatgtagtgtccttttatccttggtaattttctctgctc

SEQ ID NO: 39260 - DNA, 201 bp, Homo sapiens
tccttcaagctgtatccctttataattacaagttttccctatcttcatccactggcaatcactcatcttttctttatcactatagttttctctatttgagrttcgattgtccatatagacagactgacagtacgcctttgagacttaaccaattgctgcatatatcaatggtgcattcctttttattacagaatattttat

SEQ ID NO: 39261 - DNA, 201 bp, Homo sapiens
aagaattatttagcctgcagttaaaggacatgagaatgatttctgagtgttcgtttaggaactaaggatttaaatatataccagttcagtgtgatatgtcyatttattgaagatgcgtttggttttttttttgtcatcaagtcataagtgttggatgagtgcctaatatttgcataggctttatcatgataggatgcttat

SEQ ID NO: 39262 - DNA, 201 bp, Homo sapiens
attccctttcaccaagcaaagttttatttttcactcttatttctacctttgaacaataaacatttcaaatatgggccaatataatttcttcctttatgaaracattatttttgtatgtagtttatcacatgattattcagaaatagaaaaaccactggcacgttactgtaatacttgggtacatttatcatgaataaatgt

SEQ ID NO: 39263 - DNA, 201 bp, Homo sapiens
agtaccaagaaggaagaattatttagtgtgatatgaggaggaaaatggaaaggagaaatggaaattttagattagaattaaagggaaaacatgcttctgargatccttcattgtgtaaaatactgaaaggcactctggatgggttagggaagagtatctcagtgttatgttagtagtatttaactttatttagagcaaccc

SEQ ID NO: 39264 - DNA, 201 bp, Homo sapiens; identical to SEQ ID NO: 6703

SEQ ID NO: 39265 - DNA, 201 bp, Homo sapiens
aatccctgtgtcttttgactagtatctgtcccactagatataaaaatgaggtctccctgaataaaataggacaatctttcacattcttctgatgccaagargattttcaaatcctacccattcatggggatctgttctctcatagtatatcatgactccacaaacaagcttaggaccttttacaaagcagtcttactgaaa

SEQ ID NO: 39266 - DNA, 201 bp, Homo sapiens
ttgtaatattaattctaagaatcccattctttgcctgctgcctcttttcattccagatgatttgttgcagtatcatcactgctgtttttgtttttttttttaccatgttgagattacctatccatcagctactgcttactatctgctaagcctctggccttcttgtctatgtgagatatcatggtctactgcaatactgat

SEQ ID NO: 39267 - DNA, 201 bp, Homo sapiens
cacatgccttcaagtcattttataagtggcatacagatgaaaggagttatatttaaggcgtgttatcatacactcacgtaatgttattttaaatctcaccycttattccactctcatgttttgaaaaaaaaattgtctttaataccttatttcatgctccttttccgtgtgtgcaccaaccacagtcatttcagtctttcc

SEQ ID NO: 39268 - DNA, 201 bp, Homo sapiens
tggagtgcagtggcgcgatctcagctcactgcaagctccaccccccgggttcacaccattctcctgcctcagcctcccgagtagctgggactacaggcacytgccaccacgcccggctaatttgttgtatttttagtagagacggggtttcaccgtgttagccaggatggtctcgatctcctgacctcgtgatccacccgc

SEQ ID NO: 39269 - DNA, 201 bp, Homo sapiens
ttactgagctcttttcacatgcccacatgccttcaagtcattttataagtggcatacagatgaaaggagttatatttaaggcgtgttatcatacactcacrtaatgttattttaaatctcaccccttattccactctcatgttttgaaaaaaaaattgtctttaataccttatttcatgctccttttccgtgtgtgcacca

SEQ ID NO: 39270 - DNA, 201 bp, Homo sapiens
cacagactgcagagtctggaagtgctcagtgcagttgccgctctggtttgccaggcacttagaatcagttaaatgcaggtgctcctctcaggccaagggcwaggaatgaggtggcagtggttcaggctgaaatgcattcctccccgtaaagcacaaaacttgctcttaaacctcccttagaggtggacctagagtgagtga

SEQ ID NO: 39271 - DNA, 201 bp, Homo sapiens; identical to SEQ ID NO: 6712

SEQ ID NO: 39272 - DNA, 201 bp, Homo sapiens
gtgttaagagaggtgtgtggatgcacctatgaggatgtgcacatgtaaacgagtggagccatttaagaataaggcttaaaaacagaaggactatttttagkagcatagtccctctgccccgaccaattaaaatgtctcacacgggcaaaatgcttaacacttggttgatgttgaagcacatcaagcagtattgtcatccta

SEQ ID NO: 39273 - DNA, 201 bp, Homo sapiens
tcatatagtaaaattaacatagtttaaattcctcttggcagcaattggaactgcacatgcatatatacacatccaaaatggaattttagagaaaaattgtrtcagattgttgactcaatctttgattctctaaatggatttctcaaaagcacatgcacacacatgcataaatacatgcaaatatatacacagccacaaatt

SEQ ID NO: 39274 - DNA, 201 bp, Homo sapiens
  misc_feature (101)..(101): n is a, c, g, or t
tatactccaagagctgaatttgtctttaatgtctattttatttaaggaatgagttccctgtatgtgtatcaaagatctaactacagttgccctaatgtctnttcacaaggagtctagctgtagtccagtcctggtagggtggtttcatgttgtcaggctccttctagcttatcactctaccatttttaaaggcatcgcttt

SEQ ID NO: 39275 - DNA, 201 bp, Homo sapiens
tgacatctttttattctttttttctttttgagacgggtgtccctctgtcacccaggctggagtgcagtggctcgatctctgctcactacaacctccgcctytcaggttcaagcaattctcttgcctcagcctcctaagtagctgggattacaggcatgcgccaccacgcctggctaatttttttttttttttttttttttt

SEQ ID NO: 39276 - DNA, 201 bp, Homo sapiens
tttttgagacgggtgtccctctgtcacccaggctggagtgcagtggctcgatctctgctcactacaacctccgcctttcaggttcaagcaattctcttgcytcagcctcctaagtagctgggattacaggcatgcgccaccacgcctggctaatttttttttttttttttttttttttttttttttttagtagagacgggg

SEQ ID NO: 39277 - DNA, 201 bp, Homo sapiens
ccttgaatctggtgtccatagattttttgtttccagcagagtattagtatattaataatttggtgggggctcacacctgtaagtgggcagatcatttgagmcaaggtgggcagatcatttgagcccaggagtttgagaccagcctgggaaatatggcaaaacttggttgggctcagtggctcacacctgtaattccagcac

SEQ ID NO: 39278 - DNA, 201 bp, Homo sapiens
tatactaggtgatttaactcaggaatggaaaatgaaatactgtatgttctcacttataaatgagagcaaagctatgggtacaagaaggcatatctttgagwggtataacagactttggagactcacaagtggggagcttgtgagtctactagggaggctgaggcaggagaatctcttgaacccgggaggtggaggttgcag

SEQ ID NO: 39279 - DNA, 201 bp, Homo sapiens
agtacacagagataagtatcaagatacatgggactcttccctgcctggaggctgaaggaggatttgagctcaagttgggttgcataggccatcagttgtgyttcactgagtgaacagcagagcactttgatgcataaggaactgttaaaagactcaaacttgacttcttcagtcagtctatcccatgaaaaacactgacag

SEQ ID NO: 39280 - DNA, 201 bp, Homo sapiens
ctggttttatatttttcaaggattactttcttctaatcctttatagtccaaaatctctaaaatatgtgggaaagtactcagattaaagtggtttgcaattrtgtgcctaagaagtttttgaaatgttgactcatttggataaacggtgttttcctctatataatgtccatggatagtgaactggagcaatgagggtactgg

SEQ ID NO: 39281 - DNA, 201 bp, Homo sapiens
tcagcaacataggtatcacctgggagcttgttagtaatgaaaatcttcggccctgtctcagacctgctaaatgagaatttgcaattttaacaaattccccrtatgatatccgtgtttgaagtttgggaagtacagctgtagttcgtattccctacctatcctcatgtaatataacttccatttaacttaaattacatgaaa

SEQ ID NO: 39282 - DNA, 201 bp, Homo sapiens
agggctttataatcattcctcagtcagtgctggcttctggggcagtgttaacttttctccccagctcttgctcaacacgtttctgcaggccttctctctcytggcatgagccgtgccaactttcatatgcaggagctgccatttaatcgtttctccactctcagagaaacaggcagtcttttctttagccctgttctacaa

SEQ ID NO: 39283 - DNA, 201 bp, Homo sapiens
tctttggttcagtgggaagtgatagttcacaaagcaaggtttttttcttattcaactgggtataaacagaatccctgtgtcttttgactagtatctgtccmactagatataaaaatgaggtctccctgaataaaataggacaatctttcacattcttctgatgccaagaggattttcaaatcctacccattcatggggatc

SEQ ID NO: 39284 - DNA, 201 bp, Homo sapiens
tagaaagaggctccacttgccagtcaaaccaagcgaggacagttgggtagttacagtttgtttgctacacgttctcatacttgaggcaactaattctcggwagactgaaatgtgaagcttttagaattccttagtaactaatttctgtcatgtgtgttgtactggtagaataagtttttgtgacgaaattggaacattaat

SEQ ID NO: 39285 - DNA, 201 bp, Homo sapiens
caaggtggttggatcacctgagtgaggtcaggggttcgagaccagcctggccaacatagtgagccctgtctctactaaaaatacaaaaattagctgggcakggtggtgcgtgcctatagtctcagctactcgggaggctgaggcagcagaatcacttgaacctgggaggtggaggttgcagtgagctgagatcacatcgct

SEQ ID NO: 39286 - DNA, 201 bp, Homo sapiens
gggctcacacctgtaagtgggcagatcatttgagccaaggtgggcagatcatttgagcccaggagtttgagaccagcctgggaaatatggcaaaacttggytgggctcagtggctcacacctgtaattccagcactttgagaggccaaggtggttggatcacctgagtgaggtcaggggttcgagaccagcctggccaaca

SEQ ID NO: 39287 - DNA, 201 bp, Homo sapiens
acctattgtcttcttgattttaatcaagaaccaaaagctagttgtgcaaaatcatcacagaaatgtatttgctattaatctttgctaaaagagcatgcttraggcttcgtactcactaaagtcacagactgcagagtctggaagtgctcagtgcagttgccgctctggtttgccaggcacttagaatcagttaaatgcagg

SEQ ID NO: 39288 - DNA, 201 bp, Homo sapiens
caaaaaaaccctcaccttatcaccttccaaactgatgcactctggcactgtgttccaataggcgatctttctaaaacaatccatgcattccaaacccatcmcacttctactccacaggaatccttcacttcaactccttacatgtgcaagtagccacattttgtaaagtgatgctctttttcttttaaaatgtgtttataa

SEQ ID NO: 39289 - DNA, 201 bp, Homo sapiens
aatgggtttatccagatgtaaccccatcgtaaatggcggagcatctgtacttccttcctctggcagagttccttagagcctgtgccaattacttgaaagtytcattctctgccatttacatgtgtgctattagtagaaccaaatttctaagctgtggcgtgctgaaaataaaatgcttatgaagcaaaaatcgtgctatgt

SEQ ID NO: 39290 - DNA, 201 bp, Homo sapiens
gctaccctcgcatttttacattgggatctgtctaccttcttggggattacagataagttttagttgggtttcttgatttcatatatggaatgggtgtatgygtgtagtttataggtttacatttttcttgggagaggggccataacttcatttgtttcttaaaggggtctgtgacttacaaatggttaataattactgttc

SEQ ID NO: 39291 - DNA, 201 bp, Homo sapiens
tcagtaacaggttttaatttttcaaaaatgtttgcttctttcaaaaatacagattactcttggtggaaggctctatagctgagaagtggaaggatcgactyggtaaaaaagttaaggtaagcctgtattttatgtttgaagtaatacacagaaaacaaaacaaaagtagaaaaccagccatctgtcattgaaatgaaatag

SEQ ID NO: 39292 - DNA, 201 bp, Homo sapiens
ttggggtctcgcactcgcacggcttcgcaccccaccgcctgcgactcccaggccttctcttccccgggcgcccactccattctcgggaagagcagccggcwctggagggcagagactgccccaggggcggagctccctctcaggcgggaggtaggaaagtgcagagccgcccgggcagaggcacagacgtccctgcggggc

SEQ ID NO: 39293 - DNA, 201 bp, Homo sapiens
ggggctcgtttctggggccaaagacgggttccctagtgtgagggcgcgctcgactcggcgctgtcttggggtctcgcactcgcacggcttcgcaccccacygcctgcgactcccaggccttctcttccccgggcgcccactccattctcgggaagagcagccggcactggagggcagagactgccccaggggcggagctcc

SEQ ID NO: 39294 - DNA, 201 bp, Homo sapiens
atctatcgttcttcttctacaacagaggtagagtgacgctgtgacccttaggacagtacataaaggtcagagggccagctgattgtaaggctgagtctcaytggggctattattatgatctttgagtggtagagttatctagacaaactttagagagtcatttagctattaggttgctttattacaattttgtttccaatt

SEQ ID NO: 39295 - DNA, 201 bp, Homo sapiens
cttttcaaattaaggtatggaggggagggctagaaggttgcagaggtgaaagaggtgggtggattagattgttgaggttcattccaccactaagatattargattccctctggaacttctttgaagctggatctatcgttcttcttctacaacagaggtagagtgacgctgtgacccttaggacagtacataaaggtcaga

SEQ ID NO: 39296 - DNA, 201 bp, Homo sapiens
ggaaggaatgtgaggaagaactaagctgaaaatagttttctgtcctttccatggctgctggtaaatgtagcactgcactctgtcccacaattgaaggtatkgtattaatttcaggctttgaggtaaatgaattgctaatgttaaaactgcccatgtttgaagatctctttgtcactacttagcctattttgtcaaaaccaa

SEQ ID NO: 39297 - DNA, 201 bp, Homo sapiens
caagcaagaggagtggaaggaatgtgaggaagaactaagctgaaaatagttttctgtcctttccatggctgctggtaaatgtagcactgcactctgtcccmcaattgaaggtattgtattaatttcaggctttgaggtaaatgaattgctaatgttaaaactgcccatgtttgaagatctctttgtcactacttagcctat

SEQ ID NO: 39298 - DNA, 201 bp, Homo sapiens
tagaaaaatcaagcaagaggagtggaaggaatgtgaggaagaactaagctgaaaatagttttctgtcctttccatggctgctggtaaatgtagcactgcaytctgtcccacaattgaaggtattgtattaatttcaggctttgaggtaaatgaattgctaatgttaaaactgcccatgtttgaagatctctttgtcactac

SEQ ID NO: 39299 - DNA, 201 bp, Homo sapiens
gtggtgccagcattgtaatattaattctaagaatcccattctttgcctgctgcctcttttcattccagatgatttgttgcagtatcatcactgctgttttkgtttttttttttaccatgttgagattacctatccatcagctactgcttactatctgctaagcctctggccttcttgtctatgtgagatatcatggtctac

SEQ ID NO: 39300 - DNA, 201 bp, Homo sapiens
tgtatgagcataataccaatatgacttctatatggttcctagtttaatatagttgatttctgaatctgcaggagttgtgctgttgttgttgttgttgttcrttttcttccctttcatcattgacaccaggactctagggttcgggtgttttgtttgtttgttaatgccctaggaacaataagaccctgtcggttttccatt

SEQ ID NO: 39301 - DNA, 201 bp, Homo sapiens
aacctaagtgctgattagtggatgaatggataaagagaatgtagtatatatgcacaatgacatattgttcagctattaaaaaaagtgaaatcctgtcattygaaggaaaatggaactggaggtcattatgttaaatgaaataagccaagcccagaaagaccaatatcacacgttctccttcatatatgggagctaaaaaca

SEQ ID NO: 39302 - DNA, 201 bp, Homo sapiens
atatctgtattccaatgtttactgcagtgctattcacaatagccaaaatgtagaatcaacctaagtgctgattagtggatgaatggataaagagaatgtartatatatgcacaatgacatattgttcagctattaaaaaaagtgaaatcctgtcatttgaaggaaaatggaactggaggtcattatgttaaatgaaataag

SEQ ID NO: 39303 - DNA, 201 bp, Homo sapiens
tgagctattacccaaattgtcctagttcttctctgcttgtccctcagctatagacagtcactgaggctctgtgcttggcttctgttcctctctcctcatarggattcctcctgttggagttcatcaagctacataggctgaattatcatttttatgactctagttgtgattactctctaggaccacatttccctcctgtaa

SEQ ID NO: 39304 - DNA, 201 bp, Homo sapiens
tttgtcatgtttctacttaggtggttgttgagaacttgaggagttgtcccatgaagaaggaaaggttgtgctcaaggaaatttgtccaaaaaaaaaaaaaaggatttgtgggctgttgaggaaactgacacagaaatgaaagaaaatgcgggaaagaattttctactcaccacagggatgtggaggggaatgaccccactc

SEQ ID NO: 39305 - DNA, 201 bp, Homo sapiens
ggcaactaattctcggaagactgaaatgtgaagcttttagaattccttagtaactaatttctgtcatgtgtgttgtactggtagaataagtttttgtgacraaattggaacattaatggggggaatggttgattagctggttttatatttttcaaggattactttcttctaatcctttatagtccaaaatctctaaaatat

SEQ ID NO: 39306 - DNA, 201 bp, Homo sapiens
ggagtgcagtggcttgagcttggctcactgcagctttgacttccagggctcaagtgatcctcccaactcagtctcctgaatagctgaaactacaggcacaygccaccacaccagctgatttttgcattttttgtagagacggggttttgccacattgcccagactggtcttgaactcctgggctaaagcaattttttttcc

SEQ ID NO: 39307 - DNA, 201 bp, Homo sapiens
ctaaattcctgtaccagttggaaaagctttcaatatccctgctgcgaagcatgtaacaaggcttactgctcctcttttggtaccaaaacaatatcattgtkttgttgacaggacacatggcttgtttgtcctgtttcccattgctttctgcaatatttcccattgttttccgcaggggacttgcagagttattattgtaaa

SEQ ID NO: 39308 - DNA, 201 bp, Homo sapiens
tggtgccagcattgtaatattaattctaagaatcccattctttgcctgctgcctcttttcattccagatgatttgttgcagtatcatcactgctgtttttktttttttttttaccatgttgagattacctatccatcagctactgcttactatctgctaagcctctggccttcttgtctatgtgagatatcatggtctact

SEQ ID NO: 39309 - DNA, 201 bp, Homo sapiens
gactacaggcacttgccaccacgcccggctaatttgttgtatttttagtagagacggggtttcaccgtgttagccaggatggtctcgatctcctgacctcrtgatccacccgcctcggcctcccaaagtgctgggattacagacgtgagccaccgcaccccggcctaaagaacatttctttaaattgtctggtgtcttatc

SEQ ID NO: 39310 - DNA, 201 bp, Homo sapiens
agactatagttaacaataatctacttgtacatttcaatatgtacaataattcacatgttcacagcataaagaggaatgtttaatgtggtggatattacccwaacttgatatttacacattatatgaatgtatgaaaatatcaatgtactctgaaaatatgtccatctattatgtattaataaaaaatataagggacactta

SEQ ID NO: 39311 - DNA, 201 bp, Homo sapiens
atcccccaccccccaacaactctgttcttagatgtgttgacttggttgcctccatctgtttatttcttgggcatcaactttccttcctctttcaacttgcrcagtctaggcgcatgtccccagtccatttccaggtagtaattcttagttatcgggaaattgatttggaaaaattaccttctgtgcacgttgactcattta

SEQ ID NO: 39312 - DNA, 201 bp, Homo sapiens; identical to SEQ ID NO: 6708

SEQ ID NO: 39313 - DNA, 201 bp, Homo sapiens
gtctgtcagttttgcttcatgtattttgaagttctgtttggtacatacttgtttaatattttttatgtcttattggtgaattgatgttttcattatgtagygtccttttatccttggtaattttctctgctctaaattatattttttctgatattgctatagctaattcagctgtcatttgattagtgtttgcagggcaaa

SEQ ID NO: 39314 - DNA, 201 bp, Homo sapiens; identical to SEQ ID NO: 6710

SEQ ID NO: 39315 - DNA, 201 bp, Homo sapiens
aagtcaacatttttttctctacatcttcatgtgtagagtaattttgggttgaatcctggacattttgaatatcatgcaataaagctttgggtcttgtttayttaaagttatatggaaaatgctgattttctttttttaattttagcaacagttaacctagttaggattaggctgcaaattctgactggtcttctgtgggtt

SEQ ID NO: 39316 - DNA, 201 bp, Homo sapiens
gatttattaaggtttattctctgatccaggatataatctgtcttggtgaatgttccatgtacacttagaaaaaagagtattttgctgttgggtggaatgtyctttaaatgtcaattcaatttagttgattaatactgttatttagttcttttatattcttgctgattttctgtctactagatctattgattaccgagagaa

SEQ ID NO: 39317 - DNA, 201 bp, Homo sapiens
gcctcccaactagctaggattacaggtgtgcaccaccacacccagctaatttttgtattattagtagagacaagatttcaccatgttggccagctggtctstaacacttgatctcaggtgatccacccaccttggccttacagagtgctgggattacacacgtgagccaccatgtccggccaagacctttcttctaatata

SEQ ID NO: 39318 - DNA, 201 bp, Homo sapiens
caatctcagctcaccacaacctccacttcctgggttcaagcaattctgcctcagcctcccaactagctaggattacaggtgtgcaccaccacacccagctratttttgtattattagtagagacaagatttcaccatgttggccagctggtctctaacacttgatctcaggtgatccacccaccttggccttacagagtgc

SEQ ID NO: 39319 - DNA, 201 bp, Homo sapiens
cctggctgtgggaagcagtcttgattctacctttttcctcattcccctcactcaataggtatcacatgctgtttggtctactctgactcaaattcccttcyctccctctctaatgctactttcttagtttggaccttaccatttctcaccaggattatggccataggatgataatggtctctcttatctccagtatttccc

SEQ ID NO: 39320 - DNA, 201 bp, Homo sapiens
ctaggtgctgtcctgagtgcattttgcacattcattattattcccattttggagaaaaggaagccaaggcatatagagaagctaagttactgtccaagttmgcagagctagtaagaaaaagagaattcgaagcagagcctgttctacactacactttgtcccttaagaaatgtaattcctaactttctagagaatctgtta

SEQ ID NO: 39321 - DNA, 201 bp, Homo sapiens
caacacttatgttctaggtgctgtcctgagtgcattttgcacattcattattattcccattttggagaaaaggaagccaaggcatatagagaagctaagtkactgtccaagttagcagagctagtaagaaaaagagaattcgaagcagagcctgttctacactacactttgtcccttaagaaatgtaattcctaactttct

SEQ ID NO: 39322 - DNA, 201 bp, Homo sapiens
tttgaaaagaacgggttccatcctgaccattattattcatcttacacattttatatttgcataactttgtgtgactacatgtacaactgattatctgaaamctcagctcaattgagtcattcagcaagttagtgatgacattcagtcaaatctttaatattgtgtggtgagtaaagaggataggcttggagtggggcagac

SEQ ID NO: 39323 - DNA, 201 bp, Homo sapiens
ttttttttttgaaaggcaatcctccccccacctcctcccccgcagttattgaaaatggagacctctgtagtcactagctctgggttgatatggctccaccrttgctcgcaggggtctgtgttttccgctacttggacaaagtgacattgcttaagcctttccccccaccaggtctgactttctgcagagccagtgattgca

SEQ ID NO: 39324 - DNA, 201 bp, Homo sapiens
agtttgatacagcaatcccattactgggtatctacccaagtgaaaagacatcaatttgtcagaaggacaactgcatgcatatgtttattgcaacacaattyacaattgcaaagatatagaaccaaactaagtgcccatcaaccaaaaatatggaactaaactaagtgtccatgtccatcaaatgatgagtggataaagaaa

SEQ ID NO: 39325 - DNA, 201 bp, Homo sapiens
atttgggttgttttcagtttttgttacaatgactaatgctgcatttatttctacaatatgatagctgcgatgagtaccatatattccatttcactttcctstagtattttgcactgattttggtgagtatgtcctgccttataaggtgtcttatctgtggaaatgaaacatttattttattaagttgtaaataagtttgaa

SEQ ID NO: 39326 - DNA, 201 bp, Homo sapiens
gtcagaaggacaactgcatgcatatgtttattgcaacacaatttacaattgcaaagatatagaaccaaactaagtgcccatcaaccaaaaatatggaactraactaagtgtccatgtccatcaaatgatgagtggataaagaaaatgtggtatatatacaccacggaatactacccagccagaagaaagaatgaaataatg

SEQ ID NO: 39327 - DNA, 201 bp, Homo sapiens
atatttgtatttagatctactgttttattttctgtttgtgccctctcctttttattcacattctcttctttcttttggattgtatctctctctctctctcwcacacacacacacgtatgtgagatatatatatatcctcatgagataattttatattttttcttttaacaattacatatcttttaaacaacttgaggagaa

SEQ ID NO: 39328 - DNA, 201 bp, Homo sapiens
ataaatgtttgaatataatgaaagtattagtaattaatagtttatgcccaagttgagccaaatgttttagaattagtgtttgttacttgcttatctgtttktttgctgactgctatcttttcttggatattgctttttaaatacttgctgatgattactaaacctgggaaagtaattcattaattgtaattgtgggtgtta

SEQ ID NO: 39329 - DNA, 201 bp, Homo sapiens
ctcacttgaactccggaggtggaggttgcagtgacctgagatggcgccactgcactccagactgagcgacagagccagactgtgtttcaaaaaaaaaaaaagaaaagaaaagaaaagaaattaaacagcatataaagcattgctttagtacttagtaagcactgaaaaaagtgctgctgctgttttactattatcactgtt

SEQ ID NO: 39330 - DNA, 201 bp, Homo sapiens
actcacttgaactccggaggtggaggttgcagtgacctgagatggcgccactgcactccagactgagcgacagagccagactgtgtttcaaaaaaaaaaaaagaaaagaaaagaaaagaaattaaacagcatataaagcattgctttagtacttagtaagcactgaaaaaagtgctgctgctgttttactattatcactgt

SEQ ID NO: 39331 - DNA, 201 bp, Homo sapiens
gactcacttgaactccggaggtggaggttgcagtgacctgagatggcgccactgcactccagactgagcgacagagccagactgtgtttcaaaaaaaaaaaaagaaaagaaaagaaaagaaattaaacagcatataaagcattgctttagtacttagtaagcactgaaaaaagtgctgctgctgttttactattatcactg

SEQ ID NO: 39332 - DNA, 201 bp, Homo sapiens; identical to SEQ ID NO: 6707

SEQ ID NO: 39333 - DNA, 201 bp, Homo sapiens
gtgatgcagagcaaaggtgacttcctgttttgtttcaggttttgtttccttctcctctcaatgaaggctgtgttttctgacattcggcaatccttttgctsagtgatttcccattgagagggcatagtgtgaaggcctctgcaggtcattccatttacaatataagctgaaagggtagagtggggcgggggtggggggaag

SEQ ID NO: 39334 - DNA, 201 bp, Homo sapiens; identical to SEQ ID NO: 6704

SEQ ID NO: 39335 - DNA, 201 bp, Homo sapiens; identical to SEQ ID NO: 6706

SEQ ID NO: 39336 - DNA, 201 bp, Homo sapiens
ttatgtcttattggtgaattgatgttttcattatgtagtgtccttttatccttggtaattttctctgctctaaattatattttttctgatattgctatagstaattcagctgtcatttgattagtgtttgcagggcaaaactttttctatcctacttttaacatacttaagtcattgtgttttaaatacatttcttgtaga

SEQ ID NO: 39337 - DNA, 201 bp, Homo sapiens
tagcaaaaacaaaacaaaaaacaacaaataatctaaaaatgggcaaaagatctgagcagacatttctcaaaagaagacttacaaatggccaacaggtataygaaaaaattttcaacatcactaatcagataaatgcaaatcaaaaccacagtgagatatctcaccccagtttgaatggcttttatcaaaaagatggaacaa

SEQ ID NO: 39338 - DNA, 201 bp, Homo sapiens
aaacaaaacaaaaaacaacaaataatctaaaaatgggcaaaagatctgagcagacatttctcaaaagaagacttacaaatggccaacaggtatacgaaaamattttcaacatcactaatcagataaatgcaaatcaaaaccacagtgagatatctcaccccagtttgaatggcttttatcaaaaagatggaacaatagacg

SEQ ID NO: 39339 - DNA, 201 bp, Homo sapiens
gcgggaaagaattttctactcaccacagggatgtggaggggaatgaccccactcattacacagtggtactgtggccactcttgcaaacagccaccacctcsctccccacacacttagcatcacgatgtgaggttgatgttatgattgcagggttggacttaggatagtctggggcctcagcaagggtgggtcgggtgatgt

SEQ ID NO: 39340 - DNA, 201 bp, Homo sapiens
gatatgtattttactgtgtcacatacaatgtaatctgattcagtgccatatgttgcacccagcattcagggatggggtgagacaaactgtctttccacatstgttacacattaagaaggcaaaaacaaaagttataatcactgtgagcaaatagcactacctattgccttctgcaagaaattatttgctgttacatttcaa

SEQ ID NO: 39341 - DNA, 201 bp, Homo sapiens
gatagtaacttttaaagccactaaaaatttaatatacatgcatccttgtcagtaaccttgagattgataaaatttatatttctttaaaaaattttattcamctttaggattttaattttcttagccaaattaaagtcagatgcatgctgaataaagtagcaaatacttaaatagcagcaaacatggattctcttttcatgg

SEQ ID NO: 39342 - DNA, 201 bp, Homo sapiens
aggcgatagagcatgaccctgtctctgtaacaacaacaaaagtgtgaaagttcattctacaaattggagtcactcatatcatacccaactaaaatggagtygggaggccatggggaaaggcacccaggtccctgttccaggaaccatttttgcagttcaacagaaaaatcacgaagacctaactctaaccttaagataaag

SEQ ID NO: 39343 - DNA, 201 bp, Homo sapiens
gtgaacaaatgatgcttttatagatggtccctagcttacaatgattcaatttacaatgcttcaatttaacaatttgttgacttacaatgggtttatcaggwtgtaacccaatgcatttcaacttacgatattttcagtttcgaatgggtttatccagatgtaaccccatcgtaaatggcggagcatctgtacttccttcct

SEQ ID NO: 39344 - DNA, 201 bp, Homo sapiens
ttttattaatcttcagatgtatctacttataagtagattctattatcagttccaacatatacatgatgaaaatgaggtctagtaagttcaagaaacttcayacagtaagtggtggagttagaatttgaacttgggccatctgacccaaggatctgatggtgcttgctctttaaagtgtggtccctggatcagcaacatagg

SEQ ID NO: 39345 - DNA, 201 bp, Homo sapiens
aaagaaccaaaagacttctgcagccatgctttttttttaataattattattttttaaggctagtcaagcaatgggggtgaagaaggaagaaaaaaagtctrtaactggtagtgatcaatgagttgtaaataccaaggcactgggaccagcctccaaccatttttaaatatagggaatggtaaacctataggaattttaatg

SEQ ID NO: 39346 - DNA, 201 bp, Homo sapiens
attctgagggaatcatggcttcccagagatggtattcctgtcctagcactgaaaagaagaatttgagttgaactgtgggacaacttggcaaaaggagagawcaatatgaacaaaattcctattggaaaactttctctacgacctaaaactcaagtaatatatcaaagctttaaaagatgcatgatactccaggtgaagtct

SEQ ID NO: 39347 - DNA, 201 bp, Homo sapiens
aagtagcagagctgggccttagatcctcataatcttatttcccaaattatatgttttccaccactgcaatttctgataaaaaggtaaatgcatcctagcaytgtaaaaaaagaaaaagcatagtgtcaggcatatagtggtagctattgctattattggattataataaataataatataaatataacaatagctattatt

SEQ ID NO: 39348 - DNA, 201 bp, Homo sapiens
agtcatacctttcataattatctgtttggggtaataacatctaacagtggctggaactctatatgaaacacttgtgcatatgttacctcacttattccttraaagttgttgaagtagatgttttattcccatataacagattttttttttttaaatgagtatttagaacttcagagttgtgtaagtagcagagctgggcct

SEQ ID NO: 39349 - DNA, 201 bp, Homo sapiens
attccatagcacgtgagggaaaggaatgttggagtgtctgacttcaaagcagatggaggaaataagatctagtggtgaccatttttattcaagaagtaaayatagcccacttagaggagaatataaaagataatctgtactgaacacaaaggaaaaaaggacctaatatccgaacaaagaagaaaatgtagcccacctaaa

SEQ ID NO: 39350 - DNA, 201 bp, Homo sapiens
taagactattgatgttgagtcaatgagtaaacatggagattaaacagacttttacagtgaaccttattaaaataagagttttattattacatttatgtacrctattttaaagtatataggatatatacagcagatttatttcttctatacttttgggaattgaaaggagagaaatgaataagactgtaaaagttagcttca

SEQ ID NO: 39351 - DNA, 201 bp, Homo sapiens
ctgaaggattaaaaagcctgccatttttgcatcagggactgtgctaagtgatttccatacattatctttaattttctcagctgccccatgagatatattamcatcttgattttatcaatgattatcgaacctaagtagtcccttctttgattgttcacaatgtactttggatgctggtgtatattttagagtcataaattc

SEQ ID NO: 39352 - DNA, 201 bp, Homo sapiens
aacagtgaaatacagaaaaatcaatatctaatggtttttgtgcaaagctcagtaaataatagatttcattttccattctaaaaaacttgtgccattaggargttgggagaggaagattactagcaattaaacaagaaatgatggtaatgctacaggccccccaaaaagagtatcaagaaatcaactataggtaataaaaat

SEQ ID NO: 39353 - DNA, 201 bp, Homo sapiens
aagacccaaaagcattcaatttcaaacaaaggtcagggatagttagaaagttttatcacacttaagcttgaactcaaacaatgttgcattaaatagtgacrgtccagtgagtgtcatatttcatagctgtatcagggacttagacttctttagatcttctaagatcatatcaaaaatactagtatccttttgtttttaaaa

SEQ ID NO: 39354 - DNA, 201 bp, Homo sapiens
tctcctttatggacttcatattctctgtcttatatataaagatgtagttcctgcctagagaactacaactcacccaaagctttaaatatcattttctcacrgtatattggaggccagactagtttaggtcattaagttatatgttcttattacacatatacattgtgttttaatttcatgtcatgtatcacatgtgacaaa

SEQ ID NO: 39355 - DNA, 201 bp, Homo sapiens
tcaatgaaacagggaacaaaggatttcttgtttatactgggtggtaaatccaataaataaagcagatgcagttcactctaatgtctttatttctacattaktttggtgattctgagggaatcatggcttcccagagatggtattcctgtcctagcactgaaaagaagaatttgagttgaactgtgggacaacttggcaaaa

SEQ ID NO: 39356 - DNA, 201 bp, Homo sapiens
tagcccctcattccccatagctgatgacttcacttcattcttcaatgagaaggtaaaagccattggaaagaacaccctcattattccaccaaccaatttayaaacttgtcaatatcagtacctttctctccttttccttcttgtgtagtggataaagtcttctagctttcaaagtcctattctctcttttgctcagggtcc

SEQ ID NO: 39357 - DNA, 201 bp, Homo sapiens
gtggatgaatcaataattttataagaaacattattatgtttttttcatgcaaatggttgtttacctaagtctcttatagcagacgattcaagatgtttggwcttccttgggaagttgagaatcagactgtttttaaaatatgaagacaagattgtggagtaaagaatactgaaatgaagaattaccttcagtaacagaaaa

SEQ ID NO: 39358 - DNA, 201 bp, Homo sapiens
agatacctcgtacaggcagttggaaatatagatctagagctcagtaaaaaagtcatagttaaggacctggatcttcaaattataaaattttattttttatrtcttttaaaatgtgttgtgttttgctcctatgtgttttaaaatggaggaaaagaggacaattgggattcaggggtcaaatgccaggatatgagacttaca

SEQ ID NO: 39359 - DNA, 201 bp, Homo sapiens
aatcagatttgctcttagctgagttttgctctcagtggatgaatcaataattttataagaaacattattatgtttttttcatgcaaatggttgtttacctragtctcttatagcagacgattcaagatgtttggacttccttgggaagttgagaatcagactgtttttaaaatatgaagacaagattgtggagtaaagaat

SEQ ID NO: 39360 - DNA, 201 bp, Homo sapiens
aatctagaaaaactattccacctgacctaattccccctgcttttcattcattaagtattttcactatgacagggattcaacatgttaatacaactaaataygtttttcttccgatgaaatgcaaacgtttgtcatgtttctacttaggtggttgttgagaacttgaggagttgtcccatgaagaaggaaaggttgtgctca

SEQ ID NO: 39361 - DNA, 201 bp, Homo sapiens
cttgacacggcagacacgtttgggtttaagtgacctacaaaaatgtagagggcattattttgtaaggagaaactaccctccagtaagttcttctccccttyagtagatttgtcaaaagggagatgcatttcaagttcagacttgcgggcattctctctgcatctctcttcaattagtttggtgtttattaaagaaaaaagt

SEQ ID NO: 39362 - DNA, 201 bp, Homo sapiens
aggggccataacttcatttgtttcttaaaggggtctgtgacttacaaatggttaataattactgttctaaatcttagctgtcctattcaagaataaacatrtaagtctttcttgttcaagtactgtttccttgtacttttcagtaacaggttttaatttttcaaaaatgtttgcttctttcaaaaatacagattactcttg

SEQ ID NO: 39363 - DNA, 201 bp, Homo sapiens
agaattaactaaagagaagcctactttggctttttttgaatggggtagctattatgtgtcatattattatcagcttttcttgtcttttatcccagtcattygggctaaagttaaagagataaagactaagtgccatgatgtgactgcagtagtggaggtgaaggagattctaaagtcctctctggtaaacattccacggga

SEQ ID NO: 39364 - DNA, 201 bp, Homo sapiens
gccaatatatccattgagagaggtagaataatgccattgacacgtgagaatatattccatagcacgtgagggaaaggaatgttggagtgtctgacttcaawgcagatggaggaaataagatctagtggtgaccatttttattcaagaagtaaatatagcccacttagaggagaatataaaagataatctgtactgaacaca

SEQ ID NO: 39365 - DNA, 201 bp, Homo sapiens
agcagatctgtactttctagattctgagtcacatactttaactttgcaactgaaggcaatttgttgttacattgataagtaaagcaagtcttgtgagatarattgggtgccaatatatccattgagagaggtagaataatgccattgacacgtgagaatatattccatagcacgtgagggaaaggaatgttggagtgtctg

SEQ ID NO: 39366 - DNA, 201 bp, Homo sapiens
cttaagaacttcaccaagttcactgggttgtaataacacttgcttatctctttgagttgctttcagatctaggagctaatagtaggaggagtactgtgtcrtctgttaaaagtaaaaaaacattaggtgatagtccacagggcaaaccagctacctgagcataggcagaaaattgcctcccagttggtattcataatatta

SEQ ID NO: 39367 - DNA, 201 bp, Homo sapiens
atctttacatataattaaatattttaaggtaattgtgtattattttctacttttatattgacattaattcctgacaatttgccatgcttatgatgtatatktcttagctaagtaatattagctttgtagctcttctataaaaggtataataatctactcttcaaggtgtcaaatgaatctaccctatagatgaaacatttt

SEQ ID NO: 39368 - DNA, 201 bp, Homo sapiens
aaaatcaagcaagaggagtggaaggaatgtgaggaagaactaagctgaaaatagttttctgtcctttccatggctgctggtaaatgtagcactgcactctstcccacaattgaaggtattgtattaatttcaggctttgaggtaaatgaattgctaatgttaaaactgcccatgtttgaagatctctttgtcactacttag

SEQ ID NO: 39369 - DNA, 201 bp, Homo sapiens
tttcaatatcatgaaatcagttggaaatcattgctgtccagtaatgttgctatttgaagggtcactccttctattatgttttctcaacccgaactgaaaakctcatttgtataaaactgcaattggtgggtcaaaatttctggccaaggacatgtatatgttaccaatttgttccaaagttatggttagagtaatatagca

SEQ ID NO: 39370 - DNA, 201 bp, Homo sapiens
atgaaatttctcttttcaaaatacctgcataatttcctccaacaagcacaaaaataccattgagttgaatggtagctattttacctatagaaggggctcaytgcccctcttaagaacttcaccaagttcactgggttgtaataacacttgcttatctctttgagttgctttcagatctaggagctaatagtaggaggagta

SEQ ID NO: 39371 - DNA, 201 bp, Homo sapiens
tttctgtgtcaaaagagaagcacataccatttaatttttactaaagctttctcaggggcattatttaaagaaatctttacatataattaaatattttaagrtaattgtgtattattttctacttttatattgacattaattcctgacaatttgccatgcttatgatgtatatttcttagctaagtaatattagctttgtag

SEQ ID NO: 39372 - DNA, 201 bp, Homo sapiens; identical to SEQ ID NO: 6711

SEQ ID NO: 39373 - DNA, 201 bp, Homo sapiens
agtaatgtgaataggtaataatattaatatgcagtctaaatactgacttttcatcattccataacctggactgatgaaaagtcagtatttagactgcatawtaataaaataaaattcattcctgtattcattccaagagtactaattgacacttatgaagggacaggcaattctaggccctagagggccaaagacagagga

SEQ ID NO: 39374 - DNA, 201 bp, Homo sapiens
gagtaatgtgaataggtaataatattaatatgcagtctaaatactgacttttcatcattccataacctggactgatgaaaagtcagtatttagactgcatwttaataaaataaaattcattcctgtattcattccaagagtactaattgacacttatgaagggacaggcaattctaggccctagagggccaaagacagagg

SEQ ID NO: 39375 - DNA, 201 bp, Homo sapiens
aaacatagcaagcagccacagtataggcagccagaattcaggaaggctccagggacccctgggcttggcccagaaaaatgcctcagagtagtaccaggtgytgggaagctgctacagaagactagccattccctgcctccaccttgcctgccaaaaggaaagtcagaggactcaagggatccagggatcaagggatccagg

SEQ ID NO: 39376 - DNA, 201 bp, Homo sapiens
ggagaacctctgctagggcaatgcagaaggaaaatgtgggttggagcccccatacagaatctctatgggggcactgcctagtggagctgtgagaagacggycaccgtcctccagacccctgaatggtagatccaccgacagcttgcgccatttatccggaaaagccacagacactcaacgccagcccgtgaaagcagccag

SEQ ID NO: 39377 - DNA, 201 bp, Homo sapiens
ccaaacatagcaagcagccacagtataggcagccagaattcaggaaggctccagggacccctgggcttggcccagaaaaatgcctcagagtagtaccaggygctgggaagctgctacagaagactagccattccctgcctccaccttgcctgccaaaaggaaagtcagaggactcaagggatccagggatcaagggatcca

SEQ ID NO: 39378 - DNA, 201 bp, Homo sapiens
ctacccgggagctgcagctataggaaggaaggaaggaaggaagacctccaaggaactgtgtagcagaggtgcagtgcaaagagaattttgataaaaaatcyaggaaagctccaatactttcccccttccttgcctaacgggcatgcaggcactccaatccccagccaaacagggcactgggcaaggccggccacccatctg

SEQ ID NO: 39379 - DNA, 201 bp, Homo sapiens
ggaaccgggagcagaggacctcagattcacaccagggcaggaggcaatggcctggctgaagccttcacaatcttcccaatatactctgctgccttcctttrtaaggatccatttctgaaaccctgtgccctggccaggcacggtggctcacacctgtaattccagtactttgggaggccaaggcaggaggaccacgaggtc

SEQ ID NO: 39380 - DNA, 201 bp, Homo sapiens
catcccagcagctaggaaccgggagcagaggacctcagattcacaccagggcaggaggcaatggcctggctgaagccttcacaatcttcccaatatactcygctgccttcctttataaggatccatttctgaaaccctgtgccctggccaggcacggtggctcacacctgtaattccagtactttgggaggccaaggcagg

SEQ ID NO: 39381 - DNA, 201 bp, Homo sapiens
aaagaggtttaatggactcaccgttccacatggttggagaggcctcacaatcaaggcaggtcttacatggcagcaggcaagagggagaatgagagccaagygaaaggaatttccccttaaaaatccccttataaaaccatcagatctcgtgagacttactcactaccacaagaacagtatgggggaaaccacctctatgat

SEQ ID NO: 39382 - DNA, 201 bp, Homo sapiens
gtagatgtggagaccatgatttttgcaaatttttttaagtttaaagttatttctaaattagaagtttaaaaagaagaaatcacataagccataacacaatrgaaagatgtctttaaagttcaaggcaggagggatgtctggaaatcagcgagaaatttgcacctgtgtgtgcatgtgcatatgtgtgtgtgtatgttgcaa

SEQ ID NO: 39383 - DNA, 201 bp, Homo sapiens
atgaaaagaacatattttcacttggatatggcctgttttgaattgtggatactatttcacagaagaaagaccaatgtggatatcatcacccatccagccaygtggcagtgtgcactcaagagagatccatataagtgccacatcagatggaaatatagttacaaacttgtatacccagtcacaagttaaaaaagcaactgt

SEQ ID NO: 39384 - DNA, 201 bp, Homo sapiens
aaaattcattcctgtattcattccaagagtactaattgacacttatgaagggacaggcaattctaggccctagagggccaaagacagaggactaactctawctgacattcttaagtcaccttgtttgtgttcaattagtcagatttgtttgtggaaaaatagtagaaagaggaataaagtagcatccagtccaatttccca

SEQ ID NO: 39385 - DNA, 201 bp, Homo sapiens
ccatactgttcttgtgatagtgaataagtctcacaagatctgatgcctttattgggggtttctgcttttgcgtcttcctcattttctcttgccgccaccasgtaagcagtgccttttgcctcccaccatgattctgaggcctccccagccacgtggagctgtaagtgcatttaaacctctttctcttcccagtctcgggta

SEQ ID NO: 39386 - DNA, 201 bp, Homo sapiens
caagccctttttactcttccttccatctaaaacatctgatggggaccaggtaaacagcatgcactacagctacccatgggggttaaacagaatataagcaygaactttgtcccagggtgaaaaggaaaatcgtaaatatccctgatcttccttaggcagttattttctgtcacagaaacagaaaagactatattcagagaa

SEQ ID NO: 39387 - DNA, 201 bp, Homo sapiens
gcatttaaacctctttctcttcccagtctcgggtatgtctttatcagcggcgtgaaaatggactaatacactgtggttatgtattatagtcatatgatatkttcatatttttggaagctgggtgaagggtagatgtggagaccatgatttttgcaaatttttttaagtttaaagttatttctaaattagaagtttaaaaag

SEQ ID NO: 39388 - DNA, 201 bp, Homo sapiens
gtctttaggaagaaagggggaaagatagagaaaactatttctccatttgctgtttcttaattaccttcagttcaaaaataatttttatatcagaaaggcayatttagaggtatgttagtttattttcacactgctaataaagacatacccaagactgggtaatttataaagaaaaagaggtttaatggactcaccgttcca

SEQ ID NO: 39389 - DNA, 201 bp, Homo sapiens
gtattttacgttctgcgactgtgataaatatatgatgccagggatccatcagcaaacaaaacaggcaaaattagtctgccctcatgcagcttacattctaktgaaggaagacaaagagtaaattaaaaataggtaataatgcagggaaggggacaagaagcatcatcaggatgcagatggaggttagacaaggcctctcca

SEQ ID NO: 39390 - DNA, 201 bp, Homo sapiens
gaaggagggggacttctgagccacaccctggggtccagggctcacagccttaggagcaaaatcgtccacccccttcctggttcctcggtgctgcagagatwttcataggacagagtctgagttctggccacttaacagaggaagaaaggctggctcggtgaggttaacttacatcccagcagctaggaaccgggagcagag

SEQ ID NO: 39391 - DNA, 201 bp, Homo sapiens
gtgggttggatgccactttcgcagagctggcaccagacttacaaagccccggcaggggaagccactttacaaccagccaggccacacccccagggcagacrtttatgtagagagtaatgtacctgcctgctagtagcctctgcattgtggggccttctctcagaaccacactaaacagtgggtgggtgagaagtgtcactc

SEQ ID NO: 39392 - DNA, 201 bp, Homo sapiens; identical to SEQ ID NO: 6727

SEQ ID NO: 39393 - DNA, 201 bp, Homo sapiens
tttataaaataaattctctaggaaataaagaaaatcatcaatctattatttttaaggtatttatagctcaaagttaccagaaatctttgtggaattttcaytgccaaatttaaatttgggaatgtccgggtacaacatattgtcaccacaatccggagggccgccaaaatcgcagacggctatttgcatcctttcagtgtg

SEQ ID NO: 39394 - DNA, 201 bp, Homo sapiens; identical to SEQ ID NO: 6728

SEQ ID NO: 39395 - DNA, 201 bp, Homo sapiens
caaattaattcttgtggattacatcttgttcaaaggtactttgataatgttctgctctcccaaggccacagggccctacgattgtctctccctttcctttygttaggccagcatatgattaacgctacgtgattttctatgaatgtgttttcacgtttcaaaaacagattgatacacatattgaacagtgccagacgctgt

SEQ ID NO: 39396 - DNA, 201 bp, Homo sapiens
cataacaaaatatttacttatatatattaaaaaagagagtctgagaagtctgaaaagttttgccataaacggtctccaccagcctcaactctgagtgcccraggattcagtctcaagtccagcaacattgtgaagcaggaaatttaccttgaaaggagctatgtactctaagtagtgatttacctgtctgcctcccccact

SEQ ID NO: 39397 - DNA, 201 bp, Homo sapiens; identical to SEQ ID NO: 6729

SEQ ID NO: 39398 - DNA, 201 bp, Homo sapiens
acaccagggcaggaggcaatggcctggctgaagccttcacaatcttcccaatatactctgctgccttcctttataaggatccatttctgaaaccctgtgcsctggccaggcacggtggctcacacctgtaattccagtactttgggaggccaaggcaggaggaccacgaggtcaggagtttgagaccagcctggccaatat

SEQ ID NO: 39399 - DNA, 201 bp, Homo sapiens
attagggaacgcctttcctagttggaacgagaagacgagaagtgagagaagtgagatagaaggctccctctctattatttgagcaagaacaatgcttttcraagagggaatttctgcaatgagttcttctcttacttgttcagggaaatggttgaccccatttgaccctgtcttcaccgaagtcgacactttccacctgga

SEQ ID NO: 39400 - DNA, 201 bp, Homo sapiens
agtaattatataggtacatcactcatatcacatcttgtttctgtaaaaaagggcctcccaaacatagcaagcagccacagtataggcagccagaattcagkaaggctccagggacccctgggcttggcccagaaaaatgcctcagagtagtaccaggtgctgggaagctgctacagaagactagccattccctgcctccac

SEQ ID NO: 39401 - DNA, 201 bp, Homo sapiens
cagcttgaaaaccttttaggagcaccagctcagctcaagaattagtagcataaattacatgctcaataaagatttgatgcatgagtgcatcctgagtccaygcccggaatgtgtttcacatattccacaatacttcacattgggttcctgaggtctcctggtattgtttaagactcctgtggcagtccctggtgcaacccc

SEQ ID NO: 39402 - DNA, 201 bp, Homo sapiens
ttaaaaccatctctatcctctcctctccacaggaagtcttgcagctgaagggaggcactccttggcctccgcagccgatcacatgaaggtggtgccaagtmtcctgctctccgtcctcctggcacaggtgtggctggtacccggcttggcccccagtcctcagtcgccagagaccccagcccctcagaaccagaccagcag

SEQ ID NO: 39403 - DNA, 201 bp, Homo sapiens; identical to SEQ ID NO: 6741

SEQ ID NO: 39404 - DNA, 201 bp, Homo sapiens
tgatagcgatatggacaataaggtccaggctgaggtggtctcatatcgagatgaggaacttgttgggaactggagcaaaggtgactcttgttatgttttascaaagagattggtggcacttttcccctgccctagagatttctggaactttgaacttgagagagatgatttagggtacctggcagaagaaatttctaagca

SEQ ID NO: 39405 - DNA, 201 bp, Homo sapiens
atattatacctcctagggaatctaatttgaaatatgaaaagtttaacatcagctgtcattatgtctctctttctgctcattaacaacaacaaaaaaaaaaacccaaaatttaaaaacaaagccccagccactgctttagcttttgtgtaccaatcacattatctcctgctgcctttgttttgcctccttcatcaagcagtt

SEQ ID NO: 39406 - DNA, 201 bp, Homo sapiens
ttaaatatactttttaatgttccctcacatttgctttaagaagttcctaagacactcagtttcagatttcccaagtacacaggcatgacagaaaaacgcasaccaataaaaaatgtaacttaccttacacaaatacatacacacaaattcagggtttccaaccgagcgggggaaatcttaacattgtagaagtcttcacta

SEQ ID NO: 39407 - DNA, 201 bp, Homo sapiens
tatgtgtgtatatatatgtatatatgtatgtgtgtataaatgtatatgtgtgtatatgtgtgtgtgtatatatatatacacacacatatatatatatatgsagagagacatacatatatatatggagagagagagagagagagtcctgtaacttctgattcatactttttggtcctagttctatctctaaaacttctaaga

SEQ ID NO: 39408 - DNA, 201 bp, Homo sapiens
ctgcaggacaagctccaagaacaggaaggtaagactcagcatttggaggtggtgacatctagttggcgtgctgggctaatttcctgaccattgtacagggrgaagtaaccttgaattcaggagtattctgtgtggtcttaatgtagaaagtagcactaaatgatgccacgtaatcgttttagctcaggctcctctaacaaa

SEQ ID NO: 39409 - DNA, 201 bp, Homo sapiens
tatatgtatatatatatatgtgtgtatatatatgtatatatgtatgtgtgtataaatgtatatgtgtgtatatgtgtgtgtgtatatatatatacacacayatatatatatatatggagagagacatacatatatatatggagagagagagagagagagtcctgtaacttctgattcatactttttggtcctagttctatc

SEQ ID NO: 39410 - DNA, 201 bp, Homo sapiens
tttactatccacaaagacattttaggaggcattaaaaccatctctatcctctcctctccacaggaagtcttgcagctgaagggaggcactccttggcctcsgcagccgatcacatgaaggtggtgccaagtctcctgctctccgtcctcctggcacaggtgtggctggtacccggcttggcccccagtcctcagtcgccag

SEQ ID NO: 39411 - DNA, 201 bp, Homo sapiens
ctcttcatgcttccagtgacatcaaactcaccatttctttgaagagctgcccaatccacaaatagctaaaattgttatatgtatatatatatatgtgtgtrtatatatgtatatatgtatgtgtgtataaatgtatatgtgtgtatatgtgtgtgtgtatatatatatacacacacatatatatatatatggagagagaca

SEQ ID NO: 39412 - DNA, 201 bp, Homo sapiens; identical to SEQ ID NO: 6724

SEQ ID NO: 39413 - DNA, 201 bp, Homo sapiens
tctcttcctcttcatgcttccagtgacatcaaactcaccatttctttgaagagctgcccaatccacaaatagctaaaattgttatatgtatatatatatawgtgtgtatatatatgtatatatgtatgtgtgtataaatgtatatgtgtgtatatgtgtgtgtgtatatatatatacacacacatatatatatatatggag

SEQ ID NO: 39414 - DNA, 201 bp, Homo sapiens
gtcagaggtgccaggcaaaggcttttctctaagctggagccaactatgagggaacgactgtgaattccgttcaggtccaggacaatgagaggagccagggrttgttaggaaacatttccctgctttcgtgtgcgattcccaatagggcctgcgagtggagctgcattttgctagctgggctagaggacggggaaaattttg

SEQ ID NO: 39415 - DNA, 201 bp, Homo sapiens
gaaggatggtatcatccctgggcgggctccaacgtgagggctgtgtggctgagcagtgcaaagacctccatcctacactccacagggactgtacatacagmttgggagctggagtggggtaagaggcgaattatagacacaaggggctcctctgcaggaaggaggccaagggaaagaggcttgaaaggcttgatatttcac

SEQ ID NO: 39416 - DNA, 201 bp, Homo sapiens
aagcagacctctccccctctgcttaaagtgctcagggagaaatttgaccctgaaatagaactggtttacagaggcatcatcatttatgttgaatacaactkgaatagttcatgaaattacaccacctttacaatgaaacaaacccctagacatcatctagcccaacttctccctccttgtggaaatcccctccatagccct

SEQ ID NO: 39417 - DNA, 201 bp, Homo sapiens; identical to SEQ ID NO: 6730

SEQ ID NO: 39418 - DNA, 201 bp, Homo sapiens
tgttcaaaggtactttgataatgttctgctctcccaaggccacagggccctacgattgtctctccctttcctttcgttaggccagcatatgattaacgctrcgtgattttctatgaatgtgttttcacgtttcaaaaacagattgatacacatattgaacagtgccagacgctgtcatttgaggcccttccctggtatcct

SEQ ID NO: 39419 - DNA, 201 bp, Homo sapiens
atttctggaactttgaacttgagagagatgatttagggtacctggcagaagaaatttctaagcagcaaagcactcaagatatgacttgggtgctgtcaaagcattcagttttataagggaagcagagcaaaaaagtttggaaaatttgcagcctgacaatgtggtagaaaagaaaaacccattttccgaggagaaatttaa

SEQ ID NO: 39420 - DNA, 201 bp, Homo sapiens; identical to SEQ ID NO: 6731

SEQ ID NO: 39421 - DNA, 201 bp, Homo sapiens
cctttcgttaggccagcatatgattaacgctacgtgattttctatgaatgtgttttcacgtttcaaaaacagattgatacacatattgaacagtgccagaygctgtcatttgaggcccttccctggtatcctatgtgcttgtagtccttattattttcagagcactctacatagctcccctctgacacttagaagcatagg

SEQ ID NO: 39422 - DNA, 201 bp, Homo sapiens
ccctctctattatttgagcaagaacaatgcttttcaaagagggaatttctgcaatgagttcttctcttacttgttcagggaaatggttgaccccatttgaycctgtcttcaccgaagtcgacactttccacctggacaagtacaagaccattaaggtgcccatgatgtacggtgcaggcaagtttgcctccacctttgaca

SEQ ID NO: 39423 - DNA, 201 bp, Homo sapiens
tccaacgtgagggctgtgtggctgagcagtgcaaagacctccatcctacactccacagggactgtacatacagattgggagctggagtggggtaagaggcraattatagacacaaggggctcctctgcaggaaggaggccaagggaaagaggcttgaaaggcttgatatttcacccaccaccactcactgccggagtaagc

SEQ ID NO: 39424 - DNA, 201 bp, Homo sapiens
cactcgctggctccgctcagacatttagcaaagcagacaccttcccaggcctggaggaaacagcccctgctttttgggaatccacaagcccgcagctgcaragctcgacctggatgggcaggcaaaggctgactcctgtgcgtggtgtgagtccagcctggcccctctacaccctcactttcacctcttaaagaactgcct

SEQ ID NO: 39425 - DNA, 201 bp, Homo sapiens
acctcaagttcacgtgggattatctgagcctagactgtcagtcctggggctgctttatttcatataaaaatataatatttatccaaggttttactacacaytgcattttctgtgaagacaatgaccgtgtaaatcagggaaagatctatattttattttgtttgaaactttaccaagcattatttaccatttcaaaagctc

SEQ ID NO: 39426 - DNA, 201 bp, Homo sapiens; identical to SEQ ID NO: 6721

SEQ ID NO: 39427 - DNA, 201 bp, Homo sapiens
gctcacacctgtaattccagtactttgggaggccaaggcaggaggaccacgaggtcaggagtttgagaccagcctggccaatatggtgaaaccccgtctcyactaaaaatagaaaaattagcgtggtggcaggcgcctgtaatcccagctactcgggaggctgaggcaggagaactgtttgaacctgggaggtggaggtct

SEQ ID NO: 39428 - DNA, 201 bp, Homo sapiens
gcgtgaaactgggctgcgtttacactgaaagagctatttacccaacgtttacaatacttgggtgacctgttgaatgcaggcttgccatttagagtcaaaaagagcttcctcaacagtgtcctttgggaaacacagtggaagtatttcactgcttctacaggggagagggtagtgccgttcagactgcagagtgaggccctg

SEQ ID NO: 39429 - DNA, 201 bp, Homo sapiens
aggagaactgtttgaacctgggaggtggaggtctcagtgagctgagacagacagtgcctgggtgacagacagagactccgtctcaaaaaaaaaaaaaaaaagaaagaaaccctgtgccctaagacctgcacactcgctggctccgctcagacatttagcaaagcagacaccttcccaggcctggaggaaacagcccctgct

SEQ ID NO: 39430 - DNA, 201 bp, Homo sapiens
agtctgcttttggtctcataggactgccctaacgcttgtttttcagacgtttaaccctgtaggtctctggacaaatttgctttagaagcccctcgatgtckccctgaagagtggctttcagaagttgtgcctcctgcctgaggggagttccaggaagggttctgcatcgcctatgagtttatctggatcaccagaggcctt

SEQ ID NO: 39431 - DNA, 201 bp, Homo sapiens
gcaagaacaatgcttttcaaagagggaatttctgcaatgagttcttctcttacttgttcagggaaatggttgaccccatttgaccctgtcttcaccgaagycgacactttccacctggacaagtacaagaccattaaggtgcccatgatgtacggtgcaggcaagtttgcctccacctttgacaagaattttcgttgtcat

SEQ ID NO: 39432 - DNA, 201 bp, Homo sapiens
ctgcaaagcaacaacagcataataattgtatttaatatactactctttaaggtagaaaatggacctattctatattttaaatatactttttaatgttcccycacatttgctttaagaagttcctaagacactcagtttcagatttcccaagtacacaggcatgacagaaaaacgcagaccaataaaaaatgtaacttacct

SEQ ID NO: 39433 - DNA, 201 bp, Homo sapiens
tttgcactgccacacaaatggtttttcacattatttcctttttccaggttttacaaagaacagtgattgaagttgatgaaaggggcactgaggcagtggcrggaatcttgtcagaaattactgcttattccatgcctcctgtcatcaaagtggaccggccatttcatttcatgatctatgaagaaacctctggaatgcttc

SEQ ID NO: 39434 - DNA, 201 bp, Homo sapiens
taattgtatttaatatactactctttaaggtagaaaatggacctattctatattttaaatatactttttaatgttccctcacatttgctttaagaagttcytaagacactcagtttcagatttcccaagtacacaggcatgacagaaaaacgcagaccaataaaaaatgtaacttaccttacacaaatacatacacacaaa

SEQ ID NO: 39435 - DNA, 201 bp, Homo sapiens
tactctaagtagtgatttacctgtctgcctcccccactggattgaccagttccttgggggctgagagaacaggtcctgaacatttctgctgtgccccccarcccacatcctcatagtgtccagtaccaggctggggactcaggaagcatccatgggatcccccagtgccttctttctcgaggtgttcagcacctagaacag

SEQ ID NO: 39436 - DNA, 201 bp, Homo sapiens
gggatcccccagtgccttctttctcgaggtgttcagcacctagaacagctcaagacaaattccccacaccccacccagacagagctgaatcttactggggmgaagccttgagttgcaaggcagaagctctcgtgatgggatttgggtcatattccgggttataggaggagctggggagtatgggaagcctcccacttggtc

SEQ ID NO: 39437 - DNA, 201 bp, Homo sapiens
cttgttcagggaaatggttgaccccatttgaccctgtcttcaccgaagtcgacactttccacctggacaagtacaagaccattaaggtgcccatgatgtayggtgcaggcaagtttgcctccacctttgacaagaattttcgttgtcatgtcctcaaactgccctaccaaggaaatgccaccatgctggtggtcctcatgg

SEQ ID NO: 39438 - DNA, 201 bp, Homo sapiens; identical to SEQ ID NO: 6735

SEQ ID NO: 39439 - DNA, 201 bp, Homo sapiens
cgggttataggaggagctggggagtatgggaagcctcccacttggtctttggttttccagaaactccaccatcacaagcaggatgttaatcagtaaccgtyccacaggggatcatactttggaatagcaaatatttgctgaaggttctgggctgcaaagctgaagctttggtttctgctctaaatgaaggacttttccagg

SEQ ID NO: 39440 - DNA, 201 bp, Homo sapiens; identical to SEQ ID NO: 6738

SEQ ID NO: 39441 - DNA, 201 bp, Homo sapiens
ttgttcagggaaatggttgaccccatttgaccctgtcttcaccgaagtcgacactttccacctggacaagtacaagaccattaaggtgcccatgatgtacrgtgcaggcaagtttgcctccacctttgacaagaattttcgttgtcatgtcctcaaactgccctaccaaggaaatgccaccatgctggtggtcctcatgga

SEQ ID NO: 39442 - DNA, 201 bp, Homo sapiens
agctagaaatattttccctgagtagaccactgtaaaagaatggcatgaactacatagtcaactgaaagactcattaatggaaataatcttaaagaacaaamattgtgacctttttggtgtccacagactagggctttgtctacatttcaccatcatctgttcttgtaccacagaaacatggaagttttctttccgaagttc

SEQ ID NO: 39443 - DNA, 201 bp, Homo sapiens
gacagcctggtctattctgctttaactctagcaggaaaggccttcatggtggggcctgaatatcttcctttataaaatcaaagcctggggacagggttacytacttctgaggttcaatctggctctaaaattatgcaacaaatgccattcctttagcacttccttcctaccgggcgagatactcaactccacaggcaccac

SEQ ID NO: 39444 - DNA, 201 bp, Homo sapiens
ggccagcgaggagaaggccagtgaggaagagaaagcctggctgatggccagcaggcagcagcttgccaaggagacttcaaacttcggattcagcctgctgygaaagatctccatgaggcacgatggcaacatggtcttctctccatttggcatgtccttggccatgacaggcttgatgctgggggccacagggccgactga

SEQ ID NO: 39445 - DNA, 201 bp, Homo sapiens
aaggcaggaggaccacgaggtcaggagtttgagaccagcctggccaatatggtgaaaccccgtctctactaaaaatagaaaaattagcgtggtggcaggcrcctgtaatcccagctactcgggaggctgaggcaggagaactgtttgaacctgggaggtggaggtctcagtgagctgagacagacagtgcctgggtgacag

SEQ ID NO: 39446 - DNA, 201 bp, Homo sapiens; identical to SEQ ID NO: 6722

SEQ ID NO: 39447 - DNA, 201 bp, Homo sapiens
aagccctttttactcttccttccatctaaaacatctgatggggaccaggtaaacagcatgcactacagctacccatgggggttaaacagaatataagcacraactttgtcccagggtgaaaaggaaaatcgtaaatatccctgatcttccttaggcagttattttctgtcacagaaacagaaaagactatattcagagaat

SEQ ID NO: 39448 - DNA, 201 bp, Homo sapiens; identical to SEQ ID NO: 6736

SEQ ID NO: 39449 - DNA, 201 bp, Homo sapiens
caggacccaaggccacacactggtaagaggcagtgggttacaggagaccttcaatgagtctaatcagggagggaccgggaaggatggtatcatccctgggygggctccaacgtgagggctgtgtggctgagcagtgcaaagacctccatcctacactccacagggactgtacatacagattgggagctggagtggggtaag

SEQ ID NO: 39450 - DNA, 201 bp, Homo sapiens
ctccctggggcagggctaacctacttgagccacaggaaggaggcagggtccctgaagaagcttttactatccacaaagacattttaggaggcattaaaacyatctctatcctctcctctccacaggaagtcttgcagctgaagggaggcactccttggcctccgcagccgatcacatgaaggtggtgccaagtctcctgct

SEQ ID NO: 39451 - DNA, 201 bp, Homo sapiens
ttcaaaggtactttgataatgttctgctctcccaaggccacagggccctacgattgtctctccctttcctttcgttaggccagcatatgattaacgctacrtgattttctatgaatgtgttttcacgtttcaaaaacagattgatacacatattgaacagtgccagacgctgtcatttgaggcccttccctggtatcctat

SEQ ID NO: 39452 - DNA, 201 bp, Homo sapiens
ggtaggaccactgtgaagaatttcaaggggctcatttaattcctcctttgcactgccacacaaatggtttttcacattatttcctttttccaggttttacraagaacagtgattgaagttgatgaaaggggcactgaggcagtggcaggaatcttgtcagaaattactgcttattccatgcctcctgtcatcaaagtggac

SEQ ID NO: 39453 - DNA, 201 bp, Homo sapiens
ttgtttttgttttaaagtaggctaaataagatgaaaactgagagttgcttatttacttggtaaaatggagaccgttagaaaccataataaaagaaatttcagtagagtaatggagataaaatctgataaatgtggattaaaaagagaacaagaggtgagaaagtggagagagctcatatgagcaatatattcaaggagttt

SEQ ID NO: 39454 - DNA, 201 bp, Homo sapiens
ctttttcacaacctgtggggaagcagagaactctaaggggagagggaggagcagagttgtctggcagtggatggttcactaacggcctgcaggtagcagaragagagagagagagtgtgtatgtgtgtgtgtgtgtgtgtagttgtgttcagagacacttttccaccctttaggacaattgcttaaggaatacctgtaagg

SEQ ID NO: 39455 - DNA, 201 bp, Homo sapiens
gcctgttatttatccatccctctgccactctctgatttaggttgcatcatctcttgactggatcacagccacagcattctaattaccctctctacctatcstctaccctgtagccaaagcgatctttttaaaaagctaaacagattatatcatcctcatacttaatgtacttcagtggcttcatttttcctctgagggtaa

SEQ ID NO: 39456 - DNA, 201 bp, Homo sapiens
tactgccagtgtgcaaatatgaaataagagagatcacgagaaaatatatctgaggcttaaaagaagagaaaggtccagtatttcagctgcaaccaggaaamaaaggattcctccagggttaatgcccggtttggataccagctgtcatttcccattacagcttgaaaattttgcaagagcctgcctattactaagcttcat

SEQ ID NO: 39457 - DNA, 201 bp, Homo sapiens
aaggagaatcgcttgaacccgggaggtggaggttgcagtgagccgagatcacgccactgcactccagcctggtgacacagcaagactctgtctcaaaacaraaaacaaaaaacaaaaaagattgtgtttgtgttgttttcctccagctcagctactctgctgtagctgtggatgaagaagaagggtgaagttaaccagggt

SEQ ID NO: 39458 - DNA, 201 bp, Homo sapiens
cctgaggtcaggagttcgagaccagccttgccaacatagtgaaaccccatctctactaaaatacaaaaattagccgggcttgctagtaggtgcctgtaatytcagctacttgggaggcataggcaggagaatcgcttgaacccgggaggtagaggttgcagtgagctgaaatcgtgccactgcactccagcctaggcaaca

SEQ ID NO: 39459 - DNA, 201 bp, Homo sapiens
aataaagccccacctaggagaactgcaaaaaagagaaaaaaaaaagtacctgtaagaagactgcatgcggtggctcatgccagtaatctcagcagtttggraggccaaggtgagaagatcacttgagctgaggaggttgaggctgccgtgagccctgttcactccactgcgcttcagcctgggtgacagagtgagaatttg

SEQ ID NO: 39460 - DNA, 201 bp, Homo sapiens
tgcactccagcctggtgacacagcaagactctgtctcaaaacaaaaaacaaaaaacaaaaaagattgtgtttgtgttgttttcctccagctcagctactcwgctgtagctgtggatgaagaagaagggtgaagttaaccagggtttgggttttgctctgggaacgtgccacaggaaaaaagagacaaaggatcagaaggtg

SEQ ID NO: 39461 - DNA, 201 bp, Homo sapiens
ccccgcaaccgccaaaaaaaaaaaaaaaaaaaaaaaaagcaaataaatgttctgtgactctaatggttggaggttggggaggcagagcagggtatctgctrtgagggaaaattaagaaatatggattcatcaattgaaattttattcaagtcccatgtacttacctagggtggcattttagtaactggtgctgactcaaac

SEQ ID NO: 39462 - DNA, 201 bp, Homo sapiens
taagagattaacacactatggttgggtgcagagtctgaagcagatcgtttgatattgttgttttatgctctactacatctaattaggtagatgacaacttyaagaaaaccctttcttcctttactaatgccaaggaggatcagctcaagagccatttgtatgtctttctttctctgatgtttttcatgtttgaatattgga

SEQ ID NO: 39463 - DNA, 201 bp, Homo sapiens
ctgtggatgaagaagaagggtgaagttaaccagggtttgggttttgctctgggaacgtgccacaggaaaaaagagacaaaggatcagaaggtgtctgtgamctgtgatcatattgatggatcatggcatctaagctgagtaaataaggaaagaagggaatgcaggaatggggtgatggacaggaaataaataatgagatca

SEQ ID NO: 39464 - DNA, 201 bp, Homo sapiens
tgctatctggtttttaggtcattgtttccaaggctctttgagatcactgaattgagaggtgtgactagaagtctttatacatatattcaatagtgcaagaytcattgaaattgctgtaataaatgattaccaaattcagttacatattttcattagtctgggcatctatgcaagcaaagcctattagctgggaaggattac

SEQ ID NO: 39465 - DNA, 201 bp, Homo sapiens; identical to SEQ ID NO: 6777

SEQ ID NO: 39466 - DNA, 201 bp, Homo sapiens
agtgttgacccatcactgccttccatatgccaccaccaatggggaggagcgaaaaggaccattagcaaagtaagaatagttctcttcacatcaggaacctmtctccctcattcactgtggcttcaggctgacctaggagaacatggccttgccacattgatctgaggcaagaacatcagtcagaatggcctgtttaggtgt

SEQ ID NO: 39467 - DNA, 201 bp, Homo sapiens
tgccttccatatgccaccaccaatggggaggagcgaaaaggaccattagcaaagtaagaatagttctcttcacatcaggaacctatctccctcattcactrtggcttcaggctgacctaggagaacatggccttgccacattgatctgaggcaagaacatcagtcagaatggcctgtttaggtgttgcagagcaaaggtct

SEQ ID NO: 39468 - DNA, 201 bp, Homo sapiens
ggagaacatggccttgccacattgatctgaggcaagaacatcagtcagaatggcctgtttaggtgttgcagagcaaaggtcttgaaatccctcagaggagatacatgtagatacccctagaggaatgttgagactacagaaggagtgggggaccaccctgggggccagcagtggaggaggtggtcaatgagttaagaacat

SEQ ID NO: 39469 - DNA, 201 bp, Homo sapiens
gtgtaaagtccatcagttagttcaaaattaacaggcagatgatgaagtcttaactttgcagcaaaatgtcaaaaatgcgtttgggttttagtgaaccacaggcttaagagcagccaaatggtgcttaaaaagttaaaactaagagaactgtgctgaggttaagaatggttaatgagattcctggatctaaggtatttgcat

SEQ ID NO: 39470 - DNA, 201 bp, Homo sapiens
cagtggcttcatttttcctctgagggtaaagactaaagtcattaccatggcctatgagccctgatgtgatttgggctctactcctgtttcatgagtactamcctctctctcttctttattctctgcctactgtaatgtgtggaataactgctgtaggaacagcacagatgaaactccaccagaggacatggagagatttgg

SEQ ID NO: 39471 - DNA, 201 bp, Homo sapiens
agagagatcacgagaaaatatatctgaggcttaaaagaagagaaaggtccagtatttcagctgcaaccaggaaacaaaggattcctccagggttaatgccyggtttggataccagctgtcatttcccattacagcttgaaaattttgcaagagcctgcctattactaagcttcatgacattcctctctggtcttcatgata

SEQ ID NO: 39472 - DNA, 201 bp, Homo sapiens
tgtccaatgacttaacggcattttatattgatcacacacatagttgaggggcttggtgcagatattatttactagcatgaatttttgtgtgtgaatattatatagtaagaagtaatattgttcagtatatacattttcttcgtgacatgaaataagacaatgagttgtttttttccgtaatccactcacaatggacagaaa

SEQ ID NO: 39473 - DNA, 201 bp, Homo sapiens
aattgctgtaataaatgattaccaaattcagttacatattttcattagtctgggcatctatgcaagcaaagcctattagctgggaaggattacagaatagrgcatctaaaatttccttgcacagcacaataaatgccttcaataggatgtcagcatacctcttgtccttccattttctgtggtcaattataataagttctt

SEQ ID NO: 39474 - DNA, 201 bp, Homo sapiens
gcccagcttgttcaggcataacatgtggaggagagtcgtatgacataggagctttgctctgatgacctcccatgtccctaacttctttatggttctttagsttatctggacgttttaggaggcatattttgttattgtgttcaacaacacataaaagcatctgaggttaataagtattccatctgggaaaagagaaacaga

SEQ ID NO: 39475 - DNA, 201 bp, Homo sapiens
ctgagaaagaggaggtaaagtgaatccgtgtggtccttgcaattgttggtggtagtggggtgttggaactaggaaggatcacccttggagtctgagaacaygtagaggagaaaagcaacaaaaaccctatgtccaagagaatgtcagggacgggttacctgctgaggaagtggtagtaggtaaagcttgctttgcagaact

SEQ ID NO: 39476 - DNA, 201 bp, Homo sapiens
attaagaaatatggattcatcaattgaaattttattcaagtcccatgtacttacctagggtggcattttagtaactggtgctgactcaaacaatgtttttyggagatattttacccatattagaaacaggtgaaaggatcttggcctactgttaggattcattttcacagttagcccgatctcgcggtggttgtatatttg

SEQ ID NO: 39477 - DNA, 201 bp, Homo sapiens
cttctgggctcaagggatccttccacctctgcttcctgaatagcaggcataggcccaagctaccatgcctggctaatgtttgtatttttttttgtagaggyggggttttgccatgttgcctaggctggtctcaaactcctgggctcaagcaatccgcacctggcctattgtgaaatttttcaaggcatacagctataccat

SEQ ID NO: 39478 - DNA, 201 bp, Homo sapiens
ccattttatttgtccctttttagcctatttcagctatttttaggatcccttttccttcgcttcctatagccagccagtgctatactagtatcttatttgtmcaaaaaccaagctttgcagatgtagtgtattgatgtgctgtgcttcctaggagcttttaaaaaaaaatttttttaaataaggactccaagaagtaaagga

SEQ ID NO: 39479 - DNA, 201 bp, Homo sapiens
catgatcacactgcagtcctccttcctctgcctcccaaagtgctgggattacaggcatgagtcaacacacctggcctctgtttggttttcattgtcttttrtgagagaaataattaagggagtcactaatttatctgcatttctggtccttttaaatattatgcccatgtttcttgaaagttccattgataattataggaa

SEQ ID NO: 39480 - DNA, 201 bp, Homo sapiens
acacctgtaatcccagcactttaggaggctgaggtgggtggatcacgaggtcaagagatcaagaccatcctggccaacatggtgaaaccccgtctctactraaaatacaaaaattagctgggcatggtggcgcatgcctgtagtcccagctactcgggaggctgaggcaggggaattgcttgaacctgggaggcggaggtt

SEQ ID NO: 39481 - DNA, 201 bp, Homo sapiens
acgaaaagagtactgatcagattgcataatttgctaaaataataaccaattttcaaaattgcttttatgtatcaagcattaacatatgtaaaagcagttcktaaaatgctaaaaacagttttgatttagattatgaattattactgaaaatcaattaaaaataaggtagagaaaacattttcatatcctagtaataactaa

SEQ ID NO: 39482 - DNA, 201 bp, Homo sapiens
gttttttgtttgtttgttttttgagtatccaatatgtgacatggtgccgagggatacaaaagatgaagagagcacaggctctgcctcagacctctacaatytcatacagcttccaaaggaaaaaaaaaaccgtttgcatacttacataaagaatgacaataggacgggcgcggtggctcacacctgtaatcccagcacttt

SEQ ID NO: 39483 - DNA, 201 bp, Homo sapiens
tcaaagggaagacctttcttgctcctttgataaaagaaaatccgattttttcaccctcatatatttttgcaaatccagttttggcataaaaatcaagtctstttacttgaggaagagagatcctattttagtaatttttactgggaccctggagtagtccctctatatttttaattgaaaaaatttttttattttatcatg

SEQ ID NO: 39484 - DNA, 201 bp, Homo sapiens
tcatgttttgtgtgttgtttgtttgtttttgaccacccacaaggttatttggtgtttttcttataacctgaaataaatttgtcttcccaaaaatgttattwattatggttagggttcctagctgacttacagatgttcacttaaccaataatatattcaaagtacaaaattattctaacctctgtgtggtacaatgataga

SEQ ID NO: 39485 - DNA, 201 bp, Homo sapiens; identical to SEQ ID NO: 6780

SEQ ID NO: 39486 - DNA, 201 bp, Homo sapiens
gctgtggaaggtgttcatatcaagggcattggtgttttaaaataacatttggttgaaaagatgagattttttagctttgtgttcatttataaaattttgtyattaataagtcttcataaataacatgtacccaacgatcttaaaaatctaaatgatgacatcattgatctagcttaggagtaagtagattctgaaaggaat

SEQ ID NO: 39487 - DNA, 201 bp, Homo sapiens; identical to SEQ ID NO: 6783

SEQ ID NO: 39488 - DNA, 201 bp, Homo sapiens; identical to SEQ ID NO: 6782

SEQ ID NO: 39489 - DNA, 201 bp, Homo sapiens
atggtgtcagaagatggaaaggaatttttaaattgttgtcagaggctggacacggtcactcacacctgtaatcccagcactttgggaggctgaggcagacrgattgctttgagcccacgagttcaagaccaacctgggcaacatgacgaaactgcatctttaaaaaaaaaattttttttttaactagctgggcatggtgac

SEQ ID NO: 39490 - DNA, 201 bp, Homo sapiens; identical to SEQ ID NO: 6786

SEQ ID NO: 39491 - DNA, 201 bp, Homo sapiens
cattgagggcctactatgttcccaaaactttgctagtgctgggaagaaaaagatagatgacatagtatccatccttgagcatctcaatctaataagggagattgttaaataaaaattgcaaaattgcaatgttaagtgttataataaagctgagtataaagtgtaatttggagtgcttggatgggctcctttgctctctaa

SEQ ID NO: 39492 - DNA, 201 bp, Homo sapiens; identical to SEQ ID NO: 6790

SEQ ID NO: 39493 - DNA, 201 bp, Homo sapiens
ttaacaataaaaacttaccgtgcttgtgtccattcatgtagagttttctgtgactaacattcaaactcacatttaggtgattgaggctgatagctgagtgytggggaaaatcttagctttcccaacaattcaggcccaggaaattctgaagcaagtacatctcaaatttcaaccacatcattactaaaacaagagaaatgg

SEQ ID NO: 39494 - DNA, 201 bp, Homo sapiens; identical to SEQ ID NO: 6793

SEQ ID NO: 39495 - DNA, 201 bp, Homo sapiens
cttgggaggctgaggcaggagaatggcgtgaacccgggaggcggagcttgcagtgagccgagatcacgccactgcactccagcctgggcaacagagagagmttctgtctcaaaaaaaaaaaaaaaaaaaaaaaaaaaaaggcaagatacagagtactgtgcatattaatgccttcatttgtataaaataagaaaattacat

SEQ ID NO: 39496 - DNA, 201 bp, Homo sapiens
ttcctttgcatgtgcaatatacaaataagcctttaggtgaaatgtatttatccctgccttttgcaacggacttaccctaaaagtcatcatcaaaacactawgtcttttttttttctctttttctattgtagtgaattagatatatgtgcacattctatgtttatgtttaaatgatttatgttttctgtatcacaagttttc

SEQ ID NO: 39497 - DNA, 201 bp, Homo sapiens
cattctatgtttatgtttaaatgatttatgttttctgtatcacaagttttcaaattaaagtatggagaattattgttagttgcctatgttgattttgcttytaaacattacccttgaattttaaacacataaaaatgcctcaaaaatcttgtcaattttgtatagatgttatttttcccattctgtgtttttttttttttt

SEQ ID NO: 39498 - DNA, 201 bp, Homo sapiens
gaattattgttagttgcctatgttgattttgcttttaaacattacccttgaattttaaacacataaaaatgcctcaaaaatcttgtcaattttgtatagawgttatttttcccattctgtgttttttttttttttttgactatcgctgttatattgtgttaatattctacaaaactctgagggtaccaacgtgcaattttt

SEQ ID NO: 39499 - DNA, 201 bp, Homo sapiens; identical to SEQ ID NO: 6779

SEQ ID NO: 39500 - DNA, 201 bp, Homo sapiens; identical to SEQ ID NO: 6781

SEQ ID NO: 39501 - DNA, 201 bp, Homo sapiens
attgccctacatttgaaatttttaaactgtcgttgtgttaactgttgaattaaaatttaagtgtttggtctgaaagtattacttctgtttctttgaatctygaggtactctaacatttaatgtttatcatatattcagatgagtatggaataagatcatgtatcatctatgttatttaactatgtccatattgtagttttc

SEQ ID NO: 39502 - DNA, 201 bp, Homo sapiens
cagatgatcaacagaaaatccaagcaggtacgttagccttgagatatttcaattcttatgtaatgatcattgtgacagcagatattttgagggcattctgrtaagtgaaaaggttaacatttgtgtgcttctgttggataataggataactgaaactggtgctcatatgtttaggcagttttaataaatcatgctttttag

SEQ ID NO: 39503 - DNA, 201 bp, Homo sapiens
gcaagccacattttagaaaccaaagtcataaaggtactgttttggccagtaatacaattatgatccatgcagaattctctgtcttattgggaagctacttyctctaaaattattcacagaataactcctattgtttatttctaggttctgtatttagggctatgttggcttttaaaaactgtgtgtccaacatggcacatg

SEQ ID NO: 39504 - DNA, 201 bp, Homo sapiens
atcccagcactttgggaggctgaggcagacggattgctttgagcccacgagttcaagaccaacctgggcaacatgacgaaactgcatctttaaaaaaaaaattttttttttaactagctgggcatggtgacacgcgcctatagtcctagctactcaggaggctgaggcaggaggatcacttgagcccaggagttagagact

SEQ ID NO: 39505 - DNA, 201 bp, Homo sapiens
gcttgaacctgggaggcggaggttgcagtcagctgagatcttgcctctatactccaggctgggcgacagagcgagactctatctcaaaaaaaaaaaaaaaattgataatgataataatagtgcagtctaaacaactataatacataaggaggaagaatttcccttccagaatctgtgtgagtccattgtttttcagtgttc

SEQ ID NO: 39506 - DNA, 201 bp, Homo sapiens
agaataaattaagtagattcagtgttaagggtgggaaggagttctaaaagcagaagtcagcctggttttaggtattaaaaatagagaaatgttttttttttgagctaagatttgagcaagaaaacaaaaaatgaggaccaagcctatctgaacgttttaaatgttagaatcctagaagactgctgtgaataggaccagtct

SEQ ID NO: 39507 - DNA, 201 bp, Homo sapiens
cctcttatgattatgtttaatttttcctattttttgagacagggtctcactctgtcacccaggctggagtggagtgacacaatcacaactcactgcagccytgaccttctgggctcaagggatccttccacctctgcttcctgaatagcaggcataggcccaagctaccatgcctggctaatgtttgtatttttttttgta

SEQ ID NO: 39508 - DNA, 201 bp, Homo sapiens
tccatgttgttcaggctggtctcgaactcccgacctcaggtgatctgcccgcctcggcctcccaaagtgctgggattgcaggcgtgagccaccgcgcccarccccatagcaactctttatagaccgacgatgcatattataccttgaaagtgctgagaaacactaaagaatacttttgaattgttgcatccaaaattttcc

SEQ ID NO: 39509 - DNA, 201 bp, Homo sapiens
gggtttctccatgttgttcaggctggtctcgaactcccgacctcaggtgatctgcccgcctcggcctcccaaagtgctgggattgcaggcgtgagccaccrcgcccagccccatagcaactctttatagaccgacgatgcatattataccttgaaagtgctgagaaacactaaagaatacttttgaattgttgcatccaaa

SEQ ID NO: 39510 - DNA, 201 bp, Homo sapiens
taattttgtatttttagtagagatggggtttctccatgttgttcaggctggtctcgaactcccgacctcaggtgatctgcccgcctcggcctcccaaagtsctgggattgcaggcgtgagccaccgcgcccagccccatagcaactctttatagaccgacgatgcatattataccttgaaagtgctgagaaacactaaaga

SEQ ID NO: 39511 - DNA, 201 bp, Homo sapiens
gtttcgctcttgttgcccaggctggagtgcaatggcatgatctcggctcaccacaacctccgcctcccaggttcaagcagttctcctccctcagcctcccraatagctgggattacaggaatgtgccaccatgcctgcctaattttgtatttttagtagagatggggtttctccatgttgttcaggctggtctcgaactcc

SEQ ID NO: 39512 - DNA, 201 bp, Homo sapiens
tatttgaagagcatagacatgagttctgcaataaattcccatataaacctaacttataaaatgaatttttatttaattataaaaagaatattttgaagatkcttattttattttcagtagaaccttatttttttattttctctttcctccttcctcattatatatctgcaaaaccagaaaatatttttaatttcaagagta

SEQ ID NO: 39513 - DNA, 201 bp, Homo sapiens
tctagatataaaatgtatattttagatataaatgtatattttagagtttttaatcatcagtgtcttttatttttataatcttaatttttctcttcaaaaaatcatattttaaaattaggctgggaagcaaaattaaaatatttatttttaaatacaattaatcagtggccattaattaggtaattacaaattattggcatt

SEQ ID NO: 39514 - DNA, 201 bp, Homo sapiens
aaggtctctacttttgtatatgtttggaattttttataatactaaattttaaaaattccgtttgtctccaaatggacttcttataaaagtttagaaattgrcagtttggctgggtaattttaaatttagtgtgatatttagcaacattatttggcacagcataactctcgtatttctccctggtcctacagtaaattttct

SEQ ID NO: 39515 - DNA, 201 bp, Homo sapiens
cagaaagctggaagctgatgagcacagatgatcaacagaaaatccaagcaggtacgttagccttgagatatttcaattcttatgtaatgatcattgtgacmgcagatattttgagggcattctgataagtgaaaaggttaacatttgtgtgcttctgttggataataggataactgaaactggtgctcatatgtttaggca

SEQ ID NO: 39516 - DNA, 201 bp, Homo sapiens
ttagctgggcatggtggcgcatgcctgtagtcccagctactcgggaggctgaggcaggggaattgcttgaacctgggaggcggaggttgcagtgagctgaratcgtgccactgtactccagcctggcaacagagcaagactccatctcaaaaaaaaaaaaaaaaaaaaaaaaaaagaatgacaatatcggccgggcacagt

SEQ ID NO: 39517 - DNA, 201 bp, Homo sapiens
tgcagtgagctgagatcgtgccactgtactccagcctggcaacagagcaagactccatctcaaaaaaaaaaaaaaaaaaaaaaaaaaagaatgacaatatyggccgggcacagtggctcatgcctgtgatcctagcactttgggaggccgaggcgggtggattgcctgagctcaggagttcaagatcagcctgggcaacac

SEQ ID NO: 39518 - DNA, 201 bp, Homo sapiens
cccttgaattttaaacacataaaaatgcctcaaaaatcttgtcaattttgtatagatgttatttttcccattctgtgttttttttttttttttgactatcrctgttatattgtgttaatattctacaaaactctgagggtaccaacgtgcaatttttacattgtgtagtattatgaattatttcaggagacatagatgatt

SEQ ID NO: 39519 - DNA, 201 bp, Homo sapiens; identical to SEQ ID NO: 6788

SEQ ID NO: 39520 - DNA, 201 bp, Homo sapiens
acctttttcatttccttgaaaacctttttggcagctaacgtattagagctatttcagtctattagaagttgtttagaactctagacctaattcaatgtctrtttttctaattagcctacttcttaaaaaagaagattttaggctaggcatggtggctcacgcctgtaatcccagcactttgggaggccgaggcggatggat

SEQ ID NO: 39521 - DNA, 201 bp, Homo sapiens; identical to SEQ ID NO: 6791

SEQ ID NO: 39522 - DNA, 201 bp, Homo sapiens
tggcaaggcacagtgtaattctggccaactctagccctccctcagcaagccacattttagaaaccaaagtcataaaggtactgttttggccagtaatacaattatgatccatgcagaattctctgtcttattgggaagctactttctctaaaattattcacagaataactcctattgtttatttctaggttctgtatttag

SEQ ID NO: 39523 - DNA, 201 bp, Homo sapiens
ataatcttagggaactcaaatttttctttctagttattatcactttgctatcaggtttattttagctacttttcttttctttcttttttttttttttttttgagatggagtcttgctctgtcacccaggccggagtgcagtggtgcgatctcagctcactgcaacctccgcctcctgagttcaagcaactctcctccctca

SEQ ID NO: 39524 - DNA, 201 bp, Homo sapiens; identical to SEQ ID NO: 6792

SEQ ID NO: 39525 - DNA, 201 bp, Homo sapiens
ctgggggctgagctggggggctggtcttccctattaggcctctttggtctggtggtcccaggattctcagaaggtagactgaagctgcaaggcttcttgargcctaggctctagaacttgcacatcaccactgttggttaaggcaagtgagaaggctagtagtctagattcaagactgaggagatagattccacctcttgg

SEQ ID NO: 39526 - DNA, 201 bp, Homo sapiens
ggtcctacagtaaattttctagatataaaatgtatattttagatataaatgtatattttagagtttttaatcatcagtgtcttttatttttataatcttawtttttctcttcaaaaaatcatattttaaaattaggctgggaagcaaaattaaaatatttatttttaaatacaattaatcagtggccattaattaggtaat

SEQ ID NO: 39527 - DNA, 201 bp, Homo sapiens
gaggctgaggcaggaggatcacttgagcccaggagttagagactgcagtgagctgtgattgtaccactgtactccaacctgggcaatagagcgagaccctrtctcaaataaataaattgctatcagaaataacattcgttccacacattgagggcctactatgttcccaaaactttgctagtgctgggaagaaaaagatag

SEQ ID NO: 39528 - DNA, 201 bp, Homo sapiens; identical to SEQ ID NO: 6778

SEQ ID NO: 39529 - DNA, 201 bp, Homo sapiens
atgtattctctcttatgactcactttttcttaatttatagccataaaatctcgacctgtttcaagagttaccaatggaacttccaataaaaaaagtattcrtgaacaagacactaatgtaaataacaggtaggtcttcattcagtgttttaacctatctgttagctttctctcaaagttaattatatactaactgctagct

SEQ ID NO: 39530 - DNA, 201 bp, Homo sapiens; identical to SEQ ID NO: 6784

SEQ ID NO: 39531 - DNA, 201 bp, Homo sapiens
attggtcttttaaaaagttcatgttttggaatctaagtgtaatactgaatgcaaataattttttttagtgtactaaagaaagtcagtggcaaaggatgtaktgagccagtaccacaggcaattttgaagaaaagaggaactagcaatggatgtactgcagctcagcagaggacaaagagtaccccatctaatcttactaaa

SEQ ID NO: 39532 - DNA, 201 bp, Homo sapiens
ggaatacgactagggtcccgacaacccttttaaagcatattatacgattccacagaacatactctaggaaatggtgcactaggacatttttttctgtgttycctgttatccccgtgttttttaaaggcccccaggaattagcctacttgccttcctatcccctgctactcaccaggcttttctgccttccttgccttactg

SEQ ID NO: 39533 - DNA, 201 bp, Homo sapiens; identical to SEQ ID NO: 6789

SEQ ID NO: 39534 - DNA, 201 bp, Homo sapiens
ctaggaaatggtgcactaggacatttttttctgtgttccctgttatccccgtgttttttaaaggcccccaggaattagcctacttgccttcctatcccctrctactcaccaggcttttctgccttccttgccttactgcagaatagaacaaagtttcattatttttcctcatcctcctgactttgtggttgtctaagtctt

SEQ ID NO: 39535 - DNA, 201 bp, Homo sapiens
tttatcaccgtgctttccttttttctaaatttaaccaagttatttattgtgtatttttttgtgtgcacccacattcatatatgttattttatctttgacarcttttaatgtaattggaagcttttcatatttaaaaatagaccttaaactgcatatcaaaatatgcaatatatgcccagcattaacaacattgattacgtt

SEQ ID NO: 39536 - DNA, 201 bp, Homo sapiens
gccagccagtgctatactagtatcttatttgtacaaaaaccaagctttgcagatgtagtgtattgatgtgctgtgcttcctaggagcttttaaaaaaaaawttttttaaataaggactccaagaagtaaaggattcttcccacagaggattaagtctttaatgataaaatttctggcacttggaataaggttgaagagaga

SEQ ID NO: 39537 - DNA, 201 bp, Homo sapiens
gagtaagccttctaaaaaatcatggatattatcattcctcagggcatcctgaatctttatagacattaatctctatcaaaacttcatacattaaaaaagcyttccttttatttatttatttactttaatagatagaatagcatgcctttaaaataaacacttatgctgtatttcagatttgattacggtaatctaagacaa

SEQ ID NO: 39538 - DNA, 201 bp, Homo sapiens
gtttttgttgttctgttgttgttattgttgagacagggtcttgctctgtcacccaggctggagtacagtggcatgatcacactgcagtcctccttcctctscctcccaaagtgctgggattacaggcatgagtcaacacacctggcctctgtttggttttcattgtcttttgtgagagaaataattaagggagtcactaat

SEQ ID NO: 39539 - DNA, 201 bp, Homo sapiens
cggaggttgcagtcagctgagatcttgcctctatactccaggctgggcgacagagcgagactctatctcaaaaaaaaaaaaaaaattgataatgataatartagtgcagtctaaacaactataatacataaggaggaagaatttcccttccagaatctgtgtgagtccattgtttttcagtgttctgaaaacgaaaagagt

SEQ ID NO: 39540 - DNA, 201 bp, Homo sapiens; identical to SEQ ID NO: 6794

SEQ ID NO: 39541 - DNA, 201 bp, Homo sapiens; identical to SEQ ID NO: 6795
  misc_feature (101)..(101): n is a, c, g, or t

SEQ ID NO: 39542 - DNA, 201 bp, Homo sapiens
gaggcggagcttgcagtgagccgagatcacgccactgcactccagcctgggcaacagagagagattctgtctcaaaaaaaaaaaaaaaaaaaaaaaaaaaaaggcaagatacagagtactgtgcatattaatgccttcatttgtataaaataagaaaattacatatatgttttgtttgtatatgcataaaataactggaaa

SEQ ID NO: 39543 - DNA, 201 bp, Homo sapiens
aaagataaaggatcatcatatatacagaagagcaacagcactctgggaagtgggggaaatatcagaccccttggttttttgtttttgttttgttttgttcrtagagatggggtctcactgttacccaggctggtctcagattactgagctcaagcaatcctccctccttggcctctcaaagtgctgggattacacgtgtga

SEQ ID NO: 39544 - DNA, 201 bp, Homo sapiens; identical to SEQ ID NO: 15771

SEQ ID NO: 39545 - DNA, 201 bp, Homo sapiens; identical to SEQ ID NO: 15773

SEQ ID NO: 39546 - DNA, 201 bp, Homo sapiens; identical to SEQ ID NO: 15774

SEQ ID NO: 39547 - DNA, 201 bp, Homo sapiens; identical to SEQ ID NO: 15775

SEQ ID NO: 39548 - DNA, 201 bp, Homo sapiens; identical to SEQ ID NO: 15776

SEQ ID NO: 39549 - DNA, 201 bp, Homo sapiens; identical to SEQ ID NO: 15777

SEQ ID NO: 39550 - DNA, 201 bp, Homo sapiens
ccaactcacataaccctggatgagggattctcctggcatatgctggcctctgggccacagaggtaatcatgtgattctggctgagccaatcacagtacccyagctgcagaccctgcaattggcccaaagatggacacatgaccaaagcccaaccaatcaagctctgccccaagactttttattaggaagctgtcaaggaaa

SEQ ID NO: 39551 - DNA, 201 bp, Homo sapiens; identical to SEQ ID NO: 15779

SEQ ID NO: 39552 - DNA, 201 bp, Homo sapiens; identical to SEQ ID NO: 15778

SEQ ID NO: 39553 - DNA, 201 bp, Homo sapiens
ctgaggcaggtggatcacctgaggttaagagttcgagacccgcctgaccaacatggtgaaaccccatctgtgctaaaattacaaaaaaattagccaggcayggtggtgccaattacctacaattcccgggtcagtatccaagaccctccaccagccaggaacagtcacggggtcagtatccaacagcctccaccagccagc

SEQ ID NO: 39554 - DNA, 201 bp, Homo sapiens; identical to SEQ ID NO: 15782

SEQ ID NO: 39555 - DNA, 201 bp, Homo sapiens
gcagggagcacagaattcaatgttccctgcataccaactccaaaatcacaatcaaaacctaaaaataagtaatgagaatttaaaaaaacagaactgaatgytcatcaaaaatctggagggagaacctcccgaagccaagaagcaattaataaagtcacagagacaaaggtgaagaaattaaactacctaaaaattctaagg

SEQ ID NO: 39556 - DNA, 201 bp, Homo sapiens
gtatttttagtagagacatggtttcaccatgttggccaggctggtctcaaactcctgacctcaggtgatcggcttcccaaagtgctgggattacaagcgtsagccactgagcccagcctcgatcatttctagaaccacccccacagacacccctggtcaccctacttgaactcctaaaaggtgtctcataacaactcatgt

SEQ ID NO: 39557 - DNA, 201 bp, Homo sapiens; identical to SEQ ID NO: 15785

SEQ ID NO: 39558 - DNA, 201 bp, Homo sapiens; identical to SEQ ID NO: 15787

SEQ ID NO: 39559 - DNA, 201 bp, Homo sapiens
tctgagcaatccaaccatgaacctatgcgttccagagggctgcagtttctggactgtagtaataccacctcctccctttgtccttctggccaagtagcagyatcctgtagttcctaactcctggtttgcctcactatttcctattggcttctcagctcctctgttactcacgaacaaattccctgtatttacttccttctg

SEQ ID NO: 39560 - DNA, 201 bp, Homo sapiens; identical to SEQ ID NO: 15789

SEQ ID NO: 39561 - DNA, 201 bp, Homo sapiens
ccacgctgaaggggttggccgggcatctggccatggctaccggtcggtgtcctgaagacctcgggtgctattccttggaggtgcttgggtctcatcctcgwgggtgtatgaaatgggaaggcccggggtgcgctcggagtcagcgtctgagttccgctgtttggatgtccgcctcgctgcgccctgctgcacggcccaccc

SEQ ID NO: 39562 - DNA, 201 bp, Homo sapiens; identical to SEQ ID NO: 15791

SEQ ID NO: 39563 - DNA, 201 bp, Homo sapiens; identical to SEQ ID NO: 15792

SEQ ID NO: 39564 - DNA, 201 bp, Homo sapiens; identical to SEQ ID NO: 15794

SEQ ID NO: 39565 - DNA, 201 bp, Homo sapiens; identical to SEQ ID NO: 15803

SEQ ID NO: 39566 - DNA, 201 bp, Homo sapiens; identical to SEQ ID NO: 15804

SEQ ID NO: 39567 - DNA, 201 bp, Homo sapiens
ttttctaccggactcggcagttattaccaactctgccaagttgctaacaactctgccagttttttgtctgtctgctctcagatccatttcccgccctgtcytgttctgcactgcaaggaccacatttcccagcctcctttgctcaccatcttatcactgtgtttgactaatgggaggcactggcagaagactggttctggg

SEQ ID NO: 39568 - DNA, 201 bp, Homo sapiens; identical to SEQ ID NO: 15805

SEQ ID NO: 39569 - DNA, 201 bp, Homo sapiens
gataacttttttctaccggactcggcagttattaccaactctgccaagttgctaacaactctgccagttttttgtctgtctgctctcagatccatttcccrccctgtcctgttctgcactgcaaggaccacatttcccagcctcctttgctcaccatcttatcactgtgtttgactaatgggaggcactggcagaagactg

SEQ ID NO: 39570 - DNA, 201 bp, Homo sapiens; identical to SEQ ID NO: 15806

SEQ ID NO: 39571 - DNA, 201 bp, Homo sapiens
ccagatgtggtgcacctggacccactcggctgaggctggggccaccccagctgtgtcaatctcatgcctggaagtctgaggtcaccagcaggtggggaaargaaggggctgtgacaggtgcagacaaacaggcagggaaaggctcagatcccaaagggcgagtcagggacgccagaacagttcactcacactaggatggac

SEQ ID NO: 39572 - DNA, 201 bp, Homo sapiens; identical to SEQ ID NO: 15809

SEQ ID NO: 39573 - DNA, 201 bp, Homo sapiens; identical to SEQ ID NO: 6806

SEQ ID NO: 39574 - DNA, 201 bp, Homo sapiens; identical to SEQ ID NO: 6796

SEQ ID NO: 39575 - DNA, 201 bp, Homo sapiens; identical to SEQ ID NO: 6797

SEQ ID NO: 39576 - DNA, 201 bp, Homo sapiens; identical to SEQ ID NO: 15815

SEQ ID NO: 39577 - DNA, 201 bp, Homo sapiens; identical to SEQ ID NO: 15816

SEQ ID NO: 39578 - DNA, 201 bp, Homo sapiens
tgtgcatccaatgtgtgtcacgttctgccatcacctatctttccagatgtggtgcacctggacccactcggctgaggctggggccaccccagctgtgtcartctcatgcctggaagtctgaggtcaccagcaggtggggaaaggaaggggctgtgacaggtgcagacaaacaggcagggaaaggctcagatcccaaagggc

SEQ ID NO: 39579 - DNA, 201 bp, Homo sapiens
ttttttctaccggactcggcagttattaccaactctgccaagttgctaacaactctgccagttttttgtctgtctgctctcagatccatttcccgccctgycctgttctgcactgcaaggaccacatttcccagcctcctttgctcaccatcttatcactgtgtttgactaatgggaggcactggcagaagactggttctg

SEQ ID NO: 39580 - DNA, 201 bp, Homo sapiens; identical to SEQ ID NO: 15818

SEQ ID NO: 39581 - DNA, 201 bp, Homo sapiens; identical to SEQ ID NO: 15819

SEQ ID NO: 39582 - DNA, 201 bp, Homo sapiens; identical to SEQ ID NO: 15820

SEQ ID NO: 39583 - DNA, 201 bp, Homo sapiens
cagagacatgctaagacagaggccccgaggggagcagcacggaagtctagatacacctccagaaagccagagagcagggctggggttagggagggcccccrccccccaagccaacacctaccaatgccgaggcagaggaaactgaagacaaagtcggccatgttcaggcggaggaccactggccaggaggagagggccatg

SEQ ID NO: 39584 - DNA, 201 bp, Homo sapiens; identical to SEQ ID NO: 6800

SEQ ID NO: 39585 - DNA, 201 bp, Homo sapiens; identical to SEQ ID NO: 15822

SEQ ID NO: 39586 - DNA, 201 bp, Homo sapiens; identical to SEQ ID NO: 15823

SEQ ID NO: 39587 - DNA, 201 bp, Homo sapiens; identical to SEQ ID NO: 15824

SEQ ID NO: 39588 - DNA, 201 bp, Homo sapiens; identical to SEQ ID NO: 15826

SEQ ID NO: 39589 - DNA, 201 bp, Homo sapiens; identical to SEQ ID NO: 15827

SEQ ID NO: 39590 - DNA, 201 bp, Homo sapiens; identical to SEQ ID NO: 15829

SEQ ID NO: 39591 - DNA, 201 bp, Homo sapiens; identical to SEQ ID NO: 15830

SEQ ID NO: 39592 - DNA, 201 bp, Homo sapiens; identical to SEQ ID NO: 15832

SEQ ID NO: 39593 - DNA, 201 bp, Homo sapiens; identical to SEQ ID NO: 15834

SEQ ID NO: 39594 - DNA, 201 bp, Homo sapiens; identical to SEQ ID NO: 15836

SEQ ID NO: 39595 - DNA, 201 bp, Homo sapiens; identical to SEQ ID NO: 15838

SEQ ID NO: 39596 - DNA, 201 bp, Homo sapiens
cccaagccaacacctaccaatgccgaggcagaggaaactgaagacaaagtcggccatgttcaggcggaggaccactggccaggaggagagggccatgggcrggaggaggactcagcacagggccacggccagtaacatgaagcccttgctcatatggatgagaactggggagagggggacaggggccccagagtcaacccc

SEQ ID NO: 39597 - DNA, 201 bp, Homo sapiens
tgtgccccaagccacacaggattcttgcaagaactgttgataacttttttctaccggactcggcagttattaccaactctgccaagttgctaacaactctrccagttttttgtctgtctgctctcagatccatttcccgccctgtcctgttctgcactgcaaggaccacatttcccagcctcctttgctcaccatcttatc

SEQ ID NO: 39598 - DNA, 201 bp, Homo sapiens; identical to SEQ ID NO: 15839

SEQ ID NO: 39599 - DNA, 201 bp, Homo sapiens; identical to SEQ ID NO: 15840

SEQ ID NO: 39600 - DNA, 201 bp, Homo sapiens; identical to SEQ ID NO: 15841

SEQ ID NO: 39601 - DNA, 201 bp, Homo sapiens; identical to SEQ ID NO: 15842

SEQ ID NO: 39602 - DNA, 201 bp, Homo sapiens; identical to SEQ ID NO: 15843

SEQ ID NO: 39603 - DNA, 201 bp, Homo sapiens
caaaaaaagaaagggaaacagagagtgggggagagagacatcccacagatagagtagaactgagtcagagctccccagagacatgctaagacagaggcccygaggggagcagcacggaagtctagatacacctccagaaagccagagagcagggctggggttagggagggcccccgccccccaagccaacacctaccaatg

SEQ ID NO: 39604 - DNA, 201 bp, Homo sapiens; identical to SEQ ID NO: 15844

SEQ ID NO: 39605 - DNA, 201 bp, Homo sapiens; identical to SEQ ID NO: 15845

SEQ ID NO: 39606 - DNA, 201 bp, Homo sapiens; identical to SEQ ID NO: 15846

SEQ ID NO: 39607 - DNA, 201 bp, Homo sapiens; identical to SEQ ID NO: 15847

SEQ ID NO: 39608 - DNA, 201 bp, Homo sapiens; identical to SEQ ID NO: 15848

SEQ ID NO: 39609 - DNA, 201 bp, Homo sapiens; identical to SEQ ID NO: 15849

SEQ ID NO: 39610 - DNA, 201 bp, Homo sapiens; identical to SEQ ID NO: 15850

SEQ ID NO: 39611 - DNA, 201 bp, Homo sapiens
aagatggagtcttgctctgttgcccaggctggagtgcagtggtgtgatctcggctcactccaacctctgcctttgggctcaagcaattctcctgcctcagmctcccgattagctgatactacacgcagctgctgccacgccagcctaatttttgtatttttagtagagacatggtttcaccatgttggccaggctggtctc

SEQ ID NO: 39612 - DNA, 201 bp, Homo sapiens
ggactgagacatcctctcccaccctccgtgacaagcagacacacacacacacacacacacacacacacacacacgccctcacaacagacagaaagataccyggagagaggggacaaaaaaagaaagggaaacagagagtgggggagagagacatcccacagatagagtagaactgagtcagagctccccagagacatgcta

SEQ ID NO: 39613 - DNA, 201 bp, Homo sapiens
ctttccagatgtggtgcacctggacccactcggctgaggctggggccaccccagctgtgtcaatctcatgcctggaagtctgaggtcaccagcaggtgggraaaggaaggggctgtgacaggtgcagacaaacaggcagggaaaggctcagatcccaaagggcgagtcagggacgccagaacagttcactcacactaggat

SEQ ID NO: 39614 - DNA, 201 bp, Homo sapiens
agtcccaccctaggccccacccgcttcccgaggccccgccctcctcccgaggccccgccctcaccggagtgcagcatcaagtcgctggcgtcccagcacargtaggaggtcaccaggtaggacaccaccggacttgggtgcaccgccttgccgttaactgaaaagagcgtcaggctgaagagaaatcaggagccctgcaat

SEQ ID NO: 39615 - DNA, 201 bp, Homo sapiens
gggcgggaggaggactcagcacagggccacggccagtaacatgaagcccttgctcatatggatgagaactggggagagggggacaggggccccagagtcamccccagatacccctcttggtcaccctccaaagtcatctctgctgatacccacaagcagcccaacagacaaccccaaagtctggcacatcctcaaaatcac

SEQ ID NO: 39616 - DNA, 201 bp, Homo sapiens; identical to SEQ ID NO: 15853

SEQ ID NO: 39617 - DNA, 201 bp, Homo sapiens
tcggtgtcctgaagacctcgggtgctattccttggaggtgcttgggtctcatcctcgagggtgtatgaaatgggaaggcccggggtgcgctcggagtcagygtctgagttccgctgtttggatgtccgcctcgctgcgccctgctgcacggcccacccgcggtagctcagccgccgcgcattcaagggctgccctctgctt

SEQ ID NO: 39618 - DNA, 201 bp, Homo sapiens
cacggccagtaacatgaagcccttgctcatatggatgagaactggggagagggggacaggggccccagagtcaaccccagatacccctcttggtcaccctycaaagtcatctctgctgatacccacaagcagcccaacagacaaccccaaagtctggcacatcctcaaaatcacccctactcacctccccaaagtcacctc

SEQ ID NO: 39619 - DNA, 201 bp, Homo sapiens
gcactgtgaggacccagtgggcagggacaaagccgcaaagggcgggccctagagcgagggctggagtttgccaccggtcccctcggagggcgtggcctgayatcagggggtggggcctcaggggaggtcgaatatccagggcgtggccacgctgaaggggttggccgggcatctggccatggctaccggtcggtgtcctga

SEQ ID NO: 39620 - DNA, 201 bp, Homo sapiens
aaaggtcatcccactcatcctcaaggttaccccacagaatcacctcaatcatttctttctttcttcttctttttttttttttttttttaagatggagtctygctctgttgcccaggctggagtgcagtggtgtgatctcggctcactccaacctctgcctttgggctcaagcaattctcctgcctcagcctcccgattagc

SEQ ID NO: 39621 - DNA, 201 bp, Homo sapiens
aggggcagggccacacaaactagccacactgccgagctcagcgggacgctggacaagtgtctgcagaacgggaggggatgctgggcctctggggtggaggyactgtgaggacccagtgggcagggacaaagccgcaaagggcgggccctagagcgagggctggagtttgccaccggtcccctcggagggcgtggcctgata

SEQ ID NO: 39622 - DNA, 201 bp, Homo sapiens
aaactttcaagtcaaatactctaaaaccaatgtgcccaaaagcttagttccagtttacagtggatatttatccaacttagacttccagcagaagagaggtwtacctgtttccgagatgctacatctcctccttttagccctttttctactttgtctacttttcaacagtgcaaaattgttttagccaaataggccaagacc

SEQ ID NO: 39623 - DNA, 201 bp, Homo sapiens
cagcccactctgtgatttggtcagaatgagtggatatttgcagcttacctccccaccatgcatttcacctcctgcccattccccattctcagccccagtcwtaagccaatcagccaactgtactccactggccatataattggctcggggtgctcatgtgccccaagccacacaggattcttgcaagaactgttgataact

SEQ ID NO: 39624 - DNA, 201 bp, Homo sapiens; identical to SEQ ID NO: 15854

SEQ ID NO: 39625 - DNA, 201 bp, Homo sapiens
tattagcctctctatctctgcatgtggtgggtcttccgtagtagttgtatctattctctgattctagccacttctgagcaatccaaccatgaacctatgcsttccagagggctgcagtttctggactgtagtaataccacctcctccctttgtccttctggccaagtagcagcatcctgtagttcctaactcctggtttgc

SEQ ID NO: 39626 - DNA, 201 bp, Homo sapiens
gtttgactaatgggaggcactggcagaagactggttctgggaggagagggcaagccagggtatttattagcctctctatctctgcatgtggtgggtcttcmgtagtagttgtatctattctctgattctagccacttctgagcaatccaaccatgaacctatgcgttccagagggctgcagtttctggactgtagtaatac

SEQ ID NO: 39627 - DNA, 201 bp, Homo sapiens; identical to SEQ ID NO: 15855

SEQ ID NO: 39628 - DNA, 201 bp, Homo sapiens
ctgtactccactggccatataattggctcggggtgctcatgtgccccaagccacacaggattcttgcaagaactgttgataacttttttctaccggactcrgcagttattaccaactctgccaagttgctaacaactctgccagttttttgtctgtctgctctcagatccatttcccgccctgtcctgttctgcactgcaa

SEQ ID NO: 39629 - DNA, 201 bp, Homo sapiens; identical to SEQ ID NO: 15856

SEQ ID NO: 39630 - DNA, 201 bp, Homo sapiens; identical to SEQ ID NO: 15857

SEQ ID NO: 39631 - DNA, 201 bp, Homo sapiens; identical to SEQ ID NO: 15858

SEQ ID NO: 39632 - DNA, 201 bp, Homo sapiens; identical to SEQ ID NO: 15859

SEQ ID NO: 39633 - DNA, 201 bp, Homo sapiens; identical to SEQ ID NO: 15860

SEQ ID NO: 39634 - DNA, 201 bp, Homo sapiens; identical to SEQ ID NO: 15861

SEQ ID NO: 39635 - DNA, 201 bp, Homo sapiens; identical to SEQ ID NO: 15862

SEQ ID NO: 39636 - DNA, 201 bp, Homo sapiens; identical to SEQ ID NO: 1872

SEQ ID NO: 39637 - DNA, 201 bp, Homo sapiens; identical to SEQ ID NO: 1873

SEQ ID NO: 39638 - DNA, 201 bp, Homo sapiens; identical to SEQ ID NO: 1875

SEQ ID NO: 39639 - DNA, 201 bp, Homo sapiens; identical to SEQ ID NO: 15866

SEQ ID NO: 39640 - DNA, 201 bp, Homo sapiens; identical to SEQ ID NO: 15867

SEQ ID NO: 39641 - DNA, 201 bp, Homo sapiens; identical to SEQ ID NO: 15868

SEQ ID NO: 39642 - DNA, 201 bp, Homo sapiens
tctcatgcctggaagtctgaggtcaccagcaggtggggaaaggaaggggctgtgacaggtgcagacaaacaggcagggaaaggctcagatcccaaagggcragtcagggacgccagaacagttcactcacactaggatggaccctgccctggtggggaggtggggggcaatggaaggtctgaggctgagaggttttattgt

SEQ ID NO: 39643 - DNA, 201 bp, Homo sapiens; identical to SEQ ID NO: 15870

SEQ ID NO: 39644 - DNA, 201 bp, Homo sapiens; identical to SEQ ID NO: 15872

SEQ ID NO: 39645 - DNA, 201 bp, Homo sapiens
cccagcctcctttgctcaccatcttatcactgtgtttgactaatgggaggcactggcagaagactggttctgggaggagagggcaagccagggtatttatyagcctctctatctctgcatgtggtgggtcttccgtagtagttgtatctattctctgattctagccacttctgagcaatccaaccatgaacctatgcgttc

SEQ ID NO: 39646 - DNA, 201 bp, Homo sapiens; identical to SEQ ID NO: 15874
  misc_feature (101)..(101): n is a, c, g, or t

SEQ ID NO: 39647 - DNA, 201 bp, Homo sapiens; identical to SEQ ID NO: 15875

SEQ ID NO: 39648 - DNA, 201 bp, Homo sapiens
ttttagccaaataggccaagacctcatctgctttgtttctggcaaactgcacatctctaatacccaacaagaaagataaaggatcatcatatatacagaasagcaacagcactctgggaagtgggggaaatatcagaccccttggttttttgtttttgttttgttttgttcatagagatggggtctcactgttacccaggc

SEQ ID NO: 39649 - DNA, 201 bp, Homo sapiens; identical to SEQ ID NO: 15876

SEQ ID NO: 39650 - DNA, 201 bp, Homo sapiens; identical to SEQ ID NO: 6804

SEQ ID NO: 39651 - DNA, 201 bp, Homo sapiens; identical to SEQ ID NO: 15879

SEQ ID NO: 39652 - DNA, 201 bp, Homo sapiens; identical to SEQ ID NO: 15881

SEQ ID NO: 39653 - DNA, 201 bp, Homo sapiens
aaaattacaaaaaaattagccaggcacggtggtgccaattacctacaattcccgggtcagtatccaagaccctccaccagccaggaacagtcacggggtcrgtatccaacagcctccaccagccagcagcaatcgcctggtcagtatccaagaccccttgccaattattcacaatcaccaggtcagtatccaagaccctac

SEQ ID NO: 39654 - DNA, 201 bp, Homo sapiens; identical to SEQ ID NO: 15882

SEQ ID NO: 39655 - DNA, 201 bp, Homo sapiens; identical to SEQ ID NO: 1895

SEQ ID NO: 39656 - DNA, 201 bp, Homo sapiens; identical to SEQ ID NO: 15886

SEQ ID NO: 39657 - DNA, 201 bp, Homo sapiens
gggcagattgcttgagcttacaagttcgagaccagcctgggaaacatggcaaaactctacctctaccaaaaaatacaaaattatagctaggaatagtagcrctcccctgtagtcccaactacgtgggaggcagaggtgagaggatggcttgaacctgggaggcggaggttgcagtgagccgagatctcatgccactgcact

SEQ ID NO: 39658 - DNA, 201 bp, Homo sapiens
ggtgaaggttgcagtgaaccaagatcacgccactgcactccagcctgggtgaaagagtgaaactccatctcaaatttaaaaaagtaaaaaataaaaaaaawttaaaaaaaaagagtttgtgtcacttgtgacccaaaaactcctgactaattcaagtcccttccttaggacagcagggagcacagaattcaatgttccctg

SEQ ID NO: 39659 - DNA, 201 bp, Homo sapiens
agttagccgggcatggcagcgggcgcctgtaatcccagctactccggaggctgaggcaggagaatcgctcaaacccggggggtgaaggttgcagtgaaccragatcacgccactgcactccagcctgggtgaaagagtgaaactccatctcaaatttaaaaaagtaaaaaataaaaaaaatttaaaaaaaaagagtttgtg

SEQ ID NO: 39660 - DNA, 201 bp, Homo sapiens
gtgaaactccgtctctactaaaaagataaaagttagccgggcatggcagcgggcgcctgtaatcccagctactccggaggctgaggcaggagaatcgctcraacccggggggtgaaggttgcagtgaaccaagatcacgccactgcactccagcctgggtgaaagagtgaaactccatctcaaatttaaaaaagtaaaaaa

SEQ ID NO: 39661 - DNA, 201 bp, Homo sapiens
catggtgaaactccgtctctactaaaaagataaaagttagccgggcatggcagcgggcgcctgtaatcccagctactccggaggctgaggcaggagaatcrctcaaacccggggggtgaaggttgcagtgaaccaagatcacgccactgcactccagcctgggtgaaagagtgaaactccatctcaaatttaaaaaagtaa

SEQ ID NO: 39662 - DNA, 201 bp, Homo sapiens
atcccagcactttgggaggccgaggcaggtggatcacctgaggtcaggagtttgagaccagcctggccaacatggtgaaactccgtctctactaaaaagayaaaagttagccgggcatggcagcgggcgcctgtaatcccagctactccggaggctgaggcaggagaatcgctcaaacccggggggtgaaggttgcagtga

SEQ ID NO: 39663 - DNA, 201 bp, Homo sapiens
tcaagctctgccccaagactttttattaggaagctgtcaaggaaaagcagtctctcctcaaggattacaagcctgaagctgcctaagccttggacctagcytcatggggagagtaaaactaagaaggaaaacagacaagcgaaagagcattgagctgacactgaagtccctggctctcgtcatcccagagagcagcccact

SEQ ID NO: 39664 - DNA, 201 bp, Homo sapiens
cagctgcagaccctgcaattggcccaaagatggacacatgaccaaagcccaaccaatcaagctctgccccaagactttttattaggaagctgtcaaggaaragcagtctctcctcaaggattacaagcctgaagctgcctaagccttggacctagcttcatggggagagtaaaactaagaaggaaaacagacaagcgaaag

SEQ ID NO: 39665 - DNA, 201 bp, Homo sapiens
ctgaagagaaatcaggagccctgcaatggggtggggccagagacagaaggctggacagtgagccctatgacccccagtaagaaaagagggactgagacatyctctcccaccctccgtgacaagcagacacacacacacacacacacacacacacacacacacgccctcacaacagacagaaagatacctggagagagggga

SEQ ID NO: 39666 - DNA, 201 bp, Homo sapiens
gagttagaactgagagcccggcttcacagcgcagcgcgctccgaggccctctgtcgttacctgaatattcattagactgaccgctctttatccttatctarcgtttatcttatcggcgagtttcgtttctcagtgtagttttaatcccgggctcccattccccctcccccggtccgctcccctccctccctcttccttcgc

SEQ ID NO: 39667 - DNA, 201 bp, Homo sapiens
gcagctccgcactgtttccctcccctgtacccccttcccagtcacccgagggttcagaaaccaagtcccccggctctcccgccatccgctgggtcccaccraggcaggtgggtactcgccggaggtcttcagctcgattctgaaccaagcgttctggactgcccagacccggtgggcaaggggactggggaggccctgcgc

SEQ ID NO: 39668 - DNA, 201 bp, Homo sapiens
gggaggggagcgcgagtccgcggcgcttccgcggggcgcccggagctgcagacgggggctggaggaatctcggattcgggctgcaagagcgctgcgcaagmttcgccgagccgccctttcgcagacccagggaagcggggggagggagcgaaggagggagagagagttaaaacatcagctgaagtgccaagatgatttatg

SEQ ID NO: 39669 - DNA, 201 bp, Homo sapiens
tttctttctctttcttttcccctttcctcttctttcttccctttttttttttttttttttttttttgctttcttgcttccccccacccctctactagactstatagaagaaagagaacagaaaagggggagtcagaggagcggccagtgactggatgaaggccagcccttcatcctggagccccaggagaaggcagagctt

SEQ ID NO: 39670 - DNA, 201 bp, Homo sapiens
gaaaagcaaccaaccctgacaggtcggagcccgggtagtgtttggggttgggttgttttctttctttctctttcttttcccctttcctcttctttcttccytttttttttttttttttttttttttgctttcttgcttccccccacccctctactagactctatagaagaaagagaacagaaaagggggagtcagaggagc

SEQ ID NO: 39671 - DNA, 201 bp, Homo sapiens
aacctcacagggagctggacatgggacccctctctcctcttcttctccatgagtagaaatgccactccaaatcccctggccctctccctcacctccctgaratgcctcaaggtgcagccaggctgttaggaagggtgtcaaagggaagggggaaggaagaggaggaggagagaagaaaagaaataagggggagagtggtag

SEQ ID NO: 39672 - DNA, 201 bp, Homo sapiens
ttggcttggggcgccggtgcgtgggtacactcgaggtgcggggtgcctatccgccaccccgacacctacacccagacagagcaggcgcggcccagccagamaaccaggccggcagtagctcggcctggagggcggaggcaaggttgggggccgccaggcgcctgggcaagcctggcagggaagggagccgagaaggcaaag

SEQ ID NO: 39673 - DNA, 201 bp, Homo sapiens
gggaaggttttggagttgggggaacagctggtctctgacctgaggatgaaaggccaacctaccttgtccttacctgatcccaatctgtctggaggtgaggkagtgatgtcatgtgcagcctagcctggtgtcctttctctttaacacctgcacaccgcccccagttcaaacctcacagggagctggacatgggacccctct

SEQ ID NO: 39674 - DNA, 201 bp, Homo sapiens
tgagagccctggagtcgcgcttggcttggcttggggcgccggtgcgtgggtacactcgaggtgcggggtgcctatccgccaccccgacacctacacccagrcagagcaggcgcggcccagccagacaaccaggccggcagtagctcggcctggagggcggaggcaaggttgggggccgccaggcgcctgggcaagcctggc

SEQ ID NO: 39675 - DNA, 201 bp, Homo sapiens
aaatgaagctcagctgcggagctgcagctctgttctccctctctcccctccctttctgcttctcttcccttcggactacttttctccccttggttctaaayagctttttcccctctgaactttaatgcatttaatttggtccgcgctgtggggagcatttcctggggagatgcatttaatttcggaatttctaatcccctc

SEQ ID NO: 39676 - DNA, 201 bp, Homo sapiens
aacttttatttttctttttggtggtgacttctaaaagtgggaataatccagaaatgaagctcagctgcggagctgcagctctgttctccctctctcccctscctttctgcttctcttcccttcggactacttttctccccttggttctaaatagctttttcccctctgaactttaatgcatttaatttggtccgcgctgtg

SEQ ID NO: 39677 - DNA, 201 bp, Homo sapiens
gccacaccattggtaagagggctcagggaaggggaggaaaccagatcccacctagagaaaggcaggaaacgcagctccacccctgggaactgcctgcccgsttgaggtccagagcccaacctatttgccaactcctctcacctgagctcctgtccacatagggtcttcctgagagatactggttctctaggactgttctct

SEQ ID NO: 39678 - DNA, 201 bp, Homo sapiens
tgttggacaggaccttcactcttactctctagacctgctggctgggtttctcccagcttcgctattttttcagttccctagtagagtggcccatgggcggkagccacctggctggcccgtgccactaagaggcagctttggtggccaagtggcttgcattgttgttgctcctcaaagggcctgtgaagggctgggcaggtc

SEQ ID NO: 39679 - DNA, 201 bp, Homo sapiens
tgatcttgagtgagctacttaaacttgtctcagctttggttttcaatttgcaaaatgaggataatagtctctactttggaggtggttgtgcgaattaacartaatatatatgtcatataaattgtgtataatattggcacatagtagatgttcagtaagtggaaaatggtgatggttctcatcacatccaagttttcattc

SEQ ID NO: 39680 - DNA, 201 bp, Homo sapiens
aaaccatggttgactccagttggttgccaaactctgaccattctgccttcctcttgtcttgcaaattcttccctttctttcctgagaccagctccctatcrcctcatgcctcatgtatatgtatgttgctttactgggatctgtttgtagagatcccccctagtttagaaatcactcatggcttaaggccctctaaacctg

SEQ ID NO: 39681 - DNA, 201 bp, Homo sapiens
acacctccctggagtctgcactccatttttccttgttctcccttgctctgttaatcatccacagtcccttaggcaacttcagtctcttcctcttcactggktcttcctcctcagtctacaagcttatccaggtctttcctacccaagaaggccttccctccacttagctgcccgttccatcctccaccttccatactttcc

SEQ ID NO: 39682 - DNA, 201 bp, Homo sapiens
agaggctctgggtaacaaagacagaaactcctcaagcccgtccagttctctctctcagccagccccacccctggggttcccttagtcaagagcccatcagmcctcaagccagagccacccacaggcccagtgagctcacagaagctgttgctgcagtaaactaggagcagctgctctgagctgctcagcatctttctagac

SEQ ID NO: 39683 - DNA, 201 bp, Homo sapiens
gtgcgtgtggatttgtgtgtgtttgtgggtacctacctatgtctgcttttaggtgaaaaggccctgaggccaagaggagaaaagggaggaaggctcacagracatgacctgcagtcacaggcaaggctggacaccttgtacttgggccatcagatcaattggcaagtagtcattgggccactgggcgaagtggcagcagca

SEQ ID NO: 39684 - DNA, 201 bp, Homo sapiens
ggacaccaagagcattagtaactcacagcaggcaccctgcccagctcctcccccatgcaccaccaagccgctgtcagggagtagtgattttccatcactcrctgcctcagctaaatttgcgccagtgccctaggggtcagaggctctgggtaacaaagacagaaactcctcaagcccgtccagttctctctctcagccagc

SEQ ID NO: 39685 - DNA, 201 bp, Homo sapiens
aagataaggaaggccatccttcctctagggaccaatggaggtttcatgttcctcactccccgctgcttctctgaggagctgacactagggcaggcagcctkccgactgtgactgtctggagtctgggagagccagagagaaggaggtgtgactggggttgggactcgggttcctacccatttgcaatggtcctggaaggga

SEQ ID NO: 39686 - DNA, 201 bp, Homo sapiens
ttttgctgctctcactcccttggaagtgtgggagactctaagtgcctggaagtccccatgcggggcccaggccaaagccctggaggtccccaggaaagggygagctctcatcggaaatggtggaggagaaagagcatcttgtgaaggaaagagaagtggggagcaggcaccctggcagggcagtctctcagtggaaatgga

SEQ ID NO: 39687 - DNA, 201 bp, Homo sapiens
tttgtttatgtggaaaattaaaatgcaaatacaatgagatttatttccaggagtggagtgatgggctggcccctctggctactggtctccaggcctgtcargtcaggtgactgcttctttggaggtgctatcccccttgtgacagattcttgtgtgaagggagaggccagagttcaaggtcaaatagagttagtaaatggg

SEQ ID NO: 39688 - DNA, 201 bp, Homo sapiens
tgttatcactttgatggcctgcctgtttgggatgttagttaatgttccctggagagcacgtggttgaatggacagtagacatcctgatgggtcaatgaacrggggttctgaaaggtacacacagggtcccgacacatctagtctgtgtgcatgcacaagtttggggatgtgaacgcttatgagtagtgtgcatttgctctg

SEQ ID NO: 39689 - DNA, 201 bp, Homo sapiens
gccctggctcccagggaactctcgaaaggagtcagtcttgtcaaactgggagttggtggtttgctattcagaaggcttccggctaaagggattgtttggtyccagaatgaaagtccctgttatcactttgatggcctgcctgtttgggatgttagttaatgttccctggagagcacgtggttgaatggacagtagacatcc

SEQ ID NO: 39690 - DNA, 201 bp, Homo sapiens
tggcccctgagcatgagcaaatgggagtgagcactgggggctgctctccctggtcttggtgctccctcttggcctgggggtctttgctgggcccaactgcycagcccatacctggcaggcagatgatagaagctgaagggcatgaggagtctgcaggcagcttctggcctgcaggacatggaggcggtcaggaaggagaca

SEQ ID NO: 39691 - DNA, 201 bp, Homo sapiens
gggtatgggaagctaaagaagaatggtctggcgctgtaggagagggagcagcctcttgtaggctgggaactctcaggtaagagaggaagtgtgcaggaaaraggtagacaggcgaggccgtagagccagggtcccctcatggcacatccgcaatcaaccatgggagaaatgaggccctttcttttgttttctgagagataa

SEQ ID NO: 39692 - DNA, 201 bp, Homo sapiens
agagtggctcagcagctctggaacctgcagcccccctgccccgccacagtccgcttctggctgaccccgccggctttcccggcgcaggtactacgagaccrgcagcatcaagccgggtgtgatcggtggctccaagcccaaagtggcgacgcccaaagtggtggacaagattgctgaatacaaacgacagaacccgactat

SEQ ID NO: 39693 - DNA, 201 bp, Homo sapiens
cagggctgttggtctcatggcaaagagacagggcaagttggagagttcagaaaaagacttctatccacagaggaatggcagaaacaaggacagggaactcrccttctgtggcctgagcctagcagattgggcccacaaatagcagaccaacatgccaatttctgtcagagaagcctcgctcacctgtcctttcccagagac

SEQ ID NO: 39694 - DNA, 201 bp, Homo sapiens
ccactatccacactctctcttagcctgttaggctctaggtgagtacattcattctcctagcagtggcaacccagggctgtgttaaggaattccatcctgtrtcatttgggtgtccctcttctgtcattctcaggtctttgagtcattctcaggtcattgttccccttgggtcaggcagtggggtgacaatggtctactagt

SEQ ID NO: 39695 - DNA, 201 bp, Homo sapiens
gcccctagatctttggagtggaccctggcagaatcaacttctcacggatctcccactatccacactctctcttagcctgttaggctctaggtgagtacatkcattctcctagcagtggcaacccagggctgtgttaaggaattccatcctgtatcatttgggtgtccctcttctgtcattctcaggtctttgagtcattct

SEQ ID NO: 39696 - DNA, 201 bp, Homo sapiens
tcttcattttcgctaccttatgagaagcagacagaacttgaggatagggcagtaaaacaagagttatgttttctggccttagggtcctccgcagtgtcaartgggtagcaaaagtgctcattttcagagaaagatgctgaggaaaagcatctctgaactcctcgatagaacttttgctatataaatctatgtctaataagt

SEQ ID NO: 39697 - DNA, 201 bp, Homo sapiens
agccaccatgcctggctgcaaatatcattttgttctctaggatgattgagtttataatgcccaggcagtctgagaccactggcagaggcccccatgaccaytcgtctggcttagtgggcaatggggccagctagtctggcacattttctaccctggagtgcctttgatttactgaatcaggaaagaccctccccataccag

SEQ ID NO: 39698 - DNA, 201 bp, Homo sapiens
cctgccctaccttagcactcagatccctcctttacctctttgtgaaagggtaagagttcagaaagctggccatttactccataatctactagagaaatgtytgggtttgcaaaatgcctattgattagctccatggagtagacaagacaggcgtaattatccccattttacaggtgagaaaactgagtctcaaagaagcaa

SEQ ID NO: 39699 - DNA, 201 bp, Homo sapiens; identical to SEQ ID NO: 6816

SEQ ID NO: 39700 - DNA, 201 bp, Homo sapiens
gagagagagctgaactagaagatgagtaagaatgcctggtgctctcttaaaaggtggagcgcttctctctttcttcttgagtttaacacagtgttaatagragtttcatgcagggctttcattcttactcacagagcctgagactgtgttgatatccaagttggtgagaggtgggggtcttccgggaatttaaccagtaag

SEQ ID NO: 39701 - DNA, 201 bp, Homo sapiens
tgggtttgagagattctcccacctcagcctcccgagtagctggaaccacaagcatgtgacaccctgcccggctaatttttgtattttcagtagagatgggktttcaccatgttggccaggctggtctcgaactcctgacctcaagtgatccacctgcctcagcctcccaaagtgctgggattataggcataagccaccatg

SEQ ID NO: 39702 - DNA, 201 bp, Homo sapiens
atgctgccacctcactcctcccaaggtgagctgtctgaggtcacctcaatgctaataggacctcttcttgtctccacctcagggagtttttgcacaccatktattatcatataatataatgcaatataatatcatacataacataacataatatgatgggtaggttaacttggaaaccctgaggcggacggtggatggatg

SEQ ID NO: 39703 - DNA, 201 bp, Homo sapiens
agccagaggctacaaaaacagtgtgttaagtgattcaggcctgccttaaaggaagccacgtgcaggagagatgctgtttcctttgtgtttctgtggagagsaggaagtaaatttcaatttttcagttcctggggtatacaaagggggagactctagttccttagagttctcaggagtagggaccatttccaggagaggtaa

SEQ ID NO: 39704 - DNA, 201 bp, Homo sapiens
ttgcacaccatgtattatcatataatataatgcaatataatatcatacataacataacataatatgatgggtaggttaacttggaaaccctgaggcggacrgtggatggatggatagatgaatagatacatttgtactaagtatacatacattatatcattctattgatttgtaaaaagttcccggtctgcctggctgtaa

SEQ ID NO: 39705 - DNA, 201 bp, Homo sapiens
aaaatcttctggtttggctgttactctgggcagagaatacacctcctttgaaagaacaggcacagaccccaaatagagtctggggttactgacaatccccygagggtgctcttttgggaagagctgacaataagggtgtcaccttctaacttttttagcttgcctaacactctttggagtcagggcactctctgcccctag

SEQ ID NO: 39706 - DNA, 201 bp, Homo sapiens
gggactttagattgaaacctggtgtgggacatggcctggagaggggagaggtggagggagatccatgctactgaaaaaggaaaaagtcgtctagttacatmgctgagcaattgtctaagcaggagggattttcctgattatatgccaaaatcttctggtttggctgttactctgggcagagaatacacctcctttgaaaga

SEQ ID NO: 39707 - DNA, 201 bp, Homo sapiens
tgaggggccgggccctgagcccggggaggctgaattattcatctttaatctgcccgcagctgccgccttttcataccggtaacgcgagttctcccggggcytaaattattgatggtcggggtttggagggaggggagggtgagaagtggggctagagatagggagattaacggggtgggcaagggggtaaaagaagaggct

SEQ ID NO: 39708 - DNA, 201 bp, Homo sapiens
gccctgcgcacagtcgcgtggaacgggaggggacaagacaaactgctggacacttttccgtggaatgagaagtggggggtgcgtgggtgggaaggtacctscggagggaaaggccaaagggaaggaccagaaagagaggaaggaagagccgggaaggaacggaagggaactcagagccgagggtggtggggttggggctag

SEQ ID NO: 39709 - DNA, 201 bp, Homo sapiens
agctttggagaaaaggggttcctaatctccagggagcattactctttgactctctagacccaggaatgggctggagctaatggggaagcggccaggagccrgcctggcggaagagtgagtgtccagctagtgcagtgctggggagacgatcccaggagcaggggggactctcaggggctacctgggaatgggactatcaga

SEQ ID NO: 39710 - DNA, 201 bp, Homo sapiens
cacaaataatttatagccttctatttccacccctgagcctgcaccccagccttgcctcctgcttcccccagctcccaggaatcaataaactcacatagccwcggtgggacttcagggtgcaaggagacagacagacagacaaagagaggggaagtggagagaggagcagagaaggagaagaagagagggacagagagtgaa

SEQ ID NO: 39711 - DNA, 201 bp, Homo sapiens
ccacccctgagcctgcaccccagccttgcctcctgcttcccccagctcccaggaatcaataaactcacatagccacggtgggacttcagggtgcaaggagwcagacagacagacaaagagaggggaagtggagagaggagcagagaaggagaagaagagagggacagagagtgaaacacagagaaaagaatggggaaggag

SEQ ID NO: 39712 - DNA, 201 bp, Homo sapiens
gataagactctgctccctctggagacttgcaggaggaaccaggtgaccaagaaactggctcctgtaggaggcttgagcctgggtctaggttggagacagasgccgagaaggcggccagggcatagaggcatccacaggggcccttctgtgggctctgcccaagcgggagctttgctgctctagcgacacctctttcctccc

SEQ ID NO: 39713 - DNA, 201 bp, Homo sapiens
ccgcccgccacggccattaccctgcccgcgacacctgcgcctgagacccggcgggaggagcgggcggagaagccaccggccggactcgtggggtccgcccyggcttgcaggcgtctgatccccactccccgaccctcccgcagggagcgagttctccggcaacccgtacagccacccccagtacacggcctacaacgaggc

SEQ ID NO: 39714 - DNA, 201 bp, Homo sapiens
gcccccattttctcatggttcccgctggagaagtggtaacctcctggccttcagaggattttaaagacatctcccaggaaagaggcagaatcctcaaacartgagcataaaggggtgaccatctatcccattagcccagaacagtcccaatttatgcctgttgtctctgcatcttggccagtcagcatctcagcatctccc

SEQ ID NO: 39715 - DNA, 201 bp, Homo sapiens
acaggcttgttagtgcagcactgaggcccggggacccctcgaggacgcccgcacctcctgccctcccgtgccctccctggtcgctcgaaggctctgcgcckccctcgccctcggatcccctggagggtgcgcagccgggcgtcaccagatcgggtccctctcatgccccgtgaacgcaactattctccggggcaactggct

SEQ ID NO: 39716 - DNA, 201 bp, Homo sapiens; identical to SEQ ID NO: 6814

SEQ ID NO: 39717 - DNA, 201 bp, Homo sapiens
attttctcatggttcccgctggagaagtggtaacctcctggccttcagaggattttaaagacatctcccaggaaagaggcagaatcctcaaacaatgagcmtaaaggggtgaccatctatcccattagcccagaacagtcccaatttatgcctgttgtctctgcatcttggccagtcagcatctcagcatctcccttttct

SEQ ID NO: 39718 - DNA, 201 bp, Homo sapiens
acttgcaggaggaaccaggtgaccaagaaactggctcctgtaggaggcttgagcctgggtctaggttggagacagaggccgagaaggcggccagggcatasaggcatccacaggggcccttctgtgggctctgcccaagcgggagctttgctgctctagcgacacctctttcctcccgcttggtttccctctggcctcagt

SEQ ID NO: 39719 - DNA, 201 bp, Homo sapiens
ggcgacacggcggcggcggccgcgctgctcccgctcctctgcctccccatggatatgcactgcaaagcagaccccttctccgcgatgcaccgtgagtaccsgcgcccggctcctgtcccggctcggggctctccgtcccaaccctgtccagtcccagcgtggccccggcccctcgcgctcaggtcccatcttggaggcctc

SEQ ID NO: 39720 - DNA, 201 bp, Homo sapiens
agaagggtctcggtggggattgggagacactgaggcgttacctgcagagcgaggcaagcggaggtggcctgcggacccagcagcagggctgcagagccagmggcaaaggcagggaacaggcaccgcccactctaggactgggccctggttctgcctgtgagctggtctgagtgcggctgcatttgagcctgagctgggctc

SEQ ID NO: 39721 - DNA, 201 bp, Homo sapiens
gtggaggtccaccacctttcttctcaagctcgggaacatgcccttccgccctgcctgcttccttcgcccgtcccgggccgcggaccctgactaatggccgstccctgctgtgtgtggggtgttgtgtttttttcttgtctctccccagcagggcacgggggtgtgaaccagctcgggggggtgtttgtgaacggccggccc

SEQ ID NO: 39722 - DNA, 201 bp, Homo sapiens
gtgcgtgcttggagagagtgccgggtgtgactgtgtgagcggggagagctctaagccaggcctcagtgtgttgagcgcccatggtcctgggcacaggcatyaccctaccttctgctgataaagggaggggctgtcctgagcctgcctccaggggtggcctagggcccaagactagggagactaaggcccttacagccaggc

SEQ ID NO: 39723 - DNA, 201 bp, Homo sapiens
ggcttcctcagccagatctctgaggcagggccaccctctggtgtcagccccactggcccaggggctgagagtaaggggtcccataggggtgcagagctcckgggcccggaaccagatgcccacctctttgccctgcactgttcctgtgcctctgctggcctggcgctaacgccccgagtgtccatgtgttctccagatgtg

SEQ ID NO: 39724 - DNA, 201 bp, Homo sapiens
cccccgcatctcccctctgccccaccatctctttctaccccatctgggcgggctcccctgttcctcctccccatctgcacaccgagccctttctctgtgcrtgcatcaatagagagctgtcacttttctctctcctcccaggggaacgagtactccctcccagccctgacccctgggcttgatgaagtcaagtcgagtcta

SEQ ID NO: 39725 - DNA, 201 bp, Homo sapiens
tgccatcatccaccaagcccccgcatctcccctctgccccaccatctctttctaccccatctgggcgggctcccctgttcctcctccccatctgcacaccragccctttctctgtgcgtgcatcaatagagagctgtcacttttctctctcctcccaggggaacgagtactccctcccagccctgacccctgggcttgatg

SEQ ID NO: 39726 - DNA, 201 bp, Homo sapiens
ggaggctcttttaggtgggtaggtgattctggggaggtgtgtgctaaaggtaagggagctgttaggtcacccagtgcccatagcctggcttaggagtgccraggtgttcaaggagccctctttatcctccacgtctcaggcaccctgctcatcttcttccccaggactgacagctgcggctgcaaaccttaggggatgagg

SEQ ID NO: 39727 - DNA, 201 bp, Homo sapiens
tggccactgctttcatgattcgtcaggttacgggacccttttggtttctgtagatgtcatttagatacttgatgtgtcccacaggggaattctccaaaaargagatctcccagcactaagctttttagtccgttatttggtactttttaagaagaaaatgttggctaagtaaaagtaaggtcagtcaacccaacatttttt

SEQ ID NO: 39728 - DNA, 201 bp, Homo sapiens
ttatagcaagtgagcaacaaaactaggatttcaatccaggagatgttacttctggtccagcattgtgttagggtcactagtacagttagtgtccctagagrccggtgggtgtgaatgggtacagcaagcctgaggtcagacaggcccacagccaccccagcctctccctattcatgaactcactgagtgtttagaagctag

SEQ ID NO: 39729 - DNA, 201 bp, Homo sapiens
cttccctcccttctcctatctcccttacctctctcttcattcctgaacactccttccttttctatcctcctccactctcccttgtgacccccccacccaakccatcaatcctccctcctctcccagtctggacagcacctgacctctggggagccaccccattcctcagctcccaaacctcactccctgttcccagttgga

SEQ ID NO: 39730 - DNA, 201 bp, Homo sapiens
ctttccatcccttcagcagcttcccagctctggtcctcccacactcttgtcaacacaaagggcccagcttccacctggaaactttccttctgtgcccctgkgacaccttcccagcccagcttctaccacagcttcctcccacttgaaaggctcttgaatctctgagctgccagggatgcaagcaggacattggggcagact

SEQ ID NO: 39731 - DNA, 201 bp, Homo sapiens
ctaagcaaataggaaacagtcagataagaagacaatatgagctttgttatcctcgaaagaataatctatgtcaaagttttgactcagcagtttgtttaatygaattaatttatttacatactatctgtgttccaaaaagacctgtagtagctcacccccttgagagtgctcatgccacagtggacagagcacctggaatgg

SEQ ID NO: 39732 - DNA, 201 bp, Homo sapiens
atttatttacatactatctgtgttccaaaaagacctgtagtagctcacccccttgagagtgctcatgccacagtggacagagcacctggaatggcccagtyctgggagtcccattccccagttgtgtgaccttggaaaagtcactgcccacccctgctagttatggtaacatgaaaaatttggaccagacatcctctaatc

SEQ ID NO: 39733 - DNA, 201 bp, Homo sapiens
aaccaggtgaccaagaaactggctcctgtaggaggcttgagcctgggtctaggttggagacagaggccgagaaggcggccagggcatagaggcatccacasgggcccttctgtgggctctgcccaagcgggagctttgctgctctagcgacacctctttcctcccgcttggtttccctctggcctcagtcctggcccaacc

SEQ ID NO: 39734 - DNA, 201 bp, Homo sapiens
ccccacccgcctcccccccatggccctggaacagtcccagctcagcctgggaacatctccggctgatccatctggatccaagtgtgagaaaagttcatttmagacccagcttgacattcccaggtggcaagttagcactaacatctcaatctgtatgcgacatttcaatcaagcgaggagtaacaaaagcagaaccattaa

SEQ ID NO: 39735 - DNA, 201 bp, Homo sapiens
cagccctgcctggacatatgtcagagatggacagtggccattgtttgtttgcagcatcactttataccaagtcatgcgggttgagggaagaccacgggacrtgggatccaaatgtccagatgtgggtccatctccactccctacttgctctgggaactttgactcattacataatatctctgaatctcagtttcctcatct

SEQ ID NO: 39736 - DNA, 201 bp, Homo sapiens
gaagactggggggcagcctgggggtgaacccctcagaggcggaagtaatgtgtggagtagctaggcagagagagcaccttctgagcagaggccaccatcakaacgggcagagcccccatccccagcacagctggcccctgagccccactgctcccccagcccttgaggcccaaggcccatcacccactggtccccccacct

SEQ ID NO: 39737 - DNA, 201 bp, Homo sapiens
caggagatgctacagaaacataaagggtgctggcattaagtgcccaaaatgtgtaaagggtgctgtgcctccggtttcaccaagtcaggtctactacccgyacaaaacttgccatcatccaccaagcccccgcatctcccctctgccccaccatctctttctaccccatctgggcgggctcccctgttcctcctccccatc

SEQ ID NO: 39738 - DNA, 201 bp, Homo sapiens
attaatactccaccccatggagttttattatagacttttggcatcgggattttattctctgagtcctttttatccacagccatgacgatatgagactttgyttgtcagatgacttcttttccttttctttggctcttttggggagtatctggcttcgtgttattaaaaggcagtgtggtataaacatggcttcaaattttg

SEQ ID NO: 39739 - DNA, 201 bp, Homo sapiens; identical to SEQ ID NO: 6815

SEQ ID NO: 39740 - DNA, 201 bp, Homo sapiens
caatcatgtacatgatttggaaactagatagatgaaaataatttggaaaatttgccccccaaacctaccagtgcatataaaattcaccgaagcctatagcmgcttaatctaaaattgtgatttgttagtaacacagacatgatgcttatcaaatacagctatggcacatgcatgggagaggataagcgtgtttaaaatcac

SEQ ID NO: 39741 - DNA, 201 bp, Homo sapiens
tacaatcaatgtggctggagtatcaggtgccaggggaggggggggggttgtggagggaggtggcaggagatgaagctacaaatgtaattagaacactgtcwtgggcattccaaattgtacctgtcacacacacagctcctttaaggaagctgccctacccacagctacttcctgcccatgtagacaatgtatttgtaccag

SEQ ID NO: 39742 - DNA, 201 bp, Homo sapiens
ggaggatgacccacagagagagtagctgagtcgctaatgaggaggactgagagggcacatgttcctgcctctcctgcagcacagaggattgagactcaaaytgcactgaacacctcaaataactcccaccattccttggggtgactctctgttccttacaactcaaagcacctctcacagtccccgtggggggcatcgaga

SEQ ID NO: 39743 - DNA, 201 bp, Homo sapiens
cttcccaggagggtgccatggcagaagtaccctggctgagaatggggctgcagagggaggagcatcgtagggagggtgacaaaggtaggaagggtttgggstgtcttagcaaagacgtagttctggtgttttctacgctgagctcaaatttggcccttaaccttgggcctttcttcttacctcctcccttcatctcttccc

SEQ ID NO: 39744 - DNA, 201 bp, Homo sapiens
atggtgcctggtaggtgacaatgctgcagctgcctaatctaggtggggggaactaaattgtgggtgagctgctgaatggtctgtagtctgaggctggggtrgggggagacacaacgtcccctccctgcaaaccactgctattctgtccctctctctccttagaggctgcagttggtccctcatcctccctcatgagcaagc

SEQ ID NO: 39745 - DNA, 201 bp, Homo sapiens
agggtttccaggccaggagactgcccaaatgggagagacacgcattgaggtgttattaaaattcacctaattattctggagacactaaagccaatgtgccrtttgttccttgggagacaggatgattgagaagggtctcggtggggattgggagacactgaggcgttacctgcagagcgaggcaagcggaggtggcctgcg

SEQ ID NO: 39746 - DNA, 201 bp, Homo sapiens
tacacataaacagaaagataaaatggtgtctctgagctgggaactatgtggacggggacagggcaagtatagtcatttctgtgactataattttttaaaamctaattttgactttaatgaaaaataaaatttcaattaagaaatgtaaagagacaaccaggtccttgacacatataagcataatgaataagccaaatttgg

SEQ ID NO: 39747 - DNA, 201 bp, Homo sapiens
ctaccatcctgtgtagttctcgtgggactgtcaatcacagtgccccatcagctcctaccacatatttggtcttgtgacgctcctctggccaatgaggaccycatgtccctggccacagcacagagataaaaagttagaaacaatgggagttctctcaggagcgttgttatggagtcctggaagagaggaggggtttttggc

SEQ ID NO: 39748 - DNA, 201 bp, Homo sapiens
agttttattatagacttttggcatcgggattttattctctgagtcctttttatccacagccatgacgatatgagactttgtttgtcagatgacttcttttycttttctttggctcttttggggagtatctggcttcgtgttattaaaaggcagtgtggtataaacatggcttcaaattttggctgtatcatttactagctg

SEQ ID NO: 39749 - DNA, 201 bp, Homo sapiens
gagtctgagtacctactcggggccattcctgatgctggagctgcagaaatgcattagtcacggtccctgccacaaggtgctctttgactggctgctgggcmtgggggcaaaggggctgttggataggggatcttctttgaaatggatggtgtctaatcactcacgcgctctccttccctgctcactagattaagatctgct

SEQ ID NO: 39750 - DNA, 201 bp, Homo sapiens
gggcctaaattattgatggtcggggtttggagggaggggagggtgagaagtggggctagagatagggagattaacggggtgggcaagggggtaaaagaagrggcttcagtctctcccagcaacgcgatcagaggtctttccccagggtttcaccgagcttgctctaggtaccccccgagaaagggaggggagagaaatgag

SEQ ID NO: 39751 - DNA, 201 bp, Homo sapiens
agaaggttctttttggccgagggctgtgtggacaagcctgtggttgaggcagagggtggaaggcagggatgtgaagagaagctgctcatgatggacatgargggcctgaaagaatggggtggaggcatgtggggaggggtggagaggaaccagaaaattctgcttgggagaggaaggtcttgaagggacagggtccactag

SEQ ID NO: 39752 - DNA, 201 bp, Homo sapiens
ttgcactccctggaagacgtgcaccccactttggagatcctggtcataacccatgaaaacccagcatggcagaactcctgactattgcctggtgcccagcragtacgtttctggaagttgccagggcactggcttgggccagggcagcccagtgaacactgccctcatcatatatagtgggtaccagacccccagtgcctg

SEQ ID NO: 39753 - DNA, 201 bp, Homo sapiens
ttccaggatcaaaattcaataccttcttctttcttggcttaaacaaatttgttgggtctgtcatttgcaaccaaaaaagttctgatttaagcagttctggragacacacatgctctgttaagagctttggattttttatttttttcccctagaggcaacgagagctatggaaagtttttgagcagagagaatagcttaata

SEQ ID NO: 39754 - DNA, 201 bp, Homo sapiens; identical to SEQ ID NO: 6813

SEQ ID NO: 39755 - DNA, 201 bp, Homo sapiens
gactaggggctgaagggagttagaggtgtgggtaaagggattcctgcccagatttaggggaaggaaagtagaagccttgttgggaggcaaggagattttarggagaaactcccagcagtgagcaggtgggggctggaggaggttttaaagaggtggggtgagggaagagtggggaggtgggggcagggagtctgcagggag

SEQ ID NO: 39756 - DNA, 201 bp, Homo sapiens
aataaggggaatctggaggggttaagggggttccaggaggtccaggagaggataaagagattatggcagaggggagaaagcaaattattattagagatcasagcatgctaaattgcaaagggaggtggtggccccttcatagccatggaggatgcaggcaaggtagggagcccagtcatgtgcagctgtgtcccagaggac

SEQ ID NO: 39757 - DNA, 201 bp, Homo sapiens
atgaatctgtttttattccagttaggtttgaggtaacagagggacagccaaggaaaatgttcagcagggtactagaaatgcaaaaacctgagctgtagctytgtatagctagggaaggataaatcactcagacgtgtcaaggtagggatgaggaaactcatacagctctggaatgcagggaggtgaggccatcttcaaagg

SEQ ID NO: 39758 - DNA, 201 bp, Homo sapiens
cccttcctcctttatccagtccactgatagaggtaaaggatatggaaaagaagaggccctaatccactgtcgggatcagagtcaggccatatttgaccagmataaaagctgtgccacctcaatctcaggtcccaatcccatgtccttgtctgtgcctaccggccaccctgtgctgctgggctgcccttcccaggagggtgc

SEQ ID NO: 39759 - DNA, 201 bp, Homo sapiens
gcctggcttaggagtgccgaggtgttcaaggagccctctttatcctccacgtctcaggcaccctgctcatcttcttccccaggactgacagctgcggctgmaaaccttaggggatgagggaatgccctagcccaacctgaaaagccagaccttattgagattcctgccacctcctggccctggaggctgatttcaaacttc

SEQ ID NO: 39760 - DNA, 201 bp, Homo sapiens
tggtcctggtcttgatctctgtctctctctccctctctttctctctctccttctctctctctctctctctccttctctctctctctctctcacatacacayacacacacacacacacacacacacacacacacacactttctttgctttcccaccccctccagaatagatatggagggaagatgggaggtcacattaggaa

SEQ ID NO: 39761 - DNA, 201 bp, Homo sapiens
taggcacaggagaaacggggcatgtggcctcacagtcctcatgcaatcacacacagacacacacattctttcaggaagcttctcattctatttccacacaygcagacccttgtttatctggacgtttatatatgtacaagcgcgtagacacgcaatactcacacaaaagggaaaaataaatttaccacacttcaactttca

SEQ ID NO: 39762 - DNA, 201 bp, Homo sapiens
agggttgtcggaaggattaaatgagctctgtaaataacagcaatggcatgtaatgagttcttgatacttgtgagctgctacagaatgggagctgggcaggrggcagacggagaatgaggctgaaccctccctctatggggactgactagcacacggtcccttccttgctctgtttggtcttattaaacccacagccaccat

SEQ ID NO: 39763 - DNA, 201 bp, Homo sapiens
ttggaaaagtcactgcccacccctgctagttatggtaacatgaaaaatttggaccagacatcctctaatcatctgggcacagtctgcactcagccagcacmtgtgccacaggctgtagcctccatttggggagggtgccaggcaaagaacgagggatgccgagaggaaggctgtgccctggatggagccaagtggccttca

SEQ ID NO: 39764 - DNA, 201 bp, Homo sapiens
cctgagttcacatccaggctctgctgcttcctagctgtgcagtgttgaacaaataattttgcctctctaagactatttccttttctagaaaatgagagtartaataagtacctcgtaaagtttgaagaggttgatgagtgtaggtgaaagccctaatatcattactttctccatagacagatagatgtttgtatttgagct

SEQ ID NO: 39765 - DNA, 201 bp, Homo sapiens
ctgacaagacagtgatgacctggcgctggcctccttccagaagccctaatggcctcgtttcacagggaaacagcttgtctggctctatttctccttcttcyaaaatatccaaaccgatttggccgccacggcctttgccattcactaaatttcattgtggttgttttggcggcggcccctgatgggcagggggaggttgtg

SEQ ID NO: 39766 - DNA, 201 bp, Homo sapiens
gaggaaagtaaatgtgctggtacaattccccggggttctaggtttcctccatatctccctcttctctaccggttggttaggaaatgccagggccctaaggsgcccctcagacaatccctctgtcctcggcagttttcagtgagctaagagtccttgactgctttggtgtgtaaatcggtaggatactgaggaaactgacac

SEQ ID NO: 39767 - DNA, 201 bp, Homo sapiens
agtgggccaggacacagctaatcacattgcaagcaagggtggctgccggaggctagggctcagccccatagcctcccctccccaccttccatcagggaacsgaggagagagactgattttgctgggtagtgtttgcaagttctgccgagattttaatttcactgcatcacaactcagcaagctgccaagtcaagctggtta

SEQ ID NO: 39768 - DNA, 201 bp, Homo sapiens
caaacaggatcatgggggtggacagctggtagattccagctctagccagaagctctgacagatgagggcagggccagtggtgagaggcgctagtctgtcaygctctgggcttggcatgcaccacagactggtttccaaatggttagttaaacacattgccccttaatttttaaacctatgcatatcttgaagttaaatcaa

SEQ ID NO: 39769 - DNA, 201 bp, Homo sapiens
agctacttggcatttaataattctctcatttccacatccccctcccccaccccatcctggccatagacagagagatacacaggtatacaaatgcacatttwtgtacgtcaatactggtgcatggaccaatataaaaacacgattgtgatgtgaaaatctcaaacaccccaggaagggaacaatgatggtgtagagtctcgc

SEQ ID NO: 39770 - DNA, 201 bp, Homo sapiens
cagcccttgaggcccaaggcccatcacccactggtccccccacctccacgcttttctcttttcttcccatatcactttttgaggtcattttctgcctgcgkatgaagactcagttttcccaagactgcttcttgccagctgtgcaatcttgcacatattttgaactctccctgagcctgtttcctcgtttgtaaaattgaa

SEQ ID NO: 39771 - DNA, 201 bp, Homo sapiens
tcatcctctcttcttccctcccttctcctatctcccttacctctctcttcattcctgaacactccttccttttctatcctcctccactctcccttgtgacycccccacccaatccatcaatcctccctcctctcccagtctggacagcacctgacctctggggagccaccccattcctcagctcccaaacctcactccctg

SEQ ID NO: 39772 - DNA, 201 bp, Homo sapiens
tcaattgctatcaagccaggtctaccccattctgcacttgtgtaattgatttttttttagcctaaacatagggcattccatttatccctgctgaatttcaycttgttggtttgggttcttaattctacccgattaaggtcataaggatgtcttctatatcatcatccaactagttttttgcaaaagagttattttccttga

SEQ ID NO: 39773 - DNA, 201 bp, Homo sapiens
aacagttctgcctgaaaggccacagccctgcctggacatatgtcagagatggacagtggccattgtttgtttgcagcatcactttataccaagtcatgcgrgttgagggaagaccacgggacgtgggatccaaatgtccagatgtgggtccatctccactccctacttgctctgggaactttgactcattacataatatct

SEQ ID NO: 39774 - DNA, 201 bp, Homo sapiens
gattgagagaggccttggctgggctggatggtgacaaggcagagtgtcagattcttaagggtcatcctgtcttatctgccactcaccatagaactctttcytccaacagttctgcctgaaaggccacagccctgcctggacatatgtcagagatggacagtggccattgtttgtttgcagcatcactttataccaagtcat

SEQ ID NO: 39775 - DNA, 201 bp, Homo sapiens
aaatgcccagacacatggctgtgtgttccataggaatctggggaaatggactagaagggcaagcaggaaatggggcttcagcctgggagcctgggagtggmtgagattgagagaggccttggctgggctggatggtgacaaggcagagtgtcagattcttaagggtcatcctgtcttatctgccactcaccatagaactct

SEQ ID NO: 39776 - DNA, 201 bp, Homo sapiens
aaaacataacaggaaattaatggcctttactgtcgctctgatgcagtcatttgcaaccctgctttccgcaccaaagacttcataaattcaagcagtttctmtaaacaagcatacttagggcggcctggtatgtaatttttcgccttgcttgtgtcctttgagctaacaaagccccctttcctcttggttccagagatttct

SEQ ID NO: 39777 - DNA, 201 bp, Homo sapiens
cccccaacacaagaaaacataacaggaaattaatggcctttactgtcgctctgatgcagtcatttgcaaccctgctttccgcaccaaagacttcataaatkcaagcagtttctctaaacaagcatacttagggcggcctggtatgtaatttttcgccttgcttgtgtcctttgagctaacaaagccccctttcctcttggt

SEQ ID NO: 39778 - DNA, 201 bp, Homo sapiens
tacacacacaaaaagaaaaccccagccctggcggtgtggcagtgtcagctctcgctgttgttcgacagtgtaaaattaaattaataaagcccccaacacargaaaacataacaggaaattaatggcctttactgtcgctctgatgcagtcatttgcaaccctgctttccgcaccaaagacttcataaattcaagcagtttc

SEQ ID NO: 39779 - DNA, 201 bp, Homo sapiens
cctctctctttaacactctctccctctctcacatggatgtgcaagcaattgaaaagacaaaggaaatagccttaaggaagagactttactgctagtctgtkctgagattgctccccctgcttccagatagataaaccaattacctgagcagctctgctcctggccgcccgcgatcgcctccttttgtaggctgcctccatg

SEQ ID NO: 39780 - DNA, 201 bp, Homo sapiens
ggcctctctggggatctttgtatcaatgtgggcccaggtgcccagtgtgttgggaggtatgagaggagcagagaaccgggatgtgactctcaggagcttakagcctgctggggaaggcaaggctgttgcactcagacaattggctgttcattaaatgcccagacacatggctgtgtgttccataggaatctggggaaatgg

SEQ ID NO: 39781 - DNA, 201 bp, Homo sapiens
actctttcctccaacagttctgcctgaaaggccacagccctgcctggacatatgtcagagatggacagtggccattgtttgtttgcagcatcactttataycaagtcatgcgggttgagggaagaccacgggacgtgggatccaaatgtccagatgtgggtccatctccactccctacttgctctgggaactttgactcat

SEQ ID NO: 39782 - DNA, 201 bp, Homo sapiens
ggcgggctcccctgttcctcctccccatctgcacaccgagccctttctctgtgcgtgcatcaatagagagctgtcacttttctctctcctcccaggggaaygagtactccctcccagccctgacccctgggcttgatgaagtcaagtcgagtctatctgcatccaccaaccctgagctgggcagcaacgtgtcaggcacac

SEQ ID NO: 39783 - DNA, 201 bp, Homo sapiens
tcccagccctgacccctgggcttgatgaagtcaagtcgagtctatctgcatccaccaaccctgagctgggcagcaacgtgtcaggcacacagacatacccmgttgtgactggtaagggggcttccaggagggtgggggcactgcgttcagtggagggtgcctcagcccatgccatctgaggcccagtgtgaggagcaggtc

SEQ ID NO: 39784 - DNA, 201 bp, Homo sapiens
cctgtgagctggtctgagtgcggctgcatttgagcctgagctgggctcagtggccacccagcctccacctgggggcttaggagagccctgtcagttttccyagcctctccctaaggggctgtactggtacaactgtttccagcctagatctttggctagggagtcagaggttgaattctagaagtgttggagacctggact

SEQ ID NO: 39785 - DNA, 201 bp, Homo sapiens
ggcagagctggagtgcgggagaggcccttagtgtatttgtggacactgacctcaaagagtctttaaaagcttattttcttggcaaatattaagggctttgstgggagaagagaaaaggaggctcttttaggtgggtaggtgattctggggaggtgtgtgctaaaggtaagggagctgttaggtcacccagtgcccatagcc

SEQ ID NO: 39786 - DNA, 201 bp, Homo sapiens
cgtggtgtcaccgtgtgaggtgacatttgaatttacaattccgctgagaaaagccattaattcacaaattaacatttctccctctccctctctctttaacrctctctccctctctcacatggatgtgcaagcaattgaaaagacaaaggaaatagccttaaggaagagactttactgctagtctgtgctgagattgctccc

SEQ ID NO: 39787 - DNA, 201 bp, Homo sapiens
atgcaagtgtgagtatgcatgtgttctaccgctctgaggtctttgggtataaggggatgggaatgtcatgcactgggaaggtgtgcagttacctgggtagkgtgcgtgcttggagagagtgccgggtgtgactgtgtgagcggggagagctctaagccaggcctcagtgtgttgagcgcccatggtcctgggcacaggcat

SEQ ID NO: 39788 - DNA, 201 bp, Homo sapiens
ctatctacaatcaggctgaaaactggaagtccttcgcctttacccagttgctttcggctggggcccaaaacattgctgttcatcggtgatggtattgaagmgcagggcagttacacaacttgtccaagaatccaaatgaagtcatatggtgagaatctgctggtctgtgtgagggaggtgtgttgggatcatcctttgagg

SEQ ID NO: 39789 - DNA, 201 bp, Homo sapiens
tgtgagctggtttatgtggctggaggagagagattcttgtatttccctatctacaatcaggctgaaaactggaagtccttcgcctttacccagttgctttyggctggggcccaaaacattgctgttcatcggtgatggtattgaagcgcagggcagttacacaacttgtccaagaatccaaatgaagtcatatggtgagaa

SEQ ID NO: 39790 - DNA, 201 bp, Homo sapiens
gagaggaacaggtaagccaccaacaacacgggcagcctaccctgggtccgtagttaggcttcatggctggctttgtctacaaggagcaggaaaactattcycaattttgcttttgtccagaatcctctcatggttcatattttggaaagaattctgggggcttccctgtgtgctgctgagttggggctggagaaatccacc

SEQ ID NO: 39791 - DNA, 201 bp, Homo sapiens
ccagactggccctcctttggccccaagcactgtggcatcttcctaggagtgtcataccccaagggcaagctgtgaatctctttgtcctccaggaagctgcycctcttttgctctgggtacagttcggcctattcttcagctctaacaatgtcacggtgatgggcattagtgaggacaatcactgcagtgagtgctggcatt

SEQ ID NO: 39792 - DNA, 201 bp, Homo sapiens
cagggatagaaggcacaaagagatgtggtggacagtaaggctgaggagacaggttagggccacaggatagcaggccaggtctagaccatagaaggagtttrggctttttttttttttttttttctgaaagcaggagtagtctgagcaggaagggacaggagcagggctgggtttgggaagctcatgctccagcagtgtgac

SEQ ID NO: 39793 - DNA, 201 bp, Homo sapiens
gataggcccatcagatatcctgttgcgatggaggtctggtggcgggccacaggaactgggctggggagggagtacatggccaggaagggctgctctttgargaggggcctgagggatgaagaggagaatgttcagagacaatggtagcctgaaattctatctgatagactgagccttgtgaccagaaggccctttggccag

SEQ ID NO: 39794 - DNA, 201 bp, Homo sapiens
cgctggcctccttccagaagccctaatggcctcgtttcacagggaaacagcttgtctggctctatttctccttcttccaaaatatccaaaccgatttggcygccacggcctttgccattcactaaatttcattgtggttgttttggcggcggcccctgatgggcagggggaggttgtgggaaaggccctaagtcccagttc

SEQ ID NO: 39795 - DNA, 201 bp, Homo sapiens
ggcgtgagccactgcacccagccagtagtgtgatcttgagtgagctacttaaacttgtctcagctttggttttcaatttgcaaaatgaggataatagtctytactttggaggtggttgtgcgaattaacagtaatatatatgtcatataaattgtgtataatattggcacatagtagatgttcagtaagtggaaaatggtg

SEQ ID NO: 39796 - DNA, 201 bp, Homo sapiens
atcactcatggcttaaggccctctaaacctggttcctacatgttgggggcaggatgacaaagtaacaaaaagcatagattttagaggctgcattctgagtyttccctaattggtactgtgattttttttttttttttttttgagacggagtcttactctgtcgcctaggctggagtgcagaggcacaatctcagctcactg

SEQ ID NO: 39797 - DNA, 201 bp, Homo sapiens
gtgttctccagatgtgtctgagggctcagtccccaatggagattcccagagtggtgtggacagtttgcggaagcacttgcgagctgacaccttcacccagyagcagctggaagctttggatcgggtctttgagcgtccttcctaccctgacgtcttccaggcatcagagcacatcaaatcagaacaggtgaggagggagct

SEQ ID NO: 39798 - DNA, 201 bp, Homo sapiens
ttagaaatcactcatggcttaaggccctctaaacctggttcctacatgttgggggcaggatgacaaagtaacaaaaagcatagattttagaggctgcattytgagtcttccctaattggtactgtgattttttttttttttttttttgagacggagtcttactctgtcgcctaggctggagtgcagaggcacaatctcagc

SEQ ID NO: 39799 - DNA, 201 bp, Homo sapiens
tgctttactgggatctgtttgtagagatcccccctagtttagaaatcactcatggcttaaggccctctaaacctggttcctacatgttgggggcaggatgmcaaagtaacaaaaagcatagattttagaggctgcattctgagtcttccctaattggtactgtgattttttttttttttttttttgagacggagtcttact

SEQ ID NO: 39800 - DNA, 201 bp, Homo sapiens
caaattggagccacattttccttcagttatttgcattgtaacactctatagtccagttaaccctggataagaggggctttgctacaatgatgccacaagakctgtgcgaccagctgtccatccttactttgatacttgggtccaagccctgttggcaggattagttagggaccaattgcataagcagccaagaaggcgctc

SEQ ID NO: 39801 - DNA, 201 bp, Homo sapiens
tccctatcgcctcatgcctcatgtatatgtatgttgctttactgggatctgtttgtagagatcccccctagtttagaaatcactcatggcttaaggccctytaaacctggttcctacatgttgggggcaggatgacaaagtaacaaaaagcatagattttagaggctgcattctgagtcttccctaattggtactgtgatt

SEQ ID NO: 39802 - DNA, 201 bp, Homo sapiens
tacctctgtgtgcctgctgatgcaggggcattgcccctggacgctcctctttcacctcaaatgctgcacatctaggaccaacatcaccacttccctccaaraccagtcacctccctatagccttattcctgacctgctgatgtaaactccaccaagcttccagttacacaaatctgagtttgtaaaaccatggttgactcc

SEQ ID NO: 39803 - DNA, 201 bp, Homo sapiens
tagctgcccgttccatcctccaccttccatactttcctctcctttcgttttccaaaaacttctgaggcaatagtctccgtttactgccctgcctccttttmctccctatgcattccctaaccttgttctgtctggctcctgctccagtcgctttgctgagactcctcctcaaggtcactaatggctaccagaatcccaaat

SEQ ID NO: 39804 - DNA, 201 bp, Homo sapiens
ccagtgaccctagtggggcttggtccagcccccagtctgtctgcttgagagtctgacgcaacctccttttgggtcagatgtcgctgccgccactgctgctrtttcttgtcttctcaatgctcttcccagggtctcagtggcacctgcattgaccaggctggggcatactgggtagggaggtctcctgcctgcatcggccta

SEQ ID NO: 39805 - DNA, 201 bp, Homo sapiens
ctcctgtggatccttgccagtgaccctagtggggcttggtccagcccccagtctgtctgcttgagagtctgacgcaacctccttttgggtcagatgtcgcygccgccactgctgctatttcttgtcttctcaatgctcttcccagggtctcagtggcacctgcattgaccaggctggggcatactgggtagggaggtctcc

SEQ ID NO: 39806 - DNA, 201 bp, Homo sapiens
tggagtgcggtggcgcgatctctgctcactgcaactttcacctcccgcgttcaagcaattctctgcctcagcctccccagtagcagggattacaggcatcygccaccatgcccggctaatttttgtatttttagtagaggcgaggtttcaccatcttggccaggctggtcttgaacttccgacctcatgattcacttgcct

SEQ ID NO: 39807 - DNA, 201 bp, Homo sapiens
gtactccagcctgggcaacagtgtgagactccatctcaaaaagaataaaataaaataaaataaaataaaataaaataaaataaaataaaaaaataaaaaamaaaaaacaagagtatattattgttattattattaataataatattcatttgttattgaacaaatagctatcaagtacttacattataccagacaccattg

SEQ ID NO: 39808 - DNA, 201 bp, Homo sapiens
aggcttggagattcagcaaccccgccttactaagtgagtacgccacctggctggccggcggctcagcgcggccgcgcggcttctgggcacggtcccactcscggcgacccgacctctggggacccggccgggccagggggacaggcttgttagtgcagcactgaggcccggggacccctcgaggacgcccgcacctcctgc

SEQ ID NO: 39809 - DNA, 201 bp, Homo sapiens
tggaggaggttttaaagaggtggggtgagggaagagtggggaggtgggggcagggagtctgcagggaggtggggaagaggggagccgcagagagctcgtgrtgtcgaggggggagtcgttaaacagaatctagtgctgatgaggaaattacacttgtttcattagcgatggggaaggagatagctcagttcctcttggtca

SEQ ID NO: 39810 - DNA, 201 bp, Homo sapiens
ttgagcgtccttcctaccctgacgtcttccaggcatcagagcacatcaaatcagaacaggtgaggagggagctttctgcttgcagaagtagaaaggagccrgcagagcaaggcctctcaaaaacttgttcactaaacaccacatgcatagccagcattgtatgtgttacacacgtgtgttctgtgtgtgtgcagtgtgaac

SEQ ID NO: 39811 - DNA, 201 bp, Homo sapiens
ctccagccagtgacctgaggacaaagcttcagttcagcccctacacacacacacacacacacacacacacagacacagtgagccaagccacacacagacargcatatacacaaatctacacagaggcatgaggagagtcctgccacacatgcacacacataatgtgtgaacacacgctcacaaatacaccctctctgcccc

SEQ ID NO: 39812 - DNA, 201 bp, Homo sapiens
ggagccgagggcactgtgggccacctggggcagccagcttgtaggagccgcctgggtgagggacagtgtgggtggtcttgggcagtgggtatgtggtccasgcagcaaaagggaccagaatgctatacaaaggaacctctagggacttgctttttcttcggatgctggggatccatttttctctggcattttggtctgaac

SEQ ID NO: 39813 - DNA, 201 bp, Homo sapiens
ttagaggaatggggggggagtgaaaatgggtccccgagaggagaagcagcagcatttgggaggcagaaggagggtcctggttcccacagatgctctgtgcscagtaggaaagggctcgaggtggtgcctcaaccctggcctcccagagaccttgcagcgctgttcgttttgctcttcccaagtgaaaggctgggctttcac

SEQ ID NO: 39814 - DNA, 201 bp, Homo sapiens
ttcttgcttccccccacccctctactagactctatagaagaaagagaacagaaaagggggagtcagaggagcggccagtgactggatgaaggccagccctycatcctggagccccaggagaaggcagagctttggagaaaaggggttcctaatctccagggagcattactctttgactctctagacccaggaatgggctgg

SEQ ID NO: 39815 - DNA, 201 bp, Homo sapiens
tgtactccagcctgggcaacagtgtgagactccatctcaaaaagaataaaataaaataaaataaaataaaataaaataaaataaaataaaaaaataaaaamcaaaaaacaagagtatattattgttattattattaataataatattcatttgttattgaacaaatagctatcaagtacttacattataccagacaccatt

SEQ ID NO: 39816 - DNA, 201 bp, Homo sapiens
tgccattgtactccagcctgggcaacagtgtgagactccatctcaaaaagaataaaataaaataaaataaaataaaataaaataaaataaaataaaaaaawaaaaaacaaaaaacaagagtatattattgttattattattaataataatattcatttgttattgaacaaatagctatcaagtacttacattataccagac

SEQ ID NO: 39817 - DNA, 201 bp, Homo sapiens
aaacaggtatgtattggtaccaagggctcagaaatgtctcagtggcctcaaagccacctaggcaagacctgaaaacctgtttcccccagagggccggccayctccaaggtgacaggaagaccccccacttttttcccagggtagccagaatcccttccacctccacaattagctgtagcctcaggacaaacaagctagtgc

SEQ ID NO: 39818 - DNA, 201 bp, Homo sapiens
ggctcatgcctgtaatcccagcactttgggaggctgaggtgggaggattacttgaggtcaggagtttgagaccagcctggccaacatggtaaaaccctgtstctactaaaaatacaaaaatgagctgggcgtggtggtgtgcacctataatcctagctactcaggaggctgaggttgcagtgaacctgggaggcagaggtt

SEQ ID NO: 39819 - DNA, 201 bp, Homo sapiens
tttaaaaaaggggcgcccatacccgatcagccagcagtgccaggctgaaggccccactaggcccttctcccagctactggctctgccagtcatgtcatggytccccctcctccccaaggctcctcgacatcccatgcctctcaacaagggtatccccactactacaccctacccgcaggggtgcttaggcaggagatgcta

SEQ ID NO: 39820 - DNA, 201 bp, Homo sapiens
atcgtgccactgcactctagcctgggcgacacagcgagactccatctcaaaaaaaaaaaaaaaaaaaaaaagatcaaaggaagtatcagctgtatctttaycacagatccagatcccccagtcccttcccaccactgctcaccaaattgtcagataatggagatcaaaaagggcaaagaatgaggaccatacctatagatt

SEQ ID NO: 39821 - DNA, 201 bp, Homo sapiens
cattagactattaaacaccagcacagtcatttttccccctgaaactcggagcagggcccataaagcaaatccgaagcctaattgagttcattttaatttckctccgatcacagcgaattactctggtgataaatcagggggcagcttcacccccagtagaaggcctaatttgcagctaattacaaaactgatttctacagg

SEQ ID NO: 39822 - DNA, 201 bp, Homo sapiens
cagtgtccagcctccacacttgggtctccaaggctcctgggggacccgcttaccgctccctccaggcagcatgggtgatcatggctttgggcttgagggcrtggcacccagctctgtggagtttgagatgagtacaattattccagccttcctcctgcttcccagagaggtcagtgacaccaaggcttgatttcaaggcca

SEQ ID NO: 39823 - DNA, 201 bp, Homo sapiens
ggttgggggaaggtggttttattcaagagcttgggagaaatgtctcttaattgctgaagactgcagttttgaaggaagctgtaattaagatccaggaagasatgtggatgctgcccaagagggaagtgcccaaggcaggaagagggagcagaagaggctggtctcccagaagctggctgatttgagcagaggtaggggagg

SEQ ID NO: 39824 - DNA, 201 bp, Homo sapiens
cccaaacctaccagtgcatataaaattcaccgaagcctatagcagcttaatctaaaattgtgatttgttagtaacacagacatgatgcttatcaaatacarctatggcacatgcatgggagaggataagcgtgtttaaaatcacagctacctgtgctctctgttaattgtctacatatataattgctcaattttccaaaat

SEQ ID NO: 39825 - DNA, 201 bp, Homo sapiens
ttccttctaaaaggtaaaatgttgagcataacaagttaagaactgaccaatctttgcttttggaattcttgtcaacaaatcagccaacattcatgatcacyttctctacatgaagtttataaagttgaaaactatgggacccctgccttcaaaattcacagttcagaggagaaaacaaacattaaataataactgtgatac

SEQ ID NO: 39826 - DNA, 201 bp, Homo sapiens
tccccttcctctacccagccctaccttctgtggccattccagagccaaagccctcatgctgggtgttcacggagtatcgattcagtctgcaagcaattttratatttcttcagggactttccagcaacagcacaagtcattaattcaccctcccaaattgcttattcaatagcaggaacatggctcctgaataaagtccca

SEQ ID NO: 39827 - DNA, 201 bp, Homo sapiens
tcaaagcagaaacacagacactgccaccaaacaatactcaaattcctccaactcagtgttacacaaagtgcagccacctcaatacaataccacaaaacacsaagtaacaaacattaagctagctgccggaatgcgtcaacacaatgcaataatacacggtaatgcacaacacagttcaaactctgtatcccataggcacac

SEQ ID NO: 39828 - DNA, 201 bp, Homo sapiens
agcatcccatcctcgtggaattatggtctcttttagaatctcttgccatggaatccctggccatgtctttcccccagcatggagcattttgctttcttcarttcagattctgccctgcacccccttcctgagctactgccaactctagacatgcttgctttctccctgcatccccatcatttccctttcatcagtttttct

SEQ ID NO: 39829 - DNA, 201 bp, Homo sapiens
cagccctcttgtatatgtctgaggaaactcaatccagaaaagctcaggagatttatagcaagtgagcaacaaaactaggatttcaatccaggagatgttayttctggtccagcattgtgttagggtcactagtacagttagtgtccctagaggccggtgggtgtgaatgggtacagcaagcctgaggtcagacaggcccac

SEQ ID NO: 39830 - DNA, 201 bp, Homo sapiens
atcttatggctgctttactcagaaagcctttatatttatcatcatcatcatcatcatcatcatcataagtggttaacaagtgcttactacagtaggaaccrttacaagcatgtttcatgcattaattgatttaagcatcctaaacaaccccatagggctttataggattgttatagatgaggtagctggagtacagagaag

SEQ ID NO: 39831 - DNA, 201 bp, Homo sapiens
tgtgttttccattattgacaatggtgttccagaagaatatatggcaagagtttggtcaattttttctgctctttaagtgtcacctgtgtgctaatgaagcmattgagagtgctttgtatgcagtggccagcacctttgctggctcaggggtcctgaacagggtactcctttgtggagatactggtgttatagactccgcag

SEQ ID NO: 39832 - DNA, 201 bp, Homo sapiens
aatcatgtacatgatttggaaactagatagatgaaaataatttggaaaatttgccccccaaacctaccagtgcatataaaattcaccgaagcctatagcarcttaatctaaaattgtgatttgttagtaacacagacatgatgcttatcaaatacagctatggcacatgcatgggagaggataagcgtgtttaaaatcaca

SEQ ID NO: 39833 - DNA, 201 bp, Homo sapiens
tcttgccattttcacctaacattacttaatataggaccattttcacatatcattaaatattctttgaaaacacgattttttaatggctgcataatcttccrctgttcgatgtacatgtccttttaaaatctgggatcatcatattttaaagcttatctgtgtgcaacaacagtgattttccttaaatgtccttctcttttc

SEQ ID NO: 39834 - DNA, 201 bp, Homo sapiens
cagatgcagggccagatgctgccctctgtgtggacataggcagtggtgagctctgtcaatccccagcccctgccactgcccagatggcagggagagaactwccctctgcccctgtgctacctggctgcaatttttgcacttctctgcttaaaacacacacacacacacatacacctcttaatttgtcttaggattttatgt

SEQ ID NO: 39835 - DNA, 201 bp, Homo sapiens
atatgatcaatgaacacaataattcaaagcagaaacacagacactgccaccaaacaatactcaaattcctccaactcagtgttacacaaagtgcagccacytcaatacaataccacaaaacaccaagtaacaaacattaagctagctgccggaatgcgtcaacacaatgcaataatacacggtaatgcacaacacagttca

SEQ ID NO: 39836 - DNA, 201 bp, Homo sapiens
atgaatgccgtgatcaaggcatgaagtcatatgatgaacgaaaaaaacaaaggagcagttgcttccactcagggcaactagggaagtgtttatgagggagrtatttgatctaagcgttgatatggagtaaatatgccacaacttatttttgtgagtgcgtgcaagctctgggatatcaccattttcttttctgttgcccat

SEQ ID NO: 39837 - DNA, 201 bp, Homo sapiens
tttaatgagcaaaattagaatcctgaaagctcaatcatccttacatttttcttgtagtacgaaacaagtcaagggctgcctattcattaccagatgcaggrccagatgctgccctctgtgtggacataggcagtggtgagctctgtcaatccccagcccctgccactgcccagatggcagggagagaactaccctctgccc

SEQ ID NO: 39838 - DNA, 201 bp, Homo sapiens
tgacaatggtctactagttgttcgttcaaagacctttccaaataagctgggagctattaatcctagccccgtgaatgttgaagatatgttccgggctaggrtctgtttctccctctctgaaactcaggttccagaacattgcctattctactcttggacctggcttggcatgaagcttggccagaggggtggtactgccta

SEQ ID NO: 39839 - DNA, 201 bp, Homo sapiens
caccttcatatccagcactgtgagctaggggccttatcccaactgcctgcaagtgttcaggaaaagcttttagagctgacttgctcatggcttgtgactcwcctggctggttgaggtgagcttggctcacatgcctctctgtggggacaaggaacgctatcagaaaagtggcttccaaaggcccctcatttgaccagtggg

SEQ ID NO: 39840 - DNA, 201 bp, Homo sapiens
cgcaacctccttttgggtcagatgtcgctgccgccactgctgctatttcttgtcttctcaatgctcttcccagggtctcagtggcacctgcattgaccagkctggggcatactgggtagggaggtctcctgcctgcatcggcctaaattgaaagcacccgggcctaggggtcacccataggaataataatactggtcatca

SEQ ID NO: 39841 - DNA, 201 bp, Homo sapiens
tcctgtggatccttgccagtgaccctagtggggcttggtccagcccccagtctgtctgcttgagagtctgacgcaacctccttttgggtcagatgtcgctrccgccactgctgctatttcttgtcttctcaatgctcttcccagggtctcagtggcacctgcattgaccaggctggggcatactgggtagggaggtctcct

SEQ ID NO: 39842 - DNA, 201 bp, Homo sapiens
gtgcagctatccccagtgcagctccccagccatgcagttgagtccagagaaggggaaagggctcctgaaactgagatgtgggaaatagagtctcacaaccmatgcccaaatagcaagtgaaatattagacagctgaaacattaaatcacgtttggtttttctatctaccactgaactactaggttgagatggttttctctt

SEQ ID NO: 39843 - DNA, 201 bp, Homo sapiens
ggattgagactcaaactgcactgaacacctcaaataactcccaccattccttggggtgactctctgttccttacaactcaaagcacctctcacagtccccrtggggggcatcgagagtgcatccctccttccattgggaagctgcccctctaccatcctgtgtagttctcgtgggactgtcaatcacagtgccccatcagc

SEQ ID NO: 39844 - DNA, 201 bp, Homo sapiens
atggctgcataatcttccgctgttcgatgtacatgtccttttaaaatctgggatcatcatattttaaagcttatctgtgtgcaacaacagtgattttcctkaaatgtccttctcttttcacccctcccccactcccactccctttatgctgtcaggttgattatttgagcttatagaagcagaatttcatttttagagcat

SEQ ID NO: 39845 - DNA, 201 bp, Homo sapiens
gctaacgccccgagtgtccatgtgttctccagatgtgtctgagggctcagtccccaatggagattcccagagtggtgtggacagtttgcggaagcacttgygagctgacaccttcacccagcagcagctggaagctttggatcgggtctttgagcgtccttcctaccctgacgtcttccaggcatcagagcacatcaaatc

SEQ ID NO: 39846 - DNA, 201 bp, Homo sapiens
attgcttgaggaattcaaggttggcattttctaggcttcatggcattttcgtaggttgtggtgctttgcattttgtagtttttttaaaagataaaatgaamtggtagtggggaaaaagtccttatttgatgcatttgaagggttccactgattcttaaatgtcatacaggggagaggaaagggaggtaaacaggaagagga

SEQ ID NO: 39847 - DNA, 201 bp, Homo sapiens
ctgaccattgagcagaattagtcagataattgcccctttgtcaactttgagagcccagaccttgtggctgtgtgtgtgtgtgtgtgtactttgtataactrcacattccttctcttggaagcctgctattgcttgaggaattcaaggttggcattttctaggcttcatggcattttcgtaggttgtggtgctttgcatttt

SEQ ID NO: 39848 - DNA, 201 bp, Homo sapiens
gaggaggctggggcagctttgggctgaggcaagagtggcacttcgggaggggaaggggacaaagcattgttttatgagccatgtagagactcagtctcttsgctgattgctggtcctgggcatgagttggaactgagatctcaagagaagaacagccaagggccaagagtggccctgctgtgtgcagtgttgctgggactg

SEQ ID NO: 39849 - DNA, 201 bp, Homo sapiens
gttatgcgtctatttcagtgtgtatgcattctgctttgtgtatgcacaaacattgaattttttttttttttttttttttgagaaagagtctcgctctgtcrcccaggctggagtgcagtggcaccatctcggctcactgcaacctccgcctcccgggttcatgccattcttctgcctcagcctcctgagtacctgggacca

SEQ ID NO: 39850 - DNA, 201 bp, Homo sapiens
tggctaaagaagattccctctgccacactcgtgctgtaatgtactgcgaggcgaccccagaaattatcccagtgtgtgccatctgtattaaaatggttatycagttatgaacagggtaacataatactgatcagctaattatacaccctccgaaaaccctccagctccctcggcctggctcagccaggtattgaaagcata

SEQ ID NO: 39851 - DNA, 201 bp, Homo sapiens
aaagaggaacaatagtagtaactggtgtggaagattaatcacactccataccccctaaaacccctctgaaaagggggttcctatgagcccacatgggatargggtcctgcttcccagtcttcttagcaggactgatgaaagagccccattgtccgctcccagcttcttaggtgtccaacaatagctactctgcaggttgcc

SEQ ID NO: 39852 - DNA, 201 bp, Homo sapiens
ttagatgactttggccaactgtaaatgttttgagcatgtttaaggtaggctaggctgacctatgatgttccatagattagctgtattcaatgcattttcarcttacaatattttcaacttatcgagccattaccctgttgtgagttaaggagcatctgtacactgaaaataatttatttttcacttcctgtcctttaaaag

SEQ ID NO: 39853 - DNA, 201 bp, Homo sapiens
agggtggagggtgtgtgtagtatcgcactaggagaactggaagcagttgtttcttgtgtgtctgctgacgtcctcaaagggagcatgtatttaggtagagwcaaaggtcaagatagtcacctccttttatcatttgcaaagtggataccactatcccttcccccagtcccttacttttcttcctctttctcctcctcctcc

SEQ ID NO: 39854 - DNA, 201 bp, Homo sapiens
gtgcctatttgggctggtgcgaacccagcccctggtgtggccgtctccctggagggatggtaccccttgtcctcctactccgcggcgctcctcctagccargcaccctcaggaagtcagctcagccacactgggccttttccctccactccgctgcctcggccgggcaggagagtggctcagcagctctggaacctgcagc

SEQ ID NO: 39855 - DNA, 201 bp, Homo sapiens
attctgtttctcactttcaatacagtattcaataaattgcatgagatatccaacactttggtataaaatagtctttgtgttagatgactttggccaactgyaaatgttttgagcatgtttaaggtaggctaggctgacctatgatgttccatagattagctgtattcaatgcattttcaacttacaatattttcaacttat

SEQ ID NO: 39856 - DNA, 201 bp, Homo sapiens
caacctcccgagtagctgggactataggcgcccaccaccacgcccggctaattttttgtatttttagtagagatggggtttcaccatgttagccgggatgrtctcgatctcctgacctcgtgatccgcccgcctcggcctcccagattgctgggattacaggcgtgagccaccgcgcccggccgtcaggtgccattctatt

SEQ ID NO: 39857 - DNA, 201 bp, Homo sapiens
cctcgcggcccgctgccacagctctcgttctccttttttgcggattccgccgggggtccgccgagtcctggctgcccgcgggcagccactttgaaacccaraggtttctgcacggccaagcagaggtcggagggagagagccgcagcgcgggcccgcgggccggtggactggtgggtgagacaccgcagcccgagtcggtg

SEQ ID NO: 39858 - DNA, 201 bp, Homo sapiens
tagttagggaccaattgcataagcagccaagaaggcgctcttcccaacacaatccttcctccaaagctgtggtcccgcagtgggaggcatggtagcagccytgggacacaacggtgggcagagctcaccccagggccagcctgcaagtctttcctcaatcatccaggtgtgaggggcatagggaagaggcttactgtttgt

SEQ ID NO: 39859 - DNA, 201 bp, Homo sapiens
agagttcagaaaaagacttctatccacagaggaatggcagaaacaaggacagggaactcaccttctgtggcctgagcctagcagattgggcccacaaatarcagaccaacatgccaatttctgtcagagaagcctcgctcacctgtcctttcccagagacagtcccctactgtgaggttacccatcattggaataacattt

SEQ ID NO: 39860 - DNA, 201 bp, Homo sapiens
gggggttcctatgagcccacatgggataggggtcctgcttcccagtcttcttagcaggactgatgaaagagccccattgtccgctcccagcttcttaggtrtccaacaatagctactctgcaggttgcctcttaatactcaagtctatcttcaccccctccttgtgtctacctggaattggagtttttatattaagaagag

SEQ ID NO: 39861 - DNA, 201 bp, Homo sapiens
tgcaaatgatatggaattatcccaaatcatcctgaaaacagcaggtaaaattagctggtagaatgtaccttggctaaagaagattccctctgccacactcrtgctgtaatgtactgcgaggcgaccccagaaattatcccagtgtgtgccatctgtattaaaatggttatccagttatgaacagggtaacataatactgat

SEQ ID NO: 39862 - DNA, 201 bp, Homo sapiens
gaaatggacaacacaacagttcaatagaggggccacagggggaattagccaagtggagatggggccaaacaggagcagcccctagagaagggaaacagggrtgcctggagtaggggagattagggaaggggtggagatgtggcaggggagagcaatagcttcatatgcatgttggtattagatggggagtattgtgcaaaa

SEQ ID NO: 39863 - DNA, 201 bp, Homo sapiens
ttggcatcacatataaaggattttttaaatattttgcaaatgatatggaattatcccaaatcatcctgaaaacagcaggtaaaattagctggtagaatgtrccttggctaaagaagattccctctgccacactcgtgctgtaatgtactgcgaggcgaccccagaaattatcccagtgtgtgccatctgtattaaaatggt

SEQ ID NO: 39864 - DNA, 201 bp, Homo sapiens
tcattatccagaggtaggtgtaggttctgtcgatgttttagaaggacctttatcttgggccctgtgcataggtgatttgtactttttttgtggggaagtayaggggtttagccctggctgtgtggatcaacataggtgcatgcatctgcatataagtccttgcctttatatcagagacagcagccaaatcaccaactacct

SEQ ID NO: 39865 - DNA, 201 bp, Homo sapiens
tacgagcatccagccttgggatcttgagacaatcacagcctgcagccggagcctttaaaatgaccagtgtctattcatccctccaaacagactggcctttmtaaaggctgctccttccccaggggccgccgcttgtcctggctccctcaccctccctgccaactcccacaaagctcacctcccaggagtctggtcttgcta

SEQ ID NO: 39866 - DNA, 201 bp, Homo sapiens
gtaggatatttaggtctcctggtctccaaacccctccagtgtgctctcggggagaacacatgtgcacactccatgcatgtccaccctagccagtgtgccartatgcctatctgtggtagctacagaacatacaagcagcactgggctcaggaacccaggctggtttcaagatcacagaactgtacaaactgacagttgttc

SEQ ID NO: 39867 - DNA, 201 bp, Homo sapiens
ctgtgacaatgacacagtgcccagcgtctcttccatcaacaggtgagcaagccacccgggttttcagggctggactccagctcctggctcctgcctgcagrggtgtcccacgcccagtctctgctctttgtccagcctctgccctttctccctgcttccagccccaaatccttctgtcagagaaagggaacctgtgaggca

SEQ ID NO: 39868 - DNA, 201 bp, Homo sapiens
cgggttggaaaccccgtgcccttctcttggccgaaagagcaaaagcccgagccgctcggtttcctgggggggctgccgaggtctgaggggtcaaagggackcgagtcgggtttgggtcggctacacagggcgccccgagagttattaactcgccagcgaggcctatgccgtgccacctgggcgagacggtgggccccaacc

SEQ ID NO: 39869 - DNA, 201 bp, Homo sapiens
gttgcagcatcgtcaattccaaaggcaccccctcatgtgatcgggcactggctggggttgggtggggggcacccagggcaaagtgaggtgttgtttgagaraggtgtgaggagcgaggaaatgggggagccactggactatgggggaaggaagccaggagggtggaagaaggcagtcattactgcatacctctgttgtgtt

SEQ ID NO: 39870 - DNA, 201 bp, Homo sapiens
ggtttggagggaggggagggtgagaagtggggctagagatagggagattaacggggtgggcaagggggtaaaagaagaggcttcagtctctcccagcaacscgatcagaggtctttccccagggtttcaccgagcttgctctaggtaccccccgagaaagggaggggagagaaatgaggggggcacagatgtccccgcttt

SEQ ID NO: 39871 - DNA, 201 bp, Homo sapiens
ctgggcagggcctcggtatcagcctcactttaacttcagggtcattaattccctgattattgaaggagaagagagggttgcagcatcgtcaattccaaagrcaccccctcatgtgatcgggcactggctggggttgggtggggggcacccagggcaaagtgaggtgttgtttgagaaaggtgtgaggagcgaggaaatggg

SEQ ID NO: 39872 - DNA, 201 bp, Homo sapiens
gcagagatggtaaaaggaaaaatttaggccaggcacagcccaggggcagctcttggcaaggtgaaagaaaattgcatattcaatctccatccatgaatctycctcactgctgcccgcctcctgcttgaaaacaatgaaggctttttcccaacgctgggcagggcctcggtatcagcctcactttaacttcagggtcattaa

SEQ ID NO: 39873 - DNA, 201 bp, Homo sapiens
aaaacatcagctgaagtgccaagatgatttatgagacgagggaaaatatttcatgaagatctcccggatattctgtacttaaccagttaggagacaaaggkcttcttctgcctggtgcgtgcgagcggaccccagcgagcaagggagctagtgccagagagagctgcggaggctccggcaggagtggggacgtccccgtgg

SEQ ID NO: 39874 - DNA, 201 bp, Homo sapiens
tctttgggtataaggggatgggaatgtcatgcactgggaaggtgtgcagttacctgggtagtgtgcgtgcttggagagagtgccgggtgtgactgtgtgakcggggagagctctaagccaggcctcagtgtgttgagcgcccatggtcctgggcacaggcatcaccctaccttctgctgataaagggaggggctgtcctga

SEQ ID NO: 39875 - DNA, 201 bp, Homo sapiens
acgcccagtagtagtagttaggctgagtcaggcaggtgcatctctccccatggtatctgccgcccaggctccggccagagggaggggagcgcgagtccgcsgcgcttccgcggggcgcccggagctgcagacgggggctggaggaatctcggattcgggctgcaagagcgctgcgcaagcttcgccgagccgccctttcgc

SEQ ID NO: 39876 - DNA, 201 bp, Homo sapiens
ctcctctgcctccccatggatatgcactgcaaagcagaccccttctccgcgatgcaccgtgagtacccgcgcccggctcctgtcccggctcggggctctcmgtcccaaccctgtccagtcccagcgtggccccggcccctcgcgctcaggtcccatcttggaggcctccctggcttctggtccctcttttcgttctttctc

SEQ ID NO: 39877 - DNA, 201 bp, Homo sapiens
taaatggaagaagcagtttatttccttagttagctaccatcctagaggtccccaagagtgttgctcaggttagacttggagcaaatgaggggattaagccrtggaaatgagaagcacctgcccttgtctacgagcctggcttgaggcagcagaaggttgcaaagactcccaccaggaaggaaggcacagggtaggagtgag

SEQ ID NO: 39878 - DNA, 201 bp, Homo sapiens
caaaagagaatactgaccaggggactaaggggtgttgggatgggactgagcacgcacattaaagggctagaccctagagggaatggaggggctcatctccytccaggaggacccttaaagaccctgccagactggccctcctttggccccaagcactgtggcatcttcctaggagtgtcataccccaagggcaagctgtga

SEQ ID NO: 39879 - DNA, 201 bp, Homo sapiens
catgaagcaggttttgataaatatatccactattataaatcttagatcaatgcattggagcagacctgaatataaagataaactaatcatagaaatagatyctcaaaacagaaattgagaaacacatctatatgtagtatcatcctgcaatcatgtacatgatttggaaactagatagatgaaaataatttggaaaatttg

SEQ ID NO: 39880 - DNA, 201 bp, Homo sapiens
cacccatacccacaggctgaaatcatgtggccacttgagccacatgggcagacacacacagagacagagccaatagcgcagcacccaattctcctgcacasccagcagaaaacgatcacagctgcagtcctcccaagcacgatgcagcctgccagaaagcagcagcaccatgccgtttctccagcaggtggacgtgtccag

SEQ ID NO: 39881 - DNA, 201 bp, Homo sapiens
tgaaagctcaatcatccttacatttttcttgtagtacgaaacaagtcaagggctgcctattcattaccagatgcagggccagatgctgccctctgtgtggrcataggcagtggtgagctctgtcaatccccagcccctgccactgcccagatggcagggagagaactaccctctgcccctgtgctacctggctgcaatttt

SEQ ID NO: 39882 - DNA, 201 bp, Homo sapiens
atatgatgccaaagatctggcgatttagaaatgtccacataattgattgaatttctcagttttttatccaggctcagaatcaacacattgggaaacacctrttttcagagaaaaatattccaggaaacaaagtgttctcattagaaagcatctttgatgtgttcgagtctgatttctggcttgaaaggaggctgggctggg

SEQ ID NO: 39883 - DNA, 201 bp, Homo sapiens
taaaattttgtatgtcactccccatggctccaagtttgtctctccctgtctctgagatgggcctcccctccattggtcgatccccaaaagccccttcaatratcctcccaactacactcccgctgccacctccaactcctttgccgagacccccttggcggcagctgaaccacggcgaaggccgagactagcctgcccttt

SEQ ID NO: 39884 - DNA, 201 bp, Homo sapiens
ggagattgctgctgggtcttatggactaggggctgaagggagttagaggtgtgggtaaagggattcctgcccagatttaggggaaggaaagtagaagccttgttgggaggcaaggagattttagggagaaactcccagcagtgagcaggtgggggctggaggaggttttaaagaggtggggtgagggaagagtggggaggt

SEQ ID NO: 39885 - DNA, 201 bp, Homo sapiens
ttatgtggaaaattaaaatgcaaatacaatgagatttatttccaggagtggagtgatgggctggcccctctggctactggtctccaggcctgtcaggtcargtgactgcttctttggaggtgctatcccccttgtgacagattcttgtgtgaagggagaggccagagttcaaggtcaaatagagttagtaaatggggagaa

SEQ ID NO: 39886 - DNA, 201 bp, Homo sapiens
gttaggtttgaggtaacagagggacagccaaggaaaatgttcagcagggtactagaaatgcaaaaacctgagctgtagctctgtatagctagggaaggatraatcactcagacgtgtcaaggtagggatgaggaaactcatacagctctggaatgcagggaggtgaggccatcttcaaagggagagtagcaaagagagaga

SEQ ID NO: 39887 - DNA, 201 bp, Homo sapiens
tgaggacagcacagggctgagtcagcttgacgtgtaggatatttaggtctcctggtctccaaacccctccagtgtgctctcggggagaacacatgtgcacrctccatgcatgtccaccctagccagtgtgccaatatgcctatctgtggtagctacagaacatacaagcagcactgggctcaggaacccaggctggtttca

SEQ ID NO: 39888 - DNA, 201 bp, Homo sapiens
caggagaatcacttgaacctgggaggcagaggttgcagtgagtggagattgcaccactgcactccagcctgggagacagagcaagactctgtctcaaaaamaaaaaaggggggggagtttaaaaacatatcaatggctggtcccagtggctcacgcctgtaatcccagcactttgggaggctaagacaggcagagcacctg

SEQ ID NO: 39889 - DNA, 201 bp, Homo sapiens
gcaagctctgtactccgacagacctggattcaaatctggctgtcatttactagcttcatggcctttgacaagctacttaacctctctttgcttcagcttccttatctttaaaatggttatcatagtagttccctcacagggttgtcggaaggattaaatgagctctgtaaataacagcaatggcatgtaatgagttcttga

SEQ ID NO: 39890 - DNA, 201 bp, Homo sapiens
cctgattttgtagactttgatgagccttggtgctttctgcccaagcaaatgacatcatttcattttcattttctttatttttcttttcttttctttctttytttttttttttttttttgagacagggtctcactctgttgtccaggctgaatgcagtggcactatcttagctcactgcagccttgacctcccaggcttaag

SEQ ID NO: 39891 - DNA, 201 bp, Homo sapiens
cccaccctgattttgtagactttgatgagccttggtgctttctgcccaagcaaatgacatcatttcattttcattttctttatttttcttttcttttcttyctttttttttttttttttttttgagacagggtctcactctgttgtccaggctgaatgcagtggcactatcttagctcactgcagccttgacctcccaggc

SEQ ID NO: 39892 - DNA, 201 bp, Homo sapiens
gagccgaggagggagagctgtgtttttcgctaatcatatatttagcgttgcgggggttggggggggcgtttaaaaatacttctgggataaaatatattttyctaagtaatttccaagcgcaggaaagccgcgccgagggcatcaggcctccgcgggtctcggcgagcgggccggaaagcctcggtccttttcgggaggagt

SEQ ID NO: 39893 - DNA, 201 bp, Homo sapiens
aatagagaaaagagggaattattttaataaaatttgaatttatgccatgtctttagcttgaaaaactattctgagattttttttgcaggcttttttttttwaaagctaaaattctaaatagaaaactcctccctatctgcagattaataattaaggataatttgtaacttttcacaaggaaactttagacctggcttggac

SEQ ID NO: 39894 - DNA, 201 bp, Homo sapiens
agcaggaaaggaaatggaggtaggagaaatgataaaagacagagcactaaatcacaaataggggtacatgtacgaagtcacaaaccggctttatgccaagmtttgcagaatccacagcttggactgacaatacatagagatgctaaacacacaggcatgcagacttccagagagtgtcagtatgcagagggtggattggtc

SEQ ID NO: 39895 - DNA, 201 bp, Homo sapiens
gcccctggtccctggtgagaaggcagcccgtttctggcttcagaaagggaaggatgactttcctaatggagttaaggcagatacggggtgggagacattaraggaatggggggggagtgaaaatgggtccccgagaggagaagcagcagcatttgggaggcagaaggagggtcctggttcccacagatgctctgtgcccag

SEQ ID NO: 39896 - DNA, 201 bp, Homo sapiens
cacccagtgcttgccctgcccctggtccctggtgagaaggcagcccgtttctggcttcagaaagggaaggatgactttcctaatggagttaaggcagatayggggtgggagacattagaggaatggggggggagtgaaaatgggtccccgagaggagaagcagcagcatttgggaggcagaaggagggtcctggttcccac

SEQ ID NO: 39897 - DNA, 201 bp, Homo sapiens
ctgtcatctggtttctctccagtcccccctttgctttctaccttgcgtcgcaaggcctgagtcgccctctcgcccagcccccagtcttcagcccagcgtcygtgcttccagtccccactcctccgcgtggtcgtggaggtccaccacctttcttctcaagctcgggaacatgcccttccgccctgcctgcttccttcgccc

SEQ ID NO: 39898 - DNA, 201 bp, Homo sapiens
attcagatgcatttaaattcctgtttattaagaaagaggcacaccccttttcctgctgctttgcagactttatgatgacagggaaggaggaattaggtttytatatctgttcagcttcaaaacttctgcgtcttccctaactcgatcctgtcctgggcctttctcttttttttgaccaataaatgccatattattaatctc

SEQ ID NO: 39899 - DNA, 201 bp, Homo sapiens
cagagctttggagaaaaggggttcctaatctccagggagcattactctttgactctctagacccaggaatgggctggagctaatggggaagcggccaggarccggcctggcggaagagtgagtgtccagctagtgcagtgctggggagacgatcccaggagcaggggggactctcaggggctacctgggaatgggactatc

SEQ ID NO: 39900 - DNA, 201 bp, Homo sapiens
gcgcattccaggcccgactcagcgccgactcgctgcagtcccccagccctggactcccgccgtgtccccttcccatccccaccccttagactggggctgargggccgggccctgagcccggggaggctgaattattcatctttaatctgcccgcagctgccgccttttcataccggtaacgcgagttctcccggggcctaa

SEQ ID NO: 39901 - DNA, 201 bp, Homo sapiens
ttccaataggactgcatccaggttagctggaaacatctttctagttatccagcctgtcttccttcctcctgaagtgaggtaggagattccgtgacaaaacyttagattataaggaattcatggtgacagattgtgggaatcataaaactgaaaaccagaattcagatgcatttaaattcctgtttattaagaaagaggcac

SEQ ID NO: 39902 - DNA, 201 bp, Homo sapiens
gccgcgccgagggcatcaggcctccgcgggtctcggcgagcgggccggaaagcctcggtccttttcgggaggagtggaaccgggtccacacgccgttttckcccagccagcctgcctcgcggcccgctgccacagctctcgttctccttttttgcggattccgccgggggtccgccgagtcctggctgcccgcgggcagcc

SEQ ID NO: 39903 - DNA, 201 bp, Homo sapiens
aatcacttgaacctgggaggcagaggttgcagtgagtggagattgcaccactgcactccagcctgggagacagagcaagactctgtctcaaaaaaaaaaarggggggggagtttaaaaacatatcaatggctggtcccagtggctcacgcctgtaatcccagcactttgggaggctaagacaggcagagcacctgaggtca

SEQ ID NO: 39904 - DNA, 201 bp, Homo sapiens
ttttttttttaaagctaaaattctaaatagaaaactcctccctatctgcagattaataattaaggataatttgtaacttttcacaaggaaactttagaccyggcttggacctgtgtttaggacaagagagccgaggagggagagctgtgtttttcgctaatcatatatttagcgttgcgggggttggggggggcgtttaaa

SEQ ID NO: 39905 - DNA, 201 bp, Homo sapiens; identical to SEQ ID NO: 6817

SEQ ID NO: 39906 - DNA, 201 bp, Homo sapiens
tcggaggctgaggcaggaatatcacttgaacccagaaggcagagcttgcagtgagctgagatcgtgccactgcactctagcctgggcgacacagcgagacyccatctcaaaaaaaaaaaaaaaaaaaaaaagatcaaaggaagtatcagctgtatctttatcacagatccagatcccccagtcccttcccaccactgctca

SEQ ID NO: 39907 - DNA, 201 bp, Homo sapiens
cctcgtggccaagtatgccctctgctgcatgggctcctgtggggcaagaaaggctgggggtagggaggcactggcatgaggttgtggtcacccagggctgygcctggctggcccagaacagggcgctctcctgagtggttgatcgccttcattgtttctaatcaattcagttcagtgaacctttcctggacatcagtttca

SEQ ID NO: 39908 - DNA, 201 bp, Homo sapiens
tggccccctcctacccttctgttagccatgtggactctccccctccccaatttcataccccagtgcacaggcagacagcgaggggcccatggggctgtcaytgtttgtttttaaaaaaggggcgcccatacccgatcagccagcagtgccaggctgaaggccccactaggcccttctcccagctactggctctgccagtca

SEQ ID NO: 39909 - DNA, 201 bp, Homo sapiens
tgtgcagtgtgaacaggctcacatgagacagtatggtatcgttaagacaaatcattatggtctgtatatggtaattagaaatgagttctgggtgcaagagyatggccttgggtaaatcatctctgttcagagcctcggtttccccatctatagaatgaagggcttggatgtagggtttgtcaagtcccttctagctccgct

SEQ ID NO: 39910 - DNA, 201 bp, Homo sapiens
cttgtctggctctatttctccttcttccaaaatatccaaaccgatttggccgccacggcctttgccattcactaaatttcattgtggttgttttggcggcrgcccctgatgggcagggggaggttgtgggaaaggccctaagtcccagttctccctgaggctccctgtgctcaggccttggccaagctccttggcacccca

SEQ ID NO: 39911 - DNA, 201 bp, Homo sapiens
gagcaggcaccggtgtgataagactctgctccctctggagacttgcaggaggaaccaggtgaccaagaaactggctcctgtaggaggcttgagcctgggtytaggttggagacagaggccgagaaggcggccagggcatagaggcatccacaggggcccttctgtgggctctgcccaagcgggagctttgctgctctagcg

SEQ ID NO: 39912 - DNA, 201 bp, Homo sapiens
cccattccccctcccccggtccgctcccctccctccctcttccttcgccggctgctccctccctccctccctcccatttctccctcccctgccctcccctwgccggcaccggagtgacaggctcggggccctcctcgccgaagctcggggctccagcgctggcgaatcacagagtggtggaatctattgcctttgtctgac

SEQ ID NO: 39913 - DNA, 201 bp, Homo sapiens
aaccgacgctgggaggcaaggataggggagggctgagaacgcctgaggaaaggggacatggagacaggattggcctgtagactcaggggagcaggcaccgstgtgataagactctgctccctctggagacttgcaggaggaaccaggtgaccaagaaactggctcctgtaggaggcttgagcctgggtctaggttggagac

SEQ ID NO: 39914 - DNA, 201 bp, Homo sapiens
gtgaagctggggcacagggctggcagaccctgaacaacagagacaccagtgtctccggcctgcgtcctgcccccattttctcatggttcccgctggagaastggtaacctcctggccttcagaggattttaaagacatctcccaggaaagaggcagaatcctcaaacaatgagcataaaggggtgaccatctatcccatta

SEQ ID NO: 39915 - DNA, 201 bp, Homo sapiens
agggaagggggaaggaagaggaggaggagagaagaaaagaaataagggggagagtggtagggatgatcctgggacaaagtgtttttcaaatgtcgtgacaytgggggtcccttggtgaccatctggttctcttctgatgcgtgaagctggggcacagggctggcagaccctgaacaacagagacaccagtgtctccggcct

SEQ ID NO: 39916 - DNA, 201 bp, Homo sapiens
taagaataagggagataattatgtgtcaagatgatgtagcccaactctgcagtcaggccaaggtagcaaagcagctggcaggccagtcacagaaggcagcctcgggcatgggctgcagacacccaggtgtgtccttcagtgactgggccgggactgcagcaaaagagaatactgaccaggggactaaggggtgttgggatg

SEQ ID NO: 39917 - DNA, 201 bp, Homo sapiens
atgtggtggacagtaaggctgaggagacaggttagggccacaggatagcaggccaggtctagaccatagaaggagtttgggctttttttttttttttttttctgaaagcaggagtagtctgagcaggaagggacaggagcagggctgggtttgggaagctcatgctccagcagtgtgacagtgatgcaccagggccatgtt

SEQ ID NO: 39918 - DNA, 201 bp, Homo sapiens
actagggctcaccctatcgatccctgtgggatgtcaggaggagaagcaagaaccgtttaccttgggaaggttttggagttgggggaacagctggtctctgrcctgaggatgaaaggccaacctaccttgtccttacctgatcccaatctgtctggaggtgagggagtgatgtcatgtgcagcctagcctggtgtcctttct

SEQ ID NO: 39919 - DNA, 201 bp, Homo sapiens
aggtttgctgtttcctgggcctgtactccatccgtctttaggagagtgagtttgagaaccccagtgaaatccacaggtctgcagagaaggcctggggttaactgggcaccacttacctcagggctggacagaagtgaataatagcctgtatatggcaatgcagtcccctcttaaatagaccccagaggaagtagaggaatg

SEQ ID NO: 39920 - DNA, 201 bp, Homo sapiens
atatcaactttcttattccatctttgtttaacattccatcttgttcttaacattgtcctctgtcttctccccttggctcctcttcttttctccctctgccsttccctctcttctctcttcttcttaggtgtagctctggctctgttctgtcttcctccttcctcatggcctctttcctcttggcctttctctcttgattgc

SEQ ID NO: 39921 - DNA, 201 bp, Homo sapiens
accacctgcattagctgggcaaaatatcctttgctgaagcaaatatcttctttttttttttctaagacacagtctcgctctgttgccgaggctggagtgcrgtggcgcgatctctgctcactgcaactttcacctcccgcgttcaagcaattctctgcctcagcctccccagtagcagggattacaggcatccgccaccat

SEQ ID NO: 39922 - DNA, 201 bp, Homo sapiens
gtgccattgtactccagcctgggcaacagtgtgagactccatctcaaaaagaataaaataaaataaaataaaataaaataaaataaaataaaataaaaaaataaaaaacaaaaaacaagagtatattattgttattattattaataataatattcatttgttattgaacaaatagctatcaagtacttacattataccaga

SEQ ID NO: 39923 - DNA, 201 bp, Homo sapiens
tgagattgtgccattgtactccagcctgggcaacagtgtgagactccatctcaaaaagaataaaataaaataaaataaaataaaataaaataaaataaaataaaaaaataaaaaacaaaaaacaagagtatattattgttattattattaataataatattcatttgttattgaacaaatagctatcaagtacttacatta

SEQ ID NO: 39924 - DNA, 201 bp, Homo sapiens
cctttcatacagtgaatatgaaataaacgatagttattgcttttactattattagattcagctcttctattcaggcctagcctctcatagattctaccatyggttcttgatatgactgactcattctactcaatggttagccgcataagttctagagtgagacactcaggtttaaattctggctctgttacttaacagctg

SEQ ID NO: 39925 - DNA, 201 bp, Homo sapiens; identical to SEQ ID NO: 6869

SEQ ID NO: 39926 - DNA, 201 bp, Homo sapiens; identical to SEQ ID NO: 6871

SEQ ID NO: 39927 - DNA, 201 bp, Homo sapiens
aacatttgcaagaacaagccaggaaggtaaggaatgactgttagacaggctttcattttctttatttagttctcaggattggctgaacttgtttataatcrttgtgactttttatgtctttaatacctcctagaaatgtagaggtgttgagtaaaatagaaggaataagcttaagaggttaagtataagtttttgtttgtc

SEQ ID NO: 39928 - DNA, 201 bp, Homo sapiens
aatgaggctgggtgtggtggctcacgcctgtaatcttagcactttgggaggctaaggcgggaggattgcctgagctcaggagttggagaccaacctgggcracatgtgaaaccctgtctctactaaaatacaaaaaattagccgggcatggtggtgtgtgcctgtagtccgaagctactctggaggctgaggcgggagaac

SEQ ID NO: 39929 - DNA, 201 bp, Homo sapiens; identical to SEQ ID NO: 6874

SEQ ID NO: 39930 - DNA, 201 bp, Homo sapiens
aacaaaaaaatgaggctgggtgtggtggctcacgcctgtaatcttagcactttgggaggctaaggcgggaggattgcctgagctcaggagttggagaccarcctgggcgacatgtgaaaccctgtctctactaaaatacaaaaaattagccgggcatggtggtgtgtgcctgtagtccgaagctactctggaggctgaggc

SEQ ID NO: 39931 - DNA, 201 bp, Homo sapiens
ttcatcctataatcttatgaaatacagaggatgcattattatgctgcctctgtttccccaatacaatctgtatttgagaagctgaagaaaaaaaaaacttyagagacaaacaaattgaatcaaacatattaactatctaaaatgtactttttggccaggtgccgtggctcacacttgtaatcccagcactttgggaggcca

SEQ ID NO: 39932 - DNA, 201 bp, Homo sapiens
agggtctttgctttgcccaaaattatttaatgtgctcaaattccctcacatctctttttttttcaatgatcctagaaatccttcgaatccttttttttttwaaattaagaaaaattcagatacgcagaaagctcctttaattcaaaacttggctttcttctttttgaagagctggggagcaaagtgcaacttttatttatt

SEQ ID NO: 39933 - DNA, 201 bp, Homo sapiens
gcgacttaaggcagattacttctctctggacctcaactattttatctgtgaagtgaaaggtttgaagtagtagagctccaagatctaaagttttgtcattrttcaatgaaaaaccagattccttcttatctcttatcaagacttccagttgtacaccctcttcagtgtccacagatggagggtcctgctgttttaaagatt

SEQ ID NO: 39934 - DNA, 201 bp, Homo sapiens
agggaggtatgcggggcgggagtcagcagggggaagtcagctcccgcgaggcagccggtctcggggctccgcgggaggccgacggcgggagctcacggctygtgttcctgggtgtgtgtcgcaggagccctggtggagctcaccccgacccccggcggcctggccctggtgagcccctaccacacccaccgggccggggac

SEQ ID NO: 39935 - DNA, 201 bp, Homo sapiens
caggattgcccacgaagaaggtgtgtgctgcagcaacagctttctccaacttgttgatctaagaatgaagcatgagaaggtggataatgctcacatccaawctctgaacgtttgtgtccacatgagcagtccacataaacaggaaatccctgcctccctgagccctccactcagcgtgcccagcccctgccagccccagga

SEQ ID NO: 39936 - DNA, 201 bp, Homo sapiens
tcttttcctttcagtcagcccggatccccccaccggccctcagcgaatcccggcgcgtcagccggagccccgcctccgagctcaggccttgctcagtcgawctgacgcccagtagacaagaaagacggaagctccgcccacgcgcctttatgcgcaggctcttcctactcgcacagcccagggagtggggaggataaggcg

SEQ ID NO: 39937 - DNA, 201 bp, Homo sapiens
aaaagaaagaaagaaaagagacaggccagcatcacatctgggcttaatgactcactgactggctgggcagtagacaagatacttaaagtttactttctaawctcagtttccctaatctatcatctggagatagcattctctagctatctcctagcattgttgagagttcaacgagataatatgcagcctgtaatacatggt

SEQ ID NO: 39938 - DNA, 201 bp, Homo sapiens
aaagacggaagctccgcccacgcgcctttatgcgcaggctcttcctactcgcacagcccagggagtggggaggataaggcgctgtcatggaggacgccgcmgcgccggggcggaccgagggggtccttgaaaggcaaggagcgccgccagctgcaggccagggaggtatgcggggcgggagtcagcagggggaagtcagct

SEQ ID NO: 39939 - DNA, 201 bp, Homo sapiens
gaaggcccgcccccgggcgaagccccaccttccaagccgggcggcgcatgcccacgaggcttgcaccgcctcttttcctttcagtcagcccggatcccccsaccggccctcagcgaatcccggcgcgtcagccggagccccgcctccgagctcaggccttgctcagtcgaactgacgcccagtagacaagaaagacggaag

SEQ ID NO: 39940 - DNA, 201 bp, Homo sapiens
gcttgaacccgggaggcggaggttacagcgagccgagatcacagcaccatactccagcctgggtgacagagcgagactcttgtctcaaaaaaaaaaaaaawaaaaaaaaaaaaagaaatccaaggggggagaaataggctacagaccacaatgcccacagcaatggactccagcatgtcaaagtaacacaggtttcatata

SEQ ID NO: 39941 - DNA, 201 bp, Homo sapiens
acccccggcgaaggcccgcccccgggcgaagccccaccttccaagccgggcggcgcatgcccacgaggcttgcaccgcctcttttcctttcagtcagccckgatccccccaccggccctcagcgaatcccggcgcgtcagccggagccccgcctccgagctcaggccttgctcagtcgaactgacgcccagtagacaagaa

SEQ ID NO: 39942 - DNA, 201 bp, Homo sapiens
gaaaaggtggatggctaaaaattctaaggtcctttactaagtccagacatagtattttctgactcaaagctcagggctcatgaggttcaaacaaatagctytaagaaatctgagggggtggtcgggggcggtagctcatgcctgtaatcccagcactttgggaggccgaagggggcagatctcttgaggtcaggagtttga

SEQ ID NO: 39943 - DNA, 201 bp, Homo sapiens
ctgaagaaattctgtggcttcaaggatttaggggtagagaaaaaagagcagctaacagactatgcctaagaattttcctagaaaaaaatttttttttgcayaaaataaaatgaagaatttttgagacatttagggaaaaggtggatggctaaaaattctaaggtcctttactaagtccagacatagtattttctgactcaa

SEQ ID NO: 39944 - DNA, 201 bp, Homo sapiens
caaagtgcaacttttatttattaagagaatatgcatctagttaatcagattactcttattgggagggaggttggcagggacagaatcttgtgcacacaacrtattcatgtgctattgaatgactatcgtgtttattacgatggcctgaacagatggaagaaagaacacagtttttgtctttcatcctataatcttatgaaa

SEQ ID NO: 39945 - DNA, 201 bp, Homo sapiens
aaaccctgtctttacgaaaaatacaaaaattacatggtactatatgcctgtagtcccagctactctgcaggctgaggtgggaggacgcttgggcctgggargcagaggttgcagtgagccaagatggtgccacagcactccagcttgggtgacacagcaggaccctgactcaaaaaaaaaaaaatacatatatatatttca

SEQ ID NO: 39946 - DNA, 201 bp, Homo sapiens
gctgggtgcggtggctcaggtctgtaatcccagcatttttagaggccgaggcaggtggatcacttgagctcaggagttcaagaccagtctgggcaacatgktgaaaccctgtctttacgaaaaatacaaaaattacatggtactatatgcctgtagtcccagctactctgcaggctgaggtgggaggacgcttgggcctgg

SEQ ID NO: 39947 - DNA, 201 bp, Homo sapiens
tcaacaaaattttcaggaggaggaggatatccctgttattttccagaataatcagtgatactctgtgatattgataatctaccttgttggcccttaccaarttactgggtgtgagtaacagctgactgtagctccctttctctaccctagtgctctggaaggaggaaaggagagctggcttgtatcttactttctcaagtt

SEQ ID NO: 39948 - DNA, 201 bp, Homo sapiens
agcccaaggcagtaggatcgcttgaggccaggagtttgaaatcagcctgggcaacacagtgagaccccgtctctacaaaaaataaaaacaatagctgggtrtggtggtgcatgcctctagtcccagctatttgtggggctgaggcgggaggatcacttgagcccaggaggtcaaggctgcagtgagctatgatcacaccat

SEQ ID NO: 39949 - DNA, 201 bp, Homo sapiens
aattacttgactccaggaggcagaagttgcagtgagccaagattgcgccattgcactgcagcctggacaataagaacgaaaactgtctgaaaaaaaaaaaatgtccattgccttcagttgcactttgtggcacgtgacaggtagtcttgtgtgtacattataactctgtttcaggtccacatcataatgcagtcttttaaa

SEQ ID NO: 39950 - DNA, 201 bp, Homo sapiens; identical to SEQ ID NO: 6872

SEQ ID NO: 39951 - DNA, 201 bp, Homo sapiens
agatgggaagtggtagaggtcagattcagacacagtcctgtttgagtctgaccataaccttaatcctgtttgggccaattaagacagtcgtaaaagatctmagtatagagctataaagaagttaaatcacaaaagtgataaagtaagtttttttttgtttgtttgtttttttgagacagtctcactgtgttactcaggctg

SEQ ID NO: 39952 - DNA, 201 bp, Homo sapiens
gaccgagggggtccttgaaaggcaaggagcgccgccagctgcaggccagggaggtatgcggggcgggagtcagcagggggaagtcagctcccgcgaggcarccggtctcggggctccgcgggaggccgacggcgggagctcacggcttgtgttcctgggtgtgtgtcgcaggagccctggtggagctcaccccgacccccg

SEQ ID NO: 39953 - DNA, 201 bp, Homo sapiens
agcccaagtgtacacttggacacatggcactctggcattccgaaaaatactcattttctttgtaaacctggcagactagccagagggtcccccccccgccmccacacacacacagaaagggccaggcagcccctgctggcgacgtggcaacctcacatcctgaaagagagctgctgaatcaaacagcaggaaaagcaccac

SEQ ID NO: 39954 - DNA, 201 bp, Homo sapiens
caagcccaagtgtacacttggacacatggcactctggcattccgaaaaatactcattttctttgtaaacctggcagactagccagagggtcccccccccgsccccacacacacacagaaagggccaggcagcccctgctggcgacgtggcaacctcacatcctgaaagagagctgctgaatcaaacagcaggaaaagcacc

SEQ ID NO: 39955 - DNA, 201 bp, Homo sapiens
ccaagcccaagtgtacacttggacacatggcactctggcattccgaaaaatactcattttctttgtaaacctggcagactagccagagggtcccccccccscccccacacacacacagaaagggccaggcagcccctgctggcgacgtggcaacctcacatcctgaaagagagctgctgaatcaaacagcaggaaaagcac

SEQ ID NO: 39956 - DNA, 201 bp, Homo sapiens
gcagcggccacgacagccagcagtgtggtcagcagcttcaacgcgcgtaccgccatcgctccctcagacctaacggaaccgccagccacccgccaccaagrccggagtcctacccccggcgaaggcccgcccccgggcgaagccccaccttccaagccgggcggcgcatgcccacgaggcttgcaccgcctcttttccttt

SEQ ID NO: 39957 - DNA, 201 bp, Homo sapiens
aagcagtcctggcaatgaggaggggtggagtgagatatgtcctggctagaaaatccttgtgtttaaaagctaggagatagttgaagacagggaggaaaaaacattccagacaaaaaataacatggaagggacattgaccagaattgacacgacatttggggaatcgcagccagttaaacaggagaatatggactggggaat

SEQ ID NO: 39958 - DNA, 201 bp, Homo sapiens
ctccccacacacatctcgacattgcaatcacaagagttcattttttttcctgaatacatcatgctttggttctacttttctctctatctggaggagccttytttcctctccccctggcaatacttagggcaggcttcaatattacctcttctttgaagtctaatttctctgagataaagctagagtctccctcctttgtgc

SEQ ID NO: 39959 - DNA, 201 bp, Homo sapiens
ttgcttgaacccgggaggcggaggttgcagtgagcctctgcaccactgcattccagcctccgtgacagagcgagactctgcctcaaaaaaaaaaaaaaaaagtattgttagaattaatttactattaacgtggctaccagaaaatttaaaattttatatgcaacttgcctcatatttctgttgaacggtattagacttgac

SEQ ID NO: 39960 - DNA, 201 bp, Homo sapiens
ctgtacctcagtttctttaactgtaaaattagaaattttttcaggtctgtccctttcatggaattactctagctcttgtgtctttcagcgctgctcctgcytttctctgttctccctcatgtcctcactcctctctccacccccagccttctttactctctaagcactgaggtacttaacctcctctcttgtggacaaatg

SEQ ID NO: 39961 - DNA, 201 bp, Homo sapiens
gatacaaagatgataactactgtcttatgagcctttattctgctaagtgtatccattatctcttttaatcttcacacaacccaccatcaatgaggtatatrgtattcttatgttacacagcaggaacatctcagagattctgaaactggcccgtggttatacagatgggaagtggtagaggtcagattcagacacagtcct

SEQ ID NO: 39962 - DNA, 201 bp, Homo sapiens
gtaactgcgttccaaaggttgttctgactagtatgaagtgaaaagccaaaaaagagattgtggcatgattaggaaatgagctcagtttgtttacaacccaygctgatgggaactgcctcctttgccttctctaggaatgggggacaagttgtccacatgacttccttggtgcctacaaactacagcatgacttgtcctgga

SEQ ID NO: 39963 - DNA, 201 bp, Homo sapiens
gatcaggcgtcaccatgccccatcctgcctcggactcgacctcggcttgggaggcagcggccacgacagccagcagtgtggtcagcagcttcaacgcgcgyaccgccatcgctccctcagacctaacggaaccgccagccacccgccaccaaggccggagtcctacccccggcgaaggcccgcccccgggcgaagccccac

SEQ ID NO: 39964 - DNA, 201 bp, Homo sapiens
cccaagtgtacacttggacacatggcactctggcattccgaaaaatactcattttctttgtaaacctggcagactagccagagggtcccccccccgcccccacacacacacagaaagggccaggcagcccctgctggcgacgtggcaacctcacatcctgaaagagagctgctgaatcaaacagcaggaaaagcaccactg

SEQ ID NO: 39965 - DNA, 201 bp, Homo sapiens
aaaattctaaggtcctttactaagtccagacatagtattttctgactcaaagctcagggctcatgaggttcaaacaaatagctctaagaaatctgaggggrtggtcgggggcggtagctcatgcctgtaatcccagcactttgggaggccgaagggggcagatctcttgaggtcaggagtttgagaccagcctggccaaca

SEQ ID NO: 39966 - DNA, 201 bp, Homo sapiens
aacatgaagagtattagtgttacagatacaaagatgataactactgtcttatgagcctttattctgctaagtgtatccattatctcttttaatcttcacayaacccaccatcaatgaggtatatagtattcttatgttacacagcaggaacatctcagagattctgaaactggcccgtggttatacagatgggaagtggta

SEQ ID NO: 39967 - DNA, 201 bp, Homo sapiens
actgggtgtgagtaacagctgactgtagctccctttctctaccctagtgctctggaaggaggaaaggagagctggcttgtatcttactttctcaagttatsagtccacaaacatgaagagtattagtgttacagatacaaagatgataactactgtcttatgagcctttattctgctaagtgtatccattatctcttttaa

SEQ ID NO: 39968 - DNA, 201 bp, Homo sapiens
gcctgtggtcctagctactcaggaggctgaggtgcgagatttgcttgaacccgggaggcggaggttgcagtgagcctctgcaccactgcattccagcctcygtgacagagcgagactctgcctcaaaaaaaaaaaaaaaaagtattgttagaattaatttactattaacgtggctaccagaaaatttaaaattttatatgc

SEQ ID NO: 39969 - DNA, 201 bp, Homo sapiens
gtccccaagtttcatgcacacttgtttgtccaacagccttatttgatatctctacttgacttgtagtcattacaaatttaacgtgtccaaatctaaactcytgagttcatccccaaaacctgtttcaccaccaggcctctctctttccatcagcacctgtctcacactgttgtggcagccacaacaagaatgacctaagtc

SEQ ID NO: 39970 - DNA, 201 bp, Homo sapiens
gattgtggcatgattaggaaatgagctcagtttgtttacaacccacgctgatgggaactgcctcctttgccttctctaggaatgggggacaagttgtccayatgacttccttggtgcctacaaactacagcatgacttgtcctggactccgtatgaggacattgagaagcaagatgctaaaatcagcatgatggacacgtt

SEQ ID NO: 39971 - DNA, 201 bp, Homo sapiens
ggcaggcgtatcacttgaggccaggagttcgaggccagcctggcaaacatggcaaaaccccatctctactaaaaatacaaaaattagcggggcatggtgaygcatgcctgtggtcctagctactcaggaggctgaggtgcgagatttgcttgaacccgggaggcggaggttgcagtgagcctctgcaccactgcattccag

SEQ ID NO: 39972 - DNA, 201 bp, Homo sapiens
ccacacaccaagctcattgccgctcatttacatttgctgtctcatctgcttggagcattgcctccagggtctttgcaggtttgtgtcttctcatcctttasgtccctgctgaaataccacttccctgattaccctatcagaaataccaacccttctcacattaaagtggttctgattctgctttgttttccacagcattta

SEQ ID NO: 39973 - DNA, 201 bp, Homo sapiens
tccaagcccaagtgtacacttggacacatggcactctggcattccgaaaaatactcattttctttgtaaacctggcagactagccagagggtccccccccsgcccccacacacacacagaaagggccaggcagcccctgctggcgacgtggcaacctcacatcctgaaagagagctgctgaatcaaacagcaggaaaagca

SEQ ID NO: 39974 - DNA, 201 bp, Homo sapiens
agaaaacaaccttagtaatgtcatttaaaaaaaaacaaaagaatgcatgcctgtagtcccaactactcaggaggccgagactagagggtctcttgagtccrggaatttgaggttacagtgagctatgatcaagccactgcactccagcctgggtgacagagcaagactctgtctctaaaataaatttaaaaagaaagaaag

SEQ ID NO: 39975 - DNA, 201 bp, Homo sapiens
aatgagctcagtttgtttacaacccacgctgatgggaactgcctcctttgccttctctaggaatgggggacaagttgtccacatgacttccttggtgcctrcaaactacagcatgacttgtcctggactccgtatgaggacattgagaagcaagatgctaaaatcagcatgatggacacgttgctaagccagtcagtggcc

SEQ ID NO: 39976 - DNA, 201 bp, Homo sapiens
tgggcgtggtggcgggtgcctgtagtcccagctactcgggaggctgagggaggagaatggcgtgaacccgggaggcggagcttacagtgagcagagatcgygccactgcactccagcctgggccacagagcgagactccgtctcaaaacaaacaaacaaactacaagccagatcacaacacttctgttaaaaaaaaaaatc

SEQ ID NO: 39977 - DNA, 201 bp, Homo sapiens; identical to SEQ ID NO: 6875

SEQ ID NO: 39978 - DNA, 201 bp, Homo sapiens
aaagagcccccagcctacaccttccgcgactacaggtgagtgcggggcaggtgcagggtgaggaggtctgtgccctcctcagaggccccacagtgccctgmactctactaccccaccctagcacacacacactggttggggctagctgttcccagagtccaatcctttatccccaaacccgctggataagaagataggcaa

SEQ ID NO: 39979 - DNA, 201 bp, Homo sapiens
aggcaaagagggaatcatatcgtggtgtgacaagaacggtagtgtgagtgggcacaggggactctaaggcgagggtggagagtggaaaggtggagtttgtrcggcatcagtataggttcttaaaggtttccctcccacacaaagccaccctcctgctgctggttgagagcacctggaggtgaaggctcaggggaaagggag

SEQ ID NO: 39980 - DNA, 201 bp, Homo sapiens
cgaagcctactggaaaaagaactgcttttcttcgcttatgatgtttttggaattccctttgtggatccggtgagctagggtacaggagccggaagggagcrgggaaagagtgagcaggagagatgaatggggaggaggggaacactgtgcgattctgagagaaaacttgctggaggctgagcctagcctgggatctgtgca

SEQ ID NO: 39981 - DNA, 201 bp, Homo sapiens
gttctcccgcctcagcctccagagtagcttcggactacaggcacacaccaccatgcccggctaattttttgtattttagtagagacagggtttcacatgtygcccaggttggtctccaactcctgagctcaggcaatcctcccgccttagcctcccaaagtgctaagattacaggcgtgagccaccacacccagcctcatt

SEQ ID NO: 39982 - DNA, 201 bp, Homo sapiens
gcctcagcctccagagtagcttcggactacaggcacacaccaccatgcccggctaattttttgtattttagtagagacagggtttcacatgtcgcccaggytggtctccaactcctgagctcaggcaatcctcccgccttagcctcccaaagtgctaagattacaggcgtgagccaccacacccagcctcatttttttgtt

SEQ ID NO: 39983 - DNA, 201 bp, Homo sapiens
tggcctcccaaagtgctgggattacaagtgtgagccacggcacctggccaaaaagtacattttagatagttaatatgtttgattcaatttgtttgtctctraagttttttttttcttcagcttctcaaatacagattgtattggggaaacagaggcagcataataatgcatcctctgtatttcataagattataggatgaa

SEQ ID NO: 39984 - DNA, 201 bp, Homo sapiens
tctgggcacacccaaagggaccagtcagacacacaactgggtgtgtcacaagcccccggtgggagagcacaagcacaggtgccaggaggccagggaggccycatcaagcagtgaaggacgtggtgaggccttgacttttaaaggattcattttgctgctgtgtgtgtggagagatttcaaaccaaaaagggaagctggtca

SEQ ID NO: 39985 - DNA, 201 bp, Homo sapiens
aataaataaaagttgcactttgctccccagctcttcaaaaagaagaaagccaagttttgaattaaaggagctttctgcgtatctgaatttttcttaatttwaaaaaaaaaaggattcgaaggatttctaggatcattgaaaaaaaaagagatgtgagggaatttgagcacattaaataattttgggcaaagcaaagaccct

SEQ ID NO: 39986 - DNA, 201 bp, Homo sapiens
aatctttaaaacagcaggaccctccatctgtggacactgaagagggtgtacaactggaagtcttgataagagataagaaggaatctggtttttcattgaayaatgacaaaactttagatcttggagctctactacttcaaacctttcacttcacagataaaatagttgaggtccagagagaagtaatctgccttaagtcgc

SEQ ID NO: 39987 - DNA, 201 bp, Homo sapiens
gtccccggcccggtgggtgtggtaggggctcaccagggccaggccgccgggggtcggggtgagctccaccagggctcctgcgacacacacccaggaacacragccgtgagctcccgccgtcggcctcccgcggagccccgagaccggctgcctcgcgggagctgacttccccctgctgactcccgccccgcatacctccct

SEQ ID NO: 39988 - DNA, 201 bp, Homo sapiens
tcctggggctggcaggggctgggcacgctgagtggagggctcagggaggcagggatttcctgtttatgtggactgctcatgtggacacaaacgttcagagwttggatgtgagcattatccaccttctcatgcttcattcttagatcaacaagttggagaaagctgttgctgcagcacacaccttcttcgtgggcaatcctg

SEQ ID NO: 39989 - DNA, 201 bp, Homo sapiens
accatgtattacaggctgcatattatctcgttgaactctcaacaatgctaggagatagctagagaatgctatctccagatgatagattagggaaactgagwttagaaagtaaactttaagtatcttgtctactgcccagccagtcagtgagtcattaagcccagatgtgatgctggcctgtctcttttctttctttctttt

SEQ ID NO: 39990 - DNA, 201 bp, Homo sapiens
cgccttatcctccccactccctgggctgtgcgagtaggaagagcctgcgcataaaggcgcgtgggcggagcttccgtctttcttgtctactgggcgtcagwtcgactgagcaaggcctgagctcggaggcggggctccggctgacgcgccgggattcgctgagggccggtggggggatccgggctgactgaaaggaaaaga

SEQ ID NO: 39991 - DNA, 201 bp, Homo sapiens
agctgacttccccctgctgactcccgccccgcatacctccctggcctgcagctggcggcgctccttgcctttcaaggaccccctcggtccgccccggcgckgcggcgtcctccatgacagcgccttatcctccccactccctgggctgtgcgagtaggaagagcctgcgcataaaggcgcgtgggcggagcttccgtcttt

SEQ ID NO: 39992 - DNA, 201 bp, Homo sapiens
tatatgaaacctgtgttactttgacatgctggagtccattgctgtgggcattgtggtctgtagcctatttctccccccttggatttctttttttttttttwttttttttttttttgagacaagagtctcgctctgtcacccaggctggagtatggtgctgtgatctcggctcgctgtaacctccgcctcccgggttcaagc

SEQ ID NO: 39993 - DNA, 201 bp, Homo sapiens
cttccgtctttcttgtctactgggcgtcagttcgactgagcaaggcctgagctcggaggcggggctccggctgacgcgccgggattcgctgagggccggtsgggggatccgggctgactgaaaggaaaagaggcggtgcaagcctcgtgggcatgcgccgcccggcttggaaggtggggcttcgcccgggggcgggccttc

SEQ ID NO: 39994 - DNA, 201 bp, Homo sapiens
tcaaactcctgacctcaagagatctgcccccttcggcctcccaaagtgctgggattacaggcatgagctaccgcccccgaccaccccctcagatttcttaragctatttgtttgaacctcatgagccctgagctttgagtcagaaaatactatgtctggacttagtaaaggaccttagaatttttagccatccaccttttc

SEQ ID NO: 39995 - DNA, 201 bp, Homo sapiens
ttcttgtctactgggcgtcagttcgactgagcaaggcctgagctcggaggcggggctccggctgacgcgccgggattcgctgagggccggtggggggatcmgggctgactgaaaggaaaagaggcggtgcaagcctcgtgggcatgcgccgcccggcttggaaggtggggcttcgcccgggggcgggccttcgccgggggt

SEQ ID NO: 39996 - DNA, 201 bp, Homo sapiens
ttgagtcagaaaatactatgtctggacttagtaaaggaccttagaatttttagccatccaccttttccctaaatgtctcaaaaattcttcattttattttrtgcaaaaaaaaatttttttctaggaaaattcttaggcatagtctgttagctgctcttttttctctacccctaaatccttgaagccacagaatttcttcag

SEQ ID NO: 39997 - DNA, 201 bp, Homo sapiens
tgggtggatcacttgaggtcaggagtttgagaccagcctggccaatatggtgaaaccccatctctactaaaaatacaaaaattagccaggcatggtggcaygcacccgtaatcccagctactcgacatggaggcaggagaatagcttgaacctggaaggtggaggttgcagtgagccaagattgtgccactgcactccagc

SEQ ID NO: 39998 - DNA, 201 bp, Homo sapiens
gaagaatcgcttgaacccaggaggcggaggttgcagtgagccgagattgtgccactgcactccagcctgggtgacagagcgagactccatcacacacacamaaaaaagtaagttgtgttggccgggcgtggtggctcatgcctgtaatcccagaattttgggaggccgaggtgagtggatcacttgaggccagaagttcaa

SEQ ID NO: 39999 - DNA, 201 bp, Homo sapiens
tttttggagatggagtcttgctctgttgcccaggctggagtgcagtggtgcaatcttggctcactgcaacctccacatcccgggatcatcaaggaattctyctgcctcagcctcccaagtagctgggattacaggcatgtggcaccatgcctggctaatttttttgtatttttagtagagatagggtttcaccatgttggc

SEQ ID NO: 40000 - DNA, 201 bp, Homo sapiens
ggctcctcacttcccagtaggggcggccgggcagaggcgcccctcacctcccggacgcaaactcccatttttttaaagccaccagatctcgtgagacttaytcagtattatgagaacagcacgggaaagatccacccccattattcagtcatctcccaccaggtcccttccacaacacatgggaattatgggaactacaag

SEQ ID NO: 40001 - DNA, 201 bp, Homo sapiens
tttaaaagactgcattatgatgtggacctgaaacagagttataatgtacacacaagactacctgtcacgtgccacaaagtgcaactgaaggcaatggacattttttttttttcagacagttttcgttcttattgtccaggctgcagtgcaatggcgcaatcttggctcactgcaacttctgcctcctggagtcaagtaatt

SEQ ID NO: 40002 - DNA, 201 bp, Homo sapiens
cgggggtcggggtgagctccaccagggctcctgcgacacacacccaggaacacaagccgtgagctcccgccgtcggcctcccgcggagccccgagaccggytgcctcgcgggagctgacttccccctgctgactcccgccccgcatacctccctggcctgcagctggcggcgctccttgcctttcaaggaccccctcggtc

SEQ ID NO: 40003 - DNA, 201 bp, Homo sapiens
gtggtgcttttcctgctgtttgattcagcagctctctttcaggatgtgaggttgccacgtcgccagcaggggctgcctggccctttctgtgtgtgtgtggkggcgggggggggaccctctggctagtctgccaggtttacaaagaaaatgagtatttttcggaatgccagagtgccatgtgtccaagtgtacacttgggct

SEQ ID NO: 40004 - DNA, 201 bp, Homo sapiens; identical to SEQ ID NO: 6935

SEQ ID NO: 40005 - DNA, 201 bp, Homo sapiens
gtgcttttcctgctgtttgattcagcagctctctttcaggatgtgaggttgccacgtcgccagcaggggctgcctggccctttctgtgtgtgtgtgggggsgggggggggaccctctggctagtctgccaggtttacaaagaaaatgagtatttttcggaatgccagagtgccatgtgtccaagtgtacacttgggcttgg

SEQ ID NO: 40006 - DNA, 201 bp, Homo sapiens
ttaaggaaagcctggttattccagtacctcagaggtactgttgcttgtgccaggcagaggacacagaaattagacttttgtctcaaactggggaacagacagagagcattggtagggagaggaggcctcaggtcacatgggagcatcagtgtggggtgccagggaggggaactcccagaggttaaaagacagggctgagtt

SEQ ID NO: 40007 - DNA, 201 bp, Homo sapiens
taaggaaagcctggttattccagtacctcagaggtactgttgcttgtgccaggcagaggacacagaaattagacttttgtctcaaactggggaacagacagagagcattggtagggagaggaggcctcaggtcacatgggagcatcagtgtggggtgccagggaggggaactcccagaggttaaaagacagggctgagttc

SEQ ID NO: 40008 - DNA, 201 bp, Homo sapiens
cctacctggggatcaagaaggcttcccagagggaaatggggtgcagccagaaagggggccacccgtcacttgtcacacaacgcactttaatggggaagctrgcgctaaaccattcatagaggacctgcctccgggttagggtttcatacatagctgagcagctccctcgctgccatctgttgaaagacagccctcaacaga

SEQ ID NO: 40009 - DNA, 201 bp, Homo sapiens
gtcacatcttacatggatggcagcaggcaaagagagaacttctgcaggcaaactcccatttttttattttttattttttattattttatttatttatttatttatttatttattttttttttattgatcattcttgggtgtttctcgcagagggggatttggcagggtcacaggacaatagtggagggaaggtcagcagat

SEQ ID NO: 40010 - DNA, 201 bp, Homo sapiens
catggatggcagcaggcaaagagagaacttctgcaggcaaactcccatttttttattttttattttttattattttatttatttatttatttatttatttattttttttttattgatcattcttgggtgtttctcgcagagggggatttggcagggtcacaggacaatagtggagggaaggtcagcagataaacaagtgaa

SEQ ID NO: 40011 - DNA, 201 bp, Homo sapiens
ctatcatctgatccttgtaaactccctcatgcatcagacagggcaagtgttattatccctacttttcaatggagaaaccaggcccagggaagctgaggatytggctaatgtcccatagcttttcagtggcaggggtaaagctagaactgtaggcttctcatagcctgagtgaaagcacagggtgctgtgctaccccagggc

SEQ ID NO: 40012 - DNA, 201 bp, Homo sapiens
ctccgggttagggtttcatacatagctgagcagctccctcgctgccatctgttgaaagacagccctcaacagaagggcttgttaaaagcaaaaataataacaacaacaacaacaacaaaaagaaggcttcccagaggaagcaatggcagttttgcaggatgaatacgattacggagtactccgggtggtgggatggtgttt

SEQ ID NO: 40013 - DNA, 201 bp, Homo sapiens
atggcagcaggcaaagagagaacttctgcaggcaaactcccatttttttattttttattttttattattttatttatttatttatttatttatttattttwtttttattgatcattcttgggtgtttctcgcagagggggatttggcagggtcacaggacaatagtggagggaaggtcagcagataaacaagtgaacaaag

SEQ ID NO: 40014 - DNA, 201 bp, Homo sapiens
aggaatgttagaaacaatataagaatgacttataggccaggcgcagtggctaacacctgtaatcccagcactttgggaggccgaggtgggtggatcacttraggtcaggagtttgagaccagcctggccaatatggtgaaaccccatctctactaaaaatacaaaaattagccaggcatggtggcacgcacccgtaatccc

SEQ ID NO: 40015 - DNA, 201 bp, Homo sapiens
aatgatcaacacatacctagcaaggctggctctcggtcaggcactgttgcagaggaagtggcagtgggtcttcagccacaggcagtctgcccactcccagmgtgcgaaggctggaggggcagactgtgcggggagtctttttggaacagagctttcattagtcacagttctgcaggcgttttatgctttcaaacagccttt

SEQ ID NO: 40016 - DNA, 201 bp, Homo sapiens
atggctacaactaccttgagtacaacgctgacctcttccaggccatcacaggtgcgtgcagttcagagccagaccttcagccaggcctcctgggactctarggtcaccatctgataatataaatggggactcttcaccctcattcctcaatttattaaatctgagaagctgatgaaaaattgcttccatttgaatttgttc

SEQ ID NO: 40017 - DNA, 201 bp, Homo sapiens
ggtgctcagggaccttaggaaggaggtaaacgacgcaataagtgcagtgaatggaaatatgccaagagtatgatgggattgcagatcaggatgcttagccrtgcctgggcaggcagaatcgttgggggtggccacacagctggctgtattgctttctagctgtgcgccctgaggcaagtagtctccattccaagcttatag

SEQ ID NO: 40018 - DNA, 201 bp, Homo sapiens
aaaggaaaagaggcggtgcaagcctcgtgggcatgcgccgcccggcttggaaggtggggcttcgcccgggggcgggccttcgccgggggtaggactccggycttggtggcgggtggctggcggttccgttaggtctgagggagcgatggcggtacgcgcgttgaagctgctgaccacactgctggctgtcgtggccgctgc

SEQ ID NO: 40019 - DNA, 201 bp, Homo sapiens
gagaagaaaggagagagcccatgggagggttggaggggatgaaaggcaactcctcaaacacagtgaagatttggatgtggaagacgccgctggtctctggygccccaggcatctagcagagctctcagcaggggcatcaagagacagatgctgtactcagtgtggttagcacaggtaaatgggacagccacatgtgtcaca

SEQ ID NO: 40020 - DNA, 201 bp, Homo sapiens
tatttgggtggctcactcggcgtacagagaggaccacgttagtgcaaaaagcatgaactttacccacacactgagctgggtgacactcccacttccaccaygtggagttgtgtgacctccagcaagttagggaacctgtatgtgtttcctcaccagcggaatggaatcacagtccttcccgcgatggttgagcggatgaac

SEQ ID NO: 40021 - DNA, 201 bp, Homo sapiens
gagatgcgactgtgatttcggtctgcgtttggtaacgcacatgcaagggcgcgcgagcaatgagaggatgactgcttgagaagaaaggagagagcccatgsgagggttggaggggatgaaaggcaactcctcaaacacagtgaagatttggatgtggaagacgccgctggtctctggtgccccaggcatctagcagagctc

SEQ ID NO: 40022 - DNA, 201 bp, Homo sapiens
atagagtggggcgagtcctcctggaagcatggggtgatggcagcccggctgagatgcgactgtgatttcggtctgcgtttggtaacgcacatgcaagggcrcgcgagcaatgagaggatgactgcttgagaagaaaggagagagcccatgggagggttggaggggatgaaaggcaactcctcaaacacagtgaagatttgg

SEQ ID NO: 40023 - DNA, 201 bp, Homo sapiens
cacgttagtgcaaaaagcatgaactttacccacacactgagctgggtgacactcccacttccaccacgtggagttgtgtgacctccagcaagttagggaamctgtatgtgtttcctcaccagcggaatggaatcacagtccttcccgcgatggttgagcggatgaacaagggaatgctcacaaagcaaccagcacgacact

SEQ ID NO: 40024 - DNA, 201 bp, Homo sapiens
cagtggtgcttttcctgctgtttgattcagcagctctctttcaggatgtgaggttgccacgtcgccagcaggggctgcctggccctttctgtgtgtgtgtgggggcgggggggggaccctctggctagtctgccaggtttacaaagaaaatgagtatttttcggaatgccagagtgccatgtgtccaagtgtacacttggg

SEQ ID NO: 40025 - DNA, 201 bp, Homo sapiens
tgttggccaggctggtctcaaactcctgacctcaagagatctgcccccttcggcctcccaaagtgctgggattacaggcatgagctaccgcccccgaccaycccctcagatttcttagagctatttgtttgaacctcatgagccctgagctttgagtcagaaaatactatgtctggacttagtaaaggaccttagaatttt

SEQ ID NO: 40026 - DNA, 201 bp, Homo sapiens
tagggatgaggactgttagcatctgagagatgaagtaacttgtgcagtggcttgtggccagtcagtggtgaccggaatctgttccctgcttggacccagtrcaggcacagctccagacacatggctgacactcagtaaatcagcatcgaatgaataaagatggaagtggggtttgcttcatagcagccttatagggtcatt

SEQ ID NO: 40027 - DNA, 201 bp, Homo sapiens
ctgtgtgtgtggagagatttcaaaccaaaaagggaagctggtcagcaatgacctctgtggacaagggcaaagccctaaactcaggaagtggcagtgggagragggagaagtgaggccccgggaaggtgcaggaggtggatggacaggacctggtgactggctggacaagtgggaatggagaaggaggcacccaccacgacg

SEQ ID NO: 40028 - DNA, 201 bp, Homo sapiens
tgagccctaatgagcccatgtctcttctgagagtggattacagtctttgtcctgtgcaacccccctccctttctgtcccccttaggcagaggtgcagcctmagtgtggaagagccgtgggattctcttcaggcactgaaaacccacatggagtgaaggctgtcaccagggggcagcgctgtgccatcgccctgtggttcac

SEQ ID NO: 40029 - DNA, 201 bp, Homo sapiens
cttagccaaagacacccccctagttcattgggcattccgtagactcaaacacattttgggaagcacctcccctgccaagaagagagctatgccgtctcccraggtgctcccttgctaacatgtgtgacattggccccagaggtccaggcagagaggaaggatgatagtcatccagtccacgtggacaactgcatcctgaat

SEQ ID NO: 40030 - DNA, 201 bp, Homo sapiens
ccctcacctcccggacgcaaactcccatttttttaaagccaccagatctcgtgagacttattcagtattatgagaacagcacgggaaagatccacccccawtattcagtcatctcccaccaggtcccttccacaacacatgggaattatgggaactacaagataagatttgggtagggacacagagccaaaccatatcagt

SEQ ID NO: 40031 - DNA, 201 bp, Homo sapiens
ctgaccatctgtctccttggcagctggggcaagaaggcaaagttcctctgcagagtgcccacctgtactacaacgtgacggagaaggtgcggcgcatcatrgagtcctacttccgcctggatacgcccctctacttttcctactctcatctggtgtgccgcactgccatcgaaggtgggcctcattacccctgcagcaccc

SEQ ID NO: 40032 - DNA, 201 bp, Homo sapiens
ataggttcttaaaggtttccctcccacacaaagccaccctcctgctgctggttgagagcacctggaggtgaaggctcaggggaaagggaggcagggaaggrccatgatgagatgtctctgcctttcccagcgccatcctttacctaaatggggacttcgatggcggaaacttttatttcactgaactggatgccaagaccg

SEQ ID NO: 40033 - DNA, 201 bp, Homo sapiens
agcatggaggaagttatagtcaacctacctggggatcaagaaggcttcccagagggaaatggggtgcagccagaaagggggccacccgtcacttgtcacayaacgcactttaatggggaagctggcgctaaaccattcatagaggacctgcctccgggttagggtttcatacatagctgagcagctccctcgctgccatct

SEQ ID NO: 40034 - DNA, 201 bp, Homo sapiens
acatgggaattatgggaactacaagataagatttgggtagggacacagagccaaaccatatcagtcgttgagggcagctgaccatctgtctccttggcagstggggcaagaaggcaaagttcctctgcagagtgcccacctgtactacaacgtgacggagaaggtgcggcgcatcatagagtcctacttccgcctggatac

SEQ ID NO: 40035 - DNA, 201 bp, Homo sapiens
ttagggaagccatactgaagagctgccctcggtcgtgagccctaatgagcccatgtctcttctgagagtggattacagtctttgtcctgtgcaacccccckccctttctgtcccccttaggcagaggtgcagcctcagtgtggaagagccgtgggattctcttcaggcactgaaaacccacatggagtgaaggctgtcacc

SEQ ID NO: 40036 - DNA, 201 bp, Homo sapiens
caagataagtgtatatagagtggggcgagtcctcctggaagcatggggtgatggcagcccggctgagatgcgactgtgatttcggtctgcgtttggtaackcacatgcaagggcgcgcgagcaatgagaggatgactgcttgagaagaaaggagagagcccatgggagggttggaggggatgaaaggcaactcctcaaaca

SEQ ID NO: 40037 - DNA, 201 bp, Homo sapiens
agtcctcctggaagcatggggtgatggcagcccggctgagatgcgactgtgatttcggtctgcgtttggtaacgcacatgcaagggcgcgcgagcaatgaraggatgactgcttgagaagaaaggagagagcccatgggagggttggaggggatgaaaggcaactcctcaaacacagtgaagatttggatgtggaagacgc

SEQ ID NO: 40038 - DNA, 201 bp, Homo sapiens
ggggtgctcggagcgggcagcctgaaccccgggaatgtgcagaggccactgctccgcgccaggctgctctagagttgggggccagggcccagtgttccagwcccagcaggagctactaagccagccagcaaggggattaaggggctgagcaatccgccttccttcaggctgatgccagaaggttggggctgtctccccagc

SEQ ID NO: 40039 - DNA, 201 bp, Homo sapiens
ggtcaagaaagagtatggtgacattagccaggagacgtgtcacgtgcctgtagtcccagctggacgctgaggcaggaagatcgcttgagcctggaagttcraggctgcagtgagctatgatcgcccgactgcactccagccttcacaagaaagcaagatcccaactctaaaaacaaataaaaaggaaagtggtggattgtc

SEQ ID NO: 40040 - DNA, 201 bp, Homo sapiens
tggcctattatgcagctatgcttggagaagaacacaccagatccatcggcccccgtgaggtgagagacttccttctgttatgacagctgccagctgaactyagacctgagggcggaagagtggggtagcagaggggagtaggcgctgtgcgtgcagggcaggggccagatgtcagtgttggggccagatgtgagttcagtc

SEQ ID NO: 40041 - DNA, 201 bp, Homo sapiens
caggccatcatgttaagtagcaggcaccagcttgtcatgctgccattgcctcaagctttgtggagactgaacactaagtggtccctggtgctaggattttmtcctttccttttgactctttcctctcagccattcttctttccactttgcagttgggaattatacacaggctgttgaatgtgccaagacctatcttctctt

SEQ ID NO: 40042 - DNA, 201 bp, Homo sapiens
gcatataaaattttaaattttctggtagccacgttaatagtaaattaattctaacaatactttttttttttttttttgaggcagagtctcgctctgtcacrgaggctggaatgcagtggtgcagaggctcactgcaacctccgcctcccgggttcaagcaaatctcgcacctcagcctcctgagtagctaggaccacaggc

SEQ ID NO: 40043 - DNA, 201 bp, Homo sapiens
ctttctttctttttaaatttattttagagacagagtcttgctctgtcacccaggctggagtgcagtggcttgatcatagctcactgtaacctcaaattccyggactcaagagaccctctagtctcggcctcctgagtagttgggactacaggcatgcattcttttgtttttttttaaatgacattactaaggttgttttct

SEQ ID NO: 40044 - DNA, 201 bp, Homo sapiens
cctagcacacacacactggttggggctagctgttcccagagtccaatcctttatccccaaacccgctggataagaagataggcaaagagggaatcatatcrtggtgtgacaagaacggtagtgtgagtgggcacaggggactctaaggcgagggtggagagtggaaaggtggagtttgtgcggcatcagtataggttctta

SEQ ID NO: 40045 - DNA, 201 bp, Homo sapiens
gcctccgggttagggtttcatacatagctgagcagctccctcgctgccatctgttgaaagacagccctcaacagaagggcttgttaaaagcaaaaataataacaacaacaacaacaacaaaaagaaggcttcccagaggaagcaatggcagttttgcaggatgaatacgattacggagtactccgggtggtgggatggtgt

SEQ ID NO: 40046 - DNA, 201 bp, Homo sapiens
cctccgggttagggtttcatacatagctgagcagctccctcgctgccatctgttgaaagacagccctcaacagaagggcttgttaaaagcaaaaataataacaacaacaacaacaacaaaaagaaggcttcccagaggaagcaatggcagttttgcaggatgaatacgattacggagtactccgggtggtgggatggtgtt

SEQ ID NO: 40047 - DNA, 201 bp, Homo sapiens
taagaaaggtgccaaatcctggagagctacattcaagggaatttttatcctttagctcaaccatagctatgtggcagattctcttttactaattgttaaawaccaaatttgtgagagagcttcgtgatttacaagtgagagtggcctggaggttattcctcattccctcgcccacccacattcccttttgcatgtccaaga

SEQ ID NO: 40048 - DNA, 201 bp, Homo sapiens; identical to SEQ ID NO: 6921

SEQ ID NO: 40049 - DNA, 201 bp, Homo sapiens
ctgagggcggaagagtggggtagcagaggggagtaggcgctgtgcgtgcagggcaggggccagatgtcagtgttggggccagatgtgagttcagtcactcrgcttgttattcagaggagaagggagcacagggagggagtgtggggagtacacaggagcctcaattagcgttatctgggcccagaagtctattctctgagt

SEQ ID NO: 40050 - DNA, 201 bp, Homo sapiens
gaggtgtgagaaaaggcatcaagaagaagctaggccaggctcagtagctcacgcttgtaatcccagcagtttgggaggcgaaggccagtggatcacttgarttcagaagtttaagaccagcctggtcaacatagggtgaccctatctctaaaaaaaacttgaaaagccaggcatggtgatgcacacctgtggtcccaatac

SEQ ID NO: 40051 - DNA, 201 bp, Homo sapiens
accatgaactccaaactcctgaatggttcccagcgggtggtgatggacggcgtaatctctgaccacgagtgtcaggagctgcagagactgaccaatgtaakggaagcccagtgactgcaccttcccccaagggtccagcatccccccaccaagtgccccttgggtggtagccttcgccttcctcttcctggccacagttga

SEQ ID NO: 40052 - DNA, 201 bp, Homo sapiens
tttcataagattataggatgaaagacaaaaactgtgttctttcttccatctgttcaggccatcgtaataaacacgatagtcattcaatagcacatgaataygttgtgtgcacaagattctgtccctgccaacctccctcccaataagagtaatctgattaactagatgcatattctcttaataaataaaagttgcactttg

SEQ ID NO: 40053 - DNA, 201 bp, Homo sapiens
acaacgtgacggagaaggtgcggcgcatcatagagtcctacttccgcctggatacgcccctctacttttcctactctcatctggtgtgccgcactgccatygaaggtgggcctcattacccctgcagcacccgcccccgcatgctgtacctcagctctgtgctggatgctgaagacacagagagaacaggatgcggtccct

SEQ ID NO: 40054 - DNA, 201 bp, Homo sapiens
tgaaatatatatatgtatttttttttttttgagtcagggtcctgctgtgtcacccaagctggagtgctgtggcaccatcttggctcactgcaacctctgcytcccaggcccaagcgtcctcccacctcagcctgcagagtagctgggactacaggcatatagtaccatgtaatttttgtatttttcgtaaagacagggttt

SEQ ID NO: 40055 - DNA, 201 bp, Homo sapiens
ccaggcccaagcgtcctcccacctcagcctgcagagtagctgggactacaggcatatagtaccatgtaatttttgtatttttcgtaaagacagggtttcamcatgttgcccagactggtcttgaactcctgagctcaagtgatccacctgcctcggcctctaaaaatgctgggattacagacctgagccaccgcacccagc

SEQ ID NO: 40056 - DNA, 201 bp, Homo sapiens
atattgatgagtgtacaatatttacagttgagttgagatgactaacaaatatcaacaagaactattttgccaaagagacaatctgctattgtaatcttccytgtcttctgaaaatctatagaaaaaagaaggtaggaagacagggaaattgatctaatgattgagtgtattgaggcaaaatattaaggagtattggaatta

SEQ ID NO: 40057 - DNA, 201 bp, Homo sapiens
aggtggcagcaacctcaggagatggctaccggggtcagacctccccacatactcccaatgaaaagttctatggtgtcactgtcttcaaagccctcaaggtragatcaacactgggcattctagagtgtggagaaaggggtggggaagggggaagctcaggctttgaggaagagttggggctggtggcaggaaaggtgaaga

SEQ ID NO: 40058 - DNA, 201 bp, Homo sapiens
cccagcctacaccttccgcgactacaggtgagtgcggggcaggtgcagggtgaggaggtctgtgccctcctcagaggccccacagtgccctgcactctacyaccccaccctagcacacacacactggttggggctagctgttcccagagtccaatcctttatccccaaacccgctggataagaagataggcaaagagggaa

SEQ ID NO: 40059 - DNA, 201 bp, Homo sapiens
tacctggggatcaagaaggcttcccagagggaaatggggtgcagccagaaagggggccacccgtcacttgtcacacaacgcactttaatggggaagctggygctaaaccattcatagaggacctgcctccgggttagggtttcatacatagctgagcagctccctcgctgccatctgttgaaagacagccctcaacagaag

SEQ ID NO: 40060 - DNA, 201 bp, Homo sapiens
atggtgtgatcatagctcactgcagccttgacctcctgggctcaagtgatcctcccgcctcagccccacaaatagctgggactagaggcatgcaccaccayacccagctattgtttttattttttgtagagacggggtctcactgtgttgcccaggctgatttcaaactcctggcctcaagcgatcctactgccttgggct

SEQ ID NO: 40061 - DNA, 201 bp, Homo sapiens; identical to SEQ ID NO: 6896

SEQ ID NO: 40062 - DNA, 201 bp, Homo sapiens
ggtgcttttcctgctgtttgattcagcagctctctttcaggatgtgaggttgccacgtcgccagcaggggctgcctggccctttctgtgtgtgtgtggggscgggggggggaccctctggctagtctgccaggtttacaaagaaaatgagtatttttcggaatgccagagtgccatgtgtccaagtgtacacttgggcttg

SEQ ID NO: 40063 - DNA, 201 bp, Homo sapiens
ggtgctcggagcgggcagcctgaaccccgggaatgtgcagaggccactgctccgcgccaggctgctctagagttgggggccagggcccagtgttccagtcycagcaggagctactaagccagccagcaaggggattaaggggctgagcaatccgccttccttcaggctgatgccagaaggttggggctgtctccccagctc

SEQ ID NO: 40064 - DNA, 201 bp, Homo sapiens
tctgttatgacagctgccagctgaactcagacctgagggcggaagagtggggtagcagaggggagtaggcgctgtgcgtgcagggcaggggccagatgtcrgtgttggggccagatgtgagttcagtcactcggcttgttattcagaggagaagggagcacagggagggagtgtggggagtacacaggagcctcaattagc

SEQ ID NO: 40065 - DNA, 201 bp, Homo sapiens
tcccttgtccttgtccctgggagataaaaagtctgttttctacagctgatgttcccaaagtgcagtggacaaaaataaccaactgggcttcccagtgggcrgtacccttcccccatccagaggggctttgagacgtgtccatcactcctctaaccagtcaccctttctctttagttctggtcttagggaagccatactgaa

SEQ ID NO: 40066 - DNA, 201 bp, Homo sapiens; identical to SEQ ID NO: 6885

SEQ ID NO: 40067 - DNA, 201 bp, Homo sapiens; identical to SEQ ID NO: 6886

SEQ ID NO: 40068 - DNA, 201 bp, Homo sapiens
ccctggatctggctgagggctcaggacacaggcccagccacccccaggggcctccacaggccgctgcataacagcgatacagtacttaagtgtctgtgtakacaaccaaagaataaatgattcatggttttttttacttggtttgttcagacaatggaaatttgcccattctgtcccagaggtctcacttgataaaaattg

SEQ ID NO: 40069 - DNA, 201 bp, Homo sapiens
tcttctcaagccctcagctgccctggctaacatcaccttgtgttttgggccttgtaggtggcagcaacctcaggagatggctaccggggtcagacctcccsacatactcccaatgaaaagttctatggtgtcactgtcttcaaagccctcaaggtaagatcaacactgggcattctagagtgtggagaaaggggtggggaa

SEQ ID NO: 40070 - DNA, 201 bp, Homo sapiens
gcacaaaggagggagactctagctttatctcagagaaattagacttcaaagaagaggtaatattgaagcctgccctaagtattgccagggggagaggaaaraaggctcctccagatagagagaaaagtagaaccaaagcatgatgtattcaggaaaaaaaatgaactcttgtgattgcaatgtcgagatgtgtgtggggag

SEQ ID NO: 40071 - DNA, 201 bp, Homo sapiens
catttgtccacaagagaggaggttaagtacctcagtgcttagagagtaaagaaggctgggggtggagagaggagtgaggacatgagggagaacagagaaargcaggagcagcgctgaaagacacaagagctagagtaattccatgaaagggacagacctgaaaaaatttctaattttacagttaaagaaactgaggtacag

SEQ ID NO: 40072 - DNA, 201 bp, Homo sapiens
tggccccagaggtccaggcagagaggaaggatgatagtcatccagtccacgtggacaactgcatcctgaatgccgagaccctcgtgtgtgtcaaagagccyccagcctacaccttccgcgactacaggtgagtgcggggcaggtgcagggtgaggaggtctgtgccctcctcagaggccccacagtgccctgcactctact

SEQ ID NO: 40073 - DNA, 201 bp, Homo sapiens
gtcaagtctaataccgttcaacagaaatatgaggcaagttgcatataaaattttaaattttctggtagccacgttaatagtaaattaattctaacaatactttttttttttttttttgaggcagagtctcgctctgtcacggaggctggaatgcagtggtgcagaggctcactgcaacctccgcctcccgggttcaagcaa

SEQ ID NO: 40074 - DNA, 201 bp, Homo sapiens
gtggggcttcgcccgggggcgggccttcgccgggggtaggactccggccttggtggcgggtggctggcggttccgttaggtctgagggagcgatggcggtrcgcgcgttgaagctgctgaccacactgctggctgtcgtggccgctgcctcccaagccgaggtcgagtccgaggcaggatggggcatggtgacgcctgatc

SEQ ID NO: 40075 - DNA, 201 bp, Homo sapiens; identical to SEQ ID NO: 6914

SEQ ID NO: 40076 - DNA, 201 bp, Homo sapiens
tggccctggaatgcagtcctcagagcggctgtgctcataggtcagaacgggaaacagccgtacgcatctcccaggagattgggaaccttatgaaggaaatygagacccttgtggaagagaagaccaaggagtcactggatgtgagcagactgacccgggaaggtgagaggacagaaataggggcatgtctggctgttgtca

SEQ ID NO: 40077 - DNA, 201 bp, Homo sapiens
cccctctacttttcctactctcatctggtgtgccgcactgccatcgaaggtgggcctcattacccctgcagcacccgcccccgcatgctgtacctcagctytgtgctggatgctgaagacacagagagaacaggatgcggtcccttttcttcagttggggaaccaatgtaaatacatgggtggcatcccagtgtgatgcat

SEQ ID NO: 40078 - DNA, 201 bp, Homo sapiens
ctggaatgcagtggtgcagaggctcactgcaacctccgcctcccgggttcaagcaaatctcgcacctcagcctcctgagtagctaggaccacaggcatgcrtcaccatgccccgctaatttttgtatttttagtagagatggggttttgccatgtttgccaggctggcctcgaactcctggcctcaagtgatacgcctgcc

SEQ ID NO: 40079 - DNA, 201 bp, Homo sapiens
tgcttttcctgctgtttgattcagcagctctctttcaggatgtgaggttgccacgtcgccagcaggggctgcctggccctttctgtgtgtgtgtgggggcsggggggggaccctctggctagtctgccaggtttacaaagaaaatgagtatttttcggaatgccagagtgccatgtgtccaagtgtacacttgggcttgga

SEQ ID NO: 40080 - DNA, 201 bp, Homo sapiens
gaattatacacaggctgttgaatgtgccaagacctatcttctcttcttccccaatgacgaggtgatgaaccaaaatttggcctattatgcagctatgcttrgagaagaacacaccagatccatcggcccccgtgaggtgagagacttccttctgttatgacagctgccagctgaactcagacctgagggcggaagagtggg

SEQ ID NO: 40081 - DNA, 201 bp, Homo sapiens
cccctgaaatcaggccatcatgttaagtagcaggcaccagcttgtcatgctgccattgcctcaagctttgtggagactgaacactaagtggtccctggtgstaggattttatcctttccttttgactctttcctctcagccattcttctttccactttgcagttgggaattatacacaggctgttgaatgtgccaagacct

SEQ ID NO: 40082 - DNA, 201 bp, Homo sapiens
ctttccactttgcagttgggaattatacacaggctgttgaatgtgccaagacctatcttctcttcttccccaatgacgaggtgatgaaccaaaatttggcytattatgcagctatgcttggagaagaacacaccagatccatcggcccccgtgaggtgagagacttccttctgttatgacagctgccagctgaactcagac

SEQ ID NO: 40083 - DNA, 201 bp, Homo sapiens
tcgatagggccccttttctgtccccctcagatctcaaaaagaccccacagtacatatttcctggtctggcctccctgatttttggcacacacagctcccargtacccatgacccctcttcccaacaccccaccgctagctcagcctccccacatccagcttcagagcccctgccaaaaagttatccttgacatctaactct

SEQ ID NO: 40084 - DNA, 201 bp, Homo sapiens
gccccttttctgtccccctcagatctcaaaaagaccccacagtacatatttcctggtctggcctccctgatttttggcacacacagctcccaggtacccaygacccctcttcccaacaccccaccgctagctcagcctccccacatccagcttcagagcccctgccaaaaagttatccttgacatctaactctagttttac

SEQ ID NO: 40085 - DNA, 201 bp, Homo sapiens; identical to SEQ ID NO: 6976

SEQ ID NO: 40086 - DNA, 201 bp, Homo sapiens
atgccctgtgcacacctatgtgtgtttgtctttggcctcctcggggcctctgggtgtcagagaccgcagacagggctggctacctgtctgtgcacgcacamacacattcccaagcataccagcctcccctgagcctggagcccctgaagccatgagcagcctgtgctcaggtggcccccaccctctccacacgggagcggc

SEQ ID NO: 40087 - DNA, 201 bp, Homo sapiens
gggctgtgtgatgaggcagggccatgacctccatgaagcaattctcctggtctatgtgagcacccagcagaggaaggtgaccatcatcatcatcatcatcmtgtgtcccaggcagaacacatagagccccagggggctcctccctcctcacccccagcaaaagaggccctggggtgagggtgcccgggcattccttgtgaa

SEQ ID NO: 40088 - DNA, 201 bp, Homo sapiens; identical to SEQ ID NO: 19737

SEQ ID NO: 40089 - DNA, 201 bp, Homo sapiens
aaaatctcagtgctctttgtgtaagggtcaggagaagcctgaggctggtgactggggccaaccagcctgctggcagcagcatcccctacacggccaccctyttggggggacaggacagcctgggtgggcctgggctctcactgtcacttaggagctctgtggccctgggaggcgtccccacccctccaagctatcatagca

SEQ ID NO: 40090 - DNA, 201 bp, Homo sapiens; identical to SEQ ID NO: 19738

SEQ ID NO: 40091 - DNA, 201 bp, Homo sapiens; identical to SEQ ID NO: 19744

SEQ ID NO: 40092 - DNA, 201 bp, Homo sapiens
ggacccctggggctcctgcatcctagtgctggggctcaaacctagagtcctgccttacccccaactggggtcccaagccctacagacccctgcagaccatraggctaaactagggtgggcgtctccttacccccaccagcatcagaggtgccctggagtcagagggagcaggggagggtcccagcagggccagggctctga

SEQ ID NO: 40093 - DNA, 201 bp, Homo sapiens; identical to SEQ ID NO: 19745

SEQ ID NO: 40094 - DNA, 201 bp, Homo sapiens
gagcctgactccagcaggcctgccttggggctggggctggggtggaggccagccagtgtcctcccatagtggccgagaagaccaaggagcaggccaacgcsgtgagcgaggctgtggtgagcagcgtcaacactgtggccaccaagaccgtggaggaggcggagaacatcgcggtcacctccggggtggtgcgcaaggtga

SEQ ID NO: 40095 - DNA, 201 bp, Homo sapiens
tgaacccggaaggcagaggttgcagtgagtggagactgtaccactgcactccagcctgggtgacagagcgagactccatctcaataataataataataatrataataataataataataatagtcttgggccaggtgcagtggctcatgacgatcatcccaacactgggaggccgaggcaggaagactgcttgagactagg

SEQ ID NO: 40096 - DNA, 201 bp, Homo sapiens
ggtgcattgtcacgactgggtggtgggtgctactcatgactaggtatctcatgggtggggcccaaagatgctgccaaataccctacaatgcataggacatmtccacaccccaccacaaggaattatctagtccaaaatgtcagtatgccagggctgagaaactctctctaaacaaacttccattccttgcaaacctctgac

SEQ ID NO: 40097 - DNA, 201 bp, Homo sapiens; identical to SEQ ID NO: 19749

SEQ ID NO: 40098 - DNA, 201 bp, Homo sapiens; identical to SEQ ID NO: 19751

SEQ ID NO: 40099 - DNA, 201 bp, Homo sapiens; identical to SEQ ID NO: 19753

SEQ ID NO: 40100 - DNA, 201 bp, Homo sapiens; identical to SEQ ID NO: 19754

SEQ ID NO: 40101 - DNA, 201 bp, Homo sapiens; identical to SEQ ID NO: 19756

SEQ ID NO: 40102 - DNA, 201 bp, Homo sapiens; identical to SEQ ID NO: 19764

SEQ ID NO: 40103 - DNA, 201 bp, Homo sapiens; identical to SEQ ID NO: 19765

SEQ ID NO: 40104 - DNA, 201 bp, Homo sapiens
gggtctccagaccctggagcacccacaatgccctgtgcacacctatgtgtgtttgtctttggcctcctcggggcctctgggtgtcagagaccgcagacagrgctggctacctgtctgtgcacgcacacacacattcccaagcataccagcctcccctgagcctggagcccctgaagccatgagcagcctgtgctcaggtgg

SEQ ID NO: 40105 - DNA, 201 bp, Homo sapiens; identical to SEQ ID NO: 19766

SEQ ID NO: 40106 - DNA, 201 bp, Homo sapiens
tggaaggaaggaaggaatgctcactcaacactgaaacagagagctgggaaggcgctggccccagagctcaggagccacaggtgtcatgcttgcctgcacaracatccacctggggccccatggaaactcctggaacatgggctcagtattgggggaacccactcccaatatttcaacatacattctttctattttccctaa

SEQ ID NO: 40107 - DNA, 201 bp, Homo sapiens
agcccttggagccacctcgagggagactcatttcctggtgacaccccaaaaccagtcacgactcatctcccagtgaactgtgaaaggcctcagcagggacyatctgaccactcatacccctggcctcatcatcagccttagggcagcaggactcagcaggtggccacctgccctgcccctggatagcctggccgactcccg

SEQ ID NO: 40108 - DNA, 201 bp, Homo sapiens; identical to SEQ ID NO: 6984

SEQ ID NO: 40109 - DNA, 201 bp, Homo sapiens
aaccctcactccttggggctaagggagcaatgtctctcccacaaccaagggggtggggaggaagaggagcagctccctcctccctcccgtccaccgggtcytctcatcctccctttcatcaaaaggcggaaggtggcctgagactaaggcgtggagcttccttggtcctgaaatcagagcggagtggctggatccagcccg

SEQ ID NO: 40110 - DNA, 201 bp, Homo sapiens; identical to SEQ ID NO: 6972

SEQ ID NO: 40111 - DNA, 201 bp, Homo sapiens; identical to SEQ ID NO: 19769

SEQ ID NO: 40112 - DNA, 201 bp, Homo sapiens; identical to SEQ ID NO: 19773

SEQ ID NO: 40113 - DNA, 201 bp, Homo sapiens; identical to SEQ ID NO: 6956

SEQ ID NO: 40114 - DNA, 201 bp, Homo sapiens; identical to SEQ ID NO: 19776

SEQ ID NO: 40115 - DNA, 201 bp, Homo sapiens; identical to SEQ ID NO: 6992

SEQ ID NO: 40116 - DNA, 201 bp, Homo sapiens; identical to SEQ ID NO: 19780

SEQ ID NO: 40117 - DNA, 201 bp, Homo sapiens; identical to SEQ ID NO: 2600

SEQ ID NO: 40118 - DNA, 201 bp, Homo sapiens
gatagatactattagcccatttcacagatgggaccccagtgaggtctagagaggctctgctctagctgagctgggactcagatcctactccatgacctctkccaaggtccaggccctcttaccgtcctacggggtccttgccggtgtcctcagcctctgccttccagaccccaggtgtcctggagctctgcagatcagaga

SEQ ID NO: 40119 - DNA, 201 bp, Homo sapiens; identical to SEQ ID NO: 19783

SEQ ID NO: 40120 - DNA, 201 bp, Homo sapiens; identical to SEQ ID NO: 19787

SEQ ID NO: 40121 - DNA, 201 bp, Homo sapiens
atgggaccccagtgaggtctagagaggctctgctctagctgagctgggactcagatcctactccatgacctctgccaaggtccaggccctcttaccgtccwacggggtccttgccggtgtcctcagcctctgccttccagaccccaggtgtcctggagctctgcagatcagagaggctagtactggaagcctgggcccatg

SEQ ID NO: 40122 - DNA, 201 bp, Homo sapiens
ccatctcaggggacctgctgcccatccacactgctggccaggaaatggggggcaattcatgcctcctcagcaccttcagcactgggcggctcaaagaaggsaagggactattctggggtcacacagcatgcagccagaggccaaggcatgaggaagtccttcatttccccacccccacccacctcagatcctccaaccggt

SEQ ID NO: 40123 - DNA, 201 bp, Homo sapiens; identical to SEQ ID NO: 19790

SEQ ID NO: 40124 - DNA, 201 bp, Homo sapiens; identical to SEQ ID NO: 19793

SEQ ID NO: 40125 - DNA, 201 bp, Homo sapiens; identical to SEQ ID NO: 19792

SEQ ID NO: 40126 - DNA, 201 bp, Homo sapiens
gaacctgctccctgggagccatgaaaagagcgtggacttcgaggtggggccacaggaagtggtcaggtccatctcaggggacctgctgcccatccacactgctggccaggaaatggggggcaattcatgcctcctcagcaccttcagcactgggcggctcaaagaaggcaagggactattctggggtcacacagcatgcag

SEQ ID NO: 40127 - DNA, 201 bp, Homo sapiens
aggtctagagaggctctgctctagctgagctgggactcagatcctactccatgacctctgccaaggtccaggccctcttaccgtcctacggggtccttgcyggtgtcctcagcctctgccttccagaccccaggtgtcctggagctctgcagatcagagaggctagtactggaagcctgggcccatgcccccagcagcccc

SEQ ID NO: 40128 - DNA, 201 bp, Homo sapiens; identical to SEQ ID NO: 19796

SEQ ID NO: 40129 - DNA, 201 bp, Homo sapiens
taaggggcctcttgcccctccctggtcaaatctgttttcaggaaagcacccaacaaacctgcaactcagaagccaaatgagacctatcccaggcaggtccrctctgcgatggtggctctcatacaccgcacagaagtgtaagttggcccccccctcactccctaaatccatgtagatgcccttagccaaacaggtctggtg

SEQ ID NO: 40130 - DNA, 201 bp, Homo sapiens
gctctgcgatggtggctctcatacaccgcacagaagtgtaagttggcccccccctcactccctaaatccatgtagatgcccttagccaaacaggtctggtrtgtgggggcaggagggtggaggtaggagcatctgggggctggggctggctccaagtgctgcagagagttcactatgagctctgaagtcaaactcagatcc

SEQ ID NO: 40131 - DNA, 201 bp, Homo sapiens; identical to SEQ ID NO: 6961

SEQ ID NO: 40132 - DNA, 201 bp, Homo sapiens
tagtgacaccctgtctctactaaaaatacaaaaaattatctgggcataatctcctaattatcctagctacttgggaggctgaggcagaagaatcgcttgamcccgggaggcagaggttgtggtgggccaagatcacaccattgcactccagcctgggtgacagtgagagactccgtctcaaaaataataataataataaaa

SEQ ID NO: 40133 - DNA, 201 bp, Homo sapiens
ggccccgtaaacagcacctgctgctctgactgaggggcagttggagatgaggggggacttacaggcccaacacctcatcagcaggatgggccctggctctrtacacatagaatgttggaaagctatgttctgggtccagttgcaagaccatcctgcccacttgctgggtcgctgaggcagagcgccctggactgtgctctg

SEQ ID NO: 40134 - DNA, 201 bp, Homo sapiens
ctcctaattatcctagctacttgggaggctgaggcagaagaatcgcttgaacccgggaggcagaggttgtggtgggccaagatcacaccattgcactccarcctgggtgacagtgagagactccgtctcaaaaataataataataataaaaagaaagaaaaataatagtctcctagatcccctgagcttagggcctgagca

SEQ ID NO: 40135 - DNA, 201 bp, Homo sapiens
ttgggccaggtgcagtggctcatgacgatcatcccaacactgggaggccgaggcaggaagactgcttgagactaggaatttgagaccagcctgggcaatayagtgagacttcatctctacaaaaaatacaaaaaataataaaaagaggccgggtacggtggctcatgcctgtaatcccagcactttgggaggccgaagcag

SEQ ID NO: 40136 - DNA, 201 bp, Homo sapiens
ggtgaagagagcctccagaatgacaatgggctgtggtatgagggcagcagttcacattggaacacacctggaggctctgggagccacatctccaagaagaygcagctgatctgacacctggcatgaatgagtgtagagagcagatgtggacaactggctgagggtgtggagttgagttagtgataaagacacagaataagc

SEQ ID NO: 40137 - DNA, 201 bp, Homo sapiens
ggtggccccaccaaatgcatccttatgggaacctgctccctgggagccatgaaaagagcgtggacttcgaggtggggccacaggaagtggtcaggtccatstcaggggacctgctgcccatccacactgctggccaggaaatggggggcaattcatgcctcctcagcaccttcagcactgggcggctcaaagaaggcaagg

SEQ ID NO: 40138 - DNA, 201 bp, Homo sapiens; identical to SEQ ID NO: 6989

SEQ ID NO: 40139 - DNA, 201 bp, Homo sapiens
cccagggcctagcctccctccctgggctgggcggggcagctgcctcctgctgggagcctcagggaagtagcgtcccctagtggtaagaaagcagtgctgcktctgaccctaccctctgcagctgcctttgtgtgtgtgtgcacgtgtgttgagtgagcatgtgggtgcatttgtgagaatgtgtgggtgtacatgcgtgtg

SEQ ID NO: 40140 - DNA, 201 bp, Homo sapiens
gggtgggtggaagggtgggggctgccctactcctcttggctctggggcgatgcccaggtgtctgcttccagggccagcacagggtctccatgtccttggarctggcagccgctccctctcctagttcccctttctcgtcgtatgaccttgagaagcaaaggaacctctctgggcctccgtgttctcatctgcaagatgggg

SEQ ID NO: 40141 - DNA, 201 bp, Homo sapiens; identical to SEQ ID NO: 19805

SEQ ID NO: 40142 - DNA, 201 bp, Homo sapiens
agtctcctagatcccctgagcttagggcctgagcaccagcattttaaggctctctgggtaattgcatggcacacccaggatgcagaaccgtggtgtcacargaaacactctaacaaaacaacagagaaaatcaagaaagagaaagcacaagatcaggaaacaggttccaacacaaaaaccaggtgaagagagcctccagaa

SEQ ID NO: 40143 - DNA, 201 bp, Homo sapiens
ctgggtaattgcatggcacacccaggatgcagaaccgtggtgtcacaggaaacactctaacaaaacaacagagaaaatcaagaaagagaaagcacaagatsaggaaacaggttccaacacaaaaaccaggtgaagagagcctccagaatgacaatgggctgtggtatgagggcagcagttcacattggaacacacctggag

SEQ ID NO: 40144 - DNA, 201 bp, Homo sapiens
cctggccgactcccgccagcacagcactgcccttttatgccccactccgccaaggggcaggatggccctggggcaacacagaggtgacagtatccccgcctcccccccgtcccccgccagaggcaggtgctgaggccagagtgcagggcaatcaccagtgtggtcctacacacccagctgtcatgatatctcacgcaagtg

SEQ ID NO: 40145 - DNA, 201 bp, Homo sapiens
gagcctggagcccctgaagccatgagcagcctgtgctcaggtggcccccaccctctccacacgggagcggctacagccaggtcacggatcccctccctccscagagagaaggggcaggctgggggatgaaacctaggctcagtgttccctcccccgcatcctctcctggcactctccagaggaggaaggggaggtcaagcc

SEQ ID NO: 40146 - DNA, 201 bp, Homo sapiens; identical to SEQ ID NO: 19809

SEQ ID NO: 40147 - DNA, 201 bp, Homo sapiens; identical to SEQ ID NO: 19810

SEQ ID NO: 40148 - DNA, 201 bp, Homo sapiens
gaagatgcagctgatctgacacctggcatgaatgagtgtagagagcagatgtggacaactggctgagggtgtggagttgagttagtgataaagacacagartaagcagaagaaaaaagcaagacatgaaattttagaactctgtgagttctaaatttttactacagggaaaaccaaaagtgtgcaagggggcaaaaaagtt

SEQ ID NO: 40149 - DNA, 201 bp, Homo sapiens; identical to SEQ ID NO: 19812

SEQ ID NO: 40150 - DNA, 201 bp, Homo sapiens
cgactccaaagccaaggaatgaaaatgatggggcgttggctcaggattcgatatgccagccagtgggaacagagaccaggaaggggccagtgcatctccasgggatcagtcaacgtaaaaaggggacacctcacgataaggatggaaggaaggaaggaatgctcactcaacactgaaacagagagctgggaaggcgctggc

SEQ ID NO: 40151 - DNA, 201 bp, Homo sapiens
cacctggggccccatggaaactcctggaacatgggctcagtattgggggaacccactcccaatatttcaacatacattctttctattttccctaagtgtcractggtctgagaaataaagagaaagagttcaaagagaggaattttacagctgggcctccaggtgtgacatcacctatcggtaggactgtgatgcccacct

SEQ ID NO: 40152 - DNA, 201 bp, Homo sapiens
tttccctaagtgtcgactggtctgagaaataaagagaaagagttcaaagagaggaattttacagctgggcctccaggtgtgacatcacctatcggtaggaytgtgatgcccacctgagccgcaaaaccagcaggtttttattaaggacttcaaaaggggagggggtgtatgaacagggagtaggtcacatgctttaagggg

SEQ ID NO: 40153 - DNA, 201 bp, Homo sapiens; identical to SEQ ID NO: 6983

SEQ ID NO: 40154 - DNA, 201 bp, Homo sapiens
acttccattccttgcaaacctctgacctactgcagagggcctggaaggcgtgtgccccaggcacgcctggcctggtccagcctgccaggagtgactgggamtttccacctcaagctcctggaagtggaaactatgccgcccacccttcctgcccaggaactttctccgctgacctgcccagaccctgggcttcagcactgc

SEQ ID NO: 40155 - DNA, 201 bp, Homo sapiens
gcaaaaacaggtgatgggctggatttggcccactggccatagttttctgacccctgcctatgagtatatataactaataaaaatgaaacttaaaaaaaaaatcattttcatcaggaagagaaaatgcagatgaataatcaagaacagtttggaacctggacacagtgactcatgcctgtaatcccagcactttgggaggcc

SEQ ID NO: 40156 - DNA, 201 bp, Homo sapiens; identical to SEQ ID NO: 6971

SEQ ID NO: 40157 - DNA, 201 bp, Homo sapiens
tactcctcttggctctggggcgatgcccaggtgtctgcttccagggccagcacagggtctccatgtccttggagctggcagccgctccctctcctagttcycctttctcgtcgtatgaccttgagaagcaaaggaacctctctgggcctccgtgttctcatctgcaagatgggggtgagagtgtcggcctccctgggctgt

SEQ ID NO: 40158 - DNA, 201 bp, Homo sapiens
gctctggggcgatgcccaggtgtctgcttccagggccagcacagggtctccatgtccttggagctggcagccgctccctctcctagttcccctttctcgtygtatgaccttgagaagcaaaggaacctctctgggcctccgtgttctcatctgcaagatgggggtgagagtgtcggcctccctgggctgtgtgatgaggca

SEQ ID NO: 40159 - DNA, 201 bp, Homo sapiens
agctcctggaagtggaaactatgccgcccacccttcctgcccaggaactttctccgctgacctgcccagaccctgggcttcagcactgctattctctctgyccatgctccccaccctgggcaggccctcccttggcacagtacaggctgctggcccagaaccctgggaacattcctgacctttgctttggcttcctccagc

SEQ ID NO: 40160 - DNA, 201 bp, Homo sapiens
cagggaggcattttgggagggggcgaggccctggctatcaaggtggggtctccagaccctggagcacccacaatgccctgtgcacacctatgtgtgtttgkctttggcctcctcggggcctctgggtgtcagagaccgcagacagggctggctacctgtctgtgcacgcacacacacattcccaagcataccagcctcccc

SEQ ID NO: 40161 - DNA, 201 bp, Homo sapiens; identical to SEQ ID NO: 19819

SEQ ID NO: 40162 - DNA, 201 bp, Homo sapiens; identical to SEQ ID NO: 19820

SEQ ID NO: 40163 - DNA, 201 bp, Homo sapiens; identical to SEQ ID NO: 19821

SEQ ID NO: 40164 - DNA, 201 bp, Homo sapiens; identical to SEQ ID NO: 19822

SEQ ID NO: 40165 - DNA, 201 bp, Homo sapiens
ccttcgccagaccttactccccagccccagggaggcattttgggagggggcgaggccctggctatcaaggtggggtctccagaccctggagcacccacaakgccctgtgcacacctatgtgtgtttgtctttggcctcctcggggcctctgggtgtcagagaccgcagacagggctggctacctgtctgtgcacgcacaca

SEQ ID NO: 40166 - DNA, 201 bp, Homo sapiens; identical to SEQ ID NO: 19823

SEQ ID NO: 40167 - DNA, 201 bp, Homo sapiens; identical to SEQ ID NO: 6995

SEQ ID NO: 40168 - DNA, 201 bp, Homo sapiens
agctatcagaaacaaggttttttttggtattaagtactcaaaatttgttgaatatagtcttctctataagaaaatcagattgctgaggcaggagaatcggytgaacccgggaggcggaggttgcagtgagctgagatggtgacactgcaccccagcctgggagacagagcgagactctgtctcaaaaaaaaaaaaaaaaaa

SEQ ID NO: 40169 - DNA, 201 bp, Homo sapiens; identical to SEQ ID NO: 6999

SEQ ID NO: 40170 - DNA, 201 bp, Homo sapiens
gagaatcggttgaacccgggaggcggaggttgcagtgagctgagatggtgacactgcaccccagcctgggagacagagcgagactctgtctcaaaaaaaamaaaaaaaaaaaatcagactggacttcgtagtgagttgcttgttggcgttaacaaggttatcagcacttctcattgtttgctaggagttattacttcactt

SEQ ID NO: 40171 - DNA, 201 bp, Homo sapiens; identical to SEQ ID NO: 34287

SEQ ID NO: 40172 - DNA, 201 bp, Homo sapiens
gccgctcccgtgtggagagggtgggggccacctgagcacaggctgctcatggcttcaggggctccaggctcaggggaggctggtatgcttgggaatgtgtktgtgcgtgcacagacaggtagccagccctgtctgcggtctctgacacccagaggccccgaggaggccaaagacaaacacacataggtgtgcacagggcat

SEQ ID NO: 40173 - DNA, 201 bp, Homo sapiens; identical to SEQ ID NO: 34288

SEQ ID NO: 40174 - DNA, 201 bp, Homo sapiens
ggggttacaggcgtgcgccactgtacctggccctcttttggaatacagtgtttcttgggtaaatcttggatgtctgctcacttaagaggagaaagactgaraaactgactggaagctggggtgtatgaatactcctttcttacccattttgtcataggatcttctggttggctatttttatgggagaacccctgctgtcag

SEQ ID NO: 40175 - DNA, 201 bp, Homo sapiens
tgctatgatagcttggaggggtggggacgcctcccagggccacagagctcctaagtgacagtgagagcccaggcccacccaggctgtcctgtccccccaaragggtggccgtgtaggggatgctgctgccagcaggctggttggccccagtcaccagcctcaggcttctcctgacccttacacaaagagcactgagatttt

SEQ ID NO: 40176 - DNA, 201 bp, Homo sapiens; identical to SEQ ID NO: 6997

SEQ ID NO: 40177 - DNA, 201 bp, Homo sapiens
ttccattaaagaaaaacaagggggcccaatattttcttcacatcgcttgaaaatatatatatatatatgtgtgtgtgtgtgtgtgtatatatatatatatatttttttttctttttttttttttgagagacggagtcttgctctgttgcccaggctggaatgcagtggtgcgatctcagctcactgcaacctccgcctcct

SEQ ID NO: 40178 - DNA, 201 bp, Homo sapiens
tccattaaagaaaaacaagggggcccaatattttcttcacatcgcttgaaaatatatatatatatatgtgtgtgtgtgtgtgtgtatatatatatatatatttttttttctttttttttttttgagagacggagtcttgctctgttgcccaggctggaatgcagtggtgcgatctcagctcactgcaacctccgcctcctg

SEQ ID NO: 40179 - DNA, 201 bp, Homo sapiens
tcagagccctggccctgctgggaccctcccctgctccctctgactccagggcacctctgatgctggtgggggtaaggagacgcccaccctagtttagcctyatggtctgcaggggtctgtagggcttgggaccccagttgggggtaaggcaggactctaggtttgagccccagcactaggatgcaggagccccaggggtcc

SEQ ID NO: 40180 - DNA, 201 bp, Homo sapiens
tatatatatatatatgtgtgtgtgtgtgtgtgtatatatatatatatatttttttttctttttttttttttgagagacggagtcttgctctgttgcccagsctggaatgcagtggtgcgatctcagctcactgcaacctccgcctcctgggttcaagtgattctcctgcctcagcttcccaaggagctgggactacaggcg

SEQ ID NO: 40181 - DNA, 201 bp, Homo sapiens; identical to SEQ ID NO: 34297

SEQ ID NO: 40182 - DNA, 201 bp, Homo sapiens
cctagtctcaagcagtcttcctgcctcggcctcccagtgttgggatgatcgtcatgagccactgcacctggcccaagactattattattattattattatyattattattattattattgagatggagtctcgctctgtcacccaggctggagtgcagtggtacagtctccactcactgcaacctctgccttccgggttca

SEQ ID NO: 40183 - DNA, 201 bp, Homo sapiens; identical to SEQ ID NO: 7002

SEQ ID NO: 40184 - DNA, 201 bp, Homo sapiens
cctcggcctcccagtgttgggatgatcgtcatgagccactgcacctggcccaagactattattattattattattattattattattattattattgagayggagtctcgctctgtcacccaggctggagtgcagtggtacagtctccactcactgcaacctctgccttccgggttcaagtgattctcctgcctcagtctc

SEQ ID NO: 40185 - DNA, 201 bp, Homo sapiens
gtcagaggtttgcaaggaatggaagtttgtttagagagagtttctcagccctggcatactgacattttggactagataattccttgtggtggggtgtggakatgtcctatgcattgtagggtatttggcagcatctttgggccccacccatgagatacctagtcatgagtagcacccaccacccagtcgtgacaatgcacc

SEQ ID NO: 40186 - DNA, 201 bp, Homo sapiens
tctaagctcctgctcagaggacatcagcagctaacttccctgctctcagccttcaactctccttctctgaaccttgtgatcttcccaggcctggtgagttrgcccttgacatttatgtctgctgtgtatttaggccaccttgctgcagtgatcaatgaggttgaggtgcaacaggaacagcaggaacatctgctgggagat

SEQ ID NO: 40187 - DNA, 201 bp, Homo sapiens
ggtcccagctactcaggaggctgaggtgggaggatggcttgagatcaggagtttgaggctacagtgcgttatgattatgcctgtgaacagccactgcacastagcctgggtgacagtgcaagactgtctctaaaaaagacaaaattaggatataagcactgaggtggatgtagcgacattgagagatatggaattgactta

SEQ ID NO: 40188 - DNA, 201 bp, Homo sapiens
aataatgggagaaaatttcccaggtctaagaaaagatcccattagtactaagaaacagaatgaatatatttagatatggccagtttcaacttccaacatcwataataaaaagaaaattctatttcttgaaaataagttaacctgtataacatgtcacttattagatccacatcagacttctcactggtgacaagggatgct

SEQ ID NO: 40189 - DNA, 201 bp, Homo sapiens
tccatgcctgcagcagtgccgctgatagtaggtggcctctgctcactgctggccactttcagcggtttatgtccacccagtcaagactgtatgctccaagsgctgagccaaggctgtgtaggagcgtgcacctaacttgatataaggatgacatgtcagaaatggtcaatatgctactactatcagcaaatgtttctccaa

SEQ ID NO: 40190 - DNA, 201 bp, Homo sapiens; identical to SEQ ID NO: 34305

SEQ ID NO: 40191 - DNA, 201 bp, Homo sapiens
taagccgccatctggatcccagcatcgaggtgactctcccacttctgcttataccagcactcacacatttaagtctccatgcctgcagcagtgccgctgayagtaggtggcctctgctcactgctggccactttcagcggtttatgtccacccagtcaagactgtatgctccaagcgctgagccaaggctgtgtaggagcg

SEQ ID NO: 40192 - DNA, 201 bp, Homo sapiens
cccaatattttcttcacatcgcttgaaaatatatatatatatatgtgtgtgtgtgtgtgtgtatatatatatatatatttttttttctttttttttttttkagagacggagtcttgctctgttgcccaggctggaatgcagtggtgcgatctcagctcactgcaacctccgcctcctgggttcaagtgattctcctgcctc

SEQ ID NO: 40193 - DNA, 201 bp, Homo sapiens
acagtagagcaacagatgtcatcatctggattctaaactggcttttaaaaatggctcttccattaaagaaaaacaagggggcccaatattttcttcacatygcttgaaaatatatatatatatatgtgtgtgtgtgtgtgtgtatatatatatatatatttttttttctttttttttttttgagagacggagtcttgctct

SEQ ID NO: 40194 - DNA, 201 bp, Homo sapiens
ttatgggctgggcgcagtggctcacgcctataatcccagcactctggaaggccaaggtgggcagatcacctgaggttgggagttcgagaccagcctggccmacatggtaaaccccgtctctactaaaaatacaaaattagctgagtgtggtggtgcacgcctgtaatcccaacttctcaggtggctgaggcaggagaattg

SEQ ID NO: 40195 - DNA, 201 bp, Homo sapiens
ctctggcattttattatcttaaccacaggtttaagtatcacccacccccggtgcagctctcagttaccaagaccaattctgccccaaggcatgaagcagayggccacgccagaacaaagattagaagcccagtagcaggtgagccttgctgctgcagactgtgctgtgtcttctttctgctcaatcatgcagtgactggtc

SEQ ID NO: 40196 - DNA, 201 bp, Homo sapiens
attaggtattctggcattcttttttgagacggagtcttgctctgtcacccacgctggagtgcagtggcgcaatctcagctcactgcaacctctgcctcccrggctcaagcaattctcctgcctcagcctctcgagtaactgggattagaggcacccaccactatgcccgcctaatttttgtatttttagtagagacagggt

SEQ ID NO: 40197 - DNA, 201 bp, Homo sapiens
atctaggaagaatgtggatagggactgtggccacttgcagccccacttagttctgtttcattttccatgattttagttttttttttctttttcttttcttyttttttttttttaagatgggtctcactttgtcgtccaggcttgagtacagtggtgggatcatggctcactgcagcctagacctctccaggctcagctgat

SEQ ID NO: 40198 - DNA, 201 bp, Homo sapiens
tttttttctttttcttttctttttttttttttttaagatgggtctcactttgtcgtccaggcttgagtacagtggtgggatcatggctcactgcagcctaracctctccaggctcagctgatcctcccacttcagcctccagagtagctaggacttacaggcatgtgtcaccatgcctagctaatttttgtactttttgta

SEQ ID NO: 40199 - DNA, 201 bp, Homo sapiens
ctccgtctcaaaaaaaaaaaagtcactcgaatcccccgcccctgcctttcccaacactatcccctgtgtgacagtgcttgatggccccaggacaaagaccrgctccagagaataaaatcccggcactgacagccacttcatcaccaaggcctctgaatgctgctttctaagagcccacaaatgtggccacttctcccatgt

SEQ ID NO: 40200 - DNA, 201 bp, Homo sapiens
ccacctgagcacaggctgctcatggcttcaggggctccaggctcaggggaggctggtatgcttgggaatgtgtgtgtgcgtgcacagacaggtagccagcyctgtctgcggtctctgacacccagaggccccgaggaggccaaagacaaacacacataggtgtgcacagggcattgtgggtgctccagggtctggagaccc

SEQ ID NO: 40201 - DNA, 201 bp, Homo sapiens; identical to SEQ ID NO: 7004

SEQ ID NO: 40202 - DNA, 201 bp, Homo sapiens
gcatcaatcataccacaaaccttagcatcacacaacatacctaggtaacagatctgtacatgtagcccctgaatctaaaataaaagttgaaaaaaaacaawaacaaaaaccaaccctaaaacagttcaaccatcaccacaaggaaaaaaataaacacacttggggtcactgtgtgccagaactccagccctgccgtcagcc

SEQ ID NO: 40203 - DNA, 201 bp, Homo sapiens; identical to SEQ ID NO: 7005

SEQ ID NO: 40204 - DNA, 201 bp, Homo sapiens
ttagggaaaatagaaagaatgtatgttgaaatattgggagtgggttcccccaatactgagcccatgttccaggagtttccatggggccccaggtggatgtytgtgcaggcaagcatgacacctgtggctcctgagctctggggccagcgccttcccagctctctgtttcagtgttgagtgagcattccttccttccttcca

SEQ ID NO: 40205 - DNA, 201 bp, Homo sapiens
tgtgcagcctggcgtgtggcaagtccaaggccttgttgaaggtcccgtcccaggcagcccctgccccagctgaccctccctatggcccaagaggcaatgtrgagcagtgggaagcacccaggctctggcatcacttgtctgtttcttcctcagtaaaatggcagaatccctacccatgtcaaagttttgttatgaagactg

SEQ ID NO: 40206 - DNA, 201 bp, Homo sapiens
gaagagggacaagaaggaagcggagcctttggtggacatacgggtcacagggcctgtgccaggtgccttgggcgcggcgctctgggaggcaggtgagttcytgggctggggagactggacgagcctaggaggccagggccggctgccggcagctcttctgcctccaagagggccaggaagaaagagaacaggatggccatc

SEQ ID NO: 40207 - DNA, 201 bp, Homo sapiens
cctccatggctggtccctgcagggccctgggcctgggagctggctttgaggctgaaggcatgtgcaaccaagcttcccatcccctccctgagtgtggtccygggagggggacaactaggctctgtgtctcaagtgactctctctgccagaggctggccttggagctgtggcctctccccacccagacacagggctaagtac

SEQ ID NO: 40208 - DNA, 201 bp, Homo sapiens; identical to SEQ ID NO: 34312

SEQ ID NO: 40209 - DNA, 201 bp, Homo sapiens; identical to SEQ ID NO: 34313

SEQ ID NO: 40210 - DNA, 201 bp, Homo sapiens
catgcaacaaaacatatatgactgcatttcacaaaaccttaacatcaagtttaagggcaaattttctgtttaaacggtcctaaaattaggacccccccccsagattagcaagacttctgaagttcatctgatagacttcctgtctccacctgggtggaggctcctcctgtcctgcaagcagaccccccgttacccagacca

SEQ ID NO: 40211 - DNA, 201 bp, Homo sapiens
cgggctggatccagccactccgctctgatttcaggaccaaggaagctccacgccttagtctcaggccaccttccgccttttgatgaaagggaggatgagargacccggtggacgggagggaggagggagctgctcctcttcctccccacccccttggttgtgggagagacattgctcccttagccccaaggagtgagggtt

SEQ ID NO: 40212 - DNA, 201 bp, Homo sapiens; identical to SEQ ID NO: 34314

SEQ ID NO: 40213 - DNA, 201 bp, Homo sapiens
caagtagctgggattacaggtatgccccaccacgcctggctaattttgtatttttagtagagatgggatttctccatgttggtcacgctggtctcgaattsccgacttcaggtgatccgcccgccttggcctcccaaagtgctgggattacaggcgtgagccactgcgcccggctgatttgacacaatctgaacacaaatg

SEQ ID NO: 40214 - DNA, 201 bp, Homo sapiens; identical to SEQ ID NO: 34319

SEQ ID NO: 40215 - DNA, 201 bp, Homo sapiens; identical to SEQ ID NO: 34320

SEQ ID NO: 40216 - DNA, 201 bp, Homo sapiens
tctgaggagctgggactacaggtgtacatcaccacacctggctaattttttaatttttttgtggagattgagatcttgccatgttgctcaggctggtctcraactcctgagctcaagtgatcctcctgcctcaacctcccaaaatactgggattacaggcatgagccaccatgcccggcctgattttttttcattgatgat

SEQ ID NO: 40217 - DNA, 201 bp, Homo sapiens
tcctactgggatacatgggaggtaaatgttctgaaacctgggttgtttgaaaatgtctttattctcactccccacactggttcatagttaggctggatatragattctgggttgtaaattatttttcttcagtattttgaatgcaattttcactgtgttccagtttccaatattgctgttgagaggttcaaagccattcca

SEQ ID NO: 40218 - DNA, 201 bp, Homo sapiens
atttttttgtggagattgagatcttgccatgttgctcaggctggtctcgaactcctgagctcaagtgatcctcctgcctcaacctcccaaaatactgggaktacaggcatgagccaccatgcccggcctgattttttttcattgatgatttcctccatctgttctctctttctgaaatttgtactatttggatgttacatt

SEQ ID NO: 40219 - DNA, 201 bp, Homo sapiens
ccgtcaccccctgcttggtcttttccaccgcacccaccacgccctccttggcgatggagaagcccttcttgaagacatccatggtgggtgtgcagggttgkgctgctgcaggcaggacggagctggatctccctgcgagctgcgggcttgagctggctcgagtgctgccgcagcggctgtccccgatgcctcctattgacg

SEQ ID NO: 40220 - DNA, 201 bp, Homo sapiens
tctctgatctgcagagctccaggacacctggggtctggaaggcagaggctgaggacaccggcaaggaccccgtaggacggtaagagggcctggaccttggmagaggtcatggagtaggatctgagtcccagctcagctagagcagagcctctctagacctcactggggtcccatctgtgaaatgggctaatagtatctatc

SEQ ID NO: 40221 - DNA, 201 bp, Homo sapiens
ctcctgagctcaagtgatcctcctgcctcaacctcccaaaatactgggattacaggcatgagccaccatgcccggcctgattttttttcattgatgatttyctccatctgttctctctttctgaaatttgtactatttggatgttacatttgcaagactggtcgtctatttttcttttctctttccaattttcatctctct

SEQ ID NO: 40222 - DNA, 201 bp, Homo sapiens
accggttggaggatctgaggtgggtgggggtggggaaatgaaggacttcctcatgccttggcctctggctgcatgctgtgtgaccccagaatagtcccttsccttctttgagccgcccagtgctgaaggtgctgaggaggcatgaattgccccccatttcctggccagcagtgtggatgggcagcaggtcccctgagatgg

SEQ ID NO: 40223 - DNA, 201 bp, Homo sapiens
ggcctggagcgggccctccctggaatcactgagccagcccttctcctcttccaggtaccgcatggcccacaagccagtgtaccaggtcaagcagaaggtgmtgacctctttggcctggaggtgctgccctggctacacgggccccaactgcgagcaccacggtagggctccctgcggcccccttccccccttgacctctga

SEQ ID NO: 40224 - DNA, 201 bp, Homo sapiens
ccaaaatactgggattacaggcatgagccaccatgcccggcctgattttttttcattgatgatttcctccatctgttctctctttctgaaatttgtactayttggatgttacatttgcaagactggtcgtctatttttcttttctctttccaattttcatctctctgtttgctcttttagggaaatttctttaactttacc

SEQ ID NO: 40225 - DNA, 201 bp, Homo sapiens
catgggcccaggcttccagtactagcctctctgatctgcagagctccaggacacctggggtctggaaggcagaggctgaggacaccggcaaggaccccgtwggacggtaagagggcctggaccttggcagaggtcatggagtaggatctgagtcccagctcagctagagcagagcctctctagacctcactggggtcccat

SEQ ID NO: 40226 - DNA, 201 bp, Homo sapiens
ctgcatgctgtgtgaccccagaatagtcccttgccttctttgagccgcccagtgctgaaggtgctgaggaggcatgaattgccccccatttcctggccagcagtgtggatgggcagcaggtcccctgagatggacctgaccacttcctgtggccccacctcgaagtccacgctcttttcatggctcccagggagcaggttc

SEQ ID NO: 40227 - DNA, 201 bp, Homo sapiens
ttgtctttagtgtgaggtggttgatcttacagctctaattaggtattctggcattcttttttgagacggagtcttgctctgtcacccacgctggagtgcartggcgcaatctcagctcactgcaacctctgcctcccaggctcaagcaattctcctgcctcagcctctcgagtaactgggattagaggcacccaccactat

SEQ ID NO: 40228 - DNA, 201 bp, Homo sapiens
attattattattattgagatggagtctcgctctgtcacccaggctggagtgcagtggtacagtctccactcactgcaacctctgccttccgggttcaagtrattctcctgcctcagtctcccgagtagctgggattacaggcgtgcaccaccatgcccggctaatatttgtatttttagtggagacaaggttttgccatgt

SEQ ID NO: 40229 - DNA, 201 bp, Homo sapiens
cctagcaagtggtggtcgtctgggagtcagagacccgtgttcctgtcccagcctgccatttacaaaccatgtagccttgggcagccggtgaaggattcaayctgttttgtcaatcagggatactgtctctcaaggaagttggaaggaaaagggatcaaacgagaaagtgctttgtggctgggcatggtggctcacctgcaa

SEQ ID NO: 40230 - DNA, 201 bp, Homo sapiens
ggggctgctgggggcatgggcccaggcttccagtactagcctctctgatctgcagagctccaggacacctggggtctggaaggcagaggctgaggacaccrgcaaggaccccgtaggacggtaagagggcctggaccttggcagaggtcatggagtaggatctgagtcccagctcagctagagcagagcctctctagacct

SEQ ID NO: 40231 - DNA, 201 bp, Homo sapiens
ccatgctgtccaggcagcaggactggcttcttcctggctgtttgtacaccctccacacatggcagcttcctctgcttctgtgcccgtgcatgggcctggcmccagtgttctgtcagtgttcctgtcctaaggctggccaaagtggtccctgcagagaaccagaagtctagagattcaaggtctgttcccaggaggcttggt

SEQ ID NO: 40232 - DNA, 201 bp, Homo sapiens
caccagacctgtttggctaagggcatctacatggatttagggagtgaggggggggccaacttacacttctgtgcggtgtatgagagccaccatcgcagagyggacctgcctgggataggtctcatttggcttctgagttgcaggtttgttgggtgctttcctgaaaacagatttgaccagggaggggcaagaggcccctta

SEQ ID NO: 40233 - DNA, 201 bp, Homo sapiens
tgctgctgagagggtaaagcaggctggggactcagcactcaaaatatggtcactcggctgggtacagtggctcacgcctgtaatcccagcactttgggagkctgaggcaggtggatcacgaggtcaggagtttaagaccagcctggccaacatagtgaaaccccgtctctactaaaaatacaaaaaaaattagccaggctt

SEQ ID NO: 40234 - DNA, 201 bp, Homo sapiens; identical to SEQ ID NO: 34336

SEQ ID NO: 40235 - DNA, 201 bp, Homo sapiens
ggatctgagtttgacttcagagctcatagtgaactctctgcagcacttggagccagccccagcccccagatgctcctacctccaccctcctgcccccacayaccagacctgtttggctaagggcatctacatggatttagggagtgaggggggggccaacttacacttctgtgcggtgtatgagagccaccatcgcagagc

SEQ ID NO: 40236 - DNA, 201 bp, Homo sapiens
ggcataatcatggctcactgcagcctcaaacttctgggctcaagcaatcctcctacctcagcctcctgaatagctgggactacaggcatgcgccaccacayctggctaattttttgtagggatgaggtctcactacgttgcacaggctggactcaaactcctgggctccaaggatcctcccacctcagcctcccaaagtgc

SEQ ID NO: 40237 - DNA, 201 bp, Homo sapiens
cagagcacagtccagggcgctctgcctcagcgacccagcaagtgggcaggatggtcttgcaactggacccagaacatagctttccaacattctatgtgtayagagccagggcccatcctgctgatgaggtgttgggcctgtaagtcccccctcatctccaactgcccctcagtcagagcagcaggtgctgtttacggggcc

SEQ ID NO: 40238 - DNA, 201 bp, Homo sapiens
agttagcccttgacatttatgtctgctgtgtatttaggccaccttgctgcagtgatcaatgaggttgaggtgcaacaggaacagcaggaacatctgctggsagatctccagaatgatgtgcaccgggtggcagacagcctgccaggcctgtggaaagccctgcctggtaacctcacagctgcagtgatggaagcaaatcaa

SEQ ID NO: 40239 - DNA, 201 bp, Homo sapiens
ttttattattattattatttttgagacggagtctctcactgtcacccaggctggagtgcaatggtgtgatcttggcccaccacaacctctgcctcccgggktcaagcgattcttctgcctcagcctcccaagtagctaggataattaggagattatgcccagataattttttgtatttttagtagagacagggtgtcacta

SEQ ID NO: 40240 - DNA, 201 bp, Homo sapiens
ttttcacagttctagattgtggtgggtttctcagcctctctgctggctcggggaggcttcgggaaggtggtggagcaggtgccctctttgcaggtagggaktgtgaaacatttgctctggagcccagggatgaataatgcggaaggctctcttctcaggataatggattccagaatcccagcactgctccggcaggaggcg

SEQ ID NO: 40241 - DNA, 201 bp, Homo sapiens
tgctcaggccctaagctcaggggatctaggagactattatttttctttctttttattattattattatttttgagacggagtctctcactgtcacccaggytggagtgcaatggtgtgatcttggcccaccacaacctctgcctcccgggttcaagcgattcttctgcctcagcctcccaagtagctaggataattaggag

SEQ ID NO: 40242 - DNA, 201 bp, Homo sapiens
ctgcttcggcctcccaaagtgctgggattacaggcatgagccaccgtacccggcctctttttattattttttgtattttttgtagagatgaagtctcactrtattgcccaggctggtctcaaattcctagtctcaagcagtcttcctgcctcggcctcccagtgttgggatgatcgtcatgagccactgcacctggcccaa

SEQ ID NO: 40243 - DNA, 201 bp, Homo sapiens
gcttattctgtgtctttatcactaactcaactccacaccctcagccagttgtccacatctgctctctacactcattcatgccaggtgtcagatcagctgcrtcttcttggagatgtggctcccagagcctccaggtgtgttccaatgtgaactgctgccctcataccacagcccattgtcattctggaggctctcttcacc

SEQ ID NO: 40244 - DNA, 201 bp, Homo sapiens
ccttgccttctttgagccgcccagtgctgaaggtgctgaggaggcatgaattgccccccatttcctggccagcagtgtggatgggcagcaggtcccctgasatggacctgaccacttcctgtggccccacctcgaagtccacgctcttttcatggctcccagggagcaggttcccataaggatgcatttggtggggccacc

SEQ ID NO: 40245 - DNA, 201 bp, Homo sapiens
cacccaccacgccctccttggcgatggagaagcccttcttgaagacatccatggtgggtgtgcagggttgtgctgctgcaggcaggacggagctggatctycctgcgagctgcgggcttgagctggctcgagtgctgccgcagcggctgtccccgatgcctcctattgacgccgatgaaatattgatgcggaggccagctg

SEQ ID NO: 40246 - DNA, 201 bp, Homo sapiens; identical to SEQ ID NO: 34343

SEQ ID NO: 40247 - DNA, 201 bp, Homo sapiens; identical to SEQ ID NO: 34344

SEQ ID NO: 40248 - DNA, 201 bp, Homo sapiens
ttctccaaggttctgtcttcaacatccaggaggatccagccttcatggctctgcagataccttcccagtgttagcattattattaccttgaggatggataytttctccctctcccctgagtatctcaagattcctagcaagtggtggtcgtctgggagtcagagacccgtgttcctgtcccagcctgccatttacaaacca

SEQ ID NO: 40249 - DNA, 201 bp, Homo sapiens
tttttcttttctctttccaattttcatctctctgtttgctcttttagggaaatttctttaactttaccctctaacgtttccattaaatttattttcatttytactgttacgtttttaatttccaagagttcctttttgttttctgaatgctcacgcttcctctcccatctccccctcatttgtttttttcatagcttcctg

SEQ ID NO: 40250 - DNA, 201 bp, Homo sapiens
tctttaactttaccctctaacgtttccattaaatttattttcatttttactgttacgtttttaatttccaagagttcctttttgttttctgaatgctcacscttcctctcccatctccccctcatttgtttttttcatagcttcctggtcttgtttcttgggtgcagtaatttcttttatcaacctggaaatcttagtaca

SEQ ID NO: 40251 - DNA, 201 bp, Homo sapiens
tcaccctttcccacagccctaaccagagccaggaagtcatgctgtccttggtcttggagtcagcacaggaaacccaccaagagacaccatttgcagcaggrccctttaaggctgggcccaagattgagaaagtaaatgagtttcattatgtggtgaagtatttattgacaagggctgccaagaatgaagttgtgaggccat

SEQ ID NO: 40252 - DNA, 201 bp, Homo sapiens
acgtttttaatttccaagagttcctttttgttttctgaatgctcacgcttcctctcccatctccccctcatttgtttttttcatagcttcctggtcttgtktcttgggtgcagtaatttcttttatcaacctggaaatcttagtacaaatgtttgagtggttctcttctccttacacagtcttagtttttgtccaggttga

SEQ ID NO: 40253 - DNA, 201 bp, Homo sapiens
gaacagcaggaacatctgctgggagatctccagaatgatgtgcaccgggtggcagacagcctgccaggcctgtggaaagccctgcctggtaacctcacagstgcagtgatggaagcaaatcaaacagggcacggtgagtggcaggctctaggggctgaggaagagcctggtcacattgaggggaggaggggaggaccccgc

SEQ ID NO: 40254 - DNA, 201 bp, Homo sapiens
ctccaggtgtgttccaatgtgaactgctgccctcataccacagcccattgtcattctggaggctctcttcacctggtttttgtgttggaacctgtttcctsatcttgtgctttctctttcttgattttctctgttgttttgttagagtgtttcctgtgacaccacggttctgcatcctgggtgtgccatgcaattacccag

SEQ ID NO: 40255 - DNA, 201 bp, Homo sapiens
ttctggaggctctcttcacctggtttttgtgttggaacctgtttcctgatcttgtgctttctctttcttgattttctctgttgttttgttagagtgtttcytgtgacaccacggttctgcatcctgggtgtgccatgcaattacccagagagccttaaaatgctggtgctcaggccctaagctcaggggatctaggagact

SEQ ID NO: 40256 - DNA, 201 bp, Homo sapiens; identical to SEQ ID NO: 34350

SEQ ID NO: 40257 - DNA, 201 bp, Homo sapiens
tttttttgtttgcccacttcaacctctttttttttttttttttttgagatagggttttgctgtgcacccaggctgaagtgtagtggcataatcatggctcrctgcagcctcaaacttctgggctcaagcaatcctcctacctcagcctcctgaatagctgggactacaggcatgcgccaccacacctggctaattttttgt

SEQ ID NO: 40258 - DNA, 201 bp, Homo sapiens
gcccacctgcttctcaggggtgtgggtctctcaagctacctggcttatggggagacagaagtcacaagaaccacctgctagtgccagagcccgtgagcggsatagcctggaggccacaggcacaatagtgccgcctactgctcctgctacagagagggcatcgcctcctgccctgccagggcagccttcaagtccccccat

SEQ ID NO: 40259 - DNA, 201 bp, Homo sapiens
ggttcaggttgtgtccaccgacactgacacttctctcttgtttcctctcgtgcgtggtgcaaggcttcaatatgctgatgactttcagaatttgccccacrgtttggaaatgtgtttaccacgacgatatttatttcaaaaaaatgttgttcttaaaaacaaatttccaggccgggcgcagtggctcatgcctataatccc

SEQ ID NO: 40260 - DNA, 201 bp, Homo sapiens
ggcttgacctccccttcctcctctggagagtgccaggagaggatgcgggggagggaacactgagcctaggtttcatcccccagcctgccccttctctctgsggagggaggggatccgtgacctggctgtagccgctcccgtgtggagagggtgggggccacctgagcacaggctgctcatggcttcaggggctccaggctc

SEQ ID NO: 40261 - DNA, 201 bp, Homo sapiens
gaagaggctacatagctcgtgacatgttgcttagaactctccttttctcagcctctgcaccctgttatgtctttagctcaaaaacagaaaagctctccctkctgtagcctgagcaccaccctccttccatcccctccatcaagaaagctccccaaacctggcttgacaattactcagctctcttggagcgggtagtggacg

SEQ ID NO: 40262 - DNA, 201 bp, Homo sapiens
tttggaaatgtgtttaccacgacgatatttatttcaaaaaaatgttgttcttaaaaacaaatttccaggccgggcgcagtggctcatgcctataatcccarcagtttgggaggccgaggcgggtggatcacttgaggtcaggagttcaagaccagcctggccaacatggtgaaaccccatctctactaaaaatacaaaatt

SEQ ID NO: 40263 - DNA, 201 bp, Homo sapiens
aacttttttgcccccttgcacacttttggttttccctgtagtaaaaatttagaactcacagagttctaaaatttcatgtcttgcttttttcttctgcttaytctgtgtctttatcactaactcaactccacaccctcagccagttgtccacatctgctctctacactcattcatgccaggtgtcagatcagctgcatcttc

SEQ ID NO: 40264 - DNA, 201 bp, Homo sapiens
ggcagaggttgctgtgagccaagatagctccattgcactccagcctgggcggcagagtaggactctgtctcaaacacacacacacacacacacacacacamacacacacaccccaaatttccctttatttgtttgtaggaaggctgtagggcttgaatgtgtgccctgcagggaagcacactctgagtttgcacagccctt

SEQ ID NO: 40265 - DNA, 201 bp, Homo sapiens
  misc_feature (172)..(201): n is a, c, g, or t
aggtgtcccctttttacgttgactgatcccttggagatgcactggccccttcctggtctctgttcccactggctggcatatcgaatcctgagccaacgccscatcattttcattccttggctttggagtcggtcttgatagttgtgagagaaactccctactcattgttttnnnnnnnnnnnnnnnnnnnnnnnnnnnnnn

SEQ ID NO: 40266 - DNA, 201 bp, Homo sapiens
cagaggttgctgtgagccaagatagctccattgcactccagcctgggcggcagagtaggactctgtctcaaacacacacacacacacacacacacacacamacacacaccccaaatttccctttatttgtttgtaggaaggctgtagggcttgaatgtgtgccctgcagggaagcacactctgagtttgcacagcccttcc

SEQ ID NO: 40267 - DNA, 201 bp, Homo sapiens
aggtgggcatcacagtcctaccgataggtgatgtcacacctggaggcccagctgtaaaattcctctctttgaactctttctctttatttctcagaccagtygacacttagggaaaatagaaagaatgtatgttgaaatattgggagtgggttcccccaatactgagcccatgttccaggagtttccatggggccccaggtg

SEQ ID NO: 40268 - DNA, 201 bp, Homo sapiens
ccccttaaagcatgtgacctactccctgttcatacaccccctccccttttgaagtccttaataaaaacctgctggttttgcggctcaggtgggcatcacartcctaccgataggtgatgtcacacctggaggcccagctgtaaaattcctctctttgaactctttctctttatttctcagaccagtcgacacttagggaaa

SEQ ID NO: 40269 - DNA, 201 bp, Homo sapiens; identical to SEQ ID NO: 34356

SEQ ID NO: 40270 - DNA, 201 bp, Homo sapiens
gcagtgctgaagcccagggtctgggcaggtcagcggagaaagttcctgggcaggaagggtgggcggcatagtttccacttccaggagcttgaggtggaaaktcccagtcactcctggcaggctggaccaggccaggcgtgcctggggcacacgccttccaggccctctgcagtaggtcagaggtttgcaaggaatggaagt

SEQ ID NO: 40271 - DNA, 201 bp, Homo sapiens
ggcctcccaaagtgctgggattacaggcatgagtcactgtgtccaggttccaaactgttcttgattattcatctgcattttctcttcctgatgaaaatgattttttttttaagtttcatttttattagttatatatactcataggcaggggtcagaaaactatggccagtgggccaaatccagcccatcacctgtttttgc

SEQ ID NO: 40272 - DNA, 201 bp, Homo sapiens; identical to SEQ ID NO: 34357

SEQ ID NO: 40273 - DNA, 201 bp, Homo sapiens
ttgtggtgggtttctcagcctctctgctggctcggggaggcttcgggaaggtggtggagcaggtgccctctttgcaggtagggattgtgaaacatttgctstggagcccagggatgaataatgcggaaggctctcttctcaggataatggattccagaatcccagcactgctccggcaggaggcgaggaccggtggctctg

SEQ ID NO: 40274 - DNA, 201 bp, Homo sapiens
ctagctctttgcaaaacagagaaattcctcatccactcgcagcagccgtgtccgcagggagctccagactgccagaaagtcaaagtcatgtgagtaggggmgggtgggccatttgcccaggcctggagcgggccctccctggaatcactgagccagcccttctcctcttccaggtaccgcatggcccacaagccagtgtac

SEQ ID NO: 40275 - DNA, 201 bp, Homo sapiens
caggtagggattgtgaaacatttgctctggagcccagggatgaataatgcggaaggctctcttctcaggataatggattccagaatcccagcactgctcckgcaggaggcgaggaccggtggctctgcactggcaccccctgttgacctgggtgtggctcagcagccttctcctctggcttgttttccagtaactggtgcc

SEQ ID NO: 40276 - DNA, 201 bp, Homo sapiens
gcttgttttccagtaactggtgcccctacccaatgtccaagctggtcaccttactagctctttgcaaaacagagaaattcctcatccactcgcagcagccrtgtccgcagggagctccagactgccagaaagtcaaagtcatgtgagtaggggagggtgggccatttgcccaggcctggagcgggccctccctggaatcac

SEQ ID NO: 40277 - DNA, 201 bp, Homo sapiens; identical to SEQ ID NO: 34358

SEQ ID NO: 40278 - DNA, 201 bp, Homo sapiens; identical to SEQ ID NO: 34359

SEQ ID NO: 40279 - DNA, 201 bp, Homo sapiens
gctggaggaagccaaagcaaaggtcaggaatgttcccagggttctgggccagcagcctgtactgtgccaagggagggcctgcccagggtggggagcatggrcagagagaatagcagtgctgaagcccagggtctgggcaggtcagcggagaaagttcctgggcaggaagggtgggcggcatagtttccacttccaggagct

SEQ ID NO: 40280 - DNA, 201 bp, Homo sapiens
ggggaggctggtatgcttgggaatgtgtgtgtgcgtgcacagacaggtagccagccctgtctgcggtctctgacacccagaggccccgaggaggccaaagmcaaacacacataggtgtgcacagggcattgtgggtgctccagggtctggagaccccaccttgatagccagggcctcgccccctcccaaaatgcctccctg

SEQ ID NO: 40281 - DNA, 201 bp, Homo sapiens; identical to SEQ ID NO: 34362

SEQ ID NO: 40282 - DNA, 201 bp, Homo sapiens; identical to SEQ ID NO: 34365

SEQ ID NO: 40283 - DNA, 201 bp, Homo sapiens
gagcaacagatgtcatcatctggattctaaactggcttttaaaaatggctcttccattaaagaaaaacaagggggcccaatattttcttcacatcgcttgaaaatatatatatatatatgtgtgtgtgtgtgtgtgtatatatatatatatatttttttttctttttttttttttgagagacggagtcttgctctgttgcc

SEQ ID NO: 40284 - DNA, 201 bp, Homo sapiens; identical to SEQ ID NO: 34366

SEQ ID NO: 40285 - DNA, 201 bp, Homo sapiens
gtaggtctcagggtttaatttcccacccaatggtgtaagggatgaatcactaagcactgtcctgttatgtttcaggatcccctgtggccttctatgccagsttttcagaagggacggctgccctgcagacagtgaagttcaacaccacatacatcaacattggcagcagctacttccctgaacatggctacttccgagccc

SEQ ID NO: 40286 - DNA, 201 bp, Homo sapiens
agcaacagatgtcatcatctggattctaaactggcttttaaaaatggctcttccattaaagaaaaacaagggggcccaatattttcttcacatcgcttgawaatatatatatatatatgtgtgtgtgtgtgtgtgtatatatatatatatatttttttttctttttttttttttgagagacggagtcttgctctgttgccc

SEQ ID NO: 40287 - DNA, 201 bp, Homo sapiens
tctggattctaaactggcttttaaaaatggctcttccattaaagaaaaacaagggggcccaatattttcttcacatcgcttgaaaatatatatatatatakgtgtgtgtgtgtgtgtgtatatatatatatatatttttttttctttttttttttttgagagacggagtcttgctctgttgcccaggctggaatgcagtgg

SEQ ID NO: 40288 - DNA, 201 bp, Homo sapiens
gtatctaggaagaatgtggatagggactgtggccacttgcagccccacttagttctgtttcattttccatgattttagttttttttttctttttcttttctttttttttttttttaagatgggtctcactttgtcgtccaggcttgagtacagtggtgggatcatggctcactgcagcctagacctctccaggctcagctg

SEQ ID NO: 40289 - DNA, 201 bp, Homo sapiens
tgtgtgcgtgcacagacaggtagccagccctgtctgcggtctctgacacccagaggccccgaggaggccaaagacaaacacacataggtgtgcacagggcmttgtgggtgctccagggtctggagaccccaccttgatagccagggcctcgccccctcccaaaatgcctccctggggctggggagtaaggtctggcgaagg

SEQ ID NO: 40290 - DNA, 201 bp, Homo sapiens
tcttccattaaagaaaaacaagggggcccaatattttcttcacatcgcttgaaaatatatatatatatatgtgtgtgtgtgtgtgtgtatatatatatatwtatttttttttctttttttttttttgagagacggagtcttgctctgttgcccaggctggaatgcagtggtgcgatctcagctcactgcaacctccgcctc

SEQ ID NO: 40291 - DNA, 201 bp, Homo sapiens
caggcttgagtacagtggtgggatcatggctcactgcagcctagacctctccaggctcagctgatcctcccacttcagcctccagagtagctaggacttayaggcatgtgtcaccatgcctagctaatttttgtactttttgtagagacagggtcttgctatggtgcccaggctggtctcaaattcctgggatcaagtaat

SEQ ID NO: 40292 - DNA, 201 bp, Homo sapiens
gcggttattgctctggtatcagccaggctctaatccctgctctacctgtgagaacctgggcaggttttttttttgttttttgttttcgagatagagtctcrctctgttgcccaggctggagtgcagtggtgcaatctcagctcactgcaacctccgcctcccgggttcaagcgattctcctgcctcagcctccagagtagc

SEQ ID NO: 40293 - DNA, 201 bp, Homo sapiens
gtggagtgcagtggtgcaatctcagctcactgcaacatctgcctcctgggttcaagcgattcttgtgcctcagcctcccaagtagctgggactacaggcgygcaccaccacacccagccaatttttgtatttttagtagagatggggtttccccatgttgccccggctggtctcgaacttctgacctcaagtgatctgccc

SEQ ID NO: 40294 - DNA, 201 bp, Homo sapiens
ctctaaaatgggattaataattggacatatcacatagggttgttgtgaggattgaattgatagcacatagtgtttggcacagagtaaaggctcaacaagcrgcagctattctcaatattttagctcaggcaccaggcgccttgaggtgatagagtaaaaactctagctgagagatcaagtagaaacttgggaactagcccg

SEQ ID NO: 40295 - DNA, 201 bp, Homo sapiens
gaaaagaaaactctctaagtcacccaaattacagcgtgcaggacagttgaaccaggccagccatccttttgcagaattccctcttgaggtgctttattcayacatgttgctgtgccatcaaagcacagtagtccccctccacagaggtgtgaataaaataatttcttccatacatcctcccaatcctcccaccccacccta

SEQ ID NO: 40296 - DNA, 201 bp, Homo sapiens; identical to SEQ ID NO: 7007

SEQ ID NO: 40297 - DNA, 201 bp, Homo sapiens
ccacaaatttttctttttacagtgtgaatcttaaatttgagattcttttctcaaataaggacttagtactaatattagtattctgtgttactgattgggayagaacagtatctgaatagcactgtaggaagagtcactcattcatccaacatatatttatacagcactaactatgtgtttggcactgaatatatagtgatg

SEQ ID NO: 40298 - DNA, 201 bp, Homo sapiens
atctcagctcactgcaacatctgcctcctgggttcaagcgattcttgtgcctcagcctcccaagtagctgggactacaggcgcgcaccaccacacccagcyaatttttgtatttttagtagagatggggtttccccatgttgccccggctggtctcgaacttctgacctcaagtgatctgcccacctcagcctcccaaagt

SEQ ID NO: 40299 - DNA, 201 bp, Homo sapiens; identical to SEQ ID NO: 7008

SEQ ID NO: 40300 - DNA, 201 bp, Homo sapiens
cccaattttctgggaacatcttcatttttcatccatttcccccctttcctctatttttcttggaaatggtaatgatagttaatctcaaagtacttgtcttytaattccaaaatctgaatctcctgcgggtctgattctgtcatatacttttttcttgttttttttttttcatgtggtcttgccttttggtattctaataat

SEQ ID NO: 40301 - DNA, 201 bp, Homo sapiens
gaacatcttcatttttcatccatttcccccctttcctctatttttcttggaaatggtaatgatagttaatctcaaagtacttgtcttctaattccaaaatytgaatctcctgcgggtctgattctgtcatatacttttttcttgttttttttttttcatgtggtcttgccttttggtattctaataatgtttgattaaatg

SEQ ID NO: 40302 - DNA, 201 bp, Homo sapiens
atccatttcccccctttcctctatttttcttggaaatggtaatgatagttaatctcaaagtacttgtcttctaattccaaaatctgaatctcctgcgggtytgattctgtcatatacttttttcttgttttttttttttcatgtggtcttgccttttggtattctaataatgtttgattaaatgacaagtattatgtataa

SEQ ID NO: 40303 - DNA, 201 bp, Homo sapiens; identical to SEQ ID NO: 7009

SEQ ID NO: 40304 - DNA, 201 bp, Homo sapiens
gagacccacttgtgtaagccccacaattatcagctccttgcttagtagcttcttaaaatgtctgctgggtattctatgaatttgtttttctgtaataatgrttgtaacctcctcaaggtcaaaggattatgactgctcagactttgtaacccctggcatggagctggaactactgcatagctcaataatttcctgctgata

SEQ ID NO: 40305 - DNA, 201 bp, Homo sapiens
gcccggcccctagcccagggttcccgttacgcggctggttccagctggccgcggagtcccagaacctccccgggatgcccagatagctctctgcacgtctsgccccggggcgatcacgttgccggggcgagggctggcgccccagctgggcgctggttggtcgcgccctggggctcgaggcccggcgattggtcccaggga

SEQ ID NO: 40306 - DNA, 201 bp, Homo sapiens; identical to SEQ ID NO: 7010

SEQ ID NO: 40307 - DNA, 201 bp, Homo sapiens
caaatttttctttttacagtgtgaatcttaaatttgagattcttttctcaaataaggacttagtactaatattagtattctgtgttactgattgggacagwacagtatctgaatagcactgtaggaagagtcactcattcatccaacatatatttatacagcactaactatgtgtttggcactgaatatatagtgatgaac

SEQ ID NO: 40308 - DNA, 201 bp, Homo sapiens
tatcattcttttttttcatccgccctcccctctccttttcctcacctcacctgagatacctacatgtttcaggcggcatcctgcactttcttttcttttctttttttttttttttgagagggagtctcactctgtcacccaggctggagtgcagtggcgcgatctcggttcactgcaacctccgcctcctgggttcaagtg

SEQ ID NO: 40309 - DNA, 201 bp, Homo sapiens
tcttataaagattacatgagttaatatttctaagtgcttaaaacagtgccgagcccaaagtaagcagtatatgtttttcaggttgtatccttttacttaawattggagttcctgttgaatgtagctaaagaaggaagaagaaaatagtgtacaagagcgcttactattaactgagacaaatgaattggcaccttttttgtt

SEQ ID NO: 40310 - DNA, 201 bp, Homo sapiens
caaaaatactttttcttcttattttgatttttctgatgttgaagtttcctatgaatttccgtacattttggctagtttctaattctccccctgaacaagtmatctctttcccatcttccatacactcacattaaagccttttaaaatgcccttcagtaggtgttttaataatgtctgcatggattatttctaacttacttg

SEQ ID NO: 40311 - DNA, 201 bp, Homo sapiens
caaatttaagctgactgggctagtatctcatttttcttttcaaaaatactttttcttcttattttgatttttctgatgttgaagtttcctatgaatttccrtacattttggctagtttctaattctccccctgaacaagtcatctctttcccatcttccatacactcacattaaagccttttaaaatgcccttcagtaggt

SEQ ID NO: 40312 - DNA, 201 bp, Homo sapiens
tgtgaataaaataatttcttccatacatcctcccaatcctcccaccccaccctatatgtctagccagctgcccttttattgaataagccgttcttcagcgyctcttatgagaattacccactgtatcatatatatgaaattctgatatgtaagtagtctattttatgaactctttcatctcactgatctgtttctttacac

SEQ ID NO: 40313 - DNA, 201 bp, Homo sapiens
gctacttgggaagctgaggcaggagaatcacttgaatctgggaggcggaggtttgagatagtgctgctgtactccagactaggcaacaggtgagagtctgyctagaaaaaaaaacctctctcctttgacctctcctcctcatgctccccagccagaatcctcacctttagccaaattcttctccttgtagttactcaataa

SEQ ID NO: 40314 - DNA, 201 bp, Homo sapiens
gcactttcttttcttttctttttttttttttttgagagggagtctcactctgtcacccaggctggagtgcagtggcgcgatctcggttcactgcaacctcygcctcctgggttcaagtgattctcatgcctcagcctcccgagtagctgggattacaggtgcccagcaccactcccagctaatttttttattttttagtag

SEQ ID NO: 40315 - DNA, 201 bp, Homo sapiens
agtgcagtggcgcgatctcggttcactgcaacctccgcctcctgggttcaagtgattctcatgcctcagcctcccgagtagctgggattacaggtgcccascaccactcccagctaatttttttattttttagtagagaaggggtttgactatgttggccaggctggtcttgaactgctgacctcaaatgatccacccacg

SEQ ID NO: 40316 - DNA, 201 bp, Homo sapiens
aagtgctgggattacaggtgtgagccacctcacccaggcctgcactttctttaaccccttattttgctaacacttatgcttttccaccacacctagaccaytgtctgctcttactggactattttacaaatggggtttgaggtaaaaactaaaaaatttccagtagtgaaaattatacttgaaaatccctttagtgcaaac

SEQ ID NO: 40317 - DNA, 201 bp, Homo sapiens
ctgcatagctcaataatttcctgctgatagattgattgttaagatgggtaggaccaagcaatgtttagatgctgccaaaccacagtgggagaaatcctackaataatagtacaactccccacgattcctttctactctgtcttcattggtgcaacctacaactaagaacactgattccatcctagtttctctcatccaata

SEQ ID NO: 40318 - DNA, 201 bp, Homo sapiens
tcaacatataatcatgggtagaggaaaagaatacccagggttctagttttggctcagacctagccagcccctggcaagcagcttgacctgtctaagctttyagttcctcatctgtgaaataaagagtttgatgcctatcacctcctacctccataattctaaccattgatgggtcattaaaataagacaatatggtgcagc

SEQ ID NO: 40319 - DNA, 201 bp, Homo sapiens
ggagagaaagctgtatgaatggaacaggctgaaagggtggtgtgagtaaatggcacaagcatgtgaaaatttccaccacggttcttggcacctagcagtamgctatatgtgttagttgaatcccagagttttaacgcccttgaaaaattatttcttaattaggtcgtgtatgttcattgtagaaaaattaagaaaaacaac

SEQ ID NO: 40320 - DNA, 201 bp, Homo sapiens
gcaccaccacacccagccaatttttgtatttttagtagagatggggtttccccatgttgccccggctggtctcgaacttctgacctcaagtgatctgcccrcctcagcctcccaaagtaccagtattataggcgtgagctactgtgcccagcctatcctcattactcttgattgtccctgtgctaacttcctaatgataag

SEQ ID NO: 40321 - DNA, 201 bp, Homo sapiens
tgaagaataaacttttatcatatcatagaatcctctatgtcagagctgtaaaccacaggcctgcaggctgtatctgggcacagatgtattttatttgacaygggatttttaaagaatttattgccatgatataaccatcagcagactacattaaaaaatctgggtttactttttttcctaaaaaaattgtaaggtctcccc

SEQ ID NO: 40322 - DNA, 201 bp, Homo sapiens
cttaatactgttctcttttactacatatgatagcacctgcctgatatctagtgcactggctataattcagtcagcacaaaaatagtacatatgtatttggyactggggaagagcatttccgatccaggtgataatccctcttctttttgcattccagaatgatccaggttttagatccacgtcctttgacaagttcggtca

SEQ ID NO: 40323 - DNA, 201 bp, Homo sapiens
tgcaatctcagctcactgcaacctccgcctcccgggttcaagcgattctcctgcctcagcctccagagtagctgagagtacaggtgtgcaccaccatgccyggctaatttttgtatttttagtagagatagggtttcaccatgttggccaggctggtcttgaactcctggcctcaagtgatccactgggcagatttcctga

SEQ ID NO: 40324 - DNA, 201 bp, Homo sapiens
agaaaatagtgtacaagagcgcttactattaactgagacaaatgaattggcaccttttttgttctccaaaatgcaaaacctgctccttttaataataattaaaaaaaaaaaaaaccagttcgcaacttccctgactctttcactgaaactccgtaagtgatcttcaagatcacttacgaggtttctctcagttaccactaa

SEQ ID NO: 40325 - DNA, 201 bp, Homo sapiens
tctatggtttctgctcacacacacacaatctgctgggtcagggttatgttggaggccatgtctcagctttaaaatggggaaggagttggtgtgggaaaggytggagtggctgctacgtcttgagctacagcacgttcctgaacgggcagaacttccagctgcacagaggggcatagggaaggggcagtaggcgccagtcct

SEQ ID NO: 40326 - DNA, 201 bp, Homo sapiens
ctcattactctttctttttctttcttttttttgttttttgagacagtcttgctccatcacccagggtggagtgcagtggtgcaatctcagctcactgcaayatctgcctcctgggttcaagcgattcttgtgcctcagcctcccaagtagctgggactacaggcgcgcaccaccacacccagccaatttttgtatttttag

SEQ ID NO: 40327 - DNA, 201 bp, Homo sapiens
cggcgcccgctgcatgcggtacgtgcctgcccggcccctagcccagggttcccgttacgcggctggttccagctggccgcggagtcccagaacctccccgsgatgcccagatagctctctgcacgtctcgccccggggcgatcacgttgccggggcgagggctggcgccccagctgggcgctggttggtcgcgccctgggg

SEQ ID NO: 40328 - DNA, 201 bp, Homo sapiens; identical to SEQ ID NO: 7011

SEQ ID NO: 40329 - DNA, 201 bp, Homo sapiens
ggtcacgtgcttgggagcagataagcggcctctaggcgccgggccctcagtctctcccagcgaccgccgcgggggcaaggcctggagctgtggttcgaatytgtgcaggcagcgggtgctggcttttagggtccgccgcctctctgcctaatgagctgcaccaggtaggttcgctgcaactctgcgcgctaggaacacagg

SEQ ID NO: 40330 - DNA, 201 bp, Homo sapiens; identical to SEQ ID NO: 7013

SEQ ID NO: 40331 - DNA, 201 bp, Homo sapiens; identical to SEQ ID NO: 7014

SEQ ID NO: 40332 - DNA, 201 bp, Homo sapiens
ttcagttcctcatctgtgaaataaagagtttgatgcctatcacctcctacctccataattctaaccattgatgggtcattaaaataagacaatatggtgcrgcggttattgctctggtatcagccaggctctaatccctgctctacctgtgagaacctgggcaggttttttttttgttttttgttttcgagatagagtctc

SEQ ID NO: 40333 - DNA, 201 bp, Homo sapiens
agagagccggagcgggcggctcttccaggccttgggaaccccggcctgtccccaggcccgcgcggcacccgccctagcccaggcccgcccaaggttccctygggtcccgcgccccgcgctccctctcaagctaacccctgcccgcaggaagcggggctcggaggctccctcgcaacaaaaggctaaattcggtttccctgg

SEQ ID NO: 40334 - DNA, 201 bp, Homo sapiens
tgaaatggcagagttctgtttatttccccagacccaagagagccggagcgggcggctcttccaggccttgggaaccccggcctgtccccaggcccgcgcgrcacccgccctagcccaggcccgcccaaggttccctcgggtcccgcgccccgcgctccctctcaagctaacccctgcccgcaggaagcggggctcggaggc

SEQ ID NO: 40335 - DNA, 201 bp, Homo sapiens
tgagtggaggttgcagtgagccgagattgcgccactgcatccagcctgagcaacagagtaagactccgtctcaaaaaaaaaaaaaaaaaaaaaaaaaaaaagagaaaagttgtttcctaatagagataagatttgggagtagagcaaaatcctaatacaaagcttttatttcaggcagcagaacaacattgaagaaatact

SEQ ID NO: 40336 - DNA, 201 bp, Homo sapiens
tgttaacctcagctacactgaaggaatagaccttagtcctcacaagtataagttctagcttggaagcctgggttctgcagtagctgtggaacttaagcctstgagctcagggatgcagaggcattgagttactaccaagggcctgatcttttctttagcaggcatctgtgttaattgtttcaaaaggtggtgatcagtttt

SEQ ID NO: 40337 - DNA, 201 bp, Homo sapiens
ggaagactaggcaatttcagcactattttaagaatctgagtgattcttttccctgaacttctgctttgaggaagagataatatggcccatctttctatggkcttctctgttggttgcataaaatagcattggatttgtccagatctgtttgccggtcttggagtccccagtaacagccttcctgcctggaatgtaggccag

SEQ ID NO: 40338 - DNA, 201 bp, Homo sapiens
gggcagcagcctttgactcagcctctggattaggcctctttcttctgtttgtaaaggttttctaaggcagggcttttcagactttattcagtcaacattargctcctacactgcctcaaagcagagcgacgatggaaccctttatttcaatggaattgtgcacgtaggccagtgtattgaagaaaaactaagtctggttta

SEQ ID NO: 40339 - DNA, 201 bp, Homo sapiens
aagtggataattataactccctcgggggcgggaagcggggatcctcccccagccgcaagtccacgaagaaagcaacgaatgaaaattatgaagacaacgaraagtcagactcctccgggtcgcgctccagctgcttcggcttcgtcgcctactctgtgaactccggggagagatctcgagtcaagattaagaccttaaccc

SEQ ID NO: 40340 - DNA, 201 bp, Homo sapiens
ttgggccctgaaagacctgcctagggtctggccagcagtataagacaggtctccagacttagtttctaccgccctccagaatcctctctgtaaaattagakaaacagcacgttgatttcaaatgtgaaatggcagagttctgtttatttccccagacccaagagagccggagcgggcggctcttccaggccttgggaaccc

SEQ ID NO: 40341 - DNA, 201 bp, Homo sapiens
ttttgtaaatttgtgtattggttttgatttgtttcctctgatagtttagtatttggatagtttagtgttaacctcagctacactgaaggaatagaccttaktcctcacaagtataagttctagcttggaagcctgggttctgcagtagctgtggaacttaagcctctgagctcagggatgcagaggcattgagttactacc

SEQ ID NO: 40342 - DNA, 201 bp, Homo sapiens
gcctgtaatcccagctcctcgggaggctgaggcaggagaattgcttgaacccgggaggcagaggttacagtgagtggaggttgcagtgagccgagattgcrccactgcatccagcctgagcaacagagtaagactccgtctcaaaaaaaaaaaaaaaaaaaaaaaaaaaaagagaaaagttgtttcctaatagagataaga

SEQ ID NO: 40343 - DNA, 201 bp, Homo sapiens
attgtaaccttgtttcatcctcaaatctaaatgtgtaatgagttttcttttggtggggaggggcggtgggtttgagttaagaccacagctaggatgaaagrcaaagagaaaaacaaactgtggaagccaagcctgttctgtggctggattttacttatattggaagaagttctatgttttgtaaatttgtgtattggtttt

SEQ ID NO: 40344 - DNA, 201 bp, Homo sapiens
ctagtgggcggctccacaggtcattttcgatgaccactttattttgcagatgaggaaacttgggccctgaaagacctgcctagggtctggccagcagtatragacaggtctccagacttagtttctaccgccctccagaatcctctctgtaaaattagataaacagcacgttgatttcaaatgtgaaatggcagagttctg

SEQ ID NO: 40345 - DNA, 201 bp, Homo sapiens
tacagtctgggtttctgcgggtgaaccagttaagggttttcttctgcttttacttctcgcctatgctcaagcctccctggtcagttcttggactcatctgygccctaatttcatcattttaagtaaatgtggggctggccaaggaggacaaggcctcttgttcactcctgaaagagtcagtggtcatgtattatgttccta

SEQ ID NO: 40346 - DNA, 201 bp, Homo sapiens
gtggaccgattgtgattctcaaaagctctgtgttgtcacctgtgcccttgccccttgctcttatcttggtccgtgtatctgggagttcttccaccttatcytggccaattcctaccttcgttcattcctcatgaggttgggtaaaagctccctccggctcccatgatgctgtgcatatacctagcaaaaagcaattattgg

SEQ ID NO: 40347 - DNA, 201 bp, Homo sapiens
gtgagtggaggttgcagtgagccgagattgcgccactgcatccagcctgagcaacagagtaagactccgtctcaaaaaaaaaaaaaaaaaaaaaaaaaaaaagagaaaagttgtttcctaatagagataagatttgggagtagagcaaaatcctaatacaaagcttttatttcaggcagcagaacaacattgaagaaatac

SEQ ID NO: 40348 - DNA, 201 bp, Homo sapiens
aagaccacagctaggatgaaaggcaaagagaaaaacaaactgtggaagccaagcctgttctgtggctggattttacttatattggaagaagttctatgttytgtaaatttgtgtattggttttgatttgtttcctctgatagtttagtatttggatagtttagtgttaacctcagctacactgaaggaatagaccttagtc

SEQ ID NO: 40349 - DNA, 201 bp, Homo sapiens
tgtaatcccagctcctcgggaggctgaggcaggagaattgcttgaacccgggaggcagaggttacagtgagtggaggttgcagtgagccgagattgcgccmctgcatccagcctgagcaacagagtaagactccgtctcaaaaaaaaaaaaaaaaaaaaaaaaaaaaagagaaaagttgtttcctaatagagataagattt

SEQ ID NO: 40350 - DNA, 201 bp, Homo sapiens
gtaaaggagacaggaatttagtaatatatgttccagaaacagtacacaagagaattcgccgagatgagaaagttgtcactaggaatggggagtggtaagaygtagaaggtataattgttcttaaagttctactgccaactctttccaattaattacccactctgccatgctttatggacaggaggttgtcggacactgtca

SEQ ID NO: 40351 - DNA, 201 bp, Homo sapiens
gttcaagacaagtctggccaatatggtgaaacctcgtctctactaaaaataccaaaaaattagctgggtgtggtggcacacgcctgtaatcccagctcctygggaggctgaggcaggagaattgcttgaacccgggaggcagaggttacagtgagtggaggttgcagtgagccgagattgcgccactgcatccagcctgag

SEQ ID NO: 40352 - DNA, 201 bp, Homo sapiens
tatatgtccatacacatgcataatataaatgtataccatatttgtgagaatatgcatatatgtacacattagatacacaatacaagcacaatacatatgtmttttgcccaagatacagcattttgtaaaggagacaggaatttagtaatatatgttccagaaacagtacacaagagaattcgccgagatgagaaagttgtc

SEQ ID NO: 40353 - DNA, 201 bp, Homo sapiens
gcatggtggctcaagcctgtaatcccatcactgtaggaggccaaagtgggcagatcacttaaggtcaggagtttgagaccagcctggccaccatggtgaarccccatctctactaaaaatacaaaaattagccgggcttggtggtgagcacctgtaatcccaccctgccgagtggcaggctgaggcaggagaatcgcttga

SEQ ID NO: 40354 - DNA, 201 bp, Homo sapiens
agacatatcaaaaaataaacaaataaataaataaataagtggcagttcatcatttaactccaaagactttgcgtacatttctactgaaaacaatctgagcwgattagaaccctgccattttatagcctttagctcgatctccgaccgttcatttaaaaaaattctacttcaggccgggcatggtggctcaagcctgtaatc

SEQ ID NO: 40355 - DNA, 201 bp, Homo sapiens
ttcatgtggctaagtgatttggccaacacaaagctggtatgaagggaaagcccagatttgaacctaggtttacctgacttgcagccgtgcctttagccacmacaatgtaatgcttcaaggggcagcactgaaatttaacaaggaatttgtaaggcaccttacccaatccaaaatgtcaccagtctgaaacatcccaaaaaa

SEQ ID NO: 40356 - DNA, 201 bp, Homo sapiens
caacttatgactggttatttgtcatcaaggttcacagctgaattcagtgttggagaagttggaaaaagatgaacaagctgttttgttttgttttgagacasagtattgctctgtcgcccaggctgcagtgcagtgtcgtgatctcggctcactgtaatctctgcctcctgggttcaagggattctcctgccttagctttcc

SEQ ID NO: 40357 - DNA, 201 bp, Homo sapiens
aagtggatgagaagttcctgaactattcttggcccttttaccactaagtgaaagtaacttgctgccccaaagaaagatgtctcatcattcgacaggacttyctagttgaacttcatgaaagcaagagatcctgtttttcttgctcaccactgtatcttgagacctgttgtagtgcctgcaatacttatttaataagttatt

SEQ ID NO: 40358 - DNA, 201 bp, Homo sapiens
gcacccctttggttggccttccaacggcttcccagggccccagggtaagtctccttgggttagaggtgaaattcccagaagtgtctaactgtgcaggaatrccccttcccagggatgggaatgactttcagaatcaagaagcaaaataatacagtaaaggcgaaacagccctcacatcaccaaagtccaaaaatggatatg

SEQ ID NO: 40359 - DNA, 201 bp, Homo sapiens
gcttgtatgctggagtcaagattgcggggactaatgccgaggtcatgcctgcccaggtaagtatagctccaatccatcaatgaagaagggtaggtaggtgyacataggacttttgctagtaagggctgctgatacaccactcactaacccaaaacctaagaacgggttggagtacaggtgagaagagaacaggtttaggag

SEQ ID NO: 40360 - DNA, 201 bp, Homo sapiens
cgcacctgcagatgaaggcaaggatagtgattcaagagggcaaggcttaagggccttctgatctctgactttgggattctctggatttcttgactcttagygttttgtcctgatgcttctgtaggtccatattactgtggtgtgggagcagacagagcctatggcagggacatcgtggaggcccattaccgggcctgcttg

SEQ ID NO: 40361 - DNA, 201 bp, Homo sapiens
ggtaagtatagctccaatccatcaatgaagaagggtaggtaggtgtacataggacttttgctagtaagggctgctgatacaccactcactaacccaaaacstaagaacgggttggagtacaggtgagaagagaacaggtttaggagattctgagttggagtgagcagttagctttgttttaatggccaagcttctcgtttc

SEQ ID NO: 40362 - DNA, 201 bp, Homo sapiens
aggtacatttcaatattgtgttcacatacacattttcccaaccatcacggcaagctgagaggagaggtatgtattcccattttccagattaacaagaagcygcacttgataaagcaaaatcagggagaattcgttaaaggaatttcttgacaatccctggacttcaaagggggcaagtgaacacctcgatttcctttcagc

SEQ ID NO: 40363 - DNA, 201 bp, Homo sapiens
accccttgtcagcactgatatggtgtgtaccaagaaacagaaaagttcatgggttcaagcattctaatgctctttttatggtgggggtgaagaatgggggygggtggcaatttagggaagaaggggaaggagaagaaagggcagcagacacagcaaagtcaaactggatgaaacaggctgttttacttttaacttctctaa

SEQ ID NO: 40364 - DNA, 201 bp, Homo sapiens; identical to SEQ ID NO: 7016

SEQ ID NO: 40365 - DNA, 201 bp, Homo sapiens
ccccgggccgcggataaagggtgcggggctgctggcggccctgcagagtcgagagtgggagaagagcggagcgtgtgagcagtactgcggcctcctctcckctcctaacctcgctctcgcggcctacctttacccgcccgcctgctcggcgaccaggtaagcccccggacggcccggtgtcacgcaagcgaggcgcgccgc

SEQ ID NO: 40366 - DNA, 201 bp, Homo sapiens; identical to SEQ ID NO: 7019

SEQ ID NO: 40367 - DNA, 201 bp, Homo sapiens
ggtactaaataacaactgatagcacaagctatagggaatttgaaagaattccatggatgggtgttgtctagggccttttgttgtttttgagacggggtctsactctcacccaggctggagtatagtgtggcgcaatcttggctcactgcaacttctgcctcccagattcaagcgattctcctgcctcagcctcccaagtag

SEQ ID NO: 40368 - DNA, 201 bp, Homo sapiens
ctaacctaacatgacttcatcaagttactatgagttatctaagcctcagttcctcatctttaagatagaatgatgtgaagatctaattctagaattgtatrgctttaattttctcaataggacattttccccaggttgttaactaagatgaacttgattcttcccaactttccacgtagtttcctgctagagacatgattc

SEQ ID NO: 40369 - DNA, 201 bp, Homo sapiens
gtctgctatacagaagtcactgggtaagcatacccaggattgagaggtaaatggttgctccctgtcctctgcacctccctcagtgaggactgtaggaattkcagtattttagagatggtggccccggaacagatcacccacagaccaaagcgactaaaggaaagggaacagaaaaagaacagcaccttgaaagctcattaa

SEQ ID NO: 40370 - DNA, 201 bp, Homo sapiens
tagaggcaatattggggtgttggtcttccccaaggggaagggtggtgaggctgagggagaagcagttatgttttcagctgggcaaacatggacggttgccygtagaaactttgccactgtacttcagaacgttgccctagtcgttggaggagaacaatgtgttccctttctagccaccctggtccacggagggaggaggga

SEQ ID NO: 40371 - DNA, 201 bp, Homo sapiens
tcaaagcactcaagctttgggggagtttgtcattctcacaaaattccacaagagggcactaggttcacaccaccccggccaagcttctgattctccaaccscagtaaacaagtctccggagaacgggtttaaaagaagtggaagaggagaacggacaggaaaaatccagaagcagactaagaattgcccaagcatccagaa

SEQ ID NO: 40372 - DNA, 201 bp, Homo sapiens
cttagcactttgggaggccaaggcaggtggatcacctgagttcaggagttcgagaccagcgtggccaacatggtgaaaccttgtctctattaaaaataccraaattagcaagatgtggtggtgggtgcctataattccagctactcaggaggctgaggcaggaggatcgctggagccagggaggcagaggttacagtaagc

SEQ ID NO: 40373 - DNA, 201 bp, Homo sapiens
tgggcaacaaagtgagaccctgtctcaaaaaaacaaaaaaaaattataactgatgtaaactggcagtttaggctgggtgtggtggctcaagcctgtaatcytagcactttgggaggccaaggcaggtggatcacctgagttcaggagttcgagaccagcgtggccaacatggtgaaaccttgtctctattaaaaataccaa

SEQ ID NO: 40374 - DNA, 201 bp, Homo sapiens
gtccccttctccatcgccctctcccagaaagctccggtgcttggaccagctagagtctgagaaagaggagaggcgcgaacgccactccaaaaagagaaggkttaaagagggcaaccctaacgatacgcttgactttctgtggctggggtgagtgagggggcagggaggacgaccccggagttggtgggagctgcagaaacg

SEQ ID NO: 40375 - DNA, 201 bp, Homo sapiens
ggcgtggtggcatgcacctgtagtcctagctacctgggaggctgaggtgggaagattacttgaagctgcagtgagccatggttgtgccactgccctccagyctgggcaacaaagtgagaccctgtctcaaaaaaacaaaaaaaaattataactgatgtaaactggcagtttaggctgggtgtggtggctcaagcctgtaat

SEQ ID NO: 40376 - DNA, 201 bp, Homo sapiens
gccatgtttcgggaccccttccgtaaggaccctaacaagctggtgttatgtgaagttttcaagtacaatcgaaggcctgcaggtgtgttatagcacagctrtggatacccctcctcaatctgtgaatgctgtgaaggggagggagaagacattctgaaatcagcattgggaagactaggcaatttcagcactattttaaga

SEQ ID NO: 40377 - DNA, 201 bp, Homo sapiens
cgggggccttccaatgtgaccgaacaatggagagcccgggcctcggcgcagtcagtggagaagccggtccgggcggaggcagcagcagcgcgcagtccctmcggcctgcgcccccaccctcccccggaccccccaacccctcggcggcagggtatggccacctccgtgaggccctgagattcggacgggggcccgaggggc

SEQ ID NO: 40378 - DNA, 201 bp, Homo sapiens
atcccagcactttgaaaagccgaggcaggtagatcacttgagctcagaagttcgagactagcctgggcaacatgacaaaaccccatctctacaaaaaatasgaaaaattagctgggcgtggtggcatgcacctgtagtcctagctacctgggaggctgaggtgggaagattacttgaagctgcagtgagccatggttgtgc

SEQ ID NO: 40379 - DNA, 201 bp, Homo sapiens
ttgtttgggcggccggctcccgcctcggggtcccgggggccttccaatgtgaccgaacaatggagagcccgggcctcggcgcagtcagtggagaagccggkccgggcggaggcagcagcagcgcgcagtccctacggcctgcgcccccaccctcccccggaccccccaacccctcggcggcagggtatggccacctccgtg

SEQ ID NO: 40380 - DNA, 201 bp, Homo sapiens
tgcggcgtgtaacggtgagcgttgtttgggcggccggctcccgcctcggggtcccgggggccttccaatgtgaccgaacaatggagagcccgggcctcggmgcagtcagtggagaagccggtccgggcggaggcagcagcagcgcgcagtccctacggcctgcgcccccaccctcccccggaccccccaacccctcggcgg

SEQ ID NO: 40381 - DNA, 201 bp, Homo sapiens
cgcttggttggcgcgggcgcctggctgccttcctcgtggtggggccttcggagcaatcgtcctggttctggcgatggttgagacgcctcgattgcggcgtrtaacggtgagcgttgtttgggcggccggctcccgcctcggggtcccgggggccttccaatgtgaccgaacaatggagagcccgggcctcggcgcagtcag

SEQ ID NO: 40382 - DNA, 201 bp, Homo sapiens
tgagatgaatgctgcatctgtcatgtaaaagcactacagtgttatacactcttaaaggaaagggatgttgaccaaagaagccaagttatgtgtgtgtggtygcaggcaacatttcttttccacatttgcggtacaaaacataaccagaacaaacttcttcccttcctcttccaaaggcactggaagcataaattcttgctc

SEQ ID NO: 40383 - DNA, 201 bp, Homo sapiens
tcaggaggctgagatgggaggatgacttgagcccaggaaattgaagctgcagtgaattgtgattgcaccactgcactccagcctgggtgacagatcaagamcttgcctaaacaaaacaaaacaaacaaaaccccaaaaaacaaattgaaaatgttgattctttttactacaaacattatggcagcactaaaaacttcgtgg

SEQ ID NO: 40384 - DNA, 201 bp, Homo sapiens
gcagaggggtgggcagcagcctttgactcagcctctggattaggcctctttcttctgtttgtaaaggttttctaaggcagggcttttcagactttattcaktcaacattaagctcctacactgcctcaaagcagagcgacgatggaaccctttatttcaatggaattgtgcacgtaggccagtgtattgaagaaaaactaa

SEQ ID NO: 40385 - DNA, 201 bp, Homo sapiens
ttgattttgttgttaaatgatgtatacccttatttccattgaatctgtgcttccacccccccaactgaagttgtcttccctttgcttagccacccttacascctcttggatggtgtatcctacagtgtaagcactaaactgaagaggcagtgacctgagcactttggattttgttcattgtaatcaattccatgacaaaat

SEQ ID NO: 40386 - DNA, 201 bp, Homo sapiens
ggctggctgtatttgcattgcttggaaagctcctgtatgttttaaatgtaattttccctctttttgccccagagttgcctgagtggaatttcgatggctcyagtactttacagtctgagggttccaacagtgacatgtatctcgtgcctgctgccatgtttcgggaccccttccgtaaggaccctaacaagctggtgttat

SEQ ID NO: 40387 - DNA, 201 bp, Homo sapiens
tatcactggcttctagatgtgaagcaaatgctctacaatggtttttaaataggactaatttttagttgatgccacttttggaaattcttaaactaattgcrtatccctctaggagctacagttagattatagttgtgaccttcatttttcagtctagaacaagccatagtcttccctcttctggaaaggggccagaggaaa

SEQ ID NO: 40388 - DNA, 201 bp, Homo sapiens
gttaaagagggcaaccctaacgatacgcttgactttctgtggctggggtgagtgagggggcagggaggacgaccccggagttggtgggagctgcagaaackgctgaaaacttcagaatccatttcccccacgtaaacttggcaccgcagcagcagcagttgatagagtggcactaggctgctggcatgcaactcggctcac

SEQ ID NO: 40389 - DNA, 201 bp, Homo sapiens
ctggtcttgaactcctgatctcccaaagtgaggtcttgaactggtcttgaactcctccacctcccaaagtgctgggattacaggcgtgagccactgcaccyggcctagggccatgtaaaaagccagatctgtgctgctgtctgtgtagaagggtagacaagtggatgagaagttcctgaactattcttggcccttttacca

SEQ ID NO: 40390 - DNA, 201 bp, Homo sapiens
ttctatttcattttacaatatgcagatatatgtccatacacatgcataatataaatgtataccatatttgtgagaatatgcatatatgtacacattagatrcacaatacaagcacaatacatatgtattttgcccaagatacagcattttgtaaaggagacaggaatttagtaatatatgttccagaaacagtacacaaga

SEQ ID NO: 40391 - DNA, 201 bp, Homo sapiens
ggttcctagccttttttcaattacttttctttgggagccttccttttctctttacctctcttacacattaatgggaggtgatgaaaaagcacaaacacttrgctgcctgtttcctgtaatgaggcttaattctataacaataagcctctggtaatcaagtgataccccccaacataatagctttcaaatattcagtgtagg

SEQ ID NO: 40392 - DNA, 201 bp, Homo sapiens
actaaaaacttcgtgggagtgtactgtggaaaatagtgtacttaattaattctcattgtaatcaggctaccaagagccttgtgttgctttaagagttatamctgccaggcacagtggctcatgcctataatcccagcaccttgagaggccgaggcaggtggatcacctgagatcgggagtttgagaccagccgggccaata

SEQ ID NO: 40393 - DNA, 201 bp, Homo sapiens; identical to SEQ ID NO: 7027

SEQ ID NO: 40394 - DNA, 201 bp, Homo sapiens; identical to SEQ ID NO: 7028

SEQ ID NO: 40395 - DNA, 201 bp, Homo sapiens
ttgtgaggctgcagcaggaggatctcttgagcccaggagtttgagaccgttctaggcaatgtagtgaggtccagactccacaaaataatttttttttaaaktgcacgcctgtagtctcagctatcaggaggctgagatgggaggatgacttgagcccaggaaattgaagctgcagtgaattgtgattgcaccactgcactc

SEQ ID NO: 40396 - DNA, 201 bp, Homo sapiens; identical to SEQ ID NO: 7029

SEQ ID NO: 40397 - DNA, 201 bp, Homo sapiens; identical to SEQ ID NO: 7030

SEQ ID NO: 40398 - DNA, 201 bp, Homo sapiens; identical to SEQ ID NO: 7031

SEQ ID NO: 40399 - DNA, 201 bp, Homo sapiens
catgttggagaggacagccgagaaattgggttgtaggttttttttttttgttttccgacagagtctctatctgttacccaggttggagtgcagtggtgcartctcccggctcactgcaacctctgcctctggggttcaggcgattctcctgtgtcagcctcccgagtagctgggattacaggcgtgcacaaccacgcccgg

SEQ ID NO: 40400 - DNA, 201 bp, Homo sapiens
ggccttccaacggcttcccagggccccagggtaagtctccttgggttagaggtgaaattcccagaagtgtctaactgtgcaggaatgccccttcccagggrtgggaatgactttcagaatcaagaagcaaaataatacagtaaaggcgaaacagccctcacatcaccaaagtccaaaaatggatatgaatatataaagtaa

SEQ ID NO: 40401 - DNA, 201 bp, Homo sapiens
tggccccggaacagatcacccacagaccaaagcgactaaaggaaagggaacagaaaaagaacagcaccttgaaagctcattaagctctaaaatactaaccwaacatgacttcatcaagttactatgagttatctaagcctcagttcctcatctttaagatagaatgatgtgaagatctaattctagaattgtatggcttta

SEQ ID NO: 40402 - DNA, 201 bp, Homo sapiens
gggtaagcatacccaggattgagaggtaaatggttgctccctgtcctctgcacctccctcagtgaggactgtaggaatttcagtattttagagatggtggycccggaacagatcacccacagaccaaagcgactaaaggaaagggaacagaaaaagaacagcaccttgaaagctcattaagctctaaaatactaacctaac

SEQ ID NO: 40403 - DNA, 201 bp, Homo sapiens
ccttagcattttcttgattttgttgttaaatgatgtatacccttatttccattgaatctgtgcttccacccccccaactgaagttgtcttccctttgcttrgccacccttacaccctcttggatggtgtatcctacagtgtaagcactaaactgaagaggcagtgacctgagcactttggattttgttcattgtaatcaat

SEQ ID NO: 40404 - DNA, 201 bp, Homo sapiens
agcaattattggacacattggagtgcaatattattaatagcattaatactactaataatgtgggcaatagtgattgtttttaaaaggcagtatactcttaycagtgcgaggtagctggggcctgtgatagtttttagagataagttcttcaggcaactgtgtattttacactagtcaagtaatcctagatatccgtggttt

SEQ ID NO: 40405 - DNA, 201 bp, Homo sapiens
cattgttttgaccattcctagcctaatacaatagcctaacataatgtaagattaactggctttacgatttctattctctgctctcagtgattcatttaagwaacaaatattagctaccctgctaccctggttgaagccttccaaggctggctatgccctaggcatgggctcatccttgggtgtatcttgccttgcaggaag

SEQ ID NO: 40406 - DNA, 201 bp, Homo sapiens
ggctgctggcggccctgcagagtcgagagtgggagaagagcggagcgtgtgagcagtactgcggcctcctctcctctcctaacctcgctctcgcggcctasctttacccgcccgcctgctcggcgaccaggtaagcccccggacggcccggtgtcacgcaagcgaggcgcgccgcccctgctaccccgcgaggcgcgccgc

SEQ ID NO: 40407 - DNA, 201 bp, Homo sapiens
cgcatcagctgatcggcccgggctcctggccgctgggagccaatcagggcaccgggggcggccccgggccgcggataaagggtgcggggctgctggcggcyctgcagagtcgagagtgggagaagagcggagcgtgtgagcagtactgcggcctcctctcctctcctaacctcgctctcgcggcctacctttacccgcccg

SEQ ID NO: 40408 - DNA, 201 bp, Homo sapiens
cagacccaagagagccggagcgggcggctcttccaggccttgggaaccccggcctgtccccaggcccgcgcggcacccgccctagcccaggcccgcccaargttccctcgggtcccgcgccccgcgctccctctcaagctaacccctgcccgcaggaagcggggctcggaggctccctcgcaacaaaaggctaaattcggt

SEQ ID NO: 40409 - DNA, 201 bp, Homo sapiens; identical to SEQ ID NO: 7017

SEQ ID NO: 40410 - DNA, 201 bp, Homo sapiens
tgcctgagtggaatttcgatggctctagtactttacagtctgagggttccaacagtgacatgtatctcgtgcctgctgccatgtttcgggaccccttccgwaaggaccctaacaagctggtgttatgtgaagttttcaagtacaatcgaaggcctgcaggtgtgttatagcacagctatggatacccctcctcaatctgtg

SEQ ID NO: 40411 - DNA, 201 bp, Homo sapiens; identical to SEQ ID NO: 7020

SEQ ID NO: 40412 - DNA, 201 bp, Homo sapiens
ggatggttgggaatatacttagattatctgtgtcattaagtgattcactcctccaggaattgacaccattctttacaaaatcagcctgagataagctatgrcatccccaaaattccttccaaatttggaattttatgctgtgaaccatcacacccaatattgaagttaagcagtttttggttaaatgtgctaccttagagg

SEQ ID NO: 40413 - DNA, 201 bp, Homo sapiens; identical to SEQ ID NO: 7021

SEQ ID NO: 40414 - DNA, 201 bp, Homo sapiens; identical to SEQ ID NO: 7022

SEQ ID NO: 40415 - DNA, 201 bp, Homo sapiens
ttttcggctgcctgcccctccagtcccagccctacgctgcggcctctccggcccatgcctgagatccggcatgagtgctcctcccgcgtgcttccgccgcyggtggcttggacccgtcggggctggcgctggtggggcgcgcccttggccaggctctgggaagggcggggtgagttgttttgatcttcttttcactacttg

SEQ ID NO: 40416 - DNA, 201 bp, Homo sapiens
tatcatattttggtgcacttcattcttggctccatacctggagacaaggttggactgccatcttttctgtttactctaggtacatcgaggaggccattgaraaactaagcaagcggcaccagtaccacatccgtgcctatgatcccaagggaggcctggacaatgcccgacgtctaactggattccatgaaacctccaaca

SEQ ID NO: 40417 - DNA, 201 bp, Homo sapiens; identical to SEQ ID NO: 7023

SEQ ID NO: 40418 - DNA, 201 bp, Homo sapiens
tcatcttgcatcgtgtgtgtgaagactttggagtgatagcaacctttgatcctaagcccattcctgggaactggaatggtgcaggctgccataccaacttyagcaccaaggccatgcgggaggagaatggtctgaagtgagtaccttctgctggggccatctttaatctcctgtggcagaaaacttgggaggagacttagc

SEQ ID NO: 40419 - DNA, 201 bp, Homo sapiens
ttccacaagggaaggagttggcacttacactctgacttttgattcagtcgtccttcttgagccatttttgcaggggatcagtttggagtgggcgttaacartgttattctttttttcttctccagaacaccttccaccatgaccacctcagcaagttcccacttaaataaaggcatcaagcaggtgtacatgtccctgcct

SEQ ID NO: 40420 - DNA, 201 bp, Homo sapiens
agattcttgtcaggctgtttgatgatagtgctggttttgggggagtggtggtgggaagggaagcaaacttttaaaaattaaacagaaccaactcgaattgwatatagcttatttgagaaaggaagatgttagatatttggaaacttaaaacctttaacattttggttttcgtttgctgaattctgttctttggacagaggc

SEQ ID NO: 40421 - DNA, 201 bp, Homo sapiens
gtctttttaaagggtagaaagaaggttaggtataggatagctttttatttatttatttatttatttttgtacaaagggagcctatgtaaagctgccagatstgaactttctggtgttttgctgtaatgttagtaagatttcgccttaaaatattttattttgagtatatacgtttggtcttagagtgtcttggtggatttc

SEQ ID NO: 40422 - DNA, 201 bp, Homo sapiens
agaggtcattgctttatagtcagttctctttctcattaaaaatatagtgtactcacctttacagggtgaatgttggtaaataacttctgtctgtgaaggamgtattctggacctgtaagttaaaaataaggtgtttatagcaaattatgtaaataaagattgtatattagaaggtacacactattcaaattaaagaaaatg

SEQ ID NO: 40423 - DNA, 201 bp, Homo sapiens; identical to SEQ ID NO: 7102

SEQ ID NO: 40424 - DNA, 201 bp, Homo sapiens
cacactggactccatttttcattgtaagcacaaatcacgctcctgcctcaggtgtaccctttgccttgtaaagtcttccctaagctaagtatatggttttmtctcttactttcttcagggcactactcaaaaagttatttccttgaagagttttctctgactgtcctatagcacatatcctatgtgtagcattttatcttt

SEQ ID NO: 40425 - DNA, 201 bp, Homo sapiens
ttgcagtgagacaaggttgcaccactgcattccagcttgggcaacagagcaagactccgtctcaaaaaaagaaaaaaaaagtttatttaaaaaactgtcaygttggccgggcgcggtggcttatgcctgtcatcccagcactttgggaggctgacgcaagcgaatcacctgaggtcaggagttcgagaccaacctggccaa

SEQ ID NO: 40426 - DNA, 201 bp, Homo sapiens
tttttttttttttttttttttttttgagacggagtctcactctgttgcccacactggagtgcagtggcacgatctcagctcactgcaatctctgcctcccsggttcaagtgattctcctgcctcagcctcccaagtagttgggattacaggctcctaccaccatgcctggctaatttttgtatttttagtagagacagggt

SEQ ID NO: 40427 - DNA, 201 bp, Homo sapiens; identical to SEQ ID NO: 7093

SEQ ID NO: 40428 - DNA, 201 bp, Homo sapiens
tctttgtgggcatttgaatttgtgacccttgagttaggtagtaaatgtcagtgcgtggtaaagcttatttttgtaaatagttgtgaagaccttagatggartgggtgttctaatttgaagaattccttaaaaggattagaataaatagggagaaacaggagactagaacttcagtgccaaatacatgttttctttgtgtgt

SEQ ID NO: 40429 - DNA, 201 bp, Homo sapiens
tggtatttggtctgtggtaatgcatgtagttgcagtttggcaatttaagctaaacaattagtaacgatatttttatatcgagcaagaaaaaatattaccgkaatcttcacatttgatttattttaagatgaaaaatatttttgttggaatttaagtttaatggctaaatatgaagactccttgatataaaatattgtgttt

SEQ ID NO: 40430 - DNA, 201 bp, Homo sapiens
ggaatttctcattttactttgtggtgtggacccattctgttctctgcagtgctgcagttcatttggggtaggtactttaaaattatttagtgtctggcaamatatacatgccatgtagcaagctctctgagggcagagtttttaaagtttaaaaatcaatggaaactacaatgttgtgttaactttgagatagttttacaa

SEQ ID NO: 40431 - DNA, 201 bp, Homo sapiens
tctgttctctgcagtgctgcagttcatttggggtaggtactttaaaattatttagtgtctggcaaaatatacatgccatgtagcaagctctctgagggcasagtttttaaagtttaaaaatcaatggaaactacaatgttgtgttaactttgagatagttttacaaggtaggtacatagactttcctgcattggattgggt

SEQ ID NO: 40432 - DNA, 201 bp, Homo sapiens
gccagtgatttactcctgtggagtaaaggtaagcatgttttagtttctggagtattatattgtacgttggagctaggtatttaagaatatttgggggtggrgagggaagactccaatttactggtggtgcttggccagtaatcaaggtgacagtttaagtattgggtcttgcactgtaaactcctgcttatctagacttca

SEQ ID NO: 40433 - DNA, 201 bp, Homo sapiens
attagtactaaatgagagacactacttagatttaattttaaggattaattttggagatcaaacccattcttgaaaaaaacttgtaacccgatttttgtacygttttgtttctgtatgtctgactcatttaaattgcaattctcagagccgtttctagcagtacctcttggcctagataattttctgtccagcagacactga

SEQ ID NO: 40434 - DNA, 201 bp, Homo sapiens
gcattggattactaagtttagctatgtagagaattcaggtttggtgaagaaatttattttatttgtttttgagacagcatctcactctgttgccaggctgsagtgcagtggtgcgatctcagctcactgcaacctctgcctcgtgggttcaagcgattctcctgcctcagcctccttagcagctgggactacaggcctgtg

SEQ ID NO: 40435 - DNA, 201 bp, Homo sapiens
tttttctatgttgggttccccggaccttcatttccttcttcctttgcctgcttatcgcccccctcccccatcacacacgtttccacctttagccgtcaccwtgctgctcctcggcccgccctcctttcctccctcgccatgggtctcctcccaccgacttagccgccaggattttttcccgcctgtcgtggggtacctttt

SEQ ID NO: 40436 - DNA, 201 bp, Homo sapiens
tacttattattttgtcattcaataattcaactggcaattacatagtgtggatatactgctgctgtgtttatgtgtgtgtgagagtgtgttagggagggagrgatacatagaagacactgttttctaagaactcatggtctagtagaaaacaatgaagaataacagaggtaaagataaagggctgtgaaaagggatcattaa

SEQ ID NO: 40437 - DNA, 201 bp, Homo sapiens
tttttatttttgagacggagttttgcttttgttgcccaggctgtagtgcagtggcatatcggctcacggcaacctccgcctcctagattcaagcaattctyctgcctcagccgcctgagcagctgggattacaggtgtgtgccaccaggctcggctaatttttttttttttttttttagtagataatggggtttcaccatg

SEQ ID NO: 40438 - DNA, 201 bp, Homo sapiens
ggcatctatatcagaatcacttagaattgtttgggagtgttgcctgggattctgtatttcacatacaccatgtgattttttttttttttttttttttttttgagacggagtctcactctgttgcccacactggagtgcagtggcacgatctcagctcactgcaatctctgcctcccgggttcaagtgattctcctgcctca

SEQ ID NO: 40439 - DNA, 201 bp, Homo sapiens
tttcaccatgttggccaggctggtctcgaactcctgaaatattatcccccccattccccagtttttttagataactcgtttttagtgtgacttcagaagaractgggcatgacacagattattttttgtagcttttttgtgtaggtgggtgattggtgtaaggtttaggagaacaaaaaaggacaggtaaatcaatattaa

SEQ ID NO: 40440 - DNA, 201 bp, Homo sapiens
tcaaactgagtagtagcttccatcttggtttgggcatatgctctccagtttttagtagtcctcaccaccctacttcctgttttctctcaaatacatttttwttctgtttttcttagatttgactgttttcttcttgttctttgtgggcatttgaatttgtgacccttgagttaggtagtaaatgtcagtgcgtggtaaagc

SEQ ID NO: 40441 - DNA, 201 bp, Homo sapiens
ggtttcaccatgttggccaggctggtctcgaactcctgaaatattatcccccccattccccagtttttttagataactcgtttttagtgtgacttcagaaragactgggcatgacacagattattttttgtagcttttttgtgtaggtgggtgattggtgtaaggtttaggagaacaaaaaaggacaggtaaatcaatatt

SEQ ID NO: 40442 - DNA, 201 bp, Homo sapiens
ggttgctgagatcagtggggaactgcatagcattttaacaagtttaatgaacatttggaagagaaatttgaagctaagattctggtttttttgctgttaaytttttaatctaaggaaaacttttatgtacagtatttttactttgggtatatgtttatcttttagcaagttgaaagacttaatttgctgcttgctcactat

SEQ ID NO: 40443 - DNA, 201 bp, Homo sapiens
tggggtttcaccatgttggccaggctggtctcgaactcctgaaatattatcccccccattccccagtttttttagataactcgtttttagtgtgacttcaraagagactgggcatgacacagattattttttgtagcttttttgtgtaggtgggtgattggtgtaaggtttaggagaacaaaaaaggacaggtaaatcaat

SEQ ID NO: 40444 - DNA, 201 bp, Homo sapiens
gctaatttttgtatttttagtagagatggggtttcaccatgttggccaggctggtctcgaactcctgaaatattatcccccccattccccagtttttttarataactcgtttttagtgtgacttcagaagagactgggcatgacacagattattttttgtagcttttttgtgtaggtgggtgattggtgtaaggtttagga

SEQ ID NO: 40445 - DNA, 201 bp, Homo sapiens
taaagaacattaagcgaacccttgatttaacacactttccaattattagtaacgtaaaggaatcacggtacgttttaggatctttaaacaacaaaagcaawgcaaaaacaatgttttccttaagatatgcaagttacctgcttcttcgaccaaaaacaaaaaaattccaggagaaaagcaggcaaacaaaaatcttacttg

SEQ ID NO: 40446 - DNA, 201 bp, Homo sapiens
actagctgttgtaaagagcttaaccatttatctttctctgtaaaggcttaagttctttgcatgctttaaaaacttctcattggttacttaccattgaccarctttttgtggggagcaggatggacacatttgttagtgtttttgtctaggctttcacaaaaatagtttttagaacttgacaagtaaaatgaagtaacatca

SEQ ID NO: 40447 - DNA, 201 bp, Homo sapiens
gttgacatgtattcacaattgcatgacttctctttggaggctggtaggttgagtattgttctttttatccatcctttcccctcccctaaatgtcagtcttyctgcttttaggattatatttgaattttcaggggtttatacaccaccactggagagtagaaggccactaacttgcaggcagttaacttatatctttacaag

SEQ ID NO: 40448 - DNA, 201 bp, Homo sapiens
tgtatgtctgactcatttaaattgcaattctcagagccgtttctagcagtacctcttggcctagataattttctgtccagcagacactgattttcaaacggtaacaagaattgaaaaaagattttttatatacattaatttggtaattagtttcatgtttttcttgatggttttctgtgttctaatctgaactgtttgccc

SEQ ID NO: 40449 - DNA, 201 bp, Homo sapiens
ctgtatgtctgactcatttaaattgcaattctcagagccgtttctagcagtacctcttggcctagataattttctgtccagcagacactgattttcaaacggtaacaagaattgaaaaaagattttttatatacattaatttggtaattagtttcatgtttttcttgatggttttctgtgttctaatctgaactgtttgcc

SEQ ID NO: 40450 - DNA, 201 bp, Homo sapiens
tatttaaggcaattttttttaagcattttaatactgctttttgtctttacaggaaaatgtttataggaggccttagctgggacactacaaagaaagatctkaaggactacttttccaaatttggtgaagttgtagactgcactctgaagttagatcctatcacagggcgatcaaggggttttggctttgtgctatttaaag

SEQ ID NO: 40451 - DNA, 201 bp, Homo sapiens
tctttctgcttttaggattatatttgaattttcaggggtttatacaccaccactggagagtagaaggccactaacttgcaggcagttaacttatatctttmcaagctacattctattttaagagcctatttagggtaacatttaaagatttgcttatcactgtattctcatccactgaaatcagtccagctttaccttgga

SEQ ID NO: 40452 - DNA, 201 bp, Homo sapiens
gtaaatgtatatatatatatatatacacacacacacacacatatatatataaaatcattatgccatcagtttgagggagagcatgtatgccaacattgtaragactaagtgcccatttatccataattaagataagcagacttttccccattgtactataaagttagagtttggggctgggtatggtagcttccgcctgta

SEQ ID NO: 40453 - DNA, 201 bp, Homo sapiens
atatttaaggcaattttttttaagcattttaatactgctttttgtctttacaggaaaatgtttataggaggccttagctgggacactacaaagaaagatcygaaggactacttttccaaatttggtgaagttgtagactgcactctgaagttagatcctatcacagggcgatcaaggggttttggctttgtgctatttaaa

SEQ ID NO: 40454 - DNA, 201 bp, Homo sapiens
cttggagaaaaagcagatgggaaacaggcaaggggaaaagcaaaaaagaggaaaaaaaaagactggggtcacagtttcgatgaatgttattccctgtattkggtgagtggtgggcactagcagctcaatttcactgctagctaatagtggcaaattaagattaaactataaactatttgacattactccattatgtatttt

SEQ ID NO: 40455 - DNA, 201 bp, Homo sapiens
acgccagtaagaacgaggaggatgaagggtgagtaaggggcatcccaggatagtcaggcccaactagtccccctccccctctttattcccccgccattagscctggttcccgctctcagcccgttctccgggcccccatgcagcctccttgcactggtctccctttttctatgttgggttccccggaccttcatttccttc

SEQ ID NO: 40456 - DNA, 201 bp, Homo sapiens
agcataccctgagaacaacaaccttttttgattagaacagaagaaaaagccagagtgttcttgggctgccaaaatattaatacgtttgtctcaaagacgarccacttaggtgcttgcttagagacttctactttacacagaatttgaaaagtttgacagctggctacttactctgcaaaacggaagggagactttttagaa

SEQ ID NO: 40457 - DNA, 201 bp, Homo sapiens
tattcacctatttggtcagcaaccatttttttttttttaaagcctaagcataccctgagaacaacaaccttttttgattagaacagaagaaaaagccagartgttcttgggctgccaaaatattaatacgtttgtctcaaagacgagccacttaggtgcttgcttagagacttctactttacacagaatttgaaaagtttg

SEQ ID NO: 40458 - DNA, 201 bp, Homo sapiens
cacttgaacctgggaggcagaggttgcagtgagctgagattgtgccactgcgctccagcttgggcgacagagtgagactgtctcaaaaactaagcaaccaraaacagaaaaagatggaatggaattaatatgttccatttagtaaagatggaatagaattggtccagtttgtgttcattgtagcatattcacctatttggt

SEQ ID NO: 40459 - DNA, 201 bp, Homo sapiens
gagcccaggaaggagctcagggctgcaggaagctatgatggagccactgcattttgatagtgagacctggtctcttaaagtgttttatttttaggccaggygtagtggctcacacctgtaatctcagcactttgggaggccaagatgggtggatcacctaaggtcaggaattggagaccagcctggccaacatggcgaaac

SEQ ID NO: 40460 - DNA, 201 bp, Homo sapiens
ctatatcagaatcacttagaattgtttgggagtgttgcctgggattctgtatttcacatacaccatgtgattttttttttttttttttttttttttgagayggagtctcactctgttgcccacactggagtgcagtggcacgatctcagctcactgcaatctctgcctcccgggttcaagtgattctcctgcctcagcctc

SEQ ID NO: 40461 - DNA, 201 bp, Homo sapiens
catgattttaaaacgttggaaaattcatcaaggtacaaatcattttctgacttcagcattgatacctaaattgatttccagtacacagttttatagaattgtgaatatgtagtaatctcagttaaccagaaccttaaccttcaggttaaggaaaatacctattccttaacctctaggtaaatgggagtttaccttacaaag

SEQ ID NO: 40462 - DNA, 201 bp, Homo sapiens
ttgtgttgatcctgaaatgtctgagtttattttgtttggagtgagtttaacctgaaatgtcaaaacctagatccataatatagcatcacatctcaataaakttatttggaagcagtttcttaatagtgcagtttatcaatgaactaacatttaaggatgaccctaaactatcataaaatttgattttttttgaaagctacc

SEQ ID NO: 40463 - DNA, 201 bp, Homo sapiens
atcccaaaatttaagttgtgttagtttcttttttgggtgtgggtgtgtgtgtggggtggagttctctcgtcgcccaggctggagtgcagtggcactatctyggctcgctgcaacctctgcctcctgggttcaagcgattctcctgcctcagcctcccaggtagctgggactacaggtacacaccaccatgcccggcttatt

SEQ ID NO: 40464 - DNA, 201 bp, Homo sapiens
cgcctcctagattcaagcaattcttctgcctcagccgcctgagcagctgggattacaggtgtgtgccaccaggctcggctaatttttttttttttttttttagtagataatggggtttcaccatgttaggctggtcctgaactcctgacctcaggtgatccacctgacttggcctcccaaagtgctgggattacaggtgtg

SEQ ID NO: 40465 - DNA, 201 bp, Homo sapiens
cagcactgtgtattatggaaaaatgtttgtcttttacctagcatatttgtaaatagacctttaataagaagtgtgtgtgtgtgtgtgtgtgtgtgtgtgtrtatatatatataccattaaaaggtgggctaatgtggctttccactacagctcttaccagattttttattttcagtgtgatttggctggaatattaataac

SEQ ID NO: 40466 - DNA, 201 bp, Homo sapiens
ggaggctggtaggttgagtattgttctttttatccatcctttcccctcccctaaatgtcagtctttctgcttttaggattatatttgaattttcaggggtktatacaccaccactggagagtagaaggccactaacttgcaggcagttaacttatatctttacaagctacattctattttaagagcctatttagggtaaca

SEQ ID NO: 40467 - DNA, 201 bp, Homo sapiens
cacagacatttattgcttgattgaaacaataagtgcttttttagtgttgaggatttgagatattgcccacaaaactcagtatctagctttttaaaaaatayttgcaagagcacgcaacatgggaactgacgctgccctcctgtacggcagcatctctcaaactgagtagtagcttccatcttggtttgggcatatgctctc

SEQ ID NO: 40468 - DNA, 201 bp, Homo sapiens
aacagaaaaagatggaatggaattaatatgttccatttagtaaagatggaatagaattggtccagtttgtgttcattgtagcatattcacctatttggtcwgcaaccatttttttttttttaaagcctaagcataccctgagaacaacaaccttttttgattagaacagaagaaaaagccagagtgttcttgggctgccaa

SEQ ID NO: 40469 - DNA, 201 bp, Homo sapiens
cgctactggagtggtggggaggggtgagtggactccaggaatcctcggaagggcgggggcggaggcagggggcccctctagccgctacttcgaaacagcaytccttgttctcgatggtccccgcgcgactgtcttagctcacgacacttccggttccttttaaaggcccccaaggctgtgcaacgcggagcgtgagaggaa

SEQ ID NO: 40470 - DNA, 201 bp, Homo sapiens
ttatagaattgtgaatatgtagtaatctcagttaaccagaaccttaaccttcaggttaaggaaaatacctattccttaacctctaggtaaatgggagtttmccttacaaagctgattgagagcttatttaaaacgtaaacatacaagatgtcattgcttccttgtagtgaagtgaaaaggaggtattggattaagcattta

SEQ ID NO: 40471 - DNA, 201 bp, Homo sapiens
cagggagagtagctgcggcaatcagtgcgcgcgcggtccgctgcggcgcctggcgctccgcgggcgtccgggtggacagcgccaggggcacagggctgacwtctcagggctaattccctcctccagtgcgtaaatccaggcttaagccgccgcagggtgtgagcctcccctcccccacccgaacgccgcagctgcacgggg

SEQ ID NO: 40472 - DNA, 201 bp, Homo sapiens
tgtttgcactacgcaggagtgacagcaatatgaaatgctttgtattcaaggcagcagaggtaatctggacagacagtacatgtgctttaaaagcaagatabagtcatagaaaatatgtagataatttagccgggcatggtggctcgcgcctctaatttgggaggccgaggcaggtggatcacgaggtcaggagttcgagac

SEQ ID NO: 40473 - DNA, 201 bp, Homo sapiens
gttggtcaggctggtctcgaactcccgacctcaggtgatccgcctgcctcggcctccccaagtgctgtaatcacaggcgtgagccactgcgcccggcctasccaggttgattttaaaattacacttaaaaataatgttctcatttttaagggctctaatatttgacttttcttaactttccaattatgcagccctatcctg

SEQ ID NO: 40474 - DNA, 201 bp, Homo sapiens
gttagttattattgagaaatttctgtaataatcatggaaagggtaatttaatagttaaatctcaacttaattgaagttatttctgttgtggaacttatggwcatcttagcaagaggtcattgctttatagtcagttctctttctcattaaaaatatagtgtactcacctttacagggtgaatgttggtaaataacttctgt

SEQ ID NO: 40475 - DNA, 201 bp, Homo sapiens
ttatggaaaaatgtttgtcttttacctagcatatttgtaaatagacctttaataagaagtgtgtgtgtgtgtgtgtgtgtgtgtgtgtgtatatatatataccattaaaaggtgggctaatgtggctttccactacagctcttaccagattttttattttcagtgtgatttggctggaatattaataacagttggttgaca

SEQ ID NO: 40476 - DNA, 201 bp, Homo sapiens
ctttatagtcagttctctttctcattaaaaatatagtgtactcacctttacagggtgaatgttggtaaataacttctgtctgtgaaggaagtattctggasctgtaagttaaaaataaggtgtttatagcaaattatgtaaataaagattgtatattagaaggtacacactattcaaattaaagaaaatgtatattgagaa

SEQ ID NO: 40477 - DNA, 201 bp, Homo sapiens
attatggaaaaatgtttgtcttttacctagcatatttgtaaatagacctttaataagaagtgtgtgtgtgtgtgtgtgtgtgtgtgtgtgtatatatatataccattaaaaggtgggctaatgtggctttccactacagctcttaccagattttttattttcagtgtgatttggctggaatattaataacagttggttgac

SEQ ID NO: 40478 - DNA, 201 bp, Homo sapiens; identical to SEQ ID NO: 7103

SEQ ID NO: 40479 - DNA, 201 bp, Homo sapiens
tgtagttgcagtttggcaatttaagctaaacaattagtaacgatatttttatatcgagcaagaaaaaatattaccgtaatcttcacatttgatttattttaagatgaaaaatatttttgttggaatttaagtttaatggctaaatatgaagactccttgatataaaatattgtgtttaaaatgtcatgcatgttatactga

SEQ ID NO: 40480 - DNA, 201 bp, Homo sapiens
tcaagtaatcagctcattctgaatgcctgccattgtatgcattcactacatatttggtaaattatttgataaatgattgctcagggtgaatttttcacacktgggaattaagctacccttaattttttgagattgtttaaaattaggtactgttctgattattagtatgtaaccactaccgttctggttctaacacttgtt

SEQ ID NO: 40481 - DNA, 201 bp, Homo sapiens; identical to SEQ ID NO: 7104

SEQ ID NO: 40482 - DNA, 201 bp, Homo sapiens
atgtagttgcagtttggcaatttaagctaaacaattagtaacgatatttttatatcgagcaagaaaaaatattaccgtaatcttcacatttgatttattttaagatgaaaaatatttttgttggaatttaagtttaatggctaaatatgaagactccttgatataaaatattgtgtttaaaatgtcatgcatgttatactg

SEQ ID NO: 40483 - DNA, 201 bp, Homo sapiens; identical to SEQ ID NO: 7099

SEQ ID NO: 40484 - DNA, 201 bp, Homo sapiens
catgtagttgcagtttggcaatttaagctaaacaattagtaacgatatttttatatcgagcaagaaaaaatattaccgtaatcttcacatttgatttattttaagatgaaaaatatttttgttggaatttaagtttaatggctaaatatgaagactccttgatataaaatattgtgtttaaaatgtcatgcatgttatact

SEQ ID NO: 40485 - DNA, 201 bp, Homo sapiens; identical to SEQ ID NO: 7100

SEQ ID NO: 40486 - DNA, 201 bp, Homo sapiens
gcatgtagttgcagtttggcaatttaagctaaacaattagtaacgatatttttatatcgagcaagaaaaaatattaccgtaatcttcacatttgatttattttaagatgaaaaatatttttgttggaatttaagtttaatggctaaatatgaagactccttgatataaaatattgtgtttaaaatgtcatgcatgttatac

SEQ ID NO: 40487 - DNA, 201 bp, Homo sapiens
tgcatgtagttgcagtttggcaatttaagctaaacaattagtaacgatatttttatatcgagcaagaaaaaatattaccgtaatcttcacatttgatttattttaagatgaaaaatatttttgttggaatttaagtttaatggctaaatatgaagactccttgatataaaatattgtgtttaaaatgtcatgcatgttata

SEQ ID NO: 40488 - DNA, 201 bp, Homo sapiens; identical to SEQ ID NO: 7092

SEQ ID NO: 40489 - DNA, 201 bp, Homo sapiens
atggcgtcaacccgggagtgagccgagatcgcgccattgcacctccagcctgggcaacagagtgaaactctgtctcaaaaaaaaaaaaaaaaaaaaaaaaattcctgggctcaagcaatcatccctccttggcctaccaaagtgttgggattataggcatgagccacagcacctggccaaaagtttttttttttttaatgc

SEQ ID NO: 40490 - DNA, 201 bp, Homo sapiens
ctgggattacaggtgtgagccaccatgcctggccagaaatttatttattttttttatttttgagacggagttttgcttttgttgcccaggctgtagtgcartggcatatcggctcacggcaacctccgcctcctagattcaagcaattcttctgcctcagccgcctgagcagctgggattacaggtgtgtgccaccaggct

SEQ ID NO: 40491 - DNA, 201 bp, Homo sapiens; identical to SEQ ID NO: 7101

SEQ ID NO: 40492 - DNA, 201 bp, Homo sapiens
ctgttttcttcttgttctttgtgggcatttgaatttgtgacccttgagttaggtagtaaatgtcagtgcgtggtaaagcttatttttgtaaatagttgtgragaccttagatggaatgggtgttctaatttgaagaattccttaaaaggattagaataaatagggagaaacaggagactagaacttcagtgccaaatacat

SEQ ID NO: 40493 - DNA, 201 bp, Homo sapiens
aaaatcattatgccatcagtttgagggagagcatgtatgccaacattgtagagactaagtgcccatttatccataattaagataagcagacttttccccaytgtactataaagttagagtttggggctgggtatggtagcttccgcctgtaatcccagcagtttgggaggctggagcgggcggatcacttgaggccaggag

SEQ ID NO: 40494 - DNA, 201 bp, Homo sapiens
ccatgtgaccctttctacaaactcagtgtatgtttttaatatttcctgggtactctgctatcgtcctaatacataatattagggtaaggctgccctaataygagaacattttgagtatactattgagtatacatttgagtatacatattgagtatactatttatgccaacgtgaaggatgtgattagttttagccttcaag

SEQ ID NO: 40495 - DNA, 201 bp, Homo sapiens
ctacagctcttaccagattttttattttcagtgtgatttggctggaatattaataacagttggttgacatgtattcacaattgcatgacttctctttggargctggtaggttgagtattgttctttttatccatcctttcccctcccctaaatgtcagtctttctgcttttaggattatatttgaattttcaggggtttat

SEQ ID NO: 40496 - DNA, 201 bp, Homo sapiens
tcctaaatctttgcggggagtcagggtgttctgtggtgtaatctgtgatatccacactgctgacagctggcagaatattgtttttttccttccttctttcyttttttttttttttttttttttttttttttttttgagacagagcctcactctgttgcccagactagagggcagtggcacggtcttggctccctgcaaccc

SEQ ID NO: 40497 - DNA, 201 bp, Homo sapiens
tggaggtttaactaattgttaagcgactttgaatcgatcttttgacctgtttcatctatgtttctacaggtatttggactgccaattcctaaatctttgcrgggagtcagggtgttctgtggtgtaatctgtgatatccacactgctgacagctggcagaatattgtttttttccttccttctttcttttttttttttttt

SEQ ID NO: 40498 - DNA, 201 bp, Homo sapiens
gttttgttttctgaagctggtcatgcttaccagaggtgtcttactctcctccctaaaggataagaaaaggtggtcagtttctgatcccagtggaaaaagargttgagggatctcaaaaagtaaactgtttattttcatcactgtgcctattcagtccaacagctcttttctaacttgcttaagagagtacatctccagttt

SEQ ID NO: 40499 - DNA, 201 bp, Homo sapiens
tttctaagaccaccccctcatctgttataaataaatatcaacatacctttttcttatctctaaggttattaatgataacctgtttaaaagtttgtttccargatgctttgttttcctgttgctttggcttctggttttcatgttagaaaatttcttcaggtgtttggtgatccttgggtcatatttaggagtggaacattt

SEQ ID NO: 40500 - DNA, 201 bp, Homo sapiens
tctcggctcgctgcaacctctgcctcctgggttcaagcgattctcctgcctcagcctcccaggtagctgggactacaggtacacaccaccatgcccggctwatttttgtatttttagtagagacaggtttcaccatcttggccaggctggtctccacctcctgacctcaggtggtctgtccgcctcagcctcccaaagtgc

SEQ ID NO: 40501 - DNA, 201 bp, Homo sapiens
tgatcacagctcacctcagcctcaacctgggctcaagcgatcctctcacctcagcctcctgagttgctgggactgcaggcaagcaccaccacatccagctyatatatatatatatatatatatatactttttttttcttttttttttttgagactgaatctcactttattgtccaggctggagtgcagtggtgtgatcttg

SEQ ID NO: 40502 - DNA, 201 bp, Homo sapiens
aaagatctttgctgatcttctgactttagtgaacctattaatgtgctgcaggccccagtcaaaactggaaccagggatatagtaactattggaatcaaggytatggcaactatggatataacagccaaggttacggtggttatggaggatatgactacactggttacaacaactactatggatatggtgattatagcagta

SEQ ID NO: 40503 - DNA, 201 bp, Homo sapiens
ttgttgaaaataggaaaggaattaagaatagggtgtagtgccttatcagttgaaatgcatgtgtaagtgcaaatttaatgagactaatcattatagactcwttagtgaggctggacgcgatggctcatgcctgtagtaatcccagcacttgggaggccgaagtgggtggattactggagaccaggagatgaagaccatcct

SEQ ID NO: 40504 - DNA, 201 bp, Homo sapiens
agccgggcatggtggctcgcgcctctaatttgggaggccgaggcaggtggatcacgaggtcaggagttcgagaccagcctgaccaatatggtgaaaccccrtctctactaaaagtgcaaaaaaaaattagcctggcatggtggcatgcacctgttatcccagctactcaggaggctgaggcaggagaattgcttgaacccg

SEQ ID NO: 40505 - DNA, 201 bp, Homo sapiens
cagcagaggtaatctggacagacagtacatgtgctttaaaagcaagatacagtcatagaaaatatgtagataatttagccgggcatggtggctcgcgcctstaatttgggaggccgaggcaggtggatcacgaggtcaggagttcgagaccagcctgaccaatatggtgaaaccccatctctactaaaagtgcaaaaaaaa

SEQ ID NO: 40506 - DNA, 201 bp, Homo sapiens
tgtttgggagtgttgcctgggattctgtatttcacatacaccatgtgattttttttttttttttttttttttttgagacggagtctcactctgttgcccasactggagtgcagtggcacgatctcagctcactgcaatctctgcctcccgggttcaagtgattctcctgcctcagcctcccaagtagttgggattacaggc

SEQ ID NO: 40507 - DNA, 201 bp, Homo sapiens
agggtttcaccatgttggccaggctggtcttgaactcctgacctcaggtgatccgcctgcctcggcctccctgtgtgctgggattacaggcgtgagtcacygcccctggcctccaagtgatcttaattgcatactaatgtgttaaggactttaatgtgttaactctttaagatagagttaaacacactgtttcctaagggt

SEQ ID NO: 40508 - DNA, 201 bp, Homo sapiens
tttcaccatgttggccaggctggtcttgaactcctgacctcaggtgatccgcctgcctcggcctccctgtgtgctgggattacaggcgtgagtcaccgccyctggcctccaagtgatcttaattgcatactaatgtgttaaggactttaatgtgttaactctttaagatagagttaaacacactgtttcctaagggtttgt

SEQ ID NO: 40509 - DNA, 201 bp, Homo sapiens
actgtgtattatggaaaaatgtttgtcttttacctagcatatttgtaaatagacctttaataagaagtgtgtgtgtgtgtgtgtgtgtgtgtgtgtgtatrtatatataccattaaaaggtgggctaatgtggctttccactacagctcttaccagattttttattttcagtgtgatttggctggaatattaataacagtt

SEQ ID NO: 40510 - DNA, 201 bp, Homo sapiens
tgagaatcacttgaacctgggaggcagaggttgcagtgagctgagattgtgccactgcgctccagcttgggcgacagagtgagactgtctcaaaaactaascaaccaaaaacagaaaaagatggaatggaattaatatgttccatttagtaaagatggaatagaattggtccagtttgtgttcattgtagcatattcacct

SEQ ID NO: 40511 - DNA, 201 bp, Homo sapiens
tcaagtcaggcgtggtggtgcagcctgtaatccctcccacggaggctgaggaatgagaatcacttgaacctgggaggcagaggttgcagtgagctgagatygtgccactgcgctccagcttgggcgacagagtgagactgtctcaaaaactaagcaaccaaaaacagaaaaagatggaatggaattaatatgttccattta

SEQ ID NO: 40512 - DNA, 201 bp, Homo sapiens
tagggtaaggctgccctaatacgagaacattttgagtatactattgagtatacatttgagtatacatattgagtatactatttatgccaacgtgaaggatrtgattagttttagccttcaagtcataatacataccatgcttgaaagcatttaaaaaggaatagagtaattttttttcccattccacttggaagctgtgta

SEQ ID NO: 40513 - DNA, 201 bp, Homo sapiens
attctggagatgtctgaagcagttctttaagcagcactgtgtattatggaaaaatgtttgtcttttacctagcatatttgtaaatagacctttaataagawgtgtgtgtgtgtgtgtgtgtgtgtgtgtgtgtatatatatataccattaaaaggtgggctaatgtggctttccactacagctcttaccagattttttatt

SEQ ID NO: 40514 - DNA, 201 bp, Homo sapiens
gggatattccttccttctactgtttggggcaagtccaatacagcatctccagccacttaaacaattaattgttacctatgaatgtgtaacaaaaagtttcrtttcattctcaagaaatttcatacatccatcaccaggtcatttgaagaagcgtttcgttgttgttgttgtttttgaaacaggctcttgctctgtcgtcca

SEQ ID NO: 40515 - DNA, 201 bp, Homo sapiens
atattctggagatgtctgaagcagttctttaagcagcactgtgtattatggaaaaatgtttgtcttttacctagcatatttgtaaatagacctttaataaraagtgtgtgtgtgtgtgtgtgtgtgtgtgtgtgtatatatatataccattaaaaggtgggctaatgtggctttccactacagctcttaccagatttttta

SEQ ID NO: 40516 - DNA, 201 bp, Homo sapiens
caagatatatcttggaggtgggaggagttggtgattgattggatgtggggggtgagggaggggggatatcaaagatgattccctggattttggcaggaatrtatgggtgggtggagatgtcatttactgagaagaggaagaccaaagaagcaggtttgtagggaaagtagagttcagttttggacatctaaagcttgagat

SEQ ID NO: 40517 - DNA, 201 bp, Homo sapiens
attttgattggttgctgtaccggttgttaattccctagccattcaaactcctccccacgacactctgaagcagcgacggcacagcgggaagaatggtaaawcttttaaattttatttctgtattataaaggtttcagtagtcataatatgtagaggctgtgtattggttagttgcccattgatccccaggaaattctagac

SEQ ID NO: 40518 - DNA, 201 bp, Homo sapiens
gatgaatcaagatatatcttggaggtgggaggagttggtgattgattggatgtggggggtgagggaggggggatatcaaagatgattccctggattttggyaggaatatatgggtgggtggagatgtcatttactgagaagaggaagaccaaagaagcaggtttgtagggaaagtagagttcagttttggacatctaaagc

SEQ ID NO: 40519 - DNA, 201 bp, Homo sapiens
cacagcatccattatcttccacttaaagtcaggtcatgttcttcctctgctcaaaacccttccatggtttctcatgactttgataataaaagtagagtgcyaaccacagtttacaagaccctgagtaagctcattactggctacctctcaggtatgatctattatacttgctttccttcactttagccacactggactcca

SEQ ID NO: 40520 - DNA, 201 bp, Homo sapiens
aaaaaaaaaaaaaaaattcctgggctcaagcaatcatccctccttggcctaccaaagtgttgggattataggcatgagccacagcacctggccaaaagttkttttttttttaatgccagagatgaaatgagatggtgtggagaggagactttcaagtccctggaagaacacctagtttgcttgaaagccccttaatctaac

SEQ ID NO: 40521 - DNA, 201 bp, Homo sapiens
aatgtgcggggagggggtaaaaacagattgaattaaaaccaggtttagtgtgactaaaaacatgctaccagattaattttgattgttgtgttaaaatgttyacaagctgcacttttggcagttaattagtactaaatgagagacactacttagatttaattttaaggattaattttggagatcaaacccattcttgaaaaa

SEQ ID NO: 40522 - DNA, 201 bp, Homo sapiens
aagtgcttttttagtgttgaggatttgagatattgcccacaaaactcagtatctagctttttaaaaaatatttgcaagagcacgcaacatgggaactgacrctgccctcctgtacggcagcatctctcaaactgagtagtagcttccatcttggtttgggcatatgctctccagtttttagtagtcctcaccaccctactt

SEQ ID NO: 40523 - DNA, 201 bp, Homo sapiens
ttgttcatttgattataaaatgccaaagttgttttataaatgctacttcaagcctggaaactttgaggaagtcctgaacattaagcatataaatggcccarctctagaatacatgtaagttgaaaagctaacctgaagtgggaagcgcagtatatacctaagacttactctgcactgaaagtttgctttgtcactagaagt

SEQ ID NO: 40524 - DNA, 201 bp, Homo sapiens
atatcacttggatagttatctatgctgagttgtataactttatgcttgtcatttaattttacaatttggtggaagccaatgtgaaagcaaggagacttctrttgtggagtaggtgttttaaactgaataccatattcagccttggggtgctgaatatttagttcacagctaggattaagatactcaactatgttaataaaa

SEQ ID NO: 40525 - DNA, 201 bp, Homo sapiens
agccgtcaccatgctgctcctcggcccgccctcctttcctccctcgccatgggtctcctcccaccgacttagccgccaggattttttcccgcctgtcgtgrggtaccttttttctttccatgctgtcccctctttttccctttttctacagtcttgggcataaaaacacagacacaaacagcttctctgtttgtattacta

SEQ ID NO: 40526 - DNA, 201 bp, Homo sapiens
gtgattatagcagtaagtactatactttttatattaactgctatttgacatttattttgtacaaatttggataggcagaaaggttagtgtagccttgccargtgcaaatgtcttcaggtttcaaattcctggaaacttgaaactgcagccattttattgcttggttcctcccagcctatatcacacacacattataagggt

SEQ ID NO: 40527 - DNA, 201 bp, Homo sapiens
tgtgatctgttttggaataaggatattgtaaatacttcattagcaggtctttgaaggttggataatgtgtttttctcattgagcacctactctatgcagaktattgctggggtagagtatacaaagatgaaatagacaaacattcttaaatacagacaattaagaggaagaaatctagattagaaggagacttttgttgaa

SEQ ID NO: 40528 - DNA, 201 bp, Homo sapiens
ttagaaaacacgatttcctttactgagaaagagcccaggatttggagggaaagttgggaggggagaagcactttggaatatagggtttattaagcccagcytaggcagattcttgtcaggctgtttgatgatagtgctggttttgggggagtggtggtgggaagggaagcaaacttttaaaaattaaacagaaccaactcg

SEQ ID NO: 40529 - DNA, 201 bp, Homo sapiens
gggtgtgtgtgtgtctgaatttttttttaactgtaaagagaaaggtgttggtggatataacaagatgtcgctttaatctagtattagaaaacacgatttcytttactgagaaagagcccaggatttggagggaaagttgggaggggagaagcactttggaatatagggtttattaagcccagcctaggcagattcttgtca

SEQ ID NO: 40530 - DNA, 201 bp, Homo sapiens
gagcctagatcatgccattgcactccagcccgggcgacagagtgagactctgtttaaaaagaaaaaaataagtatttgtaaatgtatatatatatatatayacacacacacacacacatatatatataaaatcattatgccatcagtttgagggagagcatgtatgccaacattgtagagactaagtgcccatttatccat

SEQ ID NO: 40531 - DNA, 201 bp, Homo sapiens
cgccagtaagaacgaggaggatgaagggtgagtaaggggcatcccaggatagtcaggcccaactagtccccctccccctctttattcccccgccattaggsctggttcccgctctcagcccgttctccgggcccccatgcagcctccttgcactggtctccctttttctatgttgggttccccggaccttcatttccttct

SEQ ID NO: 40532 - DNA, 201 bp, Homo sapiens
taacagttgtatatactacctaaatctgcatttagtgtattaaaatgcagcatttgggattgggaacataatacgggagttagcaggagggactaaatcargtttcttggttgagttttcttagctccgattactgaccgatgatcgtgggttcacgcttccattcctttttgtaatggggaggggtgtgtgtgtgtctga

SEQ ID NO: 40533 - DNA, 201 bp, Homo sapiens
gtgagcctagatcatgccattgcactccagcccgggcgacagagtgagactctgtttaaaaagaaaaaaataagtatttgtaaatgtatatatatatatayatacacacacacacacacatatatatataaaatcattatgccatcagtttgagggagagcatgtatgccaacattgtagagactaagtgcccatttatcc

SEQ ID NO: 40534 - DNA, 201 bp, Homo sapiens
cagtgagcctagatcatgccattgcactccagcccgggcgacagagtgagactctgtttaaaaagaaaaaaataagtatttgtaaatgtatatatatatayatatacacacacacacacacatatatatataaaatcattatgccatcagtttgagggagagcatgtatgccaacattgtagagactaagtgcccatttat

SEQ ID NO: 40535 - DNA, 201 bp, Homo sapiens
ggaggctgaggcaggagaagagcttgaacccgggaagcagaggttgcagtgagccaagatcgcgccaccgcactccagcctgggcgacaaagcgagactcygtccccctcccaaaaaaactgtcatgtttcatttattagatgtttattttttcaacttcgctttttagtagtcatttagttaggttcattctaaagtgtg

SEQ ID NO: 40536 - DNA, 201 bp, Homo sapiens
aggcaggagaagagcttgaacccgggaagcagaggttgcagtgagccaagatcgcgccaccgcactccagcctgggcgacaaagcgagactctgtcccccmcccaaaaaaactgtcatgtttcatttattagatgtttattttttcaacttcgctttttagtagtcatttagttaggttcattctaaagtgtgaagtaatg

SEQ ID NO: 40537 - DNA, 201 bp, Homo sapiens
tttgctgtaatgttagtaagatttcgccttaaaatattttattttgagtatatacgtttggtcttagagtgtcttggtggatttccgcttaccacccatcrctttctgcattttaaaggcttaaatactttattgctggttaactgaggttctactgtaaacgaatcatctaagttaattagtggattgtacttcaatgga

SEQ ID NO: 40538 - DNA, 201 bp, Homo sapiens
tgtcttgatatctgtttcccgcccactaagggaggcctgtagtcctcttaagagaaacaaatcctgtattgtgctatgggatactttttttttctttttgrtgcaaatttcttagtattaacttgcttcctccaattgaaataacagttgtatatactacctaaatctgcatttagtgtattaaaatgcagcatttgggat

SEQ ID NO: 40539 - DNA, 201 bp, Homo sapiens
gttttggtgaggtatgttataaatgttttgacccagtttatgtcaaaattagtgtgaatgtgattgtcccattatggactcagagtcacttggcttttcaragctgttagggtagattatgtgatctgttttggaataaggatattgtaaatacttcattagcaggtctttgaaggttggataatgtgtttttctcattga

SEQ ID NO: 40540 - DNA, 201 bp, Homo sapiens
actttggtggttttggtgaggtatgttataaatgttttgacccagtttatgtcaaaattagtgtgaatgtgattgtcccattatggactcagagtcacttrgcttttcaaagctgttagggtagattatgtgatctgttttggaataaggatattgtaaatacttcattagcaggtctttgaaggttggataatgtgtttt

SEQ ID NO: 40541 - DNA, 201 bp, Homo sapiens
cagaagtcttgaggtatgaggatcatttcatgccaggatttctagaccagctaggcaacataatatgacccctgtttctttaaaaaaaaaaaaaaaaaaaaggctagtgtgttggggggtgtgtttgtagttgtagttacatctactcaggaggcagaggcaggagaatgtgttgagcccaggaaggagctcagggctgca

SEQ ID NO: 40542 - DNA, 201 bp, Homo sapiens
attggttaaatttgtgtatgtcctaccattcttacctttagatttaaacagtatatgttagttgatgttacatcaccaccatgacttgacagtttaatctwgagcaagtcaacatatgcttggcattatctgtatttatagttatttttaagtaagttaatagtctctgaacttcagttaagatatatattttttaaatga

SEQ ID NO: 40543 - DNA, 201 bp, Homo sapiens
gtggcaaattaagattaaactataaactatttgacattactccattatgtattttgagtctcatgtaattgtttccagtgatttgaaatgaccataaacttaaatttgaaggtcagtgttttgactcttcgaagtaattacacttgacctgctacctaaaacgatgtaatattacaacttttttgaataatctcaggaaaa

SEQ ID NO: 40544 - DNA, 201 bp, Homo sapiens
ggttatgtaggaagaatgatgttttaatatactgcccagtaaactggtgcagtttggaaaaggtgtgttattgatgtggataatatttaaggcaatttttkttaagcattttaatactgctttttgtctttacaggaaaatgtttataggaggccttagctgggacactacaaagaaagatctgaaggactacttttccaa

SEQ ID NO: 40545 - DNA, 201 bp, Homo sapiens
gcactgtgtattatggaaaaatgtttgtcttttacctagcatatttgtaaatagacctttaataagaagtgtgtgtgtgtgtgtgtgtgtgtgtgtgtgtrtatatatataccattaaaaggtgggctaatgtggctttccactacagctcttaccagattttttattttcagtgtgatttggctggaatattaataacag

SEQ ID NO: 40546 - DNA, 201 bp, Homo sapiens
cccgaacgccgcagctgcacggggcacgacagccttcgcagaggtgcagccacaccccggcctaacgctgctgctcccgccgctactggagtggtggggargggtgagtggactccaggaatcctcggaagggcgggggcggaggcagggggcccctctagccgctacttcgaaacagcactccttgttctcgatggtccc

SEQ ID NO: 40547 - DNA, 201 bp, Homo sapiens
tggtgcttctccaccatcctgaaacgatgcgattgtttataagcacatgttttggggaacgcgtaggctgtccacctctgcctctcccttgtcggccttasgccgactgttttcttgggattttgaataagtttcgcctaaggatttactcattttctccaccatacgctatcgcacaatggcatactcatacaggcccta

SEQ ID NO: 40548 - DNA, 201 bp, Homo sapiens; identical to SEQ ID NO: 25862

SEQ ID NO: 40549 - DNA, 201 bp, Homo sapiens
taacctgggttcctgaagggtaaattgcaggagccagaacccaggctgctttctggatcaggcatttgccactgcctgctcctcggtccccatggtgagcrccccctctgctgcacagagctggtatgacagcccctcagcctgctaaatgccttcttagattggctcagcagccctctggggtgggcgtcagctctgcgt

SEQ ID NO: 40550 - DNA, 201 bp, Homo sapiens
tcctctctgcctctgcccacgtgtcctcctgcctggaatgcctgctgtctcttccgtgctcagtgaactcttacctcctggtccagcccagatgtcacccmctccgtgagacttcctgagccttctccagccgaaaggactattcctgcctctgtttccccagagcatgttgttcctgcatcagttacagctcagattgca

SEQ ID NO: 40551 - DNA, 201 bp, Homo sapiens
aatgaacccaggatcacacagcccttagtgtcctcctggctgcagaacatggacctcctctgcagcatcttgctgcctagccccccgttgcccgctccccrtagtcttggaatgcagcctgttcccagccgccatccccgacttggctcccacctcctgctgggctgcccccggcaatgctcctccctgggcttttccgcc

SEQ ID NO: 40552 - DNA, 201 bp, Homo sapiens
ggccccgagcacctcagatggcattggcctaagaagcccccatgcttggagtttatccatccagaaactggcatgcactttacgtgggccaggaaactcayaggtctgtgatttgagggagaataaaaggtcagcccttttgcaaacagggcaagcacattctggctctgtccggctgaaaccctgggcagacgtgtgcag

SEQ ID NO: 40553 - DNA, 201 bp, Homo sapiens; identical to SEQ ID NO: 3282

SEQ ID NO: 40554 - DNA, 201 bp, Homo sapiens; identical to SEQ ID NO: 25874

SEQ ID NO: 40555 - DNA, 201 bp, Homo sapiens
cctggccattatgaaagaggagggaggtagaggggatccagccacaagtcaggtggatgaaccatttcaggcaccagcactgcccagtagaactttttgtsatgagggatgcgtccagtaccttcactctccaatatgcagccaccagccacacatggccatggagcccttgaagggtggcctgtgcgactgaggaactgc

SEQ ID NO: 40556 - DNA, 201 bp, Homo sapiens
acacatggccatggagcccttgaagggtggcctgtgcgactgaggaactgcattatctagttttctttcattttaattaagttaaatcttagtagccagtygtggctggtggctgccgtgtcgggcattgcagctgtaagcggaggcaagtgcaaatgcagagaccagaagtgggaatgaacttgtatttgaagaaacaaa

SEQ ID NO: 40557 - DNA, 201 bp, Homo sapiens; identical to SEQ ID NO: 25877

SEQ ID NO: 40558 - DNA, 201 bp, Homo sapiens; identical to SEQ ID NO: 25879

SEQ ID NO: 40559 - DNA, 201 bp, Homo sapiens
cagtttctaagtcatttaccaaaaatttatattaaaataatataagctaccggctgggcacagtggctcacgcctgtaatcccagcactttgggaggccarggcgggtggatcacttgaggtcaggagttcgagaccagcctggccaacatggtgaaaccccatctctactaaaaatacaaaaaatgagctgggtgtggtg

SEQ ID NO: 40560 - DNA, 201 bp, Homo sapiens
agcccggaaggttgaagctacagtgagccatgatcacgccactgcactccagcttgggcaacagagcaagagagcaagatctttctcttaaaaaaaaaaargtcaattcccagggactttggacaagccacttaacctcctgagccctggtttcttcatctgtacaatggtgatacaaaatccttcacggagttctggaga

SEQ ID NO: 40561 - DNA, 201 bp, Homo sapiens
gcctcttagacctccctcctccctgcccaccccagtcctttgcccgtatcaagaagtggctggagcacgcacgctcctcacccagcctcaccatcctggcygggggcaagtgtgatgactccgtgggctactttgtggagccctgcatcgtggagagcaaggaccctcaggagcccatcatgaaggaggtgactggggtgg

SEQ ID NO: 40562 - DNA, 201 bp, Homo sapiens
tgccgcagggatgccttcccagcctcttagacctccctcctccctgcccaccccagtcctttgcccgtatcaagaagtggctggagcacgcacgctcctcrcccagcctcaccatcctggccgggggcaagtgtgatgactccgtgggctactttgtggagccctgcatcgtggagagcaaggaccctcaggagcccatca

SEQ ID NO: 40563 - DNA, 201 bp, Homo sapiens; identical to SEQ ID NO: 25885

SEQ ID NO: 40564 - DNA, 201 bp, Homo sapiens
tgtgggggctgccgcagggatgccttcccagcctcttagacctccctcctccctgcccaccccagtcctttgcccgtatcaagaagtggctggagcacgcrcgctcctcacccagcctcaccatcctggccgggggcaagtgtgatgactccgtgggctactttgtggagccctgcatcgtggagagcaaggaccctcagg

SEQ ID NO: 40565 - DNA, 201 bp, Homo sapiens; identical to SEQ ID NO: 7266

SEQ ID NO: 40566 - DNA, 201 bp, Homo sapiens; identical to SEQ ID NO: 25888

SEQ ID NO: 40567 - DNA, 201 bp, Homo sapiens; identical to SEQ ID NO: 25889

SEQ ID NO: 40568 - DNA, 201 bp, Homo sapiens; identical to SEQ ID NO: 25891

SEQ ID NO: 40569 - DNA, 201 bp, Homo sapiens
ccaacaccaggttgtgtttataaatgtttgttgaggatcttcctatttagattagtaaatctggggcttaggaaacaattgctctgtccatgatggcttcsgggcagggcggaagtcccaagcatgtcacaacaccggtgcattcttttgggcctcacctggttttgttgcccatagtcgcagcctcatactggaccaaag

SEQ ID NO: 40570 - DNA, 201 bp, Homo sapiens
tgaatgtgttcatatagggctccgtgtggctccacatgtaggtctttccatataaacatgtacatatccatttgcacataagcacacacacgcatatgtcrataagtccacccacacgcatgtacatggagaaggcatgcagatccctacatgcttagacatgtgaccatgcatatgcctatatatgcattgattgatgtg

SEQ ID NO: 40571 - DNA, 201 bp, Homo sapiens
ctcctaatagcatttgcatgagtgcatgtacacgtgtgtttgtgaatgtgttcatatagggctccgtgtggctccacatgtaggtctttccatataaacaygtacatatccatttgcacataagcacacacacgcatatgtcgataagtccacccacacgcatgtacatggagaaggcatgcagatccctacatgcttaga

SEQ ID NO: 40572 - DNA, 201 bp, Homo sapiens; identical to SEQ ID NO: 3283

SEQ ID NO: 40573 - DNA, 201 bp, Homo sapiens
cctgtaatcccagctacacaggaggctgaggcaggagaatctcttgaacccgggagacagaggttgcagtgatctgagattgtgccattgcactccagcckgggtgacagagtaagactccgtctcaaaaataaaaattaaaaaaaattgagggtcccttgccagtaccatgccaggcacaaagccatcggcactggaggg

SEQ ID NO: 40574 - DNA, 201 bp, Homo sapiens
gaaagaacttccacttcgtgcaccgctcggccgacgtggagagcgtggtgagcgggaccctccgctcagccttcgagtacggtggccagaagtgttccgcstgctcgcgtctctacgtgccgcactcgctgtggccgcagatcaaagggcggctgctggaggagcacagtcggatcaaagtgggcgacgtgagtggcaccg

SEQ ID NO: 40575 - DNA, 201 bp, Homo sapiens
ggcagttgccctcatccccgaagcatctggtccatagaggttggagggagctgacgttcagttgggcacctgctccaggatgtgcatcggggcaggcgtcrctggagggagagtgagcctcagcgagggaaatgcccggaagaggccacacagcaagtggcagagccagaattggaaccccagtgagtcagattagagtgt

SEQ ID NO: 40576 - DNA, 201 bp, Homo sapiens
aaatgcgtgaatggatgaggaatgctgtcctgccaagaaggtcctcatggatcctcagagaggccccaagtcctgtgactgattcatctctgccttcaccygagcagccagtggatggatactcctgttagcccaaaattgttcatgaaccaaaaaaaaaaaaaaaaaaaaagaaagaaagaaagaaaaaagaaagcactg

SEQ ID NO: 40577 - DNA, 201 bp, Homo sapiens
cctgtgactgattcatctctgccttcacccgagcagccagtggatggatactcctgttagcccaaaattgttcatgaaccaaaaaaaaaaaaaaaaaaaaagaaagaaagaaagaaaaaagaaagcactgatgggtgggagtccttaggttatttttagctgcagtcgactcaggctgaactttgaactagtgtctgttct

SEQ ID NO: 40578 - DNA, 201 bp, Homo sapiens
gccaccgacctggcctggcccccttctcatttctgtattgcctgggcacctccgtctgtggactctgcgttagggttttagatgggaggaagcgaggaagkcggtgaccatacccactcttgtccctctccccaggccttgaaggacctgaagggccggatggaagccatcccatgcgtggtgggggatgaggaggtgtgg

SEQ ID NO: 40579 - DNA, 201 bp, Homo sapiens
attggcctaagaagcccccatgcttggagtttatccatccagaaactggcatgcactttacgtgggccaggaaactcataggtctgtgatttgagggagartaaaaggtcagcccttttgcaaacagggcaagcacattctggctctgtccggctgaaaccctgggcagacgtgtgcagggggaggggtgactgaggggga

SEQ ID NO: 40580 - DNA, 201 bp, Homo sapiens; identical to SEQ ID NO: 25894

SEQ ID NO: 40581 - DNA, 201 bp, Homo sapiens
tcagatcccagtacttgcaaccctgacatctggtgcaggaggtgaaatggtgcatgtcctttgtagatcatatctcagtacttgtagccctgacatctccygccacaggaggtgaaatggtgcatggccttcatggatcggatcccagtacttgcagccctgacatgtcccgctgcaggaggtgaaacggtacatggcctt

SEQ ID NO: 40582 - DNA, 201 bp, Homo sapiens
taacctgaccgaaggcccacagccaacagctggccagcatccctcatccctgactcggcctcgtgttgaacctggaaagccagtgtgggctggagcagggstgttgaggctggagctggggctggaggggagatgagctggttgctctgtcaccactgctctgctttgtagggacgtcgtgcaggaggccacaaaggtgct

SEQ ID NO: 40583 - DNA, 201 bp, Homo sapiens
ggaaagcagaggttgcagtgagctgagatcacgccactgtactccagcctgggtgacaaagtgagactctgcctcaaaaaaaaaaaaaaaaatacccgttrcccattttcgttgtaagaaccactatcctgtgtggtgatggttaattttatgtgtcactttggctgggcatggtgcccaggtatttggtcaaacattctg

SEQ ID NO: 40584 - DNA, 201 bp, Homo sapiens
agtacctcggacgaggtgtcttgggcaaggtggagtctgggccctctgtgtcttttcagtttttccctctatagatttctgaagctgcattggctggcccrcagctccttgcaaccctgacatctcctggtgcagaaggtgaaatggtgcctggcctttgtagatcagatcccagtacttgcaaccctgacatctggtgca

SEQ ID NO: 40585 - DNA, 201 bp, Homo sapiens; identical to SEQ ID NO: 25895

SEQ ID NO: 40586 - DNA, 201 bp, Homo sapiens; identical to SEQ ID NO: 25896

SEQ ID NO: 40587 - DNA, 201 bp, Homo sapiens
cttgaacctggaaagcagaggttgcagtgagctgagatcacgccactgtactccagcctgggtgacaaagtgagactctgcctcaaaaaaaaaaaaaaaaatacccgttacccattttcgttgtaagaaccactatcctgtgtggtgatggttaattttatgtgtcactttggctgggcatggtgcccaggtatttggtca

SEQ ID NO: 40588 - DNA, 201 bp, Homo sapiens
aacttccacttcgtgcaccgctcggccgacgtggagagcgtggtgagcgggaccctccgctcagccttcgagtacggtggccagaagtgttccgcctgctygcgtctctacgtgccgcactcgctgtggccgcagatcaaagggcggctgctggaggagcacagtcggatcaaagtgggcgacgtgagtggcaccgtcacc

SEQ ID NO: 40589 - DNA, 201 bp, Homo sapiens
tgcccccccgccagccagatgattgccacaaagttatgcaacctctctgaccttccatctcttcatccataagatggggtaaccgccccctctccccgccrtgggtcatcatgagaattgaatgagttaacacttccacatgcttagaatagtgccagacacatgatgattcaaaaatattacccataaggccgggtgcgg

SEQ ID NO: 40590 - DNA, 201 bp, Homo sapiens
cacccaataaaatgcctgttacttaatcacagtggtggatggtctttctggaggggatggtgggggcagccaacatcttttaagtctggtgtcattgccartgtgtcacctggtcatgggcacagtgctctcagtgtgacagaaggaacagtaggtgctgatgtttgaaattgtctgttggaggcggtggggctgggttca

SEQ ID NO: 40591 - DNA, 201 bp, Homo sapiens
cctgtaatcccagctacttggggaggctgagacaggagaatctcttgaacctggaaagcagaggttgcagtgagctgagatcacgccactgtactccagcmtgggtgacaaagtgagactctgcctcaaaaaaaaaaaaaaaaatacccgttacccattttcgttgtaagaaccactatcctgtgtggtgatggttaattt

SEQ ID NO: 40592 - DNA, 201 bp, Homo sapiens
gggggctccccctgtgccccatcctccatccaaccgcagggcagggggaggaaggacgttcagggcagtcccttccagccgacatgcccatttcctttccstgcacctcaggggaagcagatgccaaggcaaatgggcagctcctggctggctgtttccatggctcacccctctctccttcccccgtggactttgcataag

SEQ ID NO: 40593 - DNA, 201 bp, Homo sapiens; identical to SEQ ID NO: 25904

SEQ ID NO: 40594 - DNA, 201 bp, Homo sapiens
agagggtttcaccatgttagccaggatggtctcgatctcctgaccttgtgatccgcccgccttggcctcccaaagtgctgggatcacaggtgtgagccacygcgcccggccaacagggaagtttctttaggtgggccttcgtccgccttgcggtcaggcggctgagccggatggttctcatggcctgagctcctgtgaaat

SEQ ID NO: 40595 - DNA, 201 bp, Homo sapiens; identical to SEQ ID NO: 7214

SEQ ID NO: 40596 - DNA, 201 bp, Homo sapiens
gggggacagcaggcgtgtccaggactttcctggaaaaccggctctgagtccagtcctcttcatccttatcctggcacctccctcccgggcaaggacctcaytcttctctcctttcagccttttaaccatggacataaggtggccaagttctgttatgcagacaaggtgagtgagcctgtgtgcctggtgacccggggttag

SEQ ID NO: 40597 - DNA, 201 bp, Homo sapiens
gaggttgttgtgaggctttggtcagacaaagcacagcgtacttcgtccagagttgggcagctgttaagtgctttcagctgctgttagctgctgcttcccayggagggaggaaactgaggccgggagagtgaagtgacctgtctgaagctccctcccactggggaaatgggggagcggtttccagcacgcgtggggaggagg

SEQ ID NO: 40598 - DNA, 201 bp, Homo sapiens
gaacttctcagagccttgaatgctctaatacgcatggcacatcttcaaggacaaggtctgccatgtagtgtttcccacacgcattgggccatggaaccccrtttctgcaaagacccccatggaccaagtgttttgtggagcacattttgggaatgtgctgaggcctagagggagggagagttgcagccagcacgtgaccag

SEQ ID NO: 40599 - DNA, 201 bp, Homo sapiens
aggagaagacgggctgagacgtaggcagggctggaccttgttggcatattaaagttttcccacaaagaaacagtttcatggtcaaggaaatttggcatgtrtggtgttaaagcaaaatggactcctcccgtgcagaacttctcagagccttgaatgctctaatacgcatggcacatcttcaaggacaaggtctgccatgta

SEQ ID NO: 40600 - DNA, 201 bp, Homo sapiens
gccaagttctgttatgcagacaaggtgagtgagcctgtgtgcctggtgacccggggttagggttgctgcccctgctctgccctgccagctgctgatatggygggggcagggggcatcagttgctgtgtccttctttggccatggtgggtaggtgggcagggggtggctgacactgagggagtccctgggtgatgtctttga

SEQ ID NO: 40601 - DNA, 201 bp, Homo sapiens
tatgcagccaccagccacacatggccatggagcccttgaagggtggcctgtgcgactgaggaactgcattatctagttttctttcattttaattaagttawatcttagtagccagtcgtggctggtggctgccgtgtcgggcattgcagctgtaagcggaggcaagtgcaaatgcagagaccagaagtgggaatgaacttg

SEQ ID NO: 40602 - DNA, 201 bp, Homo sapiens
cctcccgtgtggccccagggacccctcccctggccattatgaaagaggagggaggtagaggggatccagccacaagtcaggtggatgaaccatttcaggcmccagcactgcccagtagaactttttgtgatgagggatgcgtccagtaccttcactctccaatatgcagccaccagccacacatggccatggagcccttga

SEQ ID NO: 40603 - DNA, 201 bp, Homo sapiens
cactgggtgtgtgtgcaggtgccagctgacagcagcacctgccacccagctccctggttgtctctgtagctgcctagagcttgccctcacctgtagctccrcaggcgtctgaggctgcatggcagctgggatttttccaggcagcgaggctccggcattctgataagcccctgggtggatactgctgattttcatttccca

SEQ ID NO: 40604 - DNA, 201 bp, Homo sapiens
gcttcccatggagggaggaaactgaggccgggagagtgaagtgacctgtctgaagctccctcccactggggaaatgggggagcggtttccagcacgcgtgrggaggaggggcccaaccctggcagccgacatagggtaggctccaatgtccctcgtggacgagggctcaggagaacctcacaaaaagctgtgcccacttct

SEQ ID NO: 40605 - DNA, 201 bp, Homo sapiens
gcgatctcggctcactgcaagctccgcctcccaggttcatgccattctcctgcctcagcctccccagtagctgggattacaggcatccgccaccacgcccrgctaattttttgtatttttagtagagagagggtttcaccatgttagccaggatggtctcgatctcctgaccttgtgatccgcccgccttggcctcccaaa

SEQ ID NO: 40606 - DNA, 201 bp, Homo sapiens
tcccaggttcatgccattctcctgcctcagcctccccagtagctgggattacaggcatccgccaccacgcccagctaattttttgtatttttagtagagasagggtttcaccatgttagccaggatggtctcgatctcctgaccttgtgatccgcccgccttggcctcccaaagtgctgggatcacaggtgtgagccaccg

SEQ ID NO: 40607 - DNA, 201 bp, Homo sapiens; identical to SEQ ID NO: 25859

SEQ ID NO: 40608 - DNA, 201 bp, Homo sapiens
ggctcagggccctggtccctggtcccgtggagggtctgacgccggggcctctctcctaggagatcttcgggcctgtactgtctgtgtacgtctacccggaygacaagtacaaggagacgctgcagctggttgacagcaccaccagctatggcctcacgggggcagtgttctcccaggataagtgagtggccaggccgcagc

SEQ ID NO: 40609 - DNA, 201 bp, Homo sapiens
tggagagcgtggtgagcgggaccctccgctcagccttcgagtacggtggccagaagtgttccgcctgctcgcgtctctacgtgccgcactcgctgtggccrcagatcaaagggcggctgctggaggagcacagtcggatcaaagtgggcgacgtgagtggcaccgtcacccccgccgcggcccagcggggggctgatggga

SEQ ID NO: 40610 - DNA, 201 bp, Homo sapiens
ggagggtctgacgccggggcctctctcctaggagatcttcgggcctgtactgtctgtgtacgtctacccggatgacaagtacaaggagacgctgcagctgrttgacagcaccaccagctatggcctcacgggggcagtgttctcccaggataagtgagtggccaggccgcagccctggtgctgtgctccgggtgtcctgtc

SEQ ID NO: 40611 - DNA, 201 bp, Homo sapiens; identical to SEQ ID NO: 7187

SEQ ID NO: 40612 - DNA, 201 bp, Homo sapiens; identical to SEQ ID NO: 25868

SEQ ID NO: 40613 - DNA, 201 bp, Homo sapiens; identical to SEQ ID NO: 25872

SEQ ID NO: 40614 - DNA, 201 bp, Homo sapiens; identical to SEQ ID NO: 25883

SEQ ID NO: 40615 - DNA, 201 bp, Homo sapiens; identical to SEQ ID NO: 25884

SEQ ID NO: 40616 - DNA, 201 bp, Homo sapiens
gttgagcatgtgaaatgtggctcgtggctactcttttagacaggaaagctccaataacccaccagaagacggataggtagcaaaagtgtcagctattacgmtataaactatcttgccagccctaggaaggaaagaagtgaaatttctccctgcttcattggtcatgctagcgttcaccactgccgggcattaggttttgaa

SEQ ID NO: 40617 - DNA, 201 bp, Homo sapiens
aggtcagaggatttgagcaaggagttcttgagactcagtgtcctggaatcaggcacctcacccccagggccagccctcccggggctgtgagctgagctcarggcagctctccaagttcatggtccacatcttggacattcctgcccagccagagctctcagccctttgtgccaaggggatctcagctggttcacattctga

SEQ ID NO: 40618 - DNA, 201 bp, Homo sapiens
ggatcctcagagaggccccaagtcctgtgactgattcatctctgccttcacccgagcagccagtggatggatactcctgttagcccaaaattgttcatgamccaaaaaaaaaaaaaaaaaaaaagaaagaaagaaagaaaaaagaaagcactgatgggtgggagtccttaggttatttttagctgcagtcgactcaggctg

SEQ ID NO: 40619 - DNA, 201 bp, Homo sapiens
caggcggctgagccggatggttctcatggcctgagctcctgtgaaatgtttcacttggcccgaggtctgcaaaatagcggggagctgacaaaatggtgcgstttggaccaacaccaggttgtgtttataaatgtttgttgaggatcttcctatttagattagtaaatctggggcttaggaaacaattgctctgtccatgat

SEQ ID NO: 40620 - DNA, 201 bp, Homo sapiens
aatgccaagtatgcggtggagctggaggggcagcagcccatcagcgtgcccccgagcaccaacagcacggtgtaccggggtctggaggtacctgcaggagrcagtgggcgagcaggcggggcagcccaatgccatgggcctgatctcaccgctgcctccttccccagggcttcgtggcggccatctcgccctttaacttca

SEQ ID NO: 40621 - DNA, 201 bp, Homo sapiens
ggagaatggtcactttctactcaagcctagaccagcgccggccagtagaatttcctgcagtgaggacagaaatgttccagatctgcattgtccgttccagyggccatgagccgccacgtgtggttgttgagcatgtgaaatgtggctcgtggctactcttttagacaggaaagctccaataacccaccagaagacggatag

SEQ ID NO: 40622 - DNA, 201 bp, Homo sapiens
gattacaggcatccgccaccacgcccagctaattttttgtatttttagtagagagagggtttcaccatgttagccaggatggtctcgatctcctgaccttrtgatccgcccgccttggcctcccaaagtgctgggatcacaggtgtgagccaccgcgcccggccaacagggaagtttctttaggtgggccttcgtccgcct

SEQ ID NO: 40623 - DNA, 201 bp, Homo sapiens; identical to SEQ ID NO: 25893

SEQ ID NO: 40624 - DNA, 201 bp, Homo sapiens
caggcctgggcgctgggcttgggggggatccttcgcagaccacagcggggtctgttccctgccaggtacctgcagtgtgcccagcatgtcttaagcacatrcctcacacttgaactcatcacaaaacaaccctgccaggtcaggattgttctccctgtttcccagatgaggtgcagaattcgaggctcagagaggttaagt

SEQ ID NO: 40625 - DNA, 201 bp, Homo sapiens; identical to SEQ ID NO: 7204

SEQ ID NO: 40626 - DNA, 201 bp, Homo sapiens
catcctcatgcatcactgaaacacctcccgggcagggcaacgtggtcctatggaagcccagtgacactgccatgctggccagctatgctgtctaccgcatycttcgggaggctggcctgccccccaacatcatccagtttgtgccagctgatgggcccctatttggggacactgtcaccagctcagagcacctctgtggca

SEQ ID NO: 40627 - DNA, 201 bp, Homo sapiens; identical to SEQ ID NO: 7208

SEQ ID NO: 40628 - DNA, 201 bp, Homo sapiens
ctctgctttgtagggacgtcgtgcaggaggccacaaaggtgctgaggaatgctgccggcaacttctacatcaacgacaagtccactggctcgatagtgggycagcagccctttgggggggcccgagcctctggtgagtgggtcccccttcccacaggggagctgagttcctggtgggagaccctagatgttacgtctcgag

SEQ ID NO: 40629 - DNA, 201 bp, Homo sapiens
tagaccagcgccggccagtagaatttcctgcagtgaggacagaaatgttccagatctgcattgtccgttccagcggccatgagccgccacgtgtggttgtygagcatgtgaaatgtggctcgtggctactcttttagacaggaaagctccaataacccaccagaagacggataggtagcaaaagtgtcagctattacgata

SEQ ID NO: 40630 - DNA, 201 bp, Homo sapiens; identical to SEQ ID NO: 25900

SEQ ID NO: 40631 - DNA, 201 bp, Homo sapiens
gatcttcctatttagattagtaaatctggggcttaggaaacaattgctctgtccatgatggcttcggggcagggcggaagtcccaagcatgtcacaacacyggtgcattcttttgggcctcacctggttttgttgcccatagtcgcagcctcatactggaccaaagaattttcatccatgatcccctttggttctcctgtc

SEQ ID NO: 40632 - DNA, 201 bp, Homo sapiens
acaaaatccttcacggagttctggagagcagatgcggtgatgtttgaaagcattgcagaggctccataaaagctgcttcctttcctttaggctttagtcaytattacccttttggctcttattgagcttgtggtcatttgagacctccagctctttttctggttgagaggcaaactgctcaccgtcactcagcaaagtttg

SEQ ID NO: 40633 - DNA, 201 bp, Homo sapiens
ctgggcctcagtctactctgctgtcaaatggggacataatgttgatagtactcatcccttacaattgttaggaggactgaatggtctgaaatgtgaaaacrgattttgtgctgggcctggtggccaggaacaggtcagtcaacatgagccagtactgttaaggtcatgcacccgtgtgaggtctgatcacaacatcacacg

SEQ ID NO: 40634 - DNA, 201 bp, Homo sapiens
ccaccgacctggcctggcccccttctcatttctgtattgcctgggcacctccgtctgtggactctgcgttagggttttagatgggaggaagcgaggaaggsggtgaccatacccactcttgtccctctccccaggccttgaaggacctgaagggccggatggaagccatcccatgcgtggtgggggatgaggaggtgtgga

SEQ ID NO: 40635 - DNA, 201 bp, Homo sapiens
agcgccggccagtagaatttcctgcagtgaggacagaaatgttccagatctgcattgtccgttccagcggccatgagccgccacgtgtggttgttgagcaygtgaaatgtggctcgtggctactcttttagacaggaaagctccaataacccaccagaagacggataggtagcaaaagtgtcagctattacgatataaact

SEQ ID NO: 40636 - DNA, 201 bp, Homo sapiens
cctcctgcctcagcctcccaaagtgctgggattataggcgtgagccactgcgtccgaccttctgttagggttttgaccctgctcacctcaggggatggaaragacttctccctttcttgcagcctccttaatccccaaaccttccctttcctggcagaggtcatggcatggagtgaagagtccctgggctgagctgctgtg

SEQ ID NO: 40637 - DNA, 201 bp, Homo sapiens; identical to SEQ ID NO: 25909

SEQ ID NO: 40638 - DNA, 201 bp, Homo sapiens; identical to SEQ ID NO: 25863

SEQ ID NO: 40639 - DNA, 201 bp, Homo sapiens; identical to SEQ ID NO: 25864

SEQ ID NO: 40640 - DNA, 201 bp, Homo sapiens
gaaataattgccatcgggtgtggatgcaaagggcatgactcaggtcccatattcgtgtctccctgggcctgatacattttgcatacttcacatagctcacrctgctctgagctatttttctcttttcggtagtattgtacccattttccaggtgaggaaactgaggctcgcagactttctaagaatgcactgaggtcatgg

SEQ ID NO: 40641 - DNA, 201 bp, Homo sapiens
agcttagctgaggtccctgtcagaagcttccagatggtcccaggggattgacactgccttgtcccttcctgagggactgtggagactcgtggctgcctctycattcttctcatgatggtagatggaagagggccgtgcagattttaatgtatttatcgttatcaaatctccatattaaccccatgagggggtgtcagtgtt

SEQ ID NO: 40642 - DNA, 201 bp, Homo sapiens; identical to SEQ ID NO: 25865

SEQ ID NO: 40643 - DNA, 201 bp, Homo sapiens; identical to SEQ ID NO: 25870

SEQ ID NO: 40644 - DNA, 201 bp, Homo sapiens; identical to SEQ ID NO: 25882

SEQ ID NO: 40645 - DNA, 201 bp, Homo sapiens
gatttttttttttttccttgagatggaatcttgctctgtcatccaggctggagtgcagtggcgtgatctcagctcactgcaacctctgcctcccgggttcrtgtgattcttctgcctcagcctcccaagtagctgggagtacaggagtgggccactacgcccagctaatttttgtatttttagtagagacggggttttacc

SEQ ID NO: 40646 - DNA, 201 bp, Homo sapiens
ggtgagcgggaccctccgctcagccttcgagtacggtggccagaagtgttccgcctgctcgcgtctctacgtgccgcactcgctgtggccgcagatcaaarggcggctgctggaggagcacagtcggatcaaagtgggcgacgtgagtggcaccgtcacccccgccgcggcccagcggggggctgatgggattgggtccct

SEQ ID NO: 40647 - DNA, 201 bp, Homo sapiens; identical to SEQ ID NO: 3286

SEQ ID NO: 40648 - DNA, 201 bp, Homo sapiens
tcttctcatgatggtagatggaagagggccgtgcagattttaatgtatttatcgttatcaaatctccatattaaccccatgagggggtgtcagtgttttakggagggagggaaactggcttcaagacatgtgacttgcccaaggtcacacagctagtgggaggcagagtgggggtggggagtgcagagctaccggctcagg

SEQ ID NO: 40649 - DNA, 201 bp, Homo sapiens; identical to SEQ ID NO: 25897

SEQ ID NO: 40650 - DNA, 201 bp, Homo sapiens
ccctctcccaggactctccttggtttggcctctcaggcctgggcgctgggcttgggggggatccttcgcagaccacagcggggtctgttccctgccaggtrcctgcagtgtgcccagcatgtcttaagcacatgcctcacacttgaactcatcacaaaacaaccctgccaggtcaggattgttctccctgtttcccagatg

SEQ ID NO: 40651 - DNA, 201 bp, Homo sapiens; identical to SEQ ID NO: 7210

SEQ ID NO: 40652 - DNA, 201 bp, Homo sapiens; identical to SEQ ID NO: 25898

SEQ ID NO: 40653 - DNA, 201 bp, Homo sapiens; identical to SEQ ID NO: 25901

SEQ ID NO: 40654 - DNA, 201 bp, Homo sapiens; identical to SEQ ID NO: 3281

SEQ ID NO: 40655 - DNA, 201 bp, Homo sapiens
tcagacaaagcacagcgtacttcgtccagagttgggcagctgttaagtgctttcagctgctgttagctgctgcttcccatggagggaggaaactgaggccrggagagtgaagtgacctgtctgaagctccctcccactggggaaatgggggagcggtttccagcacgcgtggggaggaggggcccaaccctggcagccgac

SEQ ID NO: 40656 - DNA, 201 bp, Homo sapiens
aagggtgtgggcctgggagctggagtttccgctgctcctgagggacaggaacattggaccaggacaggccactcccttcaacttcgcagtagccctgtaaygaggcgtgccaagcccctccccagaggaggaagctgggctcagagactgggtaacctgaccgaaggcccacagccaacagctggccagcatccctcatcc

SEQ ID NO: 40657 - DNA, 201 bp, Homo sapiens; identical to SEQ ID NO: 3284

SEQ ID NO: 40658 - DNA, 201 bp, Homo sapiens
caaaaggcctgctctgccagccacgggcccctgggctccccgcctatcagcgggcggagcgggcctggaccccattctccacgctctgatgagcagcgggsttaaaggtgggaaggccataaattagtattagctactgtgtcgctggctcccgggtgattagcatttttattgttttgtggtgctgaggttggtcacact

SEQ ID NO: 40659 - DNA, 201 bp, Homo sapiens
gcatgtcacaacaccggtgcattcttttgggcctcacctggttttgttgcccatagtcgcagcctcatactggaccaaagaattttcatccatgatccccyttggttctcctgtccatgctaagagacagggagggcagtccccatttcctagatgaagagacttagggaaggaagtgagcttacctggggccccacagct

SEQ ID NO: 40660 - DNA, 201 bp, Homo sapiens; identical to SEQ ID NO: 7215

SEQ ID NO: 40661 - DNA, 201 bp, Homo sapiens; identical to SEQ ID NO: 7218

SEQ ID NO: 40662 - DNA, 201 bp, Homo sapiens
cagagtaagactccgactcaaaaaagaaaaaaaaaagctactgatttgctgtgcattgttctttgtgtgacgctttccaggatcatgaagttaatggatgmggcagctagtcagaaacaaaatgccttgaaataattgccatcgggtgtggatgcaaagggcatgactcaggtcccatattcgtgtctccctgggcctgat

SEQ ID NO: 40663 - DNA, 201 bp, Homo sapiens; identical to SEQ ID NO: 25911

SEQ ID NO: 40664 - DNA, 201 bp, Homo sapiens; identical to SEQ ID NO: 25910

SEQ ID NO: 40665 - DNA, 201 bp, Homo sapiens
gaggcggaggttgcagtgagctgagatcgcaccactgcacttcagcctgggtgacagagtaagactccgactcaaaaaagaaaaaaaaaagctactgattkgctgtgcattgttctttgtgtgacgctttccaggatcatgaagttaatggatgaggcagctagtcagaaacaaaatgccttgaaataattgccatcgggt

SEQ ID NO: 40666 - DNA, 201 bp, Homo sapiens
catgccaggcacaaagccatcggcactggagggcatcatttattggtgatcatttactaagcaggtgcttgatatattaacctcatttaatcaccatttgrgggtgcctgtggccgttttacaggtggggaagcttcgaggagtcaaagcctgcttgttgtcccctgtcccttgggccaggctggggcctcaggagcccca

SEQ ID NO: 40667 - DNA, 201 bp, Homo sapiens
ccagtaccatgccaggcacaaagccatcggcactggagggcatcatttattggtgatcatttactaagcaggtgcttgatatattaacctcatttaatcamcatttgggggtgcctgtggccgttttacaggtggggaagcttcgaggagtcaaagcctgcttgttgtcccctgtcccttgggccaggctggggcctcagg

SEQ ID NO: 40668 - DNA, 201 bp, Homo sapiens; identical to SEQ ID NO: 25858

SEQ ID NO: 40669 - DNA, 201 bp, Homo sapiens
taaccggatgtggtggtgagcacctgtaatcccagctacacaggaggctgaggcaggagaatctcttgaacccgggagacagaggttgcagtgatctgagrttgtgccattgcactccagcctgggtgacagagtaagactccgtctcaaaaataaaaattaaaaaaaattgagggtcccttgccagtaccatgccaggca

SEQ ID NO: 40670 - DNA, 201 bp, Homo sapiens
gcacccaaggtaaagcagaaggctgttccaggcctctgccatgctttccctcagccctatgtgcccaggcagttgccctcatccccgaagcatctggtccmtagaggttggagggagctgacgttcagttgggcacctgctccaggatgtgcatcggggcaggcgtcgctggagggagagtgagcctcagcgagggaaatg

SEQ ID NO: 40671 - DNA, 201 bp, Homo sapiens
agagacctgcttagtaagggacgggggcaagagaagaacttgtttctgatgaacataccagcaaccccttgtcattgtccctcacaggaatccatccttcygggtgttctgtgcatgggtgggaggaggcactgctgctgtcatggctctgaacacaaccagccagccttgtcctgtgtccggggggctgccagcccccct

SEQ ID NO: 40672 - DNA, 201 bp, Homo sapiens
gatttaaatgagcacctatcaataggccaatcgttcctacaaattctcttggaccacaccggcctgtgagatagtattttagcaccatttcacagatgagsactgaggcttaaagaggtgaagagagacctgcttagtaagggacgggggcaagagaagaacttgtttctgatgaacataccagcaaccccttgtcattgt

SEQ ID NO: 40673 - DNA, 201 bp, Homo sapiens
ttttaattttcaacctcaacacttcttcatcctagatatgtgtgttccccaggaaagaggagaagccagatttaaatgagcacctatcaataggccaatcrttcctacaaattctcttggaccacaccggcctgtgagatagtattttagcaccatttcacagatgaggactgaggcttaaagaggtgaagagagacctgc

SEQ ID NO: 40674 - DNA, 201 bp, Homo sapiens
gaaactgacaccaatgggttaagtaactaacatgccagtaggaaatgaacaaactgggttttagtcccacacctctgactcccaagcccctggccataacyaccactgcacagtgccctggagctggacaggcgctgggctcagatcccaaccttagcgtcttgttcctgtgccttgacctcccagcttcagactcctcca

SEQ ID NO: 40675 - DNA, 201 bp, Homo sapiens
cccaggctgctttctggatcaggcatttgccactgcctgctcctcggtccccatggtgagcaccccctctgctgcacagagctggtatgacagcccctcakcctgctaaatgccttcttagattggctcagcagccctctggggtgggcgtcagctctgcgtgttcctggtgagccgcacgttgctgggaagacagtctag

SEQ ID NO: 40676 - DNA, 201 bp, Homo sapiens
gctactttgtggagccctgcatcgtggagagcaaggaccctcaggagcccatcatgaaggaggtgactggggtgggcagcctggggtccagaggaggacartcccaccggagcacagcacacacacagttctcctggagacattctcccatttcacagatgaggccctaaagggagaccctaaaagggaatgcctccgacc

SEQ ID NO: 40677 - DNA, 201 bp, Homo sapiens
ttgacagcaccaccagctatggcctcacgggggcagtgttctcccaggataagtgagtggccaggccgcagccctggtgctgtgctccgggtgtcctgtcygtgtccccatccccacctcctggacgtggttcccagtaataatgctgcccctaccttctctctgtcccctcccctcagcccagacaggcagccagggctc

SEQ ID NO: 40678 - DNA, 201 bp, Homo sapiens
gacactgaagtgtaaactgaggcccagggactggggagagggtgagccagagcaggggcactgggagggctcagggccctggtccctggtcccgtggaggrtctgacgccggggcctctctcctaggagatcttcgggcctgtactgtctgtgtacgtctacccggatgacaagtacaaggagacgctgcagctggttgac

SEQ ID NO: 40679 - DNA, 201 bp, Homo sapiens; identical to SEQ ID NO: 3285

SEQ ID NO: 40680 - DNA, 201 bp, Homo sapiens
ttgaccctggctggggtctgagcatttccagtgccctcagcaaccacgtccactgcagccatcataatggctgacactgatagacttttactgtggggccrgctgtggctgagcacttggctgagatgacgtgggtgttactgttcccattttacagatgagaaactgaggtcaaggcacttgcccaagttggtagtgcag

SEQ ID NO: 40681 - DNA, 201 bp, Homo sapiens; identical to SEQ ID NO: 7177

SEQ ID NO: 40682 - DNA, 201 bp, Homo sapiens; identical to SEQ ID NO: 25873

SEQ ID NO: 40683 - DNA, 201 bp, Homo sapiens; identical to SEQ ID NO: 25876

SEQ ID NO: 40684 - DNA, 201 bp, Homo sapiens; identical to SEQ ID NO: 25875

SEQ ID NO: 40685 - DNA, 201 bp, Homo sapiens
taagaaccactatcctgtgtggtgatggttaattttatgtgtcactttggctgggcatggtgcccaggtatttggtcaaacattctgggtgtttctgtgarggtgtatttggatgagattaacatttaaatcagtggagttttaaaagtaaaaagcaaggcaggtgaccgttcatcctgtgggtgggcgtggtctaatcag

SEQ ID NO: 40686 - DNA, 201 bp, Homo sapiens
gggtctctgggatgttggccagcgctcactctgagcctccgcccgctctgggctgctccgtgctcgtgttggtcccgggccatggatggcgtaggtggtgytttgggcccctgggcaactgggggagccagctcctctggtcatttccccacccccgacccctgtagagtgcggcggaaagaacttccacttcgtgcaccg

SEQ ID NO: 40687 - DNA, 201 bp, Homo sapiens; identical to SEQ ID NO: 25878

SEQ ID NO: 40688 - DNA, 201 bp, Homo sapiens
tggcagcaggctcgctgctggccgctacactgctggtccgttgattccatcatctcctcccttccccttctgcccaggctgttgcatcttttcagagaaawacagaagtgtcttttccgcaggaaccaatgacaagccagggggcccacactacatcctgcgctggacgtcgccgcaggtcatcaaggagacacataagcc

SEQ ID NO: 40689 - DNA, 201 bp, Homo sapiens
gtggtgttccttgtacctttacccagcaagatatgatagggatggtttttttttttctgagacggagtctcgctctgtcgcccaggctggagtgcagtggygcgatctcggctcactgcaagctccgcctcccaggttcatgccattctcctgcctcagcctccccagtagctgggattacaggcatccgccaccacgccc

SEQ ID NO: 40690 - DNA, 201 bp, Homo sapiens
gcatgccccaagcttggcagcaggctcgctgctggccgctacactgctggtccgttgattccatcatctcctcccttccccttctgcccaggctgttgcaycttttcagagaaaaacagaagtgtcttttccgcaggaaccaatgacaagccagggggcccacactacatcctgcgctggacgtcgccgcaggtcatcaag

SEQ ID NO: 40691 - DNA, 201 bp, Homo sapiens
gaattctggctaggaaccaggggtgaaggctagatatgtacctcttatggcaccccaggaccatgccaagtccctgcctctcagtctagtgttctctccaygccacaccctgcctcttagacatcctcgcatcccagcaaggatgcaaggctgggtgcgactggagagaacaatggaggctccccacagactggagactgg

SEQ ID NO: 40692 - DNA, 201 bp, Homo sapiens
ttacctcctcttccaggccccaggctctgccacccccttccccgcagctttgctgggggtgggagtgggtggtggcagcgttagaactgctgagaagggcygttttccaaaaggcctgctctgccagccacgggcccctgggctccccgcctatcagcgggcggagcgggcctggaccccattctccacgctctgatgagc

SEQ ID NO: 40693 - DNA, 201 bp, Homo sapiens
gcttactattacccatgtattgcagagggtattttaaaggatacagatgaacagccagatgcgcagacacatagggcaaagactggaagggtccccggcakgggcaccgccgtccccctggagttcgggctgtgccacccccttggcatgtggacgtgttcaccaatctggaagctctcccgaccctgtccttttaggttt

SEQ ID NO: 40694 - DNA, 201 bp, Homo sapiens
ggtgctgaggttggtcacacttggagcctggggaggaggcgaggccctccagggtggtggcttcgggcggggcctgagctccctctcccaggactctcctyggtttggcctctcaggcctgggcgctgggcttgggggggatccttcgcagaccacagcggggtctgttccctgccaggtacctgcagtgtgcccagcatg

SEQ ID NO: 40695 - DNA, 201 bp, Homo sapiens
agcgtgcttactattacccatgtattgcagagggtattttaaaggatacagatgaacagccagatgcgcagacacatagggcaaagactggaagggtcccyggcatgggcaccgccgtccccctggagttcgggctgtgccacccccttggcatgtggacgtgttcaccaatctggaagctctcccgaccctgtcctttta

SEQ ID NO: 40696 - DNA, 201 bp, Homo sapiens
caggttaagaactcagtcccgtaagactgaccccccaacttcagatgccaatcacaagtactgggaccccaggttacccacaccttgtctgactttgcgaygcattagaagctcccatgatgccctcttgagttttgatacgttgttagaacagctcacggaaccgaggggaagcgtgcttactattacccatgtattgca

SEQ ID NO: 40697 - DNA, 201 bp, Homo sapiens
ttgatggatgctggctgggtgtcctacagtttaacttgatgctcactgcctggggttagtgcagaccccacaggttaagaactcagtcccgtaagactgaycccccaacttcagatgccaatcacaagtactgggaccccaggttacccacaccttgtctgactttgcgacgcattagaagctcccatgatgccctcttga

SEQ ID NO: 40698 - DNA, 201 bp, Homo sapiens
gaagggccggatggaagccatcccatgcgtggtgggggatgaggaggtgtggacgtcggacgtgcagtaccaagtgtcggtatgtccagcgggtgggcagrgctcagcccctcccctgaatatgtgacctctttctctgacagctcgtaagcttataatgtgtgggctctgacttcaaggcctttatagtgcccctcccca

SEQ ID NO: 40699 - DNA, 201 bp, Homo sapiens
tagtgggccagcagccctttgggggggcccgagcctctggtgagtgggtcccccttcccacaggggagctgagttcctggtgggagaccctagatgttacrtctcgaggggcttcagagtaataggaaggataccatttactgagcacttattgtgggccaagcaagtgcactagctcagggtcctttcagcaaactcgtg

SEQ ID NO: 40700 - DNA, 201 bp, Homo sapiens; identical to SEQ ID NO: 7198

SEQ ID NO: 40701 - DNA, 201 bp, Homo sapiens
gtcccctagacttggggctggtggctcttgagggcccagtgcctgctcggggacctgaggcctctttgcatggtcaccacaataagtccctgtgtctgcgktggcccaaggagccccttcatttccctgctgtggccagggccagggcttggagcgtgaaccatttgactgaggccggatgtccctgccaccactgtccca

SEQ ID NO: 40702 - DNA, 201 bp, Homo sapiens
gctcaagctcacgcagctggttaggaggaaggctcgggcttgcacccgggtctgcagctgcccacggcccacgctcttcgccacctgctccattgggctcytgacttccaagctcctcctctcctaatattattttatccaaccttcctcaacctgtcacctttgcctccttttggactaggggtgactcaaagctgttgc

SEQ ID NO: 40703 - DNA, 201 bp, Homo sapiens
gctgggctgccatgcagattttggacttagtaagcctccataatcacatgagcaaattcttaaaacctctctcttgctcctgttctgtgtctctggaggaycctgatgaatatgtgtgctgaaggcccagtatgtttccttacaacagcctttggaaggaattctgccaccctcccattttggagagaaggaaatttaggt

SEQ ID NO: 40704 - DNA, 201 bp, Homo sapiens
cagcgctcactctgagcctccgcccgctctgggctgctccgtgctcgtgttggtcccgggccatggatggcgtaggtggtgctttgggcccctgggcaacygggggagccagctcctctggtcatttccccacccccgacccctgtagagtgcggcggaaagaacttccacttcgtgcaccgctcggccgacgtggagagc

SEQ ID NO: 40705 - DNA, 201 bp, Homo sapiens
acctggcgggggcaccggccctgatggtgagatgtgggcacaggtgggacagcggcagctggttgtcctcctggtcccaacagacagacagaggccacccygagccccttgggtctcagcctagtcatggggagaggcacagaaggtggaggcagcttggggctgtgggtaggctttgggaccagagacccagtttgaatc

SEQ ID NO: 40706 - DNA, 201 bp, Homo sapiens
caggaggtgctagctcaggggcttgagaatcctttccccctcagcccctgggatgggacctggtgagccctccaaatgtttcctggtccctcctggggccyggctcagtgctcgctttgggcacagcgtcagatgtgagaagaggatggacaggaggctgttggctgctcctgacccccggccctctgccttgcagggtaa

SEQ ID NO: 40707 - DNA, 201 bp, Homo sapiens; identical to SEQ ID NO: 25903

SEQ ID NO: 40708 - DNA, 201 bp, Homo sapiens
ctgagcgagatgccctgcaaaaggtaatgggagggtgggaggcacccgagaggtgcagggcatggagcagaggccatccccagcagccctgagatagcgcyccgtgcctgcagccatcacccgcttctacccttgctcccagccttgggtggaagcctgggagggctgtgggtctggagtgtgggaacagctgggaggacc

SEQ ID NO: 40709 - DNA, 201 bp, Homo sapiens
tccacccacacgcatgtacatggagaaggcatgcagatccctacatgcttagacatgtgaccatgcatatgcctatatatgcattgattgatgtgtgtctrtgtttatatgcgagtgcacctgtagtactaacacacgtacacttgtgtgtgtacacacacacacacacacacacacacacacagtgttcatgtctgtcct

SEQ ID NO: 40710 - DNA, 201 bp, Homo sapiens
tccactggctcgatagtgggccagcagccctttgggggggcccgagcctctggtgagtgggtcccccttcccacaggggagctgagttcctggtgggagascctagatgttacgtctcgaggggcttcagagtaataggaaggataccatttactgagcacttattgtgggccaagcaagtgcactagctcagggtccttt

SEQ ID NO: 40711 - DNA, 201 bp, Homo sapiens
cccctccccagaggaggaagctgggctcagagactgggtaacctgaccgaaggcccacagccaacagctggccagcatccctcatccctgactcggcctcstgttgaacctggaaagccagtgtgggctggagcaggggtgttgaggctggagctggggctggaggggagatgagctggttgctctgtcaccactgctctg

SEQ ID NO: 40712 - DNA, 201 bp, Homo sapiens; identical to SEQ ID NO: 7182

SEQ ID NO: 40713 - DNA, 201 bp, Homo sapiens
agagccagaaaatgtttgcatcttttgccggcttgtggtgggatggacaggacagggagctgggcacgttgctgtcctggagggaacccaggaggaggcgrcacctgacccttcttgcagacactgaagtgtaaactgaggcccagggactggggagagggtgagccagagcaggggcactgggagggctcagggccctgg

SEQ ID NO: 40714 - DNA, 201 bp, Homo sapiens
ttcctccgtggcactggttgcccccatgtctgcctctatgagaaagtggaggtgagcttggagagggaggaagggtgtgggcctgggagctggagtttccsctgctcctgagggacaggaacattggaccaggacaggccactcccttcaacttcgcagtagccctgtaacgaggcgtgccaagcccctccccagaggagg

SEQ ID NO: 40715 - DNA, 201 bp, Homo sapiens
ggattacaggcatccgccaccacgcccagctaattttttgtatttttagtagagagagggtttcaccatgttagccaggatggtctcgatctcctgacctygtgatccgcccgccttggcctcccaaagtgctgggatcacaggtgtgagccaccgcgcccggccaacagggaagtttctttaggtgggccttcgtccgcc

SEQ ID NO: 40716 - DNA, 201 bp, Homo sapiens
atgcgagtgcacctgtagtactaacacacgtacacttgtgtgtgtacacacacacacacacacacacacacacacagtgttcatgtctgtccttgtctctkctgtggctcagccagaccctggcttttgcccttggcgtcccctacccctgcccctgtttcaggagttgggcccttcaggtgcaggtgtttcggggtgagt

SEQ ID NO: 40717 - DNA, 201 bp, Homo sapiens; identical to SEQ ID NO: 7185

SEQ ID NO: 40718 - DNA, 201 bp, Homo sapiens; identical to SEQ ID NO: 7216

SEQ ID NO: 40719 - DNA, 201 bp, Homo sapiens
tctgcaggcattggccaggtcactctgtctgtcactgggtgtgtgtgcaggtgccagctgacagcagcacctgccacccagctccctggttgtctctgtakctgcctagagcttgccctcacctgtagctccgcaggcgtctgaggctgcatggcagctgggatttttccaggcagcgaggctccggcattctgataagcc

SEQ ID NO: 40720 - DNA, 201 bp, Homo sapiens; identical to SEQ ID NO: 7220

SEQ ID NO: 40721 - DNA, 201 bp, Homo sapiens
cagctgggctgggtgtgggttctgtgtccttccaggatatgtgtcatttcccatgaggggccggggcaggtggctgggtgggggcacaggctggagtattyttagttctactggttctacactgtgaggtggcaatgggatttgctcagatgccacccaataaaatgcctgttacttaatcacagtggtggatggtctttc

SEQ ID NO: 40722 - DNA, 201 bp, Homo sapiens; identical to SEQ ID NO: 7254

SEQ ID NO: 40723 - DNA, 201 bp, Homo sapiens
gacgccggggcctctctcctaggagatcttcgggcctgtactgtctgtgtacgtctacccggatgacaagtacaaggagacgctgcagctggttgacagcrccaccagctatggcctcacgggggcagtgttctcccaggataagtgagtggccaggccgcagccctggtgctgtgctccgggtgtcctgtccgtgtcccc

SEQ ID NO: 40724 - DNA, 201 bp, Homo sapiens; identical to SEQ ID NO: 7225

SEQ ID NO: 40725 - DNA, 201 bp, Homo sapiens; identical to SEQ ID NO: 7228

SEQ ID NO: 40726 - DNA, 201 bp, Homo sapiens
atgccattctcctgcctcagcctccccagtagctgggattacaggcatccgccaccacgcccagctaattttttgtatttttagtagagagagggtttcaycatgttagccaggatggtctcgatctcctgaccttgtgatccgcccgccttggcctcccaaagtgctgggatcacaggtgtgagccaccgcgcccggcca

SEQ ID NO: 40727 - DNA, 201 bp, Homo sapiens
cttgacatctcccaggctttgaattcaaatctcatttccagcatgtattggtctagaaggccactgaatccctctgagcctctgtttcctcacctgcaaawtgggaacgatagttatgcttacctcataggattgttttgagggtggaattgttttgagggcgttgcattttgctgcatgcttagtggctggtccagtgcc

SEQ ID NO: 40728 - DNA, 201 bp, Homo sapiens
aattgttttgagggcgttgcattttgctgcatgcttagtggctggtccagtgcccagcacctaatgggtgcttggggagtgtcttgatggggaggaaaaarctgtaggaaacagaaacattcggcattctagcctatttctgctacatgctagctgtgtggctttagacagttgagttatcctttctgagccaccatttct

SEQ ID NO: 40729 - DNA, 201 bp, Homo sapiens
gctagctgtgtggctttagacagttgagttatcctttctgagccaccatttcttcatctgtaaaataggtataataccaacctttccaaattgcagagaaratgatattatattgaacatctcactcaaactagaggctcaagaaatagctgttaaatgaatgaggaaaattgcaagattggacttggaggaaaatatctt

SEQ ID NO: 40730 - DNA, 201 bp, Homo sapiens; identical to SEQ ID NO: 25860

SEQ ID NO: 40731 - DNA, 201 bp, Homo sapiens; identical to SEQ ID NO: 25861

SEQ ID NO: 40732 - DNA, 201 bp, Homo sapiens
gctctgtaaaatgggggtgtggtttcttacgagttctgcttcccagggttgaggtaaaagtcaattaaaacagtgcagtaggaaaacattttgcaaaaggrtttgaaaataaatcaatatggcttaatgcttccgtttattgagcacctactttgtgctaggtgcagtgatgacttctttaaatatgtgataattatggga

SEQ ID NO: 40733 - DNA, 201 bp, Homo sapiens
cagcctaggcgacagaatgagactccatctcaaaaaaaaaaaaaaaagaaataatataaaataaaacatcaggacttatctgacttggagactgatggccygaactcagcaagctactgctggcagagccagaattaacctgatgccaagttgagggacctccaacttgtaggttattccttttctgagccctaagacata

SEQ ID NO: 40734 - DNA, 201 bp, Homo sapiens
ctagaggctcaagaaatagctgttaaatgaatgaggaaaattgcaagattggacttggaggaaaatatctttagtcccaattaattaaagcctgacattamaaaaaaaatacacatttttaattgtacaagcaatacataaatacattctgcattttaaaagagttaaactccttttggataaggcgaatgtcccctttgg

SEQ ID NO: 40735 - DNA, 201 bp, Homo sapiens; identical to SEQ ID NO: 25862

SEQ ID NO: 40736 - DNA, 201 bp, Homo sapiens
gagttcagaagaggagctgttggcctttgactatttttcattccaccccaaagaggctctcgatacccccccgacctaacgtgcaagtgtgggtgcccccragagacggcgatcaggttagcgccagtgaggctgtcttccagagagggcttggggggccagtccagccgaatgaggcacatgtcattctccgaaggctgc

SEQ ID NO: 40737 - DNA, 201 bp, Homo sapiens
gtctgagtagagatgcattaatctgccgcttaacctatcccgccctcccccgggctcccctgatggtctgtgtgtgtttgctcccactccttcccagctcrccttgatgagggcaggcctcggtgtctgggcgtagcagggcgtctggcaggttgggccaggtgccgtctggtctgtgcgggcctgagagactcgcaggcc

SEQ ID NO: 40738 - DNA, 201 bp, Homo sapiens
ttctgtcctgggggaagaagatgaaatgtaagccggcagccagcctgagttgggctgtgggagatattctgggctgccgggcctgggtgtctccagaaacmcccaacgctcgctcatgaaggctctcttggtgccaggtcttgtgccaggcactgggatatggtgccgaattggatacaagggagatgggacgtcctcctg

SEQ ID NO: 40739 - DNA, 201 bp, Homo sapiens; identical to SEQ ID NO: 3282

SEQ ID NO: 40740 - DNA, 201 bp, Homo sapiens
gatgttcgcttggagggggcttcacaaatgtcactttgctcactccagacgcccatcctaggagatggggtatcactccccttttgtagacagggaaactgagactctgagaggagaagggacttgggtaacaccactcagctagtatgtggctgagctgggattcagagccaggctgcctcccacgctagtacgctgtca

SEQ ID NO: 40741 - DNA, 201 bp, Homo sapiens
tgatgttcgcttggagggggcttcacaaatgtcactttgctcactccagacgcccatcctaggagatggggtatcactccccttttgtagacagggaaactgagactctgagaggagaagggacttgggtaacaccactcagctagtatgtggctgagctgggattcagagccaggctgcctcccacgctagtacgctgtc

SEQ ID NO: 40742 - DNA, 201 bp, Homo sapiens
aaggctgctgcctcgttgcctgaaggggtgtgtggctggggggccggagcccagttaggggcttgccgttctttcccactcacctctcaagtcctgttggstcaccacagagagcccagagaccagctagctgccctgcaaagggccccttggtcaccaggaaacaagtggggggaatgtcaggtgaggggaatgtcaggt

SEQ ID NO: 40743 - DNA, 201 bp, Homo sapiens; identical to SEQ ID NO: 25879

SEQ ID NO: 40744 - DNA, 201 bp, Homo sapiens
caaggctgctgcctcgttgcctgaaggggtgtgtggctggggggccggagcccagttaggggcttgccgttctttcccactcacctctcaagtcctgttgrctcaccacagagagcccagagaccagctagctgccctgcaaagggccccttggtcaccaggaaacaagtggggggaatgtcaggtgaggggaatgtcagg

SEQ ID NO: 40745 - DNA, 201 bp, Homo sapiens
cgtttccccggattgcttgcacaggggcggtgaatgggaggcttgggctgagagtagcctgcagcactggaagaatttgaattcatttcctttttttttttgagacagggtctcactttgtcacccaggctggaggctggagtgcggcggcatggtcacagctcactgcagcctcaacctcttgggtttagggatcctttc

SEQ ID NO: 40746 - DNA, 201 bp, Homo sapiens
tcgtagaagagtggagtctgatgagagagacagggaagtgaaaattcacagcccctggatgccagtgctgaaggagtgggttcaggactgggaacatcagwatgggcatagtgacttattctggggaagtcatgaaaagctccctggaggaggtgatgaaggggtacccaagcctggaagaggctggcagtggtactccag

SEQ ID NO: 40747 - DNA, 201 bp, Homo sapiens
cacacctatgacttcctctcatcccctggatgccccagaggacttgaggtacccttcaagctcatctcatccatcctcctgcttccaggcaaaatcattcsctgacatcccaaccaagttagctatgccttctgtctttcaaagcgaccttcagccattctgtagtggtttctatttctctctcacccctatttgcatatt

SEQ ID NO: 40748 - DNA, 201 bp, Homo sapiens
tttgggaggccgaggcaggcggatcacgaggtcaggagatcgagaccatcctggctaacacagtgaaacgctgtctctactaaaaatacaaaaaattagcygggcgtggtggcgggcgcctgtagtcccagctacgcaggaggctgaggcaggagaatggcgtgaaccccagggggcggagcctgcagtgagccgagatcg

SEQ ID NO: 40749 - DNA, 201 bp, Homo sapiens; identical to SEQ ID NO: 25881

SEQ ID NO: 40750 - DNA, 201 bp, Homo sapiens; identical to SEQ ID NO: 25885

SEQ ID NO: 40751 - DNA, 201 bp, Homo sapiens; identical to SEQ ID NO: 7266

SEQ ID NO: 40752 - DNA, 201 bp, Homo sapiens; identical to SEQ ID NO: 25888

SEQ ID NO: 40753 - DNA, 201 bp, Homo sapiens; identical to SEQ ID NO: 25889

SEQ ID NO: 40754 - DNA, 201 bp, Homo sapiens; identical to SEQ ID NO: 25890

SEQ ID NO: 40755 - DNA, 201 bp, Homo sapiens; identical to SEQ ID NO: 25891

SEQ ID NO: 40756 - DNA, 201 bp, Homo sapiens; identical to SEQ ID NO: 3283

SEQ ID NO: 40757 - DNA, 201 bp, Homo sapiens
cattttacaaatgagaggttcagagaggtgaagacttctgtcccagatctcgccacgagtccgtctgggtctctggaccccaaggtcagtgctcctcccakgaggtggccttgtcccatgcccctggaggttgccaaaggctggctcagggtgaggaggcaggcaggaggcacggggtctccccagcacctgtcacaatat

SEQ ID NO: 40758 - DNA, 201 bp, Homo sapiens
caagcagtgggaagtgattatgctcattttacaaatgagaggttcagagaggtgaagacttctgtcccagatctcgccacgagtccgtctgggtctctggmccccaaggtcagtgctcctcccaggaggtggccttgtcccatgcccctggaggttgccaaaggctggctcagggtgaggaggcaggcaggaggcacgggg

SEQ ID NO: 40759 - DNA, 201 bp, Homo sapiens
gtgtttagaaaattccaggccagatgggagactgctgaaggtttgtgatgttgccgccgcctgcccacgaggggagtgtcctcccacccacactgggcacygggtgcttggcttcctgagcaggatgtggtttctcattctagacctggtacaagagagggtagttttcacccaacagtaaacctggcaaatggcaatgcc

SEQ ID NO: 40760 - DNA, 201 bp, Homo sapiens; identical to SEQ ID NO: 25896

SEQ ID NO: 40761 - DNA, 201 bp, Homo sapiens
atgcattaatctgccgcttaacctatcccgccctcccccgggctcccctgatggtctgtgtgtgtttgctcccactccttcccagctcgccttgatgaggrcaggcctcggtgtctgggcgtagcagggcgtctggcaggttgggccaggtgccgtctggtctgtgcgggcctgagagactcgcaggcccagcggcctttg

SEQ ID NO: 40762 - DNA, 201 bp, Homo sapiens
ccccgggctcccctgatggtctgtgtgtgtttgctcccactccttcccagctcgccttgatgagggcaggcctcggtgtctgggcgtagcagggcgtctgkcaggttgggccaggtgccgtctggtctgtgcgggcctgagagactcgcaggcccagcggcctttggcagggttgctccatgaggtcaggaaaggccagtg

SEQ ID NO: 40763 - DNA, 201 bp, Homo sapiens
acaaggctgctgcctcgttgcctgaaggggtgtgtggctggggggccggagcccagttaggggcttgccgttctttcccactcacctctcaagtcctgttrgctcaccacagagagcccagagaccagctagctgccctgcaaagggccccttggtcaccaggaaacaagtggggggaatgtcaggtgaggggaatgtcag

SEQ ID NO: 40764 - DNA, 201 bp, Homo sapiens
catccctgttatttttctacagcccccaccacacagctaaactgtcccctttgggccaggcgcagtggctcatgcctgtaatcccagcactttgggaggcygaggtgggcggatcacctgaggttgggagttcgagaccagcctggccaatatggcgaaatctcatctctactaaaaatataaaaattagccaggcctggt

SEQ ID NO: 40765 - DNA, 201 bp, Homo sapiens
cccctgatggtctgtgtgtgtttgctcccactccttcccagctcgccttgatgagggcaggcctcggtgtctgggcgtagcagggcgtctggcaggttggsccaggtgccgtctggtctgtgcgggcctgagagactcgcaggcccagcggcctttggcagggttgctccatgaggtcaggaaaggccagtgcgcgtgtct

SEQ ID NO: 40766 - DNA, 201 bp, Homo sapiens
agtatagcggccagatctcggctcactgcaacctctgcctcccgggttccagtgtttctcctgcctcagcctcccaagtagctggaatcacaggcatgcamcatgatgcccggctaatttttgcatgtttagtagaggcagggttttaccacgttggccaggctggtctcgaactcctgacctccagtgatctgcctacct

SEQ ID NO: 40767 - DNA, 201 bp, Homo sapiens
cacaaggctgctgcctcgttgcctgaaggggtgtgtggctggggggccggagcccagttaggggcttgccgttctttcccactcacctctcaagtcctgtyggctcaccacagagagcccagagaccagctagctgccctgcaaagggccccttggtcaccaggaaacaagtggggggaatgtcaggtgaggggaatgtca

SEQ ID NO: 40768 - DNA, 201 bp, Homo sapiens
agcacaaggctgctgcctcgttgcctgaaggggtgtgtggctggggggccggagcccagttaggggcttgccgttctttcccactcacctctcaagtcctsttggctcaccacagagagcccagagaccagctagctgccctgcaaagggccccttggtcaccaggaaacaagtggggggaatgtcaggtgaggggaatgt

SEQ ID NO: 40769 - DNA, 201 bp, Homo sapiens
ttccagcacaaggctgctgcctcgttgcctgaaggggtgtgtggctggggggccggagcccagttaggggcttgccgttctttcccactcacctctcaagtcctgttggctcaccacagagagcccagagaccagctagctgccctgcaaagggccccttggtcaccaggaaacaagtggggggaatgtcaggtgagggga

SEQ ID NO: 40770 - DNA, 201 bp, Homo sapiens
ggctccggggctcggcttctagttagaatcctggctggctgtgtttgaccatgaggatgacggatgcattggatgcatcggagaccaggcaccctcctccygccccctccccacttctgcttccctcggtctgagtagagatgcattaatctgccgcttaacctatcccgccctcccccgggctcccctgatggtctgtgt

SEQ ID NO: 40771 - DNA, 201 bp, Homo sapiens
cttccagcacaaggctgctgcctcgttgcctgaaggggtgtgtggctggggggccggagcccagttaggggcttgccgttctttcccactcacctctcaagtcctgttggctcaccacagagagcccagagaccagctagctgccctgcaaagggccccttggtcaccaggaaacaagtggggggaatgtcaggtgagggg

SEQ ID NO: 40772 - DNA, 201 bp, Homo sapiens
acttccagcacaaggctgctgcctcgttgcctgaaggggtgtgtggctggggggccggagcccagttaggggcttgccgttctttcccactcacctctcaagtcctgttggctcaccacagagagcccagagaccagctagctgccctgcaaagggccccttggtcaccaggaaacaagtggggggaatgtcaggtgaggg

SEQ ID NO: 40773 - DNA, 201 bp, Homo sapiens; identical to SEQ ID NO: 25904

SEQ ID NO: 40774 - DNA, 201 bp, Homo sapiens; identical to SEQ ID NO: 25908

SEQ ID NO: 40775 - DNA, 201 bp, Homo sapiens; identical to SEQ ID NO: 25859

SEQ ID NO: 40776 - DNA, 201 bp, Homo sapiens
caggccgggcgcggtggctcacgcctgtaatcccagcactttgggaggccgaggcaggcggatcacgaggtcaggagatcgagaccatcctggctaacacrgtgaaacgctgtctctactaaaaatacaaaaaattagccgggcgtggtggcgggcgcctgtagtcccagctacgcaggaggctgaggcaggagaatggcg

SEQ ID NO: 40777 - DNA, 201 bp, Homo sapiens
ccagtcccagggaactgctcccaccccttcctgcagttaagggcgggggtccactgaaccctcctttgccttctcccctcccgcccgcgtttcctattcarcttcgggcagtactcgtgtcaaagtagtggtgtggaagcccttggaacaacagggcttggcacatagtaaacgctaaatcagtgggaactgtatttattg

SEQ ID NO: 40778 - DNA, 201 bp, Homo sapiens; identical to SEQ ID NO: 25866

SEQ ID NO: 40779 - DNA, 201 bp, Homo sapiens
actttctgctgtcaggcggtcctaagcacccaccacctcccgatcacagccccccacacccggagttgtaactacctggcatgtgtctgcccctgcatcgwctggaagctctgtgggggcctgctccaactctggcttcgtctcccactggcagatcccagccaggacctggccaaggtccatgctgagtaaatactcatg

SEQ ID NO: 40780 - DNA, 201 bp, Homo sapiens
ggctagatgatctcaaagggtcttcccagccttggcaatatataaatctgagtttgagctcccagcccgcttctgatcccctggccataagagaagtcacygtctaagggatgagacccaggtgtctgcctggactgttgtggccatgaagggctttaaatcatcccaggatatctattacagaactccaagcaatgatgc

SEQ ID NO: 40781 - DNA, 201 bp, Homo sapiens
ttgtggctaaatcaaaaacacagcagactaacatcacagccacatcactccagggcaagcccgtgtctcctttgtcaccaagaacaccaaggcattgtccrtgtaagacagtgtgcctgtcctcaagcttacatacaaagagacaaaacaaacacaaaagttaataacaagacaaaaattaaactgctagtaaaaaatgca

SEQ ID NO: 40782 - DNA, 201 bp, Homo sapiens
cggtctaatatgactttaatttcacagttctcgtagcttagatgatatcttgagatgtttacaataactgtagtgtgttacgtaaatacctgtgatttctrctagtgacaaaatcacagggacatctacttgctgcctacattcataatcaaaggatatgttaaaaaccattggctgggcacggtggcttacgtctgtaat

SEQ ID NO: 40783 - DNA, 201 bp, Homo sapiens
tggtctgtgtgtgtttgctcccactccttcccagctcgccttgatgagggcaggcctcggtgtctgggcgtagcagggcgtctggcaggttgggccaggtsccgtctggtctgtgcgggcctgagagactcgcaggcccagcggcctttggcagggttgctccatgaggtcaggaaaggccagtgcgcgtgtctttttgac

SEQ ID NO: 40784 - DNA, 201 bp, Homo sapiens; identical to SEQ ID NO: 25871

SEQ ID NO: 40785 - DNA, 201 bp, Homo sapiens; identical to SEQ ID NO: 25883

SEQ ID NO: 40786 - DNA, 201 bp, Homo sapiens; identical to SEQ ID NO: 25884

SEQ ID NO: 40787 - DNA, 201 bp, Homo sapiens
ctgcaggagtgggcgcctctgtgttgatagagctaaattgggttcagtatggaattcgatttagctggttgtaaagttacctaagttaaaacaaacaggcygggcgcggtggctcacgcctgtaatcccagcactttgggaggccgaggcaggcggatcacgaggtcaggagatcgagaccatcctggctaacacagtgaa

SEQ ID NO: 40788 - DNA, 201 bp, Homo sapiens
gggctggatgacaagctgcagcctccccgcaaccccacgatttccatagcgcagtggagccagaaagaaacagaccattttacagaccagagaaacaaggktgctgctctctcagaccctggagccagtgacagggaaggcggagaagggacgagagcctccgtttattcggagcctgtgtataccctccttttcacaaac

SEQ ID NO: 40789 - DNA, 201 bp, Homo sapiens
ccatttacagaaaattccaattccaagcccagcccaggtaatcactgacctgctctgtctctagaaactagccttttccggacatttcatagaaatagaawcatacactctgcagtcttttgtgtttggcttttttcacttagagaattttttttgaagttcatccatgtcgtagcatgtatttgtaggctgttccttttt

SEQ ID NO: 40790 - DNA, 201 bp, Homo sapiens
cccagggggcggagcctgcagtgagccgagatcgcaccactgcactccagcctgggcgacagcgagactccgtctcaaacaaacaaacaaacaaacaaaamaacaacaacaacaacaaacaacgaaacctctgatcactttgatcaccccccacccccattctgcagttctgtgtgggccgccctgaccccaccccaggcg

SEQ ID NO: 40791 - DNA, 201 bp, Homo sapiens
cccctccctcccccaggtgggtagagccagggtgacaccggtgaagagcatgggcatcatctgtcaagggcatctgtgtgcctcacttgagcctgctctcytgatccatccatgagccctacaaggtgggattgctatccccgttttacagaagtggagactgaggctcctagcttgaggtaggcaggccctcaggggatc

SEQ ID NO: 40792 - DNA, 201 bp, Homo sapiens
tttccagagttgacgtcagggcagctggtttagggtttcatctgtgagacaaaggctgctttgtagcttctgcccggtttaagtccaagcacatcaccccscaaggtgggaaacgaggtggaagggattgcagggcccaaacagagaagccttgggaggcttggcttgcgctcagcccctccaagaagggagccaagatct

SEQ ID NO: 40793 - DNA, 201 bp, Homo sapiens; identical to SEQ ID NO: 25893

SEQ ID NO: 40794 - DNA, 201 bp, Homo sapiens
tattttttgtgcccttctttgctactcctgctcttgctgcaagatgtgttagcaggttcgctctagactccaggctgcagccagaggcttgccggggctcrcccttgcacctgccctgctcagcggctttggaattgagtcgccttccccgctctgagccgtgtggccaggagagatgattcagctcgggacctgtgctcc

SEQ ID NO: 40795 - DNA, 201 bp, Homo sapiens
agcaggttcgctctagactccaggctgcagccagaggcttgccggggctcgcccttgcacctgccctgctcagcggctttggaattgagtcgccttccccrctctgagccgtgtggccaggagagatgattcagctcgggacctgtgctccagcctttaccccccagagaagccccagatgccctgtgctcctgggcaggg

SEQ ID NO: 40796 - DNA, 201 bp, Homo sapiens; identical to SEQ ID NO: 25900

SEQ ID NO: 40797 - DNA, 201 bp, Homo sapiens
ggcttgcccagcaaccctgtgaagactacgttctctctgtaatgtagcacaactctgtgcatgccatttaatctcttgcacctcagtttgtcgctctgtamaatgggggtgtggtttcttacgagttctgcttcccagggttgaggtaaaagtcaattaaaacagtgcagtaggaaaacattttgcaaaagggtttgaaaa

SEQ ID NO: 40798 - DNA, 201 bp, Homo sapiens
tcttccactgagggctccagcccagcctcacctgagctcatttcccttcacctgagtgagtcggcctaggcgtgccggccgctcgccttcccgcaaggtgkgggccatttccacacctccctcccaactctggaggtgggaggcagccatgcgctgtgccgttgacgtggagctgctgaacacccatggtctgctggatgc

SEQ ID NO: 40799 - DNA, 201 bp, Homo sapiens
cccccattgtgattcctgtccccaacatggggcctgctcttctcggtgagaggtggcctgggaccggactcctagccttgctcctgatatactgggtgatstgggcaaatggcttgaccactcggcttcagttgccccatctgtacaatgaggggaggttcagtgagatggtcctggctggattaggcccttaggttccct

SEQ ID NO: 40800 - DNA, 201 bp, Homo sapiens
catggggcctgctcttctcggtgagaggtggcctgggaccggactcctagccttgctcctgatatactgggtgatctgggcaaatggcttgaccactcggsttcagttgccccatctgtacaatgaggggaggttcagtgagatggtcctggctggattaggcccttaggttccctccctgccccctcttagctttctctg

SEQ ID NO: 40801 - DNA, 201 bp, Homo sapiens
ggctggattaggcccttaggttccctccctgccccctcttagctttctctgtgccctccagccctggaaggaatcccagccccttgccctccaggtccggrcccgggagcccacgcagatctcagcctagcagctaatgctggggctgggaaaggctggagaaaagggggagagggagagagtgtgtgtcctccaggagcc

SEQ ID NO: 40802 - DNA, 201 bp, Homo sapiens
cctgcttcttagaggacctgcacctttcctggcactggccggccccagtcacgctcatcatcctgtgagatgccggctcccttcccagttcacccctaccytccatcctagccgagccccccagttaccttgattgcttcctttccggttcaggtggtccccaaaaagaaagagcgtaaggtggcttccgatgatgacatc

SEQ ID NO: 40803 - DNA, 201 bp, Homo sapiens
aagtcaattaaaacagtgcagtaggaaaacattttgcaaaagggtttgaaaataaatcaatatggcttaatgcttccgtttattgagcacctactttgtgctaggtgcagtgatgacttctttaaatatgtgataattatgggagcagtcccaagcagtgggaagtgattatgctcattttacaaatgagaggttcagaga

SEQ ID NO: 40804 - DNA, 201 bp, Homo sapiens
cctggacccacctgctgccacagtggcccttgttaggacagacctcaaagggctgggcatgcccattagttcctggggtatgtctatggggtgtggacggygaaagcagggttttcagtgggttttgctgacgggggttctgtggcattagcatctggcttctttccttctgccaccctgtccccttgtactgccagccac

SEQ ID NO: 40805 - DNA, 201 bp, Homo sapiens
tacagccgtgagccaccatgttcagcctctccaaagttgtgttcaataagcaataccaagtggcagtgatgctgggaacctgggcaaatatagacaggagrgaattggacaggtggctcagaaaacaactgaaacctcagattggcattggggcaggtgacccgggggttccctgggccccatgttgcccaaaagagccag

SEQ ID NO: 40806 - DNA, 201 bp, Homo sapiens
acctgctgggcagctgcccctttctgtcccctgtatgggtccctggagcctgccttctgttcagtcatgccctctggtgtcacccccacaggcgggagacstttgactttgacgacgactgtgacagcctgacgtgggaagagaatgaagacacgctgctgctctgggaggatttcaccaactgcaatccgaccatcgacc

SEQ ID NO: 40807 - DNA, 201 bp, Homo sapiens
tgcttgcctggcacaaggcagccagtgcccagaacttcccacacttcttgggttgaagggattgaggatctgaggctggaggagccagaggtcctgccccrgcgagagctccggaactcgcctcccctctctcagcaggaagagaatactcttaatccacttctgtgtccccagcacttggctcctgggtgagcacttggg

SEQ ID NO: 40808 - DNA, 201 bp, Homo sapiens
tccctggagcctgccttctgttcagtcatgccctctggtgtcacccccacaggcgggagacctttgactttgacgacgactgtgacagcctgacgtgggargagaatgaagacacgctgctgctctgggaggatttcaccaactgcaatccgaccatcgacctgcagggcgaggtaagcccagcgcctggcttcccaaagg

SEQ ID NO: 40809 - DNA, 201 bp, Homo sapiens
ggcaacttggatggggccccttcactcatggacggaggaagatgccccctgtcccagggtgagcattcccttccatccctgcttgcctggcacaaggcagycagtgcccagaacttcccacacttcttgggttgaagggattgaggatctgaggctggaggagccagaggtcctgccccagcgagagctccggaactcgcc

SEQ ID NO: 40810 - DNA, 201 bp, Homo sapiens
gtccctcccacctctgtcttcacgaagtgctgggctcataccttaacgtggcacttgtcaccaccacctgatactctggttatatgtcagcctggctgtcytctcacaccacctcccctaggctgggagctcccagagggcaggcagggatggatgccccaatgcaccttccttgcccagctcaagatagtccctgggtgg

SEQ ID NO: 40811 - DNA, 201 bp, Homo sapiens
atacaaagtacccagaagtcgaatccacagagacagaaagtagaagggtggttgccaggggctgcggggagaggggtacggggtactactgcttaacaggyacagttgcagttttgcaagatgaaagagttctggagatggatggaggtgatggttgcacagcagtgtgaatgcacttaatgccactttaaaaatggttaa

SEQ ID NO: 40812 - DNA, 201 bp, Homo sapiens
aggatattatgctaaatgaaatcagccaggctgggcgcggtggctcacacctgtcatctcaatactttgggaggccaaggtgggagaattgcttgagcccrggagttcgagacctgctggacagcatggtgaaaccccgtctctacaaaaaataatttttaaaaattaactgggcatggtggctcatgcctatagtcccag

SEQ ID NO: 40813 - DNA, 201 bp, Homo sapiens
gtggccctgcagccacctgctgtgtcacctgctcgggaggatgctgccgtatattgttaggtggaaaaaatgcatttgaaaaccacatatggtcgcatccygttgtcgttaaaaaccaatctcataagaagagaaaatctcataagaaaaagttgggaaggatatagagccgatgttaaccgtaattctctcagggagggg

SEQ ID NO: 40814 - DNA, 201 bp, Homo sapiens
gttgctgcaggaactggagtaagggcccaggaccctgcttttccttggctccctgggcaactgggagcctgtggtagagaatgccagagagcgttctctcyaacacgtcacacatggctctttagaggggcacaaaagccttttctacatctgcacacttgatccagaaacccaatctgggtatcccagagggatacctgg

SEQ ID NO: 40815 - DNA, 201 bp, Homo sapiens
aggggcacaaaagccttttctacatctgcacacttgatccagaaacccaatctgggtatcccagagggatacctggacacatatgcaaatgtgagggtacraaggtgttcacagtcttgtttagattgcaaggactctgcgctgacagtggaggacccatcaaaccagtggccctgcagccacctgctgtgtcacctgctc

SEQ ID NO: 40816 - DNA, 201 bp, Homo sapiens
tgaggaagaacagtatttatagcggagtcttcctgcacccaacggaggcaatcttttgactaatgaggaaactaaggcacaaaacattgttgctgcaggarctggagtaagggcccaggaccctgcttttccttggctccctgggcaactgggagcctgtggtagagaatgccagagagcgttctctctaacacgtcacac

SEQ ID NO: 40817 - DNA, 201 bp, Homo sapiens
gcttcagacttctcatttatgaatgacctggacttccccgtctgatgtcctaggatcctgtgttctgtgctttttttttttttttgccccacctgcagccwgtttgtgtttgcacatcctcattgaatccaggtggggtcattctcacccattttacaggtgaggagactgagccctagagaagtgacttggcttaaggcc

SEQ ID NO: 40818 - DNA, 201 bp, Homo sapiens
cgcaccactccagcaaggtggctgtgggtatgtccattgtacagatgagaaaactttgagtcgtgccaggtgaaatgacttgttccttgtcaaagctagakagtggcagagtgggcatgtgacctcaggtctctttggcttccaagatcaccactgggttccaccactagagtctcgtgttgcacccagctttggaaaggg

SEQ ID NO: 40819 - DNA, 201 bp, Homo sapiens; identical to SEQ ID NO: 25864

SEQ ID NO: 40820 - DNA, 201 bp, Homo sapiens; identical to SEQ ID NO: 25870

SEQ ID NO: 40821 - DNA, 201 bp, Homo sapiens
cctaagacataattcaattgtggggaattaaaaagaaattgcttcatttgctcttgcttcatgtttcctgttggcccgtgatttgggccttctcttgggtrggaactctggctctgaggtgacactgcttggagttgtgttactgctctgagcctcagttctctcatctgtaaaatggggatgacaatcttagctgatgag

SEQ ID NO: 40822 - DNA, 201 bp, Homo sapiens
tggattaggcccttaggttccctccctgccccctcttagctttctctgtgccctccagccctggaaggaatcccagccccttgccctccaggtccgggccygggagcccacgcagatctcagcctagcagctaatgctggggctgggaaaggctggagaaaagggggagagggagagagtgtgtgtcctccaggagccctg

SEQ ID NO: 40823 - DNA, 201 bp, Homo sapiens; identical to SEQ ID NO: 7260

SEQ ID NO: 40824 - DNA, 201 bp, Homo sapiens
ggaggagctcgccaagcgcatgaaccttcagaccatggtggacacgctgcaggaggtaagagccctccgatatcccgaccaggagaggcacgccagagagycatgtggccaaggggcacagtcttcatgcggcaaagccaggaaattcttgcacagcccctactctgttacctcctaccacctcagtctctcctttatgga

SEQ ID NO: 40825 - DNA, 201 bp, Homo sapiens
cctgctaacgccgcctgcttcttagaggacctgcacctttcctggcactggccggccccagtcacgctcatcatcctgtgagatgccggctcccttcccarttcacccctaccttccatcctagccgagccccccagttaccttgattgcttcctttccggttcaggtggtccccaaaaagaaagagcgtaaggtggcttc

SEQ ID NO: 40826 - DNA, 201 bp, Homo sapiens
tccatccccttgagctgtatttagtcactaattcttttggtgcgcgtgtttgcagtctaattacctgcctcagctgcgctggaacctgccccttcccagcyagtgaggaccatgacggctctgcacagacaggtgaccgttgccctgttacccatccttggttgcacaagccccacgtgtcttttgttagctgggtccttg

SEQ ID NO: 40827 - DNA, 201 bp, Homo sapiens
cctgggggaagaagatgaaatgtaagccggcagccagcctgagttgggctgtgggagatattctgggctgccgggcctgggtgtctccagaaacccccaaygctcgctcatgaaggctctcttggtgccaggtcttgtgccaggcactgggatatggtgccgaattggatacaagggagatgggacgtcctcctgtgtgtc

SEQ ID NO: 40828 - DNA, 201 bp, Homo sapiens
gggccctggacgctgtagcagccctcccagtagcctccctcccagccttcccagcagctggaggtggggcttgctcactaggaggagcaaaataatgttasgcactggtgtttatgatcttatggggtcttcaccatccagggaggtgtaggtactattgttattcccattttacagatgaggaaactgaggctcagagag

SEQ ID NO: 40829 - DNA, 201 bp, Homo sapiens
gaacccagagacagagcctctaaggggaagcatggtgcagctcagccaagcccggggccctggacgctgtagcagccctcccagtagcctccctcccagcyttcccagcagctggaggtggggcttgctcactaggaggagcaaaataatgttaggcactggtgtttatgatcttatggggtcttcaccatccagggaggt

SEQ ID NO: 40830 - DNA, 201 bp, Homo sapiens; identical to SEQ ID NO: 3286

SEQ ID NO: 40831 - DNA, 201 bp, Homo sapiens
ttgggaggcagaggcaggagaatggcttgaacccgcaaggtggaggttgcagtgagccaagatcttgccactgcactccagcctaggcgacagaatgagamtccatctcaaaaaaaaaaaaaaaagaaataatataaaataaaacatcaggacttatctgacttggagactgatggcctgaactcagcaagctactgctgg

SEQ ID NO: 40832 - DNA, 201 bp, Homo sapiens
gccagatgggagactgctgaaggtttgtgatgttgccgccgcctgcccacgaggggagtgtcctcccacccacactgggcaccgggtgcttggcttcctgrgcaggatgtggtttctcattctagacctggtacaagagagggtagttttcacccaacagtaaacctggcaaatggcaatgcctggttctctggagggtcc

SEQ ID NO: 40833 - DNA, 201 bp, Homo sapiens
gcatctgtgggttgcacagccctttgagcattgccagactgtgaggtgtttagaaaattccaggccagatgggagactgctgaaggtttgtgatgttgcckccgcctgcccacgaggggagtgtcctcccacccacactgggcaccgggtgcttggcttcctgagcaggatgtggtttctcattctagacctggtacaaga

SEQ ID NO: 40834 - DNA, 201 bp, Homo sapiens
tggaagaagtagacaggctcgcctagctacagcacagggcgtgtaaacagtcaagttcagaatgatttcacagggcagagagtgggtgccctacagaggcrgatctgtgctggccctgtggggtgggcagaggttgagaaccaagctggaaactgggagagggtgtcccgtgccctttgctggcagcatctgtgggttgca

SEQ ID NO: 40835 - DNA, 201 bp, Homo sapiens
agccccttgccctccaggtccgggcccgggagcccacgcagatctcagcctagcagctaatgctggggctgggaaaggctggagaaaagggggagagggaragagtgtgtgtcctccaggagccctggctgggctgtctcctgtgggagagaggaggaattttcctctgtgtgtgcaaacagtatccgttttctcttgttt

SEQ ID NO: 40836 - DNA, 201 bp, Homo sapiens
ccagggattcggctgtttgtggaggggagggcctgcacttggaatcagaaggcctgggccaaagttcaaagtttgaatgaacccccaagcctggcagtgcrgggtgctggggccccagggcaggagttaaaagccgagtgagcttgggctagtcactgcctctcgagcctcagtttcttcatctgtaaaacagggatgcta

SEQ ID NO: 40837 - DNA, 201 bp, Homo sapiens
tgatcatcataaccagctctctgggcctgcagaaggactggacccccgacctgagacccggctcctgtgcctgttttcccacctagaccagggaacttgcytcttgcttcctctttgccccatctctgtgcctgagacctcccgagatgagtgccagcccccggtggcggtggggaaggtggaagtggcggtgaccacaca

SEQ ID NO: 40838 - DNA, 201 bp, Homo sapiens
cgagatgcgttgccttccaggagaattgatttaaactgtgccatgtgtcagtgacaccggaggctgtgggctttgcatttgcagtcctggcttttgatcgyattgagaggtgaaggccggctggcattccatttatttcctatgtcgcggatggctgaaggcccgggacgggaaggaggcagccctgtcatgtccctgtgc

SEQ ID NO: 40839 - DNA, 201 bp, Homo sapiens
cagagcctcaagctagagggaggggaatgaggtcccagaaaagaaaaggaagcagggagacagctgacgctgaagattccttctcagaggaatgcgaggcrgggctttgccttggcaaacgagaccggatgcgggtccctgggtcccccttccccccacgtgtatgcacactcacactcacacacatgtacgtgcacacac

SEQ ID NO: 40840 - DNA, 201 bp, Homo sapiens
ggcccggctggctctgcggcggttccagctaacccggtccctggtgcagctctgcggtccgggtcccccagcagagaatcggcacccggcggggaggcagsaccagacgcaggagagggcgtggccccgccggggagctgggcggagtctatgctgcggagaaagcgggagaacccggaggtgggcggagccgagggtctg

SEQ ID NO: 40841 - DNA, 201 bp, Homo sapiens
gctgctctctgcccccacctgccctctgccagaggccaggcccacgcttggcccagaatgaagtcttccactgagggctccagcccagcctcacctgagckcatttcccttcacctgagtgagtcggcctaggcgtgccggccgctcgccttcccgcaaggtgtgggccatttccacacctccctcccaactctggaggtg

SEQ ID NO: 40842 - DNA, 201 bp, Homo sapiens; identical to SEQ ID NO: 7264

SEQ ID NO: 40843 - DNA, 201 bp, Homo sapiens; identical to SEQ ID NO: 25897

SEQ ID NO: 40844 - DNA, 201 bp, Homo sapiens; identical to SEQ ID NO: 25898

SEQ ID NO: 40845 - DNA, 201 bp, Homo sapiens
tccggttcaggtggtccccaaaaagaaagagcgtaaggtggcttccgatgatgacatctctgagcaggacggggaggtgaaccggttctcggacgatgagrtcggctccatgaacatcaccgatgagatgaagcgcatgtttaaccagctgtgagtatccccgtggcccgcacactctccgtttccccggattgcttgcac

SEQ ID NO: 40846 - DNA, 201 bp, Homo sapiens; identical to SEQ ID NO: 25899

SEQ ID NO: 40847 - DNA, 201 bp, Homo sapiens
gttcagctgaaaaccctctcaggtccagctaccacttccctcaattccttcagatcttctgggctctgcttggccatctccttttcccccctctgcacccmctcccatgcctcaggatggtcttttttggttgtctccatcagctcccctggagcccctttagctccttcctctgcatttaatgcaggatttgtgccgaag

SEQ ID NO: 40848 - DNA, 201 bp, Homo sapiens; identical to SEQ ID NO: 25901

SEQ ID NO: 40849 - DNA, 201 bp, Homo sapiens
tgtgtgtgcaaacagtatccgttttctcttgtttccaaaagccggtgacgtaaccggctctccacccctccctcccctctggcctatttttagctggcccygacagcatcctaaaagggttccagactgccctgctccgaggccatgtagggagggtagcagtggggtgaggaaggagagaaactcctctgtctgtcccag

SEQ ID NO: 40850 - DNA, 201 bp, Homo sapiens
atgggcaaaggctccagtgtgtagaaagagcattcagatccaagtcaggcgagactggctgcaggagtgggcgcctctgtgttgatagagctaaattgggwtcagtatggaattcgatttagctggttgtaaagttacctaagttaaaacaaacaggccgggcgcggtggctcacgcctgtaatcccagcactttgggagg

SEQ ID NO: 40851 - DNA, 201 bp, Homo sapiens; identical to SEQ ID NO: 3281

SEQ ID NO: 40852 - DNA, 201 bp, Homo sapiens
acccgtttgcctccacatcccactcactccctccccttccccgagaggtagcactacctgaccctgtggcctccccaggaaaacgtagaatcaggcacccrtggactcataggctcgtctgactgcttcatcctatggctggggagaccgaggcccagagggtgatgtgctgtgctcacggaaggaagtggcagaaatcag

SEQ ID NO: 40853 - DNA, 201 bp, Homo sapiens
atttgtgaagtggaggcctcttccgagtcccttctcttgcccgtctttctgtcctttccagcttcctgtccctcggctggggtttccttcagatcccagaygctgggaaggaagtgaagtcaggaattgagtgtgtgatgcagtgaccactggaccctggcggctccgggccacacggccctctccagcacccacccccta

SEQ ID NO: 40854 - DNA, 201 bp, Homo sapiens; identical to SEQ ID NO: 25905

SEQ ID NO: 40855 - DNA, 201 bp, Homo sapiens; identical to SEQ ID NO: 25906

SEQ ID NO: 40856 - DNA, 201 bp, Homo sapiens; identical to SEQ ID NO: 3284

SEQ ID NO: 40857 - DNA, 201 bp, Homo sapiens
gaaactggggagggatgggccgggccctcctgtctgccactgttgattgtgttgtcatgcctcaggcttgtgttgtgtttgttttattgtgtgtgtgcttyttggacctggctactaaggtgatggaaaaaccgtgcccagtcttggagggagatgggttggcattgagcaacgatctattcaagttgcacccagggcgtg

SEQ ID NO: 40858 - DNA, 201 bp, Homo sapiens
cacctcccacctctgagcttcagacttctcatttatgaatgacctggacttccccgtctgatgtcctaggatcctgtgttctgtgctttttttttttttttgccccacctgcagccagtttgtgtttgcacatcctcattgaatccaggtggggtcattctcacccattttacaggtgaggagactgagccctagagaagt

SEQ ID NO: 40859 - DNA, 201 bp, Homo sapiens
tcacctcccacctctgagcttcagacttctcatttatgaatgacctggacttccccgtctgatgtcctaggatcctgtgttctgtgctttttttttttttttgccccacctgcagccagtttgtgtttgcacatcctcattgaatccaggtggggtcattctcacccattttacaggtgaggagactgagccctagagaag

SEQ ID NO: 40860 - DNA, 201 bp, Homo sapiens
gactttccatgtatgaactcacttaacccttacaaccaccttttttttttttttttttggaggcagtctcactctgtcacccaggctggagtgcagtggcragattatagctcattgcagactctacctcccaggcttacatgatcctcccacctcagcctcccaagtagctaggaccccataggcatgtgccaccatgct

SEQ ID NO: 40861 - DNA, 201 bp, Homo sapiens
tgtgtgaacatgggcaagtggcttggcctctctgagctgcccgtggagctccccgcttcgtcctctgtaaaagagggatcatcttgttgctctcccagggwttgagaaggaacaaatgaggtctggtgttaaggtacctggggcttggcagattttgggcatacctacctccaccccagcccagcccccttcccctggcaa

SEQ ID NO: 40862 - DNA, 201 bp, Homo sapiens
actcccattgacactttcgttatttctgaagctggcaccgatacggattctttatttctgattttccagtgaggcagccttcgatggtggaaaagggtttygcatcctggctctgccactgtctgtgtgaacatgggcaagtggcttggcctctctgagctgcccgtggagctccccgcttcgtcctctgtaaaagaggga

SEQ ID NO: 40863 - DNA, 201 bp, Homo sapiens; identical to SEQ ID NO: 25911

SEQ ID NO: 40864 - DNA, 201 bp, Homo sapiens; identical to SEQ ID NO: 25910

SEQ ID NO: 40865 - DNA, 201 bp, Homo sapiens
tattgagccctaacaaactcagccttaaaagcccccaggagaagataatgttgggctggagactggacattgaatggactgagaccacaatctctggctakaactggggtccagactctgcaagactggccagtgcattcctgcctagcccagattccccagctgggaaactgtcattgcttcctgtctgcagtctggccg

SEQ ID NO: 40866 - DNA, 201 bp, Homo sapiens
aacctctgcttcaaggcaaaggggttttgattccttaggttagataaacaagaacatcatcaagagacgagagaacgaagagtaaagggcagtgtccagaytgggttgggttaagcagagaaaggtttctagatgagtgagtttcagagctgggtgtttaaggtgagtccgtgttggcaggaagcaaggaactgtggttga

SEQ ID NO: 40867 - DNA, 201 bp, Homo sapiens
gtggggcaaacaatggaagtggatgtgaggcttggggaagagatgacatttgagacaagcctgggagaatggctagggtttcaggaggctgaggaggagasaggaagaggggaaatgagttacctgacctctgagcctcatctgcaacatggggatgatccccaggggagggctcagcgggattttatagagggaagtatg

SEQ ID NO: 40868 - DNA, 201 bp, Homo sapiens
accattgcactctagcctgggcaacaagagtgaaactctgtttcaaacaaacaaataaacaaacagacaacaaagcctttagagattagtgaggctaaagrtataacttttgtccacccctgtgtcatggaccccccagaattctatcctcagtcctcttgggggtccatgaacctctgcttcaaggcaaaggggttttga

SEQ ID NO: 40869 - DNA, 201 bp, Homo sapiens
agagaaacccccatctctactaagaatacaaaaaaattagccgggtgtggtggcgcatgcctgtaatcccagctacttgggaggctgaggcaggataatckcttgaaccccggaggtggaggttgtgatgagccaagatcgcaccattgcactctagcctgggcaacaagagtgaaactctgtttcaaacaaacaaataaa

SEQ ID NO: 40870 - DNA, 201 bp, Homo sapiens; identical to SEQ ID NO: 25858

SEQ ID NO: 40871 - DNA, 201 bp, Homo sapiens
ttaaataagatttagtggtcggtctaatatgactttaatttcacagttctcgtagcttagatgatatcttgagatgtttacaataactgtagtgtgttacrtaaatacctgtgatttctactagtgacaaaatcacagggacatctacttgctgcctacattcataatcaaaggatatgttaaaaaccattggctgggcac

SEQ ID NO: 40872 - DNA, 201 bp, Homo sapiens
attccagggcaactttgttggaaggacagatccttcctggaagaggttgcagggagccactccccaggtgtgacttcttaaccctttctcttccatgggamcactcaggcattgggtggagcctgtggaccccttctgagaataatttttttaaaaaggcattaggattactatgaaaagtcattttactaaaaatagata

SEQ ID NO: 40873 - DNA, 201 bp, Homo sapiens
tcaagtgcttctgctctaatagagaatatgggttagcaagtgttagaaggctgggctagaaggggtggagatgcagatgagaaatccagcaatgacaagarcgtatacttggggctgccacagggtgggcagtgctggcagagcctggaggaagcaccctccacccagacctggcaggtacttgagaaggttccgagaaga

SEQ ID NO: 40874 - DNA, 201 bp, Homo sapiens
cgttctgcaaatataacatttcctaagcagccatgatccactttacaggaatttctccagtaactaacagctcattcatttgttcacctgaactcatcttygttgagcacctattatgtgccaggtaccatgccaggatatgggttccagggtgaatctgatcaagtgcttctgctctaatagagaatatgggttagcaag

SEQ ID NO: 40875 - DNA, 201 bp, Homo sapiens
agccgagatcatacctctgcactccagcctgggtgacagagcgagactccgtctcaagaataaataaataaataaataaataaataaataaataaataaawaaaataaactgtcccgtttgttctatttccccagcaagaggaaaacttgggcaacttgatccatgagaccgaatccttcttcaagacgagagacaaggag

SEQ ID NO: 40876 - DNA, 201 bp, Homo sapiens; identical to SEQ ID NO: 3285

SEQ ID NO: 40877 - DNA, 201 bp, Homo sapiens
cagtctcctgcccctccagggcttggttcaccagcccacactgtacccattgtcccgcttcctgccccttcctctgggtgccagaactgggcatcatcccyacggttggggaaccctggccaggttatggggagaagtgggggagctggcctgagctctggtagaggggcctcagagttcagaagaggagctgttggcctt

SEQ ID NO: 40878 - DNA, 201 bp, Homo sapiens
gcttgaacccgcaaggtggaggttgcagtgagccaagatcttgccactgcactccagcctaggcgacagaatgagactccatctcaaaaaaaaaaaaaaaagaaataatataaaataaaacatcaggacttatctgacttggagactgatggcctgaactcagcaagctactgctggcagagccagaattaacctgatgcc

SEQ ID NO: 40879 - DNA, 201 bp, Homo sapiens; identical to SEQ ID NO: 25873

SEQ ID NO: 40880 - DNA, 201 bp, Homo sapiens; identical to SEQ ID NO: 25876

SEQ ID NO: 40881 - DNA, 201 bp, Homo sapiens; identical to SEQ ID NO: 25875

SEQ ID NO: 40882 - DNA, 201 bp, Homo sapiens
aggagtgggcgcctctgtgttgatagagctaaattgggttcagtatggaattcgatttagctggttgtaaagttacctaagttaaaacaaacaggccgggygcggtggctcacgcctgtaatcccagcactttgggaggccgaggcaggcggatcacgaggtcaggagatcgagaccatcctggctaacacagtgaaacgc

SEQ ID NO: 40883 - DNA, 201 bp, Homo sapiens
agggttttaccacgttggccaggctggtctcgaactcctgacctccagtgatctgcctacctctgcctcccaaagtgctgggattactggcatgagctacmattcctagcctgtgggccgttcttgagcagaccttaaccagacccacctgcactagtttcccttggtgggctggctgtgttgaccgcacggcttgcagaa

SEQ ID NO: 40884 - DNA, 201 bp, Homo sapiens; identical to SEQ ID NO: 25880

SEQ ID NO: 40885 - DNA, 201 bp, Homo sapiens
agaggtaaagtcgctttagcagatcaccagctgcggagcggctgagttggacgcccatcccagctctgcctgacgtcaaagtgttttgggataagggacagggggtggctgcaagtggcctcccactttgccccaagccggcttcttctcgccatgctggcctggaccatctcctttttggctttttgctgagtccgggct

SEQ ID NO: 40886 - DNA, 201 bp, Homo sapiens
gaagggagaggtgaggtggaggggctgggttgtgtggtcttcagagcctggccactcagtgccatctgtagcccagcatcactggggagctgtctgccccmgccctcgcctgcggaaccagcttctgcatgttaataagatgcccaggtgattggtatgcacattctaggctgagacacgctgctttagagactggactag

SEQ ID NO: 40887 - DNA, 201 bp, Homo sapiens
gagaggtaaagtcgctttagcagatcaccagctgcggagcggctgagttggacgcccatcccagctctgcctgacgtcaaagtgttttgggataagggacagggggtggctgcaagtggcctcccactttgccccaagccggcttcttctcgccatgctggcctggaccatctcctttttggctttttgctgagtccgggc

SEQ ID NO: 40888 - DNA, 201 bp, Homo sapiens
tcactggggagctgtctgccccagccctcgcctgcggaaccagcttctgcatgttaataagatgcccaggtgattggtatgcacattctaggctgagacaygctgctttagagactggactagctttgagtcccagctccctgcttgctagctctgtgaccttagacaagttactttacctctttgaacctcagctccctc

SEQ ID NO: 40889 - DNA, 201 bp, Homo sapiens
attggtaatatcatccagtcccagggaactgctcccaccccttcctgcagttaagggcgggggtccactgaaccctcctttgccttctcccctcccgcccrcgtttcctattcagcttcgggcagtactcgtgtcaaagtagtggtgtggaagcccttggaacaacagggcttggcacatagtaaacgctaaatcagtggg

SEQ ID NO: 40890 - DNA, 201 bp, Homo sapiens
gagcaggacggggaggtgaaccggttctcggacgatgaggtcggctccatgaacatcaccgatgagatgaagcgcatgtttaaccagctgtgagtatcccsgtggcccgcacactctccgtttccccggattgcttgcacaggggcggtgaatgggaggcttgggctgagagtagcctgcagcactggaagaatttgaatt

SEQ ID NO: 40891 - DNA, 201 bp, Homo sapiens
ctggccccaggtcagatagtcctatagtcttatttccagatgaagaactgagtacagaaaaggaaaaattaaaactattgaaatttaaaaagagatcattwataaagaggaacaaactactgatacatgctaccacatggatgagcctcaaagacattgtgctcaatgaaagtggccagacacaagagatcacatattgta

SEQ ID NO: 40892 - DNA, 201 bp, Homo sapiens
ccagatctcggctcactgcaacctctgcctcccgggttccagtgtttctcctgcctcagcctcccaagtagctggaatcacaggcatgcaccatgatgccyggctaatttttgcatgtttagtagaggcagggttttaccacgttggccaggctggtctcgaactcctgacctccagtgatctgcctacctctgcctccca

SEQ ID NO: 40893 - DNA, 201 bp, Homo sapiens
ctcgaactcctgggctcaagcgatcctcccacttcggcctcccaaagtcctgggattataggtgtgagccactgcaccaggtcagatattcttttttttakaccaggtctcactctcacccaggctggcctggagtgtagtggtgcaatcttggcctctgggggttcaagtgattcttgtgcctcagcctcctgagtagct

SEQ ID NO: 40894 - DNA, 201 bp, Homo sapiens
caggctgcctcccacgctagtacgctgtcagtaggaaacactgcttggggtggtggcagggtctgggctgggtatgatcagtggtgggcgagcctgctggygccagctcttagaagctgctatacccactccaggctcagtgatgtcatattagtaccttaaaatttgccattgcaggaaatcagcaaatgctaccaatca

SEQ ID NO: 40895 - DNA, 201 bp, Homo sapiens
gctctccacccctccctcccctctggcctatttttagctggccctgacagcatcctaaaagggttccagactgccctgctccgaggccatgtagggagggwagcagtggggtgaggaaggagagaaactcctctgtctgtcccaggatggacagacatccgaggagggaaagaacctgcccccagcttcctccagggaggg

SEQ ID NO: 40896 - DNA, 201 bp, Homo sapiens
ctcacagccactccctatcctctgtaccatcatgttttactgttctctttaattccaccatgaagagacttgataggaatgttctggaaactgcagcctargggtggggacgggggatgcgaggagtggggagcagtttattctccctggcagcaggactgaactttggtgccagagggccactgggtgtgagactgtggg

SEQ ID NO: 40897 - DNA, 201 bp, Homo sapiens
tacccactccaggctcagtgatgtcatattagtaccttaaaatttgccattgcaggaaatcagcaaatgctaccaatcagagctctgggaggctctgccayctcccggaagccccccagagagggcatgctccttctagcagatgcctttgacatcatttgtttcaaaagcccagggcacgggctctcctaacctccctgc

SEQ ID NO: 40898 - DNA, 201 bp, Homo sapiens
gaaggcaaacccacccagaataattgttgagccaacaagcagcttaagccgctcataagccctgaggtgcctgtgaaggctgaggcccagcaatgagctgycactgccaaaaccagtaagagtcactgtttttgccaagctttttttttttttttttttcttagctgttgtcattgttttttgggaggagagatgggacat

SEQ ID NO: 40899 - DNA, 201 bp, Homo sapiens
tctggcctatttttagctggccctgacagcatcctaaaagggttccagactgccctgctccgaggccatgtagggagggtagcagtggggtgaggaaggaragaaactcctctgtctgtcccaggatggacagacatccgaggagggaaagaacctgcccccagcttcctccagggagggaggaactctgttggaggagct

SEQ ID NO: 40900 - DNA, 201 bp, Homo sapiens
aggctcagtgatgtcatattagtaccttaaaatttgccattgcaggaaatcagcaaatgctaccaatcagagctctgggaggctctgccacctcccggaasccccccagagagggcatgctccttctagcagatgcctttgacatcatttgtttcaaaagcccagggcacgggctctcctaacctccctgcagagctctga

SEQ ID NO: 40901 - DNA, 201 bp, Homo sapiens
gtgctaggtgcagtgatgacttctttaaatatgtgataattatgggagcagtcccaagcagtgggaagtgattatgctcattttacaaatgagaggttcaragaggtgaagacttctgtcccagatctcgccacgagtccgtctgggtctctggaccccaaggtcagtgctcctcccaggaggtggccttgtcccatgccc

SEQ ID NO: 40902 - DNA, 201 bp, Homo sapiens
cacttgagcctgctctcctgatccatccatgagccctacaaggtgggattgctatccccgttttacagaagtggagactgaggctcctagcttgaggtagrcaggccctcaggggatcacacagaggcagatgactttctcagctcacctgcccttccttctgcagaattgcctacaacctttgactctctaaggcctgcg

SEQ ID NO: 40903 - DNA, 201 bp, Homo sapiens
aggatccaggaaggagttgagggagggcaggcaatggggagagccctgggatggcagcctggagacagggtccacattgtcctgtgctaccgatgcactgrgtcaagtgatttcactcctacagactcagccttccccttggaaataggggtatgttggatgagctgatctttaggtctcctccagttggggtaaccaagg

SEQ ID NO: 40904 - DNA, 201 bp, Homo sapiens
cagggggcggagcctgcagtgagccgagatcgcaccactgcactccagcctgggcgacagcgagactccgtctcaaacaaacaaacaaacaaacaaaaaaacaacaacaacaacaaacaacgaaacctctgatcactttgatcaccccccacccccattctgcagttctgtgtgggccgccctgaccccaccccaggcggg

SEQ ID NO: 40905 - DNA, 201 bp, Homo sapiens; identical to SEQ ID NO: 25903

SEQ ID NO: 40906 - DNA, 201 bp, Homo sapiens
ttttttttttttttttttgagatggagccttgttctgttgcccaggctggagtgtggtggtgcgatctcagctcactgcagcttccacctcctgggttcargcaattctcctgcctcagtctccgaagtagctgagactacaggcacacaccaccacacccagctaatttttttttgtatttttttagtagagactgggtt

SEQ ID NO: 40907 - DNA, 201 bp, Homo sapiens
tgccccctcttagctttctctgtgccctccagccctggaaggaatcccagccccttgccctccaggtccgggcccgggagcccacgcagatctcagcctarcagctaatgctggggctgggaaaggctggagaaaagggggagagggagagagtgtgtgtcctccaggagccctggctgggctgtctcctgtgggagagag

SEQ ID NO: 40908 - DNA, 201 bp, Homo sapiens
gccccatgggcaaaggctccagtgtgtagaaagagcattcagatccaagtcaggcgagactggctgcaggagtgggcgcctctgtgttgatagagctaaaktgggttcagtatggaattcgatttagctggttgtaaagttacctaagttaaaacaaacaggccgggcgcggtggctcacgcctgtaatcccagcactttg

SEQ ID NO: 40909 - DNA, 201 bp, Homo sapiens
gacatcatttgtttcaaaagcccagggcacgggctctcctaacctccctgcagagctctgaggctggctcagaattccatagtccagagctcactctgccyagccacttcattgtacaaatgagagaatggactcagaggggcacacagagccaggcccccaactcttggtccagtgctttgtcccccacgccatgcctgg

SEQ ID NO: 40910 - DNA, 201 bp, Homo sapiens
gaatggactcagaggggcacacagagccaggcccccaactcttggtccagtgctttgtcccccacgccatgcctggaagagaattctctcttctgtccctmttctaggctgacttttaaggtagacaggaggcagaggcagggttggaactgggtggggacaggaactcttttgcctgatacttcctggacctgccattcc

SEQ ID NO: 40911 - DNA, 201 bp, Homo sapiens
taagttaaaacaaacaggccgggcgcggtggctcacgcctgtaatcccagcactttgggaggccgaggcaggcggatcacgaggtcaggagatcgagaccrtcctggctaacacagtgaaacgctgtctctactaaaaatacaaaaaattagccgggcgtggtggcgggcgcctgtagtcccagctacgcaggaggctgag

SEQ ID NO: 40912 - DNA, 201 bp, Homo sapiens
aacctctgatcactttgatcaccccccacccccattctgcagttctgtgtgggccgccctgaccccaccccaggcggggccctgggcctttcccatggacrtctccaccagctgtgggcaggaccctagccaggctgcccctggccagatctgatgaagtgtttgaataatgcagccgtgttacagttgtgttttgttttg

SEQ ID NO: 40913 - DNA, 201 bp, Homo sapiens
gagtcaagtgatttcactcctacagactcagccttccccttggaaataggggtatgttggatgagctgatctttaggtctcctccagttggggtaaccaakgcatcttgggaaccccttagtcccaggcaaacctgcctggttggtcaacctacttctagttctagccaatagggaggtcttgacatctcccaggctttga

SEQ ID NO: 40914 - DNA, 201 bp, Homo sapiens; identical to SEQ ID NO: 25912

SEQ ID NO: 40915 - DNA, 201 bp, Homo sapiens; identical to SEQ ID NO: 25913

SEQ ID NO: 40916 - DNA, 201 bp, Homo sapiens; identical to SEQ ID NO: 25914

SEQ ID NO: 40917 - DNA, 201 bp, Homo sapiens; identical to SEQ ID NO: 25915

SEQ ID NO: 40918 - DNA, 201 bp, Homo sapiens; identical to SEQ ID NO: 25916

SEQ ID NO: 40919 - DNA, 201 bp, Homo sapiens; identical to SEQ ID NO: 25917

SEQ ID NO: 40920 - DNA, 201 bp, Homo sapiens; identical to SEQ ID NO: 25918

SEQ ID NO: 40921 - DNA, 201 bp, Homo sapiens
gtgaaccaccacgcccggcctgattttatattaatataaacaaagattcatctcccagctctgccactttgtgaaggttaaggtgtcacttagcctctccragtcacggtaaaatggaacaatggcacctgccctcacagagctgctgtgaaggtaatagatcatttgctgctaggacctggcacatgcagccttgcccaa

SEQ ID NO: 40922 - DNA, 201 bp, Homo sapiens
accacgcccggcctgattttatattaatataaacaaagattcatctcccagctctgccactttgtgaaggttaaggtgtcacttagcctctccgagtcacrgtaaaatggaacaatggcacctgccctcacagagctgctgtgaaggtaatagatcatttgctgctaggacctggcacatgcagccttgcccaaatggtgg

SEQ ID NO: 40923 - DNA, 201 bp, Homo sapiens; identical to SEQ ID NO: 7283

SEQ ID NO: 40924 - DNA, 201 bp, Homo sapiens
ctacgaaaataggggttgccacagattagatactgtcaggaaggagggacagccctgcaactgggcagctcaagaaatctgatctgtagggaggagagacragtgtgcagagagcagtaattgataaagaagtagcagtcactcatttcagccaagaggggtgttcggtattttctggatggcacagagacattgcttttg

SEQ ID NO: 40925 - DNA, 201 bp, Homo sapiens
tactgtcaggaaggagggacagccctgcaactgggcagctcaagaaatctgatctgtagggaggagagacgagtgtgcagagagcagtaattgataaagargtagcagtcactcatttcagccaagaggggtgttcggtattttctggatggcacagagacattgcttttgtttgtgcttgcctcattttatcatagtctc

SEQ ID NO: 40926 - DNA, 201 bp, Homo sapiens
tgactcagggtgacagtctccatccctgctgaccccgggtgacggtctccatccctgctgaccccgggtgacggtctccatccctgctgacccctggtgayggtctccatccctgctgacccctggtgacggtcctcatccctggtgacccctggtgacagtcttcatcggattcggtttcagggtttaagttctcccgcg

SEQ ID NO: 40927 - DNA, 201 bp, Homo sapiens
acacctctactcatcagctctgtgagcctgaggcaagctgttaacctcattgggcctcagtcttctcatctgtaaaatgggagaatcatagtacctacctmttggctggtgggaaaaattaaacaagacaatgtactcactgcttctggcacataatagctgccaagtgagctttttgaaaagtccgacttttgcatggca

SEQ ID NO: 40928 - DNA, 201 bp, Homo sapiens
acccaagaaaatatcctggaaggagaagaacatttgctgaagaacaggggaggggaagaaacccagccagagcaggaaaggctgtaactctcctgtgctgrtgactgtggccctgcctctgcagaacatattccactgcgccatgtccctggaccagctctacttcgcccgccccgtgcccctgcattctggctaccgctg

SEQ ID NO: 40929 - DNA, 201 bp, Homo sapiens
cctgctgaccccgggtgacggtctccatccctgctgaccccgggtgacggtctccatccctgctgacccctggtgacggtctccatccctgctgacccctrgtgacggtcctcatccctggtgacccctggtgacagtcttcatcggattcggtttcagggtttaagttctcccgcgcgtcctacctgctcagcctgctga

SEQ ID NO: 40930 - DNA, 201 bp, Homo sapiens
acagagtgtccagagctgcggcgagcctgcccgcctggagcatctccagtgtggagcaactccagcggtaattgttggaaaagcctgtttttggtttcctygtgcttttctaaaacgtctactctccgatctcatttctctcctctggggccataccttgtctgcaacctagcattcatttattcagagtcgacggaatgc

SEQ ID NO: 40931 - DNA, 201 bp, Homo sapiens
aacacctctactcatcagctctgtgagcctgaggcaagctgttaacctcattgggcctcagtcttctcatctgtaaaatgggagaatcatagtacctaccycttggctggtgggaaaaattaaacaagacaatgtactcactgcttctggcacataatagctgccaagtgagctttttgaaaagtccgacttttgcatggc

SEQ ID NO: 40932 - DNA, 201 bp, Homo sapiens
agctctgtgagcctgaggcaagctgttaacctcattgggcctcagtcttctcatctgtaaaatgggagaatcatagtacctacctcttggctggtgggaaraattaaacaagacaatgtactcactgcttctggcacataatagctgccaagtgagctttttgaaaagtccgacttttgcatggcaccattcctgtggtca

SEQ ID NO: 40933 - DNA, 201 bp, Homo sapiens
tcctcttaggtccctgatttggagggtttattcgttcattcagtccatgtttctgagcacctgctatgtgccaggcactgagagaagcccttgggtgtacrgcagtgaactaggaaggcaaggacactgctcttaggcagagaacttcagggagagtgccaagaagaaaagaaaagaaggcagcattagagaaagagagtg

SEQ ID NO: 40934 - DNA, 201 bp, Homo sapiens
ggtttgtgtcacatcggcaaacattccactggctgaccaaatcacatggatgagcccagagccaaggagccaggcaggttaaccaagttgtggtgggttgrgaggcactgcagacttatacattgcaaagagtatggagccagtggaatctattacaaatgcaaaaagtagacactgcctctctctcagataaccagtcca

SEQ ID NO: 40935 - DNA, 201 bp, Homo sapiens
ttctcttcggatccctgggaggcttaaccagtgctccgtttgtgatctttaagtaatctgttccatcattaattcttccaacaaatatggatgagcgcttrcctgtgctaggtgctggggatacggtagtgagcggagcagatgtcctgatgggtgagagacacagagcgagtgatgatgatgaagtggcgtgagtgtgat

SEQ ID NO: 40936 - DNA, 201 bp, Homo sapiens
ctacatggaagaggtgtttgatctgagacccaaaggacaaagaggagttaacaaaacataagatgagggagggaggggcttcaggccgacagaacagcagrggaaatgctggggttgagagaacgtgtgatccacccaggaaatcgagaggttctgttagttaggaggatgggatatggatagggggacaggatgagggat

SEQ ID NO: 40937 - DNA, 201 bp, Homo sapiens
gtggcaggcaaaggtggtggggtgggaagcaggtcacagctctgctggggctcggggcagccctagcagctctgtcttccattggtctgctctggaaaagrcagtcaggccactaaagcctggctgaaatctggctgcttgggcgcctgctgtcttaggcctggcccctttccacactcccactgtctgtgtggaccttcg

SEQ ID NO: 40938 - DNA, 201 bp, Homo sapiens; identical to SEQ ID NO: 7277

SEQ ID NO: 40939 - DNA, 201 bp, Homo sapiens
ccttcaggaggcctggggatgcatcctggtggaggcatctcaccacattccaatgtggggttgtgagagacccatgtccctaaattccccatccgtatatrtatttagacagggcttcacgctatcgcctaggctggaggtgcagtggtatgatcacagctcactgcagcctcaacctcctgggctcaagtgatcctcctg

SEQ ID NO: 40940 - DNA, 201 bp, Homo sapiens
ttacgcctccttctaggttatagttcactaggaacagagaaacctttaggttgagcttaaagtatttaaggaggcagctttaagctaaatttgatttaacrccattaagaatgacagagcctccatttagaagagcctccatttaggtttcattatgaatcaaatgaaaagtgattcatagtcaattagttatacttaaaa

SEQ ID NO: 40941 - DNA, 201 bp, Homo sapiens
gtactcactgcttctggcacataatagctgccaagtgagctttttgaaaagtccgacttttgcatggcaccattcctgtggtcacagggccagcattttakatcggtagattcatgaccagtttggttcaacaaatatttattgatttttccactaagtgctagaaaaaaattaatagaaatccttgcatcatttgttctc

SEQ ID NO: 40942 - DNA, 201 bp, Homo sapiens
cctgggctcaagtgatcctcctgcctcggcctctggagtaggtgggactacaggtgtgtgccaccatgcctggctaattttttattcttttgtggagatgrgttttgttaggttgcccgggctggtctcgaactcccgcgctgaagtgatcctctccactcagcttcccaaagtgctgggattagaggcctccatccatat

SEQ ID NO: 40943 - DNA, 201 bp, Homo sapiens
caggaagttcactgctaggatttgtgactttacaaaggtcagcccacctgctggctggtgaggactcggaggaaacaggagggggtcgcatgtggagcackaggccgccgctgcagcggttcccaaaatggcggcttggagagacgcgcacagattctggaggcagcggatgggatgtcaaggatgaccaggagagagact

SEQ ID NO: 40944 - DNA, 201 bp, Homo sapiens
aatcagacttcttttgaagaatgagctttttcaccctcaggcccacgtgggacacctatctgaagccttgggcgcctgagcttacagctgccttgggacawgagcccgatttctgccctcattgaacttgagagctgcttccctctcttggcagctggagcaggaagtggggcctggggacttttctggctcccgggcttt

SEQ ID NO: 40945 - DNA, 201 bp, Homo sapiens; identical to SEQ ID NO: 25925

SEQ ID NO: 40946 - DNA, 201 bp, Homo sapiens
gtgcatctttctaacatatgttcaatttgcaaggcaggtgacaattaccaagttattctgtgggaccttcgtaatactcctgccctgatgtctggaatgargggaaaagagacctgctgagcacaggatgtcattctgtgagcgagtggagacacatgaaatgagaaaaaggaatgcaaaatgcaaagcaaggagaaacgc

SEQ ID NO: 40947 - DNA, 201 bp, Homo sapiens
tcctgtaggctccattcatcatgagggctctatacagtatcatttttcttaccttttatgccatattcttaatgtaccttttctatgtttgtttttttttktttttttttttttgagacagagtcttgctttgtcacccaggctggagtgcagtggcggcaatcttgcctcactgcaacctctgccttccaggttcgagca

SEQ ID NO: 40948 - DNA, 201 bp, Homo sapiens
gccccccaccctttcaccttccttcacccccactgtcttataaaccgcgtcaccacattcttgaggctgattggcttctacctgcttagtgccactgtcaytcaccactcagagaaaagggttcttggtgctatctgcagctgccactcacgttggtgccatctttttttttttttttttttttgggacggagtctggctc

SEQ ID NO: 40949 - DNA, 201 bp, Homo sapiens
aatttgcatatgataaaataagcccatttctgtgtgtaatttaatgactgttagtaaatttgccaagttgtacacccatagtgcctcctcttcttcctaayaccatctcatttctctgtttttggcaccccagtgtttgattgcatcgaggtctatgcccctggcttcaaggactctgtggttggcagagacatcctcaca

SEQ ID NO: 40950 - DNA, 201 bp, Homo sapiens
gctctatacagtatcatttttcttaccttttatgccatattcttaatgtaccttttctatgtttgtttttttttgtttttttttttttgagacagagtctygctttgtcacccaggctggagtgcagtggcggcaatcttgcctcactgcaacctctgccttccaggttcgagcaattctcctgcctcagccttccgagta

SEQ ID NO: 40951 - DNA, 201 bp, Homo sapiens
cgcgatctcagctcactgcaagctcctcctcccgggttcatgccattctcctgcctcagcctcctgagtagctgggactataggcgctaccaccacgccakgcaaattttttgtgtttttagtagagaagggctttcaccgtgttagccgggatggtcttgatctcctgatctcgtgatccacctgcctcagcctctcaaa

SEQ ID NO: 40952 - DNA, 201 bp, Homo sapiens
cctctgccttccaggttcgagcaattctcctgcctcagccttccgagtagttgggactacaggtgcgtgccaccatgcccggctaatttttgtattcttastagagacggggtttcaccatattggccaggctggtctcgaactcctgacctcgctgatctgcccgccttggactcccaaagtgctgggattacagtcacg

SEQ ID NO: 40953 - DNA, 201 bp, Homo sapiens
cctcccctccttgagccaaagcaccctccactgacccgctgtggtccccaccagggcctgcctccccttcctgggtgttagtttccacagctgtcaatgcragcactgacttggatcacctcccggttccatccacctagtaaatgagtttgcttttgcagcggccctgcgctggatgatggaatccaggctggaagggca

SEQ ID NO: 40954 - DNA, 201 bp, Homo sapiens
actagagacggggtttcaccatattggccaggctggtctcgaactcctgacctcgctgatctgcccgccttggactcccaaagtgctgggattacagtcaygagccactgtgcccagcctagacatgtttagatacccaaataccattggattacagttgcctccagtattcagtgcagtaacattctgtgcaggtttgca

SEQ ID NO: 40955 - DNA, 201 bp, Homo sapiens
aatttgcagggccacaaagtatgacctgggaaactgctggggaaactgctggggaaaccccaggggttcttgctcacgagtctgattctgtggcagtggtrgggcccagaaacggtcgtttttatggcattctcaggtcattctgaaagaggaggcccccagaacataactttgagaaccacaccctttaaatctcttgta

SEQ ID NO: 40956 - DNA, 201 bp, Homo sapiens
acttagagaaccacagacacacagcctacatgtctcttccaccagcagttttcaaacctggctgatgatcagaatcacctgaggagcttagccttttattwtgttattttattttatttgtttttgagacagggtctcactctgttgcccaggctagagtgcagtggtgcgatcttggctcactgtaacctctgcctcccg

SEQ ID NO: 40957 - DNA, 201 bp, Homo sapiens
cctccatactcagctttcatcaggaagggaggacagtggcagggaccccggctgagagagggcagagaagcggtcaaaccgagggaatgggggatccctastgggggctcagaaacacaggcaggacagcccccactgagaaggtcaccaggattgtggccctctgccttgacaactatgctggctctgccatctgacttt

SEQ ID NO: 40958 - DNA, 201 bp, Homo sapiens
tgttgcccaggctggtctggaactcttgagctcaagcaatcctcccacctccacctcccaaggtgctaggattacaggcatgaaccaccacacccggcctraggagcttagcttttttaaaagtgcttctttggtggttcttttgtgcagcagattggagaccaccacctgcatcctctcgtccaaatcctacccatctca

SEQ ID NO: 40959 - DNA, 201 bp, Homo sapiens
gagaaggtcaccaggattgtggccctctgccttgacaactatgctggctctgccatctgactttcttgagagagagcacccccttctcaaggcagcagcayatcctcagacttgtcaatttatcaaaaactagagattggagacagggagaccagataggaggccaggttcaatcgcctcattgcagctactgagcacttg

SEQ ID NO: 40960 - DNA, 201 bp, Homo sapiens
cttttgtgcagcagattggagaccaccacctgcatcctctcgtccaaatcctacccatctcagaggcacttgaggggattctgcacaaggccaggtccccrggcctgcaggacactagctgtggccctacatgccagcgaccacacacgctggaggcaagtgcccatttcccatcgtggaaagtgaggagcttgatttctg

SEQ ID NO: 40961 - DNA, 201 bp, Homo sapiens
ccagagcaggaaaggctgtaactctcctgtgctgatgactgtggccctgcctctgcagaacatattccactgcgccatgtccctggaccagctctacttcrcccgccccgtgcccctgcattctggctaccgctgccctctccagggcctgtatctctgtggaagtggggctcatcctggtgagtgacctggagtcccact

SEQ ID NO: 40962 - DNA, 201 bp, Homo sapiens
gttttttaagaaaaaagcttcataatccgaacaaatcttgtggatataatctgatggttatttaacattccccttctcattcagactccacataattaaamctattgttaaaagaaaaaccttcactaaattaaatttaatagagtttaattgggcaaagaatgattcataaatgaatcaggctcccgagctggagtatgc

SEQ ID NO: 40963 - DNA, 201 bp, Homo sapiens
ctctactaaaaatacaaaaattagccgggcgtggtggcaggtgcctataatcccagctactcaggaggctgaggcaggagaatcacttgaacctgggaggsagaggttgcagtgagccgacatcgcaccactgccctccagcctgggtcacagagcaagactccatctcaaaaaaaaaaaaaaaaaaaaaagaagaaagga

SEQ ID NO: 40964 - DNA, 201 bp, Homo sapiens
agaaacagctggattggttacagctcagtgtttgccttatttgaacgcagtttaaacagttggtcccctttgattggccaaaactcggcgattgacacagragtaggttacagtctgtttacgcctccttctaggttatagttcactaggaacagagaaacctttaggttgagcttaaagtatttaaggaggcagctttaa

SEQ ID NO: 40965 - DNA, 201 bp, Homo sapiens
acttttcacatcagtggcacaagcacagagggcatgccccaatgtacaggcctgtttcagttctgggtttgtgtcacatcggcaaacattccactggctgrccaaatcacatggatgagcccagagccaaggagccaggcaggttaaccaagttgtggtgggttgagaggcactgcagacttatacattgcaaagagtatg

SEQ ID NO: 40966 - DNA, 201 bp, Homo sapiens; identical to SEQ ID NO: 25935

SEQ ID NO: 40967 - DNA, 201 bp, Homo sapiens; identical to SEQ ID NO: 25934

SEQ ID NO: 40968 - DNA, 201 bp, Homo sapiens
aattaccaagttattctgtgggaccttcgtaatactcctgccctgatgtctggaatgaggggaaaagagacctgctgagcacaggatgtcattctgtgagsgagtggagacacatgaaatgagaaaaaggaatgcaaaatgcaaagcaaggagaaacgcaaatggacagcaaacctgaaaaaaatatttaaactcacaagg

SEQ ID NO: 40969 - DNA, 201 bp, Homo sapiens; identical to SEQ ID NO: 25939

SEQ ID NO: 40970 - DNA, 201 bp, Homo sapiens
agctgctcaggaggctgaggcaggagaatcgtttgaacccagaggcggaggttgcagtgagctgagattgcgccactgcactccagcctgggtgacagagygagactccgtctcaaaaaaaaaaaaaaaaaaaaaaaaaacagcttgagaaaagtgaagaggtgaaaaaagctgcatatgcaaaaggagatcagcagcttc

SEQ ID NO: 40971 - DNA, 201 bp, Homo sapiens
tgtcaggaaggagggacagccctgcaactgggcagctcaagaaatctgatctgtagggaggagagacgagtgtgcagagagcagtaattgataaagaagtvgcagtcactcatttcagccaagaggggtgttcggtattttctggatggcacagagacattgcttttgtttgtgcttgcctcattttatcatagtctcata

SEQ ID NO: 40972 - DNA, 201 bp, Homo sapiens
ctgatggcttagtcatctatgacagggccacgatgcagtgtgaagcagctgtacctaagaacagtctgagcagtggaggaggggtcacccaggatttgggrtaaattgcgggtggtgaattctaaggatgactccatcaggagcttccattccaggctgagtttgtgttggctttatttttaaattgtcaacctcttgttt

SEQ ID NO: 40973 - DNA, 201 bp, Homo sapiens; identical to SEQ ID NO: 25940

SEQ ID NO: 40974 - DNA, 201 bp, Homo sapiens
aagccaaggcctgactgtctcctactccttgttcttgagctatgatgcgctcaggcctcttggtaccaataccgcccagactcacacgtctctggctcttkgtactttgcggtgaacgtggtgatagagtgcccctggcagctccagcgcagtgtgcacagaggctgagactggagctgctggaaaccggccggctgcgtc

SEQ ID NO: 40975 - DNA, 201 bp, Homo sapiens; identical to SEQ ID NO: 25941

SEQ ID NO: 40976 - DNA, 201 bp, Homo sapiens
ctgggtgtggacttttcacatcagtggcacaagcacagagggcatgccccaatgtacaggcctgtttcagttctgggtttgtgtcacatcggcaaacattscactggctgaccaaatcacatggatgagcccagagccaaggagccaggcaggttaaccaagttgtggtgggttgagaggcactgcagacttatacattgc

SEQ ID NO: 40977 - DNA, 201 bp, Homo sapiens
ctgtggaacctggatctgggaagctttagtggcagcacctgtttttggctggaggtgtttgtaacaccttgtaggtattgtcccctggggcagcatggacmcctctacctgctttgagactgtggatgacctgcatctcatcaaggaccgaggcagatggggacctgggcctggatttctactacagaagccagagactca

SEQ ID NO: 40978 - DNA, 201 bp, Homo sapiens
gccccaatgtacaggcctgtttcagttctgggtttgtgtcacatcggcaaacattccactggctgaccaaatcacatggatgagcccagagccaaggagcmaggcaggttaaccaagttgtggtgggttgagaggcactgcagacttatacattgcaaagagtatggagccagtggaatctattacaaatgcaaaaagtag

SEQ ID NO: 40979 - DNA, 201 bp, Homo sapiens
cagacactaagctaggcccaggggctgtaaggctagagaccatgatttctaccctgaaggccttaaagcctagtttctttctgaaatggtctgaatcaggktcataggaatggatcagccatgccagccttctcccaggatatgggccttccagagttcgaaataagggaataaggtacaagtttaaaattttccaaaaat

SEQ ID NO: 40980 - DNA, 201 bp, Homo sapiens
acagtgacttaggatctgccaaaatccatactcctaaggacaggaagtgcatcccaggtgaaaaatctgaggatgagggcaggtaaggggtgaagagcggstcaggttagcagaaggggcagaggggcagagcactgcccaggaaagtgctggggctggggaagaagaggagaaaatgtgttctgggagagcaaaggaagt

SEQ ID NO: 40981 - DNA, 201 bp, Homo sapiens
tgcagacagaggtaaagacagctgcacgttctgcctccagagccacagccgggcatgcgacccaactgggcctgctcctcctcactgccccattcaggatygacaactgcaggtgccattccaaagggaggaaatagtcaagggaacctcaagtcaacatagttgactgcaggggtcaggaactgggctaagaaagtcaag

SEQ ID NO: 40982 - DNA, 201 bp, Homo sapiens
aggctagagaccatgatttctaccctgaaggccttaaagcctagtttctttctgaaatggtctgaatcagggtcataggaatggatcagccatgccagccwtctcccaggatatgggccttccagagttcgaaataagggaataaggtacaagtttaaaattttccaaaaataatgctaactgcttaaatgtattaagtac

SEQ ID NO: 40983 - DNA, 201 bp, Homo sapiens
tacttacaaagttattgtgaggtaaccattgtaaaccctagtacagtccctggcatggaatgagtgtgtcatgctgtgatgtggtatgacatggcatggcrtagtgtggtgtgatatggcatggtatggtatcacatggtgtggtagggtgtggtatgacatggtgtgtgtggtgtgatgtgatgtagtgtggtatggtat

SEQ ID NO: 40984 - DNA, 201 bp, Homo sapiens
actaaagcctggctgaaatctggctgcttgggcgcctgctgtcttaggcctggcccctttccacactcccactgtctgtgtggaccttcgagacatttgcrtttgggagctgtggttagagcacagcgtgtgatgaaggcaggcaaggacaggccatgcattcgggggtctggggtcaggcgagctcctcacaggtgctct

SEQ ID NO: 40985 - DNA, 201 bp, Homo sapiens
gccttctccttccaggagtggcttcctgaggagttcctggagagaatctctcagctggacacccggtcgcctgtcaccaagatcaatggtaagaggcacascacattgcagcactgtctcctttgacccatctgagtgagaaacctccaggctgggggcagctgaactcagtcatcatctccattcccggacctccagcct

SEQ ID NO: 40986 - DNA, 201 bp, Homo sapiens
tcactgaggagatcatcccaggtgagctctgatgtggcatgggggagtggagggcagtgactcagggtgacagtctccatccctgctgaccccgggtgacrgtctccatccctgctgaccccgggtgacggtctccatccctgctgacccctggtgacggtctccatccctgctgacccctggtgacggtcctcatccctg

SEQ ID NO: 40987 - DNA, 201 bp, Homo sapiens
gtcccaggcactgcagctagtgagaggtgtggccaggactcaagctggatctgtccctgcattggctgtgctataccacctcctggcaggaagtctcagcmtcctccatgcttttatcccccaggccaggtcggagggtttccctgtcacctgtttcaacttctgttttgtggatcttctcttgtaggccgcatcctggga

SEQ ID NO: 40988 - DNA, 201 bp, Homo sapiens
caggatgaacacatgtcggatggagaatgcacttttttcccttggaactgcattctaggaacctgctgggtggccttgtctagatgagccactgagttccrtaagggccctgccacagttggttctgtggatatagaaagattatttgaatggccattttgtaccaagcctggatattagctgagatgtagcattaaatca

SEQ ID NO: 40989 - DNA, 201 bp, Homo sapiens
gcgcggaggaggaagtggttagagctgagtgggaggggatctaggaaggcttcacaggggaggtggttttggctgagctttgaaggatgaagaggatttcyggagggagcgactgagggatcttcctgagcaaagaaagaaggcagcttccttggggccttggacatctgaggcctttcatggagccttctccttccagga

SEQ ID NO: 40990 - DNA, 201 bp, Homo sapiens
caacagctgccacttaacagagctcacccagtgagccaggaaccgagccaggcacatcacacacgatccacttaaccctcagagcaacatctgagaactgyggttcagagaagggagtgtcttgcccaaagccactcagctggtaagtggcaaggctgatttccagcttgaggtgtctgactccccaaaatcttccttttt

SEQ ID NO: 40991 - DNA, 201 bp, Homo sapiens
gtctagatgagccactgagttccgtaagggccctgccacagttggttctgtggatatagaaagattatttgaatggccattttgtaccaagcctggatatwagctgagatgtagcattaaatcatatctcagtggagacatttttataagaagaacctaggttaatagaacccatgtacattgcttttgttgtgttaatct

SEQ ID NO: 40992 - DNA, 201 bp, Homo sapiens
gcttgaggtgtctgactccccaaaatcttcctttttagtgactgtgccctactgcttcactaagaaaagcctctctcccacctcccgcttgatagctcaamattaatatcttcttttctctcctcttcccttccctcttctacctctccactcccgcaaacgcccattctcccttctctctcactgttccttcccctgggc

SEQ ID NO: 40993 - DNA, 201 bp, Homo sapiens
gccctccagcctgggtcacagagcaagactccatctcaaaaaaaaaaaaaaaaaaaaaagaagaaaggacagaaggaagaaacttctaagtggtttcatgrtttatcgcagagaccacaccctaggattgttgccagttttctgtgggtgacacttcgtgttagccagcattagctccttgtccctgtcaccactcccagt

SEQ ID NO: 40994 - DNA, 201 bp, Homo sapiens
actgtgccctactgcttcactaagaaaagcctctctcccacctcccgcttgatagctcaaaattaatatcttcttttctctcctcttcccttccctcttcyacctctccactcccgcaaacgcccattctcccttctctctcactgttccttcccctgggctctggtacacactcacacagacacctcaggatggacagga

SEQ ID NO: 40995 - DNA, 201 bp, Homo sapiens
ctgaccaccaccaccccaccccatgcactcttcctggtgttgatgttaacccagagacctggaactgggggagctcaacagagccaagctgggccacagcrgggaatgaggcctgaggaaccgtcaagctgtgggggggtgacaggccatctggggacagcatggagggcagggatgtggacagtggggccttaatgcaga

SEQ ID NO: 40996 - DNA, 201 bp, Homo sapiens
cttcactaagaaaagcctctctcccacctcccgcttgatagctcaaaattaatatcttcttttctctcctcttcccttccctcttctacctctccactccygcaaacgcccattctcccttctctctcactgttccttcccctgggctctggtacacactcacacagacacctcaggatggacaggaagctgcctttttct

SEQ ID NO: 40997 - DNA, 201 bp, Homo sapiens
tgcaggcaccagggcatgatgagtgaccttcaaggaggtgagcccattgtctcgatgcctagacacaagcctgaacctccatggcagcctgccagctgggwtcagttaacatgctgcgatcaattaggggcagcctggagcactttgttgagagcatcttaggctgatatgcctttaaaatagagcctgagaccaaggctt

SEQ ID NO: 40998 - DNA, 201 bp, Homo sapiens
taagaaaagcctctctcccacctcccgcttgatagctcaaaattaatatcttcttttctctcctcttcccttccctcttctacctctccactcccgcaaaygcccattctcccttctctctcactgttccttcccctgggctctggtacacactcacacagacacctcaggatggacaggaagctgcctttttctttatga

SEQ ID NO: 40999 - DNA, 201 bp, Homo sapiens
gagcactttgttgagagcatcttaggctgatatgcctttaaaatagagcctgagaccaaggcttatgcgtgggtagttcatttggaagggtgaccccaagrcacaaaaatagcagaaagttggggtgaaagtggacagagaaagagtcaataccagagtgtgtgatcgcactagccagcactgtgggtgacaagatgctgg

SEQ ID NO: 41000 - DNA, 201 bp, Homo sapiens; identical to SEQ ID NO: 25955

SEQ ID NO: 41001 - DNA, 201 bp, Homo sapiens
aggctgattggcttctacctgcttagtgccactgtcactcaccactcagagaaaagggttcttggtgctatctgcagctgccactcacgttggtgccatctttttttttttttttttttttgggacggagtctggctctgtcgcccaggctggagtacggtggcgcgatctcagctcactgcaagctcctcctcccgggtt

SEQ ID NO: 41002 - DNA, 201 bp, Homo sapiens
agtcagagtgtgagagcactgcaaggttacacggaagtgggtgtgcaaacagggaggggtgagctttgggggcagtttttgcaattgacttaccctgtgcycaaaagatatgataacatgtatacgcacatgaagctcctagccattcttgggggcaattcttaggggcaaagcactactttttctgagtgattccattac

SEQ ID NO: 41003 - DNA, 201 bp, Homo sapiens
acggtctccatccctgctgacccctggtgacggtcctcatccctggtgacccctggtgacagtcttcatcggattcggtttcagggtttaagttctcccgygcgtcctacctgctcagcctgctgaggccgcagatttacactgatctggagctgaaggtagggcccccccgccggcccgattgcacggagggaggaggca

SEQ ID NO: 41004 - DNA, 201 bp, Homo sapiens
gagacccaaaggacaaagaggagttaacaaaacataagatgagggagggaggggcttcaggccgacagaacagcaggggaaatgctggggttgagagaacktgtgatccacccaggaaatcgagaggttctgttagttaggaggatgggatatggatagggggacaggatgagggatgaggctggagtgcctgctagaaga

SEQ ID NO: 41005 - DNA, 201 bp, Homo sapiens
gagaagctgaggcttcatggagaagctgcagaacttggtgggatgggtttgggatgaagaagttgtgaatgcctaggagcagcacagaccatggaaatccyggaagatctaacatggatttcccttcctgcggtttctggggccttgttctggtgggctctagacagtggcgaaggtgcaggtgaacagtgaaggctgtgt

SEQ ID NO: 41006 - DNA, 201 bp, Homo sapiens
attccggccattggcagagccagagctagaacccaggtctgactttcaatctagagttatttccacaactttcctactttcctgatttctcccctctcacygctctaattccattgtctttgtcaatgatctgttatattatccatgattattaattaatcaattaacaaagagccacaatacttctgggcatacaacaag

SEQ ID NO: 41007 - DNA, 201 bp, Homo sapiens
gaggcagctctgctccaggtacctctcgtcctccttgtagaagcacatgctgacctgggtgtggacttttcacatcagtggcacaagcacagagggcatgmcccaatgtacaggcctgtttcagttctgggtttgtgtcacatcggcaaacattccactggctgaccaaatcacatggatgagcccagagccaaggagcca

SEQ ID NO: 41008 - DNA, 201 bp, Homo sapiens
gtgggtcagcttgccggctgctgatcttggcgggactccttcatgtgcctgggagctggctggtggtggctggtccaggaccgtttctgctgggatgaccrggtgggggactcggctatgctccatgtgtctgtcctcctccagcacggtagtccaggcatgttctcaaggtctggcaaagggcaaaagcaggcaagctca

SEQ ID NO: 41009 - DNA, 201 bp, Homo sapiens
ggtgtgcaaacagggaggggtgagctttgggggcagtttttgcaattgacttaccctgtgctcaaaagatatgataacatgtatacgcacatgaagctccyagccattcttgggggcaattcttaggggcaaagcactactttttctgagtgattccattactaaaattcaacaaacatcagtaaaaagaaacttgttaag

SEQ ID NO: 41010 - DNA, 201 bp, Homo sapiens
ccccaatgtacaggcctgtttcagttctgggtttgtgtcacatcggcaaacattccactggctgaccaaatcacatggatgagcccagagccaaggagccrggcaggttaaccaagttgtggtgggttgagaggcactgcagacttatacattgcaaagagtatggagccagtggaatctattacaaatgcaaaaagtaga

SEQ ID NO: 41011 - DNA, 201 bp, Homo sapiens
gtgtgatgaaggcaggcaaggacaggccatgcattcgggggtctggggtcaggcgagctcctcacaggtgctctggaccacgctagcagccgctaagcccrtgcaggtggacaaccactgtggctgtagagcgacaatcgcccagaattggtgtcatctcagggcctccactgtgtcccaagtcatctcggatgccctacc

SEQ ID NO: 41012 - DNA, 201 bp, Homo sapiens
tgtggtgggttgagaggcactgcagacttatacattgcaaagagtatggagccagtggaatctattacaaatgcaaaaagtagacactgcctctctctcarataaccagtccaaggagctctgtgtgaaaaacaggcaaaaaacatttattgagcaactactatgtgtcagacactaagctaggcccaggggctgtaaggc

SEQ ID NO: 41013 - DNA, 201 bp, Homo sapiens
cacaggtgctctggaccacgctagcagccgctaagcccgtgcaggtggacaaccactgtggctgtagagcgacaatcgcccagaattggtgtcatctcagsgcctccactgtgtcccaagtcatctcggatgccctaccctccgcactgctgctctttagacctgccgtctcctccctgcccgcacaggcctgtgattgag

SEQ ID NO: 41014 - DNA, 201 bp, Homo sapiens
cagaacttggtgggatgggtttgggatgaagaagttgtgaatgcctaggagcagcacagaccatggaaatcccggaagatctaacatggatttcccttccygcggtttctggggccttgttctggtgggctctagacagtggcgaaggtgcaggtgaacagtgaaggctgtgttcaaggagttgtgctggaagatggcaca

SEQ ID NO: 41015 - DNA, 201 bp, Homo sapiens
tagggagtgggatgtgggtcaaaaaaaggagcgactgtgaaatgatgcctccatttactgaaaagaggaagaggcggtgggggtggagcagattttagagrctaatcaggcattggggtttgaacaggggatgtttgagatccctggtggacatccgagttcagcgagaacattgcagctgagggacgcagggagaagggg

SEQ ID NO: 41016 - DNA, 201 bp, Homo sapiens
caaatgcaaaaagtagacactgcctctctctcagataaccagtccaaggagctctgtgtgaaaaacaggcaaaaaacatttattgagcaactactatgtgycagacactaagctaggcccaggggctgtaaggctagagaccatgatttctaccctgaaggccttaaagcctagtttctttctgaaatggtctgaatcagg

SEQ ID NO: 41017 - DNA, 201 bp, Homo sapiens
ttgtgctggaagatggcacagaggtgagaagcaaaatggtgctgtccaacacatcaccgcagatcaccttcctgaagctgacgccacaggtgaggctgtgrgcaggagggtggagcttagatgtctgccaaaacaggggttagaaatcgtggggattgagggagccaggattgcatcagggtgtgagatgcaaaagccaag

SEQ ID NO: 41018 - DNA, 201 bp, Homo sapiens
ctcatgcctgtaattccagcacttcgggaggccgaggcaggcggatcacccgaggtcaggagttcaagaccagcctgaccaacatggtgaaaccccgtagytactaaaaacataaaaaaattagcagggtgtggtggcacatgcctgtaatcttagctgctcaggaggctgaggcaggagaatcgtttgaacccagaggcg

SEQ ID NO: 41019 - DNA, 201 bp, Homo sapiens
aatggaaggctgtgtgtgtgtgtgtgtgtgtgtgtgtgtgtgtgtgttgggatggagaatgcagccaagggttgggccgtttccagtgcaccagaagatasagctagaagctagaagctagaaggcgtcgacgtggcttttctctcaagggatgagcacaccctcggaagtggtttttcaacacatattaagccggcccca

SEQ ID NO: 41020 - DNA, 201 bp, Homo sapiens
tggacaaccactgtggctgtagagcgacaatcgcccagaattggtgtcatctcagggcctccactgtgtcccaagtcatctcggatgccctaccctccgcmctgctgctctttagacctgccgtctcctccctgcccgcacaggcctgtgattgagctctgcatcccttcctcgctggaccccaccctggctccccctggc

SEQ ID NO: 41021 - DNA, 201 bp, Homo sapiens
ggtaataagctatgcacatagacacacttgttagggagagggtgtagagaaggcaaagggctcttacaagaacttgagctcattgaaggctgctgggagarggctggatggtggcagggaagggctgaagatcaagatggaaaggaatagttgcacctggaactctggggagatgagatcccacctccaggatctgagtcg

SEQ ID NO: 41022 - DNA, 201 bp, Homo sapiens
acagcacagctgactgcacgaaccaaaggagacgcatgagccagagagacaaggaaggctttcaaaggaagggatggtcaagctgggtttccaaggatgaytaggagctggccaggcagcaaagggcattccaagcaagagaaacagcttgatcaggccaggcgtgggggctcatgcctgtaattccagcacttcgggagg

SEQ ID NO: 41023 - DNA, 201 bp, Homo sapiens
aatattttggatatattgggctaaataaaatatattattgacattagtttcatcagcttgcccttccttccttccttccttccttccttccttccttcctycctcccttccttgtttcctccctccctccctccctctcttccttctagagataggtcctgttctatcacccaggctggagtgcagtagtgcaatcacggc

SEQ ID NO: 41024 - DNA, 201 bp, Homo sapiens
gttgggatggagaatgcagccaagggttgggccgtttccagtgcaccagaagatacagctagaagctagaagctagaaggcgtcgacgtggcttttctctmaagggatgagcacaccctcggaagtggtttttcaacacatattaagccggccccaaattcccccagggcgatggagatgggggcttggcagcagttgcca

SEQ ID NO: 41025 - DNA, 201 bp, Homo sapiens
ttttggatatattgggctaaataaaatatattattgacattagtttcatcagcttgcccttccttccttccttccttccttccttccttccttcctccctyccttccttgtttcctccctccctccctccctctcttccttctagagataggtcctgttctatcacccaggctggagtgcagtagtgcaatcacggctcac

SEQ ID NO: 41026 - DNA, 201 bp, Homo sapiens
cacaccctttccaacaatttccacccaggatgactgtgcatgctgagaactctcatggggtaaataaaagaagggtttgctttcattttgtttttttgggktttttttctgttttttaagaaaaaagcttcataatccgaacaaatcttgtggatataatctgatggttatttaacattccccttctcattcagactccac

SEQ ID NO: 41027 - DNA, 201 bp, Homo sapiens
atgagcacaccctcggaagtggtttttcaacacatattaagccggccccaaattcccccagggcgatggagatgggggcttggcagcagttgccacacatyggccaagctgtgatctaccagccaatctggatcttccagctggggcctcctgcccttttctcttcggatccctgggaggcttaaccagtgctccgtttgt

SEQ ID NO: 41028 - DNA, 201 bp, Homo sapiens
tccgtttgtgatctttaagtaatctgttccatcattaattcttccaacaaatatggatgagcgcttgcctgtgctaggtgctggggatacggtagtgagcrgagcagatgtcctgatgggtgagagacacagagcgagtgatgatgatgaagtggcgtgagtgtgatgctaggaggagcagccgggacacagcctggtcta

SEQ ID NO: 41029 - DNA, 201 bp, Homo sapiens
tcggctcgctgcaacctctacttcccgggttcaagcaattctcctgcctcaatctcctgagtagctgggattgcaggcagccgccatcatgcctggctaayttttgtatttttagtagagacggggtttcgccatgttggccaggctgatctcgaactcctgatctcaggtgacccgcctgcctcagcctctgaaagtgct

SEQ ID NO: 41030 - DNA, 201 bp, Homo sapiens
aaggaagtgagaatacagatcttatgggtatctggggaaaaaacgtccagacagagggaaggtcaggtgcaaaggccctggggcaggagtgtgctgctgtrtaggaggcacagggacgaggccagagtggctggagagagagcacctgggaatgaagggtctcggatggtgctgggtcttgtcaagtgccctggctcttac

SEQ ID NO: 41031 - DNA, 201 bp, Homo sapiens
tttcctccctccctccctccctctcttccttctagagataggtcctgttctatcacccaggctggagtgcagtagtgcaatcacggctcactgcagcctckacctctggggctgaagccatccatcctcccacctcagcctcctgagtagctgggcctacaggcatgcaccaccacacctggctaattttttttttttttt

SEQ ID NO: 41032 - DNA, 201 bp, Homo sapiens; identical to SEQ ID NO: 25963

SEQ ID NO: 41033 - DNA, 201 bp, Homo sapiens
caggctggagtgcagtagtgcaatcacggctcactgcagcctcgacctctggggctgaagccatccatcctcccacctcagcctcctgagtagctgggccyacaggcatgcaccaccacacctggctaatttttttttttttttgtagagatgagtctccctgtgttgtctaggctggtctcaaactctggggctcaagtg

SEQ ID NO: 41034 - DNA, 201 bp, Homo sapiens; identical to SEQ ID NO: 25964

SEQ ID NO: 41035 - DNA, 201 bp, Homo sapiens
gccatactggcctatagtgaggaccttagtctgcgggtcagcccgagggagccctgacatttcagagggataaagggagggccctgtgtgctgccccactycccaggcagcgtacctgcagagactgggggtgaacaccgccgtcttcgagaggcgccatgtgatcgggggtgcagctgtcactgaggagatcatcccagg

SEQ ID NO: 41036 - DNA, 201 bp, Homo sapiens
aggacatctagaaaaggcgagggtggaaagggaagcacagggaagggcattcccagaggcaggaacagcatgagcggggcagggaggccatggggtgtggsccatactggcctatagtgaggaccttagtctgcgggtcagcccgagggagccctgacatttcagagggataaagggagggccctgtgtgctgccccactt

SEQ ID NO: 41037 - DNA, 201 bp, Homo sapiens
gctccctgcctggaggagagcgacatcccagggcagggtggcaggaagcagcgtgagtccccgaggcaccaggcctctaaggagggaagaccactttcagytgggaagtggaggggcgggagcaggcctgtcggatcttagaggacatctagaaaaggcgagggtggaaagggaagcacagggaagggcattcccagaggc

SEQ ID NO: 41038 - DNA, 201 bp, Homo sapiens
tgaccccgggtgacggtctccatccctgctgaccccgggtgacggtctccatccctgctgacccctggtgacggtctccatccctgctgacccctggtgayggtcctcatccctggtgacccctggtgacagtcttcatcggattcggtttcagggtttaagttctcccgcgcgtcctacctgctcagcctgctgaggccg

SEQ ID NO: 41039 - DNA, 201 bp, Homo sapiens; identical to SEQ ID NO: 7282

SEQ ID NO: 41040 - DNA, 201 bp, Homo sapiens
tcaggccgacagaacagcaggggaaatgctggggttgagagaacgtgtgatccacccaggaaatcgagaggttctgttagttaggaggatgggatatggakagggggacaggatgagggatgaggctggagtgcctgctagaagactggccattatcctaagagcagtgccaagccggggaggcttggaatggtgataagt

SEQ ID NO: 41041 - DNA, 201 bp, Homo sapiens
ttggtgggatagacttctctggggtactcataattcttacatcagctaagaagcagtccatttaaaggccaggcatggtgactcatgcctgtaatcccagsacttcgggaagttcaggcaggcaaatcactttgaggtcaggaattcaagaccagcctggccaacatggtgaaacctcatctctactaaaagtacaaaaat

SEQ ID NO: 41042 - DNA, 201 bp, Homo sapiens
agggcccccccgccggcccgattgcacggagggaggaggcagttccatcttcccaacctgtgtggggggtccctgttctgtgcccgaggtgatgcccgccsctgagggctccctcttccacccaagtcttgtgtatcccacgtggtctccctgctgcattcccacagatgggttttgtctcgtccatgtagtgtcttgaaa

SEQ ID NO: 41043 - DNA, 201 bp, Homo sapiens
acagaacagcaggggaaatgctggggttgagagaacgtgtgatccacccaggaaatcgagaggttctgttagttaggaggatgggatatggatagggggamaggatgagggatgaggctggagtgcctgctagaagactggccattatcctaagagcagtgccaagccggggaggcttggaatggtgataagtgagtggca

SEQ ID NO: 41044 - DNA, 201 bp, Homo sapiens
aagcatcccctgtccttgcctgggacccccactaccaacaattggaggactgcccaggtggggcccagtcaaccgctgtcacattcctggcaagctataaraatggacccaatttccccatgatccacagagtcaccctcaaaggccacggtcctgaacaatgctgggcatctcaagccacagaatcctccagtcaggcaa

SEQ ID NO: 41045 - DNA, 201 bp, Homo sapiens; identical to SEQ ID NO: 25970

SEQ ID NO: 41046 - DNA, 201 bp, Homo sapiens
ttcatggagaagctgcagaacttggtgggatgggtttgggatgaagaagttgtgaatgcctaggagcagcacagaccatggaaatcccggaagatctaacmtggatttcccttcctgcggtttctggggccttgttctggtgggctctagacagtggcgaaggtgcaggtgaacagtgaaggctgtgttcaaggagttgtg

SEQ ID NO: 41047 - DNA, 201 bp, Homo sapiens
gtctgccaaaacaggggttagaaatcgtggggattgagggagccaggattgcatcagggtgtgagatgcaaaagccaagtctctgcatttgggaaacaggsgggtaagggcaggtagcaaacggggaagaagcctcacaggtggggagaaggggccagagaggtgaagtgaccaagattccggccattggcagagccagag

SEQ ID NO: 41048 - DNA, 201 bp, Homo sapiens
ggtctgactttcaatctagagttatttccacaactttcctactttcctgatttctcccctctcaccgctctaattccattgtctttgtcaatgatctgttrtattatccatgattattaattaatcaattaacaaagagccacaatacttctgggcatacaacaagaaatactggcacccagaactggagacttcagttga

SEQ ID NO: 41049 - DNA, 201 bp, Homo sapiens
gtcatttttgtattctgcagaaggtgatcttttctatatactttttaacctggcacccagaattgaaactagccccctagaagcattgtgaccaggacagygcagaacaatgtttggatccccaagctttttcgaaagtagccaagccccctccctcattcagcatcaggaccatcaacttcttgatcttgttgaaaattt

SEQ ID NO: 41050 - DNA, 201 bp, Homo sapiens; identical to SEQ ID NO: 25976

SEQ ID NO: 41051 - DNA, 201 bp, Homo sapiens
cctgatttctcccctctcaccgctctaattccattgtctttgtcaatgatctgttatattatccatgattattaattaatcaattaacaaagagccacaawacttctgggcatacaacaagaaatactggcacccagaactggagacttcagttgatcttggtggatttcagctgcttaaggcttgctcatgcgtctgcag

SEQ ID NO: 41052 - DNA, 201 bp, Homo sapiens
gcctggggcagctcacatcagacttggtctttaaaaataataacgatttttagccgggcgcagtggctcacgtcagtaatcccagcactttgggaggctgrggtgggcggattatgaggtcaggggatcaagaccatcctggctcacacggtgaaaccctgtctctactaaaaatacaaaaaaaaaaaaaattagccgggt

SEQ ID NO: 41053 - DNA, 201 bp, Homo sapiens; identical to SEQ ID NO: 25979

SEQ ID NO: 41054 - DNA, 201 bp, Homo sapiens
ctggggtgggcggattatgaggtcaggggatcaagaccatcctggctcacacggtgaaaccctgtctctactaaaaatacaaaaaaaaaaaaaattagcckggtatggtggcacacgcctgtaatctcagctgctctggaggctgaggcaggagaattgcttgaacccgggaggtggaggttgcagtaagctgagatcgcg

SEQ ID NO: 41055 - DNA, 201 bp, Homo sapiens; identical to SEQ ID NO: 25983

SEQ ID NO: 41056 - DNA, 201 bp, Homo sapiens; identical to SEQ ID NO: 25982

SEQ ID NO: 41057 - DNA, 201 bp, Homo sapiens; identical to SEQ ID NO: 3295

SEQ ID NO: 41058 - DNA, 201 bp, Homo sapiens
catgtatacgcacatgaagctcctagccattcttgggggcaattcttaggggcaaagcactactttttctgagtgattccattactaaaattcaacaaacrtcagtaaaaagaaacttgttaaggcaattctgagatcgtcgaggcttccaagagcttacagaccagtagtgaaaagaggcctgcaaaccactgacccctt

SEQ ID NO: 41059 - DNA, 201 bp, Homo sapiens
gaaaccctgtctctactaaaaatacaaaaaaaaaaaaaattagccgggtatggtggcacacgcctgtaatctcagctgctctggaggctgaggcaggagarttgcttgaacccgggaggtggaggttgcagtaagctgagatcgcgccactgcactccagcctgggcaacaaaaagagactctgtctcaaaaaaacaaaaa

SEQ ID NO: 41060 - DNA, 201 bp, Homo sapiens; identical to SEQ ID NO: 25985

SEQ ID NO: 41061 - DNA, 201 bp, Homo sapiens
tgaagccaacaggactttctgttggatagggagtgggatgtgggtcaaaaaaaggagcgactgtgaaatgatgcctccatttactgaaaagaggaagaggyggtgggggtggagcagattttagaggctaatcaggcattggggtttgaacaggggatgtttgagatccctggtggacatccgagttcagcgagaacattg

SEQ ID NO: 41062 - DNA, 201 bp, Homo sapiens
ggctgaccaagccggctgtgggcttgtgagcgtgcatctttctaacatatgttcaatttgcaaggcaggtgacaattaccaagttattctgtgggaccttygtaatactcctgccctgatgtctggaatgaggggaaaagagacctgctgagcacaggatgtcattctgtgagcgagtggagacacatgaaatgagaaaaa

SEQ ID NO: 41063 - DNA, 201 bp, Homo sapiens; identical to SEQ ID NO: 3297

SEQ ID NO: 41064 - DNA, 201 bp, Homo sapiens
tgcccgcacaggcctgtgattgagctctgcatcccttcctcgctggaccccaccctggctccccctggctgccatgtagtctccctcttcactcagtacaygccctatacgctggctggaggcaaggcctgggacgagcaggagagagacgcttatgcagacagaggtaaagacagctgcacgttctgcctccagagccac

SEQ ID NO: 41065 - DNA, 201 bp, Homo sapiens; identical to SEQ ID NO: 3299

SEQ ID NO: 41066 - DNA, 201 bp, Homo sapiens; identical to SEQ ID NO: 3300

SEQ ID NO: 41067 - DNA, 201 bp, Homo sapiens
tcggtttcagggtttaagttctcccgcgcgtcctacctgctcagcctgctgaggccgcagatttacactgatctggagctgaaggtagggcccccccgccrgcccgattgcacggagggaggaggcagttccatcttcccaacctgtgtggggggtccctgttctgtgcccgaggtgatgcccgcccctgagggctccctc

SEQ ID NO: 41068 - DNA, 201 bp, Homo sapiens; identical to SEQ ID NO: 3301

SEQ ID NO: 41069 - DNA, 201 bp, Homo sapiens; identical to SEQ ID NO: 3302

SEQ ID NO: 41070 - DNA, 201 bp, Homo sapiens
tgttgggaaacagggtctttgcacatggagtcaagatgaagtcctaaggatgagccctaatcctatatgatcatgtccttataaaatgagggaagttgggmcacacacacacacacacacacacacacacacacacagtgccttatgaagacacagacacagggagaagacggctgtgtgaagtggaggtggagatgggcg

SEQ ID NO: 41071 - DNA, 201 bp, Homo sapiens
ctgcagcagcagagagagaacgagggactgaacctgggtggaagggtcagcattcacaagttccacctcactgtgctgcgcttgtaggagaaatgaggctkgctccctgcctggaggagagcgacatcccagggcagggtggcaggaagcagcgtgagtccccgaggcaccaggcctctaaggagggaagaccactttcag

SEQ ID NO: 41072 - DNA, 201 bp, Homo sapiens
gaaccagctcagttaatcttcacagcagccttatgaagtgggtaaagccgggactactttcatcagccccacttttgcatgtgaacaaactgaggccagayggatcaggtactgaggctgcagcagcagagagagaacgagggactgaacctgggtggaagggtcagcattcacaagttccacctcactgtgctgcgcttg

SEQ ID NO: 41073 - DNA, 201 bp, Homo sapiens
gtgccagggaccacttaaaccctgtctaggaaccagctcagttaatcttcacagcagccttatgaagtgggtaaagccgggactactttcatcagccccayttttgcatgtgaacaaactgaggccagacggatcaggtactgaggctgcagcagcagagagagaacgagggactgaacctgggtggaagggtcagcattc

SEQ ID NO: 41074 - DNA, 201 bp, Homo sapiens; identical to SEQ ID NO: 25994

SEQ ID NO: 41075 - DNA, 201 bp, Homo sapiens; identical to SEQ ID NO: 3292

SEQ ID NO: 41076 - DNA, 201 bp, Homo sapiens
taatactcctgccctgatgtctggaatgaggggaaaagagacctgctgagcacaggatgtcattctgtgagcgagtggagacacatgaaatgagaaaaagkaatgcaaaatgcaaagcaaggagaaacgcaaatggacagcaaacctgaaaaaaatatttaaactcacaaggaatccgttaaatgcaatgaaaaccaaaca

SEQ ID NO: 41077 - DNA, 201 bp, Homo sapiens
ggtagggcccccccgccggcccgattgcacggagggaggaggcagttccatcttcccaacctgtgtggggggtccctgttctgtgcccgaggtgatgcccrcccctgagggctccctcttccacccaagtcttgtgtatcccacgtggtctccctgctgcattcccacagatgggttttgtctcgtccatgtagtgtcttg

SEQ ID NO: 41078 - DNA, 201 bp, Homo sapiens
  misc_feature (101)..(101): n is a, c, g, or t
gaggcaaggcctgggacgagcaggagagagacgcttatgcagacagaggtaaagacagctgcacgttctgcctccagagccacagccgggcatgcgacccnactgggcctgctcctcctcactgccccattcaggattgacaactgcaggtgccattccaaagggaggaaatagtcaagggaacctcaagtcaacatagtt

SEQ ID NO: 41079 - DNA, 201 bp, Homo sapiens
gaatatcaaacaataactttaaaagttacatttttgaatgtacttttcttttatcacatggaaaaaatatgctaataaaaagtaagatataatgggacctraattttgttgatagttgatagatgggtagacagatctctcatatatatgtaaatatacattacatatactaactataaaaaacatacttacccacacaga

SEQ ID NO: 41080 - DNA, 201 bp, Homo sapiens
acagctgcacgttctgcctccagagccacagccgggcatgcgacccaactgggcctgctcctcctcactgccccattcaggattgacaactgcaggtgccrttccaaagggaggaaatagtcaagggaacctcaagtcaacatagttgactgcaggggtcaggaactgggctaagaaagtcaagaagacacagttcctgcc

SEQ ID NO: 41081 - DNA, 201 bp, Homo sapiens
acctgaacctggattttgtctggttttatctgaaactaggcaatgctgttatgtaggttgtcagaccagcagctctgcagctggctatatgtgtctttgastaataagagaatcactagaggaattaaatgagactaaccaaaggacatttgattggtatgcagaagtcttcaaaacaatgtgtctcttaagaaaaaaaaa

SEQ ID NO: 41082 - DNA, 201 bp, Homo sapiens
agttcctgccctccagttgctcacagtctagcaagggatggaggagactaattaagaaaccttttattacagcacagctgactgcacgaaccaaaggagamgcatgagccagagagacaaggaaggctttcaaaggaagggatggtcaagctgggtttccaaggatgactaggagctggccaggcagcaaagggcattcca

SEQ ID NO: 41083 - DNA, 201 bp, Homo sapiens
aacacagctcaaaaaatatgcacactgtgtgactcagcacacccactcccagatatacccagcagaaatgcttactggtgttcaccaaaagatacatactrggctgctcctagcagcactacttgtaatacctccaaccagaaagctaccccaatgcccattgaaagtagaacggataagtaaattgcggcaccttcgcat

SEQ ID NO: 41084 - DNA, 201 bp, Homo sapiens
caccagatttggagagaatcttcgggcttcctggaggggtatgtataagcctagggggtctctcaccatagccttccctctgcaccctcacttcctggctrtgacctctctgctttatcttgtccctccatactcagctttcatcaggaagggaggacagtggcagggaccccggctgagagagggcagagaagcggtcaa

SEQ ID NO: 41085 - DNA, 201 bp, Homo sapiens
ctaaagctaatatttattggcaaagccctatgtctgaggctagacttgaaaggggaaatgaagaaagagggtaaggaaggagaagaggagaaagggaaagrgggatgtggtggacagacctgtagggtgccccctacccaggacccctgcttactggtgcccatggccttgtgtgctcccctcccctcaagggtgggtgag

SEQ ID NO: 41086 - DNA, 201 bp, Homo sapiens
aaagagggatgtggtggacagacctgtagggtgccccctacccaggacccctgcttactggtgcccatggccttgtgtgctcccctcccctcaagggtggrtgaggtctatgaattgcttctaaccaacagaatatgacaaaggtgaaaggaggtatgtgattatatcacacacagcataatcgtgcaggaatttcagttc

SEQ ID NO: 41087 - DNA, 201 bp, Homo sapiens; identical to SEQ ID NO: 3296

SEQ ID NO: 41088 - DNA, 201 bp, Homo sapiens
gaccccgggtgacggtctccatccctgctgacccctggtgacggtctccatccctgctgacccctggtgacggtcctcatccctggtgacccctggtgacrgtcttcatcggattcggtttcagggtttaagttctcccgcgcgtcctacctgctcagcctgctgaggccgcagatttacactgatctggagctgaaggta

SEQ ID NO: 41089 - DNA, 201 bp, Homo sapiens
ccatccatattttagaccaggaaggatggataaagttaacttcttcaactttacaattctttcttgtgcgcattccaagcctaacggagctggctgaggckatttgctatgcacactttctctcagctgtgtagacttggtaccctggaaagagtctgggcttacacatcttccccctccccccagccccttattctgaaa

SEQ ID NO: 41090 - DNA, 201 bp, Homo sapiens
cactcaattagagggctcccaatctaggagcttccatcctgggaccacagcacacacaaacacacacacacaaccctatacaataaactacaccaactcayacatgcagatcaatacgccagggcaagagagaaggaagcaggcagggcagtttgccaaaggcagaaatctgtgtgtgggatgttgagctgtatttctggt

SEQ ID NO: 41091 - DNA, 201 bp, Homo sapiens
acaaacacagttaggttaaatagtttcctgaggtcacagagctggtagttgacacagtcaagatttgaactgaggtccttctgacagcaaaaatcatgctytaagcaagaaacaacactctggacacacctagtggacaactggttgtagggtcatcaagttccatcaattgttggccacctgtgtagggctatacatgaa

SEQ ID NO: 41092 - DNA, 201 bp, Homo sapiens
tgcctaatattctcttgtaaggatgtgtcataatttattatgggacattgggttcagctttggccttgattgctaattagtataagccaaaggcccgaaarcttcttttatcactgctgttcctgttttaatggttccctgtcatttctgggatcacaagggtgcagctgttctccaggcaaatgttccctgtaaaggagg

SEQ ID NO: 41093 - DNA, 201 bp, Homo sapiens
aaaatcatgctctaagcaagaaacaacactctggacacacctagtggacaactggttgtagggtcatcaagttccatcaattgttggccacctgtgtaggkctatacatgaatgttaaggaatggttccttgttgcaaagcatttacagtctagtggaggacgacaaagaacactcatataagaattattaacaactctag

SEQ ID NO: 41094 - DNA, 201 bp, Homo sapiens
ataatagtacacaaacttccttggaaagggctagcctaaaggggaactggttattaggagaaaaaaaaaaccaccgctgtttttacagtaaccctcctcaktctataatgagcaaacctctcttctgtatagagcagcctcctaatgtgagtcactccaagacttggcttccaaccgctgccccttagcccaggaagcagg

SEQ ID NO: 41095 - DNA, 201 bp, Homo sapiens
agcacgtccaccctcagccgttgagactgtgggctgtggacctggcccctccccagacctttggtgcaggaagcctggagggagccagaatctattgagcrgctgtcttaggtgattccagtgcccatgcccccggacccctctaaccagccccactctgctttgttgctggatctctgtaagccctgtccccacccccac

SEQ ID NO: 41096 - DNA, 201 bp, Homo sapiens
gaggagatcatcccaggtgagctctgatgtggcatgggggagtggagggcagtgactcagggtgacagtctccatccctgctgaccccgggtgacggtctycatccctgctgaccccgggtgacggtctccatccctgctgacccctggtgacggtctccatccctgctgacccctggtgacggtcctcatccctggtgac

SEQ ID NO: 41097 - DNA, 201 bp, Homo sapiens; identical to SEQ ID NO: 3304

SEQ ID NO: 41098 - DNA, 201 bp, Homo sapiens; identical to SEQ ID NO: 3306

SEQ ID NO: 41099 - DNA, 201 bp, Homo sapiens; identical to SEQ ID NO: 3307

SEQ ID NO: 41100 - DNA, 201 bp, Homo sapiens; identical to SEQ ID NO: 26014

SEQ ID NO: 41101 - DNA, 201 bp, Homo sapiens; identical to SEQ ID NO: 26015

SEQ ID NO: 41102 - DNA, 201 bp, Homo sapiens; identical to SEQ ID NO: 26016

SEQ ID NO: 41103 - DNA, 201 bp, Homo sapiens
tcaacaaatatttattgatttttccactaagtgctagaaaaaaattaatagaaatccttgcatcatttgttctcccaaaataaagctctgctatgaaccgyttcatttactgagtacattctctgtgccagggaccacttaaaccctgtctaggaaccagctcagttaatcttcacagcagccttatgaagtgggtaaagc

SEQ ID NO: 41104 - DNA, 201 bp, Homo sapiens; identical to SEQ ID NO: 3288

SEQ ID NO: 41105 - DNA, 201 bp, Homo sapiens; identical to SEQ ID NO: 26020

SEQ ID NO: 41106 - DNA, 201 bp, Homo sapiens; identical to SEQ ID NO: 3289

SEQ ID NO: 41107 - DNA, 201 bp, Homo sapiens; identical to SEQ ID NO: 26021

SEQ ID NO: 41108 - DNA, 201 bp, Homo sapiens
cagtggagggccatgaacagaggccagcgtggctccttctcatctccataatacagccatgttctctgcagcctcaatgcaaacagctcctcattcacctytgccacagacagaagacggatcctggctgtggaacctggatctgggaagctttagtggcagcacctgtttttggctggaggtgtttgtaacaccttgtag

SEQ ID NO: 41109 - DNA, 201 bp, Homo sapiens
aatgcaaacagctcctcattcacctctgccacagacagaagacggatcctggctgtggaacctggatctgggaagctttagtggcagcacctgtttttggmtggaggtgtttgtaacaccttgtaggtattgtcccctggggcagcatggacacctctacctgctttgagactgtggatgacctgcatctcatcaaggacc

SEQ ID NO: 41110 - DNA, 201 bp, Homo sapiens; identical to SEQ ID NO: 26024

SEQ ID NO: 41111 - DNA, 201 bp, Homo sapiens
ggaacctggatctgggaagctttagtggcagcacctgtttttggctggaggtgtttgtaacaccttgtaggtattgtcccctggggcagcatggacacctytacctgctttgagactgtggatgacctgcatctcatcaaggaccgaggcagatggggacctgggcctggatttctactacagaagccagagactcatctg

SEQ ID NO: 41112 - DNA, 201 bp, Homo sapiens
cccctggggcagcatggacacctctacctgctttgagactgtggatgacctgcatctcatcaaggaccgaggcagatggggacctgggcctggatttctastacagaagccagagactcatctgcacgctgcagaaactggagcagcccatatttggagttaggaagaagtttaataatagtacacaaacttccttggaaa

SEQ ID NO: 41113 - DNA, 201 bp, Homo sapiens
agccagagaagagaattcatagcggacactatgcaaaggaggctatacacaaaatcttcctagggcgggaggaactgcctgccggttagggaattctcagyaaggacctccggggaagcttctgagctgcttctgactctgcattggcttaggattttgagcacggtcagggtggatctgcagcctcaagctgtaagaggt

SEQ ID NO: 41114 - DNA, 201 bp, Homo sapiens
ctatgcaaaggaggctatacacaaaatcttcctagggcgggaggaactgcctgccggttagggaattctcagcaaggacctccggggaagcttctgagctrcttctgactctgcattggcttaggattttgagcacggtcagggtggatctgcagcctcaagctgtaagaggtagggcagtctaggagtccttaactcagg

SEQ ID NO: 41115 - DNA, 201 bp, Homo sapiens
gtgggttaaaagctttacttgtacataagaagtaaagtctgggggccacctctgtgacccacctggaggaaccacaggaaagatttgcgtgcttgggtcayttcatagtcatcagaatgatactcaggtcccactttgagagtcactgcattagctcaattaataaatgagaaaacagaggccccgagaagtcaagtgact

SEQ ID NO: 41116 - DNA, 201 bp, Homo sapiens; identical to SEQ ID NO: 26034

SEQ ID NO: 41117 - DNA, 201 bp, Homo sapiens
aaaagcctcagggaaaagtacagatcctctggtttctctttgccatgtctcctccatgcctgccttagtagcatcagagagtgtgcccctgggaggggacrcaactcgggcatggagcgggtggcccagtatcagagaccgtgtcatgcaacaggagggcaggggagcccggctggcaccccttgtccctgagggtgctgg

SEQ ID NO: 41118 - DNA, 201 bp, Homo sapiens; identical to SEQ ID NO: 26036

SEQ ID NO: 41119 - DNA, 201 bp, Homo sapiens; identical to SEQ ID NO: 26037

SEQ ID NO: 41120 - DNA, 201 bp, Homo sapiens
tgctgaggccgcagatttacactgatctggagctgaaggtagggcccccccgccggcccgattgcacggagggaggaggcagttccatcttcccaacctgkgtggggggtccctgttctgtgcccgaggtgatgcccgcccctgagggctccctcttccacccaagtcttgtgtatcccacgtggtctccctgctgcattc

SEQ ID NO: 41121 - DNA, 201 bp, Homo sapiens; identical to SEQ ID NO: 26040

SEQ ID NO: 41122 - DNA, 201 bp, Homo sapiens; identical to SEQ ID NO: 26041

SEQ ID NO: 41123 - DNA, 201 bp, Homo sapiens
ccgatattatgaggtcctcacagctcccattaccaaggtgagtggttccccagcctcaggcccgaccaggcagtgagagggccctcctcccatccaggctyctaagcccttctctctgctgttgtgctgtccaggtgctggatcagtggttcgagtctgagcctttaaaagccactctagccacagatgcagtgattggag

SEQ ID NO: 41124 - DNA, 201 bp, Homo sapiens; identical to SEQ ID NO: 26042

SEQ ID NO: 41125 - DNA, 201 bp, Homo sapiens
aatttaatgactgttagtaaatttgccaagttgtacacccatagtgcctcctcttcttcctaacaccatctcatttctctgtttttggcaccccagtgttygattgcatcgaggtctatgcccctggcttcaaggactctgtggttggcagagacatcctcacaccaccagatttggagagaatcttcgggcttcctggag

SEQ ID NO: 41126 - DNA, 201 bp, Homo sapiens; identical to SEQ ID NO: 26043

SEQ ID NO: 41127 - DNA, 201 bp, Homo sapiens; identical to SEQ ID NO: 26044

SEQ ID NO: 41128 - DNA, 201 bp, Homo sapiens; identical to SEQ ID NO: 26045

SEQ ID NO: 41129 - DNA, 201 bp, Homo sapiens; identical to SEQ ID NO: 26046

SEQ ID NO: 41130 - DNA, 201 bp, Homo sapiens; identical to SEQ ID NO: 26048

SEQ ID NO: 41131 - DNA, 201 bp, Homo sapiens; identical to SEQ ID NO: 26049

SEQ ID NO: 41132 - DNA, 201 bp, Homo sapiens; identical to SEQ ID NO: 26051

SEQ ID NO: 41133 - DNA, 201 bp, Homo sapiens; identical to SEQ ID NO: 26053

SEQ ID NO: 41134 - DNA, 201 bp, Homo sapiens; identical to SEQ ID NO: 7280

SEQ ID NO: 41135 - DNA, 201 bp, Homo sapiens; identical to SEQ ID NO: 26055

SEQ ID NO: 41136 - DNA, 201 bp, Homo sapiens; identical to SEQ ID NO: 7281

SEQ ID NO: 41137 - DNA, 201 bp, Homo sapiens; identical to SEQ ID NO: 26057

SEQ ID NO: 41138 - DNA, 201 bp, Homo sapiens; identical to SEQ ID NO: 7284

SEQ ID NO: 41139 - DNA, 201 bp, Homo sapiens
ttctcaggtcattctgaaagaggaggcccccagaacataactttgagaaccacaccctttaaatctcttgtatctctggtcctttagacacacacacagayacacccttcacacacacacaccctttccaacaatttccacccaggatgactgtgcatgctgagaactctcatggggtaaataaaagaagggtttgctttc

SEQ ID NO: 41140 - DNA, 201 bp, Homo sapiens
tctcaggtcattctgaaagaggaggcccccagaacataactttgagaaccacaccctttaaatctcttgtatctctggtcctttagacacacacacagatrcacccttcacacacacacaccctttccaacaatttccacccaggatgactgtgcatgctgagaactctcatggggtaaataaaagaagggtttgctttca

SEQ ID NO: 41141 - DNA, 201 bp, Homo sapiens; identical to SEQ ID NO: 26060

SEQ ID NO: 41142 - DNA, 201 bp, Homo sapiens
cattttgtttttttgggttttttttctgttttttaagaaaaaagcttcataatccgaacaaatcttgtggatataatctgatggttatttaacattccccttctcattcagactccacataattaaacctattgttaaaagaaaaaccttcactaaattaaatttaatagagtttaattgggcaaagaatgattcataaat

SEQ ID NO: 41143 - DNA, 201 bp, Homo sapiens
gtctccatccctgctgaccccgggtgacggtctccatccctgctgacccctggtgacggtctccatccctgctgacccctggtgacggtcctcatccctgstgacccctggtgacagtcttcatcggattcggtttcagggtttaagttctcccgcgcgtcctacctgctcagcctgctgaggccgcagatttacactgat

SEQ ID NO: 41144 - DNA, 201 bp, Homo sapiens
catgagtatgcgaatggaaggctcattaagtgtgctattattttctaccctccttgagggtatacagaccagtttaacctctatatcctagaaaaaaaatyatttgtttcccacatgtcttcgtggttcagctgattccagctggctcagctgatctggtttggtctcaggcatgtgtttgtgtctgcagcagctcagtgg

SEQ ID NO: 41145 - DNA, 201 bp, Homo sapiens; identical to SEQ ID NO: 26061

SEQ ID NO: 41146 - DNA, 201 bp, Homo sapiens
  misc_feature (101)..(101): n is a, c, g, or t
actggagacttcagttgatcttggtggatttcagctgcttaaggcttgctcatgcgtctgcagttggctgtgggtcagcttgccggctgctgatcttggcnggactccttcatgtgcctgggagctggctggtggtggctggtccaggaccgtttctgctgggatgaccgggtgggggactcggctatgctccatgtgtct

SEQ ID NO: 41147 - DNA, 201 bp, Homo sapiens; identical to SEQ ID NO: 26062

SEQ ID NO: 41148 - DNA, 201 bp, Homo sapiens
cattcttctggaacaggcaggggcgctataggagcaagtgcctttccatcctgtccgctgtccagcacacactgttgaaaacctactcagtgctggactctgtactgggtatgggctgggagaattagcggggcaggggcatgaaactgacacaaagcttatgataggacaggtacacaaatatttatagcatgtggtaaa

SEQ ID NO: 41149 - DNA, 201 bp, Homo sapiens; identical to SEQ ID NO: 26064

SEQ ID NO: 41150 - DNA, 201 bp, Homo sapiens; identical to SEQ ID NO: 26066

SEQ ID NO: 41151 - DNA, 201 bp, Homo sapiens; identical to SEQ ID NO: 26067

SEQ ID NO: 41152 - DNA, 201 bp, Homo sapiens
attcttctggaacaggcaggggcgctataggagcaagtgcctttccatcctgtccgctgtccagcacacactgttgaaaacctactcagtgctggactctgtactgggtatgggctgggagaattagcggggcaggggcatgaaactgacacaaagcttatgataggacaggtacacaaatatttatagcatgtggtaaag

SEQ ID NO: 41153 - DNA, 201 bp, Homo sapiens
ggaccttagtctgcgggtcagcccgagggagccctgacatttcagagggataaagggagggccctgtgtgctgccccacttcccaggcagcgtacctgcasagactgggggtgaacaccgccgtcttcgagaggcgccatgtgatcgggggtgcagctgtcactgaggagatcatcccaggtgagctctgatgtggcatgg

SEQ ID NO: 41154 - DNA, 201 bp, Homo sapiens
tggcccaaccctgccccccaccctttcaccttccttcacccccactgtcttataaaccgcgtcaccacattcttgaggctgattggcttctacctgcttartgccactgtcactcaccactcagagaaaagggttcttggtgctatctgcagctgccactcacgttggtgccatctttttttttttttttttttttgggac

SEQ ID NO: 41155 - DNA, 201 bp, Homo sapiens
ccatgatccacagagtcaccctcaaaggccacggtcctgaacaatgctgggcatctcaagccacagaatcctccagtcaggcaaaaagcagccaagggtgactgcaaagtggattccactgaggccgtctgggagcccggtcttcctgattccagagcattcaggcttctgcctcccatgagctaagtctgttgcatcacc

SEQ ID NO: 41156 - DNA, 201 bp, Homo sapiens
gtgccttcttttcctcatctgtaagagggaatagtaacagcagctgcctcctaaggccacatcagcacagtgcctggtgcacagagggctcagtacttgtygctattattattacccccatttggcacttgagaaaactgaggctccagaaagacccatggctggagactactcacccaccctgccacttataaggctgta

SEQ ID NO: 41157 - DNA, 201 bp, Homo sapiens; identical to SEQ ID NO: 26073

SEQ ID NO: 41158 - DNA, 201 bp, Homo sapiens; identical to SEQ ID NO: 26075

SEQ ID NO: 41159 - DNA, 201 bp, Homo sapiens; identical to SEQ ID NO: 7291

SEQ ID NO: 41160 - DNA, 201 bp, Homo sapiens
tccgtttaggggaagagtggactcttgctttctcttcttaaatagatagcattattcttttatctaattttcctcccgtcctaatcttattcaacattggmagaaggagtatcctgtctataccatataaaaaaataaataaataatccaaatataccaggagtagttgagacataggtgtcacagaacaactaggaactg

SEQ ID NO: 41161 - DNA, 201 bp, Homo sapiens
ctcctctgccctcagctttcccttccaccttcagaggacgccttcttttctgagattctaggcctttggaagatgccttcttatctgagattctaggccasagatgcttaggcttgatttcttgtttcccctaattctgggtctctccttccactccgtttaggggaagagtggactcttgctttctcttcttaaatagat

SEQ ID NO: 41162 - DNA, 201 bp, Homo sapiens
taaaacttaaaatgaagagccataccatctccatggtttgaaatacacaatataataaagacgtcaatttttccaaaattgatctgtaaacttaatgcacycctataaaacccagatatttgtatgtgaaattgacaagctgcttttaaattttatattgaaatgcacctaatgtagccaaaatagtcttgaataaaaaca

SEQ ID NO: 41163 - DNA, 201 bp, Homo sapiens
tgcaagaccctaggggagatgactaatgccagatggcgtggtggtgaagagagaacctctgattctgcatcttccattcagatgagcgagagagagagagwgtgcagtacaccagtggaatttaggatgccccctggggtggagtctgggtgtggggtgggagaagctcatgtggcttcagggtgatgaggcaaaggacct

SEQ ID NO: 41164 - DNA, 201 bp, Homo sapiens
cctatattttcagatgttcagcaggtattactggtacaaatgtagtaaagaagtgtcagggaggcagctgttacaccaaaagatgcacattcaataaagtwacaggactctatgaaaaaggatgtgagtttgttctccaatcccgccagacggagaaggcttctataatgtttgcacaacatgttgattctgtaagtacct

SEQ ID NO: 41165 - DNA, 201 bp, Homo sapiens
tgtaagtatccctttttaaagatggggaaacagaagctagagagcttatgggttcatataactaatagtgttagtgcctggcataacagtagaaggccatrttcttccctctatccctcgataagccttaatggcagtctctactggtgctttcaacatgaaccctgaacctgctagagcattcacttcatctttgccaag

SEQ ID NO: 41166 - DNA, 201 bp, Homo sapiens
taataaatgtggctacatataaattaaaaattttgttgcacacaaaccaaacataaactaaataaaaaggaaaaaacagaaaaagatatttgcaaaaacaraaaagaaagcctttagaagcttagtattgtagcacataaagagcttttgaaaaatcagtaaaacagtaacatccaaatagaaaaatagacaaaggagaag

SEQ ID NO: 41167 - DNA, 201 bp, Homo sapiens
aatagcaattccctagtcatgacaatcaaaaatgtctccatatgtggtccactaacccttaggggggcaaactagcctccagctgaaaatcactggatagracatagcttttgactgccttacttcaaagcccagccctctatcaaatacagtattttgtgtaatctttttgtacttcactctcctctgttgtaaaataag

SEQ ID NO: 41168 - DNA, 201 bp, Homo sapiens
aataaaaaagacagagatggagtaagcagaccttgaggtctgatgggataggagccatgagggaggagaattggttgaggatgctgccctggctgctgtakgaatgcctgggctcccatagccgcctttgctgacctctgtcatcatacctgtaccaccaggcattttagcttctaatcacacatgccctccactacacca

SEQ ID NO: 41169 - DNA, 201 bp, Homo sapiens
catggaggccaatctggtgactattgcagcaattcaggagtaagtggcaatgggcctggaaaggtgagaatgaataaaaaagacagagatggagtaagcasaccttgaggtctgatgggataggagccatgagggaggagaattggttgaggatgctgccctggctgctgtaggaatgcctgggctcccatagccgccttt

SEQ ID NO: 41170 - DNA, 201 bp, Homo sapiens
tcctttgttgtggagggctatcctgcacattgtggcatgtttagcagcatccttaacctctatccattatttgtcaatagcaattccctagtcatgacaaycaaaaatgtctccatatgtggtccactaacccttaggggggcaaactagcctccagctgaaaatcactggatagaacatagcttttgactgccttacttc

SEQ ID NO: 41171 - DNA, 201 bp, Homo sapiens
ggaaacataggtaaaaaaagaccagagttgaacaagagcatgatatgacctaggaaaaaaaggagttcaggaattcatcctaattctagagtttgggaagkgagtggagaacagcaagaaataaggctgcagagaagagcaggcctgaggcatcagggaccttgtacaccatgttgagaagttggacttaccctgaaggat

SEQ ID NO: 41172 - DNA, 201 bp, Homo sapiens
tataatgttctgtacaattgctacagccaagtcacatatttcactttgtgacaagtaggtaggacaaatgaagtgtatatagtaacaagattaacagagtytatagtgaaaagcaagccagaagcagctcaggagaagcatggcttttcctagtcgtgagacccacaagaagttttatctgtggatcctcagtttattagg

SEQ ID NO: 41173 - DNA, 201 bp, Homo sapiens
tgtatactaaaaagagcatttgaggatttatttttgaaatcaggaggcagatatgctcagagatatgcttgagaagggagtctttaagaaccgcacgaagsccttaataagtgtgagaaagaccagcagcataacaaatgaaaggggaaggagaagaagaggaaaaagggttggaagtgtaggcctagcactatggcagtc

SEQ ID NO: 41174 - DNA, 201 bp, Homo sapiens
aactaccattttgtttactttacaagtgcttcagttaattgaattattcactctgcagctagaagtcatttgcctccttttttctttttttttaactgtaycaactataaaaaatctacagttgctgtgtttagtgtctccatcatcccataccagcatcagtgacgtaagcagagctaatgaggctcttcggtgccttca

SEQ ID NO: 41175 - DNA, 201 bp, Homo sapiens
attagtggctgggtgtggtggctcactcctgtaatcccagaattttaggaggccaaggcaggtggattgattgagcccaggagttcaagaccagcctgagyaacatggcaaaacccatctctaaaaaaaaaaaaaaaaaaaaaaaatacaaaaattagacatgttggcatatgcttgtaatcccagctacttgggagctga

SEQ ID NO: 41176 - DNA, 201 bp, Homo sapiens
tgatattaaacattattcctaaaatgcaacactactcatttaaacaaggcaattagtgtctacttgtttggaagcaataccaagtgaattcctcacagaartcagcagataaaatgtcatatgtccaagaattcttttttaacatctctgaacaagcaactagagcaatataattggctcagaattttcttcagagtagat

SEQ ID NO: 41177 - DNA, 201 bp, Homo sapiens
tcatagagtttgccattggtatatgaagagtggattgtaatgtatgaacaattaaagcagaggagtaagaggaaagactctcaggcagctgtgaggtggamcaaacagagaggaaacaagatggaaaagtcacaaagtaaactgcaatcgtctgagggagggactgtgatggcttgggtgatggatatttcattggagatg

SEQ ID NO: 41178 - DNA, 201 bp, Homo sapiens
tttccagtgtttccatacatgcctagggtccaactggatgagataaccaaggagcaatattccatatttacttggagactgtttagccacatgaaacagartaggaggttgaaaggggctggcaggcataaggtctcagaaccttgcagtgtcttaggcaggtttgccctaagcctgctatttgggcacatcacactcaat

SEQ ID NO: 41179 - DNA, 201 bp, Homo sapiens
tttattgtgtactttgtccaagggcccaactaatgccttatgtgcattagtttatttaatgtaattcagttctttcaacaaatgttcaccagctgcttatyattttccaggccaatgctaggttctaaggatagaaagatgagtaagcattggcctttttcctgtatactaaaaagagcatttgaggatttatttttgaaa

SEQ ID NO: 41180 - DNA, 201 bp, Homo sapiens
ttgagatcaatcagtatacctaaatgttaaaggtcaagcagcaaggcttctagaatcatatattgtataatatcttcatgaatttgggaaagctgtcttawatatgacacaaaaacattatacataaaagattaaattggactgtactaaaattaaaaatctctattcatctaatgatactattaaggcaagctacaaact

SEQ ID NO: 41181 - DNA, 201 bp, Homo sapiens; identical to SEQ ID NO: 7321

SEQ ID NO: 41182 - DNA, 201 bp, Homo sapiens
ggcttgctcagggcccagtagtcctcctccactgactcagccccaccctggctctccccgttggagcagagccctgagcaccaccctatcctccatccagmctctagccatactgtatactcctcagcctctgtggcaggattatccttctctcacctgccaacacccaactcagctgtcttctgtctcctctttaggata

SEQ ID NO: 41183 - DNA, 201 bp, Homo sapiens
gaatctcatatagaaaatgttatgtcacaatagcgaaatgcaagagtacatacagcatatttctgtttatatgaagttcaaaaacaggcaaaattaacctrtgtggcatagaagtcagaatagcaattatcttttggggggatttactggaagggaatgcaaaggaaacttctagaatgctggaaatattctttggtgaaa

SEQ ID NO: 41184 - DNA, 201 bp, Homo sapiens
ttcaccctcaaagatttgtggattctcaaagaagcaagtgaaacgcatagctaatattttatacttgcttgtgtgaagtaaacactgttcctagcacatcrtatgtttcactttgttcctcaccacaaccttatcagccagtcactataatataatattccattttgttaatgggaaaactgaggctcagaattagaaatt

SEQ ID NO: 41185 - DNA, 201 bp, Homo sapiens
gtaagataattccctggaagaggaggcagctataagccaatgcctagagcagctgggaagagatgcacttggctgggtaaggggatgtgcgtggggcatcmacagccttactgaaattatttccttaagttcagatggaattataatagttaaaaagtgctttcacatcaactaacttagtgacacctattctaaatagcc

SEQ ID NO: 41186 - DNA, 201 bp, Homo sapiens
cagccaggactctccactgagcaagcagccaagacccagcttgcagggaatgccaagcaaatttggagagcacttaaactgagtctgtcacaccagatgamctctgtcatagggaaatgcagcagctgcagccaacaagggcaggacaactaaagaccccactcagggatgaagggtgggattaccccaacaagagaacaa

SEQ ID NO: 41187 - DNA, 201 bp, Homo sapiens
agtgctttcacatcaactaacttagtgacacctattctaaatagcccaggactgcctggcctggtgtaaaatcctgtttttataatatactattctgtaastgtccctttgtccactgttttttcttgctgctgtcacatatgtgcctttcctcatttagaagaaaactctaaagccacgtttgttggaattatgtttcaa

SEQ ID NO: 41188 - DNA, 201 bp, Homo sapiens
cttttcaaacccagtgggcaccattccaaacctgatatctctttcccagttctctttcctaagcttccagccagttagacaccatatattgccttggcagwaagggtgattagtagtatttccttctagagatattctagaaatgagtacatatacaacacatttttctttcgacagataagacatgatcgccatgtcctc

SEQ ID NO: 41189 - DNA, 201 bp, Homo sapiens
cttagtgacacctattctaaatagcccaggactgcctggcctggtgtaaaatcctgtttttataatatactattctgtaagtgtccctttgtccactgttwtttcttgctgctgtcacatatgtgcctttcctcatttagaagaaaactctaaagccacgtttgttggaattatgtttcaaataagagtaaatcgatagtc

SEQ ID NO: 41190 - DNA, 201 bp, Homo sapiens
catcaatctccaccctgtcctgggcaggctttctcctgaggttggtgtgcgggaaggagaagagctcctttgagaaccttcccactgtcatctttacttgkgtgtgtgcttagtgaagagaggattcagagacacatggtgtcactcatgcaaaggtgataatagagggaaatgttttaaaagataccactgcattttttt

SEQ ID NO: 41191 - DNA, 201 bp, Homo sapiens
tgtaagcaggtgggaaaattatgtccatgaaacagacagtcccataccacttttggttacaaacacttgccctggactagagaaggaattgagaccaagtytgtgtcccaatgggttccaggactagttttccatcaatctccaccctgtcctgggcaggctttctcctgaggttggtgtgcgggaaggagaagagctcct

SEQ ID NO: 41192 - DNA, 201 bp, Homo sapiens
tatcctccatccagcctctagccatactgtatactcctcagcctctgtggcaggattatccttctctcacctgccaacacccaactcagctgtcttctgtstcctctttaggatatgtggcaacatttgcctgttttccatgacacacagcagttatggggagtgcgacaagaaaatccaaattgggcctctctggcctgc

SEQ ID NO: 41193 - DNA, 201 bp, Homo sapiens
ataaaggttttatcattattttaaaaacacttctaatgaagttctttccattgaagcatttctaatttatcctaatgaatctgttccacagaataaaaaastaataatttagggtttgttatctacatcaatatcattatccaagtccactgtctgtctttcctcttttctcctcctgctcaggccagggagcatagtaga

SEQ ID NO: 41194 - DNA, 201 bp, Homo sapiens
ggagatggtgaaatgcaaacgcggagtactgggcctaagatgaggatttcagggcaggcttctaggcacatagaagcttgattttcaaagaagaataagarttatccagacaaagatgggaaggaagtattccaagctaaggaaacataggtaaaaaaagaccagagttgaacaagagcatgatatgacctaggaaaaaaa

SEQ ID NO: 41195 - DNA, 201 bp, Homo sapiens
catatgcttgtaatcccagctacttgggagctgaggtaggaagatcgcttgagcctggaaggtggaggttgcagtgagccaggatcatgccactgtactcyaccctgggcaacagagtgagagcctgtcttagaaaaaataaataggttaaaaaaatagtatcaaattctgagttaatgtaggcacctatttgatgttgat

SEQ ID NO: 41196 - DNA, 201 bp, Homo sapiens
tctttgttgttctacaacacatttcacctccataacaggaacagaacattctcaatgtatgactcaacaaataagtgttgaattgattgacctgactgccycatcccactcctgagcccactccagccatcatgatcatatataaaaccattccttaatagtgtttcctttctgtattgtgactccactccaactctctca

SEQ ID NO: 41197 - DNA, 201 bp, Homo sapiens
tcactcctgtaatcccagaattttaggaggccaaggcaggtggattgattgagcccaggagttcaagaccagcctgagtaacatggcaaaacccatctctwaaaaaaaaaaaaaaaaaaaaaaatacaaaaattagacatgttggcatatgcttgtaatcccagctacttgggagctgaggtaggaagatcgcttgagcct

SEQ ID NO: 41198 - DNA, 201 bp, Homo sapiens
ccacacggctggggaggcctcaggaaatttacaatcatggtggaaggggaggcaggcatgtcttacatggcagcaggagagagagagagagagagagagagtgcgcaatgtgggaagagccccttagccccttataaaaccatcagatctcgtcagaactcactcactgtaacgagaacatcctggaagaaaccacctcca

SEQ ID NO: 41199 - DNA, 201 bp, Homo sapiens
tttctacctctgaatgctggggtcccccacattccctgggctcagtcttcagcctcttttttcctctgtctatgctcactttcgaagcaaatggttttcaktcctaacagatacactgccccctttctataacagtatcttctatcactctccctactctctcgtcataacatatcacagggaatctgcagacacatttat

SEQ ID NO: 41200 - DNA, 201 bp, Homo sapiens
tccacacggctggggaggcctcaggaaatttacaatcatggtggaaggggaggcaggcatgtcttacatggcagcaggagagagagagagagagagagagagtgcgcaatgtgggaagagccccttagccccttataaaaccatcagatctcgtcagaactcactcactgtaacgagaacatcctggaagaaaccacctcc

SEQ ID NO: 41201 - DNA, 201 bp, Homo sapiens
ctaatattagcagggggagtacacgtcacaagatgaggaagggagagtcagagagaaactctctcttcccccgtcaaatatacatacacacacaccacacrcacaagctcgtgtgcacacacacacgcccatgcacacacgcagacatacacgcacacacgcacgtcagaaggtacacagtagggttattttggagtctct

SEQ ID NO: 41202 - DNA, 201 bp, Homo sapiens
acctatttattaattccttcattctttatcaaggtgctgatgctactaaggatgacggtgtctactcaaggtatttcacaacttatgacacgaatggtagrtacagtgtaaaagtgcgggctctgggaggagttaacgcagccagacggagagtgataccccagcagagtggagcactgtacatacctggctggattgaga

SEQ ID NO: 41203 - DNA, 201 bp, Homo sapiens
gcaaagcataaatattccaaacattgctttcttccagtgtgagaaggtaattttgccattcttattgtaatcagttttttaaaatactttctcacaggtarggcatttgtccatgagtgggctcatctacgatggggagtatttgacgagtacaataatgatgagaaattctacttatccaatggaagaatacaagcagta

SEQ ID NO: 41204 - DNA, 201 bp, Homo sapiens
tgatagagagaacatgagtgccctattccagctgcacgacactggcatgtatttttatgtctaagtctcagtttcttcatctgtaaaatggaaataataahaagttaaccattaggattcttgtgtcagataagataatgaatgcaatgcacataactcagagtgatatactgttggcaactgataaatgataaattgata

SEQ ID NO: 41205 - DNA, 201 bp, Homo sapiens
catttcaaaatgctggaaaacatgagggcttctgcaaggcccaaaacacattaacagctcaagctcaatagattcagtctctggggagttgccatagggtrttccacaacccccaaaaaaggaaaagaggaaaattaataaccatattgtgttaggtgctttgtatatacacatacatacatacacacatatgagtgtgtg

SEQ ID NO: 41206 - DNA, 201 bp, Homo sapiens
ttccacacggctggggaggcctcaggaaatttacaatcatggtggaaggggaggcaggcatgtcttacatggcagcaggagagagagagagagagagagagagtgcgcaatgtgggaagagccccttagccccttataaaaccatcagatctcgtcagaactcactcactgtaacgagaacatcctggaagaaaccacctc

SEQ ID NO: 41207 - DNA, 201 bp, Homo sapiens
cacaatcatctttaaagagaccaccaatacctacagaataaagtcccaatccttagtgtgggatactgagtttccacagaatgccccacctcacataaccytccaaattcagccttccttggaatttacattccagaaaaactgagctgtacataagtcattcactcaagtttaacaaatatcactgaatgcctgctaagt

SEQ ID NO: 41208 - DNA, 201 bp, Homo sapiens
gttccacacggctggggaggcctcaggaaatttacaatcatggtggaaggggaggcaggcatgtcttacatggcagcaggagagagagagagagagagagagagtgcgcaatgtgggaagagccccttagccccttataaaaccatcagatctcgtcagaactcactcactgtaacgagaacatcctggaagaaaccacct

SEQ ID NO: 41209 - DNA, 201 bp, Homo sapiens
gaactgcatcataattgctcctaacaccaaatcaaggattcaggcatcactgaagtctttttaatggcgcactggggagacaggggcagaagggaaaagaycatgtgatgggagctgtattctccagaaagtaagagctgtttttcttaacagcttgagagtaagggattaaccctccagaacagccagtggatgaatggc

SEQ ID NO: 41210 - DNA, 201 bp, Homo sapiens
caatgtatgactcaacaaataagtgttgaattgattgacctgactgccccatcccactcctgagcccactccagccatcatgatcatatataaaaccattycttaatagtgtttcctttctgtattgtgactccactccaactctctcacaatcatctttaaagagaccaccaatacctacagaataaagtcccaatcctt

SEQ ID NO: 41211 - DNA, 201 bp, Homo sapiens
gtttcagcagaacatcctcgggaggctcatttgtggcttctgatgtcccaaatgctcccatacctgatctcttcccacctggccaaatcaccgacctgaakgcggaaattcacgggggcagtctcattaatctgacttggacagctcctggggatgattatgaccatggaacaggtaagctgaacctggtgtggaccctgt

SEQ ID NO: 41212 - DNA, 201 bp, Homo sapiens
caaataaaggtaagttcatagtaattatccatacttttttaaaaatagcataatgttgtgatagagagaacatgagtgccctattccagctgcacgacackggcatgtatttttatgtctaagtctcagtttcttcatctgtaaaatggaaataataacaagttaaccattaggattcttgtgtcagataagataatgaat

SEQ ID NO: 41213 - DNA, 201 bp, Homo sapiens
gaggaaacaagatggaaaagtcacaaagtaaactgcaatcgtctgagggagggactgtgatggcttgggtgatggatatttcattggagatggagaaaagrtgaagaaattgagatatagtgaagtgcactggtcttgggtactttttaggagggaaaaggtaggaaaacttccagtttcctaattttggtgatggggtgc

SEQ ID NO: 41214 - DNA, 201 bp, Homo sapiens
gtcatctttacttgggtgtgtgcttagtgaagagaggattcagagacacatggtgtcactcatgcaaaggtgataatagagggaaatgttttaaaagataycactgcattttttttttagacagtcttgctctatcaccagtctggagtgcagtggcacaatctcagctcactgcaacctccacctcccgggtccaagtga

SEQ ID NO: 41215 - DNA, 201 bp, Homo sapiens
ccctgtaaaagagtttaccagccaagtagaagagcagaagcgggtgaggcaggcagccgtgttctgatacttagggggcagaaggcaggagggatcttgcsggtcctttgaaatgagggataaatgtatttaaagaagagagatttaaaacctgaaaaactggtaaactttgggagtaagaggcttcagccaggaagggta

SEQ ID NO: 41216 - DNA, 201 bp, Homo sapiens
acacttaaaaaaatagaggcaaccattattatcactatttgaaagggagaaattgaggctcagagaagtaaaataagttctttaagtttaccccttaggargaggcacagcaggacttacccgtgcactaacacccaagtgctgcttccccataaaatggtgaagcatttctgctcctaacacgacccccactaggcaatg

SEQ ID NO: 41217 - DNA, 201 bp, Homo sapiens
cttcttttttctttttagctcacaagtatatcattcgaataagtacaagtattcttgatctcagagacaagttcaatgaatctcttcaagtgaatactacygctctcatcccaaaggaagccaactctgaggaagtctttttgtttaaaccagaaaacattacttttgaaaatggcacagatcttttcattgctattcagg

SEQ ID NO: 41218 - DNA, 201 bp, Homo sapiens
atgctcaaagtccctaactccttcctatttgatgttccagatctgcagagttgagggacctcgttgagggcttggccacctttcccaaccattcctccctstactccaacaaccttcttgctgatgagagactctcccctggtgcccctgtggggacagaagcccctaactcagcttttaaaatatttgcttcagcaggac

SEQ ID NO: 41219 - DNA, 201 bp, Homo sapiens
aggagttttggaccagcatcactaggaatatgtcttattttctctaaatttgagcaatgatggtgcatttaaggaagagatggcattgaagaaagaaagamcagcacaatgaaaattccctaggcacagaaatgaacgttatgtgcatgaaattacaagagttagtgatgctttaagccatggcagtggggataaggtggg

SEQ ID NO: 41220 - DNA, 201 bp, Homo sapiens
tcctcccgagatacgtacttctcgctacaattattaaattgtctttccagtatggatcctaaagttgggggtgagataagttggcttccatcatttccttstctgtaacaagaacactttagtgaatagaatgctcaaagtccctaactccttcctatttgatgttccagatctgcagagttgagggacctcgttgagggc

SEQ ID NO: 41221 - DNA, 201 bp, Homo sapiens
tgaggcagtctgaggtttaaaacacttagtctttaggcccggcacagtggctcactcctgtaatcccagcactttgggaggctgaggcaggtggatcacckgaggttaggagttcgagaccaggctggccaacatggtgaaaccccatgtctactaaaaatacaaaaattagctcggtgtggtggcacatgcctgtaatcc

SEQ ID NO: 41222 - DNA, 201 bp, Homo sapiens
gaaaagtgataaggtcaataatgaacatgtggagtttgaggcgcatgtgagacatccaagtggattttggagagagctggaacattgggagttgaaggttrgaatatagtgtgttggtaaatgagtgagaagtaaggaagtggagtttggtggtataagggtggagagataagatggttccaagagaggaatgctggagag

SEQ ID NO: 41223 - DNA, 201 bp, Homo sapiens
acctctgcctctcaggttcaagcaattctcgtgccttagcttcccgagtagctgggattacaggtgcgcaacaccatgcccacctaattttcattgtattyctggtagagttgggtttcgccatgttgcccaggctggtctcaaatttctggcctcaagcaatccacccgcctcagcctcccaaagtgctgggattacagg

SEQ ID NO: 41224 - DNA, 201 bp, Homo sapiens
tggagtgcagtggcgcgatctcagctcactgcaacctctgcctctcaggttcaagcaattctcgtgccttagcttcccgagtagctgggattacaggtgcrcaacaccatgcccacctaattttcattgtattcctggtagagttgggtttcgccatgttgcccaggctggtctcaaatttctggcctcaagcaatccacc

SEQ ID NO: 41225 - DNA, 201 bp, Homo sapiens
ttccacaaaactaccattttgtttactttacaagtgcttcagttaattgaattattcactctgcagctagaagtcatttgcctccttttttctttttttttaactgtaccaactataaaaaatctacagttgctgtgtttagtgtctccatcatcccataccagcatcagtgacgtaagcagagctaatgaggctcttcgg

SEQ ID NO: 41226 - DNA, 201 bp, Homo sapiens
gaacccgggaggcggaggttgtagtgagccaagatcgcgccactgcactccagcctgggcgacagagcgagactccgtatcaaaaaaaaaaaaggggggggattctcattcattaggtgtgggatgggactcaagaatctgcatttttaacaagctcacaggagatgttgattctaccggtctgtggatcacactttgagt

SEQ ID NO: 41227 - DNA, 201 bp, Homo sapiens
tgaacccgggaggcggaggttgtagtgagccaagatcgcgccactgcactccagcctgggcgacagagcgagactccgtatcaaaaaaaaaaaaggggggggattctcattcattaggtgtgggatgggactcaagaatctgcatttttaacaagctcacaggagatgttgattctaccggtctgtggatcacactttgag

SEQ ID NO: 41228 - DNA, 201 bp, Homo sapiens
atggcgtgaacccgggaggcggaggttgtagtgagccaagatcgcgccactgcactccagcctgggcgacagagcgagactccgtatcaaaaaaaaaaaargggggggattctcattcattaggtgtgggatgggactcaagaatctgcatttttaacaagctcacaggagatgttgattctaccggtctgtggatcacac

SEQ ID NO: 41229 - DNA, 201 bp, Homo sapiens
  misc_feature (101)..(101): n is a, c, g, or t
cattaaggcagccacttccaaattccctatggccttttctgttattagtctttccatctaaacgtaacctgtttttcttttgcttctccatttagactggnaaccgcctcaatcgactgaatcaagcaggccagcttttcctgctgcagacagttgagctggggtcctgggttgggatggtgacatttgacagtgctgccc

SEQ ID NO: 41230 - DNA, 201 bp, Homo sapiens
actgagcagatgggcaactgtggagagaagggtgaaaggatccacctcactcctgatttcattgcaggaaaaaagttagctgaatatggaccacaaggtawgaaatattctaccatacttctcatacaatttaactattttatgttcaaagtgtatcaacactagcattatctttgtgagtaagcatgtataagccaaaca

SEQ ID NO: 41231 - DNA, 201 bp, Homo sapiens
acaaaatatctctaggtaacagcatacttaatggtaaaatatagaattctttagaatgtttttctccctgagattgggaacaagaaaaaagatatccattmttttcactattcaatattgtactcaaggtcctagctagtccaataagagaaggaaacaaaaatattggaaaggaagaatcaatatgtaattactcacaaa

SEQ ID NO: 41232 - DNA, 201 bp, Homo sapiens
acaagaatgtgaatgaaattgggatcactacaagaactagattcccatgcattcactgagaaaatgagaagtctttcaaaagcacaaaattttggaaaccyaacataaaacattttattaaaaactgaaatttaataagaaaaatgaaatacaaacatcgagaaagtgaaagaaatatgcataaacaatcaaggcattctt

SEQ ID NO: 41233 - DNA, 201 bp, Homo sapiens
tattgctttagctttgtcatataaattttgataggccatattttaattatcatttagttccaaatattttctaattttcgtgtgtgtgtgtgtgtgtgtgkattttgagacaaggtctcactctgtcacccatgctagagtgcaggtggtgtgatctcggctcactgcaacatccacctcccagtttcaagcaattctcct

SEQ ID NO: 41234 - DNA, 201 bp, Homo sapiens
tcaacaagaatgtgaatgaaattgggatcactacaagaactagattcccatgcattcactgagaaaatgagaagtctttcaaaagcacaaaattttggaamcctaacataaaacattttattaaaaactgaaatttaataagaaaaatgaaatacaaacatcgagaaagtgaaagaaatatgcataaacaatcaaggcatt

SEQ ID NO: 41235 - DNA, 201 bp, Homo sapiens
ctctacagattgaacagaccagggtattttttaaattccaggattacttttatacatgtcttcaacaagaatgtgaatgaaattgggatcactacaagaaytagattcccatgcattcactgagaaaatgagaagtctttcaaaagcacaaaattttggaaacctaacataaaacattttattaaaaactgaaatttaata

SEQ ID NO: 41236 - DNA, 201 bp, Homo sapiens
aaaaaatgtattttttcaatgctcttttttagtaattgcagaaattattcacattaatttttaaactagagagagtgaacaatcagcattcacactggtgkgaattataatttttatgatgaaagttcagataaagataaaggaaaactgtaatgtcaaagcctaataatgagagattttgaaaccataggctttctggct

SEQ ID NO: 41237 - DNA, 201 bp, Homo sapiens
actccttcctatttgatgttccagatctgcagagttgagggacctcgttgagggcttggccacctttcccaaccattcctccctctactccaacaaccttmttgctgatgagagactctcccctggtgcccctgtggggacagaagcccctaactcagcttttaaaatatttgcttcagcaggacagtccccagatttccc

SEQ ID NO: 41238 - DNA, 201 bp, Homo sapiens
tatgccagaaggagaatgtagatgccgtattcatcttcagtgaccgtggtaatttgtatctacagtatatagtgactagagctttcaaagtgcttctactycattgtccttggaggttttcctcccgagatacgtacttctcgctacaattattaaattgtctttccagtatggatcctaaagttgggggtgagataagtt

SEQ ID NO: 41239 - DNA, 201 bp, Homo sapiens
agaatcaaccaataatgacaatgatgactcagaagtcacctaacattacctggggacagctaaagagattggatcaacaggcatctatcctgcttgcagcygtggaagcccatgcaactgcagagaatcggtttcttatgtatctgtggcaactggggaaacttctgagaaagtaagacagacatggatgttggggtggct

SEQ ID NO: 41240 - DNA, 201 bp, Homo sapiens
cagggaagagcaaagggcatgttaaacaaggcaaaagatcactcccaaaatggaatacaatgcagttcctccataaaaccttcacgtattgtgtgtctaaytcccatacacagacagatggttaaaatagattccatgtgtcaccagcttctttagcagagtaggtgaacacatatttttcttttttaacttagggataat

SEQ ID NO: 41241 - DNA, 201 bp, Homo sapiens
gaggattcagagacacatggtgtcactcatgcaaaggtgataatagagggaaatgttttaaaagataccactgcattttttttttagacagtcttgctctrtcaccagtctggagtgcagtggcacaatctcagctcactgcaacctccacctcccgggtccaagtgattcccctgcctcagcctcccgagtagctgggac

SEQ ID NO: 41242 - DNA, 201 bp, Homo sapiens
tgcccgcctcggcctcccaaagtgctgggattacaggcgtaagccaccgtgcccagcccatgccactgctttttgagttaggggaaggaggcagaaggggmctggtttagtggctaggtctagccttatggcagcattttacttacagtaatatatttcattcttgtaagtatccctttttaaagatggggaaacagaagc

SEQ ID NO: 41243 - DNA, 201 bp, Homo sapiens
tcctcctgctcaggccagggagcatagtagatgaatttcatgtgggccagcacactgagcccacgtgtaagcaggtgggaaaattatgtccatgaaacagrcagtcccataccacttttggttacaaacacttgccctggactagagaaggaattgagaccaagtttgtgtcccaatgggttccaggactagttttccatc

SEQ ID NO: 41244 - DNA, 201 bp, Homo sapiens
aatatagggcgaagcacaatatgatgaatgtcgaaggattgatagaaataaaatcctataggagatcagaggaaggggagattttttacaactggtaaatragatggacagcagagaaaccttcatggagaaagtaatatttgaattttgaaggatgggtaaggcttagacaaacagagaagactaagaaggcttagataa

SEQ ID NO: 41245 - DNA, 201 bp, Homo sapiens
tatggggctctgttctcgagactaggacctgtcggagaatcaaccaataatgacaatgatgactcagaagtcacctaacattacctggggacagctaaagrgattggatcaacaggcatctatcctgcttgcagccgtggaagcccatgcaactgcagagaatcggtttcttatgtatctgtggcaactggggaaacttct

SEQ ID NO: 41246 - DNA, 201 bp, Homo sapiens
agcaattaggtaattcagacaatccatgcgtgggtaaaaaataagtcacagtgagtccccttaagggttcatagtctaataaataagatgagcttcatatmccaataaatatagggcgaagcacaatatgatgaatgtcgaaggattgatagaaataaaatcctataggagatcagaggaaggggagattttttacaactg

SEQ ID NO: 41247 - DNA, 201 bp, Homo sapiens
aaggtggaggttgcagtgagccaggatcatgccactgtactccaccctgggcaacagagtgagagcctgtcttagaaaaaataaataggttaaaaaaatastatcaaattctgagttaatgtaggcacctatttgatgttgatctatttatactttaataacacaaagggatatttatattgtatgctctctaaacaacag

SEQ ID NO: 41248 - DNA, 201 bp, Homo sapiens
tggccttggcttatgtcatttatctccacagggcctgcaatactacctgacttagcaattaggtaattcagacaatccatgcgtgggtaaaaaataagtcmcagtgagtccccttaagggttcatagtctaataaataagatgagcttcatataccaataaatatagggcgaagcacaatatgatgaatgtcgaaggattg

SEQ ID NO: 41249 - DNA, 201 bp, Homo sapiens
cgcttgagcctggaaggtggaggttgcagtgagccaggatcatgccactgtactccaccctgggcaacagagtgagagcctgtcttagaaaaaataaatargttaaaaaaatagtatcaaattctgagttaatgtaggcacctatttgatgttgatctatttatactttaataacacaaagggatatttatattgtatgct

SEQ ID NO: 41250 - DNA, 201 bp, Homo sapiens
gcagctccctcattctattccaaacaagctggccttggcttatgtcatttatctccacagggcctgcaatactacctgacttagcaattaggtaattcagmcaatccatgcgtgggtaaaaaataagtcacagtgagtccccttaagggttcatagtctaataaataagatgagcttcatataccaataaatatagggcga

SEQ ID NO: 41251 - DNA, 201 bp, Homo sapiens
aactcagagtgatatactgttggcaactgataaatgataaattgatatgtactgctgtggattatgtcactgaaaattatttagttctatagtaaggcagrgtcagctacatttgacagatattgtgagatgcacagatcctttgcctgattttacccttggcacgagtcagactctccttttattctcctaataggaacc

SEQ ID NO: 41252 - DNA, 201 bp, Homo sapiens
ttgctgaagctattatttactaagatttaaaaattagtggctgggtgtggtggctcactcctgtaatcccagaattttaggaggccaaggcaggtggattkattgagcccaggagttcaagaccagcctgagtaacatggcaaaacccatctctaaaaaaaaaaaaaaaaaaaaaaaatacaaaaattagacatgttggca

SEQ ID NO: 41253 - DNA, 201 bp, Homo sapiens
ctaagcactgatgcagacctagtcggagtctagctgtgcccacaggggactctggaatggaaagtacatcacagacttgtctcaccttgagacaggagggyggccttttgcaccattgtgtctatcagtctttggctgtggactgtcagaacagggcagaggagaggggcatgttatttctctaggtagggtggccccttt

SEQ ID NO: 41254 - DNA, 201 bp, Homo sapiens
aaagtaaactgcaatcgtctgagggagggactgtgatggcttgggtgatggatatttcattggagatggagaaaagatgaagaaattgagatatagtgaartgcactggtcttgggtactttttaggagggaaaaggtaggaaaacttccagtttcctaattttggtgatggggtgcatagtggtgacatcaagttaggaa

SEQ ID NO: 41255 - DNA, 201 bp, Homo sapiens
ttgggtccatgcaatttataggagagagagctcttaggagaaaaggaaggaggaaaggatagggccagggaaggagctaagcactgatgcagacctagtcrgagtctagctgtgcccacaggggactctggaatggaaagtacatcacagacttgtctcaccttgagacaggagggtggccttttgcaccattgtgtctat

SEQ ID NO: 41256 - DNA, 201 bp, Homo sapiens
aaacaagatggaaaagtcacaaagtaaactgcaatcgtctgagggagggactgtgatggcttgggtgatggatatttcattggagatggagaaaagatgawgaaattgagatatagtgaagtgcactggtcttgggtactttttaggagggaaaaggtaggaaaacttccagtttcctaattttggtgatggggtgcatag

SEQ ID NO: 41257 - DNA, 201 bp, Homo sapiens
ctgatggatctgaaattgtgctgctgacggatggggaagacaacactataagtgggtgctttaacgaggtcaaacaaagtggtgccatcatccacacagtygctttggggccctctgcagctcaagaactagaggagctgtccaaaatgacaggtgagggatgatttgctgagacccccggtattgtctctcctactggac

SEQ ID NO: 41258 - DNA, 201 bp, Homo sapiens
ggaaacaagatggaaaagtcacaaagtaaactgcaatcgtctgagggagggactgtgatggcttgggtgatggatatttcattggagatggagaaaagatraagaaattgagatatagtgaagtgcactggtcttgggtactttttaggagggaaaaggtaggaaaacttccagtttcctaattttggtgatggggtgcat

SEQ ID NO: 41259 - DNA, 201 bp, Homo sapiens
acctgagaactctacagattgaacagaccagggtattttttaaattccaggattacttttatacatgtcttcaacaagaatgtgaatgaaattgggatcamtacaagaactagattcccatgcattcactgagaaaatgagaagtctttcaaaagcacaaaattttggaaacctaacataaaacattttattaaaaactga

SEQ ID NO: 41260 - DNA, 201 bp, Homo sapiens
cagaaggggactggtttagtggctaggtctagccttatggcagcattttacttacagtaatatatttcattcttgtaagtatccctttttaaagatggggraacagaagctagagagcttatgggttcatataactaatagtgttagtgcctggcataacagtagaaggccatattcttccctctatccctcgataagcct

SEQ ID NO: 41261 - DNA, 201 bp, Homo sapiens
acatgacttgttttataggagttttggaccagcatcactaggaatatgtcttattttctctaaatttgagcaatgatggtgcatttaaggaagagatggcwttgaagaaagaaagaacagcacaatgaaaattccctaggcacagaaatgaacgttatgtgcatgaaattacaagagttagtgatgctttaagccatggca

SEQ ID NO: 41262 - DNA, 201 bp, Homo sapiens
ccttaggtgattaggaagaaatatccaactgatggatctgaaattgtgctgctgacggatggggaagacaacactataagtgggtgctttaacgaggtcaracaaagtggtgccatcatccacacagtcgctttggggccctctgcagctcaagaactagaggagctgtccaaaatgacaggtgagggatgatttgctgag

SEQ ID NO: 41263 - DNA, 201 bp, Homo sapiens
agtgacagggacacactcgccaaaagattacctgcagcagcttcaggagggacgtccatctgcagcgggcttcgatcggcatttactgtgagatgtgtttktctattgtagtttggaatgtttgcaatttatgttgcttaacaaacttccatttccagtgtttccatacatgcctagggtccaactggatgagataaccaa

SEQ ID NO: 41264 - DNA, 201 bp, Homo sapiens
gtgggctcccccacccttaccccagcatctggcacagctgaaggcagatggaaatatttacaagtacgcaatttgagactaagatattgttatcattctcytattgaagacaagagcaatagtaaaacacatcaggtcagggggttaaagacctgtgataaaccacttccgataagttggaaacgtgtgtctatattttca

SEQ ID NO: 41265 - DNA, 201 bp, Homo sapiens
tcacttctaagacattccatctaaaggctgatgcaggaaaatggccaacaccaaaggacattttaaaaagttttttggggttttttcttttttttttttttacatacttaagctaactcaatgcaggtttattatcctggcgacttgcagtcacattctaatgattttcaagggccaaaatatagtaataatcatttgaaa

SEQ ID NO: 41266 - DNA, 201 bp, Homo sapiens
tgttcctcccacctcccaccaggtccctccctcgacatgtggggattatggggattacaatttgagatgagatttggttgaggacacagagccaaaccgtmtcacctgatacagaacttacctagaattattactaatgcattgaactttaatgattatgtaatctgtttttatcttttactatttatactctggccctaa

SEQ ID NO: 41267 - DNA, 201 bp, Homo sapiens
agagagagagagagagagagtgcgcaatgtgggaagagccccttagccccttataaaaccatcagatctcgtcagaactcactcactgtaacgagaacatyctggaagaaaccacctccatgttcctcccacctcccaccaggtccctccctcgacatgtggggattatggggattacaatttgagatgagatttggttga

SEQ ID NO: 41268 - DNA, 201 bp, Homo sapiens
cggtcaagttccatgaatgctgctgggttaagattgtatcatttcaagacagacagatatttggtcattcccagacaattttggttattccctctagaatytcttttctcctttcctgtaagcagaattttcataaacactttggccaccctaagtctgataactcgtgccctaaattctgtccttaggtgattaggaaga

SEQ ID NO: 41269 - DNA, 201 bp, Homo sapiens
cgtccttcaatttggcattgcagtccattcccaggcctattcagaaacttccaggaggaggcccagattatatattttaaattagccacagagttaaataygatgcctagtcaggtgtggaagcctctgcctggggtttacacaaacgtttttcaggtctgcttcctaaaaagtatccatattgataacataaaaacatta

SEQ ID NO: 41270 - DNA, 201 bp, Homo sapiens
tggttgttaactgaaattttctatctttttaagagtgttggttacattagggagtttacacatagtttaaatagctttaaatagttttaaaattcttaatktttttaatgaataactggtcataaaatgaacttggccagttattgatattactgctaaatatataaatcagaaattttgtgcaaaatgagattgaaggca

SEQ ID NO: 41271 - DNA, 201 bp, Homo sapiens
gggatcctttcagagatttcttgctacctcttatgtagcagaagggaaaggaagaagacttcctgtcctggcaggggtatctataccattgaagaaggtcwtgtacaacaacaaacagctaaaactaagagggaaatgctttataaaagaccgccctggaatctggctgtaacacatccagaggcagtgctgtactagtaa

SEQ ID NO: 41272 - DNA, 201 bp, Homo sapiens
aacttggtaacagtagctcatttctgatggtgagacatgtttttttcttttcttcatgctttttgccattttccaaattttctataccggtcatgcatggktatatacttaaaaaatacaattaaacaataaggtgtagggggaaagcattccaactataatagcaacaaaagtcataaatacctaatacatggaaacatt

SEQ ID NO: 41273 - DNA, 201 bp, Homo sapiens
tgatataagaacaaccctgaccttctgatgggagaaaaccttgcattttatcagtcccaattcaagggatcctttcagagatttcttgctacctcttatgyagcagaagggaaaggaagaagacttcctgtcctggcaggggtatctataccattgaagaaggtcttgtacaacaacaaacagctaaaactaagagggaaa

SEQ ID NO: 41274 - DNA, 201 bp, Homo sapiens
aattaaagcagaggagtaagaggaaagactctcaggcagctgtgaggtggaacaaacagagaggaaacaagatggaaaagtcacaaagtaaactgcaatcrtctgagggagggactgtgatggcttgggtgatggatatttcattggagatggagaaaagatgaagaaattgagatatagtgaagtgcactggtcttgggt

SEQ ID NO: 41275 - DNA, 201 bp, Homo sapiens
cattcaattcatggaagatataaacgcaaacaaaattcatatatagggtttatgaaacgctaatcaaaagtacatcaatttttacctcattaaaaaaatcyaagagttcgttgagtagatagtagctaagatcattttgggaacaagaaagtaataaagggaattcttacttttcaaattttaaatatgctataaaactac

SEQ ID NO: 41276 - DNA, 201 bp, Homo sapiens
ggtatatgaagagtggattgtaatgtatgaacaattaaagcagaggagtaagaggaaagactctcaggcagctgtgaggtggaacaaacagagaggaaacragatggaaaagtcacaaagtaaactgcaatcgtctgagggagggactgtgatggcttgggtgatggatatttcattggagatggagaaaagatgaagaaa

SEQ ID NO: 41277 - DNA, 201 bp, Homo sapiens
catggtggctcacatctgtaatcccagtactttgggaggccgaggcaggatcacctgaggtcaggagttcaagaccagcctggccaacatggaaaactccrtctctactaaaaatacaaaaaaattggccatgtgtgatggcacacacctataatcccagctactcaggaggctgaggcaggagaattgcttgaacccggg

SEQ ID NO: 41278 - DNA, 201 bp, Homo sapiens
ccaagtgaaggaaactaggaacaccttctttgctgtttccccagtgctgtccacccctagagttgccctgcatcccacaccgtccctctctgcagcagacyagccaaggggaaagacagcggtcaagttccatgaatgctgctgggttaagattgtatcatttcaagacagacagatatttggtcattcccagacaatttt

SEQ ID NO: 41279 - DNA, 201 bp, Homo sapiens
aaagcctatcaaggagagaccaagtgaaggaaactaggaacaccttctttgctgtttccccagtgctgtccacccctagagttgccctgcatcccacaccrtccctctctgcagcagactagccaaggggaaagacagcggtcaagttccatgaatgctgctgggttaagattgtatcatttcaagacagacagatatttg

SEQ ID NO: 41280 - DNA, 201 bp, Homo sapiens
ttcttaaatagatagcattattcttttatctaattttcctcccgtcctaatcttattcaacattggcagaaggagtatcctgtctataccatataaaaaamtaaataaataatccaaatataccaggagtagttgagacataggtgtcacagaacaactaggaactgagaattaatggaaatgaaatgttttgctttaatc

SEQ ID NO: 41281 - DNA, 201 bp, Homo sapiens
gcccaggagttcaagaccagcctgagtaacatggcaaaacccatctctaaaaaaaaaaaaaaaaaaaaaaaatacaaaaattagacatgttggcatatgcytgtaatcccagctacttgggagctgaggtaggaagatcgcttgagcctggaaggtggaggttgcagtgagccaggatcatgccactgtactccaccctgg

SEQ ID NO: 41282 - DNA, 201 bp, Homo sapiens
ctgacttcagtgggaagtctctcttatcttccagtctcatataaaattacattttccttttggaatagagggtgcaataaattgcaagagtctgttcaacwggaatggagcataagtttttaaaatgtgatgcaccatggctcaccaggcccatcgtccttcaatttggcattgcagtccattcccaggcctattcagaaa

SEQ ID NO: 41283 - DNA, 201 bp, Homo sapiens
atcagtaggctcttgatttaactttcagagagctcttttcagactgcatgtttgcttttggttgttaactgaaattttctatctttttaagagtgttggtwacattagggagtttacacatagtttaaatagctttaaatagttttaaaattcttaatttttttaatgaataactggtcataaaatgaacttggccagtta

SEQ ID NO: 41284 - DNA, 201 bp, Homo sapiens
ggcaaggcagcacagcactgaggtctggttgggagagttctccatttccccacaattcctacatttcaaaatgctggaaaacatgagggcttctgcaaggyccaaaacacattaacagctcaagctcaatagattcagtctctggggagttgccatagggtattccacaacccccaaaaaaggaaaagaggaaaattaata

SEQ ID NO: 41285 - DNA, 201 bp, Homo sapiens; identical to SEQ ID NO: 7324

SEQ ID NO: 41286 - DNA, 201 bp, Homo sapiens
ttggacagctcctggggatgattatgaccatggaacaggtaagctgaacctggtgtggaccctgtaaaagagtttaccagccaagtagaagagcagaagcrggtgaggcaggcagccgtgttctgatacttagggggcagaaggcaggagggatcttgccggtcctttgaaatgagggataaatgtatttaaagaagagag

SEQ ID NO: 41287 - DNA, 201 bp, Homo sapiens
cattttctaaaaaagccttgttaatccttccttacctcactcccactctgcagctccctcattctattccaaacaagctggccttggcttatgtcatttayctccacagggcctgcaatactacctgacttagcaattaggtaattcagacaatccatgcgtgggtaaaaaataagtcacagtgagtccccttaagggttc

SEQ ID NO: 41288 - DNA, 201 bp, Homo sapiens
actctgagacaataactacctaggagataatcctcaaaatcacattttctaaaaaagccttgttaatccttccttacctcactcccactctgcagctcccwcattctattccaaacaagctggccttggcttatgtcatttatctccacagggcctgcaatactacctgacttagcaattaggtaattcagacaatccatg

SEQ ID NO: 41289 - DNA, 201 bp, Homo sapiens
tttatgatgaaagttcagataaagataaaggaaaactgtaatgtcaaagcctaataatgagagattttgaaaccataggctttctggcttaccaatggagyatttattcaatctaggaagacagcaattatacccatctgggttattctggttcagatttagaaaattaaatgcaagggcctgctttggaaaagggaggaa

SEQ ID NO: 41290 - DNA, 201 bp, Homo sapiens
gtgagtccagacccctggatcttggtcctcggtctgccattaactatgtgacctaggcaaagaacttcacctctgtggaccttcatttctccaccaggtakagacagaaaacttccaatggcccatctggttctaaaatttcaagaaaaccaaattgccttttaaaagtcttgaaactattaagaaaaaagaaaaaatgta

SEQ ID NO: 41291 - DNA, 201 bp, Homo sapiens
gtacataagtcattcactcaagtttaacaaatatcactgaatgcctgctaagttctagacactatgtgcccagatatgacagtgaagaagtcatattgtcwgtcctcatggagacaattttctattgtgggagactggcaagtaagtagcaatgactgtttatcattgtaagtgcctaatgggagatggtgaaatgcaaac

SEQ ID NO: 41292 - DNA, 201 bp, Homo sapiens
tataaggcacagaaaacaagcaaacaaaagaacgctatccaagccccatccccaaacacactagagcgcttaaagacctggtcaaaaggatgtgtcaagcrtacctctttgttgttctacaacacatttcacctccataacaggaacagaacattctcaatgtatgactcaacaaataagtgttgaattgattgacctgac

SEQ ID NO: 41293 - DNA, 201 bp, Homo sapiens
agatcgcgccacaccagcctggatgacaagagcgaaactccatctcaaaaacaaaaacaaagaaaggaaggaaggaaggaaggaaggaaggaaggaaggawggaaggaaggaaggaaaaaacagatgtagtatttaaactgaccttgtggaaagacaagatcaggatgggcaaaaagatgggaaaataagcaattttagga

SEQ ID NO: 41294 - DNA, 201 bp, Homo sapiens
ccaccagatggcgtatatgtgcagtgctctcagacgtgcattcaaattatatatgaatcttgttaaaatgtggattctcctttaggaggccgaggcgggcrgatcacgaggtcaggagatcaagaccatcctggctaacacagtgaaaccccgtctctactaaaaatacaaaaaattagccgggcgtggtggcggacgcct

SEQ ID NO: 41295 - DNA, 201 bp, Homo sapiens
tattacaggagtcagcaggtgttaaaatcacattcactttttctcttcattactacttgctgtgagaccttgagaattatactaagtctcagtttcacccycaaagatttgtggattctcaaagaagcaagtgaaacgcatagctaatattttatacttgcttgtgtgaagtaaacactgttcctagcacatcatatgttt

SEQ ID NO: 41296 - DNA, 201 bp, Homo sapiens
ccccagatgcaaatctctgatataagaacaaccctgaccttctgatgggagaaaaccttgcattttatcagtcccaattcaagggatcctttcagagattycttgctacctcttatgtagcagaagggaaaggaagaagacttcctgtcctggcaggggtatctataccattgaagaaggtcttgtacaacaacaaacagc

SEQ ID NO: 41297 - DNA, 201 bp, Homo sapiens
actaacacccaagtgctgcttccccataaaatggtgaagcatttctgctcctaacacgacccccactaggcaatggagtctagtcactctggtctgttccygcaaggactttgctcctgcaatgacccctttttcttttacatttttgtttttttttttcattagcatagaaatattttataatataatattaaaacaaac

SEQ ID NO: 41298 - DNA, 201 bp, Homo sapiens
ctctccttttattctcctaataggaacccccttccctgtgatcctaaaaggagccccagatgcaaatctctgatataagaacaaccctgaccttctgatgrgagaaaaccttgcattttatcagtcccaattcaagggatcctttcagagatttcttgctacctcttatgtagcagaagggaaaggaagaagacttcctgt

SEQ ID NO: 41299 - DNA, 201 bp, Homo sapiens
cagaattttcataaacactttggccaccctaagtctgataactcgtgccctaaattctgtccttaggtgattaggaagaaatatccaactgatggatctgwaattgtgctgctgacggatggggaagacaacactataagtgggtgctttaacgaggtcaaacaaagtggtgccatcatccacacagtcgctttggggccc

SEQ ID NO: 41300 - DNA, 201 bp, Homo sapiens
tatggacaagatgaaattaatgcttatcaccatctgaagaccaaatgaatttatgaacgaagagatatttcaagtatttcaatacaagaaaatggggggcyaatttgaggttccacctgaggtttggcaaattgaaagaatatacacagccactgacagcccataattcatgttcctagggacatttagtttcagcaaaat

SEQ ID NO: 41301 - DNA, 201 bp, Homo sapiens
cattaagaacacttaaaaaaatagaggcaaccattattatcactatttgaaagggagaaattgaggctcagagaagtaaaataagttctttaagtttaccscttaggaagaggcacagcaggacttacccgtgcactaacacccaagtgctgcttccccataaaatggtgaagcatttctgctcctaacacgacccccact

SEQ ID NO: 41302 - DNA, 201 bp, Homo sapiens
tccaacttacaagggacgtgaaggacctcttcaaggagaactacaaaccactgctcaaggaaataaaagaggatacaaacaaatggaagaacatttcatgytcatggataggaagaatcaatatcgtgaaaatggccatactgcccaaggtaatttacagattcaatgccatctccatcaagctaccaatgcctttcttca

SEQ ID NO: 41303 - DNA, 201 bp, Homo sapiens
acataccacaaggcatgggggtctctctttctaagcgactgccgaaagggctggatgacacagccaggaagtctggggggagatgatcacctgtagaagawgagaaggagccaaacgcttttccttcctctctccaaagggctgctccaaggcgtggtttctttgcacagccccttaggagacaacccacacaggaaggca

SEQ ID NO: 41304 - DNA, 201 bp, Homo sapiens
cctggctcctcacataccacaaggcatgggggtctctctttctaagcgactgccgaaagggctggatgacacagccaggaagtctggggggagatgatcayctgtagaagatgagaaggagccaaacgcttttccttcctctctccaaagggctgctccaaggcgtggtttctttgcacagccccttaggagacaacccac

SEQ ID NO: 41305 - DNA, 201 bp, Homo sapiens
agtgaactgtatcagactcttcttattgaacctcctcagatttgcttggttccatctgtctaccgggcactcagtcatttgctccacctcagtcactatcyactccttgcaggtccaagcagttccactgcctgaggtcaagctgccacctcttgtaacccctggctcctcacataccacaaggcatgggggtctctcttt

SEQ ID NO: 41306 - DNA, 201 bp, Homo sapiens
tctcttctagggagtcaaggtagcctcctctaatagctgaaacagtgagtgaggcggaaacctcctctgccctcagctttcccttccaccttcagaggacrccttcttttctgagattctaggcctttggaagatgccttcttatctgagattctaggccagagatgcttaggcttgatttcttgtttcccctaattctgg

SEQ ID NO: 41307 - DNA, 201 bp, Homo sapiens
agtgcagtacaccagtggaatttaggatgccccctggggtggagtctgggtgtggggtgggagaagctcatgtggcttcagggtgatgaggcaaaggaccwtggatcttatactgtgttcaagatccctgctagtccctgctgcaggccctggtcaggtctgccctgtgctccttgcagtggtgtctgctgtggccatatt

SEQ ID NO: 41308 - DNA, 201 bp, Homo sapiens
gaagggtaaacctcactttgtttctgaaatcttaccaaactgtcctttgacaaactccattttctgggtagcagtgactcctggggaagaactggaaatgkagcatagatgtctgcagagcagagctcttttggaaggaacctcaggtcctaccagactttctctctcaaagtgtggtctgtggactgcagcatgtagata

SEQ ID NO: 41309 - DNA, 201 bp, Homo sapiens
ccgggaagtggcctgctgcttgctgtgctgctgcttttcctacttctgcccttccctgccacccctcgcatgtctcagttgacaagcaattccttgtcttycctggccccctagggaaagggctaagaaacagtccatgtgcacgccgaccttactagcctaaggtgggcaaagtagtgcggaggagcctagagtacggag

SEQ ID NO: 41310 - DNA, 201 bp, Homo sapiens
gtaatgacatatatataaaatgtactttccaagaatcaaatgtgactctttactaaataactagcattagatttctttacctcaaaaaagatttggatccmctagaaccagcttgattttttttaacatataaggcacagaaaacaagcaaacaaaagaacgctatccaagccccatccccaaacacactagagcgcttaa

SEQ ID NO: 41311 - DNA, 201 bp, Homo sapiens
atagttttaaaattcttaatttttttaatgaataactggtcataaaatgaacttggccagttattgatattactgctaaatatataaatcagaaattttgygcaaaatgagattgaaggcatcagttaactgacttcagtgggaagtctctcttatcttccagtctcatataaaattacattttccttttggaatagaggg

SEQ ID NO: 41312 - DNA, 201 bp, Homo sapiens
tggtggcacatgcctgtaatcccagctactcaggaggctgaggcaggagaatcacctgaacccaggaggcagaggttgtagtgagccaagatcgcgccacrccagcctggatgacaagagcgaaactccatctcaaaaacaaaaacaaagaaaggaaggaaggaaggaaggaaggaaggaaggaaggaaggaaggaaggaa

SEQ ID NO: 41313 - DNA, 201 bp, Homo sapiens
tagcacataaagagcttttgaaaaatcagtaaaacagtaacatccaaatagaaaaatagacaaaggagaagaatagataatttacaaaagaagaaattaaratgcccaggagtttgagaccagcctgggcaacatggtgaaaccccttctctacaaaaaatacaaaaattggcctggcatggtggcacatgcctgtggtcc

SEQ ID NO: 41314 - DNA, 201 bp, Homo sapiens
aagtatcaaatccctagataacaaaactctttcaatgcattcaatcattgaaaaatataactaagagaataataaatgtggctacatataaattaaaaatkttgttgcacacaaaccaaacataaactaaataaaaaggaaaaaacagaaaaagatatttgcaaaaacaaaaaagaaagcctttagaagcttagtattgta

SEQ ID NO: 41315 - DNA, 201 bp, Homo sapiens
aaagtacatcaatttttacctcattaaaaaaatccaagagttcgttgagtagatagtagctaagatcattttgggaacaagaaagtaataaagggaattcytacttttcaaattttaaatatgctataaaactacattaattaaaacaatgtgagccagggcacagtggctcacgtctgtaatcccagcactttaggaggc

SEQ ID NO: 41316 - DNA, 201 bp, Homo sapiens
tatatcataaattaatatcaaatcatatcagagattcatggctgctttgcagatagttgaagtagccaggtgactgagatgttgctgaagctattatttaytaagatttaaaaattagtggctgggtgtggtggctcactcctgtaatcccagaattttaggaggccaaggcaggtggattgattgagcccaggagttcaa

SEQ ID NO: 41317 - DNA, 201 bp, Homo sapiens
tataatatactattctgtaagtgtccctttgtccactgttttttcttgctgctgtcacatatgtgcctttcctcatttagaagaaaactctaaagccacgyttgttggaattatgtttcaaataagagtaaatcgatagtcctggagtacggcttaatgacttctctcatgtaaaagtgcaggacctttaatatgtagatt

SEQ ID NO: 41318 - DNA, 201 bp, Homo sapiens
actgaaattatttccttaagttcagatggaattataatagttaaaaagtgctttcacatcaactaacttagtgacacctattctaaatagcccaggactgyctggcctggtgtaaaatcctgtttttataatatactattctgtaagtgtccctttgtccactgttttttcttgctgctgtcacatatgtgcctttcctca

SEQ ID NO: 41319 - DNA, 201 bp, Homo sapiens
tgagatggtttctgaaggcatcttggaagctctgaaagcctatcaaggagagaccaagtgaaggaaactaggaacaccttctttgctgtttccccagtgcygtccacccctagagttgccctgcatcccacaccgtccctctctgcagcagactagccaaggggaaagacagcggtcaagttccatgaatgctgctgggtt

SEQ ID NO: 41320 - DNA, 201 bp, Homo sapiens
cccaatataatccccattaaatgagatggtttctgaaggcatcttggaagctctgaaagcctatcaaggagagaccaagtgaaggaaactaggaacacctyctttgctgtttccccagtgctgtccacccctagagttgccctgcatcccacaccgtccctctctgcagcagactagccaaggggaaagacagcggtcaag

SEQ ID NO: 41321 - DNA, 201 bp, Homo sapiens
gatttgggtgggacacagagccaaaccatatcagatggatttacagtccagtaagtgcactgcaatgttaaaggggccttattgaaatttctacaagataycgtgaagctataaagggtggaatggaaattctcaggaggaagagtagaaaatggagaaacatttcggaagtgactttttggctgaacatgaaggtagagt

SEQ ID NO: 41322 - DNA, 201 bp, Homo sapiens
ggaaaaagaacatattactgctacattcaacaacttggctgaatctcatatagaaaatgttatgtcacaatagcgaaatgcaagagtacatacagcatatytctgtttatatgaagttcaaaaacaggcaaaattaacctatgtggcatagaagtcagaatagcaattatcttttggggggatttactggaagggaatgca

SEQ ID NO: 41323 - DNA, 201 bp, Homo sapiens
gccaagatcgcgccacaccagcctggatgacaagagcgaaactccatctcaaaaacaaaaacaaagaaaggaaggaaggaaggaaggaaggaaggaaggawggaaggaaggaaggaaggaaaaaacagatgtagtatttaaactgaccttgtggaaagacaagatcaggatgggcaaaaagatgggaaaataagcaatttt

SEQ ID NO: 41324 - DNA, 201 bp, Homo sapiens
caggaggctgaggcaggagaatcacctgaacccaggaggcagaggttgtagtgagccaagatcgcgccacaccagcctggatgacaagagcgaaactccayctcaaaaacaaaaacaaagaaaggaaggaaggaaggaaggaaggaaggaaggaaggaaggaaggaaggaaggaaaaaacagatgtagtatttaaactgac

SEQ ID NO: 41325 - DNA, 201 bp, Homo sapiens
gggagattataaaagccttgagaccagctgtaacagcaggcattgcaatttatttcaataaccttcttgccttatgcacttgagcagattgcaattgaccwccactttgaaggagattctgtaaatgattaaacttgtaccttctctcaggggaaaagtgagacagctagtgctcacacacacagaaacacaaatcctaca

SEQ ID NO: 41326 - DNA, 201 bp, Homo sapiens
agaaaagacaatttaattaaaaattgtgcaaaaaaaaaaacttgaagagatacttcacaaaagaccaatatgtatataaaaaggtctttaacaacattagycattagggaaaatgcaaatcaaaaccacagaacgatatgactacactcccaagaaaatggatagttagaaagactgacagtacaatgtactggtggaaat

SEQ ID NO: 41327 - DNA, 201 bp, Homo sapiens
ttctattacaatgtggaagacaagagcatttcatggtacttattcttcctgggagacattggaaattcacatttcacaagtcaaatggtaaaacaatactvtaatatatgaagttttatacctacttttcaagtttttggtgatcttggctcattttttaattttattttttaaagtgacataatattaaactctcctagt

SEQ ID NO: 41328 - DNA, 201 bp, Homo sapiens
ggcatgaacccgggaggcggagcttgcagtgagccgagatcatgccactgcactccagcctgggcaacagagtgagactccatctcaaaaaacaaacaaasaaacaaacaaacaatgtgggcagacattacacatatgataatttagttattataggtagaattacaagtctgtgaagaaagataggatttcttgagatag

SEQ ID NO: 41329 - DNA, 201 bp, Homo sapiens
aaatgaaaggggaaggagaagaagaggaaaaagggttggaagtgtaggcctagcactatggcagtcctcgtgaaggactagtcacagattccagtgcctgyaggtgtagatagtcctgtgaaaattgtttcgagttcccagttattagtacaatgagttcaagatgtgggtggctctctttatgattgaaaacaaaatatc

SEQ ID NO: 41330 - DNA, 201 bp, Homo sapiens
atctaacagagttgctaaaagttgtttgatttcttttggtgaagaaaagccaatctaaattatttaaatataaaagacatgacttgttttataggagtttyggaccagcatcactaggaatatgtcttattttctctaaatttgagcaatgatggtgcatttaaggaagagatggcattgaagaaagaaagaacagcacaa

SEQ ID NO: 41331 - DNA, 201 bp, Homo sapiens; identical to SEQ ID NO: 7309

SEQ ID NO: 41332 - DNA, 201 bp, Homo sapiens
ccttgccagtcatcaccctctttacatcacacatattcgctctcattctgggctatctggtcccttgtcagaaaggaatgcttgagctgatgctctggtaygaccacagatgtggtttgcagattctcctgcttttttgcgagctcaagctgatcatgctgtttttcatcagaacgcctgcagtcttaaacaacagtttca

SEQ ID NO: 41333 - DNA, 201 bp, Homo sapiens
cactgtgtcattatatacaaacaagaatgtaaaagagatagtaatccttgtaaacaggaccatcagttcatttatttgggaaccttatggggtgatgatayaatttctcatagacttttaaagctttttaaatattttttaaagctctactgcttaagaagtttctttaatatttcagaattaaagtcacattcttctttt

SEQ ID NO: 41334 - DNA, 201 bp, Homo sapiens
tttctggccttgtcggttttctgtttccctggagtataaggggaacttacatgctgcctcctgggttttatcctagatagctctggctttcttgctgcccrcagaggcctggggcaggagagttgctaagatgccatggagtgcccatttagtcacttgcagtctgggcaggttgcccctttctgggtttgtggtgatgga

SEQ ID NO: 41335 - DNA, 201 bp, Homo sapiens
ttatttgtagacctttcttatttcaaaaccagatttgagccatcttagtgatacatgcaataaacataaaaataaagaaataaaatatataataaaaactrgaagaagtgctcaggtataaacctataaagaatacatgggggaaaaaaactagagggaaaaccaccacatcaaatgcataatataatgttctgtacaatt

SEQ ID NO: 41336 - DNA, 201 bp, Homo sapiens
attcaaattacttttccatatattagcaataaccagttcaaaaatataatagaacaatacttcaagacagcaatgaaaggtatgataaaagtagaaacaaygctaagaaatgtggaagatgtatttaaagaaaactataaaatccttctcaaggggttaaaagaaaaccaaggtaaattgggaaacattcaattcatggaa

SEQ ID NO: 41337 - DNA, 201 bp, Homo sapiens
ccaaatacaaaataaatattcaaattacttttccatatattagcaataaccagttcaaaaatataatagaacaatacttcaagacagcaatgaaaggtatrataaaagtagaaacaacgctaagaaatgtggaagatgtatttaaagaaaactataaaatccttctcaaggggttaaaagaaaaccaaggtaaattgggaa

SEQ ID NO: 41338 - DNA, 201 bp, Homo sapiens
ggctggggaggcctcaggaaatttacaatcatggtggaaggggaggcaggcatgtcttacatggcagcaggagagagagagagagagagagagagtgcgcwatgtgggaagagccccttagccccttataaaaccatcagatctcgtcagaactcactcactgtaacgagaacatcctggaagaaaccacctccatgttcc

SEQ ID NO: 41339 - DNA, 201 bp, Homo sapiens
tcgtacaggcagggtgtccttatgttgcccaggctagtgttgaactcctggactcaagagatcctcccacttcgacctgccaaagtgctgggactacctcwgacatcatggtggcgtgagccaccatgcccggcccagaatggtatctgtgtggactctgtcagtatgaatgggcttgggagggactgtgaaacttatctg

SEQ ID NO: 41340 - DNA, 201 bp, Homo sapiens
attaggattcttgtgtcagataagataatgaatgcaatgcacataactcagagtgatatactgttggcaactgataaatgataaattgatatgtactgctrtggattatgtcactgaaaattatttagttctatagtaaggcagagtcagctacatttgacagatattgtgagatgcacagatcctttgcctgattttacc

SEQ ID NO: 41341 - DNA, 201 bp, Homo sapiens
cttctctgatgcaatcatacgttgctttgacttttcaaacccagtgggcaccattccaaacctgatatctctttcccagttctctttcctaagcttccagmcagttagacaccatatattgccttggcagaaagggtgattagtagtatttccttctagagatattctagaaatgagtacatatacaacacatttttcttt

SEQ ID NO: 41342 - DNA, 201 bp, Homo sapiens
gttggaaatatacaaataccctccccgttacctatttattaattccttcattctttatcaaggtgctgatgctactaaggatgacggtgtctactcaaggyatttcacaacttatgacacgaatggtagatacagtgtaaaagtgcgggctctgggaggagttaacgcagccagacggagagtgataccccagcagagtgg

SEQ ID NO: 41343 - DNA, 201 bp, Homo sapiens
acatttagtttcagcaaaataatttaatgatgttaattggaattttattgactggtaggagctatgcaatagagaaagcagaaatctgatgaggaacttgragtatgctttgcaaagtaagatatacattttatctttactctccattataaaatagtcaataatatctacatcacttgctaatgcttttggtacaaatgg

SEQ ID NO: 41344 - DNA, 201 bp, Homo sapiens
tcagaaattttgtgcaaaatgagattgaaggcatcagttaactgacttcagtgggaagtctctcttatcttccagtctcatataaaattacattttccttytggaatagagggtgcaataaattgcaagagtctgttcaactggaatggagcataagtttttaaaatgtgatgcaccatggctcaccaggcccatcgtcct

SEQ ID NO: 41345 - DNA, 201 bp, Homo sapiens
ggccagttattgatattactgctaaatatataaatcagaaattttgtgcaaaatgagattgaaggcatcagttaactgacttcagtgggaagtctctcttrtcttccagtctcatataaaattacattttccttttggaatagagggtgcaataaattgcaagagtctgttcaactggaatggagcataagtttttaaaat

SEQ ID NO: 41346 - DNA, 201 bp, Homo sapiens
tctttttaagagtgttggttacattagggagtttacacatagtttaaatagctttaaatagttttaaaattcttaatttttttaatgaataactggtcatmaaatgaacttggccagttattgatattactgctaaatatataaatcagaaattttgtgcaaaatgagattgaaggcatcagttaactgacttcagtggga

SEQ ID NO: 41347 - DNA, 201 bp, Homo sapiens
agtaccttgttctcaccccctcccccagattcttatgaatttagtgaggcttttactccaagtgctccaagggagaatcaaagtttagagaaatcatcagygagcagtggattatctctgggacaagctgggtgtgcaagtcaaggataaagtcctgtcttccttccccttaccctcctcgtgtccacgctttcttctcca

SEQ ID NO: 41348 - DNA, 201 bp, Homo sapiens
tcaggaggctgaggcaggagaatcacctgaacccaggaggcagaggttgtagtgagccaagatcgcgccacaccagcctggatgacaagagcgaaactccwtctcaaaaacaaaaacaaagaaaggaaggaaggaaggaaggaaggaaggaaggaaggaaggaaggaaggaaggaaaaaacagatgtagtatttaaactga

SEQ ID NO: 41349 - DNA, 201 bp, Homo sapiens
tgtggaatataattgaatattttcttgtttaaggggagcatgaagaggtgttgaggttatgtcaaggtaaacaaaaccaccattgtggtaaagaccaccakgagggataactgaatatatggcttacaaaatgtttactgaataagcagaacagtctggattttcctgggcaggagggggttgggggctttgggtgggttg

SEQ ID NO: 41350 - DNA, 201 bp, Homo sapiens
accttgagaattatactaagtctcagtttcaccctcaaagatttgtggattctcaaagaagcaagtgaaacgcatagctaatattttatacttgcttgtgygaagtaaacactgttcctagcacatcatatgtttcactttgttcctcaccacaaccttatcagccagtcactataatataatattccattttgttaatgg

SEQ ID NO: 41351 - DNA, 201 bp, Homo sapiens
gctcggtgtggtggcacatgcctgtaatcccagctactcaggaggctgaggcaggagaatcacctgaacccaggaggcagaggttgtagtgagccaagatygcgccacaccagcctggatgacaagagcgaaactccatctcaaaaacaaaaacaaagaaaggaaggaaggaaggaaggaaggaaggaaggaaggaaggaa

SEQ ID NO: 41352 - DNA, 201 bp, Homo sapiens; identical to SEQ ID NO: 7311

SEQ ID NO: 41353 - DNA, 201 bp, Homo sapiens
ctgtaaaatggaaataataacaagttaaccattaggattcttgtgtcagataagataatgaatgcaatgcacataactcagagtgatatactgttggcaaytgataaatgataaattgatatgtactgctgtggattatgtcactgaaaattatttagttctatagtaaggcagagtcagctacatttgacagatattgtg

SEQ ID NO: 41354 - DNA, 201 bp, Homo sapiens
tagctcggtgtggtggcacatgcctgtaatcccagctactcaggaggctgaggcaggagaatcacctgaacccaggaggcagaggttgtagtgagccaagmtcgcgccacaccagcctggatgacaagagcgaaactccatctcaaaaacaaaaacaaagaaaggaaggaaggaaggaaggaaggaaggaaggaaggaagg

SEQ ID NO: 41355 - DNA, 201 bp, Homo sapiens
gtttcttcatctgtaaaatggaaataataacaagttaaccattaggattcttgtgtcagataagataatgaatgcaatgcacataactcagagtgatataytgttggcaactgataaatgataaattgatatgtactgctgtggattatgtcactgaaaattatttagttctatagtaaggcagagtcagctacatttgac

SEQ ID NO: 41356 - DNA, 201 bp, Homo sapiens; identical to SEQ ID NO: 7314

SEQ ID NO: 41357 - DNA, 201 bp, Homo sapiens
ccataaagcttacctacttaacccaaagaggatcaggctgtctgtggtaaaagggagattcagacctcttgaatctctcaatcatctaaaatgttgagtgrgtttttgattgtttctaaatttggaagtggcatcagcaaacatgtgaccagtgtgtttcagtctctggctagacagtggggttcagcaatatgccagaag

SEQ ID NO: 41358 - DNA, 201 bp, Homo sapiens
gcaatatgccagaaggagaatgtagatgccgtattcatcttcagtgaccgtggtaatttgtatctacagtatatagtgactagagctttcaaagtgcttcyacttcattgtccttggaggttttcctcccgagatacgtacttctcgctacaattattaaattgtctttccagtatggatcctaaagttgggggtgagata

SEQ ID NO: 41359 - DNA, 201 bp, Homo sapiens
ccattattatcactatttgaaagggagaaattgaggctcagagaagtaaaataagttctttaagtttaccccttaggaagaggcacagcaggacttacccrtgcactaacacccaagtgctgcttccccataaaatggtgaagcatttctgctcctaacacgacccccactaggcaatggagtctagtcactctggtctgt

SEQ ID NO: 41360 - DNA, 201 bp, Homo sapiens
atgctgagtaaaagtgagggaaataggtgataaaggagggagattataaaagccttgagaccagctgtaacagcaggcattgcaatttatttcaataaccytcttgccttatgcacttgagcagattgcaattgaccaccactttgaaggagattctgtaaatgattaaacttgtaccttctctcaggggaaaagtgagac

SEQ ID NO: 41361 - DNA, 201 bp, Homo sapiens
ctatgctcactttcgaagcaaatggttttcagtcctaacagatacactgccccctttctataacagtatcttctatcactctccctactctctcgtcatarcatatcacagggaatctgcagacacatttataatttaacgctgcagctatttcattttagagaagtaaaattaggtgtaatttgaaaatatataattatg

SEQ ID NO: 41362 - DNA, 201 bp, Homo sapiens
ttttctcttcattactacttgctgtgagaccttgagaattatactaagtctcagtttcaccctcaaagatttgtggattctcaaagaagcaagtgaaacgmatagctaatattttatacttgcttgtgtgaagtaaacactgttcctagcacatcatatgtttcactttgttcctcaccacaaccttatcagccagtcact

SEQ ID NO: 41363 - DNA, 201 bp, Homo sapiens
aaatcttaaggtctcttggagctaatgctgaatttcttgttgctttgaaaattcatagcctacatatgagttggaaatatacaaataccctccccgttacytatttattaattccttcattctttatcaaggtgctgatgctactaaggatgacggtgtctactcaaggtatttcacaacttatgacacgaatggtagata

SEQ ID NO: 41364 - DNA, 201 bp, Homo sapiens
tagttcaaacacactgaagctccccgtggctgacagagtatcaaacatgcacacctcttcttagatatgcttccaacatgcttatatcagagggttttccygtacgtgacattgaagtcaggtctgtgtcacctgaagttattcattggaaatgtttacatgtgttttggtcaggttggcacttggaaatacagtctgcaa

SEQ ID NO: 41365 - DNA, 201 bp, Homo sapiens
tggcaaactgatgttactcagtaaccatcctttggaagttttaaatttctccacgttaccatggacacttatacaggcctgacacatgctaccccccagaygggagaaaaaaactaaagatgcatttgctaatttgtttaactctattatgactctaagctttccacacactataataactgataatggaccttactatct

SEQ ID NO: 41366 - DNA, 201 bp, Homo sapiens
gagttttagaaggagaaaatgtaaatcattaagaacacttaaaaaaatagaggcaaccattattatcactatttgaaagggagaaattgaggctcagagargtaaaataagttctttaagtttaccccttaggaagaggcacagcaggacttacccgtgcactaacacccaagtgctgcttccccataaaatggtgaagca

SEQ ID NO: 41367 - DNA, 201 bp, Homo sapiens
taaaataaagtttttacagaataattgtagcattttaaatgttggtggttgctaaaaggagagtcagtattgaatcaaagagagaacgaggaaaaaaaatmtccatccaatgaaaatcactcagtatgtcagcaagtaaagacaaaggaaataggtgatattttgtccaggtactaaatggagaacctttaaattacatag

SEQ ID NO: 41368 - DNA, 201 bp, Homo sapiens
ctcactcccactctgcagctccctcattctattccaaacaagctggccttggcttatgtcatttatctccacagggcctgcaatactacctgacttagcarttaggtaattcagacaatccatgcgtgggtaaaaaataagtcacagtgagtccccttaagggttcatagtctaataaataagatgagcttcatataccaa

SEQ ID NO: 41369 - DNA, 201 bp, Homo sapiens
gaatcttgttaaaatgtggattctcctttaggaggccgaggcgggcggatcacgaggtcaggagatcaagaccatcctggctaacacagtgaaaccccgtytctactaaaaatacaaaaaattagccgggcgtggtggcggacgcctgtagtcccagctatttgggaggctgaggcaggagaatggcgtgaacccgggagg

SEQ ID NO: 41370 - DNA, 201 bp, Homo sapiens
agaaacctaacagagagagagagagagatggagaaatgagcaagactcattcaccagtgtgccacaagaaccagatctaatagcccttcgctttctccacwtgccagcttgtgatctacctgtgaaactaggaaatctggctctatgaccagcccactctgtcttctaataggtgctaactctgagacaataactacctag

SEQ ID NO: 41371 - DNA, 201 bp, Homo sapiens
acaaattttctgggacaagtgtccagggattacttgctttatttttccattacatcaaatttctgttgtttgccaagatttacatataatggacagaaagwgctttgtactgtaaaaagccagtggtgtgagtccagacccctggatcttggtcctcggtctgccattaactatgtgacctaggcaaagaacttcacctct

SEQ ID NO: 41372 - DNA, 201 bp, Homo sapiens
tttgtttctgaaatcttaccaaactgtcctttgacaaactccattttctgggtagcagtgactcctggggaagaactggaaatggagcatagatgtctgcrgagcagagctcttttggaaggaacctcaggtcctaccagactttctctctcaaagtgtggtctgtggactgcagcatgtagataccatgaacacttgtta

SEQ ID NO: 41373 - DNA, 201 bp, Homo sapiens
tagcagggggagtacacgtcacaagatgaggaagggagagtcagagagaaactctctcttcccccgtcaaatatacatacacacacaccacacgcacaagytcgtgtgcacacacacacgcccatgcacacacgcagacatacacgcacacacgcacgtcagaaggtacacagtagggttattttggagtctctgcaatgc

SEQ ID NO: 41374 - DNA, 201 bp, Homo sapiens
ggatggagagagataggataacctaattggctaactagccacccttacccctgaatgactgtttaagtggactctgcccatttattttaaagctttgtgtmtaggactaaggcagcctggagaagatggaactagcacagcactctagtgaggactcaggaccttcttcccgggccaggaaccactcctttccagtggcag

SEQ ID NO: 41375 - DNA, 201 bp, Homo sapiens
gacaaatgtcatgaaaataaattccaaaaggttattccactaaatatccaggaaatatctaagagataaaaaaaagaaactgtgattctctgttttctctkttccctctgatgaaaccgtatttgtggtcttgtctccaaatatttaaaattaattcgtgtgtggaaggaaagaagcagaagtggggaacaggaagagggt

SEQ ID NO: 41376 - DNA, 201 bp, Homo sapiens
gaagaaatatccaactgatggatctgaaattgtgctgctgacggatggggaagacaacactataagtgggtgctttaacgaggtcaaacaaagtggtgccmtcatccacacagtcgctttggggccctctgcagctcaagaactagaggagctgtccaaaatgacaggtgagggatgatttgctgagacccccggtattgt

SEQ ID NO: 41377 - DNA, 201 bp, Homo sapiens
cattcctccctctactccaacaaccttcttgctgatgagagactctcccctggtgcccctgtggggacagaagcccctaactcagcttttaaaatatttgmttcagcaggacagtccccagatttccccacctacaagagcagttaatcgctctgcaccacttccatccactgcattcttgctaatattagcagggggagt

SEQ ID NO: 41378 - DNA, 201 bp, Homo sapiens
cgcatagctaatattttatacttgcttgtgtgaagtaaacactgttcctagcacatcatatgtttcactttgttcctcaccacaaccttatcagccagtcmctataatataatattccattttgttaatgggaaaactgaggctcagaattagaaattgccgaaagtcccacaaaaagtggtgcagccaggattagagtct

SEQ ID NO: 41379 - DNA, 201 bp, Homo sapiens
aggtgattaggaagaaatatccaactgatggatctgaaattgtgctgctgacggatggggaagacaacactataagtgggtgctttaacgaggtcaaacawagtggtgccatcatccacacagtcgctttggggccctctgcagctcaagaactagaggagctgtccaaaatgacaggtgagggatgatttgctgagaccc

SEQ ID NO: 41380 - DNA, 201 bp, Homo sapiens
taaggacggaccagagccttttcctccccctatagaaaagccattgccctcctttcttccacccttaaagggacctgcatttgttggccccgttcagccawcagcgcctcccatcccccttaaggagattggaaactgcccaagggacggttcttagataagacccccggtcagcgaacatctgtatgatcgggtgtccgc

SEQ ID NO: 41381 - DNA, 201 bp, Homo sapiens
aaaagaggatatgagcaaatgttactattttgaccacctgggcgcgctggtacgctctgcgttgtatcctctttatctgccagattgcggtgagtcagacsgcccattatctccacctgaaaggaattcagaagatttaaagggagagattcctctcccctcttcattcccttctatggggaataaagaagagattttttc

SEQ ID NO: 41382 - DNA, 201 bp, Homo sapiens
atacttggcggatggattctggggtgacactctctcagaagagtggtccgccgctccgctcagctggaattgtctgagaactcattctgggcgttcactgsaagctataaactctacaagtggtgcgcccgaagtgatcgccttgaagttgcacgtgaaggaggaaaactccttaatttttggggaatcccagtaagggac

SEQ ID NO: 41383 - DNA, 201 bp, Homo sapiens
agtctatagtgaaaagcaagccagaagcagctcaggagaagcatggcttttcctagtcgtgagacccacaagaagttttatctgtggatcctcagtttatyagggcactgtgatgttaagggccgcagccaaagcagcaaccgtatagtaatcataacaacaagtttaatatagggctaattacttccttcactgtaagcc

SEQ ID NO: 41384 - DNA, 201 bp, Homo sapiens
cacaggtgtgtcacgacccgacctcaagaggccatctagtggatgtttgtagtttaacaagccctttcaataaatacttggcggatggattctggggtgayactctctcagaagagtggtccgccgctccgctcagctggaattgtctgagaactcattctgggcgttcactgcaagctataaactctacaagtggtgcgc

SEQ ID NO: 41385 - DNA, 201 bp, Homo sapiens
gagtctatagtgaaaagcaagccagaagcagctcaggagaagcatggcttttcctagtcgtgagacccacaagaagttttatctgtggatcctcagtttaytagggcactgtgatgttaagggccgcagccaaagcagcaaccgtatagtaatcataacaacaagtttaatatagggctaattacttccttcactgtaagc

SEQ ID NO: 41386 - DNA, 201 bp, Homo sapiens
tgacaagagcgaaactccatctcaaaaacaaaaacaaagaaaggaaggaaggaaggaaggaaggaaggaaggaaggaaggaaggaaggaaggaaaaaacaratgtagtatttaaactgaccttgtggaaagacaagatcaggatgggcaaaaagatgggaaaataagcaattttaggacaaatgtcatgaaaataaattcc

SEQ ID NO: 41387 - DNA, 201 bp, Homo sapiens
atcttgttaaaatgtggattctcctttaggaggccgaggcgggcggatcacgaggtcaggagatcaagaccatcctggctaacacagtgaaaccccgtctytactaaaaatacaaaaaattagccgggcgtggtggcggacgcctgtagtcccagctatttgggaggctgaggcaggagaatggcgtgaacccgggaggcg

SEQ ID NO: 41388 - DNA, 201 bp, Homo sapiens
tctgtatgatcgggtgtccgcttctccttgacaaacttccctgctggaggggtgcctccaagagggaaggaaagtggctgagtatgattgtcttcctaatwcgcaagttctcatttcctacttccagcatcagcctttctggccttgtcggttttctgtttccctggagtataaggggaacttacatgctgcctcctgggt

SEQ ID NO: 41389 - DNA, 201 bp, Homo sapiens
tcactttgttcctcaccacaaccttatcagccagtcactataatataatattccattttgttaatgggaaaactgaggctcagaattagaaattgccgaawgtcccacaaaaagtggtgcagccaggattagagtctgtctccagagtctgcattgttactgattacttggtgacacagaatatttggtaaatgctctcaa

SEQ ID NO: 41390 - DNA, 201 bp, Homo sapiens
ctgatgctactaaggatgacggtgtctactcaaggtatttcacaacttatgacacgaatggtagatacagtgtaaaagtgcgggctctgggaggagttaasgcagccagacggagagtgataccccagcagagtggagcactgtacatacctggctggattgagaatggtaagtaatttgtaataacatacctggcttgtg

SEQ ID NO: 41391 - DNA, 201 bp, Homo sapiens
aaaactgaggctcagaattagaaattgccgaaagtcccacaaaaagtggtgcagccaggattagagtctgtctccagagtctgcattgttactgattactyggtgacacagaatatttggtaaatgctctcaaagcttagctattattattaaaaggtatttctatatttcttcttcccatcttaacaaataacaagtttt

SEQ ID NO: 41392 - DNA, 201 bp, Homo sapiens
tgaatttgaatgactgataatttaatttattttcagtcaattgttacgtatgttttctttttcttcccaggacatggtgacccaggcatctctgtatctgyttgaagctacaggaaagcgattttatttcaaaaatgttgccattttgattcctgaaacatggaagacaaaggctgactatgtgagaccaaaacttgagac

SEQ ID NO: 41393 - DNA, 201 bp, Homo sapiens
gattttttaaaatcaaaatattctagaatcaaatgtgattgtttgaaacttactccagtacgaatatggttaattcatttgctgaaactttgtgatgataraaactttttcttaaatttcaggctgatgttctggttgctgagtctactcctccaggtaatgatgaaccctacactgagcagatgggcaactgtggagaga

SEQ ID NO: 41394 - DNA, 201 bp, Homo sapiens
ccacacacagtgataaaagaagtaagccttaccctcaacacaccaaaatcttaaggtctcttggagctaatgctgaatttcttgttgctttgaaaattcayagcctacatatgagttggaaatatacaaataccctccccgttacctatttattaattccttcattctttatcaaggtgctgatgctactaaggatgacgg

SEQ ID NO: 41395 - DNA, 201 bp, Homo sapiens
agctatttgggaggctgaggcaggagaatggcgtgaacccgggaggcggaggttgtagtgagccaagatcgcgccactgcactccagcctgggcgacagarcgagactccgtatcaaaaaaaaaaaaggggggggattctcattcattaggtgtgggatgggactcaagaatctgcatttttaacaagctcacaggagatg

SEQ ID NO: 41396 - DNA, 201 bp, Homo sapiens
agttagacaccatatattgccttggcagaaagggtgattagtagtatttccttctagagatattctagaaatgagtacatatacaacacatttttctttcracagataagacatgatcgccatgtcctctttaaaacttttaatttcaatatattaataatatgtattgctcattatcttccaaatttttaaattattttt

SEQ ID NO: 41397 - DNA, 201 bp, Homo sapiens
cttggcttttctgctgcgtagaaatacattctgataccatttttgcaatcccctcagatactttctggcaaacagaaatgactctgatgacaatttaacamttttgctatgatgggatgtccttgtttcttggatcatgagaggaaaatcacagaaaggcaatctgtcagaaactgagcatagactctgaccctttgaaat

SEQ ID NO: 41398 - DNA, 201 bp, Homo sapiens
ttaatggaaatgaaatgttttgctttaatcagaaaggctgttaaaaatattgacaactcatgtgacctaggtaatgaccaatcagaaccaatgccagccakaaatagctggtattgtcagactggtgaatatcatataagttaaagtctgccctgggtctaatatccccccaatataatccccattaaatgagatggtttc

SEQ ID NO: 41399 - DNA, 201 bp, Homo sapiens
cctgggcaacatagcaaaaccccatctctgcaaaaaatacaaaaattagctgggcgtggtagctcatacctgtggtcacagctattcaggaggctgaggtrggatgagcccaggaagttgaggctgcagtgagctgagatcaaaccacttcactccaacagagagaacccctgtctccaaaaaaaaaacagaagtaaagag

SEQ ID NO: 41400 - DNA, 201 bp, Homo sapiens
attcattttatttctcctaagcttctagtttgacattttcagttttttgtttgcctcagctatcctttgaaataattgttgataataagtctgtcgatctsaactatatcttttggtaaagttttacttctctcgttattaaaaatgaagttactaacagcttagagaaataaaatgtaataaataaaattttgattttgc

SEQ ID NO: 41401 - DNA, 201 bp, Homo sapiens
gattgatgacacattagttatatttttatgcatactttgtttgaattttttttaaatttcagttaaatttaagaaaaatcagttttccaatgattagtgcyaaaaagaattattactcattaaactctgatcttcctcacagaaaaacatatgtaatgcaagtaaaattgattttttcccgcaatatttatgatcctagat

SEQ ID NO: 41402 - DNA, 201 bp, Homo sapiens
cttgaacctgggaggttggggttgtagtgagccgagatcatgccactgcactccagcctgggcagcagagtaagaacctatctcaaaaaaaaaaaaaaaamaattcattaaagatctctttgggtgaaaaaaaattcataattaactgattaattttttaaaacatagcagcattctttacagaaaatgtcatttctgctt

SEQ ID NO: 41403 - DNA, 201 bp, Homo sapiens
gagagagagctgaagcaaatatggcaaaaaaattaaaatctaaatatgattgatgacacattagttatatttttatgcatactttgtttgaattttttttwaatttcagttaaatttaagaaaaatcagttttccaatgattagtgctaaaaagaattattactcattaaactctgatcttcctcacagaaaaacatatgt

SEQ ID NO: 41404 - DNA, 201 bp, Homo sapiens
gaactaaagttcaggcaaatgggaggaaattcagtatttcatactgaaatgaagtacaaccctctgttccttttttataaagtggcatttgtgctttttargatcacaatatgttgtggcaaaaggcaaacagcagtgatttgtacaaaatttcagcagatccagattagcaataataatgtttccaagtcatcaccatgg

SEQ ID NO: 41405 - DNA, 201 bp, Homo sapiens
aacaagcccaactgagcaaagtatttttagaccagatagggtatgggcagtagaaatacaggatctttcattatttttcctttggtggatagggaggaggwtggggaaatatctcaaggataaaatgctctaggtcttttatccatgtgtcccagtggaccacaactgaaatcaggactaacattactgctggggaaatga

SEQ ID NO: 41406 - DNA, 201 bp, Homo sapiens
gttacattttttttttcacatgtatatgaaatttccaattagcacaggaaaattctagagccatgttatgggtgtgtgagcagggaggtcctttggggagygataccattaatttgttgcagctaagagaactaaataagaccctagtgatctaaaggagcacatacaggtactccctagagtccttatttattttatatg

SEQ ID NO: 41407 - DNA, 201 bp, Homo sapiens
cttgctgtgagtcttaacttggcttgtatcatgtaatatacttctttttatttgtatgtggctagtgcatttttattggctttctactttctcattccacscttttcctaattaccagtgctgtgagagttttgaactctcacagttaaattttgagtttaacctaagagctcttaaaggaaagacaaatagaatacaata

SEQ ID NO: 41408 - DNA, 201 bp, Homo sapiens
cccaaacaatgctgattttctgtcttgtgttactaagcacaagaaagctctgctgtgtgttcaagcatgagttggtactggccatcagttcagtgttaacraatcaacaatacagtacatccagaaaaagaggaaattcacagatgtgtatgtgaggccactctagaaagtcctaaaataacatccgaaatagatgacaaa

SEQ ID NO: 41409 - DNA, 201 bp, Homo sapiens
cacactttttgggtttttgtttgaaatggctcccaaacaatgctgattttctgtcttgtgttactaagcacaagaaagctctgctgtgtgttcaagcatgrgttggtactggccatcagttcagtgttaacgaatcaacaatacagtacatccagaaaaagaggaaattcacagatgtgtatgtgaggccactctagaaag

SEQ ID NO: 41410 - DNA, 201 bp, Homo sapiens
tgcaagatgaatgaactctggaaatctgctatactacattttgcctatagtcatattgtgttgtacacttgaaattttattaaaagggtagctctcgtgtwtaaaacaaacaaaaaaagaaaaacagttatggtgtctttgaaggatttgtgacatccattttaatagttcacatgtctttagcacttaacctgtttctga

SEQ ID NO: 41411 - DNA, 201 bp, Homo sapiens
tgaagctagtctactcaggaaactgagttgtgggaagataacttgaacctgggaggtcaaggctatagtgagccatgattacgccactgtattccagcttrggcgacagagccagaccctctctgaaagaaaaaaaggttatatatgtactgtaatggaacattatttagcctttaaagatggaaatcctgccatatgtaa

SEQ ID NO: 41412 - DNA, 201 bp, Homo sapiens
gagaatattgccaaagtcatcatttctatgtggggcagaggctgagagatgggtattaagttacctttgtaggcctgcctactgggaagaggggctttcawaagggaaggatatcaagcctataagaacctatgtaagatggcttaggctttcacaatttttcacgtttgttgtacttgtcagtcccttgaaacaaaaaag

SEQ ID NO: 41413 - DNA, 201 bp, Homo sapiens
aattacagttcataggtacattttttttccttttgacaccattcactgaattaggctaatagtgttaaagtgtcaaagtgacagttggggaagagaaaaaycatatattttcaatcattaaatcaggcatctcctttcagtcctttatcttctccatagccgtaatttactttggaaaatccagcagatctagaaactgca

SEQ ID NO: 41414 - DNA, 201 bp, Homo sapiens
aaacagtgggagtttagttatatacttcttggccacatgacttgctagtgggagttttaagattagctaatcccagcccctttgatgcaaaactgctacamaatgaaaatagaaatatgtacttggttaaatttcgcatttgttgtgtgagtttaaattttataaataaggaaaaaatactccgaatctgagttttttacc

SEQ ID NO: 41415 - DNA, 201 bp, Homo sapiens
agaagtatttccacagtatacagaaacaaggcaaatgtgcactatcttcactgctgttcaacattataatggaggtattaaccaatatagttagatacatygatttaaggcataagaatgggtaaagaagaaagactatctctgcagattatatgataacgggttgagcatccctaatctgaaaggctccaaaattcaaaa

SEQ ID NO: 41416 - DNA, 201 bp, Homo sapiens
aacatgcagaagacctcttaggtggcactgccatattcatgtgtgcgcacacatgctattttcttctgtataagaaacaaagtcatttttcttttattttwtctattttccttttgttgttctgtagtttgtataatctagggttaaaatcccaagaatacagtgctttttaattttgaagaacttttggctcaaaatggg

SEQ ID NO: 41417 - DNA, 201 bp, Homo sapiens
atctagttctttaaaaaataaaaaactttgtgggtagcatctagtaatttacatgagtctttagctaattagtatacctaaaagaatcctcttaggatcargagacaaaatacaattcgtattctctacttagagcttatcattgtagattcttgttaagtaaataagtttacttgataaaagtaaatttgtgcacttaac

SEQ ID NO: 41418 - DNA, 201 bp, Homo sapiens
attttattttattttattttattttattttattttattttacttagagtctcactctgtcgcccagggtggagtgcagtggtgcagtctcggctcactgcmacctccgccttctgagctcaagcaattctcctgccttagcctccctagtagctaggattacaggcatgagccaccgcacccagtgggttctcattttaaa

SEQ ID NO: 41419 - DNA, 201 bp, Homo sapiens
ctccaacaggatgtcaggaggaggatcatttgattcaggtgatctagatcatcaagtcgtgacagtgttgatagctaaatgtcaggagcaaagagtgtccrtgactaacaggcagcatggatatgctgggcaaagggatgattcacatcttgggcagcacaccatgagatttcttcatgctactcataatgacatgcaatt

SEQ ID NO: 41420 - DNA, 201 bp, Homo sapiens
caggaaaaaaatattggtaataatttttattgcagtggccttaatacagttgaaagtggatattttgatttttttttttagtttacatatccatagttttktttttgtttttgtttttgtttttgttttttttgaacattcttgggtgtttctcgcagagggggatttggcagggtcataggacagtagtggagggaaggt

SEQ ID NO: 41421 - DNA, 201 bp, Homo sapiens
atatcagtaattgtactataattttgtaacacattataaggggaagttggatgaggtatatacaggaagtctgtgctatttttgcaacttttctccgagtstaaaattatttccaataaaacatctttaaaaataggggccgggcatagtggcttgtgcagcactgtaatcccagaactttgagaggccgagacaggcgga

SEQ ID NO: 41422 - DNA, 201 bp, Homo sapiens
ggaaggactgttcctcccacagagaggacattgtgggctaatcatatgcttatttacacctgctcttttttaaagcccccaagttcatgtggctaccatcygaactaactacccaaaaattttcactctgattcctattttgaataacatgcttatactcaccaataaatctttagttcaaatgaacgaaaagtttccttg

SEQ ID NO: 41423 - DNA, 201 bp, Homo sapiens
tcgcaccactgcactccaacttgggcaagagggacaccctgtctctaaataaatgaatgaataaatgataaaggtttgaggtaccaggtatctattgttayctaaactcttgttatctgagctcagaagccagaaaaattttcatgacatagtaagctttgctatcagggctctcactatttgaactaagactgaatagag

SEQ ID NO: 41424 - DNA, 201 bp, Homo sapiens
tctcagttcttacttacaactgcttttatccatcctttgtcatattctgctttgctttttcatacttttgctcattttcatttcttctttttcctttaggwttctgtttgtctgtgcgtctctatcttgccctccctctctttttctgtttgactttctgaatatttgtctctccctcttgatttatctcatctctccctc

SEQ ID NO: 41425 - DNA, 201 bp, Homo sapiens
gtagtcccaacagaaagataaatttatgagtctattgaacagctctaactatgtgccaagcattgtgctaaacattgtagatatgaaaaggtattacataraagctctgaccctacagtattcactgtctctgtactagaaaaagacacctgataattaaaataaaacaaatgtaaaagaggtttacaggtgctgtaatag

SEQ ID NO: 41426 - DNA, 201 bp, Homo sapiens
tcttctgcttcctctccactttattgaatgaggaaataaaaactaaaatgcttttattatccacacattcacagagcaaactctaatatagtaatactaarcagatcaaaatacatttaagttccttcgttgtgtgtaagcaaaaaaaaaaaaaatgcatttaagaatagccacatgttgattattgttaaagttgggtga

SEQ ID NO: 41427 - DNA, 201 bp, Homo sapiens
tacctgttaaaaatttgtgaaagctattgcttatttcttttccaaagtagatttggatgacaaattcagtttggttttgagcttatctaaaaagcttaatrttttaagcataccaaactcattagcagaagtcaaatatgtctctccctattgctacacaactttttagggatattgttatatatgaaagcatgacatcaa

SEQ ID NO: 41428 - DNA, 201 bp, Homo sapiens
tgctttcatcttcatttaaataaatgtcttcattttttaatgtgaaatgttgtaccctactcttttctgcatgctgtgcattcccactagatatatttttwaaataatttataatttataatattcaacaatagagttgtcatttttttgaagctttaccctattacataattgctgttgttgatatatataatttccata

SEQ ID NO: 41429 - DNA, 201 bp, Homo sapiens
gactgattttcttctgccagagtgcaaaacccaaactaaaggtgttttggtgttaatttgttaaacatccaaagtgtgtttttcagcattattaacgttgyttctcaactatttgtgggttttcagggtcagcctggcagcaggcatggaaaccgaggaaggagacaagctaaaaaagctgcatccacagaccttggagca

SEQ ID NO: 41430 - DNA, 201 bp, Homo sapiens; identical to SEQ ID NO: 7330

SEQ ID NO: 41431 - DNA, 201 bp, Homo sapiens
cttctgcttcctctccactttattgaatgaggaaataaaaactaaaatgcttttattatccacacattcacagagcaaactctaatatagtaatactaagmagatcaaaatacatttaagttccttcgttgtgtgtaagcaaaaaaaaaaaaaatgcatttaagaatagccacatgttgattattgttaaagttgggtgat

SEQ ID NO: 41432 - DNA, 201 bp, Homo sapiens
atgcaacagcctggactcaaatatggcatatgaatgaggactggggcatatggtaaaaaaataaaaatccagaggacatagtatcagtgatgtttgacaamcactcttagggatttttaaaattaatttagacagctgtagccagccttagtcaaatttaaaaaaaaaaaaaaaaacacaagagagagagcagactttgtc

SEQ ID NO: 41433 - DNA, 201 bp, Homo sapiens
cttaatttcaccttatcagtagggtaattggaatagttattgtgtaagttattactgtctgatagtaagaatgaagtttttcatttataatttagtgttayactgcaaaatagggcaaccctttcataaaaccaggaaataatgagaagtagttttgcttttactgacttaacccgggggtctttgttaaataataggatt

SEQ ID NO: 41434 - DNA, 201 bp, Homo sapiens
gtactatccggatggtagtagccttaaaatgagttgggcattgttccctcctcctttattttctgatggtgtttatgtaggattgatgttatttcttctcrcatgtttgccagaattcaccaatgaattcatctaaagctgtagattttttgcagggaaggtttttaaattacaaatttaatttcttagtagatataaaat

SEQ ID NO: 41435 - DNA, 201 bp, Homo sapiens
tgaataaatctgaatgccagattattaatttactgtgaaagttgagtagtgcttctgtcagcattaccagtatattttcttcttcaggttaatctgcatgraaatccaaactattaattagaaggctgtttggtgagcaagaggttcagattaaggtttgttagtcgtttggatggttctagggaaggaaatgatcaaaac

SEQ ID NO: 41436 - DNA, 201 bp, Homo sapiens
agcatgggatgttttttcgtttactctggtcatcattgatttcatattctattgttttgggatttgtccatctcccttttaagttctatcagttttttatrgtatttgaagctatattaaacaatttatatttatcatgtcttcctgatatattgactcatacatacatttttctctgtctctaatagtatttcttgaaac

SEQ ID NO: 41437 - DNA, 201 bp, Homo sapiens
aaacctattttatctgacattatagtgtcattcttttgagtaacatttaaatggtagatctttttctatcttacttgcaacccctatatttaaagtgtctytcatttatggttattagttgggttctgcctctttatacagtgattggagtgtcattagaccctttaaatttaatatatttttgacatggtatgccatgtc

SEQ ID NO: 41438 - DNA, 201 bp, Homo sapiens
ctggagttcagtggtatgatctcagctcaccacaacttccgcctccctggttcaagtgattcttctgcctcagccccccgagtacctgagactacaaggcrcgtgccaccatgcccggctaattttttgtatctttagtagagacagggtttcactttgctggccaggctgatctcaaactcctgacctcgtgatctgccc

SEQ ID NO: 41439 - DNA, 201 bp, Homo sapiens
tatattatacatatgtatatatatgtgtatatatgcaagattttggcaggctgtcagaaataactaacatatggaaagcagttaaatactatgtgccaagyacttgctaagcacttacaatggtctctatgtgattgatcatcacaatagccctaaaggataaattatattattaccctagtttactaatgaggcaactga

SEQ ID NO: 41440 - DNA, 201 bp, Homo sapiens
agactacaagcacacgccaccacacccggctaattttttgtatttttagtagagatggggttttaccacgttggccaggctggtctcaaactcctaacttsaggtgatctgccagactggctcatttctgcaagtaataaactctaataatatcctgtacttcctcttcaaagcatttagcacaatggtaattacatgagt

SEQ ID NO: 41441 - DNA, 201 bp, Homo sapiens
tgtttatgctacttaatattagaaaactgagaatgacttatggtttgaagctcttggtttgcaaagaacatggatatattgggtacgtgtttgtgatctaragtacaaggtgtgtttgccatggtgccacaggtaattaaaaattattaggttggcatcagagctggcaacaaaatagggatgtgagcctttcccaagcta

SEQ ID NO: 41442 - DNA, 201 bp, Homo sapiens
gctttttttttttttttttttttttttttttttttttttttgagatggagtcttgctctgtcgcccaggctggagtgcagtggcgcgatctctgctccccscaagctccacctcccaggttcacgccattctcctgcctcagcctcccgagtagctgggattacaggcgcccgccaccatgcctggctaattttttgtatt

SEQ ID NO: 41443 - DNA, 201 bp, Homo sapiens
cgtaagtaaggctagcatttcagcaacaattcttcaatcatacatggggatggagaccaaaaaagtcacaacctcccatcctggccaacatggtgaaacaytgtctctactaaaatacaaaaaaattagctggacatggtggtgcgcacctgtaatcgcagctacttgggaggctgaggcgggggatttgcttgaacccag

SEQ ID NO: 41444 - DNA, 201 bp, Homo sapiens
tttcagcacctcaaatgattggcatgtgtattgtagttattttggtgtatttcatacgggatgttaggatttagtgtcatagttttcttagattcttcctyttccatatcttcaaagtatccagagaagtttctctccatcctgtctctattcatgtagttcctaccatgcaccctccttcctaaccactgttattagtcc

SEQ ID NO: 41445 - DNA, 201 bp, Homo sapiens
gtgccactgcactccagcctgggcgacagagagaggctccgtctcaaaacaaaaaacaaacaaaaaaacaaacaaacaaacacggggagcagtattcacartatggtaagtgattttgaaaaacaagttacacagacattttgaagtagtatgcagatgtctaataagcccttgaaaagatatttaacatcagtcattata

SEQ ID NO: 41446 - DNA, 201 bp, Homo sapiens
tgtcagtaaaggccactctgttctgagaggctgctcatagtcctccttacatggcccctctatcttcaaagccatcaacgatatgtcgagtccttctcacrctttaaatctctctgacttgcccccgtgctcccaccagagaaatgtttgagcttttatagggctcacttgattgaatcagactcacctgaatcttaaatt

SEQ ID NO: 41447 - DNA, 201 bp, Homo sapiens
ccatggtgccacaggtaattaaaaattattaggttggcatcagagctggcaacaaaatagggatgtgagcctttcccaagctaggaaaatgttttcctgaycccactaggtagggccttatggcctgtgaatagtgtggcaacacaggcctctgagtagaacccacagttccagattagcttgggcagagtaaagtcagca

SEQ ID NO: 41448 - DNA, 201 bp, Homo sapiens
tctactgaaaatacaaaaattagctgggcatggtggcacatgcctgtaatctcagctacttgggaggctgaggcaggagaatcatttgaacctgggaggcrgaggttgcagtgagccaagatggcagcactacactccaacctgggcgacagaatgagactccacctcaaaaaaaaaaaaaacctaaaaataaataaaata

SEQ ID NO: 41449 - DNA, 201 bp, Homo sapiens
taattttgttcttcaacatggcaaaatttttatccctgtccatggtcaaactgcctataaaatcactttcaatcacaggttgggactagtgtgctagtatrtatgcctctctgccaaaaaaaaaaaaaaaaaaaaatatgacacttaatagaattcaactaaatatgcctgattggaggtgaaaacatctatgtgacagat

SEQ ID NO: 41450 - DNA, 201 bp, Homo sapiens
gtatttttagtagagacatggtttcaccatgttggccaggctggtctcgaactcctgacctcaggtgatctacccgccttggcctcccaaagtgctggaaytacaggcgtgagccacttgtgcccggcctggccacagtttttttaacctttgaaatagagttagtattcatacaagtttaacaatacttttttaaaagaa

SEQ ID NO: 41451 - DNA, 201 bp, Homo sapiens
tagtggggatttgaactcttttttaaaagttataatctaaagacttttttatagttagctcatcattaatttttatgtcaaaacttgcagaaggccaggcrcggtggctcacacctgtaatcccaccactctgggaggccaaggcgggtggatcacctgaggtcaggaatttcagaccagcctggccaacattgtgaaacc

SEQ ID NO: 41452 - DNA, 201 bp, Homo sapiens
caactatttcaaaagatcagattacttaccagtttcactaataaagatttattactttaaacctttatcataaaatgtatgctttgaatactgtgaagtayactgcatataaggagtgtggtatagtataaagaaactttctgcaggtagtaattatagtgaagattttaggtttacaaagccctagctgttttctgtgta

SEQ ID NO: 41453 - DNA, 201 bp, Homo sapiens
cccaggcaggtggatcacaaggttaggagttcaagaccagcctggccaagacagtgaaaccctgtctctactaaaactacaaaaacaagctgggcgtggtrgcaggcacctataatcccagctactcgggaggctgaagcaggagaatcacttgaacctgggcggcagaggctgcagtgagccaagatcgtgccactgcac

SEQ ID NO: 41454 - DNA, 201 bp, Homo sapiens
aagaattcatgagtccatactgataaaaatcaataaatggaaaatgaaactgtcttaccttagtgtaatataaagtgataaatgtagaatcgtgaaattaraagatcaccaccaagaaaaccatcaggcaagagtcaccactagaggctacaaaactagtgggtgaaattctgaggaaaagcataatttttttttaaagta

SEQ ID NO: 41455 - DNA, 201 bp, Homo sapiens
aattaaaaattagccaggtgtggtggtatacacctgtagcgctagttacttgggaggctgaaccaggaggattgcttgaccctgagtggtagaggctgcartgagctgtgatcacactactgtactccagcctaggtaacagagtgagaccctgtctcaaaaaaaacaaaaggagggggaacaaaggttattacagatcag

SEQ ID NO: 41456 - DNA, 201 bp, Homo sapiens
cagtagaattgcttgaacccaggaggcagaggttgcagtgatctgagatcgtgcccttgcactccagcctgggtgacagagcgagactctgtctaaaattraaaaaaaaaaaaaaaaaaaaaaaagagttgtccgttagatataaatgtttgtatactgaaatatttacaagtaaaatgctgagatttgctttaaatactt

SEQ ID NO: 41457 - DNA, 201 bp, Homo sapiens
aaatgcagaagcaatggtagaattagaaaattgccagaaaatcatcagcagatcctaaaaatattagattaaaaagttttggttgagaaactgctcacttwaaaaaaaaattttgagaggtattttaaatggatgaattagagagacagccctgaatccactgatcagttgtaacatcactaaaagtgggccagccaaaca

SEQ ID NO: 41458 - DNA, 201 bp, Homo sapiens
cctcctgggtttacaccattctcctgcctcagcctcctgaatagctgggactacaggcacctgccaccacgcccggctaatttcttgtatttttagtagasatggggtttcaccgtattagccaggatgttctcgatctcctgacctcgtgatccgcccgccttggcctcccaaagtgctgggattacaggcgtgagcacc

SEQ ID NO: 41459 - DNA, 201 bp, Homo sapiens
aacgggacaacgtgaaagtagatgagtttaaatacgtactaataatttaaaacccctatggtattttgaggaaactcttccggctacccttcttccatcayttctctcccgttagggttgcgaaaagggctctgtacagcctcgcgacaactcgttctccgccctaatttcaagtcattcaaaactctgtcccttttcatt

SEQ ID NO: 41460 - DNA, 201 bp, Homo sapiens
ttttgtcaatattttgttaactatgtcagaacatgttctgttgtttcctctattcttagtaattagtctcgctctgtcgcacaggctggagtgcagtggcrcaatctcggctcactgcaagctctgcctcctgggtttacaccattctcctgcctcagcctcctgaatagctgggactacaggcacctgccaccacgcccg

SEQ ID NO: 41461 - DNA, 201 bp, Homo sapiens
gcccagcttctaagtttcctagtaaaacatgaagtatgttttatatgtgatactggaaggctggatttctctataattaactgcatgctgtaaatttattktagaatacaattatgatattctgcaatccagcacctgccagtggcctaactgcttgctttccttatcatcctggcagttatataatccctgggctcacca

SEQ ID NO: 41462 - DNA, 201 bp, Homo sapiens
cctgggcgacagagcaagactccgtctcaaaaaaaaaaaaaaaaaaaatatcaggcatggtgatgtgtgcctgtaatcccagctactcgggaggctgaggmaagagaatcacttgaacttgggaggtggaggttgcagcgagccgagatcgcactccagcctaggtgacagagcaggactcctgactcaaaaaaaagaaaa

SEQ ID NO: 41463 - DNA, 201 bp, Homo sapiens
tcgttgtgtgtaagcaaaaaaaaaaaaaatgcatttaagaatagccacatgttgattattgttaaagttgggtgatgggtacatcaaaattcattacactrttctctacattagtgtatgtgtgaaaacttctgtaataaaaagttaaactacaaaaatcatcttttgttttaaaacattaataaatattctagcatcaag

SEQ ID NO: 41464 - DNA, 201 bp, Homo sapiens
tgtgcttatttatcttgtttttaaacagctctattgagatataatttatatactatacaattcacttaacatgtacatttcagtagcttttagtgtatttmcaaatgtgtgcaaccatcaccgtggtcaattttaaaacattttcatcaccctcagaaagaaaccctgaggtggaagcaactcaagtgtctatcaacaggt

SEQ ID NO: 41465 - DNA, 201 bp, Homo sapiens
agtctttccttcttgcttataatgtcctcctaaaattattatttatatttgttggtaagtgtcatcattaacctcttcatggtttaacgaactcttttagktcaagggagttcattctctttactctttttaaatgtaactgatattcattaaagctatagtgccttctgtggttatttggtaaatttttgttaaatgaca

SEQ ID NO: 41466 - DNA, 201 bp, Homo sapiens
acatggaaataacaatgaaattggccaatcccaccaccattacaaaaatatgcacacgttccctaatctacattccccccttttttttttaatctaaagtytgatttcccctgtataaaaatggtgggaggtagaagcacacacaggaggcatttaagatgtgatttggtctagactggtaatctcaaagacagctttcga

SEQ ID NO: 41467 - DNA, 201 bp, Homo sapiens
ttgtaaactttataaatgctgtatacttgggttccactaaatttataaaatatttttctatctaaaaaattaacttgtttgcagtaactttttactttatraattttaaaaaatttttaaagttttgacccttttttagtaacagcttaaaatagacatattatagctgtacaaaaatattttttctttatatccttgccc

SEQ ID NO: 41468 - DNA, 201 bp, Homo sapiens
agctcatgcctgtaatcccagcactttgggaggccgaggcgggtggatcacaaggtcaggagttcgagaccagcctggacaacatagtgaaaccccatctstactaaaaatagaaaaattagccaggcatggtggcgcacgcctgtagtaccagctacctgggaggctgaggcaggagaattgcttgaacccgggaggcag

SEQ ID NO: 41469 - DNA, 201 bp, Homo sapiens
cttgggaggcagaggttgcactgagccgagtactgccattgcacttcagcctgggcaacacagcgggactccgtctcagaaaaaaaaaaaaaaaaaagtaraccccagcgagatgctttctaccttgctgttattggcactactggctctaccacacgtctttgtggtcaagttctcagtgttttcaagtgtgaaagaatt

SEQ ID NO: 41470 - DNA, 201 bp, Homo sapiens
ttttgtattttttgtagaaacagggtttcaccatgttggccaggatggtctcgatctcttgacctcatgatccacctgcctcagcctcccaaactgctgarattacaggcgtgagccaccgctgctggccaagaaacctgtttttaaaggttttctcattcttttgttcagtcaaaaactgtctttttttcctattatgta

SEQ ID NO: 41471 - DNA, 201 bp, Homo sapiens
gaaaccccgtctctacaaaaatacgaaaattagccagcatgatggcgggtacctgtaatcccagctacttggcaggctggggcagaagaatcacttgaacytgggaggcagaggttgcactgagccgagtactgccattgcacttcagcctgggcaacacagcgggactccgtctcagaaaaaaaaaaaaaaaaaagtaga

SEQ ID NO: 41472 - DNA, 201 bp, Homo sapiens
gagtgtaaatactgacttctatgctttcttttttctaaagtgtttaagtgatttaagagggtgtctcattgcctagtctatgtcccttgaattatctataygtctctcagaagataagtagaggcctggaactcatttacataattctaaaacttgattcttactcatttacctaacgggtaatctagtgctagaaaccca

SEQ ID NO: 41473 - DNA, 201 bp, Homo sapiens
ttttagtgagcccttattttattttattttattttattttattttattttattttattttattttattttattttacttagagtctcactctgtcgcccarggtggagtgcagtggtgcagtctcggctcactgcaacctccgccttctgagctcaagcaattctcctgccttagcctccctagtagctaggattacaggc

SEQ ID NO: 41474 - DNA, 201 bp, Homo sapiens
gccagtaagtacatttctgattttattgaatgtactgtatttccatttaacacagccagttctagtgtgtacagtttttcagtcttttaaaacaacacttkgatgtatgctgtaattttttctttaggataaactttctgtaagtggtcttcctggtcttcctggatcaaagatatattcagtataaggctttcatactgg

SEQ ID NO: 41475 - DNA, 201 bp, Homo sapiens
tttttctgctaggctgattaagtttagcttaagtcatagtgagatttacttagttgtcacagaccgtttctcagatagtgggaccagtgagttttaaaggkgtttgttctgtgttaattgctccagtatcttcaattcagaagaataaatgtttgatattcaggctgctatagttcacaaatggattttattgatgactta

SEQ ID NO: 41476 - DNA, 201 bp, Homo sapiens
tatagtagtgtattagttttctattgctgcataaaaattaccacaaacatagaggcttaaaagacaacacccattatcagctcacagtgggcccaactgtrttgtccgcttagggttctatgaggccaaagtcagccaggctgggcccttttctgaacgctttgggaaagaatttgcttcaaggcttattccagttgttga

SEQ ID NO: 41477 - DNA, 201 bp, Homo sapiens
gtctcacctccaacattggggattacattccaacatgaaatttgaatgagacaaacatccaaactatattactgtatattttgtacctctacctagacagkaagttatatgcagcttctttcttaccatgtgtaatattgtacttagaaatgagataaatgaaatgtgcattctgcaaatggtgaatttaaatgttgcaga

SEQ ID NO: 41478 - DNA, 201 bp, Homo sapiens
aaaaatggaagcgggttagccttagataacagtgcagaggatttcatgggcagtaaacgaggacaaggagagtataaggatacagatatgggtagatggayagatatggcagcaagagaaattctcttctgattgctttgcttttctcagtgaattagtcaagatatcaagtacattatcagagtagaagaatgttctaaa

SEQ ID NO: 41479 - DNA, 201 bp, Homo sapiens
ttcacttactaaataaaaggaaaaagagatacactcttaatttatgctatgcgcagtagatagagttgaacaaaagttttaaatatttcactatcatcatrtataattcagttcgcatctgttccataacttactaaatcaattcagtgagagggctgagattttgaaatgaccaaatgacaaattttccctgcagtgatg

SEQ ID NO: 41480 - DNA, 201 bp, Homo sapiens
attacactcagatagatagatagatagatagatagatagatagatagatagatagatagatagatagatagattagatagataagatagattgattagatrgattagatagatagatagatagatagatagatagattagatattccaaaccccaaaaaatagcaaaatcattcgaagagaggcctaaatatatagaagac

SEQ ID NO: 41481 - DNA, 201 bp, Homo sapiens
accaaaattgaaatcaaaaccacaatgagatacaacttcatgcccactaggatgactataataaaacaacacacacaagaattggtaaggatgtggagaarttggaaccgtcctacattgctcttgggaatgttaaattgtacacaaattgctggggaaacagggttgtcattttacccaacaagtcaacccagatatata

SEQ ID NO: 41482 - DNA, 201 bp, Homo sapiens
ttaggtggagacacacatccaaacaatattacactcagatagatagatagatagatagatagatagatagatagatagatagatagatagatagatagatwagatagataagatagattgattagatggattagatagatagatagatagatagatagatagattagatattccaaaccccaaaaaatagcaaaatcattc

SEQ ID NO: 41483 - DNA, 201 bp, Homo sapiens
attggctcacagctccgcaggctgcataggaagcatagtggcttctagggaggcctcgggaaacttcaattatggcagaaggcaagagggaagcaggcacrtcttacatggctggagcccgaggaagagaagagtggggggagcaccacacactttttaaagaaccagatctcatgagaactcactgtacagtaccaaggg

SEQ ID NO: 41484 - DNA, 201 bp, Homo sapiens
tacaaaaacttaaaactaaaataccttatcagtggtatttatgattccacaaagtgtgtgtgtgtgtgtgtgtgtgtgtgtgtgtgtgtgtgtgtgcatgygtgtgtgtgtgtggttttgttgttgttgtcggagacagggcctcgcttggtctcccaggctagagtgcagtggcatgatcacgactcactgcagtctcga

SEQ ID NO: 41485 - DNA, 201 bp, Homo sapiens
aaatgtccagaataggcaaatctatagagacacaaagtaaattagtggttgccttgggctgggagaatggaggggattagcaggtgatgactaagagcagkggggttgttttttgtggtaataaaaatgttctaaaattgattgtagtgagggtcacactactccgaatatacaaaagccatttaatggcttttataccat

SEQ ID NO: 41486 - DNA, 201 bp, Homo sapiens
aagtgctgggattacaggcatgagccaccgcacccagccaaggcagggatgcttctaagatactagcaatgttctgtttcccaatctgaatgaagttacayagataattattttgttattatacttaatttaaactgtaatatatttctaagcactctatattcgtctgttctcgcattgctataaagaaatgcctgagac

SEQ ID NO: 41487 - DNA, 201 bp, Homo sapiens
gtgagccgagatcgagccactgcactccagcctggtgacagagcaagactcttgtctcaaaaaaaaaaaaaaaaagtaaaatagatgtcatctgtcctgayggaaatacaaatcaaagccatagtgagatacctttgtgtctataattacaaaaatcagataataacaacagttgaaaaggatgtagacaaattggaatcc

SEQ ID NO: 41488 - DNA, 201 bp, Homo sapiens
tgatactgagtaattaagaaacagtcataaaataatctattattccatttatttaggatcaaaaacagtcaaaactcaactatgttcttttgggatacatrtatatgtggtaaaattatacaagaaataaaaagcaagtaagtactggttggacaaagtgggtcacgcctgtaatcccagcactttaggaggccaaggcag

SEQ ID NO: 41489 - DNA, 201 bp, Homo sapiens
cccccaaaagcatttaaaaacaaaaggctgctgtcgtcctgcctgaaaaatcataaaagcaaaacccaaaagaattaaattatttccagacaagttaactrtggtccagaacaaagctcaaaaatactgttacaaattacaagagtatccaacacccaacaaggttaaattcacaatttagtcttgactccaatcagaaat

SEQ ID NO: 41490 - DNA, 201 bp, Homo sapiens
ctagcatagagtcagagcttggtaaatctatactgaatgaacatatttcttttgttttgttttgttttgtttttgttttttgttgttgagacagagtctcwctctgtcgcccaggctggagtgcagtggcacgaactcagctcactgcaagcttcacctcccaggttcacgccattctcctgtctcagcctcccgagtagc

SEQ ID NO: 41491 - DNA, 201 bp, Homo sapiens
gagatcaggccactccactccagcctgggtaacagagtgagactccatctcaaaaaaaaaaaaaattaaataaataagtgagtatcccttaaaaaaaaaaraagaagaagtatgatgataaacttgaactggagaaatttcattaattttgctcacaaatgatatcatttgtattgcagggttgaagaacatacaagttta

SEQ ID NO: 41492 - DNA, 201 bp, Homo sapiens
aatcacatttgttgcacataaggtcatcttttagaaatattgagatcagttttgcttgtgttattaatagtttataaaatactacattgcagtagttatayaaaattttacaaaagttggaagcaggtagactacaggagtcattaaaagaatgttctccagtctatatagtttgtgtgattttttttccccagacttgtg

SEQ ID NO: 41493 - DNA, 201 bp, Homo sapiens
atttcacttctacattctaatgttgctttcatcttcatttaaataaatgtcttcattttttaatgtgaaatgttgtaccctactcttttctgcatgctgtrcattcccactagatatattttttaaataatttataatttataatattcaacaatagagttgtcatttttttgaagctttaccctattacataattgctgt

SEQ ID NO: 41494 - DNA, 201 bp, Homo sapiens
taggggcggccgggcagaggcgcccctcacctcccggacggggcggctggccgggcggggggctgacccccccacctccctcctggacggggcggctggcygggcggggggctggcccattcatagttttatgtcaggacttttcaggaagtttggggataaatgggattatttgagattgatgtttcatttttctgttaa

SEQ ID NO: 41495 - DNA, 201 bp, Homo sapiens
caccatgcccaactaatttttgtatttttagtagagacggggtttcaccatgttggccaggctggtctcaaactcctgaccgcaagtgatcctcccgcctyggcctcccaaagtgctgggattacaggcatgagccaccgcacctggccaaaatttggaatgttttcatcttttgtttctgtaaatagtgctgttttgaat

SEQ ID NO: 41496 - DNA, 201 bp, Homo sapiens
tcggctcactgcaagctccgcctcccaggttcacgccattctcctgcctcagcctcccgagtagctgggactacaggtgcccgccaccacgcccggctaaytttttgtatttttagtagagacggggtttcacggtagtctcgatctcctgacctcgtgatccgcccgcctcggcctcccaaagtgctgggattacagatg

SEQ ID NO: 41497 - DNA, 201 bp, Homo sapiens
tccccctccatttacaaaacaattattttgttcttaagaaataattcatctcttttctagaggaaataggaagaaaatcactaaatggccttttatcaacrctgaatgtcattgctctttcttttgtctatttctgattcccaactgtgtaagtaattagggtcatgaaaatattaatagctattattaaaattagggtct

SEQ ID NO: 41498 - DNA, 201 bp, Homo sapiens
agtcagtactttaattgtgaaatctttcattttgtcagattactaaatgaataatttttaactttttggcaactcataagcactttgagacattctccctrcaaaaatggctacccacaaattatctgaccaacactttcatggagtgaaagatgccaaggtgaagaaatcttcctctagatgttagctttccagagtagt

SEQ ID NO: 41499 - DNA, 201 bp, Homo sapiens
aatgaataatttttaactttttggcaactcataagcactttgagacattctccctgcaaaaatggctacccacaaattatctgaccaacactttcatggartgaaagatgccaaggtgaagaaatcttcctctagatgttagctttccagagtagtagctttccagagttgacatacgttgaaataaaaatgatgtcacta

SEQ ID NO: 41500 - DNA, 201 bp, Homo sapiens
ggcgcccgccaccatgcccggctaatttttttttatttttagtagagacgaggtttcaccttgttagccaggatggtcttgatctcctgacctcgtgatcmgcctgcctctgcctcccaaagtgctgggattacaggcgtgagccaccgtgcccagccagttgacctaatttcaatgttgttttgtctcagtgaataggga

SEQ ID NO: 41501 - DNA, 201 bp, Homo sapiens
caccaaggtcacagaaatggctactgattaaattgtttccatcatcaaagatatacctctgctcatgacttagtggagatctatttgagtcaaaatttcartataaaatattgtgccttctttcttttttctcctctttctacttgtcctcctcttataaaagttcaactttatgcttgtatcaagtataaatcattttag

SEQ ID NO: 41502 - DNA, 201 bp, Homo sapiens
gtacatttttatgtttggctgtttacactttgaattatttggccaaatctttcatcatagtttggtaaggcaagtgctaattgcatgtttaagtgctaatkgcatgtttgttgatgaaagagctgaagttcaaataacatgttcagactcatataacgaataacaagtagagttggaacacagccctgtgctcccttctga

SEQ ID NO: 41503 - DNA, 201 bp, Homo sapiens
tgattttgaaaattaaagcaaagaaagggtaaagggtgtttttagtctagcatttaagttttatttgtgatatatggaaatttctttatgccttttcttargcaagcagctttcatacagctactctaccatgtttttgttgcatttaccttgctactgaaatggagaacccaatggtaaaataggtggcagtttaagaga

SEQ ID NO: 41504 - DNA, 201 bp, Homo sapiens
ttttctgcatgctgtgcattcccactagatatattttttaaataatttataatttataatattcaacaatagagttgtcatttttttgaagctttaccctrttacataattgctgttgttgatatatataatttccataatgtgtactattgcatcttatttaaaaataggaagtatttttctttgataagtttggcctat

SEQ ID NO: 41505 - DNA, 201 bp, Homo sapiens
atattgtatggtttggttttgttttggtttgttttttaaaaaaatggggtcttggccaggcacggtggctcacacctataatcccagcactttgggaggcwgaggcaggtggatcacctgaagtcaggagttctagaccagcctggtcaacatgatgaaaccctgtctctactaaaaatacaaaaattagctgggcgtgat

SEQ ID NO: 41506 - DNA, 201 bp, Homo sapiens
caggctggtctcgaactccagagctcaggcaatctgcccacctcagcctcccaaagtgctgggattataggtgtgagccactgtgcccagcccggctttcyttttttttttttttttttttttttttttaaataaagatccttcaggccattgaatatacattggctttatttaacaaaatcactgtaatccaactctaat

SEQ ID NO: 41507 - DNA, 201 bp, Homo sapiens
aataaaccttctgagaacttatatgtctgtagtcttttttcttttctttttttttttttttttttttcttgagacagagtcttgctctgtcgcccaggctrgagtgcagtggcacgatctcggctcactgcaatctccacttcccaggttcaagtgattctcctgcctcagcctcccgagtagctgggactacaggcgcgt

SEQ ID NO: 41508 - DNA, 201 bp, Homo sapiens
aacagaacttaaaacatggcaataagtacccaataatgttaaccctccctatcattactattattaacgtcatcatcatcatcagtggttatagtggttayactggcttgcttttttttttttttttttttggagacagagtctcactctgtcacccaggctagagtgcagtggctcattctcaactcactgcaacctcca

SEQ ID NO: 41509 - DNA, 201 bp, Homo sapiens
ttaatttgtctaggtaatagtctgagatattttcccgaggaaggttgcttaggaaataaaccttctgagaacttatatgtctgtagtcttttttcttttcyttttttttttttttttttttcttgagacagagtcttgctctgtcgcccaggctagagtgcagtggcacgatctcggctcactgcaatctccacttcccag

SEQ ID NO: 41510 - DNA, 201 bp, Homo sapiens
gataatttactatgtgccgtgtactgcctatataaagcagagagtacttgcccttatggattttattttctagtgagtgagacaaagaatgaaatatttawgtataatatagtgtcagatagaaactattgcaatgattttaaaaaaggaggttgaggttagaacatgatggaatggagcgtagggcctgttttacacaag

SEQ ID NO: 41511 - DNA, 201 bp, Homo sapiens
atgtgctgtcatccaggctttgtttcatttatagagcacaggcagagtacttttagcatagttcttaatggccctaggattttcagaaggttaaatgagcrctgtcttcaacttaaagttaagtatctgcattagcttcttttttttttggagacagagtcttgctctgtcacccaggctggagtgcagtagcgcaatctc

SEQ ID NO: 41512 - DNA, 201 bp, Homo sapiens
gcctctggcaataaaataaaatattttattgactttcaggagattccaggtatccattacttggccagccactgcagtacaatcctcctgctgttctgcayggacacattccaaaccaacaggtaggaaagacaactaacctcctaggctttgttgcagaacatcatagctccctcagagtgtaaggggcaaccctgagcc

SEQ ID NO: 41513 - DNA, 201 bp, Homo sapiens
ctgtagagttttatgagatgtggcataagagaatggacaaaatcgtaaagggattaataattaagatagattcttagcgaaggcatttttttaagtgcttrgcatcattatttttaatagctccactgtgttcaaaaactcaatcctagcttatttatgctacttctgaatgaagtcctaagatattagtgttttttctcc

SEQ ID NO: 41514 - DNA, 201 bp, Homo sapiens
gcgtaggtggtcaaaaaataaaaatctttaaaagttgatattttgacctcctcccatgaatcacaaatattcttttaagacatggaggtgttgctctgttkcccaggttggagtgtagtgctgctgtcatagcttattgtaaccttgaactttggggctcaagcagttctcccacctcagtgctggtgcatgccaccacat

SEQ ID NO: 41515 - DNA, 201 bp, Homo sapiens
agtttgagaccagcctggccaacatggtgaaaccctgtctatactaaaaatacaaaaattagccaggcatggtggcacacgcctgtaattccagctactcrgcaggctgaggtatgagaattacttaaacccaggaggtggaggttgcggtgagccaagatggtgccactgcactccaacctggccgatagagtgagactc

SEQ ID NO: 41516 - DNA, 201 bp, Homo sapiens
cttcattttagtgagcccttattttattttattttattttattttattttattttattttattttattttattttattttacttagagtctcactctgtcscccagggtggagtgcagtggtgcagtctcggctcactgcaacctccgccttctgagctcaagcaattctcctgccttagcctccctagtagctaggatta

SEQ ID NO: 41517 - DNA, 201 bp, Homo sapiens
aataaatctttagttcaaatgaacgaaaagtttccttgttgattgacattatttccagtaattatctgttttcctgtaattaagtttatcttgagacttargtatgttaagctacagtaaagtcttcattaaccaaaattatcagaaaatgaagcaaggccaggttctgcttatttgaacaatattactgtaatacttttt

SEQ ID NO: 41518 - DNA, 201 bp, Homo sapiens
gtataattgtaaactttaaaaaaaattaaatcatcttccacttaatccccgagacttcccataatgtttagtaatacggacatgtgcaaagaattaaatcrtataattaaacaaaattttgtcaagttaactttgcttctcaaataaggaagttatataattaaacacatttgcttgtacctaatgagacgttagcatcaa

SEQ ID NO: 41519 - DNA, 201 bp, Homo sapiens
gttgatacttttcattctctagaaatctacttctccttcctaatcctcagccttctccctcttttccagatcattggatttttctttctcaaacttggcaktcttcaaactatacttttgacactatgagaactctgtacccactcttgcttttgtctgaataattagacaaggaacctaacctacaatgccacttctcta

SEQ ID NO: 41520 - DNA, 201 bp, Homo sapiens
gccatttattatcattaccaagtcttatttatatactgtctgctatacttttaaacaactgctagcacagtaggactacagacatgtgagtgatgtattgygctatgacatcactgggtgataggaatttttcaactcctttataatcttagggggccaccatcatatatgcaatctatcattgaccaaaatgtcactttg

SEQ ID NO: 41521 - DNA, 201 bp, Homo sapiens
gtagagacggggtttcacggtagtctcgatctcctgacctcgtgatccgcccgcctcggcctcccaaagtgctgggattacagatgtgagccaccgcaccyggcctactctgttctttttcaaaattgtttttagtatttaggctccttgcaattccatatgatttgagaatgggcttttctgtttctgcaaaaaaagacc

SEQ ID NO: 41522 - DNA, 201 bp, Homo sapiens
tctggacctcaagtaatagaattttcatattgttttttcttgatttttttcttccaaaattataacacagactgtagctgatgccataataaagaaatgtmccttcatgctactcatttaaatatccttgcgtgtgactaattaacttaattcattagtacactctattaataaggcaagcaaaaatcctttgttctgtgt

SEQ ID NO: 41523 - DNA, 201 bp, Homo sapiens
ttgcccaagctagaatgcaatggtgcaatctcggctcactgcaacttctgcctcccaggttcaagcgattctcttgcctcagcctcccgattaactgagaytacaagcacacgccaccacacccggctaattttttgtatttttagtagagatggggttttaccacgttggccaggctggtctcaaactcctaacttcagg

SEQ ID NO: 41524 - DNA, 201 bp, Homo sapiens
gggctgtaaagaaaaggcagtgggaacttctgaatcagaaagaaaaatgataaaagtttgttctttgggggttgaggaagaggaagcattgaaatagatayattaaatagttttttaattaattatttatttattttttgagacagagtcttgctctgttgcccaagctagaatgcaatggtgcaatctcggctcactgca

SEQ ID NO: 41525 - DNA, 201 bp, Homo sapiens
gagggctgtaaagaaaaggcagtgggaacttctgaatcagaaagaaaaatgataaaagtttgttctttgggggttgaggaagaggaagcattgaaatagayacattaaatagttttttaattaattatttatttattttttgagacagagtcttgctctgttgcccaagctagaatgcaatggtgcaatctcggctcactg

SEQ ID NO: 41526 - DNA, 201 bp, Homo sapiens
tgaggcacggggatcacccagtttcagaccagcctgaccaacatggtgaaatcccatctctactaaaaatacaaaatcagctgggtgtagtggcacatgcraaaatacaaaatcagccgggtatggtggtagcatgcatcccagctactcaggaggctgaggcaggagaatcgcctgaacccaggtgagtggaggttgtag

SEQ ID NO: 41527 - DNA, 201 bp, Homo sapiens
aacttgaaataagctttgtcaaatattatgcagaagatgtgcattgccatgccttgcaagtaatagggttttttttcttcttttttgaactggtactttartatacctaattacatccatttgagttagtattaagttttaatttctcagaaataaagtagtgaaaattggtagcagttttgtttttcccattcttgagaa

SEQ ID NO: 41528 - DNA, 201 bp, Homo sapiens
ggccttctgacgtcccgctgctgccagcccgccgttaggtcgggttccgagtgagccaggctcgcctggcccgcggctgcggctccggctgcagctgcagscactgccttgtgcccaccgcccccacccgggggccatgtgaaaagcaaacccctcgaggcctagcggaggaggcaggggaaaggtttccgagtccctgcc

SEQ ID NO: 41529 - DNA, 201 bp, Homo sapiens
tttagtagagacagggtttctccatgttggccaggctggtctcaaactcctgaccttgtgatccgcccacctcggcctcccagagtactgggattacaggygtgacccactgcgtccggccctggaacctatttaaatgctgcttctcttctttttttattttatgcacacccatgaaccttatgtggtaattaaactatt

SEQ ID NO: 41530 - DNA, 201 bp, Homo sapiens
agtttttagcagacacaagatttcaccatgttgcccaggctggtctcgaactcctgacctcaagtaatcctcccgcctcggcctcccaaagtgctaggatkacaggtctgagccaccgcgcctgtctgccactcgtttaataaatggtcgttactcaaagagtggtgatggggccactcttgattatcaatccttcaaaca

SEQ ID NO: 41531 - DNA, 201 bp, Homo sapiens
gtttcaccatgtcgcccaggctggtcttgaactcctgagctcaagtgatccacccacctgagcctccccagagtgctaggatcacaggtgtgagcccctgyccctggccctgaatctgttttgcagtttttaataagtagcaggactacattctttttttttttttaagacaggctcttgcctctgtcactcaggctggag

SEQ ID NO: 41532 - DNA, 201 bp, Homo sapiens
atccatcagcagggaattggttatgctagagctatacaataaagtagctatcacaaatgataatactggtatctattcagccacaaccatagcccactgtkgcaagttttttcaatttaaaaaaagcaaagcattatatcattaaaacatgtgtccatacctgtaactaaagacagagatatgtgtaaacagtggcatctc

SEQ ID NO: 41533 - DNA, 201 bp, Homo sapiens
attttttgtagagatagggtttcaccatgtcgcccaggctggtcttgaactcctgagctcaagtgatccacccacctgagcctccccagagtgctaggatyacaggtgtgagcccctgcccctggccctgaatctgttttgcagtttttaataagtagcaggactacattctttttttttttttaagacaggctcttgcct

SEQ ID NO: 41534 - DNA, 201 bp, Homo sapiens
ctatcatgctctgcacagatgaaccttgaagacattatagaaagtgaaataaattagccacaaaaagtgaaatagtgtactacatgattccacttacatgmggtatctaaagtatgtagtcaaattcagaaacagaaagtggaatggtggctgtggtgcaaaggatacaggggagttgcagttgttgtttgataagtatag

SEQ ID NO: 41535 - DNA, 201 bp, Homo sapiens
cctcccagattcaagcaattctcccacctcagccccccaagtagctgggactacagacacgcacatcacacctggctaatttttgtattttttgtagagayagggtttcaccatgtcgcccaggctggtcttgaactcctgagctcaagtgatccacccacctgagcctccccagagtgctaggatcacaggtgtgagccc

SEQ ID NO: 41536 - DNA, 201 bp, Homo sapiens
ttttagtagagatggggttttaccacgttggccaggctggtctcaaactcctaacttcaggtgatctgccagactggctcatttctgcaagtaataaactytaataatatcctgtacttcctcttcaaagcatttagcacaatggtaattacatgagtaattggccaattagttgcttactgtttttctatccatcagaat

SEQ ID NO: 41537 - DNA, 201 bp, Homo sapiens
caggtagtggctgataccaagggctctggagccaacactacctgagttcatatcttaactctaccccttactagtcttgctactttgaaaaagctgcttartcttcctctgcctcagctgcaaactatgtaatactgcttttatggggattaaatgaattaatacacttaaagcattgggagtagtgcttagtaaataata

SEQ ID NO: 41538 - DNA, 201 bp, Homo sapiens
caaatacaccatacagctctacaaaaatattttctttatatccttattctaaagtcttcttttatgaatttttaaattttctttctttttaattttttttwattaaaaactaaggtgcaaacatgcatattagcctaggcctacgcatttcaggatcatcagcatcattgtcttccacctccacatcttgtccctctagaa

SEQ ID NO: 41539 - DNA, 201 bp, Homo sapiens
tgatctgcccgcctcagccttcagaagtgctggaattaacaggtgtgagcaactgtgcccggccaaaagatttttttaaatggaacaccgatatagtgcamttaaccatgtatgcagcttgcaggactgtaagttgttctaggtgaatcagtgaatgtgaaggcctgggacattttactactgtagacttcataaacactc

SEQ ID NO: 41540 - DNA, 201 bp, Homo sapiens
gagtctcgctctgccgccaggctggagttcagtggtatgatctcagctcaccacaacttccgcctccctggttcaagtgattcttctgcctcagccccccragtacctgagactacaaggcgcgtgccaccatgcccggctaattttttgtatctttagtagagacagggtttcactttgctggccaggctgatctcaaac

SEQ ID NO: 41541 - DNA, 201 bp, Homo sapiens
gtaatcccagctactcgggagactgaggcaggataattgcttgaacctggaaggtggaggttgcagtaagctgagattgcgccacttcactccagcctggragacagagcaatactctgtctcaaaaaaaaaaaaaaaagatacgttttttaattaaaggaaaatacctaaactcaggatttagattactttctgatacct

SEQ ID NO: 41542 - DNA, 201 bp, Homo sapiens
aaaaaaaaaaaattagccaggtgtggtggcgggcacctgtaatcccagctactcgggagactgaggcaggataattgcttgaacctggaaggtggaggttscagtaagctgagattgcgccacttcactccagcctgggagacagagcaatactctgtctcaaaaaaaaaaaaaaaagatacgttttttaattaaaggaaa

SEQ ID NO: 41543 - DNA, 201 bp, Homo sapiens
gagtgagtactcctactctgttctttttctttttcttttttttgtttttgttgttgttgttgttgttgttgttgtttttgagatggagtcttgctctgtcrcccaggctggagtgcagtggcgcgatctcggctcactgcaagctccgcctcccaggttcacgccattctcctgcctcagcctcccgagtagctgggacta

SEQ ID NO: 41544 - DNA, 201 bp, Homo sapiens
acttttaaaaatgggaagagtgagtactcctactctgttctttttctttttcttttttttgtttttgttgttgttgttgttgttgttgttgtttttgagayggagtcttgctctgtcacccaggctggagtgcagtggcgcgatctcggctcactgcaagctccgcctcccaggttcacgccattctcctgcctcagcctc

SEQ ID NO: 41545 - DNA, 201 bp, Homo sapiens
caagagaattacattattgacaaaaggtgagggaatttttaacatctgttttggtaattgtctgactgatgctaataaaaattaaaatgtcctattaaaaygccaacagactccaagacgaggatgccagtagtacccagcagaggcgccagatatttaggtattggaagcatgttttcaatacagtattgaaaaattaaa

SEQ ID NO: 41546 - DNA, 201 bp, Homo sapiens
gttctgtcacattggcctcctggctacacaaacaatacacgcataaatactcatatgaggaattgggtggtgagttttagtgaaatacacattctcttgckttttttttttcttttccattttattctttgtttttgaggtgtctcactctgttacccaggctggagggcagtggcatgatcatggcttactgcaaccttc

SEQ ID NO: 41547 - DNA, 201 bp, Homo sapiens
ttaaatatataagctggatttggtggtgggcccctgtaattctagctacgtgggaggctaaagcaggagaatagcttgaacctgggaggcagaggctgcartgagtcgagattgtgccactgcactccagcctgggcaacaaaacaagactctgtctcaaaaataaataaataaaacatatataaatatctggagttaaat

SEQ ID NO: 41548 - DNA, 201 bp, Homo sapiens
acaaggaatattatgtagctatctaaagaatcactaaaagggggcaatattcaggctaggtgcggtggctcacacctgtaatcccagcactttgggaggcmcaggcaggtggatcacaaggttaggagttcaagaccagcctggccaagacagtgaaaccctgtctctactaaaactacaaaaacaagctgggcgtggtgg

SEQ ID NO: 41549 - DNA, 201 bp, Homo sapiens
actttggggagcagatatgcaagcagatgattataaactaatatggaaaccattttatttcctagaatttatcctaaggataatgcacacaaagatttatwtacagaagagtttatcctatagcaaaaaaaatttacaaacaacctaactctgtacatcaatgaggaatacttaaattatggtatattcatacaaggaata

SEQ ID NO: 41550 - DNA, 201 bp, Homo sapiens
cagtaaaatcagtacaaggaaagcagtccatataaaagctaaaggcaagtcagatctctcttgtgcctaaaaattaggccaatcttctgttactcacacaratggagtaacagttggagtgtaatatttaaggtttttataggggtctggaaaaattgtatttcctgtgtataactttagcagtgaaatatcttgctggaa

SEQ ID NO: 41551 - DNA, 201 bp, Homo sapiens
tagcgcatgcctgtagtcccagctactcaggaggctgaggcaggagaattgcttcaacccaggaggcaggggttgcagtgagccaagattgcaccactacrctccagcctgggcaacagagcaagaattcatctcgaaaaaaataaagtttatggaggttgaaaacataaacatttacaaggccttgaaaaaaaccttttt

SEQ ID NO: 41552 - DNA, 201 bp, Homo sapiens
gtagtggattttatgtatttaatttctgcaaataattttcgtggttagggatacaaaaatgcatagaatttgcattttgccttctaggaagaggggagatrgtttaaagcaaatactaattagtaccttgctcattgcttggtctttgaagtcctttcagaaaatattaattgtataatatgaacttggccaatttcactt

SEQ ID NO: 41553 - DNA, 201 bp, Homo sapiens
cttagaagggaattagtaggttaaaggatgtgactgttattaaggtccatggtacattttgccaaaatctttgattcacagtcccaatatgtactgactcygctttactgttttcacatttcataaatggcaacatgtattaatttggctctgtgattattaatgaagttgtacatttttatgtttggctgtttacacttt

SEQ ID NO: 41554 - DNA, 201 bp, Homo sapiens
aaaaaaagaaaataattaatttaacatgagacaaaaaggaatgattctctaaatcttccctacctacttttgaattattcttcagtttagatttttacagyttttattcctcaagtaacttctaaacttttcccaattgtttttaaaaatccacagtgactatttttactgcctaaggttttgaatggctattgccaaact

SEQ ID NO: 41555 - DNA, 201 bp, Homo sapiens
attttttgtatttttagtagagactgggtttcaccatgttagtcaggatggtctcgatctcctgacctcgtgatccacccgcctcggcctcccaaagtgckgggattacaggcatgagccaccgcgcccggcctattctaacttgtaaagattgtttaacattatcaaagttcctgtagttagttatacctctttttccct

SEQ ID NO: 41556 - DNA, 201 bp, Homo sapiens
ctctgggaggctgaggcatgtggatcatctgaggtcaggagttcaagaccagcctggccaacatagcaaaaccacatctcctaaaaatacagaattagccrggcttggtggcacccgcctgtgatcccagccacttgggaggctgagacaggagaatagcttgaacccggaggcagaggttgcagtgagccaagatcacgc

SEQ ID NO: 41557 - DNA, 201 bp, Homo sapiens
tattatccatctttggggaacttgactataccagtatgaactcctatttttattctaacttttttttttttttttgagatggagtcttgctctgtcacccmggctggagtgcagtgaagtgatcttggcttactgcaagctccgcctcctgggttcacaccattctcctgcctcagcctcccaagtagctgggactacagg

SEQ ID NO: 41558 - DNA, 201 bp, Homo sapiens
taaacccagatgggagtccagttgtgtataatcctcctatgactcaacaaccagttagatcccaagtgcctggacctccacagccacctctgccagccccwcctcaacaaccagcagctaatcacattttctcacaggtgcacatatccatgattacataatgctaagttgacttgcctttacatatttgggactaaattc

SEQ ID NO: 41559 - DNA, 201 bp, Homo sapiens
agtcagctgagatcgcaccactgcactccagcctgggccgggcaacagagtgagactgtctcaaaaaaacagaaaagaggttgtaaaataaggacagtacyatcaagtttacaatttgaaacatgagctattaattattttagtttttcatccagttctaattttattagtgaaatatatgtaatgtggcctaaaaattag

SEQ ID NO: 41560 - DNA, 201 bp, Homo sapiens
ttcagagatgaaaagaaatattaattggcccttttaataggcaaaaaatgatttttgtttttaattcttagggtaaattgatacagtttttatgaagagtyattttggcataacttaaaatagaagctgtccttcagaaggcaatctgtatagtgtatcatagttgtttcattcattaaagattaattatccatcccagag

SEQ ID NO: 41561 - DNA, 201 bp, Homo sapiens
atgtgttactgacattttcatttcatcttcagaacaaccctaagaagtaggtacactatataattcccattttacaaataaagaaaccgggaaagagaaargttaagtaacttgtgcaagtcataaagcagctaaagtgctaaagctcaacctttgaatccaagcggactgactccagagccaacattgtatttgatatgg

SEQ ID NO: 41562 - DNA, 201 bp, Homo sapiens
aagatgagtccactataaaatgtattgctaagatttcataatcgttactttaggtcacaactttgacttctataaaagaacatctcttttctaacctgttmcagttaatgttagcaaacctgtgccctactgtaatttaaaattaatggatgcactttgaagtagtctgtaagtttttagctaattgaatgacaaaatatt

SEQ ID NO: 41563 - DNA, 201 bp, Homo sapiens
tattagaaattcataggttaaaataaatgttcaaaagtattacttcggttctagggccaggcgcaatgtctcacgcctgtaatcccagcactttgggagaytgaggcaggtggatcacttgaggtcgggagtgtgcaaccagcctggccaatatgatgaaaccccatctctactaaaaatacaaaaaaaattagctgggca

SEQ ID NO: 41564 - DNA, 201 bp, Homo sapiens
atattagcctaggcctacgcatttcaggatcatcagcatcattgtcttccacctccacatcttgtccctctagaaggtcttcagaggcagtaacacacgtrgagctgtcgtctcctatgtggagctgtcatctcctatgataacaatgccttcttctgaaatacctcctgaaagacctacctgagtctgtgtgtgtgtgtg

SEQ ID NO: 41565 - DNA, 201 bp, Homo sapiens
agatgcttataatatacttaaagaagtatgggtcaataatataattataatcagacagttcaaatcattcaagttacactgtactttttatatatatatawcttctgggatatgaagaaggttgtaaatcagaaaaccttagagatctgctccatattgaataaaaacaaacttaccttttcctcatagggagattacccg

SEQ ID NO: 41566 - DNA, 201 bp, Homo sapiens
ggaaaatggtgtgaacccaggaggcggagcttgcagtgagcccagatcgcaccactgcactccaacctgggcgacagagcgagactccatctcaaaaaaawatatatatatatattaaggtagcatttccagtgaatataattgtggtgaaatttgcccttttagttttaccttttagaaatttctcagatacttaatgct

SEQ ID NO: 41567 - DNA, 201 bp, Homo sapiens
gtctgtccagttcaaatcctgttttccatacttactggctgtgtgatgttggacaaattacttgatttttctatctgccttagtttcctaatctgttgtaggacagagtgataataggacatacttcttagaactgttgtgtgagttttaaatgaattcattatgaaaaatattaccacagggccaggcacatggtaaata

SEQ ID NO: 41568 - DNA, 201 bp, Homo sapiens
tagtctgtccagttcaaatcctgttttccatacttactggctgtgtgatgttggacaaattacttgatttttctatctgccttagtttcctaatctgttgtaggacagagtgataataggacatacttcttagaactgttgtgtgagttttaaatgaattcattatgaaaaatattaccacagggccaggcacatggtaaa

SEQ ID NO: 41569 - DNA, 201 bp, Homo sapiens
tggagcactagtctgtccagttcaaatcctgttttccatacttactggctgtgtgatgttggacaaattacttgatttttctatctgccttagtttcctartctgttgtaggacagagtgataataggacatacttcttagaactgttgtgtgagttttaaatgaattcattatgaaaaatattaccacagggccaggcac

SEQ ID NO: 41570 - DNA, 201 bp, Homo sapiens
actttgtctcagtctgtctcccttttttgttcatctacctggtgtttcagggtgtctctccctttctgactaaatctatcttaatctctctctctctctcttttatctttctacctccctccttcctcttttctttctctttctgtctttccttttctgcccctctgactctctctccctgtctgtttcagtatttcccat

SEQ ID NO: 41571 - DNA, 201 bp, Homo sapiens
tactttgtctcagtctgtctcccttttttgttcatctacctggtgtttcagggtgtctctccctttctgactaaatctatcttaatctctctctctctctcttttatctttctacctccctccttcctcttttctttctctttctgtctttccttttctgcccctctgactctctctccctgtctgtttcagtatttccca

SEQ ID NO: 41572 - DNA, 201 bp, Homo sapiens
catttgctgagccctccttgcacttggcaaaattctcttctgtccttgccaatgaaaaaaaattattattattattattattattattattattattattwtttttaaatttaagagacaagatctcattatgttgcctggactggacttaaacttctgggctcaaggaatccttctgccttagcctcctaagtaactggg

SEQ ID NO: 41573 - DNA, 201 bp, Homo sapiens
agctgagaaatgaaaaataaatcacattaattttcagagttacataaagaaaaatatgtgtagcagattctcagtatttgtagactttgtatttgcaaatytgcctatttgctgaaattatttgtaacccctaaattgatacttattgtactttctttttcattcgtggacacgttcagtgtggcaaaaaagtttgaatca

SEQ ID NO: 41574 - DNA, 201 bp, Homo sapiens
gagggatagcctgcagcacagaaattaaaagatagatgagattctccaacaacctccaatgtgaatcttgattaaaagtttttggtgttgggcatggtggytcacgcctgtaatcccagcactttgggaagctgaggcgggtggatcacttgaggtcaggagttcaagaccagcctggccaacatggtgaaacctcaactc

SEQ ID NO: 41575 - DNA, 201 bp, Homo sapiens
gacccaatgcagaggcacccaagttataaaacatacacagcacatccgttacatcttctgcctatttttaaggctaatcctaaaacaactagctgagttcwgctgaaatttatattttgatggtgatttgcctatcgaaaggaatttcagtttgatatgaggcagcaacaagtctgtggtaatgagtagcagtcaacttca

SEQ ID NO: 41576 - DNA, 201 bp, Homo sapiens
taattctcacattggctgaatgattgtaggaagtatttatctggccagcaatcaataatagtcatctgctttaaagtatttaaagtagggtggtctaaagygtgagaaaatgtgattgatgggtgggaaagttgattggcaggttggaaaaatgaggtaattggggtttctgcacaagcataatcaagctacatggttctt

SEQ ID NO: 41577 - DNA, 201 bp, Homo sapiens
agacccaatgcagaggcacccaagttataaaacatacacagcacatccgttacatcttctgcctatttttaaggctaatcctaaaacaactagctgagttmagctgaaatttatattttgatggtgatttgcctatcgaaaggaatttcagtttgatatgaggcagcaacaagtctgtggtaatgagtagcagtcaacttc

SEQ ID NO: 41578 - DNA, 201 bp, Homo sapiens
aatgtcagcatttcaagaggcctaggcaggcagattacttgagatcaagagttccaggtcagcctggccaacattgtgaaaccctgtttctactaaaaacrcaaaaaatagctaggcaaggtggcggggcctataattccagctactcgggaagctgaggcaggagaattgcttaaacccaggaagtggaagttgcagtga

SEQ ID NO: 41579 - DNA, 201 bp, Homo sapiens
aacagaagacccaatgcagaggcacccaagttataaaacatacacagcacatccgttacatcttctgcctatttttaaggctaatcctaaaacaactagcwgagttcagctgaaatttatattttgatggtgatttgcctatcgaaaggaatttcagtttgatatgaggcagcaacaagtctgtggtaatgagtagcagtc

SEQ ID NO: 41580 - DNA, 201 bp, Homo sapiens
ctagctcctcaggaggctaaggtggggaggattcattgagatgaggagctcgagggtacagtgaaacaaaaattctgccaagtctgtcataagaagttatwattccagtctatacagaacccaaattctgatgctgcaatagacgtgtatgtgttgaggtggcatttccaacacaaaaaaaggtctcatgttcacatttca

SEQ ID NO: 41581 - DNA, 201 bp, Homo sapiens
gctatgtatgattctccggaggagctttttgttttaagaattgattgctttatagtgttacggaagtagatcatcattgctgttacttgggaacagaagamccaatgcagaggcacccaagttataaaacatacacagcacatccgttacatcttctgcctatttttaaggctaatcctaaaacaactagctgagttcagc

SEQ ID NO: 41582 - DNA, 201 bp, Homo sapiens
ttatttatgctacttctgaatgaagtcctaagatattagtgttttttctcctttcacagtctttaaaatctagaacttcctggtagttcttatcactcttytatgtgtaaaacctttgcttcttcaccagtattctgttgtaccttcatcttccacttatcacttcacataccatattcattcattcatgactattcccca

SEQ ID NO: 41583 - DNA, 201 bp, Homo sapiens
aatgaggagtgagaaaattgatgatttatctactttttgaaccaaagtttaattttttatttaccagagaatattgccaaagtcatcatttctatgtgggkcagaggctgagagatgggtattaagttacctttgtaggcctgcctactgggaagaggggctttcataagggaaggatatcaagcctataagaacctatgt

SEQ ID NO: 41584 - DNA, 201 bp, Homo sapiens
ctgggctatgtatgattctccggaggagctttttgttttaagaattgattgctttatagtgttacggaagtagatcatcattgctgttacttgggaacagmagacccaatgcagaggcacccaagttataaaacatacacagcacatccgttacatcttctgcctatttttaaggctaatcctaaaacaactagctgagtt

SEQ ID NO: 41585 - DNA, 201 bp, Homo sapiens
atactaaggagaagcaggtttggaaaccaaactgaatattgctataaattttgttaaaatgtaattctgtgttcagctttggatttgaaatcaccaagtaracatgtttttctgttgattttttttaaacaaatataaaaatgtaagttaaatatttaatgaatgatgggggaaatgttattacttagttttatgaaactt

SEQ ID NO: 41586 - DNA, 201 bp, Homo sapiens
aacaagagcgaaactccttctcaaccaaaaaaaaaaaaaaaaaaaaaaaaaaacaaaaaaaaaacgagattctcatacttctactatcatatactgagtaraaggtggtgccagttactgagatgggatatactaaggagaagcaggtttggaaaccaaactgaatattgctataaattttgttaaaatgtaattctgtgt

SEQ ID NO: 41587 - DNA, 201 bp, Homo sapiens
cggaggtagtagtgagccgagattgtgccattgcactccagcctgggcaacaagagcgaaactccttctcaaccaaaaaaaaaaaaaaaaaaaaaaaaaamcaaaaaaaaaacgagattctcatacttctactatcatatactgagtagaaggtggtgccagttactgagatgggatatactaaggagaagcaggtttgga

SEQ ID NO: 41588 - DNA, 201 bp, Homo sapiens
aaactaaatttcaggggttaaataataagttatctggaatttctgggtgtctgcaatattttcagagactaccctattaaatacagtcattaataaattaraacctaggaacctgaaggtgttactgataaagattacactcactgacataattttatatgtatttttgtgttgcttttagccatattgtataaattttat

SEQ ID NO: 41589 - DNA, 201 bp, Homo sapiens
cttagtgtattcacttatgagtttttgaagtttttaaatgcaaagtttttgttccttcttgctgagtttataaatcatcaacccaaagatttttgaggtgkttatttgagtcagtactttaattgtgaaatctttcattttgtcagattactaaatgaataatttttaactttttggcaactcataagcactttgagacat

SEQ ID NO: 41590 - DNA, 201 bp, Homo sapiens
gcaaatggtgaatttaaatgttgcagaaaaatttcctttttttgttttgttttgtttttaagacagtctcactctgttgcccaggcgggagtgcagtggcrccatcttggctcactgcaacctccgcctcccaggttcaagcgattctcctgcctcagcctcccaagtatctgggattataggtgtgcaccaccatgccca

SEQ ID NO: 41591 - DNA, 201 bp, Homo sapiens
tctttatttttatcccaaaataagcgtgaaagtcaaaaatgggtgtttccctgtccgggcgcagtggctcatgcctgtaatcccaacactttgggatgccraggcaggcagatcacctgaggtcaggagttcaagaccaccctggccaacatggcaaaaccccatctctactaaaaatatttaaaaatcagctgggcgtaa

SEQ ID NO: 41592 - DNA, 201 bp, Homo sapiens
acccatctctactaaaaatacaaaaattaggcaggtgtggtggcacacgcctgtaatcccagctacttcggaggctggggcaggagaatcgcttgaacccrggaggcagaggtttcagggagccgagattgcgctattgcgctccagcctgggtgacaagagcgaaactcttatctcaaaaaaaaaaaaaaaaaaagttat

SEQ ID NO: 41593 - DNA, 201 bp, Homo sapiens
gtaggtcctagcacatagattttctttatatttttataaataaatatgtaatacacattcatagaggacaaaatacagataagcaaaaatatgaaaactarccaccaataaattactatttactgttaatatttggtgtataaccttccaaacttttaaaagtatattttctacattgcctggcaagtagttatcacaaaa

SEQ ID NO: 41594 - DNA, 201 bp, Homo sapiens
tcatatgcatatagcagtgcagtaggtttacaccagcatcaccataaacacgtgagtaatgtgttgtgttatgaaggctgtgataatccttaggtgctagkaatttttcaccaacatagtcttatgggaccactatcatttatgcagtccattgttgactgaaatgtcattatgcagtgcgtgattgtattgatacagcaa

SEQ ID NO: 41595 - DNA, 201 bp, Homo sapiens
gcactgggattacaggcatgaggcaccgtgcctggctctaacattgcttggcatccattctatgaatagatttcttggctatctagattatgtttgcttasatatttgaaagagtctttctgaactaaagttcaggcaaatgggaggaaattcagtatttcatactgaaatgaagtacaaccctctgttccttttttataa

SEQ ID NO: 41596 - DNA, 201 bp, Homo sapiens
aacagaaaagcccttttctgtgactcttttccttccaagctgactttagaagtgtgtttgtggccgggcgcggtggctcacgcctgtaatcccagcacttygggaggccaaggtgggcggatcacgaggtcaggagatcgagaccatcctggccaacatggtgaaaccccgtctctactaaaaatacaaaaaattagctgg

SEQ ID NO: 41597 - DNA, 201 bp, Homo sapiens
ccaccatgcccagcctaggccttcattttagtgagcccttattttattttattttattttattttattttattttattttattttattttattttattttacttagagtctcactctgtcgcccagggtggagtgcagtggtgcagtctcggctcactgcaacctccgccttctgagctcaagcaattctcctgccttagc

SEQ ID NO: 41598 - DNA, 201 bp, Homo sapiens
gccaccatgcccagcctaggccttcattttagtgagcccttattttattttattttattttattttattttattttattttattttattttattttattttacttagagtctcactctgtcgcccagggtggagtgcagtggtgcagtctcggctcactgcaacctccgccttctgagctcaagcaattctcctgccttag

SEQ ID NO: 41599 - DNA, 201 bp, Homo sapiens
agccaccatgcccagcctaggccttcattttagtgagcccttattttattttattttattttattttattttattttattttattttattttattttattttacttagagtctcactctgtcgcccagggtggagtgcagtggtgcagtctcggctcactgcaacctccgccttctgagctcaagcaattctcctgcctta

SEQ ID NO: 41600 - DNA, 201 bp, Homo sapiens
gagccaccatgcccagcctaggccttcattttagtgagcccttattttattttattttattttattttattttattttattttattttattttattttattttacttagagtctcactctgtcgcccagggtggagtgcagtggtgcagtctcggctcactgcaacctccgccttctgagctcaagcaattctcctgcctt

SEQ ID NO: 41601 - DNA, 201 bp, Homo sapiens
tgagccaccatgcccagcctaggccttcattttagtgagcccttattttattttattttattttattttattttattttattttattttattttattttattttacttagagtctcactctgtcgcccagggtggagtgcagtggtgcagtctcggctcactgcaacctccgccttctgagctcaagcaattctcctgcct

SEQ ID NO: 41602 - DNA, 201 bp, Homo sapiens
agctgagattgcaccactgcactccagcctggcgacagagcaagactttgtctcaaaaataaataaataaataaataaataaataaataaataaataaatatgagatggctgttgtgaagagaaggaagtcagttttttctcagtataattgtaaactttaaaaaaaattaaatcatcttccacttaatccccgagacttc

SEQ ID NO: 41603 - DNA, 201 bp, Homo sapiens
gagctgagattgcaccactgcactccagcctggcgacagagcaagactttgtctcaaaaataaataaataaataaataaataaataaataaataaataaatatgagatggctgttgtgaagagaaggaagtcagttttttctcagtataattgtaaactttaaaaaaaattaaatcatcttccacttaatccccgagactt

SEQ ID NO: 41604 - DNA, 201 bp, Homo sapiens
atagatctttcagcttttactgaaagatttttttaatgctttaattatagatttttttgctttcttttaagcttatctaagcttttgttttttagaaaccrttgtgttgattttgtggtaaaagtgcaactcaaatcattattatctatctatgatgtcatagacaaacaatgtctatcttagttgacatagaagttctct

SEQ ID NO: 41605 - DNA, 201 bp, Homo sapiens
atagaagttctctatttaaattattgcctgaacaatcttaattccattagtttatctaacatttttaaagtattgtctctgaagacaacatgcagagataytgttcagaaggagatgcatgaatatacattttaactaagagttttcatcaagtgagattccctgggttcctcatctacttgcttatgtggctgtctacaa

SEQ ID NO: 41606 - DNA, 201 bp, Homo sapiens
tttaaggcgaagatagcatgaatatttgaaaagtattttgaaagcaagcctgtagtaatagacctgacaaaaatcaaattctttcacaactaaaatttctrtctacctccaaattattgcctccattatattcatatctgaactaagctgtcttaatttgctacaaatgtagttaattatgtaaatcatttaaatttttca

SEQ ID NO: 41607 - DNA, 201 bp, Homo sapiens
ctataatagaaaacatttattttctctataatgttgaggatttgttttaattgatatattcaactcagaacgttagttttacattttatataaagtatttrataaaagtagtaaagtattattaagttgttttttagtttgaagaatccagttgggtaaaataatctttttcctctgtacaattctgtgttactcaaaaaa

SEQ ID NO: 41608 - DNA, 201 bp, Homo sapiens
taaacacacaatacttgtagtgtgatgcactagggcttcaacctggttttcttagttaatagtaaaattttattcagaaatgtaaaattactactgttatmctagtgttcagaaacaccaactagttgctaaaatattctgactatagcatcctaaattctgattttcagctggaccaccaccgccacctggtggggggat

SEQ ID NO: 41609 - DNA, 201 bp, Homo sapiens
aattaaacattacgtatctgtaaggatacaattttgtttgaaatctttctaaaaaactgtggtgattgaaggattgacagtgatatataaatctcaaaaasgaaataaagctgtgtgccgttgattttggaaatgtttgtacttaacatttttatatggtaggagaatgaaggaatgtgtgattataatggatactcagaa

SEQ ID NO: 41610 - DNA, 201 bp, Homo sapiens
tcaccatgcagttcccagcagcttcaaggccaccaatgtacaggtataaagaaatcagtgaaaataagatgattggttcatatgagaaatagttcgattamtttccttaggcatttctacaaaaagcttctcaatttgtgatgtgctgaaatacacccacaatattgagggtgctgtactgaatcatagttaacatgtgca

SEQ ID NO: 41611 - DNA, 201 bp, Homo sapiens
gcatcagaaacatagggctgaaaattaatttatgattttttttttttttttgagacggagtttcactcttgttgaccgggctggagtgcaatggtgtgatytcagcccactgcaacctccgcctcccaggttcaagccattctgcctcagcctgccgagtagctggaattataggcacccgccaccacgcctggctaattt

SEQ ID NO: 41612 - DNA, 201 bp, Homo sapiens
ctgcaacatccaggatcagaacaagtacaatttcctcgaaccacttcaccatgcagttcccagcagcttcaaggccaccaatgtacaggtataaagaaatyagtgaaaataagatgattggttcatatgagaaatagttcgattaatttccttaggcatttctacaaaaagcttctcaatttgtgatgtgctgaaatacac

SEQ ID NO: 41613 - DNA, 201 bp, Homo sapiens
ccattagtttatctaacatttttaaagtattgtctctgaagacaacatgcagagatattgttcagaaggagatgcatgaatatacattttaactaagagtyttcatcaagtgagattccctgggttcctcatctacttgcttatgtggctgtctacaagtcacttaatttaccttagtctaactgccttctgtaaagtggg

SEQ ID NO: 41614 - DNA, 201 bp, Homo sapiens
tcatgtacatcaccagtgggatgggatgatcctgtatcttcatttattataaggaataactataaaccagatagtttgtgactttctccacatacttttcrttagaatctaagagttaggcctttgagtatttaactctgtgctttatggctcgaaagattaaatgttaaaaacaaattagtgattgtgtttagtttattg

SEQ ID NO: 41615 - DNA, 201 bp, Homo sapiens
gatattgtgtgaaactcgtcagggttaccaccagtttaggagaagcatctctgcactggcccatctgatgaatagtagtcatacttctctttattgttgcrgtcttcagtgatcatgattcactaactttctgtgctagatatagttcatgcttagcatagccatgcaggataacttccaggtccttaatctgttaccctt

SEQ ID NO: 41616 - DNA, 201 bp, Homo sapiens
tctacttgcttatgtggctgtctacaagtcacttaatttaccttagtctaactgccttctgtaaagtgggttgctatagtctttaagccaatatgtatatyaccgtttttgtaataaacagtataaatatgagaaaattaaacagatgcaattttagtttgtggatgaccagctgtattcccaagattgaaaagtgattac

SEQ ID NO: 41617 - DNA, 201 bp, Homo sapiens
ccaggactttgagaccagcctggacaacacacgaagactttgtctctacaaaaataaaaataaaaaaattattcatgcgtcacggtacatacctgtagtcrcagttgtttgggaggctgaggtgggaggatgacttgagagttcaaggctgcagtgagttaggattgcaccagtgcactccagcctgggcaacagagtaag

SEQ ID NO: 41618 - DNA, 201 bp, Homo sapiens
aagaaaagtcagcactactgggtaagcaggtgagggggcttattgataggagagtcggctatgtcaaatagggactcaaggcacaaagtcaatttctttaytgacaactttcaatccaagtaataggaattttgtatttgtaaattactaggtagtggctctggctattcttgttttttcattgatttctgtgagcatttc

SEQ ID NO: 41619 - DNA, 201 bp, Homo sapiens
atgaagtatttttttaaaggactgaataaaagtctctttatataaaatcattcaaataataatcttagctatttcctgtttgtcaaacaaagattaaaagyatgtatgtggcaaagcgtggtggctcctgccagcactttgggatgccgaggcaggaggtttacctgagcccaggactttgagaccagcctggacaacaca

SEQ ID NO: 41620 - DNA, 201 bp, Homo sapiens
tgtgagaatttattttatgttaatctggtgaatgccatattcattgtttattgaagtatttattaataatttactatatgggccgggcgcagtggctcacrtctgtaatcccagcactttgggaggccaaggtgggcgggtcacaaggtcaggagttcgagaccagcctgaccaacatggtgaaaccctgtcactactaaa

SEQ ID NO: 41621 - DNA, 201 bp, Homo sapiens
caaactgctgagattacaggcgtgagccaccgctgctggccaagaaacctgtttttaaaggttttctcattcttttgttcagtcaaaaactgtcttttttycctattatgtaccagacaccaggttagacaatgatagcaattcctccagctataaaaaaagcatttaggccccacttatagtcaagtggtaatcatctaa

SEQ ID NO: 41622 - DNA, 201 bp, Homo sapiens
tgagctgagattgcaccactgcactccagcctggcgacagagcaagactttgtctcaaaaataaataaataaataaataaataaataaataaataaataaatatgagatggctgttgtgaagagaaggaagtcagttttttctcagtataattgtaaactttaaaaaaaattaaatcatcttccacttaatccccgagact

SEQ ID NO: 41623 - DNA, 201 bp, Homo sapiens
gtgagctgagattgcaccactgcactccagcctggcgacagagcaagactttgtctcaaaaataaataaataaataaataaataaataaataaataaataaatatgagatggctgttgtgaagagaaggaagtcagttttttctcagtataattgtaaactttaaaaaaaattaaatcatcttccacttaatccccgagac

SEQ ID NO: 41624 - DNA, 201 bp, Homo sapiens
cttccaaaggaggagaaacttgtgaaattactacagaactgattcatctctggtataatatatttgtatttttaaagagagagtgtaaatactgacttctrtgctttcttttttctaaagtgtttaagtgatttaagagggtgtctcattgcctagtctatgtcccttgaattatctatatgtctctcagaagataagtag

SEQ ID NO: 41625 - DNA, 201 bp, Homo sapiens
ggtaggatatcaactttgaatgactaggcctggtgctttactttaaaagtccttctttccctcctgtcttccaaaggaggagaaacttgtgaaattactayagaactgattcatctctggtataatatatttgtatttttaaagagagagtgtaaatactgacttctatgctttcttttttctaaagtgtttaagtgattt

SEQ ID NO: 41626 - DNA, 201 bp, Homo sapiens
tgttatggtactaaatttggctagtgaaaatttatatgaagaaaaaataacaggaatatatgttgtgtattgatatatacattattgatcatagataattytttgtgttgacagttcaaaaagatgagttatggcatgtggataatgactaaagaagttatatcaaaagtcaattatttcccttaatatattctttctcag

SEQ ID NO: 41627 - DNA, 201 bp, Homo sapiens
aggattttttaaatcccacataatatcattttatatcttaaaatattgaggttaattcattaattacatcaaatatccagttaatatttgtatttccttcygccccgcaaatattgcttatgtttttacacatttgtcttagagtttcccatattctggattttaccgattgcgtcatcatactgtcatttaacatgtctt

SEQ ID NO: 41628 - DNA, 201 bp, Homo sapiens
agtctgtccagttcaaatcctgttttccatacttactggctgtgtgatgttggacaaattacttgatttttctatctgccttagtttcctaatctgttgtwggacagagtgataataggacatacttcttagaactgttgtgtgagttttaaatgaattcattatgaaaaatattaccacagggccaggcacatggtaaat

SEQ ID NO: 41629 - DNA, 201 bp, Homo sapiens
aggggcattacttgagaacattctctaatgtagaatagaaaaaaactataatacagtatactttttaacatatttctttcggctaggtacggtggctcacrcctataatcccagcactttgggaggccaaggctggtggatcacctgaggtcaggcattcaaaaccagcctggccaacatggtgaaaccccgtctctacta

SEQ ID NO: 41630 - DNA, 201 bp, Homo sapiens
ataactagatactttagttgtgctatctcataatggaaataatacctcctttgtaatggaggtggtgtttccatttcttctgataagaagctaaggagcckcagaatagtcacttgcccaatatcacttagatagatggctgatatcacatgtaggtattttaagctccaaagctctcactttttatgacccactgcgtct

SEQ ID NO: 41631 - DNA, 201 bp, Homo sapiens
ttagtcgtagaagcttggttttatcctcattttattgcattattcatttattaatgtttaggatctgaaacacattgatattggcaagttaatattgtctrgcattgtcttatgtttccagcaatataggtagatgagcaaatgtcttattctattcctcagctctttagaaagtcctcattgctgggagagaggaatagg

SEQ ID NO: 41632 - DNA, 201 bp, Homo sapiens
tacaggaaaaacacttctgtaatatacaactttatagtcttaagagttttattagtcgtagaagcttggttttatcctcattttattgcattattcatttrttaatgtttaggatctgaaacacattgatattggcaagttaatattgtctagcattgtcttatgtttccagcaatataggtagatgagcaaatgtcttat

SEQ ID NO: 41633 - DNA, 201 bp, Homo sapiens
aaaaaaaaaaaaaaaatatcaggcatggtgatgtgtgcctgtaatcccagctactcgggaggctgaggcaagagaatcacttgaacttgggaggtggaggktgcagcgagccgagatcgcactccagcctaggtgacagagcaggactcctgactcaaaaaaaagaaaaacatatagagtaaagagatctcagtctaggaa

SEQ ID NO: 41634 - DNA, 201 bp, Homo sapiens
ttaagtaacttcaccaccctctccctactttgcagctgtttgttttcggaatgaaccaattaacttttgtatgggttataattaaggaagacatggttttytttttttaattcagttcagtctgtctgtgactttaagacctacttctctttggcttttttaacttttgagctgtatttatcaattcctaaaatccattta

SEQ ID NO: 41635 - DNA, 201 bp, Homo sapiens
ggtcatatttttaactatggggttttctctgatgctagttatgatgagaaggaggaaacaataaatcaggttgcatctggatagtgctacaggcacaaaamagagaatcatgtctttgaaaaatgtttgacattgtgtttgactcttatgagtcagtcataatataacactttataaaagctagacttgtcctttcagctg

SEQ ID NO: 41636 - DNA, 201 bp, Homo sapiens
aggcacaagccactgcacccagccaacttttttttttttttttttttttagaacagacaatgtgggtttcattaaaaatgttaaatggcttgttatttttsttttattttttcttttgtatttttaaaaatctagaatgttattacggttcaaaattacagtcttaagtccatagagttacacagctctagaagagaactc

SEQ ID NO: 41637 - DNA, 201 bp, Homo sapiens
ctttcatttccctctccagaggtaattactaacatgaaataggtatatactcttcccatccatgcttgtgtggtttttaaatttttatatacgttacattwtatggtagagttcattctgctttttgactaaacattctgacattcttctttggacttatatttgtacctatagttttagttcatttcattttaatcgttt

SEQ ID NO: 41638 - DNA, 201 bp, Homo sapiens
atgggtaaaaagtatatagagatacattcatttagttatatattagtagggtagagaaaaatatatcaagcgaaatcgaattttgaaagcatgaagaaaayaccacatcaaagtctagctaaaatacgataagactgagggtttcttataaatagtccaacacttgccaaagtctgtgtaaagcaaatgcctactcattga

SEQ ID NO: 41639 - DNA, 201 bp, Homo sapiens
attttgtattttgtatctgagtatttaaaatagaagaacagacgctcatttagcatttacgtgtttagataatcacaaacctagcaactgtcattatattkttttcattttgtaaagcagattaaaataccatttgattcaagcatagtatatattaatagcagtatggctttgtcataactagcataaagctatcaggaa

SEQ ID NO: 41640 - DNA, 201 bp, Homo sapiens
tagagtcatttacttctcagctgtagcaccaatttcttctccccacccctcacatgtttgatatttcttgtaacttactgatagaatggtttacctgtgtrctaattggtatttgtgtatagcacagcaaattgtcagctggaaaaatgacttctctttcaagttcatcttaaaatagacatactatatggcttgttgaat

SEQ ID NO: 41641 - DNA, 201 bp, Homo sapiens
ttttattttatttcgagacagtgtctcacttcgtcatccaggcaccacgtcatccaggagtgcagtggtgccatctcggctcactgcaacctccacctccygggttcaagcaattctcctgccttggcttctcccaggtggctgggattacaggcacacaccaccacgcccagctaatttttttggtttttgtagagacag

SEQ ID NO: 41642 - DNA, 201 bp, Homo sapiens
tgcctaggctagtctcgaactcctggactcaagcgatctacccgccttggcttcccagaatgctagaattataggtgtgagccactacatgtggcctgcasaattttattttgttttattttattttatttcgagacagtgtctcacttcgtcatccaggcaccacgtcatccaggagtgcagtggtgccatctcggctca

SEQ ID NO: 41643 - DNA, 201 bp, Homo sapiens
agttttcccagctcagagattaggatgttagtacaacttgcctcatagggaatgcttagaacatacctttcatatagtaagctcttttttttttgttgttkttttttttggagagggagtctcgctctgtcactcaggctggagttcagtggcacagtctcggctcactgcaagctccgcctcctgggttcacgccattct

SEQ ID NO: 41644 - DNA, 201 bp, Homo sapiens
tgtctcagttttcccagctcagagattaggatgttagtacaacttgcctcatagggaatgcttagaacatacctttcatatagtaagctcttttttttttkttgttgttttttttggagagggagtctcgctctgtcactcaggctggagttcagtggcacagtctcggctcactgcaagctccgcctcctgggttcacgc

SEQ ID NO: 41645 - DNA, 201 bp, Homo sapiens
taatattttatagaaattttaggattactttcataaaaatttcttaatacttcagagctaattcaagaaacctgtgtgcattaacgtcaggaagttaactktcccacataattgccttggagttgttctgaattgttgattatggtctcaaataattatctgacaggtttttggttaggaatttttctgctgccacacact

SEQ ID NO: 41646 - DNA, 201 bp, Homo sapiens
attgtctcttttatgtactttgggtagagatgatttcgaataaattaagtgcacaactacaatacatcttctatgctctccttttaatacaggaaaaacayttctgtaatatacaaccttttaatacaggaaaaacacttctgtaatatacaactttatagtcttaagagttttattagtcgtagaagcttggttttatcc

SEQ ID NO: 41647 - DNA, 201 bp, Homo sapiens
ggctaaaatgttatttcataatagatggttttaggggcttaccatttaatcaaaattttatcattttagagcataaaagtactcgcttaaatttttttttwaatcttactagatgaaatgaattcagagcaggatttaactcattgtaccattacaggttatcaagttatacccaaccagcagcaaaactaccaaggaata

SEQ ID NO: 41648 - DNA, 201 bp, Homo sapiens
ctctgcactggcccatctgatgaatagtagtcatacttctctttattgttgcagtcttcagtgatcatgattcactaactttctgtgctagatatagttcrtgcttagcatagccatgcaggataacttccaggtccttaatctgttacccttaggagttgtctcgttgttagtttacaggttctcccctttttagtatgt

SEQ ID NO: 41649 - DNA, 201 bp, Homo sapiens
ctttgggtctaactgacctgagctccaactatggcttaatcatatgcctgcctttgaccttgcatatttgcttaagccatttgaacctcggtttgttcaawaatatttatatcagtaactaacttctgagtgtttactgttttatgtgttactgacattttcatttcatcttcagaacaaccctaagaagtaggtacacta

SEQ ID NO: 41650 - DNA, 201 bp, Homo sapiens
attaacagcatgtatcagttcattttaaaggttacacgatagaagttttagtttgtgcctacttttagatggttttggctcacctgctaaaagatcaatayaccttgagaaaagtagtttacctgttagtttgagtctcatatgtagggcccctataaaggattagtaacctttaacttatgaccattataaaaatatcta

SEQ ID NO: 41651 - DNA, 201 bp, Homo sapiens
ggttttctattgagatttttggataaactattattttttctaatagagtgataagatattctctactttgctctcattctgaaaatcagctaccatgaatrttataacttacatctgttatcttgcttcagcatagtaatatttaaagtgattaaaggaaacaaatgtttaccttccaaaagatgcattcattttattcat

SEQ ID NO: 41652 - DNA, 201 bp, Homo sapiens
ccatctcagccttccaagcagctgggattacaggtgtgagccactgcactggctaatttcttaaatttttttgtttttcttgtttgttttgttttgtttttgagacagagtctcactctgtcacccaggctagagtgcagtggcacaatctcggctcactgcaacctctgcctcacggattcaagcaattcgcttgcctca

SEQ ID NO: 41653 - DNA, 201 bp, Homo sapiens
aactgaaagacagcacctgttctgcctcaagctgtttttaagctatttttactggccacaaaatgctctttgacagaaagaagaaatcaaacgttttctarccttttccttctaacataatccttaggtgctttcttgagagagggctgtgatcctttgttagaaaaaaatgtagttggcaattcaagaaataaagggtgg

SEQ ID NO: 41654 - DNA, 201 bp, Homo sapiens
cccatctcagccttccaagcagctgggattacaggtgtgagccactgcactggctaatttcttaaatttttttgtttttcttgtttgttttgttttgtttttgagacagagtctcactctgtcacccaggctagagtgcagtggcacaatctcggctcactgcaacctctgcctcacggattcaagcaattcgcttgcctc

SEQ ID NO: 41655 - DNA, 201 bp, Homo sapiens
caacttagattcataagaagtatattgactctaagccttgacatcaaattatcttggtgaattgatttttcctcagaattttaaggactaaatgagataayagatgagtgctttgtaactgtatatcccatatctcttgatttattccctccttttaaaaatccttccatcttgctgggctcacacctgtaatcctagcac

SEQ ID NO: 41656 - DNA, 201 bp, Homo sapiens
tcccatctcagccttccaagcagctgggattacaggtgtgagccactgcactggctaatttcttaaatttttttgtttttcttgtttgttttgttttgtttttgagacagagtctcactctgtcacccaggctagagtgcagtggcacaatctcggctcactgcaacctctgcctcacggattcaagcaattcgcttgcct

SEQ ID NO: 41657 - DNA, 201 bp, Homo sapiens
tctcacaaggcatcgtttacattattgaaatacagtgcttgtggcctcaactttgagaactcggaaattttgtttttgtagattcacataaaataagctcrggttatatatgctaatgatgtttgcagagattgaataaatctgaatgccagattattaatttactgtgaaagttgagtagtgcttctgtcagcattacca

SEQ ID NO: 41658 - DNA, 201 bp, Homo sapiens
tcctcccatctcagccttccaagcagctgggattacaggtgtgagccactgcactggctaatttcttaaatttttttgtttttcttgtttgttttgttttgtttttgagacagagtctcactctgtcacccaggctagagtgcagtggcacaatctcggctcactgcaacctctgcctcacggattcaagcaattcgcttg

SEQ ID NO: 41659 - DNA, 201 bp, Homo sapiens
gggataagttagggagtaagagtgatactgcccagagatctcacaaggcatcgtttacattattgaaatacagtgcttgtggcctcaactttgagaactcrgaaattttgtttttgtagattcacataaaataagctcaggttatatatgctaatgatgtttgcagagattgaataaatctgaatgccagattattaattt

SEQ ID NO: 41660 - DNA, 201 bp, Homo sapiens
agtaaacatttgtccagtgattaaatgaacaaatgatttggcagagtcaaatgctttgaatgttttttctttttctttcttttttttttttttttttttttgagagttttgctctgtcacccaagctgggagtgcagtggcatgatcatagctcactgcagcctcaaccaccagtgctcaagcaatcctcccatctcagcc

SEQ ID NO: 41661 - DNA, 201 bp, Homo sapiens
acccaccgcagccggccaagttctgctgtttttattacattttttgcagcttaaaatgagtgctatctttagcttaatctctgatacattaatccagtgcraaaccagtgattttcttaaactcactaatgacatgaaaatatattggaatcttatgtatttgatttcctgtggattccatattctagagtgcctggataa

SEQ ID NO: 41662 - DNA, 201 bp, Homo sapiens
ttttggtaacatgaaagattcatttgcttaggaagggatagagtgagaaactgattggtctgaaattgaattgtactattaatttaaatgaatcaaaaagygatctctggtttttgacaacagtattacaatacatttaacttttttaagatgacccttaaattacatttgaccgccttcacccaaatctgctccaccaat

SEQ ID NO: 41663 - DNA, 201 bp, Homo sapiens
tgggttctgaggaaacatctgagttttgatcatttcttcagggtttgagaagactatggtggcttaatgatcttctgtattccataactagtacacctagwtacagaattgacatagatacattcaggtcctggaggaaatttgtggtatctattaaaaaaatgaaaattgccagtcatgtagtagtcacctgtagtccct

SEQ ID NO: 41664 - DNA, 201 bp, Homo sapiens
gggtttgaattctgactttccctccagtgtattctatgcctgtacactctctagtagtggtcggtcgcttgctctctctcgctcgctctctctccccctcyctccctccttccttctctttgtttttgagacagagtcttgctctgtcacccaagccggagtgcagtggtgtgatcttggctcactacaacctctgcatcc

SEQ ID NO: 41665 - DNA, 201 bp, Homo sapiens
agcccattgcacaatatctcataatctcagatagttacaatgaaatctgtcttttataaattttctttctctatcttcacagcggtgactaatagctgttygtaggaatgaggcgtatgggcatccaggctttacatttgatctttctagccaacatctttcagttatgtgtttgaccatcatccccaaagcttctatagg

SEQ ID NO: 41666 - DNA, 201 bp, Homo sapiens
cagtaaacatttgtccagtgattaaatgaacaaatgatttggcagagtcaaatgctttgaatgttttttctttttctttcttttttttttttttttttttttgagagttttgctctgtcacccaagctgggagtgcagtggcatgatcatagctcactgcagcctcaaccaccagtgctcaagcaatcctcccatctcagc

SEQ ID NO: 41667 - DNA, 201 bp, Homo sapiens
gcctcagcctcccgagtagctgggattacaggcgcccgccaccatgcctggctaattttttgtatttttagtagagatggggtttcatcgtgttagccagratggtctcgatctcctgaccttgtgatccgcccgcctcggcctcccaaagtgctaggattacaggtgtgagccaccccgcccggccagatactactttta

SEQ ID NO: 41668 - DNA, 201 bp, Homo sapiens
ccagtaaacatttgtccagtgattaaatgaacaaatgatttggcagagtcaaatgctttgaatgttttttctttttctttcttttttttttttttttttttttgagagttttgctctgtcacccaagctgggagtgcagtggcatgatcatagctcactgcagcctcaaccaccagtgctcaagcaatcctcccatctcag

SEQ ID NO: 41669 - DNA, 201 bp, Homo sapiens
ggacattctcctgcctcagcctcctgagtagccaggattacaggcgtgtgctaccatgcctggctaatttttgtatttttagtagagatggagtttcaccwtgttggtcaggctggtctcgaactcctgacatcaagtgatctgcctgccttagcctcccaaaatgttgggattacagccatgagccaccgcgcccagcca

SEQ ID NO: 41670 - DNA, 201 bp, Homo sapiens
cccagtaaacatttgtccagtgattaaatgaacaaatgatttggcagagtcaaatgctttgaatgttttttctttttctttcttttttttttttttttttttttgagagttttgctctgtcacccaagctgggagtgcagtggcatgatcatagctcactgcagcctcaaccaccagtgctcaagcaatcctcccatctca

SEQ ID NO: 41671 - DNA, 201 bp, Homo sapiens
tctttaatctccatatatcaaggatttcctgtcttcttagtgtttaaacaaaagatgccatagtttttcttaaacaaaagtacctgtgtttagacagactrataaatcttagctattagaatgtgagaagtcatccgatccaacctcagtggtgtgggacgcatccaggggcaatcacctgggcagcttttcctaaaattg

SEQ ID NO: 41672 - DNA, 201 bp, Homo sapiens
ggggtctgccaactgcagctttcctggagtctggttatcttccagcccagactagggcttctactatgaaattgaagagcactaggtgttaccagactctkgtgcagatgtgcactcactttagcacatttgcaaggtcccactggtcccagagaatgccatgcctccccaccaactagcacatcccaattgtgaatattg

SEQ ID NO: 41673 - DNA, 201 bp, Homo sapiens
ttgaagaatgaaagaaactgcaaaaattctccattaaattagagcacagggccaggcatggtggctcactcacgcctgtaatcccagcagtttgggaggcygaggcgggcagaatacttgaggccaggagcttgagaccagcttgggcaacctggcgaaaccctcatctctactaaaaatacaaagaaattagctaggcat

SEQ ID NO: 41674 - DNA, 201 bp, Homo sapiens
gaagcctggaggcagaggttgcagtgaactgagatcgtaccactgctctccagcctgggtgacagggcagaactctgtctcaaaaaaaaaaaaaaaaaaaactaactgttcaaaaatacagcagtaacttaatggtttcacactaatagcctttaatttttgtcaatattttgttaactatgtcagaacatgttctgttgt

SEQ ID NO: 41675 - DNA, 201 bp, Homo sapiens
ttaatgtagctgaaatcttactgtatatatttcacttattggtcatagtaaaaattttttcatcctattaaaaattcattaatataatttaatgatcataytcttacattttatgaatatacaataatatatttaccctattgcagaacatttaggtcgtatctttttactttattgaaccatcttgtaagcaattttaat

SEQ ID NO: 41676 - DNA, 201 bp, Homo sapiens
tgtcccttttcattggctgaagcggcggcatgggtacctctcaggaactacaattccagccaagcaccgcgacaagtgaacggaggagaagttatgagtargggaaaagcatgttgggaatcgtagtccgctccaggccgaaaagagcaatcaccccgccctccgccactgaagctggagaaaccaggtgttcgtttcaga

SEQ ID NO: 41677 - DNA, 201 bp, Homo sapiens
aaaaagaggaaagatgtaactactttgaaaactagaagagaaagaactaaaggagaaaagaattcttaggccaggtgcagtgactgacacctgtaatcccrgcactctgggaggctgaggcatgtggatcatctgaggtcaggagttcaagaccagcctggccaacatagcaaaaccacatctcctaaaaatacagaatta

SEQ ID NO: 41678 - DNA, 201 bp, Homo sapiens
tctgtacagcctcgcgacaactcgttctccgccctaatttcaagtcattcaaaactctgtcccttttcattggctgaagcggcggcatgggtacctctcargaactacaattccagccaagcaccgcgacaagtgaacggaggagaagttatgagtaggggaaaagcatgttgggaatcgtagtccgctccaggccgaaaa

SEQ ID NO: 41679 - DNA, 201 bp, Homo sapiens
cctccaggttcaagcaattctcctgcctcagactcccaagtagctgagattacaggctgccgccaccacacctggctaatttttgtgtttttagtgtaggyggggttcaccatgttgtccaggcaggtctcgaactgaacctcaagtgatccgcccacctcagcctcccaaagtgctgggattaccggcaagagccaccac

SEQ ID NO: 41680 - DNA, 201 bp, Homo sapiens
taaaagaaaaaaagttactttcactgctaaaacattgccttttcagaacattcatttcttctttagtggatataaaagaggttttttttgtttgtttgttkctttttttcttttttaccatttttgtgggcatgtgtttattagcaaaatttattagtaaattgttttattcaccaaaaaatgttaaaggagaagggaaga

SEQ ID NO: 41681 - DNA, 201 bp, Homo sapiens
ctttaaaaaatgtttcacagaatctttatgaaattatgaaaaagaaaacctacttttaagtctttttcccttttttctgtccacagtctgtttttcctcayttttgtatcctagtatttctctagtgtcccttttgtcctacttgtgatacctctcttgtattcattttatttctcctaagcttctagtttgacattttca

SEQ ID NO: 41682 - DNA, 201 bp, Homo sapiens
gcaatctcggctcactgcaacttctgcctcccaggttcaagcgattctcttgcctcagcctcccgattaactgagactacaagcacacgccaccacacccsgctaattttttgtatttttagtagagatggggttttaccacgttggccaggctggtctcaaactcctaacttcaggtgatctgccagactggctcatttc

SEQ ID NO: 41683 - DNA, 201 bp, Homo sapiens
tagtttgtccagggatgttcatctgtatacatgtgtatatgcacacaattcaaaacatatctgggaacagttcaaacaatgcctctccctcacattattaytaacaataggatagggagtccacattgtgttggtaacccttgtcatggagaaaataagagagctgatttctgttaaaaactaggccttgtgtgccagagt

SEQ ID NO: 41684 - DNA, 201 bp, Homo sapiens
aggctgggcgggcggatcacctgaggtcgggagttggagaccagcctgaccaacatggagaaaccccgtctctactgaaaatacaaaaaattagtcgctcrtggtggcgggcacctgtaatctcagctactcgggaggctgagacaggagaatcgcttgaacctgggaggcagcggtgagccgagatcaggccattgaact

SEQ ID NO: 41685 - DNA, 201 bp, Homo sapiens
gtctggaatatagtggcgccatctcagctcactgcaacctctacctcccaagttcaagcagttctcatgcctcagcctcctgagtagctagaattacaggygcccaccaccaggcctggctaatttttatatttttattagagatggggtttcaccatgttggccaggctggtctcgaactcctggccttaagtaatccgc

SEQ ID NO: 41686 - DNA, 201 bp, Homo sapiens
cataaaactctttaaattatatactttatgtgtggtttattttctataaattatacctcagtaaaactataaaataatctgagtcttaaattttttcttaragactggttcttgctgtcatttaggctggaatgcagtggtgtgatcctgactcactgaggcctcaacctcctgggctcaagcaatcctcctgcgtcagcc

SEQ ID NO: 41687 - DNA, 201 bp, Homo sapiens
ttaaacaaagactagttttggataaagtgaaaagaaatactgtaaaactaacaaattattaaaaacaagagtaagaatttgtgaggttaagataggccacmgggcatttaatggaggaataaaggtagacttgaactaactgtaaaacctgttacagagtcatattgaaatgttaaaatttaatcaaaagtgtttttttca

SEQ ID NO: 41688 - DNA, 201 bp, Homo sapiens
tgatcatgttacccagggtcaggaaaatggtaaacactcctcaaatagtgttttgttatcaagaaatactgcgaagggccaaggacggtggctcatggctstgatcccagcactttgggaggccgaggcgggtgatcacttgagaccaagagttggggaccagcctggccaacatggtgaaacaccatctctactaaaaat

SEQ ID NO: 41689 - DNA, 201 bp, Homo sapiens
agaaaatgtggtatggctcattcctgtgatcccaacactttttgaggccaaggcatgaggatggctcgagcccaggagtttgagaccagcctgagcaacayagggagaccccatttctacaaaaaatttaaaaagtagctgggtatagtgacaaatacctgtgaagctagtctactcaggaaactgagttgtgggaagata

SEQ ID NO: 41690 - DNA, 201 bp, Homo sapiens
ccaccacctcctcctcctcccctaccacctgggcagccagtccctactgctggatatcctgcctctggtcatcctgtcagccagcctgtgctccagcagcmgggatatattcagcagccatcaccacaggtatattgctttttaaccttttctttcttgtggaaacctctcacttaagatcagttttaacttcaaagaact

SEQ ID NO: 41691 - DNA, 201 bp, Homo sapiens
tgggaagccaaggtgggcggatcacttgaggtcaggagtttgagatcagcctgaccaacatggtgaaaccccatctctactaaaaatacaaaaattagccrggcatggtagcgcatgcctgtagtcccagctactcaggaggctgaggcaggagaattgcttcaacccaggaggcaggggttgcagtgagccaagattgca

SEQ ID NO: 41692 - DNA, 201 bp, Homo sapiens
aagaataagataccaggccagccacggtagctctcgcctgtaatcccagcactttgggaggctgaggtgggcggatcacctgaagtctggagttcaggacyagcctgtccaacatggtgaaacccccatctctactaaaaatacaaaaattagccagacatggcagtgcgcgcctgtagccccagctactggggaggctga

SEQ ID NO: 41693 - DNA, 201 bp, Homo sapiens
gcacacccctataatctcagcactttgggaggccaacaggggcggttcactctgagctcaggagttcaagaccagcctgggcaacatggcgaaaccctgamtctactaaaaatacaaaaattagctaggtgaggtggcgcgcacctgcaattccagttactcaggaggctaaaacaggagagtcgtttgacccaggaggca

SEQ ID NO: 41694 - DNA, 201 bp, Homo sapiens
agccgagattgcaccgctgcactccagcctgggcgacagagcagacagagcaagactcagtctcaaaaaaaaaaaaaaaaaaaaccaacaaaaaagattarcttgtggtatcattgaagcaaagataattatattttaaatgaaaatttaaatttaaaatgaaaatataattttaaattatattttaagtgaaaagacagg

SEQ ID NO: 41695 - DNA, 201 bp, Homo sapiens
gtcagctgagatcgcaccactgcactccagcctgggccgggcaacagagtgagactgtctcaaaaaaacagaaaagaggttgtaaaataaggacagtaccrtcaagtttacaatttgaaacatgagctattaattattttagtttttcatccagttctaattttattagtgaaatatatgtaatgtggcctaaaaattaga

SEQ ID NO: 41696 - DNA, 201 bp, Homo sapiens
gggttgaggtggccataagccgagattgcaccgctgcactccagcctgggcgacagagcagacagagcaagactcagtctcaaaaaaaaaaaaaaaaaaaaccaacaaaaaagattagcttgtggtatcattgaagcaaagataattatattttaaatgaaaatttaaatttaaaatgaaaatataattttaaattatatt

SEQ ID NO: 41697 - DNA, 201 bp, Homo sapiens
ggggttgaggtggccataagccgagattgcaccgctgcactccagcctgggcgacagagcagacagagcaagactcagtctcaaaaaaaaaaaaaaaaaaaaccaacaaaaaagattagcttgtggtatcattgaagcaaagataattatattttaaatgaaaatttaaatttaaaatgaaaatataattttaaattatat

SEQ ID NO: 41698 - DNA, 201 bp, Homo sapiens
taaggttcttatctttgattggattaggagaatgatgtgggcttttttgtttttagtgctttccagctgagtatttctagttttgcttgtgattatagtamttttaaccaacatagatcccagttttattttctttttcattggaacaaatgttagcctgttaatgcctgttgagtacttttctgctaagcactgcattag

SEQ ID NO: 41699 - DNA, 201 bp, Homo sapiens
attgattgtgctttcctctgaaagtgctgaaagaaatgggataatattgcaacagtgcagtcctttaacaaaacagaatggtagtgttttaaaaaaaaaaatctatgttgagatctggatatttattttgttgtttggtatcacttactattggcatttcttactttacaaaatagaggctttcccacaatattgacgtaa

SEQ ID NO: 41700 - DNA, 201 bp, Homo sapiens
aacccaggaggcagaggtttcagggagccgagattgcgctattgcgctccagcctgggtgacaagagcgaaactcttatctcaaaaaaaaaaaaaaaaaaagttattttgtacaagtcagagtaaagaatacgcctgtttgggatggagtagtaggcagtgtaatgtttttgaaaattcatttctttgttctgttgaccaa

SEQ ID NO: 41701 - DNA, 201 bp, Homo sapiens
gaagttgtgatgaaaagcaggatattttcaaggtcacaaaatatctccccacaagatatgaattacaaagagaaaaatggtaactatggggtggcgggggsgggtggaaatggcagataccaccttaaccaggtaaagtagaagtcactagtaatctgagacacgccagcgtcatgtgttccctgatgcactgaaagggca

SEQ ID NO: 41702 - DNA, 201 bp, Homo sapiens
gtcatcattggtttacagatggcattacgttatatttgacaaaagctcaactttttgtatctattcttttttctagtccctgtgttcccaagagaattacmttattgacaaaaggtgagggaatttttaacatctgttttggtaattgtctgactgatgctaataaaaattaaaatgtcctattaaaatgccaacagactc

SEQ ID NO: 41703 - DNA, 201 bp, Homo sapiens
atgataaccaggtaatctagaacaattgtaggatttgtataggtgcaagacatactataccagtagttcatttgcctaaaaattatcctcttttctgtagrtgagaatacgtttgaaagatgacagaagaagcaaatctatagaagaaagagaagaagagtaccagagagccagagaccgaatattttcccaagatgtacg

SEQ ID NO: 41704 - DNA, 201 bp, Homo sapiens
accttcacagtgcttctattgtacaagcacagtctggaaaaaaaattaataggtactattaagtgaaataaccttagattcatgggtattctaagcatttytttaatactttttgtaatttttctgattatttctgtgttattaagaatgctttcctttagaacaaatgctagttcagatcacctatataaaataaaatca

SEQ ID NO: 41705 - DNA, 201 bp, Homo sapiens
agattataagcttgaggttttaacaatttggtcttgtagatgcctagttacaaataaatttggctttagtaaaatggctcatctttaaaaaaaaaaaaaaagaaaactaccttcacagtgcttctattgtacaagcacagtctggaaaaaaaattaataggtactattaagtgaaataaccttagattcatgggtattcta

SEQ ID NO: 41706 - DNA, 201 bp, Homo sapiens
gtccatggtcaaactgcctataaaatcactttcaatcacaggttgggactagtgtgctagtatatatgcctctctgccaaaaaaaaaaaaaaaaaaaaatatgacacttaatagaattcaactaaatatgcctgattggaggtgaaaacatctatgtgacagatagcatgtgtttatcattggtcatatttttaactatgg

SEQ ID NO: 41707 - DNA, 201 bp, Homo sapiens
ctgtccatggtcaaactgcctataaaatcactttcaatcacaggttgggactagtgtgctagtatatatgcctctctgccaaaaaaaaaaaaaaaaaaaaatatgacacttaatagaattcaactaaatatgcctgattggaggtgaaaacatctatgtgacagatagcatgtgtttatcattggtcatatttttaactat

SEQ ID NO: 41708 - DNA, 201 bp, Homo sapiens
ctttatttagcataatgtttttggggttcatccatgttgtagcatgaatcagtacttcattccttttcatttctgaataatatgcgtttgaatggatatatgacgttttattcatcagttggtggatatttgggttgtttctgttttttggttattgtgagcatcactctgtaaacattcttggacaagtttttatgtaga

SEQ ID NO: 41709 - DNA, 201 bp, Homo sapiens
tatattttaaatgactttataaatgtagttaaagctattgccaaaaaagtgtaaatttccgttttatgcaattcttctaacgttttattctgacattaacrttgtttgccaacctgttattctttagcctgttcatcctctgcagtcctcttcacagcctgttcagtactctacagccccttacccatccccgttcctgcc

SEQ ID NO: 41710 - DNA, 201 bp, Homo sapiens
cctgtccatggtcaaactgcctataaaatcactttcaatcacaggttgggactagtgtgctagtatatatgcctctctgccaaaaaaaaaaaaaaaaaaaaatatgacacttaatagaattcaactaaatatgcctgattggaggtgaaaacatctatgtgacagatagcatgtgtttatcattggtcatatttttaacta

SEQ ID NO: 41711 - DNA, 201 bp, Homo sapiens
gatagttaagtaaaaggtgaagaagaggtgctttccaaattaggattagtgaacagcaaatggtttttctaataaaattttctaaatatatatatatatawcttcatggttatagtttacctaattgtaactgtaagaaaccttttttagcttaaatatcattgatgacaaaaacttttaaatgaaaagatgattaaagtc

SEQ ID NO: 41712 - DNA, 201 bp, Homo sapiens
ccctgtccatggtcaaactgcctataaaatcactttcaatcacaggttgggactagtgtgctagtatatatgcctctctgccaaaaaaaaaaaaaaaaaaaaatatgacacttaatagaattcaactaaatatgcctgattggaggtgaaaacatctatgtgacagatagcatgtgtttatcattggtcatatttttaact

SEQ ID NO: 41713 - DNA, 201 bp, Homo sapiens
ctattgccaaaaaagtgtaaatttccgttttatgcaattcttctaacgttttattctgacattaacattgtttgccaacctgttattctttagcctgttcrtcctctgcagtcctcttcacagcctgttcagtactctacagccccttacccatccccgttcctgccagtctcacccacccagcaatactctgtggtacta

SEQ ID NO: 41714 - DNA, 201 bp, Homo sapiens
tccctgtccatggtcaaactgcctataaaatcactttcaatcacaggttgggactagtgtgctagtatatatgcctctctgccaaaaaaaaaaaaaaaaaaaaatatgacacttaatagaattcaactaaatatgcctgattggaggtgaaaacatctatgtgacagatagcatgtgtttatcattggtcatatttttaac

SEQ ID NO: 41715 - DNA, 201 bp, Homo sapiens
tcatttgaacctgggaggcagaggttgcagtgagccaagatggcagcactacactccaacctgggcgacagaatgagactccacctcaaaaaaaaaaaaaacctaaaaataaataaaataatacatgtatggataatagatatatagtaaatagatatatactgtatagtaaaatcaccaactacagaataatggcttcta

SEQ ID NO: 41716 - DNA, 201 bp, Homo sapiens
cccgccaccatgcctggctaattttttgtatttttagtagagatggggtttcatcgtgttagccagaatggtctcgatctcctgaccttgtgatccgcccrcctcggcctcccaaagtgctaggattacaggtgtgagccaccccgcccggccagatactacttttaccaataaagtgttattctttcttgtgccaatatt

SEQ ID NO: 41717 - DNA, 201 bp, Homo sapiens
ctgcctgcccaacagataatatgttatctatagtctccaaaggctaagggcatgagttccgtcttctagggcccagtgaagtgctagcacaaaggcattayatacatgctggtgggattcaaagctggcccctggttgcttgggattctagaagacctttaacagctggtgctaaaagaacctgagtctcttgcacacaca

SEQ ID NO: 41718 - DNA, 201 bp, Homo sapiens
ataatacacagttttctacattttttcggtattttaatttctacttagagtaatatatatcaaaagtttatccaggccgggcgcagtggcttacgcctgcmatcccagcactttgggaggccaatgcggaaggatcacttgaggccactcaagaccctgtctctagagaaactacaaaaatcagccagaagtggtggcaca

SEQ ID NO: 41719 - DNA, 201 bp, Homo sapiens
gagtttacagggcagaatactgaagagaagagagctctagagatctctggagggacctccttgagtcttagttgaagagattggtgcatatgtttgcaaamactacttgaggccaggaaaagaaccactcaaaaggagcagacacaaacaatccctggaactcacccaaggacagtaatcatttgtagtcctaccagccac

SEQ ID NO: 41720 - DNA, 201 bp, Homo sapiens
cacagctcagggagggggaacccaaccagagtctctgagttaggagatggagttgggacttaaggaagccaaggtagctagagtttacagggcagaatacygaagagaagagagctctagagatctctggagggacctccttgagtcttagttgaagagattggtgcatatgtttgcaaacactacttgaggccaggaaaa

SEQ ID NO: 41721 - DNA, 201 bp, Homo sapiens
ctaaatcttccctacctacttttgaattattcttcagtttagatttttacagcttttattcctcaagtaacttctaaacttttcccaattgtttttaaaawtccacagtgactatttttactgcctaaggttttgaatggctattgccaaacttgctgttttagatatttcttgaggccacaagcaacctatataacaagc

SEQ ID NO: 41722 - DNA, 201 bp, Homo sapiens
tcactgcaagctccacctcccagggtcacgcctttctcctgcctcagcctcctgagtagctggaactacaggcacccgccaccacgcccggctaatttttkgcatttttagtagagacggggtttcaccgtgttagccaggatggtctccatctcctgatcctcccgctcggcctcccaaggtgctgggattacaggcgtg

SEQ ID NO: 41723 - DNA, 201 bp, Homo sapiens
acccgccaccacgcccggctaattttttgcatttttagtagagacggggtttcaccgtgttagccaggatggtctccatctcctgatcctcccgctcggcytcccaaggtgctgggattacaggcgtgagccaccacacccggcctgcttttttttttttttttgagtcttgctctgttgctgaggctggagtgcagtgat

SEQ ID NO: 41724 - DNA, 201 bp, Homo sapiens
tgcctcagtagctgggactacaggcatctgccaccatgcccagctaatttttgtatttttagtagagacagggttttgccacgttggccaggctggtctcsaactcctgacctcaagtgatctgcctgcctcggcctcccaaagtgctgggattacaggcgtgagccaccatgcccagcctgcctggctgattttttaaaa

SEQ ID NO: 41725 - DNA, 201 bp, Homo sapiens
cccaggctggccttgaactcctgggatcaagcgatcctcccacctcagcctcccaaagtgttgggattacaggcatgagccgctgtgcccagcctattttwttattattattatttaattttattttttctcactattgcccagctcctggcctccaactcctgggctcaaaggatcttcctgcctcagcctcctgagtag

SEQ ID NO: 41726 - DNA, 201 bp, Homo sapiens
gtagcacagtcttggctcactgcaacctctgcctcctgggttcaagcagttctcctgcctcagcttcctgagtagctgggattacaggcacccgccaccaygcctgggtaatttttgtatttttagtggagatggagtttcaccatgttggctgggctggtctcgaacttctgactcaggtgatccacttgcctcagcctc

SEQ ID NO: 41727 - DNA, 201 bp, Homo sapiens
ctgggtaatttttgtatttttagtggagatggagtttcaccatgttggctgggctggtctcgaacttctgactcaggtgatccacttgcctcagcctcccwgagtgctgggattacaggtgtgagccaccaagcctggcttggtgctttttaaatttattttgagatagagtctgactctgttacccaggctggagtgcag

SEQ ID NO: 41728 - DNA, 201 bp, Homo sapiens
ttagtggagatggagtttcaccatgttggctgggctggtctcgaacttctgactcaggtgatccacttgcctcagcctccctgagtgctgggattacaggygtgagccaccaagcctggcttggtgctttttaaatttattttgagatagagtctgactctgttacccaggctggagtgcagtggtgccatcacagcctac

SEQ ID NO: 41729 - DNA, 201 bp, Homo sapiens
gtcaggtggtgaatagactacgtttcatttatccgttcatcggttatggacatttgagctgtttccatgttttggctttgtgaacactgctgttaacatgsgtgtacctgtatgtgtacatacatgagtagaggggttcagttcttttgggtatatatgtaggagtggaattactggtcataggatcattctatgtgtaac

SEQ ID NO: 41730 - DNA, 201 bp, Homo sapiens
atatgacacggagaatgaaattccccatagcgcacccccaagagacagccctggtccccccgtctttcccgtggacctccagcggggcagatgctgagccrcctgttgtcgagtggcgtgctatcccgtcctccagctcctctgtggcttacagacacccacctgcagccctgtctttgcctcctctagcgcccaccacct

SEQ ID NO: 41731 - DNA, 201 bp, Homo sapiens
aaaataaaaggaatgatcacttcctgtttcatgaatgaggaaactgaggctctgggagatgggaaatcctgcccggaatctcacagctggaggccaggccrggctttgaatccaggcaactgagtctgagtggatggtgtgtgctttgtgttggagctggcccagggctggatgaaggcaacatttaattaatgaaaacca

SEQ ID NO: 41732 - DNA, 201 bp, Homo sapiens
ggtcatggccccagcagtgagcccagggaggtcagagacggaggtgtgtgtgtgggtgtgaccctgcgcagttccctgccggctgtagttttttgcattcrcttaatgtttctcgtggaggaaattgtgcatgagcaaatgtgaaaccgtgctgtgctcaaattgtcctaatacatcattgcattggaacagattggcttt

SEQ ID NO: 41733 - DNA, 201 bp, Homo sapiens
cgggtgtccttgttggtgatggttccacctgcttgtgccaccagtgccctctgggtctcacacacaactctcttcccagcgaaggcccctcctgccctcargcctcagtgctgcttccgtctcggaaggccccaggagctcctgcatcctgggcgtgattcctgtgtgcctgcagaccccctcgcggctgccatctcatcc

SEQ ID NO: 41734 - DNA, 201 bp, Homo sapiens
ctgggtaggggtggagcctgggtggccctgcctgtgagctgcatagttgtcgcctttgaccctgagttttcttcgttatctgtttggacctgtttggggcrggcaggggatgagatctgaagataaatgccttagctgtgaccatctccttttgtgagaggtcaatgtccagttccgctgcagttataacatcccattttt

SEQ ID NO: 41735 - DNA, 201 bp, Homo sapiens
cctgtttggggcaggcaggggatgagatctgaagataaatgccttagctgtgaccatctccttttgtgagaggtcaatgtccagttccgctgcagttatamcatcccattttttgatttctttttattttttcctttttctttttgagatggagtctcgctctgtcacccaggctggagtgcaatggggtgacctcagctc

SEQ ID NO: 41736 - DNA, 201 bp, Homo sapiens
caaaatctttagcttcccatgaagtcccgtttgtctttatttgtggcctatgccttcctgttgtttgactttcacagtgtccctcgttgccacaaagaacygtagacctaagatgatgacagcacgggtggggcggcggaggcgccgctgtcattttcctggcctcaggtcctctgtgtgtcctcccatcctgtggagcat

SEQ ID NO: 41737 - DNA, 201 bp, Homo sapiens
gctcggtggagcacgtggtggagtttggccttgactaccccgagggcatggccgttgactggatgggcaagaacctctactgggccgacactgggaccaayagaatcgaagtggcgcggctggacgggcagttccggcaagtcctcgtgtggagggacttggacaacccgaggtcgctggccctggatcccaccaaggggt

SEQ ID NO: 41738 - DNA, 201 bp, Homo sapiens
gaggctctgtctggcctgggctctgaacccctcaaaaaatgtggccctgtggctgggtctgtagcgagcagcatggccagtgctgtgcctgcatgtccccrtcccctgtgtcaggccaacaaaggggatgtggcttctctgcagaacaggacagggcccctgtagcctctggaggacgatgtgggaggttttgggcatggc

SEQ ID NO: 41739 - DNA, 201 bp, Homo sapiens
acactgggcaagctgttctgggtggacgcggacctgaagcgcattgagagctgtgacctgtcaggtacgcgccccggggcctgccctaaccgcagacaccyggccttcattgtcagtaatggcagcagctgccacattgtccgagacctgccgtgagcccagtgccgcgccaggggctttgtgtgtagcgtgttttgtcct

SEQ ID NO: 41740 - DNA, 201 bp, Homo sapiens
cagcctgccacctacttttgtaaataaagttttcttggtgcacagccatgcccattcattcatttgcacaatgtctgtggctgctttcatgccaaaagcargagaactgagtggttatgctggagacctacggccttcaaagccccagacctcacgtctggcccttgacagacagagcttccccagccctgctgcgcatcc

SEQ ID NO: 41741 - DNA, 201 bp, Homo sapiens
cgtggagccccgaggggcaggatggcctccatggtcacacgtaggaagtggcctccaccctccgatgatcctctccctcctccctttcagcgccctccccrggggtgtcctcagccctcctgcctgtgctttgtcccgtcttctgcaggcgcctgggacgtgctgacaggtcctctgccggctcctgccttgctatgcgca

SEQ ID NO: 41742 - DNA, 201 bp, Homo sapiens
cctcctctggcttctctgtgccagtgcccccacgctttgtgtctgtgtccccagcccatgggactctgctattccctgagtgctgccgcatgcccagcccrcactgaggacgtggagccccgaggggcaggatggcctccatggtcacacgtaggaagtggcctccaccctccgatgatcctctccctcctccctttcagc

SEQ ID NO: 41743 - DNA, 201 bp, Homo sapiens
tggcacgatctcggctcactgcaagctctgcctcccgggttcatgccattctcctgcctcagcctcccgcgtagctgggactacaggcgcctgccaccgcrcccggctaatttttgtatttttagtagagatgggatttcactacattagccaggatggtctcgatctcctgacctcatgatccgcccgtctcggcctccc

SEQ ID NO: 41744 - DNA, 201 bp, Homo sapiens
tgggcttgtggtggctttggtgccgtccgctgcgtctgcctcttagagcatggagttctccttctcaggagggctgagctgctggagctctagtcctgccrcagagcagcccccaagtgcggcgttgcctgtccctgtggagcaggtgactacctggctgcgggcggaacagcaggccatggctctggtagtggtctgtga

SEQ ID NO: 41745 - DNA, 201 bp, Homo sapiens
tttctctgctctgccctaaaccttctaattagtgaaaacgcacatttgcagacatcaatcaaatgtcatattccctagcagcttgtcctgggatcactgasctggtcacattccacagttgctaactcagggcttgcagagtatgtgtgcacgtgtgtgtgcatgcgtgtgtttgtgagagagatacatgccttctgggga

SEQ ID NO: 41746 - DNA, 201 bp, Homo sapiens
cacatttgcagacatcaatcaaatgtcatattccctagcagcttgtcctgggatcactgagctggtcacattccacagttgctaactcagggcttgcagartatgtgtgcacgtgtgtgtgcatgcgtgtgtttgtgagagagatacatgccttctggggagccctggtggcctgtttccttccctcccaggcccctgagc

SEQ ID NO: 41747 - DNA, 201 bp, Homo sapiens
ttcgatggggggccaggggccaacaggaatgggggtggctgagctgagaggccaagggcaggttccaggttgcattgagagccgaagctggtgagtgtgakgcgggcagatgtgaggtgtgtgtggggagtggggtgctgtctgggtgactgggctgggagagggcaggtgggggccaagctggaagaggtggtgttattc

SEQ ID NO: 41748 - DNA, 201 bp, Homo sapiens
taatagagacagagtttcaccgtgttggcgagactggtctcgaacccctgacctcaggtgatctgcctgccttggcctcccaaagtgctgagattacagtygtgagccaccgtgcccggcctgcatttacctgtttttaattgtggtaaaatacatataacacttatcgtcgtaaccatttgtaagtgtgaagttcagtgg

SEQ ID NO: 41749 - DNA, 201 bp, Homo sapiens
catgcattcatcccaccttttcttcttgggtggttttgtgtgtgcgtgtgtgtgtgtatgtgtgtatatcctgcccaactaacctgcaggctccttgactytggagccctgatgtcttctgtttctctgtctcttccatcatgctggcactggacgcaggatcattcctgactgattaatctctagcttgtgtccaggctg

SEQ ID NO: 41750 - DNA, 201 bp, Homo sapiens
aggcactaccaggctgttttccacagcagccagaggtgtctttaaaagcagttgtcaactgggcttggtggctcacacctgtaatcccagcactttgggakgccaaggcgggcggatcacctgaggtcaggagttcgagaccagcctgaccaacatggcaaaaccccgtctctactaaaaatacaaaattagctgggcgtg

SEQ ID NO: 41751 - DNA, 201 bp, Homo sapiens
agcgcatgagtttttgtgaaacactggaaggaggattgtgggaaatcaaatggaaagttctcaccccaggcgtggagaagagtgggtcatggccccagcartgagcccagggaggtcagagacggaggtgtgtgtgtgggtgtgaccctgcgcagttccctgccggctgtagttttttgcattcgcttaatgtttctcgtg

SEQ ID NO: 41752 - DNA, 201 bp, Homo sapiens
acaggcgtgagccaccacgcccagctaatttttgtatttttagtagaggcaaggtttcgtcatgttggccaggctggtctcaaactcctggccttaagtgrtctgcccgcctcggcctcccaaagtgctgagatgacaggtgtgagccaccgtgcccggcccagaactctttaattcccacctgaaacttgccgccttaag

SEQ ID NO: 41753 - DNA, 201 bp, Homo sapiens
tcccaccattctgctttctgtctcaatgaatttgcctaccgtaagtacctcatataaattgaatcataaagtatttgtctttttatatctggcttatttcmcttagcataacattcttaagtttcatccatgttgtagcatgtgtcagaatctctctctttttttttttttttttttttttttttttgcagacagagtctc

SEQ ID NO: 41754 - DNA, 201 bp, Homo sapiens
attttgggagtccgaggtgggcagatcacttgaggtcaggagtttgagaccagcctggccaacatagtgaaaccctggctctactaaaagtacaaaattakctgggtgtggtggcgcgcacctgtaatcccagttactcaggaggctgaggcaggagaatcgcttgtacccgggaggcagaggttgcagtgaaccaagatt

SEQ ID NO: 41755 - DNA, 201 bp, Homo sapiens
agctcaggggccgggcgcggtggctcacgcctgtaatcccagcactttgggaggccagggcgggcggatcatgaggtcaggagatcaagaccatcctggcyaacatggtgaaaccccgtctctactaaaaataccaaaaaactagccaggtgtggtggcgggcacctgtagtcccagctacttgggaggctgaggcaggag

SEQ ID NO: 41756 - DNA, 201 bp, Homo sapiens
aaagacacatgatccttcgtgtccagatgaaagtgatgatgtctttgcagctgcccagcaaggctgtgtgtgtgtgtgtgtgtgtgtgtgtgtgtgtgtgkggtgtgtgtgtggtgtgtgtgtgtgtatgggggagggaggcaccctttccatctgggggtgtgtgtgtgtggggtgtgtgtgtgtgtgtgcgcgtgtgtg

SEQ ID NO: 41757 - DNA, 201 bp, Homo sapiens
aagacacatgatccttcgtgtccagatgaaagtgatgatgtctttgcagctgcccagcaaggctgtgtgtgtgtgtgtgtgtgtgtgtgtgtgtgtgtgtkgtgtgtgtgtggtgtgtgtgtgtgtatgggggagggaggcaccctttccatctgggggtgtgtgtgtgtggggtgtgtgtgtgtgtgtgcgcgtgtgtgt

SEQ ID NO: 41758 - DNA, 201 bp, Homo sapiens
atccttcgtgtccagatgaaagtgatgatgtctttgcagctgcccagcaaggctgtgtgtgtgtgtgtgtgtgtgtgtgtgtgtgtgtgtggtgtgtgtgkggtgtgtgtgtgtgtatgggggagggaggcaccctttccatctgggggtgtgtgtgtgtggggtgtgtgtgtgtgtgtgcgcgtgtgtgtggtgtgtggt

SEQ ID NO: 41759 - DNA, 201 bp, Homo sapiens
tttgttaggaggtgcttggcgcttggttgggagttgttggtgtccagttgagaggtgctaggtgcttggttgggaggtatttgattgggaggtgcttggcrcttggttgggaggtgctctgcacttggttgggaggtgctcggtgctaggttgggaggtgatcagttgggaggtgctagatgctctgttgggaggtgcatg

SEQ ID NO: 41760 - DNA, 201 bp, Homo sapiens
tccttcgtgtccagatgaaagtgatgatgtctttgcagctgcccagcaaggctgtgtgtgtgtgtgtgtgtgtgtgtgtgtgtgtgtgtggtgtgtgtgtkgtgtgtgtgtgtgtatgggggagggaggcaccctttccatctgggggtgtgtgtgtgtggggtgtgtgtgtgtgtgtgcgcgtgtgtgtggtgtgtggtg

SEQ ID NO: 41761 - DNA, 201 bp, Homo sapiens
tgggaggtgcttggcacttggttgggaggtgctctgcacttggttgggaggtgctcggtgctaggttgggaggtgatcagttgggaggtgctagatgctcwgttgggaggtgcatgatgctcagttgggaggtgctaggcgcttggttgggaggtaattggtacttggttgggaggtgcttggcacttggttgggaggtac

SEQ ID NO: 41762 - DNA, 201 bp, Homo sapiens
gacggtgaccccagagagtgtggagacggagagtccttgagagtcactgagagacgtggctgccctgccttcccaagaggggctctgagtcattccccacmctcacctgcccctacccaccctcacctggcccccagcctcacctacccccacatctgtaccgatccctttacccgcaccttccctacccaccctcacctc

SEQ ID NO: 41763 - DNA, 201 bp, Homo sapiens
ccagagcagccgctcagcgcctgtaacctggaacaggccagcctttcggggcctcagttttctcatctgcctaatgggaatagcaattcccaccttccctktgttggttgggttctcactagatgcacaggagacagcagcttgagagggactgtttggagagctgttccatgtgacacccctcttaccctgtccccacgg

SEQ ID NO: 41764 - DNA, 201 bp, Homo sapiens
tcttggctctgtgcatccttgagaccagaaaggtctggaacaaatgagtagacgatgccctaacctggggagggagccacatcctgatcccagcaacctcrggaaggatctgtcaggattatggggcaccctgggggccccaagtctgcatgggtctccacttgcaatttctgtaggaagctctgataaatccaaactggg

SEQ ID NO: 41765 - DNA, 201 bp, Homo sapiens
gtggagtggcccaaggagcccacccagccgaccctgcccctcccgtggctggtgggcggcaccaggggctgcctggctttgctcgttcaccaacatcaccygggctggccagggcgcgctcacttctgccaccaccgagggccctgggcgaaggagtgaataccaggctgccttggcagggatgtgttgagggctgtgggg

SEQ ID NO: 41766 - DNA, 201 bp, Homo sapiens
gcgccttcatgaacgggagctcggtggagcacgtggtggagtttggccttgactaccccgagggcatggccgttgactggatgggcaagaacctctactgrgccgacactgggaccaacagaatcgaagtggcgcggctggacgggcagttccggcaagtcctcgtgtggagggacttggacaacccgaggtcgctggccc

SEQ ID NO: 41767 - DNA, 201 bp, Homo sapiens
caggggggcccacgggctgcttgcaggggccaaccgcctgaccctggaggacgccaacatcgtgcagcctctgggcctgaccatccttggcaagcatctcyactggatcgaccgccagcagcagatgatcgagcgtgtggagaagaccaccggggacaagcggactcgcatccagggccgtgtcgcccacctcactggcat

SEQ ID NO: 41768 - DNA, 201 bp, Homo sapiens
agctgaagcgggaggatcacttgagcccaggagtttacaagtagctaggcaacatgatgagaccccatttctacaaaaagtgaaaaaaaaaaaaaaaaaaraaaagccaggtgtggtggctcacacctgtaatcccagcactttgggaggctgaggcaggcagatcacgaggtcaggagattgagaccatcctggctaaca

SEQ ID NO: 41769 - DNA, 201 bp, Homo sapiens
ggggagtgtcaccatctctctctcgaatttgcatgagcccaagttgtttttcagaaaaagggtgtgactctgaaaatgaacccgtgggggggttggctcargcctgtaaccccagcactcggtgtgactctgaaaatgaacccgtgggggtgttggctcaggcctgtaaccccagcactcggtgtcactcttaaaatgaac

SEQ ID NO: 41770 - DNA, 201 bp, Homo sapiens
attgcttgaatccgggaagtggaggttgcagtgagccaggatggtgccactgcactccagcctgggtgacagagcgagaccctgtcataaaaaaaaaaagraaagaaaagaaaaacgagaaaaacaaacacaaaattagtagaagaaaagaaataataaagatcagaacaggccaggctcatgggcacagtggctcaactc

SEQ ID NO: 41771 - DNA, 201 bp, Homo sapiens
tctctctctcgaatttgcatgagcccaagttgtttttcagaaaaagggtgtgactctgaaaatgaacccgtgggggggttggctcaggcctgtaaccccarcactcggtgtgactctgaaaatgaacccgtgggggtgttggctcaggcctgtaaccccagcactcggtgtcactcttaaaatgaacccgtgggggggttg

SEQ ID NO: 41772 - DNA, 201 bp, Homo sapiens
cagcctgggtgacagagcgagaccctgtcataaaaaaaaaaagaaaagaaaagaaaaacgagaaaaacaaacacaaaattagtagaagaaaagaaataatraagatcagaacaggccaggctcatgggcacagtggctcaactcctacctgctcaggagtttgagaccagtctggccaacatggcaaaaccccatctctcc

SEQ ID NO: 41773 - DNA, 201 bp, Homo sapiens
ttcagaaaaagggtgtgactctgaaaatgaacccgtgggggggttggctcaggcctgtaaccccagcactcggtgtgactctgaaaatgaacccgtggggktgttggctcaggcctgtaaccccagcactcggtgtcactcttaaaatgaacccgtgggggggttggctcaggcctgtaaccccagcactcggtgcgactc

SEQ ID NO: 41774 - DNA, 201 bp, Homo sapiens
atggtgcgtgcgcctgtaatccggctactcaggaagactgaggcaggagaatggcgtgaacccgggaggcggagcttgcagtgagccgagatcatgccacyaccctccagcctgggcaacagagcgagactgcgtctcaaaataaataaataaataaataaataaataaataaataaaataaaacaacacacacacacaca

SEQ ID NO: 41775 - DNA, 201 bp, Homo sapiens
agtgaggagatcctgtctcaaaaaaaaaaaagagctcagctttcaagatttgttattgttgaaggaattacttccccttgagattccatagttatgttccytttttttttttttttttttaattgagatggagtctcccttgttgcccaggctggagtgcagtggcacaatctcggctcactgcaaccttcgcctcccggg

SEQ ID NO: 41776 - DNA, 201 bp, Homo sapiens
ttttaattgagatggagtctcccttgttgcccaggctggagtgcagtggcacaatctcggctcactgcaaccttcgcctcccgggttcaagtgattctccygcctcagcttcccaagtagctgggattacaggcgcccaccaccacgcccagctaatttttgtagttttggtacagatggggtttcaccatggtgtctagg

SEQ ID NO: 41777 - DNA, 201 bp, Homo sapiens
aatctcggctcactgcaaccttcgcctcccgggttcaagtgattctcctgcctcagcttcccaagtagctgggattacaggcgcccaccaccacgcccagytaatttttgtagttttggtacagatggggtttcaccatggtgtctaggctggtctcgaactcctgacctcaggtgatccacccacctcggcctcccaaag

SEQ ID NO: 41778 - DNA, 201 bp, Homo sapiens
cagcctggacctcaccggttgaggggccggcctagatcttctttgcgcaatggcacgatctcagctcactgcaacctccacctcccgagttcaagtgattmtcctgcctcagcctcctgagtagctgtgattacaggcgtgcactaccacacctggctaggttttgtatttttagtagacacagggtttcgccatgttggc

SEQ ID NO: 41779 - DNA, 201 bp, Homo sapiens
cgaccgccagcagcagatgatcgagcgtgtggagaagaccaccggggacaagcggactcgcatccagggccgtgtcgcccacctcactggcatccatgcastggaggaagtcagcctggaggagttctgtacgtgggggctggcagtggggtgggcagggtggcctctaaacccgacccctggaggaggctggaggccagt

SEQ ID NO: 41780 - DNA, 201 bp, Homo sapiens
tggtctcaaactcctaacctcaagtgatccaccctcctcggcctcccaaagtgttgggattgcaggcgtgagccactgcacccagcctgacctagatcttytaggttagaaagtcccaggagtgggcggccatgcatccaggcctgccacaggagcccgcctgccctcctccctgaagtcagggctctggaagcccttccc

SEQ ID NO: 41781 - DNA, 201 bp, Homo sapiens
atcacatctgcagaatcccttctgccacataaggtcatgacgccgtgctggggactggggtgggaaattacggggtcatttaggattctgcctgccactgycttgctgtgtcccagggcttgggggaggggcctccacagctgggaccacagtccttcctcccctccatggtaaccatctgaggattacttgagaccagcc

SEQ ID NO: 41782 - DNA, 201 bp, Homo sapiens
gcttttgctatgttggttgggaagtgctcagtgctaggttgggaggtgatcagtcgggaggtgctaggtgatttgttgggaggtgcatgatgctcagttgrgaggtgctaggtgctcggttggaaggtgattggtactttgttaggaggtgcttggcgcttggttgggagttgttggtgtccagttgagaggtgctaggtg

SEQ ID NO: 41783 - DNA, 201 bp, Homo sapiens
tctggggggcactatccaaccccttatacaatgaaagacgggaagagggccaggtgtggtagttcacgcctgtaatctcagcactttaggaagctgaagcrggaggatcacttgagcccaggagtttacaagtagctaggcaacatgatgagaccccatttctacaaaaagtgaaaaaaaaaaaaaaaaaaaaaaagccag

SEQ ID NO: 41784 - DNA, 201 bp, Homo sapiens
gggctggtgtggtgaaacccgcacagggtggaagtgggcatccctgtcccaggggagcccccagggactctggtcactgggcttgccgctggcatgctcaktcctccagcacttactgacaccagcatctactgacaccaacatttacaaacaccgacattgaccgacaccgacatttaccgacactgacatttaccaaca

SEQ ID NO: 41785 - DNA, 201 bp, Homo sapiens
ggtgaatggatgcacagattgggttctgtctgcacactggaatatggttcacccctaaaacgggatgaagcactgacatgctacagcctggatgaacctcraaaacatggtgccaagtcaaagaagacagacatcagaggctgtatattgtgattccgtttatatgagatgttgagaatgtgtgtagttaagtccatcaaa

SEQ ID NO: 41786 - DNA, 201 bp, Homo sapiens
aatctcagcactttaggaagctgaagcgggaggatcacttgagcccaggagtttacaagtagctaggcaacatgatgagaccccatttctacaaaaagtgraaaaaaaaaaaaaaaaaaaaaagccaggtgtggtggctcacacctgtaatcccagcactttgggaggctgaggcaggcagatcacgaggtcaggagattg

SEQ ID NO: 41787 - DNA, 201 bp, Homo sapiens
gtggtgaaacccgcacagggtggaagtgggcatccctgtcccaggggagcccccagggactctggtcactgggcttgccgctggcatgctcagtcctccascacttactgacaccagcatctactgacaccaacatttacaaacaccgacattgaccgacaccgacatttaccgacactgacatttaccaacactgtttac

SEQ ID NO: 41788 - DNA, 201 bp, Homo sapiens
acatccaggtgctgagccaggagcggcagcctttctgtgagtgccggctggggcgcgggggcgagggtgcgggggctggggggagcgggggcgcggggcakgggagtgggaggatgcgggggcgtgggggtgcgcgggcgtgggtggggtgggggggcaggtgacccctccctgcagaagcccatgctctggggggccccc

SEQ ID NO: 41789 - DNA, 201 bp, Homo sapiens
agcgggaggatcacttgagcccaggagtttacaagtagctaggcaacatgatgagaccccatttctacaaaaagtgaaaaaaaaaaaaaaaaaaaaaaagwcaggtgtggtggctcacacctgtaatcccagcactttgggaggctgaggcaggcagatcacgaggtcaggagattgagaccatcctggctaacacggtga

SEQ ID NO: 41790 - DNA, 201 bp, Homo sapiens
ggcgtgggtggggtgggggggcaggtgacccctccctgcagaagcccatgctctggggggccccctctctaaaggggtacctgctgcaatggagggaggtrtgtggctggctgggggacacgggcctgcagaggacccctctgcagagctcatgggggctatttcaggctcagcagtggcaaggggatttccaaggaaggt

SEQ ID NO: 41791 - DNA, 201 bp, Homo sapiens
gcgggaggatcacttgagcccaggagtttacaagtagctaggcaacatgatgagaccccatttctacaaaaagtgaaaaaaaaaaaaaaaaaaaaaaagcwaggtgtggtggctcacacctgtaatcccagcactttgggaggctgaggcaggcagatcacgaggtcaggagattgagaccatcctggctaacacggtgaa

SEQ ID NO: 41792 - DNA, 201 bp, Homo sapiens
tgaggccagcccgggcaaaggggacacaggaatcctctgcactgcttttgccacttactgtgagatttaaattatttcacaatacaaaattaagacaaaargttaatcacatatccactgccctgcttaagacagaaaacatgggtgttgttgaagccagaggcagctgctggcctgagtttggtgattggttcctaagca

SEQ ID NO: 41793 - DNA, 201 bp, Homo sapiens
tgctggcctgagtttggtgattggttcctaagcagttgaaggcagttttgtttttccatagatgtctgttctccctttgctgggtgcagcctcgccctgcygctgtggtcgggtttcagtggcctcgtcccgtggacgcagcctcgccctgccgctgtggtcgggtttcagtggcctcgtcccgtggacgcagcctcgccc

SEQ ID NO: 41794 - DNA, 201 bp, Homo sapiens
ttgttattgtttttgtgtctttttgttttgttttgcttcgtttgttttgtttttgagacagtgtcttgctctgtcactcaggctggagtgcaatggcgcgwtctcagctcaccgcaacctctgcctcccgggttcaagtgatcctcttgcctcagcctcctgagtagctgggattacaggtgcacgccaccatacccagct

SEQ ID NO: 41795 - DNA, 201 bp, Homo sapiens
acgagtatgtcagcgggaccccgcacgtgcccctcaatttcatagccccgggcggttcccagcatggccccttcacaggtaaggagcctgagatatggaaygatctggaggaggcaggagagtagtctgggcagctttggggagtggagcagggatgtgctaccccaggccctcttgcacatgtggcagacattgctaatc

SEQ ID NO: 41796 - DNA, 201 bp, Homo sapiens
gtggtcgggtttcagtggcctcgtcccgtggacgcagcctcgccctgccgctgtggtcgggtttcagtggcctcgtcccgtggacgcagcctcgccctgcygctgtggtcgggtttcagtggcctcgtcccgtggacgcagcctcgccctgccgctgtggtcgggtttcagtggcctcgtcccgtggacgcagcctcgccc

SEQ ID NO: 41797 - DNA, 201 bp, Homo sapiens
atttgcacaatgtctgtggctgctttcatgccaaaagcaagagaactgagtggttatgctggagacctacggccttcaaagccccagacctcacgtctggsccttgacagacagagcttccccagccctgctgcgcatcctggcccagcatgtgctgtgtgtgtgatttcagcttgcaggagccgtggttaggaattgtcc

SEQ ID NO: 41798 - DNA, 201 bp, Homo sapiens
ggcatagcctcttggagactcagtttcctcattggtaggagtgacggccacagtggtgcggcctctgcagcacacggggggctcggtgggcggaagccccrggtctataaggcggctgtgcaggagccagccgagctggtctcccaacagccagggctccggggtccttagcagctgtggggggcctgcacctgtttccca

SEQ ID NO: 41799 - DNA, 201 bp, Homo sapiens
acgtgcccctcaatttcatagccccgggcggttcccagcatggccccttcacaggtaaggagcctgagatatggaatgatctggaggaggcaggagagtastctgggcagctttggggagtggagcagggatgtgctaccccaggccctcttgcacatgtggcagacattgctaatcgatcacagcattcagcctttccca

SEQ ID NO: 41800 - DNA, 201 bp, Homo sapiens
gacgcagcctcgccctgccgctgtggtcgggtttcagtggcctcgtcccgtggacgcagcctcgccctgccgctgtggtcgggtttcagtggcctcgtccygtggacgcagcctcgccctgccgctgtggtcgggtttcagtggcctcgtcctgtggacgcagcctcgccctgccgctgtggtcgggtttcagtggcctcg

SEQ ID NO: 41801 - DNA, 201 bp, Homo sapiens
aagcaagagaactgagtggttatgctggagacctacggccttcaaagccccagacctcacgtctggcccttgacagacagagcttccccagccctgctgcrcatcctggcccagcatgtgctgtgtgtgtgatttcagcttgcaggagccgtggttaggaattgtccctgtgttggtccattttgcattgctatgaaggag

SEQ ID NO: 41802 - DNA, 201 bp, Homo sapiens
agagaacgcggccctgtctgttcctggcgtgctctgtgctgccccgcctgggttccctgccccagtcgcaggccccttggaggaggtaccatgtgtctccygtttcacagatgagccccggggagctcactctagtagtggccagagaggcctgcggctcagggagcggggcacatttccaacaggacacaccgccctggt

SEQ ID NO: 41803 - DNA, 201 bp, Homo sapiens
gacgcagcctcgccctgccgctgtggtcgggtttcagtggcctcgtcccgtggacgcagcctcgccctgccgctgtggtcgggtttcagtggcctcgtccygtggacgcagcctcgccctgccgctgtggtcgggtttcagtggcctcgtcccatgggcgtgctttggcagctttttgctcacctgtggagcctctcttga

SEQ ID NO: 41804 - DNA, 201 bp, Homo sapiens
gagggcaccaggcatctgctcccatgacccaaacactgcccaccaggccctacctccaaccttggggtcatattttattctgttctatgctatgctatgcyatgccatgccatgccatgccatgctattcctattctattatttgagacagaatctcgctctgttgcccaggctggagtgcagtggcatgatcttggctca

SEQ ID NO: 41805 - DNA, 201 bp, Homo sapiens
gaggaggtgcagtgtcaggcggacccgggaccgtggcggcgaggaggtgcagtgtcaggcggacccgggaccgtggcggcgaggaggtgcagtgtcaggcrgacccgggaccgtggcggcgaggaggtgcagtgtcaggcggacccgggaccgtggcggcgaggaggtgcagtgtcaggcggtcccgggaccgtggcggcg

SEQ ID NO: 41806 - DNA, 201 bp, Homo sapiens
ttggtagaaagggggtgattatactccccgctccatggggtttggaggaaggctgtgtgggttgtgctgagcagcgtgatggtgcaggctgtctgggtcaktgccgagggagcgagtcttccttcggcggttgtaatcagaagtagcttccaaggctgggtgctgccaggaggagctggggtgggtgaaggggcagtgggg

SEQ ID NO: 41807 - DNA, 201 bp, Homo sapiens
catttgcagacatcaatcaaatgtcatattccctagcagcttgtcctgggatcactgagctggtcacattccacagttgctaactcagggcttgcagagtrtgtgtgcacgtgtgtgtgcatgcgtgtgtttgtgagagagatacatgccttctggggagccctggtggcctgtttccttccctcccaggcccctgagctt

SEQ ID NO: 41808 - DNA, 201 bp, Homo sapiens; identical to SEQ ID NO: 7338

SEQ ID NO: 41809 - DNA, 201 bp, Homo sapiens
gatggatggcagcacccggaagatcattgtggactcggacatttactggcccaatggactgaccatcgacctggaggagcagaagctctactgggctgacrccaagctcagcttcatccaccgtgccaacctggacggctcgttccggtaggtacccacgcagtcctggggcacccctttcccctttgtccccagggcttt

SEQ ID NO: 41810 - DNA, 201 bp, Homo sapiens
atggatggcagcacccggaagatcattgtggactcggacatttactggcccaatggactgaccatcgacctggaggagcagaagctctactgggctgacgycaagctcagcttcatccaccgtgccaacctggacggctcgttccggtaggtacccacgcagtcctggggcacccctttcccctttgtccccagggctttt

SEQ ID NO: 41811 - DNA, 201 bp, Homo sapiens
ggtgctaggtgctcggttggaaggtgattggtactttgttaggaggtgcttggcgcttggttgggagttgttggtgtccagttgagaggtgctaggtgctyggttgggaggtatttgattgggaggtgcttggcacttggttgggaggtgctctgcacttggttgggaggtgctcggtgctaggttgggaggtgatcagtt

SEQ ID NO: 41812 - DNA, 201 bp, Homo sapiens
ggtgctcggttggaaggtgattggtactttgttaggaggtgcttggcgcttggttgggagttgttggtgtccagttgagaggtgctaggtgcttggttggraggtatttgattgggaggtgcttggcacttggttgggaggtgctctgcacttggttgggaggtgctcggtgctaggttgggaggtgatcagttgggaggt

SEQ ID NO: 41813 - DNA, 201 bp, Homo sapiens
gctcctccaccccgcttccctgactgcaggcagaaggtggtggagggcagcctgacgcaccccttcgccctgacgctctccggggacactctgtactggayagactggcagacccgctccatccatgcctgcaacaagcgcactggggggaagaggaaggagatcctgagtgccctctactcacccatggacatccaggtg

SEQ ID NO: 41814 - DNA, 201 bp, Homo sapiens
ggtggctcacgcctgtaatctcagcactttgggaggctgaggcaggtggatcaactgaggtctggatttcgagaccagccttgccagcttggtgaaacccyatctctactaagaatacaaaaaaattagccaggcgtggtggcatgtgcctgtaatcccacctacttgggaggctaaggctggagaatcgcttgaacccag

SEQ ID NO: 41815 - DNA, 201 bp, Homo sapiens
attcttgttgatcttgtcacagcccctctggaaggtggagatggtactcgctcaggaacgataccactcaaggaagcatggccccctggatggggtggccyttggtgcacctgaggctcctgaggctgcagagcaccatggtgggggaggaggcggctgtgtgtctgtcatttgcctcttctgctgaatggagacccccag

SEQ ID NO: 41816 - DNA, 201 bp, Homo sapiens
aataggctgggggcggtggctcatgcctgtaatcccagcactttgggaggccgagacgggcggattatgaggtcaggagatcgagaccatcctggctaacrcggtgaaaccctgtctctaccaaaaatacaaaaaaaaaaattagccgggcacggtggcaggcgcctgtagtcccagctactcgcgaggctgagacaggag

SEQ ID NO: 41817 - DNA, 201 bp, Homo sapiens
aggtcaggagatcgagaccatcctggctaacacggtgaaaccctgtctctaccaaaaatacaaaaaaaaaaattagccgggcacggtggcaggcgcctgtwgtcccagctactcgcgaggctgagacaggagaatggcatgaacccaggaggcagagctaggaggcagagcttgcagtgaactgagatcatgccactgcac

SEQ ID NO: 41818 - DNA, 201 bp, Homo sapiens
gccatgggttttattcttttttttttgagacggagtgttgctgtctcccaggctgagagtgcagtggtgtgatcttggctcactgcaagctccgcctcccrggttcacgccattctcctgcctcagcctcccgagtagctgtgactacaggtgtccgccaccatgcccggctaatttttttttttgtacttttagtagaga

SEQ ID NO: 41819 - DNA, 201 bp, Homo sapiens
acggggtttcaccgtgttagccaggatggtctcgatctcctgacctcgtgatccgcccatctcggcctcccaaagcgctggaattacaggcatgagccacygcacccagcctttttttttttttttttaggcagggtctcactctgtcatccaggctggagtgcagtggtacagtcacagctcactgcagcctcgacctcc

SEQ ID NO: 41820 - DNA, 201 bp, Homo sapiens
ccgtgttagccaggatggtctcgatctcctgacctcgtgatccgcccatctcggcctcccaaagcgctggaattacaggcatgagccaccgcacccagcctttttttttttttttttaggcagggtctcactctgtcatccaggctggagtgcagtggtacagtcacagctcactgcagcctcgacctcccagggctgaag

SEQ ID NO: 41821 - DNA, 201 bp, Homo sapiens
aatttttattttttgtagaggtgggattttgccatgttgcccagggtggctcaagtgacccacccacctcagcctcccgaagtactggaattacaggtgcragccatcgtgcctggccatgttttgttgtttttaaatagacttaattttttcaaacagttgtaggttcacagcaaaattgatgagcagcaggtactgagt

SEQ ID NO: 41822 - DNA, 201 bp, Homo sapiens
tatttgagacagaatctcgctctgttgcccaggctggagtgcagtggcatgatcttggctcactgcaacctccacctcccaggttcaagcgattctcctgyatcagcctcccgagtagctgggattacaggcacacaccaccacacccggctaatttttgtattttcaatagagatggggtttcaccatgttggccaggct

SEQ ID NO: 41823 - DNA, 201 bp, Homo sapiens
gccagcctagcaagaccccagctaccaaaaaattttaaaagttaactgaacgtggtggtggtgggcacttgtggttcccagctacctgggaggctgaggtkggaggatcgcttaagcccaggaggtcaaggctgcagtgagctatgatcgcaccactgcactccagcctggacaacagagcaagaccctgtctgaaaaaaa

SEQ ID NO: 41824 - DNA, 201 bp, Homo sapiens
ttttccagagtgtttagaactggactcatacagattggctctttcacctactaacatgcatttaagtttcctccatgtcttttcatggcttgatagatcatttcttttcttttcttttttttttttttgagatggagtctcgctctgtcgcccaggatggagtgcaatggtgcgatttctgctcactgcaacctccccctc

SEQ ID NO: 41825 - DNA, 201 bp, Homo sapiens
atttgagacagaatctcgctctgttgcccaggctggagtgcagtggcatgatcttggctcactgcaacctccacctcccaggttcaagcgattctcctgtmtcagcctcccgagtagctgggattacaggcacacaccaccacacccggctaatttttgtattttcaatagagatggggtttcaccatgttggccaggctg

SEQ ID NO: 41826 - DNA, 201 bp, Homo sapiens
ccactgcactccagcctggacaacagagcaagaccctgtctgaaaaaaaaaacaaaaaaaaaagttcctttctttttgtggctggatgacatcccattgtwtggccacagcacattttgtttgtctgtttatcgggtggtgggcagtggtttccaccttttgtctcctgtgaataatgctgctgtgaacatttgaattcaa

SEQ ID NO: 41827 - DNA, 201 bp, Homo sapiens
ggacaacagagcaagaccctgtctgaaaaaaaaaacaaaaaaaaaagttcctttctttttgtggctggatgacatcccattgtatggccacagcacatttkgtttgtctgtttatcgggtggtgggcagtggtttccaccttttgtctcctgtgaataatgctgctgtgaacatttgaattcaagtttttgtttgaacacc

SEQ ID NO: 41828 - DNA, 201 bp, Homo sapiens
cgtgatggtgcaggctgtctgggtcagtgccgagggagcgagtcttccttcggcggttgtaatcagaagtagcttccaaggctgggtgctgccaggaggakctggggtgggtgaaggggcagtggggagcacggctcacacggccagcgggtgacctggggaggacggaggggggtgtgctgggcgcttcaggcgtgtggc

SEQ ID NO: 41829 - DNA, 201 bp, Homo sapiens
tacacttgctggggccttcgtgtcacaatgacgtgagcactgcgtgttgattacccactttttttttttttttgaggtggagtctcgctctcttgcccagkctggagtgcagtggcacgatctcggctcactgcaagctctgcctcccgggttcatgccattctcctgcctcagcctcccgcgtagctgggactacaggcg

SEQ ID NO: 41830 - DNA, 201 bp, Homo sapiens
cccttcccgcacgagtatgtcagcgggaccccgcacgtgcccctcaatttcatagccccgggcggttcccagcatggccccttcacaggtaaggagcctgrgatatggaatgatctggaggaggcaggagagtagtctgggcagctttggggagtggagcagggatgtgctaccccaggccctcttgcacatgtggcagac

SEQ ID NO: 41831 - DNA, 201 bp, Homo sapiens
aggaggagctggggtgggtgaaggggcagtggggagcacggctcacacggccagcgggtgacctggggaggacggaggggggtgtgctgggcgcttcaggygtgtggctccctttcctgtggggcgaaggtcaggaggggggcagggcctggctgtgtcagaatcactcagactcttaagacacatccagagtccccagcc

SEQ ID NO: 41832 - DNA, 201 bp, Homo sapiens
tccaaatggcgacacctggtccctgcctggaggctggaagctgtggcccttgtatgcccctccagggtctgtgcgctcggttggcccgagttcccatcaccgtcgtcatcatcaccatcatcattgtcatttcgcttgtctgtgagccggcctggtctcccagagcagagaccctctgaggtccagcctgagttggggtct

SEQ ID NO: 41833 - DNA, 201 bp, Homo sapiens
ttgaattctgctttttcctgattttgagcaaatgaaagccagctgggtgtagggagtcaggtgccttccccaaggaaggggctgagagggtggtcacaccrggaccccaagggacagggagcagcgttcccaggggcacacaggcggcctcctagaggtagggatgcgttggtggcggggggggccccgcactgctgtgtg

SEQ ID NO: 41834 - DNA, 201 bp, Homo sapiens
ccaaatggcgacacctggtccctgcctggaggctggaagctgtggcccttgtatgcccctccagggtctgtgcgctcggttggcccgagttcccatcaccgtcgtcatcatcaccatcatcattgtcatttcgcttgtctgtgagccggcctggtctcccagagcagagaccctctgaggtccagcctgagttggggtctc

SEQ ID NO: 41835 - DNA, 201 bp, Homo sapiens
ccctatgtctgtggggcggcttggctgagcctggaagccacctgacctcccccgtcccttccctgccaggcatcgcatgcggaaagtccatgatgagctcygtgagcctgatggggggccggggcggggtgcccctctacgaccggaaccacgtcacaggggcctcgtccagcagctcgtccagcacgaaggccacgctgt

SEQ ID NO: 41836 - DNA, 201 bp, Homo sapiens
tttttttgagacggagtttcacttttgttgcccaggcttcagtgcaatggtgtgatctctaggctcaccgcaacctctgcctcccaggttcaagcagttcycctgcctcagcctccctagtagctgggattacaggcatgtgccaccacgcccagctaattttgtatttttagtagagatggggtttctccatgttggtca

SEQ ID NO: 41837 - DNA, 201 bp, Homo sapiens
tgctctctgcagctcagagtcactctcatccccagcagtcgagtgcagagcctgggcctccggcctccccaccccctccacacagccccaggaccaaggcrgcagctggcttcggtttctgccatgtttttccaattatgtggaatgagctaaaaacagcaggagtgaggccttatttgggagttgccaccgccatcctcg

SEQ ID NO: 41838 - DNA, 201 bp, Homo sapiens
caaatggcgacacctggtccctgcctggaggctggaagctgtggcccttgtatgcccctccagggtctgtgcgctcggttggcccgagttcccatcaccgtcgtcatcatcaccatcatcattgtcatttcgcttgtctgtgagccggcctggtctcccagagcagagaccctctgaggtccagcctgagttggggtctcc

SEQ ID NO: 41839 - DNA, 201 bp, Homo sapiens
ccgtcccttccctgccaggcatcgcatgcggaaagtccatgatgagctccgtgagcctgatggggggccggggcggggtgcccctctacgaccggaaccaygtcacaggggcctcgtccagcagctcgtccagcacgaaggccacgctgtacccgccggtgaggggcggggccggggaggggcggggcgggatggggctgt

SEQ ID NO: 41840 - DNA, 201 bp, Homo sapiens
tgcccctgttcttttgacttttgtctcctgcacatccctcctgcttgggggcctttgggcagtgggcttagcggcgtgcaccatgccactcgggccacacrtgccctggccggtggctctcagagctatgtccagagggtggccaggcagtgctcccggcagcgcccagatgaggctggggtgcggcttggggatttgtgg

SEQ ID NO: 41841 - DNA, 201 bp, Homo sapiens
gtccagcagctcgtccagcacgaaggccacgctgtacccgccggtgaggggcggggccggggaggggcggggcgggatggggctgtgggcccctcccaccrtcagtgctggccaccggaggcttcccgggttcctgggggctgtgccaccgcctctgaggcatgcttgctttcttcccttttcaaacccttctgcttcctt

SEQ ID NO: 41842 - DNA, 201 bp, Homo sapiens
atgactccttgtttcgtttcactgaccgtgccctgtgcctctgctctccctccccagttccgtgtgccctggggtcagtgatagaagacacggcccctggrccccaagtctgctgagctgacacctcgggctgccgctcacctgcagagagacactagaaggctccgactcccttcctggcccccactctgtttttctacc

SEQ ID NO: 41843 - DNA, 201 bp, Homo sapiens
ggggtttctccatgttggtcaggctgatcttgaactccctacctcaggtgatccgcccaccttggcctcccaaagtgctgggattacaggcgtgagccacygcacctggcctttttcttttcttttcttttcttttttctgagacagggtctcgctctgtcacccaggctggagtgcaatggtgtcatcatggctaactgc

SEQ ID NO: 41844 - DNA, 201 bp, Homo sapiens
gggtttgagagctgaggttctttggtcttcagtggagctggcagtgactttcttgactttgtcaagagaagccccccgtctctgtgccacctctggggatstgattgaacggaaatcagagcatccgagttccagcctcagccctctgctgtgtggctgtgaaatgtaggccctgtgtgccttgctgacctgggagggtcg

SEQ ID NO: 41845 - DNA, 201 bp, Homo sapiens
aaacaaacaaacaaaaaacaaacaaacaaagcgtcatttatccagcacccctggggaaccatgctacctggtgttttatggtacctggcaaggtgcaggtraagttgctgctcttgggcattgaacccgtcttgtttggggcagctcaggccccaggcagggtccgggttggctctcgttggtgtggccctggcccatcca

SEQ ID NO: 41846 - DNA, 201 bp, Homo sapiens
tcctggaggatagggctgggctcggagctgcacgcagtggggcgtgtcctgcatgcagtggggcctcagaagagagctgtggtgggcggggcagtgccaaygctggtgggtgccaggcctccacgctcagatcagccccggcgacaggtttgggccaccctctctctggcctctgtgcagtggcccaggccgtctgctctg

SEQ ID NO: 41847 - DNA, 201 bp, Homo sapiens
cccggctgggtacgttgaattgtgtccctcaaggagatatgctaaaggtctaaccccaggaacctgtgtatgtgatctaatttggaaacagggtcttggcwgatgtaatcaagcgaggatgaggtcaccctagagtagggggcctatatccacggtgctggtgtcctcatgagagcaggtgagcagacactgacactcagg

SEQ ID NO: 41848 - DNA, 201 bp, Homo sapiens
gggttggatcctgcctctctcccaggtgtctcagtctctgcaaaactcaaaaacctcagaggccttgcagcctgaggggtgtcagagacacctccttcgartcagtaaacacctacagattcaccccagcagtgaaaggactgcttcgccacagaggtttgatttactcctaagtaattggaagggatgccgagaataggt

SEQ ID NO: 41849 - DNA, 201 bp, Homo sapiens
tttccagagtgtttagaactggactcatacagattggctctttcacctactaacatgcatttaagtttcctccatgtcttttcatggcttgatagatcatttcttttcttttcttttttttttttttgagatggagtctcgctctgtcgcccaggatggagtgcaatggtgcgatttctgctcactgcaacctccccctcc

SEQ ID NO: 41850 - DNA, 201 bp, Homo sapiens
ttccagagtgtttagaactggactcatacagattggctctttcacctactaacatgcatttaagtttcctccatgtcttttcatggcttgatagatcatttcttttcttttcttttttttttttttgagatggagtctcgctctgtcgcccaggatggagtgcaatggtgcgatttctgctcactgcaacctccccctccc

SEQ ID NO: 41851 - DNA, 201 bp, Homo sapiens
tccagagtgtttagaactggactcatacagattggctctttcacctactaacatgcatttaagtttcctccatgtcttttcatggcttgatagatcatttcttttcttttcttttttttttttttgagatggagtctcgctctgtcgcccaggatggagtgcaatggtgcgatttctgctcactgcaacctccccctcccg

SEQ ID NO: 41852 - DNA, 201 bp, Homo sapiens
ccagagtgtttagaactggactcatacagattggctctttcacctactaacatgcatttaagtttcctccatgtcttttcatggcttgatagatcatttcttttcttttcttttttttttttttgagatggagtctcgctctgtcgcccaggatggagtgcaatggtgcgatttctgctcactgcaacctccccctcccgg

SEQ ID NO: 41853 - DNA, 201 bp, Homo sapiens
ggggtctcacatgttgctcaggctggtctcaaactcctaagctcaagggatccttcccctcggctcccagagtgctgggattacaggcgtgagccaccgcrcccggcccatgcaccaaatgaggttttgtcaccagatgagcaacaaaagctttccatcttcagagcgttttggattttggaattgttggggagggcttat

SEQ ID NO: 41854 - DNA, 201 bp, Homo sapiens
tgcaggccgggccggctttatgtgcgtgtggcctgtgccgtcagaaagggccctgggcttcatcacgctgttgctgttcgtcttcctcagattcttagtcyttttttttttttttttttttttgagacggagtctttctctgtcatccaggctggagtgcagtggtacaatctcagctcactgcaagctccgactcccagg

SEQ ID NO: 41855 - DNA, 201 bp, Homo sapiens
tcatggttcactgcagccttgacctctttttttgtttgtttgtttgttttttttttttttgggatggagtcttgctctgtccccctggctggagtgcagcrgcaccatcttggctaactacaacctccacctcccaggttctagcgattctcctgcctcagcctcccaagtagctgggattacaggtgcccgccaccacgc

SEQ ID NO: 41856 - DNA, 201 bp, Homo sapiens
tgggcatgggcagggcagtaccaggagtgctctgggcatagtgctccatcccagggctgtgtatcttgctggcttagccagtggccctcacggtttgcttstgccccacagcctcgccgctcctgctatttgccaaccgccgggacgtacggctggtggacgccggcggagtcaagctggagtccaccatcgtggtcagcg

SEQ ID NO: 41857 - DNA, 201 bp, Homo sapiens; identical to SEQ ID NO: 7344

SEQ ID NO: 41858 - DNA, 201 bp, Homo sapiens
accatgttgcccaggctggtctcaaactcctgagcttaagccatgtgtccacctcggcctctcaaagcactgggattataggtgtgaaccactgtgcctascctgtgtttgctattttgatcccctgtgcacagagaagcatgtgaatttgcccagagccacacagctagtcccagccagggttggaacatagggtctgta

SEQ ID NO: 41859 - DNA, 201 bp, Homo sapiens
cagctcactgcaacctccacctcccgagttcaagtgattctcctgcctcagcctcctgagtagctgtgattacaggcgtgcactaccacacctggctaggktttgtatttttagtagacacagggtttcgccatgttggccaggctggtctcaaactcctaacctcaagtgatccaccctcctcggcctcccaaagtgttg

SEQ ID NO: 41860 - DNA, 201 bp, Homo sapiens
tgatcccagctacttgggagtctgaagcatgagaattgcttgaacatgggaggcggaggttgcagtgagccgagatcgcgccattgcactccagcctgggygacagagcgagactctgtctcaaaaaaaaaaaaaaaaaagaaaagaaaagaaattatcaatctcctcttttatggcatatatatatatatatatatatat

SEQ ID NO: 41861 - DNA, 201 bp, Homo sapiens
tgagagccaggcgtgtgtgtgtctgagcaactgagtgtgggagtgggaggatgtgagcgtgtgtgtgtgtgtgtgcgtgtgcacgcatatgcgtgcatacrtgtgagcctgtgtgtgtccgtgtgtgtgcatgcatgcgtgtgagtggatatttgtgtgtgtatgagtgtgcgcatgtgactgtgtgtgcacgtgtatgtg

SEQ ID NO: 41862 - DNA, 201 bp, Homo sapiens
gctacttgggagtctgaagcatgagaattgcttgaacatgggaggcggaggttgcagtgagccgagatcgcgccattgcactccagcctgggcgacagagygagactctgtctcaaaaaaaaaaaaaaaaaagaaaagaaaagaaattatcaatctcctcttttatggcatatatatatatatatatatatatatatatat

SEQ ID NO: 41863 - DNA, 201 bp, Homo sapiens
ggcgggtggatcatgaggtcaggagatcgagaccatcctggctaacaaggtgaaaccccgtctctactaaaaatacaaaaaattagccgggtgcggtggcrggcgcctgtagtcccagctactcgggaggctgaggcaggagaatggcgtgaacccgggaagcggagcttgcagtgagccgagattgcgccactgcagtcc

SEQ ID NO: 41864 - DNA, 201 bp, Homo sapiens
ccatggcttacgcgtgtaatcccagcactttgggaggccgaggcgggcggattacgaggtcaggagatcgagaccatcctggctaacacggtgaaacctcrtctctactaaaaatacaaaacattagccaggtgtggtggtgggtgcctgtagtcccagctactcgggaggctgaggcaggagaatggcgtgaacctggga

SEQ ID NO: 41865 - DNA, 201 bp, Homo sapiens
gactctgtctcaaaaaaaaaaaaaaaaaagaaaagaaaagaaattatcaatctcctcttttatggcatatatatatatatatatatatatatatatatatwttttttttttttggttatgttcagaaaggccttccctgctctgatcataaaaaacaacttattttcacactctctctcttttttttttgagacagagttt

SEQ ID NO: 41866 - DNA, 201 bp, Homo sapiens
gcgtgtgtgtgtgtgtgtgcgtgtgcacgcatatgcgtgcatacgtgtgagcctgtgtgtgtccgtgtgtgtgcatgcatgcgtgtgagtggatatttgtktgtgtatgagtgtgcgcatgtgactgtgtgtgcacgtgtatgtgcccgtgtgagcgagtatgtgcgcgagagtgtctgcatctgaaccagtctgtgtgta

SEQ ID NO: 41867 - DNA, 201 bp, Homo sapiens
attgcttgaacccaggaggtagaggttgtagtgagcccgtatcgtaccactgccctccacctgggcaatagagcgagactctgtctcaaaaagaaaaaaaraaaaagaacatttatgccaggtgtggtggctcatgcctgaaatcccagaactttggaagactgaggcaggaggatcacttgagcccagaaatttgagagt

SEQ ID NO: 41868 - DNA, 201 bp, Homo sapiens
tttttttggttatgttcagaaaggccttccctgctctgatcataaaaaacaacttattttcacactctctctcttttttttttgagacagagttttgctcytgttgcccaggctggagtgcagtggcgcaatctcagctcactgtaacctccgcctcccgggttggagtgattctcctgccttaccttcccgagtagctgg

SEQ ID NO: 41869 - DNA, 201 bp, Homo sapiens
aggaagggcctagctgggactctcaggagccaaggccctgaggggcaacttgcctggtccctgccctgaggcgttcactgctttcttcctgggccagatcrcaggcccggaggctggaccactgggctggcactcttgccgagctgctccctgacttcctgaccatgctcctttcagcagccttgctgcactttagtttcc

SEQ ID NO: 41870 - DNA, 201 bp, Homo sapiens
gggcatctgcagtagtcggagaggctgaagatagcagcttgctagaagccctctcccagggccggcctgcggttgctcaccagcggctgccatggccatcrtgtcgccaggacctgcgctcctcctgtcattgcgttccctcccagcgtgggtcgctgcagctccctcacctcccaaccaggcatccactgcatttgtgag

SEQ ID NO: 41871 - DNA, 201 bp, Homo sapiens
cagtcagagcccgcactgctgttactgatacccttggctgtaccaggggagaacttggttgccattgccaggtgttctcccaccacccccactactgtccytgtttgatgtgtggcgggaataaagctgtgcacattggagcttttggcacatcctggctttcaggtgaaaggtgcgtgtgtgtttgagggtttagcctgg

SEQ ID NO: 41872 - DNA, 201 bp, Homo sapiens
gttttgctcctgttgcccaggctggagtgcagtggcgcaatctcagctcactgtaacctccgcctcccgggttggagtgattctcctgccttaccttcccragtagctgggattataggcatgcaccaccatgcctggctaattttgtacttttagtagagacgggggtttctccatgttggtcaggctggtctcgaactc

SEQ ID NO: 41873 - DNA, 201 bp, Homo sapiens
aaccgtgtggctgtctgggggcagcgcggtccaggcagagggatcagccagtgcaaaggccctgggctggtttggggcggggcctgtttgaggggctgtarcagaatgtagggaaacagggcccaaggtgtgaggagaggacacatgaggtctcgagcagaggaggtgccagctctgactcgtgctggaaggcatcccctg

SEQ ID NO: 41874 - DNA, 201 bp, Homo sapiens
ctgctgttactgatacccttggctgtaccaggggagaacttggttgccattgccaggtgttctcccaccacccccactactgtccctgtttgatgtgtggsgggaataaagctgtgcacattggagcttttggcacatcctggctttcaggtgaaaggtgcgtgtgtgtttgagggtttagcctggccaacccagccatga

SEQ ID NO: 41875 - DNA, 201 bp, Homo sapiens
cagccttacagaccactgtctccagaatggtcacatccacactgggcagcccagtctcgctagttcctcgtcccacctcctgcctttgctcatgcccgtcmtgctctgggcccaccgcggacacatcttccccccgcccgccgtctgacctcacagcagctgggccccaagaggagtatcctgtcctgctgcacttttctc

SEQ ID NO: 41876 - DNA, 201 bp, Homo sapiens
ttacagaccactgtctccagaatggtcacatccacactgggcagcccagtctcgctagttcctcgtcccacctcctgcctttgctcatgcccgtcctgctytgggcccaccgcggacacatcttccccccgcccgccgtctgacctcacagcagctgggccccaagaggagtatcctgtcctgctgcacttttctcaacac

SEQ ID NO: 41877 - DNA, 201 bp, Homo sapiens
ctcgctcaggaacgataccactcaaggaagcatggccccctggatggggtggcccttggtgcacctgaggctcctgaggctgcagagcaccatggtggggraggaggcggctgtgtgtctgtcatttgcctcttctgctgaatggagacccccagagggcaaagcggggcttgttctccctgtgtcccgggatcactctca

SEQ ID NO: 41878 - DNA, 201 bp, Homo sapiens
gtttgattggtgtaaccaaagcgcatttgtttatggattgtctgtggcagcttttgttctgccgagatgagttgtgacagatctgtatgggctctaaagcmtaaaacatgtgccatccgcccctttacagaaaaagtgtgctgacctctgttctaaagtattggacaactacaatgtttgctcatttattattctatgatt

SEQ ID NO: 41879 - DNA, 201 bp, Homo sapiens
ggcagcccagtctcgctagttcctcgtcccacctcctgcctttgctcatgcccgtcctgctctgggcccaccgcggacacatcttccccccgcccgccgtytgacctcacagcagctgggccccaagaggagtatcctgtcctgctgcacttttctcaacacccggtgttggctgcaccttcccacccattgcaggcccct

SEQ ID NO: 41880 - DNA, 201 bp, Homo sapiens
cgcgccaccacacccgcccagctaatttttgtatttttagtagagatggggtttcaccatgttggccaggatgatctcgatctcttgacctcgtgatccgyccacctcggcctcccaaagtgctgggattataggcatgagccactgtacccagctgactcttagtcacttttaagaaggggactgtgccttcatttttca

SEQ ID NO: 41881 - DNA, 201 bp, Homo sapiens
tgttctaaagtattggacaactacaatgtttgctcatttattattctatgatttgttttctgctttttgttgttgttgttgttgttgagatagggtttccytctgtcactcaggctggagtgcagtggtgtaatctcagctcactgcagcctcgacctcctgggctctagtgatcctctcatctcagcctccctagtagct

SEQ ID NO: 41882 - DNA, 201 bp, Homo sapiens
gccaggatgatctcgatctcttgacctcgtgatccgcccacctcggcctcccaaagtgctgggattataggcatgagccactgtacccagctgactcttartcacttttaagaaggggactgtgccttcatttttcactgggccctgcagaatatatgcctgggctctgggctcttctgaacctgtgttggcttccatctg

SEQ ID NO: 41883 - DNA, 201 bp, Homo sapiens
catttattattctatgatttgttttctgctttttgttgttgttgttgttgttgagatagggtttccctctgtcactcaggctggagtgcagtggtgtaatytcagctcactgcagcctcgacctcctgggctctagtgatcctctcatctcagcctccctagtagctgggactacaggcacacaccaccactcctggctga

SEQ ID NO: 41884 - DNA, 201 bp, Homo sapiens
cttggctctcctcagatcctgaacccgccgccctccccggccacggacccctccctgtacaacatggacatgttctactcttcaaacattccggccactgygagaccgtacaggtaggacatcccctgcagccctccatggccattgggttcccgccagcccgtggtggaggggcctaatccccatgccactgatgagggg

SEQ ID NO: 41885 - DNA, 201 bp, Homo sapiens
aatggcgtgaacctgggaggtggagcttgcagtgagctgagatcccgccactgcactccagcctgggctacagagcgagactctgtctcaaaaaaaaaaawaataaaataaaataataaaattaaaaaattaaaagtaaggccgggcgtggtggctcacgcctgtaatcccagaactttgggaggccaaggcaggtggatc

SEQ ID NO: 41886 - DNA, 201 bp, Homo sapiens
tcaaagaagacagacatcagaggctgtatattgtgattccgtttatatgagatgttgagaatgtgtgtagttaagtccatcaaaagtgtttgccggggctrggggcggggactggggagtgactgctgccgggtgtggggtttgcctgtggggcaatggaagtgctttggaactagacagaagtggaggctgcaccgcctt

SEQ ID NO: 41887 - DNA, 201 bp, Homo sapiens
aatcccagcactttgagaggccaaggcgggtggatcgcctgagctcagggcttcaagaccagccttgggcaacatggcgaaaccctgtctctaccaaaaarataccccccaaaaattagctgggtgtggtggtgcacgcctgtggtcccagctactctggaggcggaggtgggagaatcgcttgaacctgggaggcagagg

SEQ ID NO: 41888 - DNA, 201 bp, Homo sapiens
ggacattctgggcactgtcccctttctctgctgtgaagggtggacaaaacacaataggtctgccagcccttgtgtcctgtggctcatcccagctggctggsatgggaactgagtcctccaagctggtgtggttcccctctggtctccgctgagagtcacgcccagcctctgggcacacaccctgtggtcacctccaaacag

SEQ ID NO: 41889 - DNA, 201 bp, Homo sapiens
tgaggcaggagaattgcttgagcctaggaggcggaggttgcactgagccaagatcatgccgctatactccagcctgggcaacagagtgagaccctgtctcmaaaaaaaaaaaaaaaaaatgcagctcgtcctggctagtctgaaaaaggtggagcatatatgttgcccaatatccacaaatattccagaaaatatctgaga

SEQ ID NO: 41890 - DNA, 201 bp, Homo sapiens
ggccagagatcacgtaagggcgccctgaggatgtgcttgtttctcatggatgggtgatgcttgtctcttgggaacatggagaagcaaagccacgtcgcccmcagacctacccaggaacagctgcagctgcaggttcagggtccatcccagccatgggttttattcttttttttttgagacggagtgttgctgtctcccagg

SEQ ID NO: 41891 - DNA, 201 bp, Homo sapiens
aaaaaaaaagcaatacaaaatacaaatatcactttcactaaaagaagggatggaagacccaaaacaaacagaaaacaacaaaatggcaggagtaagtcccyacttatcaataataacattgactgtaaataggctaagctctgcaatcaaaagagtgggccaggagcggtggctcacgcctgtaattccaacgctttggga

SEQ ID NO: 41892 - DNA, 201 bp, Homo sapiens
tcagcttcatccaccgtgccaacctggacggctcgttccggtaggtacccacgcagtcctggggcacccctttcccctttgtccccagggcttttgaaggygttccttcttaactcaggcctacagactcttctctgaaactctggggccctgaggaatgcaggacttctcagaacttggaacagcgtcagggtctgtgtg

SEQ ID NO: 41893 - DNA, 201 bp, Homo sapiens
ggaggctgggaagcggaggttgctgtgagccaagatggagccactgcactcccacctgggcgacagagtgagatcctgtcttaagaaaaaaaagagtggakgaatggatcaaaaaacaagacccaaccatctcttgcatacaagaaacacactttacctataaaaacacactaggccaggtgtggtggctcacacctgtaa

SEQ ID NO: 41894 - DNA, 201 bp, Homo sapiens
ttgttgttgttgttgttgttgagatagggtttccctctgtcactcaggctggagtgcagtggtgtaatctcagctcactgcagcctcgacctcctgggctytagtgatcctctcatctcagcctccctagtagctgggactacaggcacacaccaccactcctggctgattttttttttttttttttttttttgtggagac

SEQ ID NO: 41895 - DNA, 201 bp, Homo sapiens
actgcagaagcatttgcgattgcaggaggtaaatatgtatcaaagacatgagttttagtgaaggatatctttttttttttttttttttgagacagagtctygctctgttgtccaggttggagtacagtggctcacagcagcttccacctcccaggttcaagcaattctcctgcctcagcctcccaagcagctgggattaca

SEQ ID NO: 41896 - DNA, 201 bp, Homo sapiens
gtgagctgagattacatcactgcactccagcctgggcgacagaccgagactccatctcaaaaaaaaaaaaagaaattaattgggtcagcagcaatgactgwcgggggaccctcctgatggctcctccaccccgcttccctgactgcaggcagaaggtggtggagggcagcctgacgcaccccttcgccctgacgctctccg

SEQ ID NO: 41897 - DNA, 201 bp, Homo sapiens
gaaagcccaggaacaaatggcttcactgctgaattttaccaaacatttttttttttttgagacggagtctcgctctgtcgcccaggctggagtgcagtggygcaatctcagttcactgcaagctcctcctcccgggttcatgtcattctcctgcctcagcctcctgagtagctgggactacaggtgcccaccaccacgccc

SEQ ID NO: 41898 - DNA, 201 bp, Homo sapiens
catgttgcccaggctggtttcaaactcctaggctcaaacacccacctcagcctcccaaagtgctgggattacaggcgtgagccaccatgcccagcctattytactgtttgtattacatagctttaaaagattttttatgactttaagtcacaagggttctttgtagaaaaaaatatatatataggaaagtataaaaagaaa

SEQ ID NO: 41899 - DNA, 201 bp, Homo sapiens
ctgcagaagcatttgcgattgcaggaggtaaatatgtatcaaagacatgagttttagtgaaggatatctttttttttttttttttttgagacagagtcttrctctgttgtccaggttggagtacagtggctcacagcagcttccacctcccaggttcaagcaattctcctgcctcagcctcccaagcagctgggattacag

SEQ ID NO: 41900 - DNA, 201 bp, Homo sapiens
gaggctgagttgggaggattgcttgagccccaggaggttgatgctgcagtgacctgagattactccactgtactccaacctgagcgacagagcaagacttrtctggggaaaaaaaaaaaaaaatatatatatatatatatatatatatatacatatatacatacacgcacacacacataatataaaaatatatatttataa

SEQ ID NO: 41901 - DNA, 201 bp, Homo sapiens
acccgggaccgtggtgatgaggaaatgcagtgtcaggcagacccgggactgtggtgatgaggaaatgcagtgtcaggcagacccgggactgtggtggtggygaggaggtgcagtgtcaggcagacccgggaccgtggtggtgttgaggaggtgcagtgtcaggcagacccgggaccgtggcggcgaggaggtgcagtgtca

SEQ ID NO: 41902 - DNA, 201 bp, Homo sapiens
ttttaccaaacatttttttttttttgagacggagtctcgctctgtcgcccaggctggagtgcagtggcgcaatctcagttcactgcaagctcctcctcccrggttcatgtcattctcctgcctcagcctcctgagtagctgggactacaggtgcccaccaccacgcccggctaatttcttgtatttttagtagagacgggg

SEQ ID NO: 41903 - DNA, 201 bp, Homo sapiens
tgagccccaggaggttgatgctgcagtgacctgagattactccactgtactccaacctgagcgacagagcaagacttgtctggggaaaaaaaaaaaaaaatatatatatatatatatatatatatatacatatatacatacacgcacacacacataatataaaaatatatatttataaatatataatatataatataaaaa

SEQ ID NO: 41904 - DNA, 201 bp, Homo sapiens
gaaatgcagtgtcaggcagacccgggactgtggtgatgaggaaatgcagtgtcaggcagacccgggactgtggtggtggtgaggaggtgcagtgtcaggcrgacccgggaccgtggtggtgttgaggaggtgcagtgtcaggcagacccgggaccgtggcggcgaggaggtgcagtgtcaggcggacccgggaccgtggcg

SEQ ID NO: 41905 - DNA, 201 bp, Homo sapiens
aaacatttttttttttttgagacggagtctcgctctgtcgcccaggctggagtgcagtggcgcaatctcagttcactgcaagctcctcctcccgggttcawgtcattctcctgcctcagcctcctgagtagctgggactacaggtgcccaccaccacgcccggctaatttcttgtatttttagtagagacggggtttcact

SEQ ID NO: 41906 - DNA, 201 bp, Homo sapiens
agtgacctgagattactccactgtactccaacctgagcgacagagcaagacttgtctggggaaaaaaaaaaaaaaatatatatatatatatatatatatayatacatatatacatacacgcacacacacataatataaaaatatatatttataaatatataatatataatataaaaatatatatttataaataaaatttat

SEQ ID NO: 41907 - DNA, 201 bp, Homo sapiens
atgcagtgtcaggcagacccgggactgtggtggtggtgaggaggtgcagtgtcaggcagacccgggaccgtggtggtgttgaggaggtgcagtgtcaggcrgacccgggaccgtggcggcgaggaggtgcagtgtcaggcggacccgggaccgtggcggcgaggaggtgcagtgtcaggcggacccgggaccgtggcggcg

SEQ ID NO: 41908 - DNA, 201 bp, Homo sapiens
tttttttttttgagacggagtctcgctctgtcgcccaggctggagtgcagtggcgcaatctcagttcactgcaagctcctcctcccgggttcatgtcattytcctgcctcagcctcctgagtagctgggactacaggtgcccaccaccacgcccggctaatttcttgtatttttagtagagacggggtttcactgtgttag

SEQ ID NO: 41909 - DNA, 201 bp, Homo sapiens
acctgagattactccactgtactccaacctgagcgacagagcaagacttgtctggggaaaaaaaaaaaaaaatatatatatatatatatatatatatatayatatatacatacacgcacacacacataatataaaaatatatatttataaatatataatatataatataaaaatatatatttataaataaaatttataaat

SEQ ID NO: 41910 - DNA, 201 bp, Homo sapiens
gaggaggtgcagtgtcaggcggacccgggaccgtggcggcgaggaggtgcagtgtcaggcggacccgggaccgtggcggcgaggaggtgcagtgtcaggcrgacccgggaccgtggcggcgaggaggtgcagtgtcaggcggtcccgggaccgtggcggcgaggaggtgcagtgtcaggcagaccggggacttggagcacc

SEQ ID NO: 41911 - DNA, 201 bp, Homo sapiens
tggggttccaccatgttggccaggctggtctcaaactcctgacctcgtgatccacctgcctcagcctcctgaagtgctgggattacaggcgtgagccaccrtgcccggccggggagctaaaaattaatacaattgaactcatagagatagagagtagaaggatggttaccagaggctgagaagggtagtgggtttgggggg

SEQ ID NO: 41912 - DNA, 201 bp, Homo sapiens
cgcacacacacataatataaaaatatatatttataaatatataatatataatataaaaatatatatttataaataaaatttataaattatatttataagtraatatataatatataatataaaaatatatattatataatatataataaaatatataatataaaaatatatatttataaataatatataatacatacttat

SEQ ID NO: 41913 - DNA, 201 bp, Homo sapiens
gtggcggcgaggaggtgcagtgtcaggcggacccgggaccgtggcggcgaggaggtgcagtgtcaggcggacccgggaccgtggcggcgaggaggtgcagygtcaggcggtcccgggaccgtggcggcgaggaggtgcagtgtcaggcagaccggggacttggagcacctagttccacttgcgggctgaccttctattttt

SEQ ID NO: 41914 - DNA, 201 bp, Homo sapiens
gcatgaacccaggaggcagagctaggaggcagagcttgcagtgaactgagatcatgccactgcactccagcctgggcgactgagggagactccgtctcaamaaaaaaaaaaaaaaagaataagtaggaaagtataattagatttttttttgtaacacaaaggataaatgcttgatgtgatggttacatcatttaccctgat

SEQ ID NO: 41915 - DNA, 201 bp, Homo sapiens
aaatatatatttataaatatataatatataatataaaaatatatatttataaataaaatttataaattatatttataagtaaatatataatatataatataaaaatatatattatataatatataataaaatatataatataaaaatatatatttataaataatatataatacatacttataagtatatatttaaaatata

SEQ ID NO: 41916 - DNA, 201 bp, Homo sapiens
agatcatgccaccaccctccagcctgggcaacagagcgagactgcgtctcaaaataaataaataaataaataaataaataaataaataaaataaaacaacmcacacacacacacacacacacacaccctaacacaaagacctggaagaagtgcctggagagagtctcctggcctcccaacaggaccccaaaaattgaaccc

SEQ ID NO: 41917 - DNA, 201 bp, Homo sapiens
gttttgtgatgtgcttgtgtccatcctggtttctgccgtgtccccaacatccggccaagcttaggtggatgttccagcacacactcaccctgtctgtgcayctgtttttgtgtccgtaagtgggtatttactcgccttacgagtgagccactgtgggaattcagggaggtggcgcagtgaccacccctggagggatatgtg

SEQ ID NO: 41918 - DNA, 201 bp, Homo sapiens
tgggcaacagagcgagactgcgtctcaaaataaataaataaataaataaataaataaataaataaaataaaacaacacacacacacacacacacacacacmccctaacacaaagacctggaagaagtgcctggagagagtctcctggcctcccaacaggaccccaaaaattgaacccttgatcaatggggctggatgtgca

SEQ ID NO: 41919 - DNA, 201 bp, Homo sapiens
gggtatgagtttcactacattccaccaccagtgttcactaccattacctgccttccgtcttaagtgttcatcatttaaaaataaatttattgggctggacrcggtggctcatgactgttatcccagcactttgggaggctgaggcgggcagatcacctgaggtcaggagttcaagaccagcctggccaatatggtgaaact

SEQ ID NO: 41920 - DNA, 201 bp, Homo sapiens
ggaactttccttggggattcaacacgtgcaagtcttaggggctggcaaatcctgccctcagctagagagggggcttttatttgagaccagaatcacctgarcatcctcctgtccccagctgtgtccagcctgtctgcagggacatcctgagaggaccaggctctcccctcatccacctgcctaagtgccactctgaaccct

SEQ ID NO: 41921 - DNA, 201 bp, Homo sapiens
ttcgaggctcctatgccctcattcttgttgatcttgtcacagcccctctggaaggtggagatggtactcgctcaggaacgataccactcaaggaagcatgsccccctggatggggtggcccttggtgcacctgaggctcctgaggctgcagagcaccatggtgggggaggaggcggctgtgtgtctgtcatttgcctcttc

SEQ ID NO: 41922 - DNA, 201 bp, Homo sapiens
attcttggtttagacagatgagtaaggacatgcacccaccattccatgtcatacaggatagttccactgccctgattttctgtgctccactcattcatccytctcctctccaactcctggcaaccactgatgctttactgtctctgtgtatttgctttttccagagtgtttagaactggactcatacagattggctctttc

SEQ ID NO: 41923 - DNA, 201 bp, Homo sapiens
cgtggaagcctggagctgaggcagtgtgggcgacccctggagcagtgagtgcttccttcatggccttcatcgcaccctgcagtcctcatgtaggggatgcmatccatgaatttagttttcccagcctcctttaaaaacgcgttcatgctggggccggggcagtgcagtggctcacatctgaaatcccaccactttgggagg

SEQ ID NO: 41924 - DNA, 201 bp, Homo sapiens
caagggggtgtgagtgtttagtaccacagggagggctggcgcggtggctcacgcctgtaatcccagcactttaggaactcctcacctgaggtcaggagttygagaccagcctggccaacatggtgaaatcccatccccactgcctgcctggggagtggccatgcagccatgggcctgaggttgtggtggggcatgggggca

SEQ ID NO: 41925 - DNA, 201 bp, Homo sapiens
gggcagaggatttgtgggctgtggagcctgtgctcgtggcccagccctgggggttgtgagtgtgctggccggggagcttttcctgcaagtggactggtgtytaggagccagcatgtcaggcagcaggcagcgggagtgcagcaggcagcgggagcacagcaggcagagggcggggctcgagcagccatccgtggaccctgg

SEQ ID NO: 41926 - DNA, 201 bp, Homo sapiens
cgattgcaggaggtaaatatgtatcaaagacatgagttttagtgaaggatatctttttttttttttttttttgagacagagtcttgctctgttgtccaggytggagtacagtggctcacagcagcttccacctcccaggttcaagcaattctcctgcctcagcctcccaagcagctgggattacaggcgcccgctactatg

SEQ ID NO: 41927 - DNA, 201 bp, Homo sapiens
ctcccaggttcaagcaattctcctgcctcagcctcccaagcagctgggattacaggcgcccgctactatgtctggctaatttttgtatgtttagtagagakggggtttcaccatgttggctaggctggtcttgaactcctaacctcaggtgatccacctacctcagcctcctaaagttctaggatcacaggcatgagccac

SEQ ID NO: 41928 - DNA, 201 bp, Homo sapiens
atttttgtatgtttagtagagatggggtttcaccatgttggctaggctggtcttgaactcctaacctcaggtgatccacctacctcagcctcctaaagttytaggatcacaggcatgagccactgtgcctggcctatgcctgaacaatatcttatcaagacatgtcttttagtcatcctcccgctatggggcgtttctgtt

SEQ ID NO: 41929 - DNA, 201 bp, Homo sapiens
gtgtcaggcggacccgggaccgtggcggcgaggaggtgcagtgtcaggcggacccgggaccgtggcggcgaggaggtgcagtgtcaggcggacccgggacygtggcggcgaggaggtgcagtgtcaggcggacccgggaccgtggcggcgaggaggtgcagtgtcaggcggtcccgggaccgtggcggcgaggaggtgcag

SEQ ID NO: 41930 - DNA, 201 bp, Homo sapiens
caccgacatttactgacaccaatatttactgacatcaacatttagccatgtgatgggggccggcttgggggcaggccttgctcttggcactggggatgctrcagagaccagacagactcatggggtcatggacttctgcttcttctccagcctcatgtactggacagactggggagagaaccctaaaatcgagtgtgccaa

SEQ ID NO: 41931 - DNA, 201 bp, Homo sapiens
ggaggtgcagtgtcaggcggacccgggaccgtggcggcgaggaggtgcagtgtcaggcggacccgggaccgtggcggcgaggaggtgcagtgtcaggcggwcccgggaccgtggcggcgaggaggtgcagtgtcaggcagaccggggacttggagcacctagttccacttgcgggctgaccttctattttttgtcatcgtg

SEQ ID NO: 41932 - DNA, 201 bp, Homo sapiens
gaggaggtgcagtgtcaggcggacccgggaccgtggcggcgaggaggtgcagtgtcaggcggtcccgggaccgtggcggcgaggaggtgcagtgtcaggcrgaccggggacttggagcacctagttccacttgcgggctgaccttctattttttgtcatcgtgttgggagcttaggaaagtgacttaacctctctgtgctt

SEQ ID NO: 41933 - DNA, 201 bp, Homo sapiens
atctcgtgatccacccaccttggcctcccaaagtgctgggattacaggcatgagccaccatgcctggccggccctacttcttaaatgggcctgaggcacayggtgccgagagctcgctgaggtctatggaggaagggcgcagatgggatctgggcctggcgtcctggccggcccccaaggccttctccacagagtttccat

SEQ ID NO: 41934 - DNA, 201 bp, Homo sapiens
ggtgcagtgtcaggcggacccgggaccgtggcggcgaggaggtgcagtgtcaggcggtcccgggaccgtggcggcgaggaggtgcagtgtcaggcagaccsgggacttggagcacctagttccacttgcgggctgaccttctattttttgtcatcgtgttgggagcttaggaaagtgacttaacctctctgtgcttcagtt

SEQ ID NO: 41935 - DNA, 201 bp, Homo sapiens
ccccctgcccccggccacagcgcccctccatccagaccccactcctgcacacggctcctccgcccgtgcgcagccctctgagagtgtggcaggtgcaccargctctgctctagggagcttcttcctcttcctgtgtcccacgggaccaacatcgggacccaggaaacaggctgggagagttcggtaacaccttcaagaggg

SEQ ID NO: 41936 - DNA, 201 bp, Homo sapiens
aataaataaataaataaaataaaacaacacacacacacacacacacacacacaccctaacacaaagacctggaagaagtgcctggagagagtctcctggcytcccaacaggaccccaaaaattgaacccttgatcaatggggctggatgtgcagaggtggtgacagcccagggaggctgggtctcctgaacccgcctttcc

SEQ ID NO: 41937 - DNA, 201 bp, Homo sapiens
tttcagaggcttttttttcctcttataaaataacatttatacgttcgctgtagcaaggaaaacattataaaaaatagtgaagaaaatagaaattacccatwattttgccacacagacttagttgtgtccatgtatcttgtgcaccttttttctgtttacggatcaaaatcgacttttagggtcaggcgcggtggctcacac

SEQ ID NO: 41938 - DNA, 201 bp, Homo sapiens
cgtccgtggctggccctgcttctttttttttttttttttttttttaattgagacagagtctctctctgtcacctaggctggagtgcaatggcgcgatctcygctaactgcaacctctgcctgctgagctcaagcgattatcctgcctcagcctcccgagtagcttggactataggcacccgccaccacactcggcttattt

SEQ ID NO: 41939 - DNA, 201 bp, Homo sapiens
tatggtgaaactccatctctactaaaaatacaaaattagctgggcatggtggggcatgcctataatcccagctactcaggaggctgaggcaggagaatggygtgaacccgagaggcagagcttacagtgagcccagatagcaccactgcagtccagcgtgggcaacagtgcgagactccatctcaaaaaaaaaataaataa

SEQ ID NO: 41940 - DNA, 201 bp, Homo sapiens
gagagcagacctctcaatctcagcaggccccccacacagaccccataaccctagtctgccttcacagtacagttcgtggctatgtgttcacggatggtgtygttcacctaaggtctctgccctgtgaccccaagggcgtcctgagggcagattccaagtctgtttcgtccacccctccttccctagcagcgggtccagggc

SEQ ID NO: 41941 - DNA, 201 bp, Homo sapiens
ctagtgaggaaaaggcgtgtttgtggtgttgcataggattctggtaagaaagtttgcactaaccataagtatttgtactacattaaaatgaaagctcaggkgccgggcgcggtggctcacgcctgtaatcccagcactttgggaggccagggcgggcggatcatgaggtcaggagatcaagaccatcctggccaacatggt

SEQ ID NO: 41942 - DNA, 201 bp, Homo sapiens
gtcatgagcagtacaagtaaccgctgctgtccattgaacacctactgtgtgcctgggttcagaaaggcaccctgtgctggcttttaaagaattaggccgcytgcctaaaggggggagtgtggccttctttttcatttaagtcaccaactgttttatacatccacgcccctaaattcttcagttttaggcaaagatgagagg

SEQ ID NO: 41943 - DNA, 201 bp, Homo sapiens
gctggggttctgagtgagccccacagggcagaggcagaaaatgagtctcagagagggtgagcgagctgcttggggccccacagcaggagatggagcaggastgcagcctagcctctgcccccagcacctgcgcaagaagctgctctgctctggactgtgttaggctgcgagggctggagagaaatgagagttggtgcttag

SEQ ID NO: 41944 - DNA, 201 bp, Homo sapiens
gagggtattaactgtgatgaccttctgagttcctgcacactggtgacccattggcagggtctcctcctggctctggcaggggtggctcaggccgctgggtracggtgtgctggccagatagttcctggggctgcaggtggcttctttcgccccatccctcccatcccctttcattcttcctgtcaacacatctcagaccct

SEQ ID NO: 41945 - DNA, 201 bp, Homo sapiens
ggctgatcacttgaggttgggagttcgagaccagcctgcccaacatagtgaaatcccgtctctactaaaaatacaaaaattagctgggtgtggtggcaggygcctgtattcccagctactggggaggctgaggtgggagaattacttgaacctgggaggcggaagttgcagtgagccaaaattacgccactgcactccagc

SEQ ID NO: 41946 - DNA, 201 bp, Homo sapiens
tggcatcgcggtcgactgggtggcccgaaacctctactggaccgacacgggcacggaccgcatcgaggtgacgcgcctcaacggcacctcccgcaagatcytggtgtcggaggacctggacgagccccgagccatcgcactgcaccccgtgatggggtaagacgggcgggggctggggcctggagccagggccaggccaag

SEQ ID NO: 41947 - DNA, 201 bp, Homo sapiens
ccatccctcccatcccctttcattcttcctgtcaacacatctcagaccctggacaccgaatgagccgtcggtacccacaccccagggcaattcagtggagsggtaggtggctcgttcccccacgttgccccaggaagaggaccctgtccccggcatcctgacccacctcccttagagaccgagagcctctaaggataaacc

SEQ ID NO: 41948 - DNA, 201 bp, Homo sapiens
aattacttgaacctgggaggcggaagttgcagtgagccaaaattacgccactgcactccagcctaggcaatagagtgagactccgtctcaaaaaaaaaaargggccaggggtggtagtgacaaagagaccctatcccaaaaaaaccgaacactgaatccttgagactgagtaaggacactgtgaaatttttctgggtgggg

SEQ ID NO: 41949 - DNA, 201 bp, Homo sapiens
gcctcgccctgctgctgtggtcgggtttcagtggcctcgtcccgtggacgcagcctcgccctgccgctgtggtcgggtttcagtggcctcgtcccgtggaygcagcctcgccctgccgctgtggtcgggtttcagtggcctcgtcccgtggacgcagcctcgccctgccgctgtggtcgggtttcagtggcctcgtcccgt

SEQ ID NO: 41950 - DNA, 201 bp, Homo sapiens
gcaggagaatcgcttgaacccaggagacagaggttgcagtgagccaggatcacgccactgcactccagcctggcaacagagcgagactctgtctcaaaaawaaaaataaaaataaaataaataaatacataaattgacttttaggagattggttcaaacaatgtgtgtaatgttgtgtctgagtgtttttcatttatcgtt

SEQ ID NO: 41951 - DNA, 201 bp, Homo sapiens
tccgggtgttggacacatttggttaactggatagaataacgcgagttcccagggacttggtccatttgctattttattttattttattttattttattttwtttatttatttatttatttatttatttattgagatggagtttcgtttttgtcgcccaggctggagtgcagtggcgcgatctcggttcactgcaacctctg

SEQ ID NO: 41952 - DNA, 201 bp, Homo sapiens
gacgcagcctcgccctgccgctgtggtcgggtttcagtggcctcgtcccgtggacgcagcctcgccctgccgctgtggtcgggtttcagtggcctcgtccygtggacgcagcctcgccctgccgctgtggtcgggtttcagtggcctcgtcccgtggacgcagcctcgccctgccgctgtggtcgggtttcagtggcctcg

SEQ ID NO: 41953 - DNA, 201 bp, Homo sapiens
gttaactggatagaataacgcgagttcccagggacttggtccatttgctattttattttattttattttattttattttatttatttatttatttatttakttatttattgagatggagtttcgtttttgtcgcccaggctggagtgcagtggcgcgatctcggttcactgcaacctctgcctcccaggttcaagtgattc

SEQ ID NO: 41954 - DNA, 201 bp, Homo sapiens
aggatcgcttaagcccaggaggtcaaggctgcagtgagctatgatcgcaccactgcactccagcctggacaacagagcaagaccctgtctgaaaaaaaaamcaaaaaaaaaagttcctttctttttgtggctggatgacatcccattgtatggccacagcacattttgtttgtctgtttatcgggtggtgggcagtggttt

SEQ ID NO: 41955 - DNA, 201 bp, Homo sapiens
tctgctcagcgacctttctcccgtgggagttcctgggggttcagcttcatcctacagacagcagcacacactggctgtgcacccttttttttttttttttyttttttttgagatggagtctcgcttttttcgcgcaggctgaagtgcagtggtgtgatcttggctcactgcaacctctacctcctgggttcaagtgatttt

SEQ ID NO: 41956 - DNA, 201 bp, Homo sapiens
tggtttccaccttttgtctcctgtgaataatgctgctgtgaacatttgaattcaagtttttgtttgaacacctgttgtgaattatttggatatatgtgtargggtaggattgctgagtcctatggtaatgttaggtttgacttactgaggaaccattaaactgttttcaacagtggctgcgccgttctgcatccccaccgg

SEQ ID NO: 41957 - DNA, 201 bp, Homo sapiens
ctccagggttcaagggattctcccacctcagcctcccaagtagctgggattacaggtgcccgccaccacacccggctaattttcatatttttagtagagaygaggtttcaccatgttggccaggctggtctcgaactcctgacctcaagtgatccgcccgcctcggcctcccaaagtgctaggtcaagcccattttaaagt

SEQ ID NO: 41958 - DNA, 201 bp, Homo sapiens
actacacttgctggggccttcgtgtcacaatgacgtgagcactgcgtgttgattacccactttttttttttttttgaggtggagtctcgctctcttgcccrgtctggagtgcagtggcacgatctcggctcactgcaagctctgcctcccgggttcatgccattctcctgcctcagcctcccgcgtagctgggactacagg

SEQ ID NO: 41959 - DNA, 201 bp, Homo sapiens
aggagaattgcttgaatccgggaagtggaggttgcagtgagccaggatggtgccactgcactccagcctgggtgacagagcgagaccctgtcataaaaaaraaaagaaaagaaaagaaaaacgagaaaaacaaacacaaaattagtagaagaaaagaaataataaagatcagaacaggccaggctcatgggcacagtggct

SEQ ID NO: 41960 - DNA, 201 bp, Homo sapiens
cttccagggaaggtcctctttccaaatggcgacacctggtccctgcctggaggctggaagctgtggcccttgtatgcccctccagggtctgtgcgctcggktggcccgagttcccatcaccgtcgtcatcatcaccatcatcattgtcatttcgcttgtctgtgagccggcctggtctcccagagcagagaccctctgagg

SEQ ID NO: 41961 - DNA, 201 bp, Homo sapiens
tctgtgcgctcggttggcccgagttcccatcaccgtcgtcatcatcaccatcatcattgtcatttcgcttgtctgtgagccggcctggtctcccagagcakagaccctctgaggtccagcctgagttggggtctccgtgctgacccctgacggggactcaggacgtaccaggtctgggtcaggagtgacccccaaacctcg

SEQ ID NO: 41962 - DNA, 201 bp, Homo sapiens
atgggacagggtctgttggctgcactgtgctcccagggatctggggagaggctatatccctgggctttggcactgcagagctgtgtgtgtttgtgtgtgtktgtgtgtgtgtgtgtgtgtgtgtgtgtgtgtgtgtgtttgcgtgcgcgcacatgtgtataagatctttttttattacatgaagcaagataactgttgctg

SEQ ID NO: 41963 - DNA, 201 bp, Homo sapiens
gagcgatgaagtggcgtcgagctgggcaggaagggtgagcccctgcaaggtgggcatgctggggacgctgagcagcatggccagcagctgggtctgcagcytggtacccggcgggacttgtggttggggctggtttgtggccaggagaggggctggcaggagacaagggggactgtgaggcagctcccacccagcagctga

SEQ ID NO: 41964 - DNA, 201 bp, Homo sapiens
ccccactgcgctggggtctcctgggccatgctctggccctttgtgttcccagctaccctcatagaggctgcaaatctttcccctgctgaaatgaaaccaastgaactaactacaggattcagttctgtgattgtcattggctgagttgagtttgttttggctttctctttcttggtgaaggtgggagtgtggggttggctg

SEQ ID NO: 41965 - DNA, 201 bp, Homo sapiens
ggacaagcacgttaactgcttcagagctcagtttccccatccgtgatagggaatgatctttatgctcccacaggctcgtcctgaggctgcagagaggcagsgttgaaaagtacctagctcagggcctggctcagtgacggttagctgttagggttaccatcgcatcgcaattgttactccatagtgacgaccccccgggga

SEQ ID NO: 41966 - DNA, 201 bp, Homo sapiens
ataggctggatgtggtgatgtgtgtgtgcctgtagccccagctacttgggaggctgaggtgggagaatcacttgagcccaggaagtggaggctgcagcgastcatgaatgcaccctgcactctagctgggtaactggagtgagattctgtctcaaaaaagcaaagaccagagcagaaataaatgaaatggaaatgaaggaa

SEQ ID NO: 41967 - DNA, 201 bp, Homo sapiens
ttttttttcgggatggaatcttactctgtcacccagactggagtgcagtggcgcaatcttggctcactgcaacctctgcctcccagtttcaagcgattctyctgcctcagcctcccaagtagctgggactacaagcgcccaccaccacgcccagctaatttttgtgtttttagtagagatggggttccaccatgttggcca

SEQ ID NO: 41968 - DNA, 201 bp, Homo sapiens
ccctgcgcgcggggtcagtgtgtggacctgcgcctgcgctgcgacggcgaggcagactgtcaggaccgctcagacgaggcggactgtgacggtgaggcccwccccgtcaaggctctgccaagaccctggccctgccctccgggatacgagcttggggctgcctccggcctcacaggagtaggggctctgaaaacctttgct

SEQ ID NO: 41969 - DNA, 201 bp, Homo sapiens
ctgggactacaagcgcccaccaccacgcccagctaatttttgtgtttttagtagagatggggttccaccatgttggccaggctggtctcaaactcctgacytcgtgatccacctgcctcagcctcctgaagtgctgggattacaggcgtgagccaccgtgcccggccggggagctaaaaattaatacaattgaactcatag

SEQ ID NO: 41970 - DNA, 201 bp, Homo sapiens
agtcaacaataatttattgtacatttaagaataaataggctgggggcggtggctcatgcctgtaatcccagcactttgggaggccgagacgggcggattaygaggtcaggagatcgagaccatcctggctaacacggtgaaaccctgtctctaccaaaaatacaaaaaaaaaaattagccgggcacggtggcaggcgcctg

SEQ ID NO: 41971 - DNA, 201 bp, Homo sapiens
ttgagcccaggagtttgaggttgcagcgagccaagatcgtgtcactacactctagcctgggtgacagagcccagaccctgcctctttaaaaaaaaaaaccmaaaaacatgtattggaacacagccatgcctgttcagtcacgtgctctccatgctgctttctgctccagagacccttatggcctgaaagctgaaaatattt

SEQ ID NO: 41972 - DNA, 201 bp, Homo sapiens
ggttacatcatttaccctgatgtgattattatacgttatatgcctgtatcaaaacatcatggctgggcacggtggctcaggcctgtaatcccagcactttsggaggctgaggcgggcggatcacgaggtcaggagatcgagaccatcctgtcccacatggtgaaagcccgtctctactaaaaatacaaaaattagctgggt

SEQ ID NO: 41973 - DNA, 201 bp, Homo sapiens
aagaagagaaaaatctctccaagagataatagtgacctctgagctgggcgcggtggctcacgcctgtaaatcccagtactttgggaggctgaggcgggcasatcacctgaggtcgggagtttgtgaccggcctgaccaagatggagaaaccccgtctctactaaaaataaataaataaataaataaataaatacaaaatta

SEQ ID NO: 41974 - DNA, 201 bp, Homo sapiens
gaagactgaggcaggagaatggcgtgaacccgggaggcggagcttgcagtgagccgagatcatgccaccaccctccagcctgggcaacagagcgagactgygtctcaaaataaataaataaataaataaataaataaataaataaaataaaacaacacacacacacacacacacacacacaccctaacacaaagacctgga

SEQ ID NO: 41975 - DNA, 201 bp, Homo sapiens
gtcctgcagttgctctgtgtggtgggtgtgatctggagccctccgcccattgctgcacctggggcaggcattgctaattgatcccaggactccttcctgcrgagcacgccctggttctccaggcagccgctgcctgtcagcctgcagtggttcgggagaggacacctgcttgcctggtctgttccaaatcttgcttctcat

SEQ ID NO: 41976 - DNA, 201 bp, Homo sapiens
gggaagcggagcttgcagtgagccgagattgcgccactgcagtccgcagtccggcctgggcgacagagcgagactccgtctcaaaaaaaaaaaaaaaagtmcaaaaaaaaaaaaattagtctgggtgtggtatcacgcgcctataatctcactactcgagaggctgaggcggagaattgcttgaacccaggaggtagaggt

SEQ ID NO: 41977 - DNA, 201 bp, Homo sapiens
ttggtggctgggtgcggtggctcacacctgtaatcccagcactttgggaggccgaggtgggcagatcacctgaggtcgggagttcgagaccagcctcaccmacgtggagaaaccccgtctctactaaaaataccaaaaaaaaaattaaccgggcatggcggcgcctgcctgtaatcgcagctactcaggaggctgaagcag

SEQ ID NO: 41978 - DNA, 201 bp, Homo sapiens
cgcagctactcaggaggctgaagcaggagaattgcttgaacctgggaggcggaggttgtggtgagctgagatggcaccattgcactccagcctgggcaacmaaagtgaaactccgtctcagaaaaaaaaaagtttgattggtgtaaccaaagcgcatttgtttatggattgtctgtggcagcttttgttctgccgagatga

SEQ ID NO: 41979 - DNA, 201 bp, Homo sapiens
ggctgagttgggaggattgcttgagccccaggaggttgatgctgcagtgacctgagattactccactgtactccaacctgagcgacagagcaagacttgtytggggaaaaaaaaaaaaaaatatatatatatatatatatatatatatacatatatacatacacgcacacacacataatataaaaatatatatttataaat

SEQ ID NO: 41980 - DNA, 201 bp, Homo sapiens
gtgtgggcagctgtgccttgccatccccggcggccaccgctgcggctgcgcctcacactacaccctggaccccagcagccgcaactgcagccgtaagtgcytcatggtcccccgcacctcactccctcgttagatcaggctggttctgggagctgacgctgaaaggagcttctcatctggggttcctgggtgtacatagat

SEQ ID NO: 41981 - DNA, 201 bp, Homo sapiens
tatgacacggagaatgaaattccccatagcgcacccccaagagacagccctggtccccccgtctttcccgtggacctccagcggggcagatgctgagccgyctgttgtcgagtggcgtgctatcccgtcctccagctcctctgtggcttacagacacccacctgcagccctgtctttgcctcctctagcgcccaccacctt

SEQ ID NO: 41982 - DNA, 201 bp, Homo sapiens
ctataggcatgcaccaccacacctgtctgatttaaaaaaatatacagatgaggtcttgccatgttgcccaggctagtctcaaacttctggcctcaagtgawcctcccaccttggcctcccaaagtgttgggattacaggcatgagccaccgcactcagcccataaccttgtcttatgtgtgtttctaagacaccttattta

SEQ ID NO: 41983 - DNA, 201 bp, Homo sapiens
attgtggggccttgtctggagctagcaaaacaaggtgaagacaaaacagcgacagtatctggggagtacaggccagcgccgctcctttttccggaaatgcmtgggtcaaggaggcaaaaggggttttggggaaactgtttgttttaaagggggggtttctaggccgaccgcgttgcctttcacctcattgcagttttgggt

SEQ ID NO: 41984 - DNA, 201 bp, Homo sapiens
ccttgggcctccatgccagaggccatgcccttccatccaccaccccctggcctgggccctggccctcctggctcgggaactccaggccccttcctcacggmtcgagagacgtgtatttaccgcacaggtgcttgtcattctcttgtggcctcttctccagggagatcacagaaggacagggcctcactgaggtctcggaca

SEQ ID NO: 41985 - DNA, 201 bp, Homo sapiens
cacgttgccccaggaagaggaccctgtccccggcatcctgacccacctcccttagagaccgagagcctctaaggataaacccattcacccgtgtttcagargcttttttttcctcttataaaataacatttatacgttcgctgtagcaaggaaaacattataaaaaatagtgaagaaaatagaaattacccataattttgc

SEQ ID NO: 41986 - DNA, 201 bp, Homo sapiens
tgtttcagaggcttttttttcctcttataaaataacatttatacgttcgctgtagcaaggaaaacattataaaaaatagtgaagaaaatagaaattacccmtaattttgccacacagacttagttgtgtccatgtatcttgtgcaccttttttctgtttacggatcaaaatcgacttttagggtcaggcgcggtggctcac

SEQ ID NO: 41987 - DNA, 201 bp, Homo sapiens
acacacgggtgggggatgtaggcaggtgaggcctctgagttgctttctcccttgcagcgacgggttgcagggctgatgggggtggaggggtttggggtcaracccacctgggtttacatgctcagtggctgtttgacttcgggcaccatacctagtttctgttatctcaccccgttcctctcccaggctatggggagccct

SEQ ID NO: 41988 - DNA, 201 bp, Homo sapiens
ggatctgtcaggattatggggcaccctgggggccccaagtctgcatgggtctccacttgcaatttctgtaggaagctctgataaatccaaactgggggtcmtaggacacagtcagaaatgctgataccgttgtgtgtggagcctcgggccctgggggtcaggagcatgtggagggtgggccacgggggttcagaagagaat

SEQ ID NO: 41989 - DNA, 201 bp, Homo sapiens
gttgaaaataagaatgttagtaatgggctggtttctggcaggtcaaactgggactctgaaatacatatttttctctgctctgccctaaaccttctaattartgaaaacgcacatttgcagacatcaatcaaatgtcatattccctagcagcttgtcctgggatcactgagctggtcacattccacagttgctaactcaggg

SEQ ID NO: 41990 - DNA, 201 bp, Homo sapiens
ataagaatgttagtaatgggctggtttctggcaggtcaaactgggactctgaaatacatatttttctctgctctgccctaaaccttctaattagtgaaaaygcacatttgcagacatcaatcaaatgtcatattccctagcagcttgtcctgggatcactgagctggtcacattccacagttgctaactcagggcttgcag

SEQ ID NO: 41991 - DNA, 201 bp, Homo sapiens
cctaaaccttctaattagtgaaaacgcacatttgcagacatcaatcaaatgtcatattccctagcagcttgtcctgggatcactgagctggtcacattccrcagttgctaactcagggcttgcagagtatgtgtgcacgtgtgtgtgcatgcgtgtgtttgtgagagagatacatgccttctggggagccctggtggcctg

SEQ ID NO: 41992 - DNA, 201 bp, Homo sapiens
ctcgtggtgtgccagagcccgtggctgctgggcgactgtgcctctttctctcagtggcaagagccttattttctaatagagcctgatgggccagaggttcygccacagggacactgttctctgtctctcgtgcttggggtctcttgctgtggaccccctgggaggttgtcctgggggtgcggggattgtgttttctgggta

SEQ ID NO: 41993 - DNA, 201 bp, Homo sapiens
tcaagtgatctgcctgcctcggcctcccaaagtgctgggattacaggcgtgagccaccatgcccagcctgcctggctgattttttaaaatttgtcgttgaratgggtgtcttgctttgctgcccaggctggccttgaactcctgggatcaagcgatcctcccacctcagcctcccaaagtgttgggattacaggcatgagc

SEQ ID NO: 41994 - DNA, 201 bp, Homo sapiens
atgggtgtcttgctttgctgcccaggctggccttgaactcctgggatcaagcgatcctcccacctcagcctcccaaagtgttgggattacaggcatgagcygctgtgcccagcctattttattattattattatttaattttattttttctcactattgcccagctcctggcctccaactcctgggctcaaaggatcttcc

SEQ ID NO: 41995 - DNA, 201 bp, Homo sapiens
tgggctctagtgatcctctcatctcagcctccctagtagctgggactacaggcacacaccaccactcctggctgattttttttttttttttttttttttgkggagacagggtttccgcatgttgcccaggctggtttcaaactcctaggctcaaacacccacctcagcctcccaaagtgctgggattacaggcgtgagcca

SEQ ID NO: 41996 - DNA, 201 bp, Homo sapiens
cagagcgaacttgcttcccaaaaggagtctggatccgggcgtggccgtgctgccctggccgcctcctcacttcagctggagcctccgagctgacgtccatkcctattcctcctgagcactgtagacacaggccccagctctgtcccctgccctctcctccactcagactccctgggctctgaggctttacctacaggccct

SEQ ID NO: 41997 - DNA, 201 bp, Homo sapiens
actcctgacctgccatgcagggccccgtgggcttgtggtggctttggtgccgtccgctgcgtctgcctcttagagcatggagttctccttctcaggagggytgagctgctggagctctagtcctgccgcagagcagcccccaagtgcggcgttgcctgtccctgtggagcaggtgactacctggctgcgggcggaacagca

SEQ ID NO: 41998 - DNA, 201 bp, Homo sapiens
ccacagcacctaaggccagcttggtcaccaaggcatgctggaaggtcaccacaggtggcacaggtggcttggggtgtgctgggcagcaaccattatgcagyagtggcctccaagcagaagctgctgtttcggacacccgaggtattcccagcctccttcccctaccccgaggtttgctggagtcactgagggggcagtagc

SEQ ID NO: 41999 - DNA, 201 bp, Homo sapiens
cttttctgccagttctaaaatgcgttctgagctcggtcctccagtttcctccctgtgaggaagaacaatgagacctttgtaaccacacaggggaaacggcygcttccctctgcagtgggcatgggggaggggctgggacgtcccacctcctcccacctcgatggaaaccacgagtctgtgccagcccagccgactgtcggg

SEQ ID NO: 42000 - DNA, 201 bp, Homo sapiens
cctgggggagagctactcaactgtcccaaggagagggtgatgactgctggcctcccaccggccatcagcgccccactgactgacacccctgagtcagtctycaccctggaactgtttctctcactatttgccatggccttgggccgcttccgggggcttggcaaggcaggaggcgtggaaccaagatggtatgtaatcaga

SEQ ID NO: 42001 - DNA, 201 bp, Homo sapiens
agagctactcaactgtcccaaggagagggtgatgactgctggcctcccaccggccatcagcgccccactgactgacacccctgagtcagtctccaccctgraactgtttctctcactatttgccatggccttgggccgcttccgggggcttggcaaggcaggaggcgtggaaccaagatggtatgtaatcagaatgctata

SEQ ID NO: 42002 - DNA, 201 bp, Homo sapiens
aaagcagggccccgtgtgtttagctcccctcttcagttccaagaaattcgccggtgaacccgatccagcatttgttcagcactttcctggggagattcacytcgtgcttcctgtcgtttttggaacccgtttaatttcagccgtgctgtgtcactgctcaggcatttagtagaactcacacacacgggtgggggatgtagg

SEQ ID NO: 42003 - DNA, 201 bp, Homo sapiens
ctcaaggcaggaggggccacgagctggcctttctctgacactgacttgccagaagtgggcgttcctgggagtggcagacatgcacccactagagatagatytgaatcaccccctcacattctcctaatagtgccaagaacccacagcagagtgcggggtgtactgagtttgtgctgagcaggggtgcctgaatcccggatt

SEQ ID NO: 42004 - DNA, 201 bp, Homo sapiens
tataaaatattaaagtatagaaggcaggcatttggtacattcacagtgtttacaaccctctcttctatcaagttataagagatttccatcaccccaaaatwaaacccatacccattacacggtgacttcccgttccctctccccggatcccctggtgaacaccagtcgactttctgcctctgtggttctgcctgttctggg

SEQ ID NO: 42005 - DNA, 201 bp, Homo sapiens
tggccagcccctcctggtgcctgggctgcgtctcctccttagtgtgctgcctctacaggcttttctcctgaactgtcctctttgctttttttttttttttwaagctttaaaagaagtttttgtagagatgcggtcttgctgtgttgcccaggctggtcttgaactcctggcctgagatgatcctctctcctcggaaagtgc

SEQ ID NO: 42006 - DNA, 201 bp, Homo sapiens
ggggtgatggtctgaaggcctctcctgatttctcattgagcccgttgtgggaatgagaccgttgtctgtgagatgaggcttcttgcacaggcagaaggggytgagggctgcggtgcagagggaggtgagggagccagcctggccgcaggcagatcaggaatgcttggggtggggtggtggagagaagtgtaggtgaggcca

SEQ ID NO: 42007 - DNA, 201 bp, Homo sapiens
tacctgcctggcaaagctctcaggaaattgctcaacggggcattaatagctatctgagcgtgtggcctgggctggaacacaccagcctgggtgctgggtgycttccaggctctggccaccttgggttctgccccaggaaggagcagactgtctcctctaggggacctgaagcttaacgtcctcactgtacgagatagtttt

SEQ ID NO: 42008 - DNA, 201 bp, Homo sapiens
actgggctgggagagggcaggtgggggccaagctggaagaggtggtgttattctgtagcacctgatgtacacagaccttgggggtgcagctccaggctttytctctccccacccgcccctgaaggccccactctcccgccttctgcagccagccttccttttgtctgcccctgagctcctccgctcttgtggtcgttaaga

SEQ ID NO: 42009 - DNA, 201 bp, Homo sapiens
agctcatgtgtggtgagccagcttctggcacggggaaggggcgtccgggctgggttcccccaggaacgtggagtttaggggaggagacgtgcctttccagyggggctgggggctgtgtgggagactcaggcggctgggaggctccttgcgggaggcagggaagcctttcccagggcagcggccaggaggacagactgtgag

SEQ ID NO: 42010 - DNA, 201 bp, Homo sapiens
ctttcccagggcagcggccaggaggacagactgtgagctgtgggctcggcggctacagagtctgcctcagtgggcggggctgatggtgtccaggtgcctgyagcacgcacccacccacgggaccttgctgagcagcgtctgtcaggcagcaagattacccgagggctgcagtggtcctgttccctggcagcttactgtctg

SEQ ID NO: 42011 - DNA, 201 bp, Homo sapiens
gggtgcagctccaggctttctctctccccacccgcccctgaaggccccactctcccgccttctgcagccagccttccttttgtctgcccctgagctcctcygctcttgtggtcgttaagaaaagctttttataatccaagttggtttgggaagaggcaaactgtcctttcccaacagtcatatgccaaccctggccacatc

SEQ ID NO: 42012 - DNA, 201 bp, Homo sapiens
ggcagaacatgtgcttggttaaaggaaacccaagattttattattgttgtaaatgtcaagtccctcattttgaatctttagacaactgcagaattgtgtcmctgacttgggtaaaagcccaaggaaaaacatgaaattatgttgccaaaattgcggtcatcgtagctgcatgagggtttgagtggccaccgccaccccagt

SEQ ID NO: 42013 - DNA, 201 bp, Homo sapiens
cgttatagtcatgctagttttatttttttaaatgtggtttgaattttatataaagtatatggattatatctgagaactaatatgcaaggcctgtatgcaamacataatacaactttacagaaggacattggagaggactgcagtagatgttcacggataggaagacaggagatggagatggcagttgcccccagattgatc

SEQ ID NO: 42014 - DNA, 201 bp, Homo sapiens
tgcctgggccacctgcagtcagcttatccatccccaggctccaggcattacctgtccatgcattcatcccaccttttcttcttgggtggttttgtgtgtgygtgtgtgtgtgtatgtgtgtatatcctgcccaactaacctgcaggctccttgactctggagccctgatgtcttctgtttctctgtctcttccatcatgct

SEQ ID NO: 42015 - DNA, 201 bp, Homo sapiens
gggtgtgtggtttttggtgttgacatgtcgaacgttttgttgttaccgcagtcattttgttactagttaattggtgctacctttccacggagacaatagtytagttacccctgccgctggagattgttcttttttttttttttttttttttttttttttttgctattacaaataaggcctcagcaaatattgtgactcaga

SEQ ID NO: 42016 - DNA, 201 bp, Homo sapiens
gctgcgtctcctccttagtgtgctgcctctacaggcttttctcctgaactgtcctctttgcttttttttttttttttaagctttaaaagaagtttttgtaragatgcggtcttgctgtgttgcccaggctggtcttgaactcctggcctgagatgatcctctctcctcggaaagtgctgggattataggtgtgagctacgg

SEQ ID NO: 42017 - DNA, 201 bp, Homo sapiens
gaagagggggctgtagggccttggtgcgaggccctccagtgacaggatcccccatcacccagagttccacaggccctggtagggaggagggggagcagaakaggaggtgccatctttgcctgctggggaagggcaggggccacccacacagagctctcccatttgctgtggaccctggggccactgccagttccttccaaa

SEQ ID NO: 42018 - DNA, 201 bp, Homo sapiens
gtgccgcgggtgtccttgttggtgatggttccacctgcttgtgccaccagtgccctctgggtctcacacacaactctcttcccagcgaaggcccctcctgycctcaggcctcagtgctgcttccgtctcggaaggccccaggagctcctgcatcctgggcgtgattcctgtgtgcctgcagaccccctcgcggctgccatc

SEQ ID NO: 42019 - DNA, 201 bp, Homo sapiens
ctgtgtgcctgcagaccccctcgcggctgccatctcatcctttggtgcacctgttggccagacctcctggtagcgggtgctgcactcccctgaatgtgccrgggcctgggggcagggacctgggctcctccctcactgagtggagggaactcagtgtcttggagttggggtgcctgcaggctgggtggtgcaggtgaaatg

SEQ ID NO: 42020 - DNA, 201 bp, Homo sapiens
gcgaggagccgccgccgccgcgccatggagcccgagtgagcgcggcgcgggcccgtccggccgccggacaacatggaggcagcgccgcccgggccgccgtrgccgctgctgctgctgctgctgctgctgctggcgctgtgcggctgcccggcccccgccgcgggtaggtgggcgcaggccggccgggggccgcgggttgct

SEQ ID NO: 42021 - DNA, 201 bp, Homo sapiens
gcgggccatccgcagggcgtacctggacgggtctggggcgcagacgctggtcaacaccgagatcaacgaccccgatggcatcgcggtcgactgggtggccygaaacctctactggaccgacacgggcacggaccgcatcgaggtgacgcgcctcaacggcacctcccgcaagatcctggtgtcggaggacctggacgagcc

SEQ ID NO: 42022 - DNA, 201 bp, Homo sapiens
catggggtcatggacttctgcttcttctccagcctcatgtactggacagactggggagagaaccctaaaatcgagtgtgccaacttggatgggcaggagcrgcgtgtgctggtcaatgcctccctcgggtggcccaacggcctggccctggacctgcaggaggggaagctctactggggagacgccaagacagacaagatc

SEQ ID NO: 42023 - DNA, 201 bp, Homo sapiens
gtgtggccctgtgtgctgacccagctgggctctgccctgtgtggcccccagggtgcccggcgtgtgccctgatggcctggggcagagctccagagagccayggctggccgagggctcacggattctcacccgcccccagtgcctcaggagacacctgggcagcgaacagcttgaggtgtgcagaggatgggtcacgatggg

SEQ ID NO: 42024 - DNA, 201 bp, Homo sapiens
gaggcggaccctcctggaggacaagctcccgcacattttcgggttcacgctgctgggggacttcatctactggactgactggcagcgccgcagcatcgagygggtgcacaaggtcaaggccagccgggacgtcatcattgaccagctgcccgacctgatggggctcaaagctgtgaatgtggccaaggtcgtcggtgagtc

SEQ ID NO: 42025 - DNA, 201 bp, Homo sapiens
ggccctccagctgtgagcccaggtgggaccacccagttacaagagcgttaggcctggctgtgtaggagacgtgtgtctccacaccagagtccttgcggcayatgggaagccttcatggtcctcatggtggggaggggtccccggggaggcatggagtctcgctcctaggttgctgtgtggcttcagcgctctgtacctcca

SEQ ID NO: 42026 - DNA, 201 bp, Homo sapiens
gcctggctgtgcctttgctgacaccgtgcccgtgtgtgttcatgcaggtcaggagcgggtcgtgattgccgacgatctcccgcacccgttcggtctgacgyagtacagcgattatatctactggacagactggaatctgcacagcattgagcgggccgacaagactagcggccggaaccgcaccctcatccagggccacct

SEQ ID NO: 42027 - DNA, 201 bp, Homo sapiens
ccccggggaggcatggagtctcgctcctaggttgctgtgtggcttcagcgctctgtacctccatgcccctgtcctgcagatgtcaacacccagttgaggaraacgtggactttgcccagtgttgtgcagggatggtggggccaggctggagcccacgtgtcctgccttcgccctggccaaggtgggggttatctgccctgg

SEQ ID NO: 42028 - DNA, 201 bp, Homo sapiens
tccaaagccaagtcctccaggacggttcttgcccctgagaaggggcagtgtgggtgctgggctgcagcgagcccctcttcgttccatttcctcacagtctyggggacggagggcttgtcctggagcacaggaccgggattgtgctgaggtcctgggaggccacggtcatgaggggacccagtgaaggccaggaggggacaa

SEQ ID NO: 42029 - DNA, 201 bp, Homo sapiens
tggaatacaggggtggatgggaagctgatgccacggccaaggaaacgggcctgagcttggacagtggtcaaagacttgtaagggaatcttgaggctctgtytggcctgggctctgaacccctcaaaaaatgtggccctgtggctgggtctgtagcgagcagcatggccagtgctgtgcctgcatgtccccgtcccctgtgt

SEQ ID NO: 42030 - DNA, 201 bp, Homo sapiens
cagcatggccagtgctgtgcctgcatgtccccgtcccctgtgtcaggccaacaaaggggatgtggcttctctgcagaacaggacagggcccctgtagcctytggaggacgatgtgggaggttttgggcatggcaggaagggtcacccatatctgggggaacagacgtaacagttggtaaacaaacaggtgctgtcaccgaa

SEQ ID NO: 42031 - DNA, 201 bp, Homo sapiens
tcaaaaaaaaaaaagagctcagctttcaagatttgttattgttgaaggaattacttccccttgagattccatagttatgttcctttttttttttttttttyttaattgagatggagtctcccttgttgcccaggctggagtgcagtggcacaatctcggctcactgcaaccttcgcctcccgggttcaagtgattctcctg

SEQ ID NO: 42032 - DNA, 201 bp, Homo sapiens
ggggcgcagccatgcgtcaggctggagccagctgcagaggccacagacagggtgtcatgagcagtacaagtaaccgctgctgtccattgaacacctactgkgtgcctgggttcagaaaggcaccctgtgctggcttttaaagaattaggccgcctgcctaaaggggggagtgtggccttctttttcatttaagtcaccaac

SEQ ID NO: 42033 - DNA, 201 bp, Homo sapiens
atcccagctactcaggaggctgaggcaggagaatggcgtgaacctgggaggcagaggttacagtgagtcgagatcgcgccactgcactccagcctgggcartaagagtgaagcttcgtctcaaaaacaaagtcacacacgcttcttgtacgagggtcatttggccgaggggccagatggctcaccatctagttgggacagg

SEQ ID NO: 42034 - DNA, 201 bp, Homo sapiens
caccaccacacctgtctgatttaaaaaaatatacagatgaggtcttgccatgttgcccaggctagtctcaaacttctggcctcaagtgaacctcccacctyggcctcccaaagtgttgggattacaggcatgagccaccgcactcagcccataaccttgtcttatgtgtgtttctaagacaccttatttaggctgagtgca

SEQ ID NO: 42035 - DNA, 201 bp, Homo sapiens
accaccacacctgtctgatttaaaaaaatatacagatgaggtcttgccatgttgcccaggctagtctcaaacttctggcctcaagtgaacctcccaccttrgcctcccaaagtgttgggattacaggcatgagccaccgcactcagcccataaccttgtcttatgtgtgtttctaagacaccttatttaggctgagtgcag

SEQ ID NO: 42036 - DNA, 201 bp, Homo sapiens
gtggtgagctgagatggcaccattgcactccagcctgggcaacaaaagtgaaactccgtctcagaaaaaaaaaagtttgattggtgtaaccaaagcgcatytgtttatggattgtctgtggcagcttttgttctgccgagatgagttgtgacagatctgtatgggctctaaagcctaaaacatgtgccatccgccccttta

SEQ ID NO: 42037 - DNA, 201 bp, Homo sapiens
gcctctggctggaccatctcattgtcctcagacacagcctctcgggtctagtttcatttcctgaaaaacaagtgcacagaactagagcaggagtcgagagmtacggcccccgggccagatccagccctgccacctgttttcacaccatgctcaagctgagtgggttttacattttttaattacttgaaaaaaaaaaagcca

SEQ ID NO: 42038 - DNA, 201 bp, Homo sapiens
tcaccagcagagccgccatccacaggatctccctcgagaccaataacaacgacgtggccatcccgctcacgggcgtcaaggaggcctcagccctggacttygatgtgtccaacaaccacatctactggacagacgtcagcctgaaggtagcgtgggccagaacgtgcacacaggcagcctttatgggaaaaccttgcctct

SEQ ID NO: 42039 - DNA, 201 bp, Homo sapiens
tgggtgtggtggcaggcgcctgtattcccagctactggggaggctgaggtgggagaattacttgaacctgggaggcggaagttgcagtgagccaaaattaygccactgcactccagcctaggcaatagagtgagactccgtctcaaaaaaaaaaaagggccaggggtggtagtgacaaagagaccctatcccaaaaaaacc

SEQ ID NO: 42040 - DNA, 201 bp, Homo sapiens
cacattggagcttttggcacatcctggctttcaggtgaaaggtgcgtgtgtgtttgagggtttagcctggccaacccagccatgaggtcggacctgacctrggggtgagtcctgagctcggcacccctgagctgtgtggctcacggcagcattcattgtgtggcttggccgcacccctttccctgctgggctgttgatgtt

SEQ ID NO: 42041 - DNA, 201 bp, Homo sapiens
attgaatactgaaccattgctcctaggggaaacatcgggctaggttcctgtgagcctcaggtcacaacgtttttgccaactgttcgatacctgacctggcttttttttttttttttttaagacagcgtcttgctgtgtcaccccaggctggaatgcagtggtacaatcatgggtcactgcagccttgacctcctgggctca

SEQ ID NO: 42042 - DNA, 201 bp, Homo sapiens
gtatccccggggcctggcgctgtgacggctttcccgagtgcgatgaccagagcgacgaggagggctgccccgtgtgctccgccgcccagttcccctgcgcrcggggtcagtgtgtggacctgcgcctgcgctgcgacggcgaggcagactgtcaggaccgctcagacgaggcggactgtgacggtgaggccctccccgtca

SEQ ID NO: 42043 - DNA, 201 bp, Homo sapiens
tgtctgatttaaaaaaatatacagatgaggtcttgccatgttgcccaggctagtctcaaacttctggcctcaagtgaacctcccaccttggcctcccaaastgttgggattacaggcatgagccaccgcactcagcccataaccttgtcttatgtgtgtttctaagacaccttatttaggctgagtgcagtagctcacgcc

SEQ ID NO: 42044 - DNA, 201 bp, Homo sapiens
tttgagctgtttccatgttttggctttgtgaacactgctgttaacatgcgtgtacctgtatgtgtacatacatgagtagaggggttcagttcttttgggtmtatatgtaggagtggaattactggtcataggatcattctatgtgtaactttttgaggcactaccaggctgttttccacagcagccagaggtgtctttaaa

SEQ ID NO: 42045 - DNA, 201 bp, Homo sapiens
gcacattggagcttttggcacatcctggctttcaggtgaaaggtgcgtgtgtgtttgagggtttagcctggccaacccagccatgaggtcggacctgaccygggggtgagtcctgagctcggcacccctgagctgtgtggctcacggcagcattcattgtgtggcttggccgcacccctttccctgctgggctgttgatgt

SEQ ID NO: 42046 - DNA, 201 bp, Homo sapiens
ggagtccccctgctcccccaaaagatggtgtctaaattatcatccaattggccgaggttttgttttctattaattgtttttattttttattgtggtaaatwtatataacataaaatttgccattttaattgttttgttattgttgtttttgagacagggtctcaccccagtgcccaggctggagtgcagtggtgcgatcat

SEQ ID NO: 42047 - DNA, 201 bp, Homo sapiens
gactgtcacgtggagtcctttggagagagggacgtgttaattgatggatgtggctcccatgctgagaaagctcctgggcgtacattgccttagagtttcaytggagctgcgttcttttatggtgtctgctaggcagaagtgatgaagacttggaagaaaacccagaaggttttccacttaatttggaaaatgtgcttttcc

SEQ ID NO: 42048 - DNA, 201 bp, Homo sapiens
ggttgactgtggcaggctggctcaagagtccctgctcctgaacccttgccaggcagcctggcatcagctcggggaatttttgccctgacccttggaagcargtgggcctctttgttctcatgtcagtgatgagaagagtgactttcctatggcccctctggagtacaggtgtttcctgttggcgggctcttcccccatgac

SEQ ID NO: 42049 - DNA, 201 bp, Homo sapiens
accgcacactctgttctgctagagtagttagctgtcctgggtgatatggcaggtgacaggggcaactgtgcttaacaaaggaacccccatcccccctgccmagttgggagactagaaggtcaggggcagaagctctgaagggccaggtgcagtggctgacacctctaatcccagcactttgtgaggccaaggcgggcagat

SEQ ID NO: 42050 - DNA, 201 bp, Homo sapiens
gtgtgctccgccgcccagttcccctgcgcgcggggtcagtgtgtggacctgcgcctgcgctgcgacggcgaggcagactgtcaggaccgctcagacgaggyggactgtgacggtgaggccctccccgtcaaggctctgccaagaccctggccctgccctccgggatacgagcttggggctgcctccggcctcacaggagta

SEQ ID NO: 42051 - DNA, 201 bp, Homo sapiens
gagttcaggatcccccagagataccagggccagcactcgatccccacccagccctgaaccccaccatgtgctgggattgtgctgggagtgtccacacgccygggaccccagggctggtgctctcatctcctttttccagatcatgagaatgaggctcagggaagtttgaaaaaaacctatcccaagtcacacagcaacagg

SEQ ID NO: 42052 - DNA, 201 bp, Homo sapiens
ctgttggttctgtgctctgctcagcgacctttctcccgtgggagttcctgggggttcagcttcatcctacagacagcagcacacactggctgtgcaccctttttttttttttttttttttttttgagatggagtctcgcttttttcgcgcaggctgaagtgcagtggtgtgatcttggctcactgcaacctctacctcctg

SEQ ID NO: 42053 - DNA, 201 bp, Homo sapiens
atgttggccaggatggtcttgaactcctgacctcaggtgatccgcccacctcagcctcccaaagtgcagggattacaggcgtgagccaccacacccggagygccggttgtttttagcagtttgtcttgttcctggagagactggctcctgcccaggagctcggggagtagggccgcggggtgctgcctcacacctcgagtt

SEQ ID NO: 42054 - DNA, 201 bp, Homo sapiens
cctctccagtagctgggactataggcatgcaccaccacacctgtctgatttaaaaaaatatacagatgaggtcttgccatgttgcccaggctagtctcaamcttctggcctcaagtgaacctcccaccttggcctcccaaagtgttgggattacaggcatgagccaccgcactcagcccataaccttgtcttatgtgtgtt

SEQ ID NO: 42055 - DNA, 201 bp, Homo sapiens
gtagctgggactataggcatgcaccaccacacctgtctgatttaaaaaaatatacagatgaggtcttgccatgttgcccaggctagtctcaaacttctggsctcaagtgaacctcccaccttggcctcccaaagtgttgggattacaggcatgagccaccgcactcagcccataaccttgtcttatgtgtgtttctaagac

SEQ ID NO: 42056 - DNA, 201 bp, Homo sapiens
acactgtttctagcaccttccaggcagaatctcatgtatccttcactttcgaaatgggtactatttcatccccacttttatcaatgagaaactaaagctcraagaggtcaagtaagttcctggccaaggtcagctagcaggctctagaggcctcgttctccttagaggcagccttgccagggcccaggcttggcaggctgc

SEQ ID NO: 42057 - DNA, 201 bp, Homo sapiens
accacactaggctgcctccccagacaagctcagcgggcactgcatgttgggttcagaaatcagcagaactccacgttctgagctgctcttcaagttgctcytatgggggttacttttaagctgggaaatggctgtggcgtcgaggggccgggggcttgggctccagagtctgactgtgtgtttgagtccggctgtggaaac

SEQ ID NO: 42058 - DNA, 201 bp, Homo sapiens
gctgagtgacatgaagacctgcatcgtgcctgaggccttcttggtcttcaccagcagagccgccatccacaggatctccctcgagaccaataacaacgacrtggccatcccgctcacgggcgtcaaggaggcctcagccctggactttgatgtgtccaacaaccacatctactggacagacgtcagcctgaaggtagcgtg

SEQ ID NO: 42059 - DNA, 201 bp, Homo sapiens
tgccgtgtccccaacatccggccaagcttaggtggatgttccagcacacactcaccctgtctgtgcacctgtttttgtgtccgtaagtgggtatttactcrccttacgagtgagccactgtgggaattcagggaggtggcgcagtgaccacccctggagggatatgtgtgtggcaggggtcgagggtctcgcccttccctg

SEQ ID NO: 42060 - DNA, 201 bp, Homo sapiens
gtatttactcgccttacgagtgagccactgtgggaattcagggaggtggcgcagtgaccacccctggagggatatgtgtgtggcaggggtcgagggtctcscccttccctgcttcctgcgcgtggctttctccaggacggggagggctgagctgaagaggtggggacagttgcgtccccccgccacccactgtcctgcggt

SEQ ID NO: 42061 - DNA, 201 bp, Homo sapiens
gtgcgtccttgtgttcacctcgtatgagacagtgcgggggtgccaactgggcaaggtggcaggctgtccgtgtggccctcagtgattagagctgtactgaygtcattagccttgatggtggccaggactggtagggccctcagaggtcatggagttccttcgtggagcgggtgctgaggctgtatcaggcacagtgctggc

SEQ ID NO: 42062 - DNA, 201 bp, Homo sapiens
ggtaagtgtttgcctgtcccgtgcgtccttgtgttcacctcgtatgagacagtgcgggggtgccaactgggcaaggtggcaggctgtccgtgtggccctcrgtgattagagctgtactgatgtcattagccttgatggtggccaggactggtagggccctcagaggtcatggagttccttcgtggagcgggtgctgaggct

SEQ ID NO: 42063 - DNA, 201 bp, Homo sapiens
tgtggaggtgaggcctcactaaatttcctgggctagtcttgaactcctgagctaaagtgatcctcctgcctcagcctcccaaagtggtaggattacaggcrtgagccactgcgcctgggctgacatatgtgttttcgtaagcccgaaagatagcatctgaagagtcaacattgagccttgccttttgctgctaacgatgta

SEQ ID NO: 42064 - DNA, 201 bp, Homo sapiens
tttgtggaggtgaggcctcactaaatttcctgggctagtcttgaactcctgagctaaagtgatcctcctgcctcagcctcccaaagtggtaggattacagrcatgagccactgcgcctgggctgacatatgtgttttcgtaagcccgaaagatagcatctgaagagtcaacattgagccttgccttttgctgctaacgatg

SEQ ID NO: 42065 - DNA, 201 bp, Homo sapiens
tattttgcatcctttaaatatatgttcatggtacaaaattcaaaagatacagaagagtctgcagtccaaagagactccgcccccatgacgccaagcaggcmtccctgggaggcatggcctcctgcagtgtgtttcttctatgtccccccaggggtcatctgtacatatgcaagcatacaagagcgtggactttgttttcca

SEQ ID NO: 42066 - DNA, 201 bp, Homo sapiens
gccaagaaacggggccgtcagaacgctgcactaactgcagccttgggcctccatgccagaggccatgcccttccatccaccaccccctggcctgggccctggccctcctggctcgggaactccaggccccttcctcacggctcgagagacgtgtatttaccgcacaggtgcttgtcattctcttgtggcctcttctccagg

SEQ ID NO: 42067 - DNA, 201 bp, Homo sapiens
ttggagcaggagtcaggaggggctcctgtctttccttgaaacgttggatgccgggatcctggaacagtctctgcattcctcctggcgagaaccagagcctrggcacaggggaccatctgttgtttgaaggctgcagcctggcagggcactcaggagatctggcagttggctgcagggccaggtctaggggccagggcatca

SEQ ID NO: 42068 - DNA, 201 bp, Homo sapiens
gggatctgagaccatgtcattgcactccagcctgggcaacagagcgagacgccatctcaaaaaaaaaaaacctacagagccacacggcctctttctccacygagtgttggtgtgggagcttgtgttattgtggtgaaatcttggtactttcttgaggcagagagaggctgagcgcctggagagactttcacatgggtcgcc

SEQ ID NO: 42069 - DNA, 201 bp, Homo sapiens
ttgaggcagagagaggctgagcgcctggagagactttcacatgggtcgccatgtccgccgtcggtttcgctgttgtgctccccatctgaaggctggtgccrtccagacaggctggacgcccctttccaccagatccttcctcccgcagcagtttctagttacgttgtactgtgaggtctgtgtccttggttgatggcaaaa

SEQ ID NO: 42070 - DNA, 201 bp, Homo sapiens
ccagtgcccccacgctttgtgtctgtgtccccagcccatgggactctgctattccctgagtgctgccgcatgcccagcccgcactgaggacgtggagcccygaggggcaggatggcctccatggtcacacgtaggaagtggcctccaccctccgatgatcctctccctcctccctttcagcgccctccccgggggtgtcct

SEQ ID NO: 42071 - DNA, 201 bp, Homo sapiens
ttattttgcatcctttaaatatatgttcatggtacaaaattcaaaagatacagaagagtctgcagtccaaagagactccgcccccatgacgccaagcaggmatccctgggaggcatggcctcctgcagtgtgtttcttctatgtccccccaggggtcatctgtacatatgcaagcatacaagagcgtggactttgttttcc

SEQ ID NO: 42072 - DNA, 201 bp, Homo sapiens
cctagcctcccagctcccccactttctccccaccctccaccagtggcaaagccagccccttcagggcgcacggtgtctgcccccaaggagggcccattccrttggggttaatgttggccacctctttctgtttgtctctggcagaaatcaccaagccgccctcagacgacagcccggcccacagcagtgccatcgggcccg

SEQ ID NO: 42073 - DNA, 201 bp, Homo sapiens
actcaggcggctgggaggctccttgcgggaggcagggaagcctttcccagggcagcggccaggaggacagactgtgagctgtgggctcggcggctacagartctgcctcagtgggcggggctgatggtgtccaggtgcctgcagcacgcacccacccacgggaccttgctgagcagcgtctgtcaggcagcaagattaccc

SEQ ID NO: 42074 - DNA, 201 bp, Homo sapiens
cagacgttggagccatctgagccccctcgtcccgctctagcttctcctcccgtgtgccccgcggtgctggtggcaggcccttacgccggttctggctgcaygctctgttccagaagctttcttccctgcttggttaccagaaaatcatcccatccattacaaggacagggtccccttatctcccattcccagggcaggaca

SEQ ID NO: 42075 - DNA, 201 bp, Homo sapiens
aagtgggtatttactcgccttacgagtgagccactgtgggaattcagggaggtggcgcagtgaccacccctggagggatatgtgtgtggcaggggtcgagrgtctcgcccttccctgcttcctgcgcgtggctttctccaggacggggagggctgagctgaagaggtggggacagttgcgtccccccgccacccactgtcc

SEQ ID NO: 42076 - DNA, 201 bp, Homo sapiens
ccatccccacacccgtccttcacccgccaccctcccgcaggtacctgtacttcaccaacatgcaggaccgggcagccaagatcgaacgcgcagccctggayggcaccgagcgcgaggtcctcttcaccaccggcctcatccgccctgtggccctggtggtggacaacacactgggcaagctgttctgggtggacgcggacc

SEQ ID NO: 42077 - DNA, 201 bp, Homo sapiens
cacagggcagaggcagaaaatgagtctcagagagggtgagcgagctgcttggggccccacagcaggagatggagcaggactgcagcctagcctctgccccyagcacctgcgcaagaagctgctctgctctggactgtgttaggctgcgagggctggagagaaatgagagttggtgcttagagagggggcgcaggtccccat

SEQ ID NO: 42078 - DNA, 201 bp, Homo sapiens
ctgatttgcttctaaagggccctgtgattcggctcagccacctttagattaggttagcctcccctttgatagactccaagtcggctgattaataaccttamtcacatctgcagaatcccttctgccacataaggtcatgacgccgtgctggggactggggtgggaaattacggggtcatttaggattctgcctgccactgc

SEQ ID NO: 42079 - DNA, 201 bp, Homo sapiens
ctatgcgcacgctggtcaccacagaggcctggcccttcttctgtagcagtcccacacccgcaacaggtgtggctgctgaccacctgctttctgcccctctrgtcctgaggagggcgcagtgggcactcaggcgtggctgagcagatgtgtgttgccgggaggaggaaggactgctccagtcagggctgaatttcccacccg

SEQ ID NO: 42080 - DNA, 201 bp, Homo sapiens
acaggcatgagccactgcgcctgggctgacatatgtgttttcgtaagcccgaaagatagcatctgaagagtcaacattgagccttgccttttgctgctaaygatgtataaaagctgctgttctgagcatttcggaggctcccagctgccgtgtgcaccctgcctagagctctaccgtaacccatctccgggaggaggtgct

SEQ ID NO: 42081 - DNA, 201 bp, Homo sapiens
gaaccactggcctgggtcgttcggttggtaggcagtggggccaggccatccaactcacaaccaccttctactctgcttcccccgcaccctgaagtttgttytgttttgaggacacagccgtcacattcttggtggctgaacagcactccttgtcaggcgtggctgggcccccactggagggcatcatggtcctctctcctg

SEQ ID NO: 42082 - DNA, 201 bp, Homo sapiens
gtaggcagtggggccaggccatccaactcacaaccaccttctactctgcttcccccgcaccctgaagtttgttctgttttgaggacacagccgtcacattyttggtggctgaacagcactccttgtcaggcgtggctgggcccccactggagggcatcatggtcctctctcctgctgcggttgaaccttggctgtttcaac

SEQ ID NO: 42083 - DNA, 201 bp, Homo sapiens
cagtaagtgcctgaagcgggcacagccctgcccttatgccacttatgtgctgggagacccagagattagtcaggtgtggctcctcccctgcatttgctccmaatccaggagacagcggggttccaaagccataaggaagcattgttctaagataccctagagcccagagggccgtcatattcacacaggaagccagagggg

SEQ ID NO: 42084 - DNA, 201 bp, Homo sapiens
ggctacgcggaggtgacgtggtcccagatcgcggggcagtgggggaggcaggcttgtgcctcagttgtacactcccgtggggagaggtagggcgggggaaytttctctccaacttttggtgtttcccagggggtggagttgaggtcaggaggactcaggaaacttaagcagtcgtgaaacgctacacatgttcttttaatt

SEQ ID NO: 42085 - DNA, 201 bp, Homo sapiens
ttcctgtatgaccttggacatccagtccactgacaaactcactcactcaccgctgcagccctcgggggcaggagtagttagttagcactgtggacagagcycctgcgcccagggtctgattccagcctggccgcttcctgtgctgggaggcttaggaagctgatgctacctttgtgtgcctcagttttctcacctgtaaaa

SEQ ID NO: 42086 - DNA, 201 bp, Homo sapiens
tcatccaagtagtaccacgtatgggtgtttcagccttttattttttttttgaaatggagtcttgctctgttgcccaggttggagtgcggtggtgcgatctyggctcactgcaacttctgcctcctgggtttaagtgattctcctgcctcaggctcccaagtagcttgcattacaggtgcccgccaccacgcccagctaatt

SEQ ID NO: 42087 - DNA, 201 bp, Homo sapiens
tcatctgcaaaatcgggacgatggtgtccaccttgcccatgctggtggggtcccaagagctggtgtctggggtgagggagctgggggccaaaagctcctgmcctggggcatccagctgtcctttgaagagtaccccgagggtgtgactgagagccagtccccagcacccttgtccagatggggaccaggaggtgggtgaag

SEQ ID NO: 42088 - DNA, 201 bp, Homo sapiens
gagggggcagtagcgagctgcaggtgcagggtcggggtcctgggggttgcgtgtatgcgcagcctccagagaagcccatgcaggcccccctcacccgttcytgcctgacctgctgttgtgtcctgctcctagctctgcggtctgggacaagcacgttaactgcttcagagctcagtttccccatccgtgatagggaatgat

SEQ ID NO: 42089 - DNA, 201 bp, Homo sapiens
tgatggggctcaaagctgtgaatgtggccaaggtcgtcggtgagtccggggggtcccaagccatggctcagccatgcagacttgcatgaggaggaagtgaygggtccatgcctgggcataagtgttgagctcaggtgccccgacctggggaagggcaggacaggaaaggtgacagtatctggccaaggacagatgggaagg

SEQ ID NO: 42090 - DNA, 201 bp, Homo sapiens
ttggtcggggaccactctcagctcctagaggccaccacaggtccttgccccgtggccctctctgcctcagcagtgggggctccctgcgtcagtccctcccrcaccttgagtctctctgatttgcttctaaagggccctgtgattcggctcagccacctttagattaggttagcctcccctttgatagactccaagtcggct

SEQ ID NO: 42091 - DNA, 201 bp, Homo sapiens
tagcttccttgctcactcagcaggtagcagttgtgggatcgaggttctgttttctctctggttattggtcggggaccactctcagctcctagaggccaccmcaggtccttgccccgtggccctctctgcctcagcagtgggggctccctgcgtcagtccctcccacaccttgagtctctctgatttgcttctaaagggccc

SEQ ID NO: 42092 - DNA, 201 bp, Homo sapiens
tcaccacagaggcctggcccttcttctgtagcagtcccacacccgcaacaggtgtggctgctgaccacctgctttctgcccctctggtcctgaggagggcrcagtgggcactcaggcgtggctgagcagatgtgtgttgccgggaggaggaaggactgctccagtcagggctgaatttcccacccggagcatttctgctgt

SEQ ID NO: 42093 - DNA, 201 bp, Homo sapiens
ccaagggtcgcctcctctgctgggcaagttcccagtctgacgggcctgtgccgtgggccccagctgtgggggcgctgttgatgcgcagccaggcctcgccrccagagcccgcacgcttccattccgctgacttcatcgacgccctcaggatcgctgggccggccctgtgggagagtgaatgtggcttttgccaaagttgag

SEQ ID NO: 42094 - DNA, 201 bp, Homo sapiens
gtctttgatcaggccccctcccctatgccacacagtccctgtcactcgggtgagcccagtagtcatggggaaggcctgcgggttccaaacatccaaaggcytgcgtgcagcatgacagcttgaaaccgatgttttttaccttgatcagatttcagcttggcgggggctttgctcagctttcagtgaggcctgggccgattt

SEQ ID NO: 42095 - DNA, 201 bp, Homo sapiens
ggatttcagaccctgcttctgagcgggaggagtctcagcaccttcagggtggggaacccagggatgggggaggctgagtggacgcccttcccacgaaaacyctaggagctgcaggtgtggccatttcctgctggagctccttgtaaatgttttgtttttggcaaggcccatgtttgcgggccgctgaggatgatttgcctt

SEQ ID NO: 42096 - DNA, 201 bp, Homo sapiens
cgtaagcagaggggacattttgtgactgtccccctcctgagcttcccagcagcttttctccaagttacagcccaaaagctcaggtggatttgcaacccaasggtgtctgtgcacctcccactgatgcccgaactgccctggccaagaaacggggccgtcagaacgctgcactaactgcagccttgggcctccatgccagag

SEQ ID NO: 42097 - DNA, 201 bp, Homo sapiens
ctgtccccctcctgagcttcccagcagcttttctccaagttacagcccaaaagctcaggtggatttgcaacccaacggtgtctgtgcacctcccactgatrcccgaactgccctggccaagaaacggggccgtcagaacgctgcactaactgcagccttgggcctccatgccagaggccatgcccttccatccaccacccc

SEQ ID NO: 42098 - DNA, 201 bp, Homo sapiens
ggaggtgtgggggacagcggggaacaggaggagcttggagtttgtttcacgtcctcctgcctctgacccaagcctagagattctatggacagtttcacccyaaatctgcctctttcaggagcgtgtttacattgtggggccttgtctggagctagcaaaacaaggtgaagacaaaacagcgacagtatctggggagtacag

SEQ ID NO: 42099 - DNA, 201 bp, Homo sapiens
cagtcctccccgtttctgtagcgtgatggggcccagcttgcagaaggtggtgggggacagggcctgcttcctgtgccggtgtcccactcgggagggcaggkggcttccaagtgggctggcttccacactcaggaacagtcctaagggcagagtctcggtgtggggccccctagaaggactctcctggcatccggtggatgg

SEQ ID NO: 42100 - DNA, 201 bp, Homo sapiens
ggtgtggagaaagctccttggacttgaccttcatattctagtaggacatgtgctgtgttgtccacaaatcctcatgtaccctagaaatgaatgtgggggcrgctgggctctctccagagctgaaggaatcactctgtaccatacagcagctttgtcttgagtgcagctgggatttgtggctgagcagttacaattcctacg

SEQ ID NO: 42101 - DNA, 201 bp, Homo sapiens
tgcaggaccgggcagccaagatcgaacgcgcagccctggacggcaccgagcgcgaggtcctcttcaccaccggcctcatccgccctgtggccctggtggtrgacaacacactgggcaagctgttctgggtggacgcggacctgaagcgcattgagagctgtgacctgtcaggtacgcgccccggggcctgccctaaccgca

SEQ ID NO: 42102 - DNA, 201 bp, Homo sapiens
actccttccccgactgtatcgacggctccgacgagctcatgtgtggtgagccagcttctggcacggggaaggggcgtccgggctgggttcccccaggaacrtggagtttaggggaggagacgtgcctttccagcggggctgggggctgtgtgggagactcaggcggctgggaggctccttgcgggaggcagggaagccttt

SEQ ID NO: 42103 - DNA, 201 bp, Homo sapiens
gcattgttcaactagtatagaatgtgacctgtcagcctcgggcagccctgagaggcaggggctttccacagcccagctgggtgccctgggctccgtgctgkccgaggagacgccatccccacacccgtccttcacccgccaccctcccgcaggtacctgtacttcaccaacatgcaggaccgggcagccaagatcgaacgc

SEQ ID NO: 42104 - DNA, 201 bp, Homo sapiens
gtcctcatcaaacagcagtgcgactccttccccgactgtatcgacggctccgacgagctcatgtgtggtgagccagcttctggcacggggaaggggcgtcygggctgggttcccccaggaacgtggagtttaggggaggagacgtgcctttccagcggggctgggggctgtgtgggagactcaggcggctgggaggctcct

SEQ ID NO: 42105 - DNA, 201 bp, Homo sapiens
attgtggtcgtatcttgatccttcatgacatttgtaaagaccctgcttccaaataagctcacattctgaggttctggggtgagcgggaatttggagagcaytgttcaactagtatagaatgtgacctgtcagcctcgggcagccctgagaggcaggggctttccacagcccagctgggtgccctgggctccgtgctgtccg

SEQ ID NO: 42106 - DNA, 201 bp, Homo sapiens; identical to SEQ ID NO: 7336

SEQ ID NO: 42107 - DNA, 201 bp, Homo sapiens
cctgacgtcaccaacactgttctgtcaccttgctttggtgtggcttcttcacagttgtcacatctgggccgtttggagtgacctagcaagtcctttgcttrtctcccaggactttccggagtagccaagcagagccttcggccagttcccttgtggggccaggccctgcccgggagcacaggcaggagaacagctgcctcc

SEQ ID NO: 42108 - DNA, 201 bp, Homo sapiens
ggagaggactgcagtagatgttcacggataggaagacaggagatggagatggcagttgcccccagattgatcagtggattcagtgcaggggccggcagtgygctctcctccctgttctttcctcccaccccattgcacaaatgttggtgcctggcatttaaagaagcagaccaggcgcggtggctcacacctgtaatccca

SEQ ID NO: 42109 - DNA, 201 bp, Homo sapiens
gtggacagttagaccaagaggagcccggaagcagacccaggctttggcatcaggagctttggcatctggcagaactcctgtccctggggttggggtgtgargaggtgtgcagggtagtagcgtgaataactgctttgaggagctgaagctagaaggtgcccagagctgtgttaggtgtcagagaagttgtttgtgaggcat

SEQ ID NO: 42110 - DNA, 201 bp, Homo sapiens
ctcaacattcaccaagtcatgtttgtttttcaatgctccagctcttcctcctccaggaagcctgcccagtctacccacagccaggtctacccacagtcagmccttcctcttcttagaagcctgcccactctaaccgcagccagatcttcctctgtctaggaagcctgcctggttcacccacagccgtgtcttcttcctcta

SEQ ID NO: 42111 - DNA, 201 bp, Homo sapiens
tccctggggagagggcgtaattattttatgttcatgatgcggcagtcaccaccgtgtttctgaaaggtttgttctgcactctgggctgccagttgacattyggtttttcatggtgatctggtgggtcctggggtgtgatggtggccgggcccagctgcttcagccctcagcctgtccatcccccacccacacccagaactg

SEQ ID NO: 42112 - DNA, 201 bp, Homo sapiens
cattcagtgtcaccacagtctctcagcactcccagcctggacctcaccggttgaggggccggcctagatcttctttgcgcaatggcacgatctcagctcaytgcaacctccacctcccgagttcaagtgattctcctgcctcagcctcctgagtagctgtgattacaggcgtgcactaccacacctggctaggttttgtat

SEQ ID NO: 42113 - DNA, 201 bp, Homo sapiens
ggttagaaagtcccaggagtgggcggccatgcatccaggcctgccacaggagcccgcctgccctcctccctgaagtcagggctctggaagcccttcccttkgccatgccctgtgggacagtgtccaagctctggagtaggactgaagacccctgggctctagtcctggggccaccaacttgctgttgccctttgcagtgac

SEQ ID NO: 42114 - DNA, 201 bp, Homo sapiens
cctcctgagactcgacttcgttgcagtttcagcaatgcaggtggccccgtgcggacatccaggcagggttgagggaaggcacatccctcccaggcccaggktacccatgtgggtggcagagcgggctctggggatgaccctctggcccctgaggatctggggccagaaagacactggcttagcatgggaggagtccccggc

SEQ ID NO: 42115 - DNA, 201 bp, Homo sapiens
caggaaggtcacggctggttttggggaaattgcaggccgtctggccaggctgagggccccatgtggacggggccagcgatgaggcaggtggaatggtgccmgcggggaggtccctgatgccacttgaggccgatgtttgggcagagggacacactggaggctgtcacgggggacgaggcaggatgtgactcattcagaaac

SEQ ID NO: 42116 - DNA, 201 bp, Homo sapiens
gctgaccagcgcctctactggaccgacctggacaccaacatgatcgagtcgtccaacatgctgggtgagggccgggctggggccttctggtcatggagggyggggcagccgggcgttggccacctcccagcctcgccgcacgtaccctgtggcctgcaagttccccaacctggcaggagctgtggccacacccacgactgc

SEQ ID NO: 42117 - DNA, 201 bp, Homo sapiens
gggtgtggccgcctgagccggcaggtcagaggtctctctcaggaggcctgagatctgaaggactaaaagagggaaaggcgagaaggaacagcacgtgcagyggctttgaggcaggagcatgctggtgttgggaccgacttcacgggctgtgtgacctgtgtagtcatatgaggtgagctctgttgttgacctgaaattcct

SEQ ID NO: 42118 - DNA, 201 bp, Homo sapiens
tccctgtgccctttggcaccttcgtgccaggtcaggcttgaggcctgaaggcagtggtgggggccaccaagggtcgcctcctctgctgggcaagttcccartctgacgggcctgtgccgtgggccccagctgtgggggcgctgttgatgcgcagccaggcctcgccgccagagcccgcacgcttccattccgctgacttca

SEQ ID NO: 42119 - DNA, 201 bp, Homo sapiens
tctggctgcacatggcgtggcctcttctgtaccattgaaggacacttcagttggatttagggcctaccctcacccattgtggtcgtatcttgatccttcakgacatttgtaaagaccctgcttccaaataagctcacattctgaggttctggggtgagcgggaatttggagagcattgttcaactagtatagaatgtgacc

SEQ ID NO: 42120 - DNA, 201 bp, Homo sapiens
tgggcagggccctgcgccctctgaaggctctgagggaacctttgggcttctggtggctccaggcaccccttgacttgtggtcctgtcactccagtctctcygtctggctgcacatggcgtggcctcttctgtaccattgaaggacacttcagttggatttagggcctaccctcacccattgtggtcgtatcttgatccttc

SEQ ID NO: 42121 - DNA, 201 bp, Homo sapiens
gagactcagtttcctcattggtaggagtgacggccacagtggtgcggcctctgcagcacacggggggctcggtgggcggaagccccgggtctataaggcgrctgtgcaggagccagccgagctggtctcccaacagccagggctccggggtccttagcagctgtggggggcctgcacctgtttcccatggctgctgtcaga

SEQ ID NO: 42122 - DNA, 201 bp, Homo sapiens
aaaaaaaaagaaaagaaaagaaaaacgagaaaaacaaacacaaaattagtagaagaaaagaaataataaagatcagaacaggccaggctcatgggcacagkggctcaactcctacctgctcaggagtttgagaccagtctggccaacatggcaaaaccccatctctcctaaaaatatgaaaaaaaaaaaataggctggatg

SEQ ID NO: 42123 - DNA, 201 bp, Homo sapiens
aagaaaaaaaagagtggatgaatggatcaaaaaacaagacccaaccatctcttgcatacaagaaacacactttacctataaaaacacactaggccaggtgyggtggctcacacctgtaatcccagccctttgggaggcctgactggcagatcacctgaggccaggagtttcagaccagcttgaccgacatggcaaaacccc

SEQ ID NO: 42124 - DNA, 201 bp, Homo sapiens
atcgaagtggcgcggctggacgggcagttccggcaagtcctcgtgtggagggacttggacaacccgaggtcgctggccctggatcccaccaaggggtaagygtttgcctgtcccgtgcgtccttgtgttcacctcgtatgagacagtgcgggggtgccaactgggcaaggtggcaggctgtccgtgtggccctcagtgatt

SEQ ID NO: 42125 - DNA, 201 bp, Homo sapiens
aaaaaaaaaaagatgctggttcctaaaatgtggcccttttcctcctcacctgctgccagaccatcagccgcgccttcatgaacgggagctcggtggagcaygtggtggagtttggccttgactaccccgagggcatggccgttgactggatgggcaagaacctctactgggccgacactgggaccaacagaatcgaagtgg

SEQ ID NO: 42126 - DNA, 201 bp, Homo sapiens
aggaggtgccagctctgactcgtgctggaaggcatcccctggtggctggagcgagagtgagctgtggggtgggtggcgtgggggcaggagccctctccacrgttattaccgggatcctggcgacagaaagcagcagcggggacacctcacttgtgggggtaaggagtggcgagatttgggatctgttctgaagagaaaaga

SEQ ID NO: 42127 - DNA, 201 bp, Homo sapiens
cgccaagcctggctgattattcactggatgaggagacaggcccagagaggggcaggaacctgcccgaggtcacccagcaggccccagaggtttcggtctcrgattctccctgctcatccctggatgtagtgctgctgtggatgtggttctgtgctgggggctgtggagagcagggggcttgtgccaggaccccagtgaggg

SEQ ID NO: 42128 - DNA, 201 bp, Homo sapiens
aagagcacagacccatttatcctctgcctggtttcccccagtgctgcctgccatcttgcatgacttccattcctatcataagcaagacactgataacgatyctttcaccttattcagattgacataagtgttttttgtttgttcttgagacaaacttcctctgtcacccagtgggagtgcagtggcacaatcacagctcac

SEQ ID NO: 42129 - DNA, 201 bp, Homo sapiens
gtcatacaggatagttccactgccctgattttctgtgctccactcattcatccctctcctctccaactcctggcaaccactgatgctttactgtctctgtrtatttgctttttccagagtgtttagaactggactcatacagattggctctttcacctactaacatgcatttaagtttcctccatgtcttttcatggcttg

SEQ ID NO: 42130 - DNA, 201 bp, Homo sapiens
accccgtacagcagggatgccaaacccgcgctgagtccctctcaacttctgctttgaagcccagtcacgccattgcctgggttttgctgggcggggctgcrtgtgatgttctcctctgtccctcccccagagccgcccacctgctccccggaccagtttgcatgtgccacaggggagatcgactgtatccccggggcctgg

SEQ ID NO: 42131 - DNA, 201 bp, Homo sapiens
aaagaggtctgtctggctcatggttctgtaggcagcaccagtatggcacccgcatctgctcagcttctagtgaggtctcaggaagctttgactcatggtgraagtcgaagcgggagcaggtgcatcacatggtgagagagggagcaacggagagagagagagagcgcctctccctcttgccctcaccttgagaggagatgc

SEQ ID NO: 42132 - DNA, 201 bp, Homo sapiens
gagccgcagcgatggaggatgtgcgggtgcagcaccccgtacagcagggatgccaaacccgcgctgagtccctctcaacttctgctttgaagcccagtcaygccattgcctgggttttgctgggcggggctgcgtgtgatgttctcctctgtccctcccccagagccgcccacctgctccccggaccagtttgcatgtgcc

SEQ ID NO: 42133 - DNA, 201 bp, Homo sapiens
gccctccatggccattgggttcccgccagcccgtggtggaggggcctaatccccatgccactgatgaggggaggtattctgggtgctagtgggcaggtgcygggcccagccctgcctccctctgctctgccaaccacactaggctgcctccccagacaagctcagcgggcactgcatgttgggttcagaaatcagcagaac

SEQ ID NO: 42134 - DNA, 201 bp, Homo sapiens
acaccggcagctgggccccacccccagagcggtgattcaggagctccagggcggggctgaagacttgggtttctaacaagcaccccagtggtccggtgctsctgctgggtccatgcgtagaaagccctggagacctggagggagccctttgttcccctggcttcagtttcctcatctgtagaatggaacggtccatctggg

SEQ ID NO: 42135 - DNA, 201 bp, Homo sapiens
caggagcccaggtgctccaggccccatttgccccaggccaaatcactcgggaacttggatgcagctgtctttcagggtaacccaaaggaaccagatccccscaggcagtaggcttctgggctgtcctctcctcctacgtcagctcagtaagagcccttcgaagggatgctgtgtcggaggccccaaaagcccaggctcatc

SEQ ID NO: 42136 - DNA, 201 bp, Homo sapiens
tcttctgggttggggctggaggtggagcggcacacaggagccgcagcgatggaggatgtgcgggtgcagcaccccgtacagcagggatgccaaacccgcgmtgagtccctctcaacttctgctttgaagcccagtcacgccattgcctgggttttgctgggcggggctgcgtgtgatgttctcctctgtccctcccccaga

SEQ ID NO: 42137 - DNA, 201 bp, Homo sapiens
agtgaatgtgtattctcccagcctctcttctgggttggggctggaggtggagcggcacacaggagccgcagcgatggaggatgtgcgggtgcagcaccccrtacagcagggatgccaaacccgcgctgagtccctctcaacttctgctttgaagcccagtcacgccattgcctgggttttgctgggcggggctgcgtgtga

SEQ ID NO: 42138 - DNA, 201 bp, Homo sapiens
cagacatctgtcgttggctcctctcagccgtcgtgggctgaccctggcacgtcctcctgtggctgagcccagtggggacagctgcttccttttattaccckagaactctcgtctttgatcaggccccctcccctatgccacacagtccctgtcactcgggtgagcccagtagtcatggggaaggcctgcgggttccaaaca

SEQ ID NO: 42139 - DNA, 201 bp, Homo sapiens
ccgtgtcagtaggaagactctgtaggctgccaagaggaataagtgggaggatcctcccagagaggccgggcctgcaggagggccagttctcatgagttctyatttggcccctaccctccaggctgtggttctgaggtgggagacagagcctgacctctgtttgtcttgttttgtctttgcagcagcccacccatgtgcccg

SEQ ID NO: 42140 - DNA, 201 bp, Homo sapiens
gcttccctgacctttgaaatgtggtccctgctcgggaaacttgcctggacctcagtcaattatggttttcctctgggctgtgtgtgtgtgtgtgtgtgtgkgtgtttgagtgtgcaagtgtgtgcattaggattagagagaattcgatggggggccaggggccaacaggaatgggggtggctgagctgagaggccaagggc

SEQ ID NO: 42141 - DNA, 201 bp, Homo sapiens
gtcagcccttcctcttcttagaagcctgcccactctaaccgcagccagatcttcctctgtctaggaagcctgcctggttcacccacagccgtgtcttcttyctctaggaagcctgcctggtccacccatagtcaggtctacctcctccaagaagcctgcctgatccacccacagccagatcttcctcctccaagaagcctg

SEQ ID NO: 42142 - DNA, 201 bp, Homo sapiens
gtgggcgttcctgggagtggcagacatgcacccactagagatagatctgaatcaccccctcacattctcctaatagtgccaagaacccacagcagagtgcrgggtgtactgagtttgtgctgagcaggggtgcctgaatcccggattgaagaaagtgttctacgcccgattaaaccaactgggaatccaggcaaaagaaga

SEQ ID NO: 42143 - DNA, 201 bp, Homo sapiens
ggtctcacacacaactctcttcccagcgaaggcccctcctgccctcaggcctcagtgctgcttccgtctcggaaggccccaggagctcctgcatcctgggsgtgattcctgtgtgcctgcagaccccctcgcggctgccatctcatcctttggtgcacctgttggccagacctcctggtagcgggtgctgcactcccctga

SEQ ID NO: 42144 - DNA, 201 bp, Homo sapiens
ctttctccccaccctccaccagtggcaaagccagccccttcagggcgcacggtgtctgcccccaaggagggcccattccgttggggttaatgttggccacmtctttctgtttgtctctggcagaaatcaccaagccgccctcagacgacagcccggcccacagcagtgccatcgggcccgtcattggcatcatcctctctc

SEQ ID NO: 42145 - DNA, 201 bp, Homo sapiens
cctggcccatccagacctatatttctgccgtcctgcaggtgatcaatgttgatgggacgaagaggcggaccctcctggaggacaagctcccgcacattttygggttcacgctgctgggggacttcatctactggactgactggcagcgccgcagcatcgagcgggtgcacaaggtcaaggccagccgggacgtcatcattg

SEQ ID NO: 42146 - DNA, 201 bp, Homo sapiens
gtgtcggaggacctggacgagccccgagccatcgcactgcaccccgtgatggggtaagacgggcgggggctggggcctggagccagggccaggccaagcamaggcgagagggagattgacctggacctgtcattctgggacactgtcttgcatcagaacccggaggagggcttgttaaaacaccggcagctgggccccacc

SEQ ID NO: 42147 - DNA, 201 bp, Homo sapiens
cgaggtgacgcgcctcaacggcacctcccgcaagatcctggtgtcggaggacctggacgagccccgagccatcgcactgcaccccgtgatggggtaagacrggcgggggctggggcctggagccagggccaggccaagcacaggcgagagggagattgacctggacctgtcattctgggacactgtcttgcatcagaaccc

SEQ ID NO: 42148 - DNA, 201 bp, Homo sapiens
gagttcatccggccctgacccagcgggaaatgagttcacagagaagcgggagaactttgccccaggccctgccgttgctcataactgccccaggtccttamatttgctccaggtcctgccccaggccctgcagttgctcataactgccccaggtccttatatttgctccaggtcctgccccaggtcctgcagttgctctgt

SEQ ID NO: 42149 - DNA, 201 bp, Homo sapiens
tggaaatgtaatctggtagcaggaggcctgtggaagcttgcctttaatggccttgtgtctctttcatcctgtcctgagagccggagaacttggatgttgcrcctaactcaaccttcctgttaacatacagttctgcaggctcatggatcatcagaaccacgtcctatctcacgcggctgtatgcttccgttggttcaggtg

SEQ ID NO: 42150 - DNA, 201 bp, Homo sapiens
ctgttcattgcacaccggagcatccaggcatgggtggagagctcagacttccaggcacggtcgcaggggctggtctaaccatgttcccgcccgcctgctcrtcagaaccgcctgttgggagctgttatcatgataccatacctgggccctgggctatccgattctgacttaattgctccaggttggggccaggccgttgtt

SEQ ID NO: 42151 - DNA, 201 bp, Homo sapiens
aaaggttgcagtgagccaagatcacgccattgcactctagtctgggcaacaagagtgaaactccgtctcaaaaaaaataaataaataaaaaataaaaatartgacctctggccaggtgtggcagctcatacccgtaatcccagcactttggaaggaaggccgagatgggcagattgctttagcacaggagtttgagaccag

SEQ ID NO: 42152 - DNA, 201 bp, Homo sapiens
gaattaaaaaatatattaaaaactatatatttaccagtattacaatatattacccagagacttgtctccctaatgaggccacctttactttttcaatcttygtctccgctggtgctttctcataactgccattcattctagtagaaatcatggttcacggttatgctgggtgtgtggtttttggtgttgacatgtcgaacg

SEQ ID NO: 42153 - DNA, 201 bp, Homo sapiens
gtattagagcaactgagagctgctcattgcaagcctgatgttttcccagttggccgggtccaccgggtgccctgggattctgggatctgggtggaaagtarggggcttgggggagtgtcctgggttctggaatccaggtggcaagtggtgaggttcagggagtggcttctgagccaccataggggtctctgtgggaggctc

SEQ ID NO: 42154 - DNA, 201 bp, Homo sapiens
ccctcccgtcgggttctgctcctgccacgttctcccctctccccaccaaaggctgggttttctttgtcagggctcctttcccctttggagaagagggggcygtagggccttggtgcgaggccctccagtgacaggatcccccatcacccagagttccacaggccctggtagggaggagggggagcagaagaggaggtgcca

SEQ ID NO: 42155 - DNA, 201 bp, Homo sapiens
ctgacgcccagaggcttggctcggctcaggcattcttggaaatatctggctccaggaaaggcagaggcctcctgagtcggcccagagggaacctgccccargtctgggggaggcctgacccagcagagtggcttttgccgatgggttgggccggtcaagatgtgctgaaagttgtcctcagaaggccactttgggattcct

SEQ ID NO: 42156 - DNA, 201 bp, Homo sapiens
tgccagttccttccaaaggaaagccagctccccaggtggtgggagagtgatgtggcttcctcttaaacttaggaattgagtgtgtggttgcttctaagtgycttagaagccggagcggctcctggaaagagcctgcctgccacagcgggccttaccctggctgtgcccacagatgtccctggggcctgccgctcctgcccg

SEQ ID NO: 42157 - DNA, 201 bp, Homo sapiens
tggaccagtttctcaaaaggcctgtgaccccaagaaccaaggaatttcagcctgggtggatcacaccttcactggtgagtgggacaagctgggggccctcrccacaggagcagccagggcatggggcacagttggcctcattcacaaaatgggagtataagtgatccctgctctggcggccaggacgatgagtgggaacac

SEQ ID NO: 42158 - DNA, 201 bp, Homo sapiens
cagggcatggggcacagttggcctcattcacaaaatgggagtataagtgatccctgctctggcggccaggacgatgagtgggaacacaccgtgtgggggcygcctggcctgggtgtgccgcgggtgtccttgttggtgatggttccacctgcttgtgccaccagtgccctctgggtctcacacacaactctcttcccagcg

SEQ ID NO: 42159 - DNA, 201 bp, Homo sapiens
ccctcctcggcctcccaaagtgttgggattgcaggcgtgagccactgcacccagcctgacctagatcttctaggttagaaagtcccaggagtgggcggccrtgcatccaggcctgccacaggagcccgcctgccctcctccctgaagtcagggctctggaagcccttcccttggccatgccctgtgggacagtgtccaagc

SEQ ID NO: 42160 - DNA, 201 bp, Homo sapiens
tatgagtgtgcgcatgtgactgtgtgtgcacgtgtatgtgcccgtgtgagcgagtatgtgcgcgagagtgtctgcatctgaaccagtctgtgtgtaagtayggggtaccagcaggggtgggacacggtggaatttatcgccaaagtattttgagtccctgaggtcaggccagagcagcctcgtgcccccactacctgagaa

SEQ ID NO: 42161 - DNA, 201 bp, Homo sapiens
agaagtgcccccggcctcccaggggtgctgtgctgggcaaccactcatccctggagcccctcgtatgccctcgctgccctccgagtgggctagccaccccygcagctgccggggagccagctgacctccggggcagcctctgttccgcttggtgaactgttgccctctcagccctctccccctgcactgtggctccaggag

SEQ ID NO: 42162 - DNA, 201 bp, Homo sapiens
gatagcagcttgctagaagccctctcccagggccggcctgcggttgctcaccagcggctgccatggccatcgtgtcgccaggacctgcgctcctcctgtcmttgcgttccctcccagcgtgggtcgctgcagctccctcacctcccaaccaggcatccactgcatttgtgagcccttgcgcctggtcctgctccccacgca

SEQ ID NO: 42163 - DNA, 201 bp, Homo sapiens
tgtgactcagacgttttccttctttctggtgtttcttgggacagactcctgcaggggtgatccctggggagagggcgtaattattttatgttcatgatgcrgcagtcaccaccgtgtttctgaaaggtttgttctgcactctgggctgccagttgacattcggtttttcatggtgatctggtgggtcctggggtgtgatgg

SEQ ID NO: 42164 - DNA, 201 bp, Homo sapiens
tggagtctgcagcatggggcacaacaggttcattagtgtagaattccaggacaggcctggctcctaagcagccttcttttacaaaaactgcagagcccgcytgtatcctagcactttgggaggccgaagtgggtggatcacgaggtcaggagttcaagaccagcctggccaacatggtgaaaccccatctctactaaatat

SEQ ID NO: 42165 - DNA, 201 bp, Homo sapiens
tctcaaaaaataaaaaatagaaaaacaagtgctgtagcggaagtgagcactttgcggagtcaggcttgtgtggcctgttccacaaatgatgtgctcacggyggcctcaggcccacctggagtctgcagcatggggcacaacaggttcattagtgtagaattccaggacaggcctggctcctaagcagccttcttttacaaa

SEQ ID NO: 42166 - DNA, 201 bp, Homo sapiens
tccatgcattcatcccaccttttcttcttgggtggttttgtgtgtgcgtgtgtgtgtgtatgtgtgtatatcctgcccaactaacctgcaggctccttgamtctggagccctgatgtcttctgtttctctgtctcttccatcatgctggcactggacgcaggatcattcctgactgattaatctctagcttgtgtccaggc

SEQ ID NO: 42167 - DNA, 201 bp, Homo sapiens
aaacaaaaaacaaacaaacaaagcgtcatttatccagcacccctggggaaccatgctacctggtgttttatggtacctggcaaggtgcaggtgaagttgckgctcttgggcattgaacccgtcttgtttggggcagctcaggccccaggcagggtccgggttggctctcgttggtgtggccctggcccatccagacctata

SEQ ID NO: 42168 - DNA, 201 bp, Homo sapiens
tgcagtggttcgggagaggacacctgcttgcctggtctgttccaaatcttgcttctcatcccagcacaggtagggggtgctatgggaaagggatcctcagytggccctgtcactgctctatcagctggggacgtggcatcctagtgaaaacatcatggccgggcgcggtggctcacgcctggaatcccagcactttgggag

SEQ ID NO: 42169 - DNA, 201 bp, Homo sapiens
tcttgttgatcttgtcacagcccctctggaaggtggagatggtactcgctcaggaacgataccactcaaggaagcatggccccctggatggggtggccctkggtgcacctgaggctcctgaggctgcagagcaccatggtgggggaggaggcggctgtgtgtctgtcatttgcctcttctgctgaatggagacccccagag

SEQ ID NO: 42170 - DNA, 201 bp, Homo sapiens
gagccaggacaggcacgttctctgcatcttgtcccctgacgcccagaggcttggctcggctcaggcattcttggaaatatctggctccaggaaaggcagargcctcctgagtcggcccagagggaacctgccccaggtctgggggaggcctgacccagcagagtggcttttgccgatgggttgggccggtcaagatgtgct

SEQ ID NO: 42171 - DNA, 201 bp, Homo sapiens
tatttctgaactctgttttggctctgttccctcccaggagccaggacaggcacgttctctgcatcttgtcccctgacgcccagaggcttggctcggctcargcattcttggaaatatctggctccaggaaaggcagaggcctcctgagtcggcccagagggaacctgccccaggtctgggggaggcctgacccagcagagt

SEQ ID NO: 42172 - DNA, 201 bp, Homo sapiens
cctgggtgacagagcaagaacctatctcttaaaaatatatatttaaaaagtattgggtgtggtggctcacgcctgtggtcccagctacttaggcatctgargtgggaggatggcttgagcccaggagtttgaggttgcagcgagccaagatcgtgtcactacactctagcctgggtgacagagcccagaccctgcctcttt

SEQ ID NO: 42173 - DNA, 201 bp, Homo sapiens
gcattccagcctgggtgacagagcaagaacctatctcttaaaaatatatatttaaaaagtattgggtgtggtggctcacgcctgtggtcccagctacttargcatctgaggtgggaggatggcttgagcccaggagtttgaggttgcagcgagccaagatcgtgtcactacactctagcctgggtgacagagcccagaccc

SEQ ID NO: 42174 - DNA, 201 bp, Homo sapiens
tcacaccatgctcaagctgagtgggttttacattttttaattacttgaaaaaaaaaaagccaaaggaggtttcatgacccatgaaaattatatggaattcmaaaaaaaaaaattatatggaattcaaatttcagtgtccataaataatttcttgagacagggtctcgctctgtcacccaggctggagtgcagtgctatggc

SEQ ID NO: 42175 - DNA, 201 bp, Homo sapiens
aatactgggatttgactttcaggctaaacttgagaagtgtggcctctgctgtcctgccagagctctccagccagtgcccagggctctccagccagtgcccrggggtctccaccagtgcccgggggtctccgccagtgccaggggtctccgccagtgcccaggggtctccgccagtgctcaggagtcttggtttctttgtct

SEQ ID NO: 42176 - DNA, 201 bp, Homo sapiens
tgtcgttataataaaaatgccctttcctcgccaccagaagtccagtctccatgcctacgtggttttgtctttttacttctttatggcttttgctatgttgkttgggaagtgctcagtgctaggttgggaggtgatcagtcgggaggtgctaggtgatttgttgggaggtgcatgatgctcagttgggaggtgctaggtgct

SEQ ID NO: 42177 - DNA, 201 bp, Homo sapiens
gcatcatctctgcgagccaactgtccctgtttggctctggcttttcttaactatttgaaatggttcctttacatgcttgcctctgaattctctcccagaasccctccccaggatcacacctgtggctgttcactcccacccctgcccctggggcaaagttgaccttagtgttgattcctgggcctctccccacaccttccc

SEQ ID NO: 42178 - DNA, 201 bp, Homo sapiens
ttgggattccttcctccagtattagagcaactgagagctgctcattgcaagcctgatgttttcccagttggccgggtccaccgggtgccctgggattctgsgatctgggtggaaagtagggggcttgggggagtgtcctgggttctggaatccaggtggcaagtggtgaggttcagggagtggcttctgagccaccatagg

SEQ ID NO: 42179 - DNA, 201 bp, Homo sapiens
gcaggaccttgaccagccgagggccatcgccttggaccccgctcacgggtaaaccctgctgcgactccacctgggtccagggggcggggagtgtcaccatytctctctcgaatttgcatgagcccaagttgtttttcagaaaaagggtgtgactctgaaaatgaacccgtgggggggttggctcaggcctgtaaccccagc

SEQ ID NO: 42180 - DNA, 201 bp, Homo sapiens
cccctgttatttctgaactctgttttggctctgttccctcccaggagccaggacaggcacgttctctgcatcttgtcccctgacgcccagaggcttggctyggctcaggcattcttggaaatatctggctccaggaaaggcagaggcctcctgagtcggcccagagggaacctgccccaggtctgggggaggcctgaccca

SEQ ID NO: 42181 - DNA, 201 bp, Homo sapiens
tgacatgctacagcctggatgaacctcgaaaacatggtgccaagtcaaagaagacagacatcagaggctgtatattgtgattccgtttatatgagatgttkagaatgtgtgtagttaagtccatcaaaagtgtttgccggggctgggggcggggactggggagtgactgctgccgggtgtggggtttgcctgtggggcaat

SEQ ID NO: 42182 - DNA, 201 bp, Homo sapiens
cggccattggagcgtggggggcagcctttgcagaggggtgtcctttgggggctccgaggagctggggagggtgttctagtcataggagcttggtgggaggragcagatggggaggatgtcactccatgggcaggtcacatctgggtgtgagggtggccaggaaggtcacggctggttttggggaaattgcaggccgtctgg

SEQ ID NO: 42183 - DNA, 201 bp, Homo sapiens
atcgaggctgcagtgagctgtgatcccaccactgcactccagcctgggcgacaaagtgaggagatcctgtctcaaaaaaaaaaaagagctcagctttcaaratttgttattgttgaaggaattacttccccttgagattccatagttatgttccttttttttttttttttttttaattgagatggagtctcccttgttgcc

SEQ ID NO: 42184 - DNA, 201 bp, Homo sapiens
cccgaagtactggaattacaggtgcaagccatcgtgcctggccatgttttgttgtttttaaatagacttaattttttcaaacagttgtaggttcacagcawaattgatgagcagcaggtactgagttcctatacatccctgtcctcacacccacacagccttcccaactgtcagcatcctgtgcagggtggtacatttgtt

SEQ ID NO: 42185 - DNA, 201 bp, Homo sapiens
cacactggaggctgtcacgggggacgaggcaggatgtgactcattcagaaacaagtgacggtcctcttctggaaccttctctcactctgtcctggttttcycagtccacactcgctgtgaggaggacaatggcggctgctcccacctgtgcctgctgtccccaagcgagcctttctacacatgcgcctgccccacgggtgt

SEQ ID NO: 42186 - DNA, 201 bp, Homo sapiens
ctgctgtccattgaacacctactgtgtgcctgggttcagaaaggcaccctgtgctggcttttaaagaattaggccgcctgcctaaaggggggagtgtggcyttctttttcatttaagtcaccaactgttttatacatccacgcccctaaattcttcagttttaggcaaagatgagagggctgcccaggcgtcatttgctca

SEQ ID NO: 42187 - DNA, 201 bp, Homo sapiens
ctaaacaacaaaaataatctggccgcctgccagctgggaagccactgtggccaggctgtttatggccttgggatctgcgcagtggacagtggcctgcaccrtgaccccgttcatcctgcgtgccccaggcccaggaggtggctcaagccctctgcctcctgtaagggcacctgagaaggaggccctggagctgggagcaga

SEQ ID NO: 42188 - DNA, 201 bp, Homo sapiens
ggagggtattaactgtgatgaccttctgagttcctgcacactggtgacccattggcagggtctcctcctggctctggcaggggtggctcaggccgctgggygacggtgtgctggccagatagttcctggggctgcaggtggcttctttcgccccatccctcccatcccctttcattcttcctgtcaacacatctcagaccc

SEQ ID NO: 42189 - DNA, 201 bp, Homo sapiens
aggagattggttcaaacaatgtgtgtaatgttgtgtctgagtgtttttcatttatcgttcatgcaaattccgacatcattcactcttctccagagtgtgcygttttcctgcctgtgtcatcacccgtcaccttgaatgccctcgtttaggtaaaataagtacattttattcaaaaatatttgaggacatttgggttgtctc

SEQ ID NO: 42190 - DNA, 201 bp, Homo sapiens
ccaggcgtggtggcgggcacctgtaatcccagctactcaggaggctgaggcaggagaatggcgtgaacctgggaggcagaggttacagtgagtcgagatcrcgccactgcactccagcctgggcaataagagtgaagcttcgtctcaaaaacaaagtcacacacgcttcttgtacgagggtcatttggccgaggggccaga

SEQ ID NO: 42191 - DNA, 201 bp, Homo sapiens
ctggaggccagctgtgggcaccagccttggcagggctgtggcggagcccaggctgctggtactctctctgcagctgctccctgctggcctggctggacagmgtccccaccaccactggggtcacctctgtgctggtcacagctcactcagaccttcaggcaaatgggttggatcctgcctctctcccaggtgtctcagtct

SEQ ID NO: 42192 - DNA, 201 bp, Homo sapiens
aaccacgagtctgtgccagcccagccgactgtcggggggtttggcagcctcctttcccatggtggtaatttgcagggtcatggctcaggggcaccgcagtytgcacctccgtccctggatccgtgcgtttgctgtgtggcctcgcagtaaatgcttccatctgcgtggcatttatggaccctggggcttggtactgtctgt

SEQ ID NO: 42193 - DNA, 201 bp, Homo sapiens
gctctgtcacccaggctggagtgcagtgctatggcatggctcgctgtacccttgacctcccaggctcaagcgatcctcctgtctcagcctcctgagtagckgggactacgggtgtgtgccaccaagcccggctaatttttttttaattttagtaaagacagggtctttctatgttgcccaggcttttctggaactccatct

SEQ ID NO: 42194 - DNA, 201 bp, Homo sapiens
tcaagcgagccaaggacgacgggacccaggcaggtgccctgtgggaagggtgcggggtgtgcttcccaaggcgctcctcttgctggtttccaggctgctgyccctgtccttagcagagggaggaaacagaggatggctctgggtgaatgatgacttgggcttcgattatgtagtcacagggtatgaccctgagatgcgtgg

SEQ ID NO: 42195 - DNA, 201 bp, Homo sapiens
gggttcagcgacatgtccgaatgtcccgaggcctctgaggttgttttcttttgccgcagaacaaatcaccacgaacagcgttttaagacaacaccaactctttttttttttttttttttgagtcaggatcttgctctgttgcccaggctggggtgccctggtgcaaacacagttcactgcagcctcgacctctgggcttaa

SEQ ID NO: 42196 - DNA, 201 bp, Homo sapiens
actccggggcttggagcaggagtcaggaggggctcctgtctttccttgaaacgttggatgccgggatcctggaacagtctctgcattcctcctggcgagarccagagcctgggcacaggggaccatctgttgtttgaaggctgcagcctggcagggcactcaggagatctggcagttggctgcagggccaggtctaggggc

SEQ ID NO: 42197 - DNA, 201 bp, Homo sapiens
agtgcccccgggtctcaggcctcagaaccagggtttcccttcatctcggtggcctgggagcatctgggcagttgagcaaagagggcgattcacttgaaggrtgtgtctggccctgcctaggagccccccggcacggtgctggggcctgaagctgccctcgggtggtggagaggagggagcgatgaagtggcgtcgagctgg

SEQ ID NO: 42198 - DNA, 201 bp, Homo sapiens
cctgggagcatctgggcagttgagcaaagagggcgattcacttgaaggatgtgtctggccctgcctaggagccccccggcacggtgctggggcctgaagcygccctcgggtggtggagaggagggagcgatgaagtggcgtcgagctgggcaggaagggtgagcccctgcaaggtgggcatgctggggacgctgagcagca

SEQ ID NO: 42199 - DNA, 201 bp, Homo sapiens
ccaacaccaacatttaccgacaccaacatttaccaacactgaaatttaccgacaccgacatttaccgacaccgtttaccaacaccgacgtttaccgacacygacatttaccgacactgatatttaccaacactgacatctactgacgctggcatctactgacaccgatgccagcatctaccaacaccgacatttaccaaca

SEQ ID NO: 42200 - DNA, 201 bp, Homo sapiens
gcgagtcatggctgcttctcaggtccttgcccagcgccaggagcaaaccctcctggcactttgttcaggggtggatgcgccagtgttcctgctgtggaccsccatctcacatgagggtcttgggcctgcaggctcgttcaggaaacacccgctgagtatgcagtgtgtgccagctgtgtcccaggcaatggcggggacagt

SEQ ID NO: 42201 - DNA, 201 bp, Homo sapiens
ctttgttcaggggtggatgcgccagtgttcctgctgtggacccccatctcacatgagggtcttgggcctgcaggctcgttcaggaaacacccgctgagtaygcagtgtgtgccagctgtgtcccaggcaatggcggggacagtggctgctgctggggttgtggtggcttctggggactctggggacagctgaggtgcaagg

SEQ ID NO: 42202 - DNA, 201 bp, Homo sapiens
gatcgagtcgtccaacatgctgggtgagggccgggctggggccttctggtcatggagggcggggcagccgggcgttggccacctcccagcctcgccgcacrtaccctgtggcctgcaagttccccaacctggcaggagctgtggccacacccacgactgcccagcagcctcaccctctgctgtgggagttgtccccgtcca

SEQ ID NO: 42203 - DNA, 201 bp, Homo sapiens
aaataggaggagagacaagtgggcagttcagactgatggtatgggcacagtagagactggtgcagacaggctggcctgtgatgtcaagcaacttctgtaaytgtttccggcatccatttgtgtgtcaatttccgtgtcagtaggaagactctgtaggctgccaagaggaataagtgggaggatcctcccagagaggccggg

SEQ ID NO: 42204 - DNA, 201 bp, Homo sapiens
agaaatgtgaactgtgatggggtgggcagggctgggagaactttgtacagtggagaaatatttataaacttaattttgtaaaacagaactgccattctttygtgccctgtgtgcatttgagttgtgtgtccccgtggagggaatgccgacccccggaccaccatgagagtcctcctgcacccgggcgtccctctgtccggc

SEQ ID NO: 42205 - DNA, 201 bp, Homo sapiens
ggcgtgagccaccatgcccagcctattctactgtttgtattacatagctttaaaagattttttatgactttaagtcacaagggttctttgtagaaaaaaawatatatataggaaagtataaaaagaaagtaaaaattgtccataacctctccagccagagacgaccgttgctgacacctcagcatattgcctttaagtctt

SEQ ID NO: 42206 - DNA, 201 bp, Homo sapiens
aggacagggaaagaagctttgcagctatgcagaggtgggcccacgggtgctccttcaccctcggggtgtcctgcgagaggcccttagaggccagatcatgstgtggagtctggttgtgatccacaaggcagcggaagcttctggaaggctttaggcaggagttacaggaaatgcaagctaaagccagatctttcctaggtg

SEQ ID NO: 42207 - DNA, 201 bp, Homo sapiens
agcagcatggccagtgctgtgcctgcatgtccccgtcccctgtgtcaggccaacaaaggggatgtggcttctctgcagaacaggacagggcccctgtagcmtctggaggacgatgtgggaggttttgggcatggcaggaagggtcacccatatctgggggaacagacgtaacagttggtaaacaaacaggtgctgtcaccg

SEQ ID NO: 42208 - DNA, 201 bp, Homo sapiens
caagtggttctcctgcctcagtatcccaagtagagctgggattacagggacccacccgccaccacacctggctaattttttcttttttttccgaaacggarttttggtctgtcgcccaggctggagtgcagtggtgcaatctcagctcactgcaacctctgtttcccaggttcaagggattctcttgcctcagcctccgga

SEQ ID NO: 42209 - DNA, 201 bp, Homo sapiens
cttggttggttgcatctcccagccggcacgagcaggtctcatgcctcctgcatcctggtggaggtggctggtgggaggatctggcctgagactctcctgcygaggttcaggaacgagccaggtgatggggacaagttggggagtcagtgctggcatctcagaggaggggcctgggccctgagaggagtgctgggagggcag

SEQ ID NO: 42210 - DNA, 201 bp, Homo sapiens
atctgtggtttgtgaggctttggaaacacttaatgcgctctccaaatggggagtctgttggggaggccctggcgggagccggggctacatccaggtcctcrgcttggtggccttgttcacttatttgttcaggaagcagcagggtgtgggctctgtgccaggccgccctggagggctgtcctggggccagtgaggtccaag

SEQ ID NO: 42211 - DNA, 201 bp, Homo sapiens
ccagcacccttgtccagatggggaccaggaggtgggtgaagatatttggggtctgagctctgtgctggttgcccccgagggggcctggagccctgagttasgagcagaacggggtgctggtcctatccgttccctacctgggtagtgggggctgccttcctgggttgggggtggggggagctccctgtgtccctaagccat

SEQ ID NO: 42212 - DNA, 201 bp, Homo sapiens
agggacactgttctctgtctctcgtgcttggggtctcttgctgtggaccccctgggaggttgtcctgggggtgcggggattgtgttttctgggtattttcktatttgctctattggagtgtatttaatttaatatatatattttaaacatcttttagtttgccttaatgtaattttttttgagatttaatttttttttttt

SEQ ID NO: 42213 - DNA, 201 bp, Homo sapiens
cccatgtctacaaaaaatttaaaaaattagctgagtatgattgcacactcctgtagtctcagctacttgaaaggctgaggtgggaaaatctattgagctcrggaggtcaaggctgcagtaagccatgatcacagcactgcaacagatctagcctgggcaacagagcgagaccctgtctcaaatacatacatacaagcatac

SEQ ID NO: 42214 - DNA, 201 bp, Homo sapiens
gtcctccaggctggagtgcagtggcgcgattgccatcttggttcactgcaacctctgcctcccgggttccagctgttctcctggctcagcctcccaagtarctgggactacaggcatgcgccaccacgcctggctaatttttgtatttttggtagagacagggtttcaccatgttggccaggctggtctcgaactcctgac

SEQ ID NO: 42215 - DNA, 201 bp, Homo sapiens
gattgccatcttggttcactgcaacctctgcctcccgggttccagctgttctcctggctcagcctcccaagtagctgggactacaggcatgcgccaccacrcctggctaatttttgtatttttggtagagacagggtttcaccatgttggccaggctggtctcgaactcctgacctcaagtgacctacccatctccgcctc

SEQ ID NO: 42216 - DNA, 201 bp, Homo sapiens
ccacgcctggctaatttttgtatttttggtagagacagggtttcaccatgttggccaggctggtctcgaactcctgacctcaagtgacctacccatctccrcctcccaaagtgctgggattacagacataagccacggtgccagcctgtttatctttttcttatagatttgtgggaggtctttatttggtatggactttaa

SEQ ID NO: 42217 - DNA, 201 bp, Homo sapiens
ggaatgctgctgtctccatctctgaagcatcagaacatattttaagatcagttatgtaaattcccacctcattgtccttttcaaaagacgtattggctctkcttgcacgtttatgcttttgtggtgaacttcagagccgtcctatcaggttccaccctttgatctcttgatctggggacggtaaatggtgatatccagcag

SEQ ID NO: 42218 - DNA, 201 bp, Homo sapiens
tgccctgtgggaagggtgcggggtgtgcttcccaaggcgctcctcttgctggtttccaggctgctgcccctgtccttagcagagggaggaaacagaggatrgctctgggtgaatgatgacttgggcttcgattatgtagtcacagggtatgaccctgagatgcgtggaaccccgagactgtgattatatgtagaaactggg

SEQ ID NO: 42219 - DNA, 201 bp, Homo sapiens
ctctccttgcagccatctgcctgcccaaccagttccggtgtgcgagcggccagtgtgtcctcatcaaacagcagtgcgactccttccccgactgtatcgayggctccgacgagctcatgtgtggtgagccagcttctggcacggggaaggggcgtccgggctgggttcccccaggaacgtggagtttaggggaggagacgt

SEQ ID NO: 42220 - DNA, 201 bp, Homo sapiens
tgcttcgccacagaggtttgatttactcctaagtaattggaagggatgccgagaataggttcctcatggtgggactagaggccctctgctgacctagttamcagagggctagggctgggtgtgctcagcccctgaaggttctaggcccatttgggacaccccgccagaacctgccacaacctgccatgtggtgacagctac

SEQ ID NO: 42221 - DNA, 201 bp, Homo sapiens
ccgacatttaccaacactgacatttaccaacactgacatttaccgacattgacatttactgacactgacatctactgacactggcatctactgacactgaygtttaccgacactagcatctactgacactgacatttaccaacaccagcatctaccaacaccgacatttaccaacactgacatttactgacactgatatct

SEQ ID NO: 42222 - DNA, 201 bp, Homo sapiens
gaatccaggcaactgagtctgagtggatggtgtgtgctttgtgttggagctggcccagggctggatgaaggcaacatttaattaatgaaaaccactacccmctcccggctgttacctcttgagcgcttttctatgaagcatcctgtttaagcctcgcactctgtgatgtggaggtgcagtaattatccccatttcacagac

SEQ ID NO: 42223 - DNA, 201 bp, Homo sapiens
tctcccagcctctgtcaaccactaatctactttctgtctctgggggttcacttcttctggacgttttgtgtgactggaatcctgcaatatgtggtccctgygtgtggcttctttccatagcattgtgttttccagattcacccacacattgtcgcacgttatcagaatctcattcctgactgggtgcagtgggttaggcct

SEQ ID NO: 42224 - DNA, 201 bp, Homo sapiens
cgcgatctcagctcattgcaacctctgcctcctgggttcaagtgattctcctgcctcagcctcccaagtagctggaattacaggagtgcgccaccaggccyggcatatttttctatttttagtagagagggggttttaccatgttggctaggctggtcttgaactcctgacctcaggtgatccacctgcctcggcctccca

SEQ ID NO: 42225 - DNA, 201 bp, Homo sapiens
tctagttacccctgccgctggagattgttcttttttttttttttttttttttttttttttttgctattacaaataaggcctcagcaaatattgtgactcaracgttttccttctttctggtgtttcttgggacagactcctgcaggggtgatccctggggagagggcgtaattattttatgttcatgatgcggcagtcacc

SEQ ID NO: 42226 - DNA, 201 bp, Homo sapiens
ctgggtgcagtggagccggccttgacatttgtgggttttgctgacatttgtggaaggctctggaggtgccctttgtgccgacttgcccgagccactcctgytgcccaactcactccggtgtctgctcaggaaagaaattctaatgcacactaattttagcattagcccgatggcaaatataattactgagttaattatcac

SEQ ID NO: 42227 - DNA, 201 bp, Homo sapiens
gtgtgactggaatcctgcaatatgtggtccctgcgtgtggcttctttccatagcattgtgttttccagattcacccacacattgtcgcacgttatcagaayctcattcctgactgggtgcagtgggttaggcctgtaatcctaacattctgggaggccaaggcgggacgatcacttgaggcaggagtttgagaccagcctg

SEQ ID NO: 42228 - DNA, 201 bp, Homo sapiens
ttttttttttttttttttttttttttttgctattacaaataaggcctcagcaaatattgtgactcagacgttttccttctttctggtgtttcttgggacaractcctgcaggggtgatccctggggagagggcgtaattattttatgttcatgatgcggcagtcaccaccgtgtttctgaaaggtttgttctgcactctgg

SEQ ID NO: 42229 - DNA, 201 bp, Homo sapiens
agcggggcacatttccaacaggacacaccgccctggtctgagtctcgtgggtagtgggagcagaggagagcgccctatgtctgtggggcggcttggctgarcctggaagccacctgacctcccccgtcccttccctgccaggcatcgcatgcggaaagtccatgatgagctccgtgagcctgatggggggccggggcgggg

SEQ ID NO: 42230 - DNA, 201 bp, Homo sapiens
aggctgtgtgtgtgtgtgtgtgtgtgtgtgtgtgtgtgtgtggtgtgtgtgtggtgtgtgtgtgtgtatgggggagggaggcaccctttccatctgggggkgtgtgtgtgtggggtgtgtgtgtgtgtgtgcgcgtgtgtgtggtgtgtggtgtgtgtgtgtgtatgggggaggcaccctttccatctgggtccaagagac

SEQ ID NO: 42231 - DNA, 201 bp, Homo sapiens
ggcgtgagccaccgcgcctggctactttggtacttttgagttaaaactatagagtaggtgactgagtgatatttttaatgcgttctcaagaatttgaacaygaagagagtgtcaccctcccaggttatgcccccgggagttcatgcacttgccacctggtcgctgctcagggggcccagggagtttgctgcagtgccggag

SEQ ID NO: 42232 - DNA, 201 bp, Homo sapiens
ggagtttgctgcagtgccggaggactcctgggtcccggctgtgcctccccgcagccgcctgctcccttgggacactcattcatttgctgtggccactgccrcccacagtccttgcctcgtagactccactgcagctctggttacaaagagcgagtggtcagggactcctgacctgccatgcagggccccgtgggcttgtgg

SEQ ID NO: 42233 - DNA, 201 bp, Homo sapiens
ctccactgcagctctggttacaaagagcgagtggtcagggactcctgacctgccatgcagggccccgtgggcttgtggtggctttggtgccgtccgctgcrtctgcctcttagagcatggagttctccttctcaggagggctgagctgctggagctctagtcctgccgcagagcagcccccaagtgcggcgttgcctgtcc

SEQ ID NO: 42234 - DNA, 201 bp, Homo sapiens
gcctggctcagtgacggttagctgttagggttaccatcgcatcgcaattgttactccatagtgacgaccccccggggactctggacttgttcagctcagcygagaggctgcttggccgaaaccatctcagctctgcatagtgtggcctggtggcctgtgggttgcgctcatgacaacgtggagcctattcagtcggtaccg

SEQ ID NO: 42235 - DNA, 201 bp, Homo sapiens
ttatacgagtgttttcttccatcaataaaagaaatcggcgaacagcctcccatgggtttcagtaagtgcaagccctccttgtcatcccagacctcagcctrcccatttaatggatgaagacactgaggcctggagggaacagtgacttcggagccactctcctggactctgccactcctctcgcctcccatatgaacctga

SEQ ID NO: 42236 - DNA, 201 bp, Homo sapiens
acgtgtatatcctacctccatcagcagagaggcctagaagcaatgaccccaagtagcagtgagcacaccagagcccaggtctgggtttctgaataccattytccacccaaaggagtcagagcttgtccacgaagaagctggttctagggctggggcaaggaaaggtacaagccgagcatggggcatcttattgtgtaagaa

SEQ ID NO: 42237 - DNA, 201 bp, Homo sapiens
agtcagagcttgtccacgaagaagctggttctagggctggggcaaggaaaggtacaagccgagcatggggcatcttattgtgtaagaaagcaaagaagttytggaggactggtggggacctctgggacagaagagccagcttagaggggtgctcactgtccaaatctaggaatatttgaacgtcaaaatgttgtgtacatg

SEQ ID NO: 42238 - DNA, 201 bp, Homo sapiens
ggctggtctcaaactcctaacctcaagtgatccaccctcctcggcctcccaaagtgttgggattgcaggcgtgagccactgcacccagcctgacctagatyttctaggttagaaagtcccaggagtgggcggccatgcatccaggcctgccacaggagcccgcctgccctcctccctgaagtcagggctctggaagccctt

SEQ ID NO: 42239 - DNA, 201 bp, Homo sapiens
accctgtggtcatgcactggaagctcattacctgacgatttggagctcatcactgggggcctaaggagaatagatactgaaggatgaggagtgatggcgcrgggcacgggtgtctttggtggccagaacttggggactgctggggtgcctcactgcaggccttctcagcgccctttatatgcttacacaggctgtttctaa

SEQ ID NO: 42240 - DNA, 201 bp, Homo sapiens
tgcgattgcaggaggtaaatatgtatcaaagacatgagttttagtgaaggatatctttttttttttttttttttgagacagagtcttgctctgttgtccargttggagtacagtggctcacagcagcttccacctcccaggttcaagcaattctcctgcctcagcctcccaagcagctgggattacaggcgcccgctacta

SEQ ID NO: 42241 - DNA, 201 bp, Homo sapiens
cactccttcgctgcagagggacctgggctgagagctcctctcttatggctgcagtcgggagagaagtctgttggggggagaagggggcttcctcaagggaytccctgtgccctttggcaccttcgtgccaggtcaggcttgaggcctgaaggcagtggtgggggccaccaagggtcgcctcctctgctgggcaagttccca

SEQ ID NO: 42242 - DNA, 201 bp, Homo sapiens
aggaggtaaatatgtatcaaagacatgagttttagtgaaggatatctttttttttttttttttttgagacagagtcttgctctgttgtccaggttggagtrcagtggctcacagcagcttccacctcccaggttcaagcaattctcctgcctcagcctcccaagcagctgggattacaggcgcccgctactatgtctggct

SEQ ID NO: 42243 - DNA, 201 bp, Homo sapiens
ctgggctgagagctcctctcttatggctgcagtcgggagagaagtctgttggggggagaagggggcttcctcaagggactccctgtgccctttggcacctycgtgccaggtcaggcttgaggcctgaaggcagtggtgggggccaccaagggtcgcctcctctgctgggcaagttcccagtctgacgggcctgtgccgtgg

SEQ ID NO: 42244 - DNA, 201 bp, Homo sapiens
cccctgcaggctggcagggggcctggtggctctggccccagccctgggctctgtggcatggagctgacaccacagacacctgtggggttggaccgctggaytagcagcgagccctgcccttccagttggatagcttttccattccagagccgtcagggccgcagggctgagcacgcagctccacgctccctagagactcag

SEQ ID NO: 42245 - DNA, 201 bp, Homo sapiens
aatgaggtttagggaacagcagctgtgtcatgtcacacagcgagcagggggtctctgagccgtctgaccccacagccgaccaagctccaatccttaccgcytcctagtgttgtggatgtagcccagggtgctcccacatttttcagatgagaacaccgaagctcaaaacaggagcgttttgtccacattggatacacgatg

SEQ ID NO: 42246 - DNA, 201 bp, Homo sapiens
ctgaccatgctcctttcagcagccttgctgcactttagtttccttgaatgaaaaatggggatgagaatagctcctacctccaaggtgaatggagtgagttyggacaggtgactccctgggaccagtgcctggcgcctgacaaggtccagtcagagcccgcactgctgttactgatacccttggctgtaccaggggagaact

SEQ ID NO: 42247 - DNA, 201 bp, Homo sapiens
ttggttgccattgccaggtgttctcccaccacccccactactgtccctgtttgatgtgtggcgggaataaagctgtgcacattggagcttttggcacatcstggctttcaggtgaaaggtgcgtgtgtgtttgagggtttagcctggccaacccagccatgaggtcggacctgacctgggggtgagtcctgagctcggcac

SEQ ID NO: 42248 - DNA, 201 bp, Homo sapiens
ttgccattgccaggtgttctcccaccacccccactactgtccctgtttgatgtgtggcgggaataaagctgtgcacattggagcttttggcacatcctggytttcaggtgaaaggtgcgtgtgtgtttgagggtttagcctggccaacccagccatgaggtcggacctgacctgggggtgagtcctgagctcggcacccct

SEQ ID NO: 42249 - DNA, 201 bp, Homo sapiens; identical to SEQ ID NO: 7334

SEQ ID NO: 42250 - DNA, 201 bp, Homo sapiens
cctcgtccagcagctcgtccagcacgaaggccacgctgtacccgccggtgaggggcggggccggggaggggcggggcgggatggggctgtgggcccctccmaccgtcagtgctggccaccggaggcttcccgggttcctgggggctgtgccaccgcctctgaggcatgcttgctttcttcccttttcaaacccttctgctt

SEQ ID NO: 42251 - DNA, 201 bp, Homo sapiens
tacccagctgactcttagtcacttttaagaaggggactgtgccttcatttttcactgggccctgcagaatatatgcctgggctctgggctcttctgaaccygtgttggcttccatctgacctctctgtgccagcccaaggctgctgctcttcctgagggcaaggagccccatgactgcgtgttgactcgctggatggggct

SEQ ID NO: 42252 - DNA, 201 bp, Homo sapiens
gcgcggccactgcaatgagatacagacgttcgcccaattaaaacacagttagtggaggacacatggctttcagggaaaactgctttctctcaggaagatckctgctgtgcagtattccatagctagaccccagctccactcaacagtggactccattaatagcctgggttttggaagaggcgatttgcttctggtaactgg

SEQ ID NO: 42253 - DNA, 201 bp, Homo sapiens
ttttggcacatcctggctttcaggtgaaaggtgcgtgtgtgtttgagggtttagcctggccaacccagccatgaggtcggacctgacctgggggtgagtcytgagctcggcacccctgagctgtgtggctcacggcagcattcattgtgtggcttggccgcacccctttccctgctgggctgttgatgtttagactggagc

SEQ ID NO: 42254 - DNA, 201 bp, Homo sapiens
ggatagtaacacaagccaggctttgcactttggagaaggtgcttacaaacttggacgagacagtacccagacacatagctgaaactgtaggtactgccacrcacacatgcacagaaatagagaaatagtcatagatgcatgtgtgtataaaagtgtatgtaggctaggcacggcagctcatgcctgtaattccagcacttt

SEQ ID NO: 42255 - DNA, 201 bp, Homo sapiens
tccaactctaatggtggatttgtttatttctcctagtagttctatctttttctctccttctacccttgatcctcttctccccctagggcttcctggtgttrgtggtgggagagtggggtagtgaagaacctggactttagggccaaagaggccagggttcaaatcctggctctgtcacttcccagttgagtgaccctggct

SEQ ID NO: 42256 - DNA, 201 bp, Homo sapiens
acatgccttagcgaccaacccacatttaaaacaaattcctgaatgagggctgtaactgtagtcccaagtcattcttttttgtagctcataatagcccatamtattactataccatatgtttgcatttacctatttttattttattttatttttttgagacagagttttgcttttgtcacccaggctggagtgcaatggtac

SEQ ID NO: 42257 - DNA, 201 bp, Homo sapiens
agttctatctttttctctccttctacccttgatcctcttctccccctagggcttcctggtgttagtggtgggagagtggggtagtgaagaacctggacttyagggccaaagaggccagggttcaaatcctggctctgtcacttcccagttgagtgaccctggctggtgcctgaatctctgtgagcctccacttcctcctct

SEQ ID NO: 42258 - DNA, 201 bp, Homo sapiens
gctgagattacagtcgtgagccaccgtgcccggcctgcatttacctgtttttaattgtggtaaaatacatataacacttatcgtcgtaaccatttgtaagygtgaagttcagtggcattaagaacattcatgttgctggtaaccactgccaccatccatctcccaccacaatttaataaatcattgaaaacagactttctt

SEQ ID NO: 42259 - DNA, 201 bp, Homo sapiens
cccctgaccccattgcacctgtctccacaggagccgaggaggtgctgctgctggcccggcggacggacctacggaggatctcgctggacacgccggacttyaccgacatcgtgctgcaggtggacgacatccggcacgccattgccatcgactacgacccgctagagggctatgtctactggacagatgacgaggtgcggg

SEQ ID NO: 42260 - DNA, 201 bp, Homo sapiens
ttttctctccttctacccttgatcctcttctccccctagggcttcctggtgttagtggtgggagagtggggtagtgaagaacctggactttagggccaaaraggccagggttcaaatcctggctctgtcacttcccagttgagtgaccctggctggtgcctgaatctctgtgagcctccacttcctcctctgtgaaattga

SEQ ID NO: 42261 - DNA, 201 bp, Homo sapiens
ctgacattggcatctaccaacaccaacatttaccgacaccaacatttaccaacactgaaatttaccgacaccgacatttaccgacaccgtttaccaacacygacgtttaccgacaccgacatttaccgacactgatatttaccaacactgacatctactgacgctggcatctactgacaccgatgccagcatctaccaaca

SEQ ID NO: 42262 - DNA, 201 bp, Homo sapiens
catttaccgacaccaacatttaccaacactgaaatttaccgacaccgacatttaccgacaccgtttaccaacaccgacgtttaccgacaccgacatttacygacactgatatttaccaacactgacatctactgacgctggcatctactgacaccgatgccagcatctaccaacaccgacatttaccaacactgacattta

SEQ ID NO: 42263 - DNA, 201 bp, Homo sapiens
ggggtgtcctcagccctcctgcctgtgctttgtcccgtcttctgcaggcgcctgggacgtgctgacaggtcctctgccggctcctgccttgctatgcgcaygctggtcaccacagaggcctggcccttcttctgtagcagtcccacacccgcaacaggtgtggctgctgaccacctgctttctgcccctctggtcctgagg

SEQ ID NO: 42264 - DNA, 201 bp, Homo sapiens
tgtgcacagagaagcatgtgaatttgcccagagccacacagctagtcccagccagggttggaacatagggtctgtagctccagggtctggtctgttctcarcctctctcccacctgcttccccgcgggattcttctgcctctgcagcggccatcgctcttcatgatgcacctggggctattcacatggaagcgtcgtgtgt

SEQ ID NO: 42265 - DNA, 201 bp, Homo sapiens
tctcagcaccttcagggtggggaacccagggatgggggaggctgagtggacgcccttcccacgaaaaccctaggagctgcaggtgtggccatttcctgctrgagctccttgtaaatgttttgtttttggcaaggcccatgtttgcgggccgctgaggatgatttgccttcacgcatccccgctacccgtgggagcaggtca

SEQ ID NO: 42266 - DNA, 201 bp, Homo sapiens
gaggcttgcaaaggttaaggggctgttcgaggcccaggctggcaggagatgggcctgggccagagtctgggacttcccatgcctgggctgtctttggtccygttgctcaccatccctccctggggccatgaccttagagagccaaatggaggtgcaggtaacccacggcaaggaggggttgccatgactcagagtccccgt

SEQ ID NO: 42267 - DNA, 201 bp, Homo sapiens; identical to SEQ ID NO: 7386

SEQ ID NO: 42268 - DNA, 201 bp, Homo sapiens
accacctcagcctggaccttattgtccatatcactatcagcattttggtcaaagctattcagtgagtctccaggaagttccaaactttcccacatcctccyatcttcttctgagccctccaaactgttccaacctctgccttttacccagttccaaattgctgggtaacaggcaaagtgttaaagtgctgaaatgccaata

SEQ ID NO: 42269 - DNA, 201 bp, Homo sapiens
aaaagagttagtggctttagatttctgcaattttggtataaatcactggcctggacctgtatttacagagatgcaatactcacatcatgtggggtttgtayaaattgcagacatcgaggaacagagaatgttccaagggcaggctgtagggaagaggctacgatgtgggaggtattatcctgaaaaaagcaatgcacaggg

SEQ ID NO: 42270 - DNA, 201 bp, Homo sapiens
gtaccggagctctctcctgaccccagacccagaatctgctccgtggaggctgttcacatgctggggagctcggtgcagctgcttgctccccagaccccagscaactcagcctctctctccatgattttctgttgtttattccaaaataggggagtctacaccctgtggagctcaagatggtcctgagtggggcgctgtgct

SEQ ID NO: 42271 - DNA, 201 bp, Homo sapiens; identical to SEQ ID NO: 26078

SEQ ID NO: 42272 - DNA, 201 bp, Homo sapiens; identical to SEQ ID NO: 26079

SEQ ID NO: 42273 - DNA, 201 bp, Homo sapiens; identical to SEQ ID NO: 7397

SEQ ID NO: 42274 - DNA, 201 bp, Homo sapiens; identical to SEQ ID NO: 7396

SEQ ID NO: 42275 - DNA, 201 bp, Homo sapiens
attagcataggcctacagagcccaggcattagggcagcacaaaccaggctctaagcaaaggcaaataaaatactacacctctcagcaaagtgaagacacasgctctggggccacctgaagcttctgtgcagaagtgggaatgttttccaagaggcttgtcttgtcattcccttacaggtagatttaggtcaagcattgcat

SEQ ID NO: 42276 - DNA, 201 bp, Homo sapiens
gcattagggcagcacaaaccaggctctaagcaaaggcaaataaaatactacacctctcagcaaagtgaagacacacgctctggggccacctgaagcttctrtgcagaagtgggaatgttttccaagaggcttgtcttgtcattcccttacaggtagatttaggtcaagcattgcattccctgggagccagtaagtaccaag

SEQ ID NO: 42277 - DNA, 201 bp, Homo sapiens
ctgccatgggcactgactcttagggtctgaaagcccctgagatgcaaaagcctagtgctcacaaagagctggaaagcctcaaggaagttcttcaatatttytggaaggaaactgtctccagaagcttccctccccacgacagataatgagcagcaagtgcttctggcgacttagggtgatgtgaaatcacgctgggaatcc

SEQ ID NO: 42278 - DNA, 201 bp, Homo sapiens; identical to SEQ ID NO: 7408

SEQ ID NO: 42279 - DNA, 201 bp, Homo sapiens; identical to SEQ ID NO: 7411

SEQ ID NO: 42280 - DNA, 201 bp, Homo sapiens; identical to SEQ ID NO: 7412

SEQ ID NO: 42281 - DNA, 201 bp, Homo sapiens
gctctctgaagatcctcagtcacttagagtggagggacccagagaacaggtggcattgttggacctcctgcttgctcactctgccccatgcactgcaacasgtccctctctaaaatagtttgcacctgcccacctggggcacccttgctgagcacagatgccaggtagatccttcagctaggccatatgtgtatgtgtgtg

SEQ ID NO: 42282 - DNA, 201 bp, Homo sapiens
accggagctctctcctgaccccagacccagaatctgctccgtggaggctgttcacatgctggggagctcggtgcagctgcttgctccccagaccccagccmactcagcctctctctccatgattttctgttgtttattccaaaataggggagtctacaccctgtggagctcaagatggtcctgagtggggcgctgtgcttc

SEQ ID NO: 42283 - DNA, 201 bp, Homo sapiens
gcacaaaccaggctctaagcaaaggcaaataaaatactacacctctcagcaaagtgaagacacacgctctggggccacctgaagcttctgtgcagaagtgrgaatgttttccaagaggcttgtcttgtcattcccttacaggtagatttaggtcaagcattgcattccctgggagccagtaagtaccaaggagagaactaa

SEQ ID NO: 42284 - DNA, 201 bp, Homo sapiens
tacaataggagtacaggcatttggtaagtacagctattccaaatgggagaaattggccaaaacaaaggggctacaggccccatgcaagttcaaaatccagyggggcagtcaaatcttaacgcttcaaaattacctcctttgagtctctgtctcacatccaggtcatgcttatgcaagaggtgggttcccatagtctttggc

SEQ ID NO: 42285 - DNA, 201 bp, Homo sapiens
ccttcagctaggccatatgtgtatgtgtgtgcttactggtgtatgtatgtgtgcatgcaggcatatatgtgtgagcatatgtgtgcatgcatgtatctgtrtgtaaccatgtatgtgtgagtgcaggtatgtaggtatgagcatgtgtgtgtatatgtatatgtgtgcatgcatgtatctgtgcatgtatgtatctgatgt

SEQ ID NO: 42286 - DNA, 201 bp, Homo sapiens
tgcatgcatgtatctgtatgtaaccatgtatgtgtgagtgcaggtatgtaggtatgagcatgtgtgtgtatatgtatatgtgtgcatgcatgtatctgtgyatgtatgtatctgatgtatgtgggtggtgaggggatgtacagagaggaatgagaccctcttttgctctcagcaacctcacagggtgtagaaagttgtcca

SEQ ID NO: 42287 - DNA, 201 bp, Homo sapiens
tgagcacagatgccaggtagatccttcagctaggccatatgtgtatgtgtgtgcttactggtgtatgtatgtgtgcatgcaggcatatatgtgtgagcatrtgtgtgcatgcatgtatctgtatgtaaccatgtatgtgtgagtgcaggtatgtaggtatgagcatgtgtgtgtatatgtatatgtgtgcatgcatgtatc

SEQ ID NO: 42288 - DNA, 201 bp, Homo sapiens; identical to SEQ ID NO: 7393

SEQ ID NO: 42289 - DNA, 201 bp, Homo sapiens
tatgtgtgcatgcatgtatctgtgcatgtatgtatctgatgtatgtgggtggtgaggggatgtacagagaggaatgagaccctcttttgctctcagcaacmtcacagggtgtagaaagttgtccaaacaattccaaaggggggcttattaagacagggttcagaaaaaggcctgagacccaaggggcattaaaggaggggg

SEQ ID NO: 42290 - DNA, 201 bp, Homo sapiens; identical to SEQ ID NO: 7395

SEQ ID NO: 42291 - DNA, 201 bp, Homo sapiens
gttgtccaaacaattccaaaggggggcttattaagacagggttcagaaaaaggcctgagacccaaggggcattaaaggagggggttgagtctattttgggktgtagaggcttgaagatttgaccctgaactagagggtggagtggaggtggtacaatgtgcttccatgccttgatgtccactctgggccagtggacaggag

SEQ ID NO: 42292 - DNA, 201 bp, Homo sapiens
ccatgccttgatgtccactctgggccagtggacaggagaagccatgtcatgacagctgctgagaagcctcccttctgcccagcctgggggcaggccgtctyacagcagtcctgtgccctagagcccaggacaggggaagaaggagggaaaggcatccagggccctgcatctggcctctttcccacaggtgaagagatcagc

SEQ ID NO: 42293 - DNA, 201 bp, Homo sapiens
gtggtgaggggatgtacagagaggaatgagaccctcttttgctctcagcaacctcacagggtgtagaaagttgtccaaacaattccaaaggggggcttatyaagacagggttcagaaaaaggcctgagacccaaggggcattaaaggagggggttgagtctattttgggttgtagaggcttgaagatttgaccctgaacta

SEQ ID NO: 42294 - DNA, 201 bp, Homo sapiens; identical to SEQ ID NO: 7398

SEQ ID NO: 42295 - DNA, 201 bp, Homo sapiens; identical to SEQ ID NO: 7400

SEQ ID NO: 42296 - DNA, 201 bp, Homo sapiens; identical to SEQ ID NO: 7401

SEQ ID NO: 42297 - DNA, 201 bp, Homo sapiens
tgagtctattttgggttgtagaggcttgaagatttgaccctgaactagagggtggagtggaggtggtacaatgtgcttccatgccttgatgtccactctgrgccagtggacaggagaagccatgtcatgacagctgctgagaagcctcccttctgcccagcctgggggcaggccgtctcacagcagtcctgtgccctagag

SEQ ID NO: 42298 - DNA, 201 bp, Homo sapiens; identical to SEQ ID NO: 7402

SEQ ID NO: 42299 - DNA, 201 bp, Homo sapiens; identical to SEQ ID NO: 7403

SEQ ID NO: 42300 - DNA, 201 bp, Homo sapiens; identical to SEQ ID NO: 7404

SEQ ID NO: 42301 - DNA, 201 bp, Homo sapiens; identical to SEQ ID NO: 7405

SEQ ID NO: 42302 - DNA, 201 bp, Homo sapiens; identical to SEQ ID NO: 7406

SEQ ID NO: 42303 - DNA, 201 bp, Homo sapiens
gtcatagtttcattttacttattatttatttatttattgaggcagagtctagctctctctgtcatccaggctggagtacagtggctcaatcttggctcacygcaacctccacctcccaggttcaagcaattctcacacctcagcctcctgagtagcttggattacaaatgtgcaccaccaacccggctaatttttgtgttt

SEQ ID NO: 42304 - DNA, 201 bp, Homo sapiens
ctgagacctaattagtaagtcaagcaaagggataggtccagagagaacttattgttggtgaggcctgtttgataatgttttcatataatattgacagtatrcacagtcatagtttcattttacttattatttatttatttattgaggcagagtctagctctctctgtcatccaggctggagtacagtggctcaatcttggc

SEQ ID NO: 42305 - DNA, 201 bp, Homo sapiens
agggtgtagaaagttgtccaaacaattccaaaggggggcttattaagacagggttcagaaaaaggcctgagacccaaggggcattaaaggagggggttgartctattttgggttgtagaggcttgaagatttgaccctgaactagagggtggagtggaggtggtacaatgtgcttccatgccttgatgtccactctgggcc

SEQ ID NO: 42306 - DNA, 201 bp, Homo sapiens; identical to SEQ ID NO: 7407

SEQ ID NO: 42307 - DNA, 201 bp, Homo sapiens; identical to SEQ ID NO: 7409

SEQ ID NO: 42308 - DNA, 201 bp, Homo sapiens; identical to SEQ ID NO: 7410

SEQ ID NO: 42309 - DNA, 201 bp, Homo sapiens
tcccccatcacagtgaatggatgtaagctcacccactctgtgcccctacctccctgctactctttggggataataataaaacaaaaaccattaccatcagycagtctgtccacccactggcatgtaccaagccagacactctgccgtgttctgggcttaacaacagaggatgagagtggtcctttctctcagtctaataaa

SEQ ID NO: 42310 - DNA, 201 bp, Homo sapiens
cggggcagtcaaatcttaacgcttcaaaattacctcctttgagtctctgtctcacatccaggtcatgcttatgcaagaggtgggttcccatagtctttggmagctccactcctgtgactttgcagggtacaaccctcctcctggctgctttcatgggctgacactgtctgtggcttttccaggcacacagcataagctgtt

SEQ ID NO: 42311 - DNA, 201 bp, Homo sapiens
aggaaagagggagggaagaaaggaagggaaaagggagggagtgagtgaatgaaagatggaaagaaggaagaaagggagggaggcagggaggaaagaaagtygcgcttcccttgagctgccatgggcactgactcttagggtctgaaagcccctgagatgcaaaagcctagtgctcacaaagagctggaaagcctcaaggaa

SEQ ID NO: 42312 - DNA, 201 bp, Homo sapiens
ctggagtggctgggatgcaagtcatcccaagtcctgagactacacaaagctgccaggccctgggtctggcccatgaaaccattttttcctcctggacctcyaggtctgtgatgggaggggcttctgtgaagacctctgatatgccctggagacactttccccattttcttggtgaaaaacatttggctcctctttccttat

SEQ ID NO: 42313 - DNA, 201 bp, Homo sapiens
ccatctcacaaggggtccctgatgctgagggggacaagtgaacctcccagtctagagctccagccaagtctatccaaggtgggaacgggggccaggatccytgctcagagctccgccattgtcccccatcacagtgaatggatgtaagctcacccactctgtgcccctacctccctgctactctttggggataataataaa

SEQ ID NO: 42314 - DNA, 201 bp, Homo sapiens
gcaagattgagatcctcttgtcctatgtgccaggaatgaactccagtgtccccacccaaaccctggggaatgggagcagaagccagaggaggagcccatayctgagccccaggtattccacctgcacttcacctgttggaccagcttggtggttgagagtccactgaggcactggcaaggaggtggccaggacagacaagg

SEQ ID NO: 42315 - DNA, 201 bp, Homo sapiens
atgtgtaatttatcaatgttctcttagttcatggctaatttcacagagtctgagacctaattagtaagtcaagcaaagggataggtccagagagaacttaytgttggtgaggcctgtttgataatgttttcatataatattgacagtatacacagtcatagtttcattttacttattatttatttatttattgaggcagag

SEQ ID NO: 42316 - DNA, 201 bp, Homo sapiens; identical to SEQ ID NO: 26118

SEQ ID NO: 42317 - DNA, 201 bp, Homo sapiens
ggcctttgccgtgttcttaatgtcttctttacatacctaggaaaagtgaaggagaggtgagaaagacagagtggggaggaacccgtgtctgtgggtttgtrctagatgccaacctggctcttcacatcctctgtctcatccagtcaagcagccacactgagtcccccagcatgagaacagcttccacagagcaggagattc

SEQ ID NO: 42318 - DNA, 201 bp, Homo sapiens
tttgctctcagcaacctcacagggtgtagaaagttgtccaaacaattccaaaggggggcttattaagacagggttcagaaaaaggcctgagacccaagggrcattaaaggagggggttgagtctattttgggttgtagaggcttgaagatttgaccctgaactagagggtggagtggaggtggtacaatgtgcttccatgc

SEQ ID NO: 42319 - DNA, 201 bp, Homo sapiens; identical to SEQ ID NO: 7387

SEQ ID NO: 42320 - DNA, 201 bp, Homo sapiens; identical to SEQ ID NO: 7388

SEQ ID NO: 42321 - DNA, 201 bp, Homo sapiens; identical to SEQ ID NO: 7390

SEQ ID NO: 42322 - DNA, 201 bp, Homo sapiens; identical to SEQ ID NO: 7389

SEQ ID NO: 42323 - DNA, 201 bp, Homo sapiens; identical to SEQ ID NO: 7392

SEQ ID NO: 42324 - DNA, 201 bp, Homo sapiens
atttttggtcatgaaccagtcttagatttaagtcaatgtaaatttggcctttgccgtgttcttaatgtcttctttacatacctaggaaaagtgaaggagargtgagaaagacagagtggggaggaacccgtgtctgtgggtttgtgctagatgccaacctggctcttcacatcctctgtctcatccagtcaagcagccaca

SEQ ID NO: 42325 - DNA, 201 bp, Homo sapiens
agaaaactggcttggctggagggttcggctcagggtgtctgattaggttgtaggaaagatgtcagccaaggtttcagtcatctgaaggcttgactgggacygaaggatctgtttgtaagattgctcactcagaccattggcaggaaaccacagtttctcaccatgtgggcttctatataggggtgcttgaatatccttatt

SEQ ID NO: 42326 - DNA, 201 bp, Homo sapiens
tttgaacaacttgatattttatttattcttgaacacttgtaggacctcttggctcatatgtctgaataccatttctttaaaatgtacgctttaacatgtayacatatgtaacaaacctgcacattgtacacatgtatcctaaaacttaaagtataataataataataaaagaaaaaagaaaaataaaacttaaaaaaaaaa

SEQ ID NO: 42327 - DNA, 201 bp, Homo sapiens; identical to SEQ ID NO: 7399

SEQ ID NO: 42328 - DNA, 201 bp, Homo sapiens
actaagtccagtccatactcaagagaagggcagttaaacttcctctctgtatcagtctgttctcacactgctaataaagacatacctgagactgagtaatktgtaaaggaaagagattgaattgactcacagttccacatggctgaggtggcatcacaatcatgatggaagatgaaggaagagcaaagtcacatcttacat

SEQ ID NO: 42329 - DNA, 201 bp, Homo sapiens
tttcaataaataatgttacagtgatacagttaaatactatacagctattgaagcatgtcattattcatatttagtatggaaagatattttgctattttgcyacatgaaaaaatgaggttggaaaaagtataggttttgtgaatctgttgtatgaaagctgtctatagttacatgtgtatgtgtgtggaggaaaaagtgttg

SEQ ID NO: 42330 - DNA, 201 bp, Homo sapiens
gcaaaagcctagtgctcacaaagagctggaaagcctcaaggaagttcttcaatatttctggaaggaaactgtctccagaagcttccctccccacgacagayaatgagcagcaagtgcttctggcgacttagggtgatgtgaaatcacgctgggaatcctgctcctcctcaggtcctggcagtttcagggcccctccctagg

SEQ ID NO: 42331 - DNA, 201 bp, Homo sapiens
attcactagaatgagaatagcacaggaaagacctgccctgatgattcagttacctcccactgggtcccttccatgacatatgggaattatgggagcaacarctcaagatgagctttgggtggggacacagccaaactatatcattccacccctggctcctcgcaaatcacatgtcctcacatttcaaaaccaatcatgcct

SEQ ID NO: 42332 - DNA, 201 bp, Homo sapiens
attttgctacatgaaaaaatgaggttggaaaaagtataggttttgtgaatctgttgtatgaaagctgtctatagttacatgtgtatgtgtgtggaggaaawagtgttgtcattggttttctgatgatgcactcagaaaagacaagtattcacattttttcttgtggctgatctggattttcaggtttttctacaatgaaca

SEQ ID NO: 42333 - DNA, 201 bp, Homo sapiens
agtttcattttacttattatttatttatttattgaggcagagtctagctctctctgtcatccaggctggagtacagtggctcaatcttggctcactgcaayctccacctcccaggttcaagcaattctcacacctcagcctcctgagtagcttggattacaaatgtgcaccaccaacccggctaatttttgtgttttcagt

SEQ ID NO: 42334 - DNA, 201 bp, Homo sapiens
cccatcatcttagtgtagcaatggggaggctcaggcccagagtgggcgagagagttgtctcctgcgactcagcagcattggaggcatagatggggcaagawcctagggctctgactcaccgtgcagcttctcttccaacaggagatgggttggggcagaaaaggttgaatagggtgaaggagcaaaccacagactccagtg

SEQ ID NO: 42335 - DNA, 201 bp, Homo sapiens; identical to SEQ ID NO: 26135

SEQ ID NO: 42336 - DNA, 201 bp, Homo sapiens
tggggaggctcaggcccagagtgggcgagagagttgtctcctgcgactcagcagcattggaggcatagatggggcaagaacctagggctctgactcaccgwgcagcttctcttccaacaggagatgggttggggcagaaaaggttgaatagggtgaaggagcaaaccacagactccagtgggagactgtggggtcatcctc

SEQ ID NO: 42337 - DNA, 201 bp, Homo sapiens
tgcatgcaggcatatatgtgtgagcatatgtgtgcatgcatgtatctgtatgtaaccatgtatgtgtgagtgcaggtatgtaggtatgagcatgtgtgtgwatatgtatatgtgtgcatgcatgtatctgtgcatgtatgtatctgatgtatgtgggtggtgaggggatgtacagagaggaatgagaccctcttttgctct

SEQ ID NO: 42338 - DNA, 201 bp, Homo sapiens
ggatccgtggagtctgcctgctcttccaaggatgcctcagccttttaagtaaggcctagggaggggccctgaaactaccaggacctgaggagaagcaggawtctcagcgtgatttcacaccaccctaagccgccgggaatacttgctgctcattatctctctattggagtctcatggaacacattgtgggaagtgctatag

SEQ ID NO: 42339 - DNA, 201 bp, Homo sapiens
ctatgaaatctaggcggaggctcccaaacctcagttcttcacttttgtgcacccacaggctcaacaccacatggaagctgccaagggttgggatttacacyctctaaagccatgacccaagctgtacctttgccctctttagccaaagctggagtggctgggatgcaagtcatcccaagtcctgagactacacaaagctgc

SEQ ID NO: 42340 - DNA, 201 bp, Homo sapiens; identical to SEQ ID NO: 7391

SEQ ID NO: 42341 - DNA, 201 bp, Homo sapiens
acatagtgggcaccaagtgaatatcagttactttaattattactaaatttatctccctaacaggaatttactatcttaccataataaactctgcttacatwctcatataggtgaatacacctgccctaagtcatctctacagcaagagcagaggccacatctacctccagggttattgccattctcacaaaggtgaggata

SEQ ID NO: 42342 - DNA, 201 bp, Homo sapiens
cttcacttttgtgcacccacaggctcaacaccacatggaagctgccaagggttgggatttacaccctctaaagccatgacccaagctgtacctttgccctytttagccaaagctggagtggctgggatgcaagtcatcccaagtcctgagactacacaaagctgccaggccctgggtctggcccatgaaaccattttttcc

SEQ ID NO: 42343 - DNA, 201 bp, Homo sapiens; identical to SEQ ID NO: 7394

SEQ ID NO: 42344 - DNA, 201 bp, Homo sapiens
ggaggaagtgagttctggatagacccgttgtccagctctgagcaggagggaggaagggaggggctgccattgcagctgggaaattgtgaccagcacctcaytgctcttagagttttcccagcctttttcaaataggggcaggactggggcaggccatctcacaaggggtccctgatgctgagggggacaagtgaacctccc

SEQ ID NO: 42345 - DNA, 201 bp, Homo sapiens
gtgaatacacctgccctaagtcatctctacagcaagagcagaggccacatctacctccagggttattgccattctcacaaaggtgaggataagtcaccacrgggaacattgcttctctgcaggctgtgacactttccagggcatataaagcccatgaagaactgagatgtttgctgagaagagagcatacccaccgaagac

SEQ ID NO: 42346 - DNA, 201 bp, Homo sapiens
gaccagcacctcattgctcttagagttttcccagcctttttcaaataggggcaggactggggcaggccatctcacaaggggtccctgatgctgagggggayaagtgaacctcccagtctagagctccagccaagtctatccaaggtgggaacgggggccaggatccctgctcagagctccgccattgtcccccatcacagt

SEQ ID NO: 42347 - DNA, 201 bp, Homo sapiens
ctctgatatgccctggagacactttccccattttcttggtgaaaaacatttggctcctctttccttatgcaaatttctgcagccagctcgaatttctcttyagaaaataggtttttcttatctcatcttcatgctgcatgttttccaaacttttatgctctgcttcccttttaaatgtaggttccaattccaaaccatata

SEQ ID NO: 42348 - DNA, 201 bp, Homo sapiens
agcaattctcacacctcagcctcctgagtagcttggattacaaatgtgcaccaccaacccggctaatttttgtgttttcagtagagatggggttttgccaygttggccaggcttgtctcatttcatcttatttctactgtcattccatttggtcaatttgtaatttaataattttgtacaaggcagtttctacattaattt

SEQ ID NO: 42349 - DNA, 201 bp, Homo sapiens
tctatccaaggtgggaacgggggccaggatccctgctcagagctccgccattgtcccccatcacagtgaatggatgtaagctcacccactctgtgcccctrcctccctgctactctttggggataataataaaacaaaaaccattaccatcagtcagtctgtccacccactggcatgtaccaagccagacactctgccgtg

SEQ ID NO: 42350 - DNA, 201 bp, Homo sapiens
agttcctcatctccatctgagaccacctcagcctggaccttattgtccatatcactatcagcattttggtcaaagctattcagtgagtctccaggaagttscaaactttcccacatcctcctatcttcttctgagccctccaaactgttccaacctctgccttttacccagttccaaattgctgggtaacaggcaaagtgt

SEQ ID NO: 42351 - DNA, 201 bp, Homo sapiens
tgtggggtttgtacaaattgcagacatcgaggaacagagaatgttccaagggcaggctgtagggaagaggctacgatgtgggaggtattatcctgaaaaargcaatgcacagggagccctcttcaagcacttaaaggcttgccaagtagaagaatgtgcttgttctgtgtaattccagaacacacaagcagaaccaatggg

SEQ ID NO: 42352 - DNA, 201 bp, Homo sapiens
actctttggggataataataaaacaaaaaccattaccatcagtcagtctgtccacccactggcatgtaccaagccagacactctgccgtgttctgggcttwacaacagaggatgagagtggtcctttctctcagtctaataaagcacttcccacgatgtgttctatgggactcgattagaggagtcccacagaggcatcca

SEQ ID NO: 42353 - DNA, 201 bp, Homo sapiens
taacatgtatacatatgtaacaaacctgcacattgtacacatgtatcctaaaacttaaagtataataataataataaaagaaaaaagaaaaataaaacttaaaaaaaaaagtgtatgctttaacaataaattattaataaatagttatctgtgttattcaagatataattaaattgttttttgtgcactgacccttacctt

SEQ ID NO: 42354 - DNA, 201 bp, Homo sapiens
ggctgtagggaagaggctacgatgtgggaggtattatcctgaaaaaagcaatgcacagggagccctcttcaagcacttaaaggcttgccaagtagaagaaygtgcttgttctgtgtaattccagaacacacaagcagaaccaatgggtgcaaattatgtggaggctgtttttcctatatgacccccatattttaaccacaa

SEQ ID NO: 42355 - DNA, 201 bp, Homo sapiens
acccactggcatgtaccaagccagacactctgccgtgttctgggcttaacaacagaggatgagagtggtcctttctctcagtctaataaagcacttcccaygatgtgttctatgggactcgattagaggagtcccacagaggcatccaggagatgctttacacagtggagctctctgatcaagtaaatgcagggaattctg

SEQ ID NO: 42356 - DNA, 201 bp, Homo sapiens
tgcagggaattctgctttctacatcctctcataagagaaccacagcccagctcagcatatgagtgactgaggttttctgaagtaaggcaacttgttgaatygtatttagctatgcatcgacccaatttttacactgcatccttttcccccatataacttttggagaaacccactttaggatacatcttccacctcatagga

SEQ ID NO: 42357 - DNA, 201 bp, Homo sapiens
tgctttacacagtggagctctctgatcaagtaaatgcagggaattctgctttctacatcctctcataagagaaccacagcccagctcagcatatgagtgaytgaggttttctgaagtaaggcaacttgttgaatcgtatttagctatgcatcgacccaatttttacactgcatccttttcccccatataacttttggagaa

SEQ ID NO: 42358 - DNA, 201 bp, Homo sapiens
tctgctttctacatcctctcataagagaaccacagcccagctcagcatatgagtgactgaggttttctgaagtaaggcaacttgttgaatcgtatttagcyatgcatcgacccaatttttacactgcatccttttcccccatataacttttggagaaacccactttaggatacatcttccacctcataggatgccaggaaa

SEQ ID NO: 42359 - DNA, 201 bp, Homo sapiens; identical to SEQ ID NO: 26148

SEQ ID NO: 42360 - DNA, 201 bp, Homo sapiens
tggatgttatccaacccatcatcttagtgtagcaatggggaggctcaggcccagagtgggcgagagagttgtctcctgcgactcagcagcattggaggcakagatggggcaagaacctagggctctgactcaccgtgcagcttctcttccaacaggagatgggttggggcagaaaaggttgaatagggtgaaggagcaaac

SEQ ID NO: 42361 - DNA, 201 bp, Homo sapiens; identical to SEQ ID NO: 26150

SEQ ID NO: 42362 - DNA, 201 bp, Homo sapiens
cagagtgggcgagagagttgtctcctgcgactcagcagcattggaggcatagatggggcaagaacctagggctctgactcaccgtgcagcttctcttccarcaggagatgggttggggcagaaaaggttgaatagggtgaaggagcaaaccacagactccagtgggagactgtggggtcatcctccttgtagggcatgagc

SEQ ID NO: 42363 - DNA, 201 bp, Homo sapiens
tccacctcccaggttcaagcaattctcacacctcagcctcctgagtagcttggattacaaatgtgcaccaccaacccggctaatttttgtgttttcagtaragatggggttttgccacgttggccaggcttgtctcatttcatcttatttctactgtcattccatttggtcaatttgtaatttaataattttgtacaaggc

SEQ ID NO: 42364 - DNA, 201 bp, Homo sapiens
tggggaaattcccctgtataaaaccatcagatcttgtgagacttattcactatcatgagaccagcacaagaaagacctgcccccatgattcaattacctcycactgggttccttccatgacacgtgggaattatagaagctacaattcaagatgaaatttgggtgggaacagagccaaaccatatcaccttcttaaagatg

SEQ ID NO: 42365 - DNA, 201 bp, Homo sapiens
acccactttccttggtctctatacactctcaggggagggggcctgaagagggcttagaatagtcatacagattagcataggcctacagagcccaggcattrgggcagcacaaaccaggctctaagcaaaggcaaataaaatactacacctctcagcaaagtgaagacacacgctctggggccacctgaagcttctgtgcag

SEQ ID NO: 42366 - DNA, 201 bp, Homo sapiens
ttttctccaatattttttattttctttctcacaatgaacaactatccttcatttacccaaatattctatttaaaagctaataatacagcatttgttgagtyatctggttctgcaagattgagatcctcttgtcctatgtgccaggaatgaactccagtgtccccacccaaaccctggggaatgggagcagaagccagagga

SEQ ID NO: 42367 - DNA, 201 bp, Homo sapiens
ctatgagcaggcctataaagagacttacgtggtaaaaaatgaagtctcctgcccacagccacattagtgaacctagaagcagagactctgtgagataatcratgtttgttgttttaagttgctcagttttggtctaacttgttatgcagcaatagataaataatatgcagagaaagagaaacaaatgcatttgttttatta

SEQ ID NO: 42368 - DNA, 201 bp, Homo sapiens
ctggaaactagttggaattcacacatgcataaacctggatgtgagagagagctgcttcatgggaacccttgaccaatggggaataggagtgggtgaggagsaaattctcttatccatcccacaggtggacaattctgagatgcgttcattcttcatggttcctcagaggatcccagcagtattgagacataatcacccatg

SEQ ID NO: 42369 - DNA, 201 bp, Homo sapiens
aatgctctttccttggtcattaaggggcctgggagtcctggaccagcttttcatgcagctagaccacttacatgcaactagagccttgactttgaaaccarggacaaaagcatctcttgctaaaggtaacttctgctgcttagaacccaggtatggggaacttctttcatgtctctgtgtttagcctcgaagtgcctctgg

SEQ ID NO: 42370 - DNA, 201 bp, Homo sapiens
agggtaatatggtttacctgggaatcaagggaaaagatctctgtctcttctgtgcagaaattcagggcaagcctactttgcagcttaaggtgagtgattgygcagctaacgagagaagtactgtcatatggactttctatttcatttactatgttactgaataaaaataatatgcttgcaaccctggactattcaatgtaa

SEQ ID NO: 42371 - DNA, 201 bp, Homo sapiens
agaatgctctttccttggtcattaaggggcctgggagtcctggaccagcttttcatgcagctagaccacttacatgcaactagagccttgactttgaaacsaaggacaaaagcatctcttgctaaaggtaacttctgctgcttagaacccaggtatggggaacttctttcatgtctctgtgtttagcctcgaagtgcctct

SEQ ID NO: 42372 - DNA, 201 bp, Homo sapiens
aagaacagaagcaaggagactattgcaatgctccagaagatagagtcaatggtggatttccaagagcagaaccacaaagagtgattgggagtaggactgascaataatattcggtttcaagagtaatgattttctttcatagccaacattgaagccgcgtctgactcctaattcagagttagaaagccacaagacctccaa

SEQ ID NO: 42373 - DNA, 201 bp, Homo sapiens
acatagttctctggcctcaagacaaaacaggttccctggccccacagaactggcattttggtagtggagataataaataaataaatagatggataaatacrttttccaaaaccatggaagcatacattttatgaagaaaatagttgagcaaaataaggggctaggacatgggtgagggactcttggagataggctggctgg

SEQ ID NO: 42374 - DNA, 201 bp, Homo sapiens
tattggcatttcagcactttaacactttgcctgttacccagcaatttggaactgggtaaaaggcagaggttggaacagtttggagggctcagaagaagatrggaggatgtgggaaagtttggaacttcctggagactcactgaatagctttgaccaaaatgctgatagtgatatggacaataaggtccaggctgaggtggt

SEQ ID NO: 42375 - DNA, 201 bp, Homo sapiens
ccactccccttttctcttccctgtcttcctcttattcatgagatactacatacatttatttgtttatcaaaaaatatttgttagttcccataagaggtccrcaccattcctgccactgagcacatagttctctggcctcaagacaaaacaggttccctggccccacagaactggcattttggtagtggagataataaataa

SEQ ID NO: 42376 - DNA, 201 bp, Homo sapiens
aatcacatcagggtctccctgaactccctcaccacacactgccctggccaaggagccaaggtgagcctgtgggtctctaggtgtgccagtcatccagatgrgggcaaagctgccagtcccactgactgtttgagtgattctcttgggaggctccatcctggcgataggagagcatcccctggcccttctccatgaggaggt

SEQ ID NO: 42377 - DNA, 201 bp, Homo sapiens
ggaatgaaaactgagcttcatatcaagggttggatgccctcagctgcattcatcagatatttggtttttctctctgagcaaaaagagaaaagatgccatgrggtgtgtctgaataagccctcctaagtttcctatatttatctccttaaaggagactcagcacccacttcatgaaaaaaaaaaaaaaagcaaggtgttttc

SEQ ID NO: 42378 - DNA, 201 bp, Homo sapiens
agactgtacaaaatcagaaagtatagaccatttggatttttttttttttttgagatagagttttgctcttgttgcccaggttggagtgcagtggcgtgatytcagctcaccgcaacctccgcctcctgggttcaagcaatactcctgcttcagcctcccgagtagctgggactacaagcatgtgccaccacgcctggctaa

SEQ ID NO: 42379 - DNA, 201 bp, Homo sapiens
cagacaccgactatatccttgaactcccaagatgaccagagtgagtctcatatccaggggccaacctggactatgctgatatcccaatctagagagaggargctggatgcagaaatccaaggccaacctacttttccttccttctcatcccttaaacttaaaggacagaacccacgacgacttgccttcactctggtgaga

SEQ ID NO: 42380 - DNA, 201 bp, Homo sapiens
tgtcttgaatctacccgtctctcttcaacttccttgtcacccaccactgaatgccagacaaccaccaaggctcatctgaatgtggatccacctcctgcccmttgcccttcgtctactcctgcacccattaaattcattctccatgagacagccaggattatctctaccaatggaaatcttaaccgtgccagtccaatctct

SEQ ID NO: 42381 - DNA, 201 bp, Homo sapiens
ccgtctcagttacaacagaaacctaggagtgatccttgatttttcctttcgctgaagtcctacatccaacctattaaaaaggctgtctctaaagcagattwtctccaaaatatgtcttgaatctacccgtctctcttcaacttccttgtcacccaccactgaatgccagacaaccaccaaggctcatctgaatgtggatcc

SEQ ID NO: 42382 - DNA, 201 bp, Homo sapiens
agatggtgtgggtcctgagtggaaattctttaatagcagctcctcttagccgcagcattaagcctggtgagtgacaatcaaacccactgttgcttcttgasgtgatgccatcttcaccaggaatgaggctgagcttgcataagcctggccctggacctcacccacttctaggcaccagcccaacagccacaggaaggtcaa

SEQ ID NO: 42383 - DNA, 201 bp, Homo sapiens
aatcagttttatctatgcctataatagcagtgtggccataataaaagccacatctaactgaccaaggccaaagccactagcaatgtcttctccaaactcaycatgtagtttgaaccccaaacaacaaagcttgtttttatctcaaaggaagtgtcaggatcaataatctgaattattcaacaaatatgttttgagcaccta

SEQ ID NO: 42384 - DNA, 201 bp, Homo sapiens
aaatacaaaaaactagcccagtgtggcagtgggtgcctgtagttccagctactcgggaggctgaggcaggagaatcacttgaacctgagaggcggaagttkccatgagccgagatcgtgccactgcactccagcttggcgacagagcgagagcgagactccatctccaaaaaaaaagtaaatgtagcgtgaagattaaaag

SEQ ID NO: 42385 - DNA, 201 bp, Homo sapiens
aggagactatgacccaggggaggcatgtcacataatcattaagaatagagagacttggcttctaacttggctagatttcttagtagctgtatgactttggrtacattctgtcatccctcagagccgctgttttcttacatgagaaataaaattaatggcccctaaagagttgtgtgtgggacgggcgcagtggctcacgcc

SEQ ID NO: 42386 - DNA, 201 bp, Homo sapiens
tgccttcactctggtgagaaagggacatgggaaaacatggttaatccagtctgaaactgacagtctcccactgagtcactcactgtagaacccatcacctraaacaagcatagatggagatcaggcattgagaggacagcctctctccaggatgtctctgaattaatgattggctctgcagctcaatcttttatcctcatc

SEQ ID NO: 42387 - DNA, 201 bp, Homo sapiens
actgcacgtagatcctttcaaatgctttgattcacaaactagtccctgccctatttcccctccatttatcgttatagccactacttctcagagcaatgagwctctctccagaaactcaaaagccattaataccaggatgcaactggagtcctgaagttgataacctcacgtgtattttgtgcatttttgtcatctggcagg

SEQ ID NO: 42388 - DNA, 201 bp, Homo sapiens
ctgagaggcacggcctccgattcaaggatcaggaggccaggctgagaggcacggcctccgattcaaggatcgggaggccacgctgagaggcacggcctccrattcaagctctcttcctctttttctgtctctttccacaaggatctgcagccctcacccgagtagcgagcatctaaagcaggactagacgaggcaagggag

SEQ ID NO: 42389 - DNA, 201 bp, Homo sapiens
aacggcctttgaaaatctcggggcacctagctcttttattattatctgtatttagaattgcttgtttattttgatgagaggattttaaaaaacaacatatrgataactaatttaaatattatggggttttttttaccacctagacattttatcattcggaaaaagacaagtcactaatagccctagaaaaaggtgaatctt

SEQ ID NO: 42390 - DNA, 201 bp, Homo sapiens
tttcttcttcctttttttttttttttgtggcaaagtcttgctctgtcacccagggctggagtgcagtggctcaatctcggctgactgcagtctcaacctcygcagactgaagtcatccttctgcctcagcctcccaagtagctgggaccacaggcgcaagccaccatgccccactaatctttgtgtttttttagagacagg

SEQ ID NO: 42391 - DNA, 201 bp, Homo sapiens
gaggcttccagagcctgcggactcgcctccgccggactgtgtagtttgaccattgctctccagcaggaaactggaaataaacccagggctaggcactggcygagctccattctccccggtcctgcgctggcccctccggcggggcctgccgctctcagtgtgccgggccaggatctaccggcagggggcgctctccaccag

SEQ ID NO: 42392 - DNA, 201 bp, Homo sapiens
tgccctaatagaggttccattctggatacgacaacatagggtgacaggtgaatgaacaggtgcctcagatacagcccttaaaacacttcaggtgctgaaasccatggctggtgtcagaggcacctcctagtggttgtccttatgaggtgaagtcctgctctctttcccctgatgttccatatcagatgtcctttgtcacta

SEQ ID NO: 42393 - DNA, 201 bp, Homo sapiens
aacacagcaatggcttcatgcagtttagtgggtcaagagagccacacctctgcctccaagggagacacacctctgcctccaaggaagaccagtaaaggcaytctcctcaactcagcatctggcctaatccgcatttcctcattgctgttttctgatgttgcctctgctcttgttaatcaggaagcacagaccagtcatgct

SEQ ID NO: 42394 - DNA, 201 bp, Homo sapiens
tatataaaattacaaaacaaatgaaaacaaacctatagtgacagaaagcagatctgtagattcctggtgaataggacgggggatgggagggaaggacagaytccaggagacatgaagactctttgggggatggtgaatatgttcatgattttaattttgatgatggtttcacaaacatagacatatgtcaaaacttatcaa

SEQ ID NO: 42395 - DNA, 201 bp, Homo sapiens
atagagaattgcttgaacctggggagcggaggttgcagagagctgagatcgtgccatgcactccagcctgggcgacagagcaagactctgtcttaaaaacwacaacaacaaatacaatcagtggagaaaaaaataccatgttcaacaaatggtgacaaatcaatgagatattcatataatgacaacaaaaaggtgaattat

SEQ ID NO: 42396 - DNA, 201 bp, Homo sapiens
gtgtatgtggacgtattagttggttctcatgctgctaataaagacatacccaaggctgggtaatttataaaggaaagaggtttaatggactcacagttcakcatggctggggaggcctcacaatcatggcagaaggcaaaggaagagcaaaggcacaccttacatggcaacaggcaagagagcttgtgcaggggaactccc

SEQ ID NO: 42397 - DNA, 201 bp, Homo sapiens
atgaacaactgattttcaacaaacatacaaatacaaccagtgtggctgggtgcagtggctcacacctgtaattccagcactttgggagacctaggtgggcrgatcacctgaggtcaggagtccaagacaagcctggccaacatggtgaaaccccttctctactaaaaatacaaaagttagctgggtgtggtggtgcatgcc

SEQ ID NO: 42398 - DNA, 201 bp, Homo sapiens
gaatattgccaaggataagaagtttatttcacaatgattaacagtacactgacacactgaaaattttaaaatattgctaaaagaaagtttttgaaaggccyaaaaagccagaacgatatgccttcctcaagggtcagaggattcaatattattaaaaagtgaattttccccaacttgacctgtagatccaatacaatccca

SEQ ID NO: 42399 - DNA, 201 bp, Homo sapiens
gctgggattacaggtgcatgccaccatgcctggctaactgttgtattttttacaatttaatacaattacaattgtattttagtagagacagggtttcaccmtgttggccaggctgaactcttgatctcaagtgattcaagtgattagtatttgcatgatacatctttctccaccttcttacctttaaactgtctacagttt

SEQ ID NO: 42400 - DNA, 201 bp, Homo sapiens
aacagcttatgctgtgtgcctggaaaagccacagacagtgtcagcccatgaaagcagccaggaggagggttgtaccctgcaaagtcacaggagtggagctkccaaagactatgggaacccacctcttgcataagcatgacctggatgtgagacagagactcaaaggaggtaattttgaagcgttaagatttgactgccccg

SEQ ID NO: 42401 - DNA, 201 bp, Homo sapiens
ataaggaaagaggagccaaatgtttttcaccaagaaaatggggaaagtgtctccagggcatatcagaggtcttcacagaagcccctcccatcacagacctrgaggtccaggaggaaaaaatggtttcatgggccagacccagggcctggcagctttgtgtagtctcaggacttgggatgacttgcatcccagccactccag

SEQ ID NO: 42402 - DNA, 201 bp, Homo sapiens
ctctgcctcaataaataaataaataataagtaaaatgaaactatgactgtgtatactgtcaatattatatgaaaacattatcaaacaggcctcaccaacartaagttctctctggacctatccctttgcttgacttactaattaggtctcagactctgtgaaattagccatgaactaagagaacattgataaattacacat

SEQ ID NO: 42403 - DNA, 201 bp, Homo sapiens
gaatctcctgctctgtggaagctgttctcatgctgggggactcagtgtggctgcttgactggatgagacagaggatgtgaagagccaggttggcatctagyacaaacccacagacacgggttcctccccactctgtctttctcacctctccttcacttttcctaggtatgtaaagaagacattaagaacacggcaaaggcc

SEQ ID NO: 42404 - DNA, 201 bp, Homo sapiens
ggatctgcagccctcacccgagtagcgagcatctaaagcaggactagacgaggcaagggagctgcaccagggctacccctgagaaagccccagctctcctyggctttctcagtgatgtgtggctttcgtgggctcctcaaaaacagaaactatctttttttattattattatctgtccctttttgctgtttttgataactt

SEQ ID NO: 42405 - DNA, 201 bp, Homo sapiens
gtgatggtgtgcatgcacagacacagcctccagggagccgtgagcagaaggggacctccagctgcatccaggactccctctccaacccagccacatcagargggaagggtaccacttggctcatagcgctttcgagaaaccctggatgccagtgaagtcatggggaggctgtgggccaggatccacagggctgcagctggg

SEQ ID NO: 42406 - DNA, 201 bp, Homo sapiens
gtgaaagtccttcctggagtaggagtgatggtgtgcatgcacagacacagcctccagggagccgtgagcagaaggggacctccagctgcatccaggactcyctctccaacccagccacatcagaggggaagggtaccacttggctcatagcgctttcgagaaaccctggatgccagtgaagtcatggggaggctgtgggcc

SEQ ID NO: 42407 - DNA, 201 bp, Homo sapiens
gtggctcgcacctgtaatcccagtaccttgggaggtagaggcgggcagaacacttgaggccaggagttcaagaccagcctggcaaacatgaagaaaccccrtctctactaaaaatacaaaaactagttgggcatagtggtgcacacctgtaatcccagctacttgggaggctgaggcacgagaatcacttgaatcccagga

SEQ ID NO: 42408 - DNA, 201 bp, Homo sapiens
tgtggctgcttgactggatgagacagaggatgtgaagagccaggttggcatctagcacaaacccacagacacgggttcctccccactctgtctttctcacytctccttcacttttcctaggtatgtaaagaagacattaagaacacggcaaaggccaaatttacattgacttaaatctaagactggttcatgaccaaaaat

SEQ ID NO: 42409 - DNA, 201 bp, Homo sapiens
cctagctcttttattattatctgtatttagaattgcttgtttattttgatgagaggattttaaaaaacaacatatggataactaatttaaatattatgggkttttttttaccacctagacattttatcattcggaaaaagacaagtcactaatagccctagaaaaaggtgaatcttgggactgtgactgcacgtagatcct

SEQ ID NO: 42410 - DNA, 201 bp, Homo sapiens
aataaggatattcaagcacccctatatagaagcccacatggtgagaaactgtggtttcctgccaatggtctgagtgagcaatcttacaaacagatccttcrgtcccagtcaagccttcagatgactgaaaccttggctgacatctttcctacaacctaatcagacaccctgagccgaaccctccagccaagccagttttct

SEQ ID NO: 42411 - DNA, 201 bp, Homo sapiens
tgaacccgggaggtggagcttgcagtaagccgagatggtgccactgcactccagcctgggtgacagagccagactccgtctcaaaaaaaaaaaaaaaaaaraaaaaacctgaagaaaccagaatataaactttatataataataatgtatcaatattggtgtattcattgtaacatgtatgcaaaacaaatgtaaaatgtt

SEQ ID NO: 42412 - DNA, 201 bp, Homo sapiens
gtggtgaattgcaaatcagcttggaaatatctccatctgacctcatcaaagacaataggatggaaggacccctatcatttgctaagctataaatgtatttkctcttgctaaaacactcagttcctaaaacggcctttgaaaatctcggggcacctagctcttttattattatctgtatttagaattgcttgtttattttga

SEQ ID NO: 42413 - DNA, 201 bp, Homo sapiens
atgtaagatgtgactttgctcttccttcatcttccatcatgattgtgatgccacctcagccatgtggaactgtgagtcaattcaatctctttcctttacamattactcagtctcaggtatgtctttattagcagtgtgagaacagactgatacagagaggaagtttaactgcccttctcttgagtatggactggacttagt

SEQ ID NO: 42414 - DNA, 201 bp, Homo sapiens
aggcatgattggttttgaaatgtgaggacatgtgatttgcgaggagccaggggtggaatgatatagtttggctgtgtccccacccaaagctcatcttgagytgttgctcccataattcccatatgtcatggaagggacccagtgggaggtaactgaatcatcagggcaggtctttcctgtgctattctcattctagtgaat

SEQ ID NO: 42415 - DNA, 201 bp, Homo sapiens
acctagctcttttattattatctgtatttagaattgcttgtttattttgatgagaggattttaaaaaacaacatatggataactaatttaaatattatggrgttttttttaccacctagacattttatcattcggaaaaagacaagtcactaatagccctagaaaaaggtgaatcttgggactgtgactgcacgtagatcc

SEQ ID NO: 42416 - DNA, 201 bp, Homo sapiens
actgaaaacacaaaaattagccgggttggtggtgcacatttgtaatccaagctactcaggaggctgaggtgtgagaattgcttgaacctgggaggtggagrttgcagtgagccaagattgagccactgtactccagcctggatgacagagagagctagactctgcctcaataaataaataaataataagtaaaatgaaact

SEQ ID NO: 42417 - DNA, 201 bp, Homo sapiens
attttagggggagaggagaaaaaagcataacatgtttcttctctccttctctcacatggccaactgttaacagcctcctcaccaccatctgatctatcttrttctcttcacaaaaggctctgaagacatcatgaacccacaacgtaagtggtgaattgcaaatcagcttggaaatatctccatctgacctcatcaaagaca

SEQ ID NO: 42418 - DNA, 201 bp, Homo sapiens
gtgcctttctgttttaagaaggtctcttttaatggagaattaaattcatttaaatggactgtggtttctgaaatatgtggatttattcctaccatgctttmattttttctttgctttttttcctgatacctctttttctgttcctgtttctccttccctttatggcttcaactggattgagtaaggtggttttgtttgttt

SEQ ID NO: 42419 - DNA, 201 bp, Homo sapiens
ctagtatgaaggctcatctatcttcacagaaatagaagtggcacaggatgaagtctggtccagaatgaccatactagacactgggcagatgtctgagcccrgtcagcagtgaggagcactctggaactgggagtgaggatctggtccaggggtcctgttctcagaaggcctctctttcaacaacttgtagcaagaagaaaa

SEQ ID NO: 42420 - DNA, 201 bp, Homo sapiens
gccatgagagacttgcaacaatgtacttggatacgtagtacataggttttctgagaagggctgcaaagaatgtgagttctgtaaatagctaaatgtgcagraagaatctataggaagatggtgatgaaaaatgcaatgtaatcctggacagtgcttataaatatcagcttcccagctattccaagggcactgaacatgagc

SEQ ID NO: 42421 - DNA, 201 bp, Homo sapiens
tcctttttcttcttcttctcctccttctccttcttcttcttttcttctcttttctttctttctctctttctttctttctttctttttctccttcttcttcytcttcttcttcttcttcttcttcttcttcttcttcttcttcttcttcttcctctccttcttcttcttcatgtgtggtccaactgctgtctacctactttc

SEQ ID NO: 42422 - DNA, 201 bp, Homo sapiens
agctcctttttcttcttcttctcctccttctccttcttcttcttttcttctcttttctttctttctctctttctttctttctttctttttctccttcttcytcttcttcttcttcttcttcttcttcttcttcttcttcttcttcttcttcttcctctccttcttcttcttcatgtgtggtccaactgctgtctacctact

SEQ ID NO: 42423 - DNA, 201 bp, Homo sapiens
attccaacactcagttatctccgtctcagttacaacagaaacctaggagtgatccttgatttttcctttcgctgaagtcctacatccaacctattaaaaargctgtctctaaagcagattttctccaaaatatgtcttgaatctacccgtctctcttcaacttccttgtcacccaccactgaatgccagacaaccaccaag

SEQ ID NO: 42424 - DNA, 201 bp, Homo sapiens
gtccattctttatttcaatagataatatctgcccttggatgtggcttttctaatttacacttccaatggtgttttcattcttccctgccctacatttttaytttttaaaaatttaaaaagtattgttgtcctagcatataaagcaggggtttccaacccctaggccatggtccgaaatttttttaaaatttacacttccaa

SEQ ID NO: 42425 - DNA, 201 bp, Homo sapiens
tggctatttcttatgcatttacgtactcataggctctattggaagcatacaatgttgtcttatgtgtacccctgtgcatctgtatgtatgtgtccatgtgmgtgcatgtttctctaactggaataataaaatacatatttttctccaactcacttttctttttttttcgagacagagtctcactctgtcacccaggctgga

SEQ ID NO: 42426 - DNA, 201 bp, Homo sapiens
actagcaaagactgtgcagctgacagagtgccacctcccaatatctaatagcaaccatcaaaagatcaaaaaccatacactgatgttctctattgctcgtrcagtttagcaggttaaattttgcagattacagctctagttcactaaaatcagttttatctatgcctataatagcagtgtggccataataaaagccacatc

SEQ ID NO: 42427 - DNA, 201 bp, Homo sapiens
tagttggaattcacacatgcataaacctggatgtgagagagagctgcttcatgggaacccttgaccaatggggaataggagtgggtgaggagcaaattctyttatccatcccacaggtggacaattctgagatgcgttcattcttcatggttcctcagaggatcccagcagtattgagacataatcacccatgacaggtct

SEQ ID NO: 42428 - DNA, 201 bp, Homo sapiens
gcagctttgtgtagtctcaggacttgggatgacttgcatcccagccactccagctttggctaaagagggcaaaggtacagcttgggtcatggctttagagrgtgtaaatcccaacccttggcagcttccatgtggtgttgagcctgtgggtgcacaaaagtgaagaactgaggtttgggagcctccgcctagatttcatag

SEQ ID NO: 42429 - DNA, 201 bp, Homo sapiens
gctgtatgactttggatacattctgtcatccctcagagccgctgttttcttacatgagaaataaaattaatggcccctaaagagttgtgtgtgggacgggygcagtggctcacgcctgtaatcctagtactttgggaggccgaggcgggtggactgcctgagctcaggagtttgagaccagcctgggcaacacagtgaaac

SEQ ID NO: 42430 - DNA, 201 bp, Homo sapiens
ggaaaaaatggtttcatgggccagacccagggcctggcagctttgtgtagtctcaggacttgggatgacttgcatcccagccactccagctttggctaaaragggcaaaggtacagcttgggtcatggctttagagggtgtaaatcccaacccttggcagcttccatgtggtgttgagcctgtgggtgcacaaaagtgaag

SEQ ID NO: 42431 - DNA, 201 bp, Homo sapiens
cccatgcagatgattttccccgagtgactactccctccaggatctgcctgcatgccttgtcttatgcttattcaccgatgtcagcagtttcccaccccttygctatctgacccaggtcttatagctgtttttgtaaaagtcctgatccaatacaagccaactcagtgacacaaaaataaactcgtgcctttctgttttaag

SEQ ID NO: 42432 - DNA, 201 bp, Homo sapiens
aaattaatgtagaaactgccttgtacaaaattattaaattacaaattgaccaaatggaatgacagtagaaataagatgaaatgagacaagcctggccaacrtggcaaaaccccatctctactgaaaacacaaaaattagccgggttggtggtgcacatttgtaatccaagctactcaggaggctgaggtgtgagaattgct

SEQ ID NO: 42433 - DNA, 201 bp, Homo sapiens
ttgaattaaaaagcaaaactttactagatgctaccaacaagaagtgcactttaaaggtaaagacacaattatgctaaaaggaacatgatggaaaatgatayaccatgttaacaccaataaaaagcaagttggagtggctatattaatattagacaaagtgagcctgggcaacatagtgagaccttgtctttacaaaaaata

SEQ ID NO: 42434 - DNA, 201 bp, Homo sapiens
agtgctggaattacaggcgtgagccactatgactggccagcttggcaatttcaaccaaaaaaaaagcctagtgctattatggtagagatgtcatggaatcyatagactgacatcttaaaaatattcagtcttttaattcataaacatggtatataccttcaattatttaggtattctttaatctctctcagtaacactttg

SEQ ID NO: 42435 - DNA, 201 bp, Homo sapiens
cccagactggagaatcggagcagcgcaaattccctgcaggcaggatgcaggcaagataggcaggctacacagggcagtgccgtcctagattttgtctggcycagatgcagtcccttctgactggctgaatcaccaaggctgggcctccgacatcatccacctaccttcacaccaggaaaggaatatctgggctctcagctt

SEQ ID NO: 42436 - DNA, 201 bp, Homo sapiens
ttggcctaatactttatctattaaaagatttaggtggcatttctcctttattccattaatgtagttctgctttacaattcttgtctggacaatttcagcaktggtcttcattgatgatctttattcttgatgcggagtcacatctgttcccttattcttcaagaaagactattggattttctacactgtgcaacttcagcc

SEQ ID NO: 42437 - DNA, 201 bp, Homo sapiens
agtatcattgaactccaagtaacaggaaagtgactttatgctgggaacatccctggggcctgtgacacggaaggacatggataggtggacacacagcctcrtggacgttgagagccataggtacctccaactgtggtcgctgatccacacagatgctcacgctcatcatgggaaggtacagagggagcggccacctggttc

SEQ ID NO: 42438 - DNA, 201 bp, Homo sapiens
tcattcatattatggtataaagactgtacaaaatcagaaagtatagaccatttggatttttttttttttttgagatagagttttgctcttgttgcccaggytggagtgcagtggcgtgatttcagctcaccgcaacctccgcctcctgggttcaagcaatactcctgcttcagcctcccgagtagctgggactacaagcat

SEQ ID NO: 42439 - DNA, 201 bp, Homo sapiens
cttttttttcttgggcactattttaacatgttgaagttttcttctattcctagtttgctgggagtttatatcctaagtagatgttacctttggcctaataytttatctattaaaagatttaggtggcatttctcctttattccattaatgtagttctgctttacaattcttgtctggacaatttcagcagtggtcttcatt

SEQ ID NO: 42440 - DNA, 201 bp, Homo sapiens
tctatataaacaatcatattatttgaggagagttttacttattttctgatttctatttcttgtgtatttttagcagacttctcaaaatgactaggacttcmaatacgatgttgaacaaaagtggaaaaagcaaacattcttgacttgttatgaatcttagggaaaaaaatcaattctttcaccattaagtatgtgctgtag

SEQ ID NO: 42441 - DNA, 201 bp, Homo sapiens
cttgcacttattagttctagtagttgttatgtggatttcttaggattttctatataaacaatcatattatttgaggagagttttacttattttctgatttytatttcttgtgtatttttagcagacttctcaaaatgactaggacttcaaatacgatgttgaacaaaagtggaaaaagcaaacattcttgacttgttatga

SEQ ID NO: 42442 - DNA, 201 bp, Homo sapiens
ttttatatactttgttaaatttattcctaagtatttgaagtttttgatgctatgtaaatggatttgatttttgctttcattttctgatagcctgctgccaktatataaaaatacagttaacttttctataaaaaatagtgtatcctccagccttgcacttattagttctagtagttgttatgtggatttcttaggattttc

SEQ ID NO: 42443 - DNA, 201 bp, Homo sapiens
gtgcacaggtcttttatatactttgttaaatttattcctaagtatttgaagtttttgatgctatgtaaatggatttgatttttgctttcattttctgatarcctgctgccagtatataaaaatacagttaacttttctataaaaaatagtgtatcctccagccttgcacttattagttctagtagttgttatgtggatttc

SEQ ID NO: 42444 - DNA, 201 bp, Homo sapiens
ggtatataccttcaattatttaggtattctttaatctctctcagtaacactttgtagtttttggtgcacaggtcttttatatactttgttaaatttattcytaagtatttgaagtttttgatgctatgtaaatggatttgatttttgctttcattttctgatagcctgctgccagtatataaaaatacagttaacttttct

SEQ ID NO: 42445 - DNA, 201 bp, Homo sapiens
atggaaaacataatctacaatgcttcataattaaacatagaagaaacctttttcattctattaagcaaagatttcttagatacagtgagaaattatggtaygtatgattttttaaattgctaaatttgactttattaaaaacaaaaatttctttttgaaagattctattcagagaatgaaaagagaagtcactgactggga

SEQ ID NO: 42446 - DNA, 201 bp, Homo sapiens
tcctgccactgagcacatagttctctggcctcaagacaaaacaggttccctggccccacagaactggcattttggtagtggagataataaataaataaatwgatggataaatacattttccaaaaccatggaagcatacattttatgaagaaaatagttgagcaaaataaggggctaggacatgggtgagggactcttgga

SEQ ID NO: 42447 - DNA, 201 bp, Homo sapiens
tttttcttgggcactattttaacatgttgaagttttcttctattcctagtttgctgggagtttatatcctaagtagatgttacctttggcctaatactttrtctattaaaagatttaggtggcatttctcctttattccattaatgtagttctgctttacaattcttgtctggacaatttcagcagtggtcttcattgatg

SEQ ID NO: 42448 - DNA, 201 bp, Homo sapiens
gataaaaactgaagagggcaggcgcggtggctcacgcctgtaatcccaacactttgggggccgaggtgggcggatcacgaggtcaggagatcgagaccatmctggctaacatggtgaaacaccgtctctactaaaaatacaaaaaattagctgagcgtggtggcgggagtctgtagtcccagctactcaggaggttgaagc

SEQ ID NO: 42449 - DNA, 201 bp, Homo sapiens
tctgatttctatttcttgtgtatttttagcagacttctcaaaatgactaggacttcaaatacgatgttgaacaaaagtggaaaaagcaaacattcttgacytgttatgaatcttagggaaaaaaatcaattctttcaccattaagtatgtgctgtagacttttttttcttgggcactattttaacatgttgaagttttctt

SEQ ID NO: 42450 - DNA, 201 bp, Homo sapiens
tcccaaatggatcaaattcttgccaagagccttaattacactacggaattaagctcaagaatattcatagtacaagttgagcctccctagtctcaaaattyaaaatctgaaatctttcaaaatccaaaactttttgagcaccaacatgacactcaaaagtcatgctcgtaagaaatgctaattgaagcatttctaattttg

SEQ ID NO: 42451 - DNA, 201 bp, Homo sapiens
ttgctccgatcttataaatttctttcccactccttgctttgagcttgttttactcctttttctagtaccttcaggtggaatctcaaattattaatttgacrtctttcttcttttctaaacatttatgctatttttccaagcatgatttagttgtatcccacaaatttagctataattttgggggtgttttttgttttttgt

SEQ ID NO: 42452 - DNA, 201 bp, Homo sapiens
gccaaagactatgggaacccacctcttgcataagcatgacctggatgtgagacagagactcaaaggaggtaattttgaagcgttaagatttgactgccccrctggattttgaacttgcatggggcctgtagcccctttgttttggccaatttctcccatttggaatagctgtacttaccaaatgcctgtactcctattgta

SEQ ID NO: 42453 - DNA, 201 bp, Homo sapiens
aaccttatcattcccaaggcattggttacagtattcagaaggatcttgcttaagtaatggaaaataactagacctaaactaaatgcttctcaggttcaacytatcaaatcctaaaatcaagtcccaaatggatcaaattcttgccaagagccttaattacactacggaattaagctcaagaatattcatagtacaagttga

SEQ ID NO: 42454 - DNA, 201 bp, Homo sapiens
ctccgtctcagttacaacagaaacctaggagtgatccttgatttttcctttcgctgaagtcctacatccaacctattaaaaaggctgtctctaaagcagaytttctccaaaatatgtcttgaatctacccgtctctcttcaacttccttgtcacccaccactgaatgccagacaaccaccaaggctcatctgaatgtggat

SEQ ID NO: 42455 - DNA, 201 bp, Homo sapiens; identical to SEQ ID NO: 7444

SEQ ID NO: 42456 - DNA, 201 bp, Homo sapiens
gccaagattgagccactgtactccagcctggatgacagagagagctagactctgcctcaataaataaataaataataagtaaaatgaaactatgactgtgyatactgtcaatattatatgaaaacattatcaaacaggcctcaccaacaataagttctctctggacctatccctttgcttgacttactaattaggtctcag

SEQ ID NO: 42457 - DNA, 201 bp, Homo sapiens
aaacacaaaaattagccgggttggtggtgcacatttgtaatccaagctactcaggaggctgaggtgtgagaattgcttgaacctgggaggtggaggttgcrgtgagccaagattgagccactgtactccagcctggatgacagagagagctagactctgcctcaataaataaataaataataagtaaaatgaaactatgac

SEQ ID NO: 42458 - DNA, 201 bp, Homo sapiens
actccagaagctgaggtggtaggatcacttgagctcaggagttcacagctacagtgaactaatgatcatgccactgtactccagcctgggcaacagagcartgtttctaaattcacacacacacacacacacacacacacacacacacacacacacacatatagatatagatatatcaaagtaaattgcagaataaagaat

SEQ ID NO: 42459 - DNA, 201 bp, Homo sapiens
agaataaaatctgtcttcctgttcctcagccttgatgtcgcagagaatgaagggactcccaggtccacccaagtccttcagtttgtgagtgcagctgtcayggcccgctttagcctcccctttccctttgacataactctccaaaggaagaacagttctttcctcctcatgattccttctattaaacacttggctttcttc

SEQ ID NO: 42460 - DNA, 201 bp, Homo sapiens
acatctttacatgcacatactagggattctgcaacaagtctctctgggctttcctcagactcactgaaattttctttttactttcatttactggctccccstcatgtgacttcttgtagttgaaattcctcagaactcatccttgaatcctcttctcctttatactatttcactgggtgacactatttgtttcatgaacgg

SEQ ID NO: 42461 - DNA, 201 bp, Homo sapiens
ctccactgctcccacacatctttacatgcacatactagggattctgcaacaagtctctctgggctttcctcagactcactgaaattttctttttactttcrtttactggctccccctcatgtgacttcttgtagttgaaattcctcagaactcatccttgaatcctcttctcctttatactatttcactgggtgacactat

SEQ ID NO: 42462 - DNA, 201 bp, Homo sapiens
aagctttcattttgctctgttccatcatgattcactcttcttctcctccttctccctccttctccctcctcctcctcctccagctcctttttcttcttctyctcctccttctccttcttcttcttttcttctcttttctttctttctctctttctttctttctttctttttctccttcttcttcttcttcttcttcttctt

SEQ ID NO: 42463 - DNA, 201 bp, Homo sapiens
ggtttcaccatgttggccgggctggtcttgaactcctgacctcaagtgatccacctgcctcagcttcccaaagtgctgggattacaggtgtgagctactaygcccagcccaactcattttttcactgaaaaatgtgttcaaatatctgtctacactggcatggatggctgtctcattcctttacaactgctgcagagcacc

SEQ ID NO: 42464 - DNA, 201 bp, Homo sapiens
cagcatttgagaaacacagcctctgctaaagctactttcttcacatgctgtttacacttttcacttttaaaaacgttaatttttcagttattaatacatcracacattcatcttgaaataaagttaaaatataccagataaatccaaattctttccccccagatcctagttcctctttctccaccccaatggtaaccactg

SEQ ID NO: 42465 - DNA, 201 bp, Homo sapiens
atttttgtcattttgtggtacagatagtgatttcttggatcatctttctccaagcttgtttggcattttctttcctttcttcttcctttttttttttttttgtggcaaagtcttgctctgtcacccagggctggagtgcagtggctcaatctcggctgactgcagtctcaacctctgcagactgaagtcatccttctgcct

SEQ ID NO: 42466 - DNA, 201 bp, Homo sapiens
ttatttttcttcatccatttgcctttaactcccatgtgggctgctctttatctaccataggcagaaccatatatttccattcctatgtaataggatcccartgagtctttttctcccaaaagatgcagcaacaaaaagttagggattatagccatggaaaagacagtcagttgtttcttacaatggaatagtaatagtcta

SEQ ID NO: 42467 - DNA, 201 bp, Homo sapiens
gatttttgtcattttgtggtacagatagtgatttcttggatcatctttctccaagcttgtttggcattttctttcctttcttcttcctttttttttttttttgtggcaaagtcttgctctgtcacccagggctggagtgcagtggctcaatctcggctgactgcagtctcaacctctgcagactgaagtcatccttctgcc

SEQ ID NO: 42468 - DNA, 201 bp, Homo sapiens
aacaacacgggttatcaacaagaaaggaggggagataaatatgcagttaaagaactgatcagttaactaccttactagtttgagtcacttacaagtagaasatttctgattataaaaagaatacttcaaagtcaactctaggccgtatggttgggaagtaacaccagaaataagtgaataaactacatggaaacccataat

SEQ ID NO: 42469 - DNA, 201 bp, Homo sapiens
ttgatttttgtcattttgtggtacagatagtgatttcttggatcatctttctccaagcttgtttggcattttctttcctttcttcttcctttttttttttktttgtggcaaagtcttgctctgtcacccagggctggagtgcagtggctcaatctcggctgactgcagtctcaacctctgcagactgaagtcatccttctg

SEQ ID NO: 42470 - DNA, 201 bp, Homo sapiens
tcttgatttttgtcattttgtggtacagatagtgatttcttggatcatctttctccaagcttgtttggcattttctttcctttcttcttcctttttttttktttttgtggcaaagtcttgctctgtcacccagggctggagtgcagtggctcaatctcggctgactgcagtctcaacctctgcagactgaagtcatccttc

SEQ ID NO: 42471 - DNA, 201 bp, Homo sapiens
catagtaacttctctgtaatgaatatagtatggaaatgggggtgaaagagtaactttacagtggagaaacctaatgaacactatctcagccaggtaatcaagattaacatcagcagtaataagttatgttgacagtatgtaccttagatatgatatataataaaaatagcattttatctctgtgatctccctcccccaaac

SEQ ID NO: 42472 - DNA, 201 bp, Homo sapiens
acatagtaacttctctgtaatgaatatagtatggaaatgggggtgaaagagtaactttacagtggagaaacctaatgaacactatctcagccaggtaatcaagattaacatcagcagtaataagttatgttgacagtatgtaccttagatatgatatataataaaaatagcattttatctctgtgatctccctcccccaaa

SEQ ID NO: 42473 - DNA, 201 bp, Homo sapiens
acacatagtaacttctctgtaatgaatatagtatggaaatgggggtgaaagagtaactttacagtggagaaacctaatgaacactatctcagccaggtaatcaagattaacatcagcagtaataagttatgttgacagtatgtaccttagatatgatatataataaaaatagcattttatctctgtgatctccctccccca

SEQ ID NO: 42474 - DNA, 201 bp, Homo sapiens
acacacacacacacacacacacacacacacagacacacacacgcactctgtctctccctccttcctctcaacccagagactcagagtactagaaggtgccygtggtgatgtgttggaacctcctaacaatcccagatgtgattaatggaaagcataccaagaccatcacagcctagagaagcaggactgtgccagccacag

SEQ ID NO: 42475 - DNA, 201 bp, Homo sapiens
tttttttttgttattagtttatttcacttaactgagtttactttcaagattcatccatgttgtagcatgtatcagaacttcattccttttaaggctgtgtsgtgtgtgtaccacattttctttattcgttcatctgtcgatggacacttgggttgccatcaccttttgggtattgtgaataatgctgctatgaacatgggt

SEQ ID NO: 42476 - DNA, 201 bp, Homo sapiens
ttttttttttaagttttatttttcttttttcttttattattattattatactttaagttttaggatacatgtgtacaatgtgcaggtttgttacatatgtrtacatgttaaagcgtacattttaaagaaatggtattcagacatatgagccaagaggtcctacaagtgttcaagaataaataaaatatcaagttgttcaaa

SEQ ID NO: 42477 - DNA, 201 bp, Homo sapiens
caacactttttcctccacacacatacacatgtaactatagacagctttcatacaacagattcacaaaacctatactttttccaacctcattttttcatgtrgcaaaatagcaaaatatctttccatactaaatatgaataatgacatgcttcaatagctgtatagtatttaactgtatcactgtaacattatttattgaaa

SEQ ID NO: 42478 - DNA, 201 bp, Homo sapiens
tgttcattgtagaaaaacctgaaaatccagatcagccacaagaaaaaatgtgaatacttgtcttttctgagtgcatcatcagaaaaccaatgacaacactwtttcctccacacacatacacatgtaactatagacagctttcatacaacagattcacaaaacctatactttttccaacctcattttttcatgtagcaaaat

SEQ ID NO: 42479 - DNA, 201 bp, Homo sapiens
aatccatagactgacatcttaaaaatattcagtcttttaattcataaacatggtatataccttcaattatttaggtattctttaatctctctcagtaacaytttgtagtttttggtgcacaggtcttttatatactttgttaaatttattcctaagtatttgaagtttttgatgctatgtaaatggatttgatttttgctt

SEQ ID NO: 42480 - DNA, 201 bp, Homo sapiens
tccatttcttgcagcatatggaaaaataattcaaaattgatcataaatcaaaatggaaaacataatctacaatgcttcataattaaacatagaagaaaccyttttcattctattaagcaaagatttcttagatacagtgagaaattatggtacgtatgattttttaaattgctaaatttgactttattaaaaacaaaaatt

SEQ ID NO: 42481 - DNA, 201 bp, Homo sapiens
cacatagtaacttctctgtaatgaatatagtatggaaatgggggtgaaagagtaactttacagtggagaaacctaatgaacactatctcagccaggtaatcaagattaacatcagcagtaataagttatgttgacagtatgtaccttagatatgatatataataaaaatagcattttatctctgtgatctccctcccccaa

SEQ ID NO: 42482 - DNA, 201 bp, Homo sapiens
gatgatctttattcttgatgcggagtcacatctgttcccttattcttcaagaaagactattggattttctacactgtgcaacttcagcctgcccaccttaygaaactttcaaaaatgggaaattgacccatgcagatgattttccccgagtgactactccctccaggatctgcctgcatgccttgtcttatgcttattcac

SEQ ID NO: 42483 - DNA, 201 bp, Homo sapiens
ttctgtaaatttgaaagctttccaaagtaagaatgcattattatgtattaaaaaagtacttagcagctaacacagtaaaattacagtgtctgacatccaaygcttacaagaaaggcaaagaaacaggaaattcagacacagtatgaggagaaaaattaatcaaagccaacccagaactgatacagatgttaaaatgaacaa

SEQ ID NO: 42484 - DNA, 201 bp, Homo sapiens
ggtggcatttctcctttattccattaatgtagttctgctttacaattcttgtctggacaatttcagcagtggtcttcattgatgatctttattcttgatgyggagtcacatctgttcccttattcttcaagaaagactattggattttctacactgtgcaacttcagcctgcccaccttatgaaactttcaaaaatgggaa

SEQ ID NO: 42485 - DNA, 201 bp, Homo sapiens
ggacttcaaatacgatgttgaacaaaagtggaaaaagcaaacattcttgacttgttatgaatcttagggaaaaaaatcaattctttcaccattaagtatgwgctgtagacttttttttcttgggcactattttaacatgttgaagttttcttctattcctagtttgctgggagtttatatcctaagtagatgttacctttg

SEQ ID NO: 42486 - DNA, 201 bp, Homo sapiens
caggtgcacaggccgggatctgagagagcgcgtgggcagtccacagggcaggtgaggctctgagagagagtgtgggcagtccacagggcaggtgaggctcyggtgtgtgtcacacccacagtttctgctgactgagtcccatgaacagggccagagccaccggcaacttctgtaccccagatccacattcaggcgctttcc

SEQ ID NO: 42487 - DNA, 201 bp, Homo sapiens
ctttgcacacatctcaaacacttccattgctgcctatgtcttactaacatcctaaatcccttccagctgttttacgggactctcctcatcttcccaaccgwaggcaacatcttatcttctgcgaggtccatagcatttttgccttctcatggaacatttattttcttaggctttgtgctatagcttcttctccttgtcttg

SEQ ID NO: 42488 - DNA, 201 bp, Homo sapiens
aaattctcttatccatcccacaggtggacaattctgagatgcgttcattcttcatggttcctcagaggatcccagcagtattgagacataatcacccatgrcaggtctaagttcaagaatacatcctgaattgacttctctcacttccctgtttcaatttccccagtcccttctcatgttccctagggtcacttgtcatca

SEQ ID NO: 42489 - DNA, 201 bp, Homo sapiens
ataatttgtccccaaaactatgcttctggcattatctcttattgcttcagtgccccgcattctctttgggatactcctgaaccccaccttacatgctgtawgcaggccttttactccagtcattgccgtgcaaccaactttgagacagtgtaacctggcagtgtattatctcagcaacattgaacatttctctcttccagc

SEQ ID NO: 42490 - DNA, 201 bp, Homo sapiens
attttgttcatacaacttcttcaataaaacattataatatgtgccccaaagataaagctgaagaatgagatgaatgtgaaattaaaggtttgcatgtcttyctaatcctaatgaattcttaatgtcattcgttaataatttgacacacagtgtatacacttaacccttgaacaacacgattttgaactgcacaggtccact

SEQ ID NO: 42491 - DNA, 201 bp, Homo sapiens
tcactcgaatgtcactatcccaagatgaaacctaaaaatcactttccattctttcttgatcttaccccaccatccactcagctgccatgcccagtttagtyaaccccccaaatgctgcttcatgcaaccttccattcctattccttttgccaacccatgatgtagagatgtggattcatgacattttgttcatacaacttc

SEQ ID NO: 42492 - DNA, 201 bp, Homo sapiens; identical to SEQ ID NO: 7450

SEQ ID NO: 42493 - DNA, 201 bp, Homo sapiens
tcatctgcctttgtccctagcctctgtcccttcctttgggggcagcagtccctctcctgttacacactcagagctgagttactttagcttcctcctcctaycctcctctctaacaagcctcttttccacccccaggaaaaaaatatcatggacctgtatgtggagaagaaagcacagaagccctttctctttttccacaat

SEQ ID NO: 42494 - DNA, 201 bp, Homo sapiens
tttttttttttgttattagtttatttcacttaactgagtttactttcaagattcatccatgttgtagcatgtatcagaacttcattccttttaaggctgtrtggtgtgtgtaccacattttctttattcgttcatctgtcgatggacacttgggttgccatcaccttttgggtattgtgaataatgctgctatgaacatgg

SEQ ID NO: 42495 - DNA, 201 bp, Homo sapiens
agggaagacagtgatgcttcaaagagtcagagcaccttgtgtcagaggatcctggggtggagccaggctatgggaacccagtgagttcccgtttttaacastctaatgccctgcttcatctgcctttgtccctagcctctgtcccttcctttgggggcagcagtccctctcctgttacacactcagagctgagttacttta

SEQ ID NO: 42496 - DNA, 201 bp, Homo sapiens
ccacttttatctcatgggccacatcttaagcatatgaccacattttgctgcaagtgtggtaggaaattttacttctttttgggaagcaacatgtcctggtsacaactggggttctgttattaaggacgaaaaacaaaataggtttgaggagggtgatggagggtctctgccacatggctaatgggaggagcctgtcactat

SEQ ID NO: 42497 - DNA, 201 bp, Homo sapiens
ctatagcacttcccacaatgtgttccatgagactccaatagagagataatgagcagcaagtattcccggcggcttagggtggtgtgaaatcacgctgagawtcctgcttctcctcaggtcctggtagtttcagggcccctccctaggccttacttaaaaggctgaggcatccttggaagagcaggcagactccacggatcc

SEQ ID NO: 42498 - DNA, 201 bp, Homo sapiens
ccttgtctgtatctctagagtacaccacacttcagtaaaatcacatcagggtctccctgaactccctcaccacacactgccctggccaaggagccaaggtsagcctgtgggtctctaggtgtgccagtcatccagatgggggcaaagctgccagtcccactgactgtttgagtgattctcttgggaggctccatcctggcg

SEQ ID NO: 42499 - DNA, 201 bp, Homo sapiens
actctcctttgtctctgaaatctccaaatgatggcgttcctcagggctcagccagtcatcatttacaagccctgtgaatgggtaatgagctgatcttttgsattgatgaatcacccctacactcattcactctgccgtttacacttccaacacagatctcctctctcaatagtttacccgtgtcctcttgaggtcctctca

SEQ ID NO: 42500 - DNA, 201 bp, Homo sapiens
tatcctcacctttgtgagaatggcaataaccctggaggtagatgtggcctctgctcttgctgtagagatgacttagggcaggtgtattcacctatatgagwatgtaagcagagtttattatggtaagatagtaaattcctgttagggagataaatttagtaataattaaagtaactgatattcacttggtgcccactatgt

SEQ ID NO: 42501 - DNA, 201 bp, Homo sapiens
gtcttcggtgggtatgctctcttctcagcaaacatctcagttcttcatgggctttatatgccctggaaagtgtcacagcctgcagagaagcaatgttcccygtggtgacttatcctcacctttgtgagaatggcaataaccctggaggtagatgtggcctctgctcttgctgtagagatgacttagggcaggtgtattcac

SEQ ID NO: 42502 - DNA, 201 bp, Homo sapiens
tatatggtttggaattggaacctacatttaaaagggaagcagagcataaaagtttggaaaacatgcagcatgaagatgagataagaaaaacctattttctraagagaaattcgagctggctgcagaaatttgcataaggaaagaggagccaaatgtttttcaccaagaaaatggggaaagtgtctccagggcatatcagag

SEQ ID NO: 42503 - DNA, 201 bp, Homo sapiens
acactttgcctgttacccagcaatttggaactgggtaaaaggcagaggttggaacagtttggagggctcagaagaagataggaggatgtgggaaagtttgsaacttcctggagactcactgaatagctttgaccaaaatgctgatagtgatatggacaataaggtccaggctgaggtggtctcagatggagatgaggaact

SEQ ID NO: 42504 - DNA, 201 bp, Homo sapiens
aaggtaagggtcagtgcacaaaaaacaatttaattatatcttgaataacacagataactatttattaataatttattgttaaagcatacacttttttttttaagttttatttttcttttttcttttattattattattatactttaagttttaggatacatgtgtacaatgtgcaggtttgttacatatgtatacatgtta

SEQ ID NO: 42505 - DNA, 201 bp, Homo sapiens
catctttaagaaggtgatatggtttggctctgttcccacccaaatttcatcttgaattgtagcttctataattcccacgtgtcatggaaggaacccagtgrgaggtaattgaatcatgggggcaggtctttcttgtgctggtctcatgatagtgaataagtctcacaagatctgatggttttatacaggggaatttcccca

SEQ ID NO: 42506 - DNA, 201 bp, Homo sapiens
gccttgtacaaaattattaaattacaaattgaccaaatggaatgacagtagaaataagatgaaatgagacaagcctggccaacgtggcaaaaccccatctytactgaaaacacaaaaattagccgggttggtggtgcacatttgtaatccaagctactcaggaggctgaggtgtgagaattgcttgaacctgggaggtgga

SEQ ID NO: 42507 - DNA, 201 bp, Homo sapiens
aagaagacattaagaacacggcaaaggccaaatttacattgacttaaatctaagactggttcatgaccaaaaatgcatgtagctagcatggctttcccaaygcagagagaaaaaggcatggactcagctccaacagactggcgtaatgagtgcagaatatgctgtgaggttttaaatttgctgacaagaaaggttaacgtt

SEQ ID NO: 42508 - DNA, 201 bp, Homo sapiens; identical to SEQ ID NO: 7446

SEQ ID NO: 42509 - DNA, 201 bp, Homo sapiens
attttatttgctctcctggatcgagagctgtgatgttctttgcttaaatctaagaaccacaggagaaggcacgggatgacagatttctgttcaatcagtaycagaaggcacttcccaaacaatgtgggtttcctaagccttgcaaggaggtaggctaattccttgtctatctgtagtatggaaaaaataaggccaacataa

SEQ ID NO: 42510 - DNA, 201 bp, Homo sapiens
ttctattaaacacttggctttcttcctgccttcattcacctcagccaagtgaaaagaaacccatacatcctgctgcacacctattatcctgctgtcattastgataccaccccttcccctcttaaaaatgacaccttatatataaattatgtggtcatactacatatgagaaactaagagtgtgtggactaactgctgtct

SEQ ID NO: 42511 - DNA, 201 bp, Homo sapiens; identical to SEQ ID NO: 7445

SEQ ID NO: 42512 - DNA, 201 bp, Homo sapiens
cccctttttgtggagaacagggtctccctatgttgcccaggcaggtctccaattcctgggctcaagctatacctttgtttccctaagtgcttggcttgcargcacgagcccccgttctgtaagcccagtacttagggaggcaaaggcatagcttttttttttttagacaaaatctcgctctgttgcccaggctggagtgca

SEQ ID NO: 42513 - DNA, 201 bp, Homo sapiens
aagcttctcatgagctggcccttttgcctatctttctagtcttgttttttgacctaaacccatcatcattttggcttctgaggagtagtagttccctcaaygtagcaggctgttcacatagccgttggtcatccccctgcctgggaggctccctgaaccctaacgactttgtgagttctaaagctgcctacctgccctgtg

SEQ ID NO: 42514 - DNA, 201 bp, Homo sapiens
ggctctaagcatttcataattagcttctgttgctgctgctgctgttattttggataggagctctttgtttcaccactattcctagtgcttagcacagtagkgagacataggatgtctcctatgtctcactaacagtaataatcataacagcttcttatactgctagtggtgtggtctgaatgtatgtctccaaaaattgat

SEQ ID NO: 42515 - DNA, 201 bp, Homo sapiens
caaaaattgatatgttgaaacctaatcactagagtgatggaatgaggaggtgaatcgtctccgagatgattagctcatgagggaggaaccctcatgaatgrgattagtgctcttacaaaagaggccccagaaagctgccttgccccttccaccatgtgagggcacagctagaaggtgtcatgtatgaaccagaaagtgggt

SEQ ID NO: 42516 - DNA, 201 bp, Homo sapiens
taataataatatatgtacaatagatttgaccatcttccaccattagcatagcctgctttcaggtggaaagggatggcgttagtatttaaagggaatggccracagatattggattcatcagcaccagagattggtgctgtgttgccacttcctgcagctcataccacctgtgtaagtgttgttgtaggtctttgggccact

SEQ ID NO: 42517 - DNA, 201 bp, Homo sapiens
cctcacaagtagtaagtggtagagctgggatccaaacccagatttatttgatgctagagtcttaattccatctgccttaaacttaattgttgctatcctgytactcctacccataaataatatcagtaacagaggtaaagtaattttacatttgtttaatgttggagagagagttataaaataatatatataccttcccca

SEQ ID NO: 42518 - DNA, 201 bp, Homo sapiens
ttttagttttaaaataatcattagtgtcaactattttttttccataaaacaccaagttaactttactttctgttctatagaaatctgattatcaagctgaragaatacattaactttttttgagacaaggggttgttctgttgcccaggctgggagtggcacaatcacagctcagtgcagcctcaacctcctgggctcaaa

SEQ ID NO: 42519 - DNA, 201 bp, Homo sapiens
ggaggcagaggatgcagtaagctgagatctcaccactgcaaaccaacctgggcaacagagtgagactctgtgtcaaaaaacaaacaacaacgacgaaagartagacacataaaatatatatctggacttgctaaacagatgtaagaactttaaagttctacataggccatgcacgatggctcatatctatcaacactttga

SEQ ID NO: 42520 - DNA, 201 bp, Homo sapiens
caatagcatccttcagtcattgacatccagcccttcccctcacatcacagaaccaccccctattcggcagtgccatccaccctaccctcatctttcagaawtgctgatctcaagtgagacagagccttacaacataattacagtacagtaagattttgtcaatagaggtcttagctaagtattatcatacttacagatacc

SEQ ID NO: 42521 - DNA, 201 bp, Homo sapiens
aagccagtgacatacagaataagagagaataacagattactctggccgttaggagactgagagggtcttccacttaggaagcttttgcagttgttcgaccrtaagatgatggaggctttgacaagtgtggtggtgaagataataatgggtagacaaatgtaagaactattgaagagattgacagacttactaatgtaatag

SEQ ID NO: 42522 - DNA, 201 bp, Homo sapiens
agccgagattgcaccattgcactccaacctgggcaacaagagtgaaactccatcttaaaaaaaaaagaaggagaagaagaagaaaaagacaaaaatgagtsgggcatggtggtgtgtgcctgtaatagctcccctagagcctgaggcaggagaatcacttgaacccaggaggcggaggttgcagtgagctgagatcgtgtc

SEQ ID NO: 42523 - DNA, 201 bp, Homo sapiens
taatattccattatatgtatagaccacattttgtttctccattcattcattgatgaacacttgaattccatttgtcttttttttttttttttttttttggkctttttctcccctttttgtggagaacagggtctccctatgttgcccaggcaggtctccaattcctgggctcaagctatacctttgtttccctaagtgctt

SEQ ID NO: 42524 - DNA, 201 bp, Homo sapiens
gtgggagacataggctccacttctaaatcctggcctgggtgctgaggccagaggccggaagccgggaacggaatccacccatcgctcctgggtcctgccawagggtagggtagctgctggggcagttcccttaagcctgccaggcccccgaggatgcaggggaagaaagaacctatcattgctgccaaacttcagagtgcc

SEQ ID NO: 42525 - DNA, 201 bp, Homo sapiens
atgtgctagaacttctaagatctatcgggatcaatgaggtcccaactgttacctggaaagagtttatcaatctaacagaagcttttgccaacaatgagccrgtctccacccttaccccccaacctcagttgcaatcctgacaacacattctttgctgagttctgaatacccagcatgcaaaagaaaattacaatctgggtt

SEQ ID NO: 42526 - DNA, 201 bp, Homo sapiens
ggtcccaacagcacccagcagagccgcagcgccacccctttaccttcacagcttgattcttggtgttgacgggagagttccgcaaggctgcatggaatgcscgaagcatgtcccctgtgcatcaccaccagttaaggatagctaggctcaagcacatccatgccgtcatgaacaagctcacttcagaaacagctcaggaac

SEQ ID NO: 42527 - DNA, 201 bp, Homo sapiens
tgcacagggaggctgcagggcacctctgccaaccatgcaaaccctcctttcaactccctctctaccttccacgtcaaagcaactgtcctggaggggtaacytgatgtaaaattggattgtgctcacttgcacctgcttggtgctgagcactgtatctcccctactggatcctcacagcacccgtacatgtgaactggaggt

SEQ ID NO: 42528 - DNA, 201 bp, Homo sapiens
atggaatgcccgaagcatgtcccctgtgcatcaccaccagttaaggatagctaggctcaagcacatccatgccgtcatgaacaagctcacttcagaaacarctcaggaacagagtcagatgggatctcatccataccacccaccttccacggcttccaggggggcagagacggtttacagcctgcacagggaggctgcagg

SEQ ID NO: 42529 - DNA, 201 bp, Homo sapiens
cgtttgttctggaaaatctggcctgctgatcgaaccccaaggcaagccaggtggctcactggggcgcgtggcagcgttcacataccttttcgtgccactgsagtaacactgcgctgctattttctgtgggcttctcaaagcctttataaatgtacttcattaacaagtcaacgccgtttctgtccagtgactgcacagcct

SEQ ID NO: 42530 - DNA, 201 bp, Homo sapiens
ccctgtgcatcaccaccagttaaggatagctaggctcaagcacatccatgccgtcatgaacaagctcacttcagaaacagctcaggaacagagtcagatgrgatctcatccataccacccaccttccacggcttccaggggggcagagacggtttacagcctgcacagggaggctgcagggcacctctgccaaccatgcaa

SEQ ID NO: 42531 - DNA, 201 bp, Homo sapiens
tcacaaacctgtctccacatgagctctaaggtgtctgaaactcaaaacatcggaaaacacacttcggcttcactgtgttccctggctgccatgccaccttycccatctcagtagacggcaaaagccttggagttgtcctatctgccttggttctttctctaccagcatccaggctgttagcagattccttcagcaccccct

SEQ ID NO: 42532 - DNA, 201 bp, Homo sapiens
gccctcacagctcttctctgcactgtgcgccctcctctgcgatctcagccatgccctgcgcagctgactcccctccctacctcccgcccagacagctccayggacactagcctcacaaacctgtctccacatgagctctaaggtgtctgaaactcaaaacatcggaaaacacacttcggcttcactgtgttccctggctgc

SEQ ID NO: 42533 - DNA, 201 bp, Homo sapiens
atcctgttcccccacctccccaagcactacgccagccgcctcccccttcttgcctaggtcgttttttcttggaatcgtcccatctactgagaggtgcgccrttgtgcaggcaccttatgaaagccctcggcttgcacccctttgccctgctgctgcgtctctgctcacctgccgtgctgacatgttaaaacttcctatatc

SEQ ID NO: 42534 - DNA, 201 bp, Homo sapiens
gatgtcagggagtatggcttggtaactgttcccgtagtccacatgaggtgtagagggcctgaagtaaatcagccagcctggagaaggagatcgcatatcartatgttgcacaagaggcataagtggaacttggccactgattctttttctgtccctaactttgcctaacacagtgacctgtgtaagatgtgttgttttggt

SEQ ID NO: 42535 - DNA, 201 bp, Homo sapiens
ggcagtccagtccctctgtctttcagttctggagttccttttccccatccaaacaaggccagcctgatatcagccactgataacctctactttgtaactcctttttttttttgagacggagtctcgctctgtcgcccaggctggagtgcagtggcgcaatattgcctcactgcaagctccgcctcccaggttcatgccatt

SEQ ID NO: 42536 - DNA, 201 bp, Homo sapiens
ttggcacttgctgagccttccgtttggaagtgcctttccctggtcatcctcactttctttatgccaccctgaccagcctcaccaccagaaccccaccctccctcaccatgctgcctcttctccatgcctcttcataccctctgatacactgtggatttgattattgatttcttttttttttttttttgagacagagtctcc

SEQ ID NO: 42537 - DNA, 201 bp, Homo sapiens
cttggcacttgctgagccttccgtttggaagtgcctttccctggtcatcctcactttctttatgccaccctgaccagcctcaccaccagaaccccaccctccctcaccatgctgcctcttctccatgcctcttcataccctctgatacactgtggatttgattattgatttcttttttttttttttttgagacagagtctc

SEQ ID NO: 42538 - DNA, 201 bp, Homo sapiens
ccttggcacttgctgagccttccgtttggaagtgcctttccctggtcatcctcactttctttatgccaccctgaccagcctcaccaccagaaccccaccctccctcaccatgctgcctcttctccatgcctcttcataccctctgatacactgtggatttgattattgatttcttttttttttttttttgagacagagtct

SEQ ID NO: 42539 - DNA, 201 bp, Homo sapiens
caggcacgtgccaccatgcctggctaatttttgtatttttggtagagacagggtttcaccatactggccaggctggtctcgaactcctgacctcaagtgayccacctgcgttggcctcccaaagtgctgggattacaggcgtgagccaccatgccctgcctgagatggagcttttaggacttaggaatgagaaaaaaatag

SEQ ID NO: 42540 - DNA, 201 bp, Homo sapiens
ctggtgtgtagtggaacgatcttggcctactgttacctcaacctcctgggttcaagcagttctcatgccccacctcccaagtagctgggactacaggcacrtgccaccatgcctggctaatttttgtatttttggtagagacagggtttcaccatactggccaggctggtctcgaactcctgacctcaagtgatccacctg

SEQ ID NO: 42541 - DNA, 201 bp, Homo sapiens
aaggctgagggaggagaatgacgtgaacccaggaggcggagcttgcagtgagtggagatcatgccactgcactccagcctgggcgacagagcaagactccrtctcaaaaaaaaaaaaaaaaaaatactgtgtgaagatgttaattgctgcattcttttagatgggaaaaacagaaagcctaagtaggcagcacagtaggca

SEQ ID NO: 42542 - DNA, 201 bp, Homo sapiens
cctctttcgtctatacttcctttctacagctgtggaagtaaagcactgatagctgcctttaagggtttgtttgggtgggaggagggggttatgaaatgaargtatttgtgaaccgtcctataaactttataaactctctggtatttggtagaggctcaataaatgtcatggtccccacccttcaccctccagcctttccac

SEQ ID NO: 42543 - DNA, 201 bp, Homo sapiens
gaggttacagtgagccaagattgcactactgcacgccagcctgggcaacagagtgagactccatctcaaaaaaaaaaaaaaaatagctgggcgtggtggcrtgcgcttgtagtcctagctacccaggaggctgaggcaggagaatcgcttgaacccagcaggcggaggttgcagtgagctgagatcacgccactgcactcc

SEQ ID NO: 42544 - DNA, 201 bp, Homo sapiens
gaggctgaggcaggagaatggcgtgaacccgggaggtggagcttgcagtgagccgagatcatgccactgcactccagcctgggcgacagagcgagactccrtctcaaaaataataataataataataaagctccccaaggccagaccttattcagtaaataagaaggctttctaagagaaattcatagatgtagcttgaat

SEQ ID NO: 42545 - DNA, 201 bp, Homo sapiens
aatgatgtgaacccgggaggcggagcttggtggagccgagattgcgccactgcactccagcctgggtgacagagcaagactccgtctcaataaataaataratagataaataaataaagtagggcactcatatggctaggaggccatgagtcctgaagagcccatcacagatggcacccctgtcggtaggcaggggagagc

SEQ ID NO: 42546 - DNA, 201 bp, Homo sapiens
ggtgacctatcattgcccacctgccccagaggccacgtaaggttgggttgagtttttgcaggaagtatgggaaagcctcccttgaaggtagactttgcatstgaccccagagcttctagttaagtggctttaggcctttggtaagtccttaacaaatctgagtctcctctgatgaggactctagccttctacttacacctc

SEQ ID NO: 42547 - DNA, 201 bp, Homo sapiens
agcctcctgaagtgctgggattattggtgtgagccaccgtccctggtcattacttcttcttctttccataaccaattgttccagtcccccactccattcaygtggcctgcgagtctgacttcttgttcttggctactgtccttagaccagctcttcaggataggcccctagccttggtgtgggtcctggcgggggtgctcg

SEQ ID NO: 42548 - DNA, 201 bp, Homo sapiens
atgtcactccctcctcaagcctacctggaggtgcttccttcccaggtggggccctttttgccctacgatagtgatcatagtttggaccaggtgaacctccygtgtgattttttccacctgtctcagagggttcggtgtagcatctttcccactggtttttcagaaaatcagacccgataatgagctcttcgaagtccggga

SEQ ID NO: 42549 - DNA, 201 bp, Homo sapiens
tagtagactcaggactcagggaatgcagtcagctgcgtgggcccctgtgctctctaggaagctgggagacaaatgttataaagaaactcttaccccatagkatgcccttttctgatttttcaactataattacctggaaagtggtccatgtccacgggcctagtgggctctaattctgtgaggtgacctatcattgcccac

SEQ ID NO: 42550 - DNA, 201 bp, Homo sapiens
gagaccagcctggccaacatggcgaaacccggtctctactaaaaatacaaaaattagctgggtgtggtggcacatgcctgtagtcccagctactcgggagsgggaggcaggagaatcgtctgaacccaggaggcagaggttgcagtgagctgagattgcgccattgcactccagcctgggaaacaagagagaagctccatc

SEQ ID NO: 42551 - DNA, 201 bp, Homo sapiens
caatctgctggattgttaaactttctcttctgcaaacttggagctttaatcagaggatgcctctttcattccctaaacataactggataaaaaggaggaamgattctgtcactttcttatatgcccccagactcccgtggcccctttcaaagcaccttggataatgggacattgtagtacttgcccagcttggtcatgact

SEQ ID NO: 42552 - DNA, 201 bp, Homo sapiens
aatcaacagctgcttgaaagtcatgctgtcaaaacactgctcttgctgatatttccagggagaccttaaagcaaggccttaaaagatgataaggacctttsttttgcttgtttatatcagggaccatgtacagaaatgaagaaacaatctgctggattgttaaactttctcttctgcaaacttggagctttaatcagagga

SEQ ID NO: 42553 - DNA, 201 bp, Homo sapiens
tgcatccttggagaagagactagaacagaacttatcaggagaagaacacgtgcaagaactcctgaaagaggtaacttctgttctctttgggctggctggtrttggaaaggcagggttgattctggtgacttcacaattcctagagtttcagagctgtagggccagcaaacagcatggtaacaaaagaagtgtctccaactt

SEQ ID NO: 42554 - DNA, 201 bp, Homo sapiens
ttggcttgtcctgcttacatcagaaagagccttatgtcccctgtgggtgacatgcttttctcagggaaagggagagctgtattcagagatacatacaaacrgatagcatctcatcaccaataaaccacacctagtgatttccgccacttgggctgccttgtctttctgcactgccctcttccccaccattttgtactctgc

SEQ ID NO: 42555 - DNA, 201 bp, Homo sapiens
aagatgtggtcaggatgtttcttcccccacctttctccatgtgggctctcttcagcttagttgcatcccatggccaaagtcacagcttcagttggaccttyggtttgccttcttgacatagtttttgtctctctgggtttcctataacctcttcatctttttgcctctttatggccaactgttgccagcacattatctttt

SEQ ID NO: 42556 - DNA, 201 bp, Homo sapiens
ggcctacccagcatcagtctctcttccttcactctctgacacagtctcccacgctcactgccaaactgatcctcctaatcagcactggtgaccatatcackctcttaaacatcttctacaattcccttcaacagtctacaggaagtgtaatgtgggttctagggaataaattgatttctagaatcagaatgtccatgcttg

SEQ ID NO: 42557 - DNA, 201 bp, Homo sapiens
atgtttaatgtgcatagaaattacttgggaagtttgtttaaagtatatatctctaggccaggcgtggtggctcacgcctgtaatcccagcactttgggtakccgaggcgggcagatcacctgaggtcaggagttcaagaccagcctggccaacatggcaaaaccccgcctctattaaaaatacaaaaattaggccaggcgc

SEQ ID NO: 42558 - DNA, 201 bp, Homo sapiens
atgccactgcactcctgcctggtgacagagcgagactctgtctcaaaaaaataaataaataaataaattagctgggcatggtggcgggtgcctgtaattcyagctactcaggaggctgaagcaagagaatcacttgaacccaggaggcggaggttgcagtgagccaagatcgcaccactactttccagcctgagcgacaag

SEQ ID NO: 42559 - DNA, 201 bp, Homo sapiens
agcgagactctgtctcaaaaaaataaataaataaataaattagctgggcatggtggcgggtgcctgtaattctagctactcaggaggctgaagcaagagartcacttgaacccaggaggcggaggttgcagtgagccaagatcgcaccactactttccagcctgagcgacaagagtgaaattccatctcaaaaataataaa

SEQ ID NO: 42560 - DNA, 201 bp, Homo sapiens
cgtatataaacgctgacagcgttgatgtcagagaagcctcaccacctagggagcgccaggaggcttccctggaagccccgcccagtgccaactcactcccwctgatgtggatgaaagctcacactcgcactgggcagacacccacagccctggtcccaacagcacccagcagagccgcagcgccacccctttaccttcaca

SEQ ID NO: 42561 - DNA, 201 bp, Homo sapiens
tagccgttggtcatccccctgcctgggaggctccctgaaccctaacgactttgtgagttctaaagctgcctacctgccctgtggcagggagtatctcccaycctgtgcttcttcctctttgtggacacttactgtactctattgtgtaattttttattagtcttttgttccagcctcaaggtcaagggactatttcaaatt

SEQ ID NO: 42562 - DNA, 201 bp, Homo sapiens
ataaaacctaaagagactaagtactataggagaagattgttcccagcaagcctgcacctggctctcctcctccagcatgcatgagcgttcctatatatgcmtttctgacttttccagcattggcatttccaagcctttacaatttttgccagtttactgagtgtggagtggtatttcattgctttaatttgcattgctatg

SEQ ID NO: 42563 - DNA, 201 bp, Homo sapiens
cacctgcttggtgctgagcactgtatctcccctactggatcctcacagcacccgtacatgtgaactggaggtcgttctcatcttctcattctaaaaaagcrgaaaatgtaggtacaaagggagacctcctaactcttcatcaatgctcttcatcaattaaactattaaggaaattaagatgtgctagaacttctaagatct

SEQ ID NO: 42564 - DNA, 201 bp, Homo sapiens
cctcatatcctgttcccccacctccccaagcactacgccagccgcctcccccttcttgcctaggtcgttttttcttggaatcgtcccatctactgagaggygcgccgttgtgcaggcaccttatgaaagccctcggcttgcacccctttgccctgctgctgcgtctctgctcacctgccgtgctgacatgttaaaacttcc

SEQ ID NO: 42565 - DNA, 201 bp, Homo sapiens
aatctctaattcacttacaaactgtctttctgtatggtcttaggtagggatctaaatatggagaaattctgcatatttctcaaaatcatttactaaacagyctgtcctttctgaattgattcctcttgctaactttatcacgtattgtttccgtctgcacatgggtttgtctctgcattctctgtccattggtctgattgt

SEQ ID NO: 42566 - DNA, 201 bp, Homo sapiens
tgtttgtccttttgtgtctggcttatttgacttagtatatacatcttcagtgttcatctatgttgtagcatatgtcagactttcattccttttttttttttaacagaattttttttttttttagaatttttttgagatggagtcttgctccgtcatcaggctggagtgcagtggcacgatctcggctcactgcaacctccg

SEQ ID NO: 42567 - DNA, 201 bp, Homo sapiens
acaacctccgcctcccaggcacaagcgattctcctgcctcaacctcccaaagagctggaattatgggtgtgtaccaccacacccggctcatttttttttttgtatttttttaatttattttattttatttatttttttttttttgagacagagtctggctctgtagcctgggttggcgtccagtggtgcaatcttggctca

SEQ ID NO: 42568 - DNA, 201 bp, Homo sapiens
cctgacctcaagtgatccacccatctcagcctcccaaagtactgggaatacagcaccatatatttatttatttatttatttttattttattttattattawttttttgagatggactcccgctgtatcacccaagctgtagtgtagtgtcctgatctcagcctaccacaacctccgcctcccaggcacaagcgattctcct

SEQ ID NO: 42569 - DNA, 201 bp, Homo sapiens
cttaggtgatccgcctgccttggcctcccaaagtgctaggattataggcatgacccactgcgccaggcccttatttatttatttatttatttatttatttatttatttatttattttttggagacacagtctcactctatcccccaggctagagtgcaatagtgccatctcggctccctgcaacctccgcctcccaggttg

SEQ ID NO: 42570 - DNA, 201 bp, Homo sapiens
cgcctgccttggcctcccaaagtgctgggtttataggcgtgagccaccgcgcccggcctgtgatggtatcttatttttaatctttctttttttttgagatrgagtctcactctgtcgcccaggctggagtgcagtggcactatcttggctcactgcagcctctgcctcctgggttccagcgattctcctgcctcagcctcc

SEQ ID NO: 42571 - DNA, 201 bp, Homo sapiens
acttaacacaatattttcatggaattcaccttacttttttttttttacttaaataagtatatttatgtatttatttatttatttatttatttatttatttagagatacagtcttgctctgttgcccaggctggagtgcagtggtgtgatcttggctcactgcagcctccacctcccaggttcaagtgattctcctgcctca

SEQ ID NO: 42572 - DNA, 201 bp, Homo sapiens
tacttaacacaatattttcatggaattcaccttacttttttttttttacttaaataagtatatttatgtatttatttatttatttatttatttatttatttagagatacagtcttgctctgttgcccaggctggagtgcagtggtgtgatcttggctcactgcagcctccacctcccaggttcaagtgattctcctgcctc

SEQ ID NO: 42573 - DNA, 201 bp, Homo sapiens
gtacttaacacaatattttcatggaattcaccttacttttttttttttacttaaataagtatatttatgtatttatttatttatttatttatttatttatttagagatacagtcttgctctgttgcccaggctggagtgcagtggtgtgatcttggctcactgcagcctccacctcccaggttcaagtgattctcctgcct

SEQ ID NO: 42574 - DNA, 201 bp, Homo sapiens
cacagtgaaaccctgtctgtactaaaaatacaaaaaattagctgggcatggtagcgggcacctgtagtcccagctactcagaaggctgagggaggagaatkacgtgaacccaggaggcggagcttgcagtgagtggagatcatgccactgcactccagcctgggcgacagagcaagactccgtctcaaaaaaaaaaaaaaa

SEQ ID NO: 42575 - DNA, 201 bp, Homo sapiens
tgtacttaacacaatattttcatggaattcaccttacttttttttttttacttaaataagtatatttatgtatttatttatttatttatttatttatttatttagagatacagtcttgctctgttgcccaggctggagtgcagtggtgtgatcttggctcactgcagcctccacctcccaggttcaagtgattctcctgcc

SEQ ID NO: 42576 - DNA, 201 bp, Homo sapiens
ggcggatcacaaggtcaggagatcgagaccatcctggctaacacggtgaaaccctgtctctactaaaaatacaaaaaattagctgggcatggtggcaggcrcctgtagtcccagctactcaggaggctgaggcaggaaaatggcgtgaacccaggaggcggcggagctttcagtgagccgagatcgcgccactgcactcaa

SEQ ID NO: 42577 - DNA, 201 bp, Homo sapiens
ctcaattatatagtaatatagtagggacataccaaaattttaatttttgtcgatggtgggttttttttttgttttcgtttttttttttttttttttttttktgggtgtcagggtctcactctgtcacccaggctggagtgcaatggtgcaatcatggctcactgcagcctcaaattcctgggtgtaagtgatcctcctact

SEQ ID NO: 42578 - DNA, 201 bp, Homo sapiens
tgttgtagcatatgtcagactttcattccttttttttttttaacagaattttttttttttttagaatttttttgagatggagtcttgctccgtcatcaggytggagtgcagtggcacgatctcggctcactgcaacctccgcttcctaggttcaagcaattcccctacctcagcctcccgagtagctgggactacaggcgc

SEQ ID NO: 42579 - DNA, 201 bp, Homo sapiens
atttatttatttatttatttatttatttatttattttttggagacacagtctcactctatcccccaggctagagtgcaatagtgccatctcggctccctgmaacctccgcctcccaggttgaagcaattcttctgcgtcagccttctgagtagctggaattacaggcacgtgccaccacgcccgactaatttttgtatttt

SEQ ID NO: 42580 - DNA, 201 bp, Homo sapiens
ttttaaaatatttttagtagagatgggatttcaccacgttagccaggctggtctcgaactcctgacctaaagtgatctgcctgcctcagcctcccaaagtkctgggattacaggtgtgagccaccacacccggcctagaatttctactttgaaaaatgttgcttacagaatcaagttctaactcctttttgcaacattcaa

SEQ ID NO: 42581 - DNA, 201 bp, Homo sapiens
tctccaggcctttgcagatgctccaaactcattccgaacttcggcaacggtacctggacctgcccatagatacagttcttgtgctggatgtgagcaggccrgcagcagggggtggagggagtcaggacctaatggtcggcctgagttacctgggaggtgcaccagcagctcctttccaccttacatcccaccttctggtcc

SEQ ID NO: 42582 - DNA, 201 bp, Homo sapiens
gattgagaccatcctggccaatatggtgaaaccccgtctctactaaaaatacaaaaaattagccgggtgtggtggtgggcgcctgtagtcccagctactcrggaggctgaggcaggagaatggcgtaaacccaggaggtggatgttgcagtgagccgagatcgcgccactgtactccagccaaggcaacagagcgacactc

SEQ ID NO: 42583 - DNA, 201 bp, Homo sapiens
tttttagtagagatggggtttcaccgtgttagccaggatggtctcgatctcctgacctcgtgatctgcccacctcagcttcccaaagtgctgggattacargcgtgagccaccacgcccagcctacagttattctttttcaagattgctgcagcaatcttgttatagctgcttctgctatattacagttataactattgct

SEQ ID NO: 42584 - DNA, 201 bp, Homo sapiens
aatcaagtgaccaccacccagaattgatgcagtccatattctgggactataactgtgagacccagactcgggagggagtaggtgaagagggtgatcattasgaaaggggcaggtttgatgtcagggagtatggcttggtaactgttcccgtagtccacatgaggtgtagagggcctgaagtaaatcagccagcctggagaa

SEQ ID NO: 42585 - DNA, 201 bp, Homo sapiens; identical to SEQ ID NO: 7463

SEQ ID NO: 42586 - DNA, 201 bp, Homo sapiens
gatgttggctcactgcaacctcaaccttttttgttttcaatttttttacttttgtagagaaaagatctccctgtgttacctgggctggttttgatctcctrgctttaagcaagcctcctgcctcggcctctcacagtgctgggattacaaacataagccactggtctcagcaccataaatacatttataatgaaggaaaaa

SEQ ID NO: 42587 - DNA, 201 bp, Homo sapiens
ccaaatgtctgtgctgtacttgaccaacaggccacgtatttttcaaagcattttcattgatagcgctttatcgagagccccaggtctggctcagcactcarattccaaaagcgtctgcataaatgctctaataggaaaaaatacctgcagttccactaccttgttcctgtcaactcagtgtttttctctcatttccctcct

SEQ ID NO: 42588 - DNA, 201 bp, Homo sapiens
acatgaaatttcataaataatcattagtgaatatttaacaagaatagctgagcatttaccctgagctcagtattcaagagctttacagatagggactcatygagtcctcacaactaccctttggttagacagtgttttcctattttacaggtgatagtaatgggcatctgacatcaaaggctaaatgatttgtcaagaccg

SEQ ID NO: 42589 - DNA, 201 bp, Homo sapiens
caaaacttactgtgtttcaggcttttcatcttataaaagctgtgtcagtgttgctgaacttttcccaagaggaggagaacatgctcaaggaaactctggartataaggtagggttctctggtctactgttccagcttccaagatacgttgtcagttatcccagcagtagcagtgtaagaccccttagacccacacccgagt

SEQ ID NO: 42590 - DNA, 201 bp, Homo sapiens
tggcacaatctcggctcactgcaacctccacctctcgggttcaagcgattctcctgcttcagcctgccgagtagctgggattacaggtgtccagcatcacrcccagctaatttttttatatttttagtagagacagggtttcatcatgttggccaggctggtctcaaactcctgacctcagatgatccgcctgccttggcc

SEQ ID NO: 42591 - DNA, 201 bp, Homo sapiens
ggaggtggaggttgcggtgagccgagatagtgccattgcattccagcttaggcaacaagagcgaaactccatctcaaaaaaaaaaaaaaaaaaaaaaaaaraaagaaagaaagaaaataaactcattggaggtaattttatcaaactcaaaaccacacagcgtctctagaaaatgttcaaggatatcagatacttatataa

SEQ ID NO: 42592 - DNA, 201 bp, Homo sapiens
actttctttatgccaccctgaccagcctcaccaccagaaccccaccctccctcaccatgctgcctcttctccatgcctcttcataccctctgatacactgyggatttgattattgatttcttttttttttttttttgagacagagtctccccctgtcacccagactggagtgcaatggcgtgatcttggctcactgcgacc

SEQ ID NO: 42593 - DNA, 201 bp, Homo sapiens
tcagaatgccctctggcatccggttgggttcagccagtggggaaccctgaaagaaccatgtgtgaaagaagatgtggtcaggatgtttcttcccccacctytctccatgtgggctctcttcagcttagttgcatcccatggccaaagtcacagcttcagttggacctttggtttgccttcttgacatagtttttgtctctc

SEQ ID NO: 42594 - DNA, 201 bp, Homo sapiens
tattttctgtctctttgagtttggacactctagatacctcctgttggtggaatcatacaatgtttgtccttttgtgtctggcttatttgacttagtatatrcatcttcagtgttcatctatgttgtagcatatgtcagactttcattccttttttttttttaacagaattttttttttttttagaatttttttgagatgga

SEQ ID NO: 42595 - DNA, 201 bp, Homo sapiens
tagctgggcatggtagcgggcacctgtagtcccagctactcagaaggctgagggaggagaatgacgtgaacccaggaggcggagcttgcagtgagtggagrtcatgccactgcactccagcctgggcgacagagcaagactccgtctcaaaaaaaaaaaaaaaaaaatactgtgtgaagatgttaattgctgcattctttt

SEQ ID NO: 42596 - DNA, 201 bp, Homo sapiens
aggaggcctgatctgattctcccagttaatccctcttgcatctcatatctcatagcacggtgtgtgtccctctgttgaagcacagttgttttgtaattagktgtgtgtctgtctccaccaccagcctccatgctggaattaatgttgattgtatcctcagaaaacaacagatagagttcaggcttgatgaaagtttattga

SEQ ID NO: 42597 - DNA, 201 bp, Homo sapiens
gctccccatttctgacgtttagttctttaaagaaagcttgtccatgcagcagtgattctgcagcacagccaacccagcatcaggagacgtgaccaggcacatctgaggccccaccctcaaaagattccaagtgcaatcccacaaactgaagacttttaaagcctagatcaattattaaatgtttggcactttattaaatta

SEQ ID NO: 42598 - DNA, 201 bp, Homo sapiens
gcctagcacaagtcacaatatgttgtagataatctgtaaatatttattcaactgaggaatgatagtcttcttttactcttctttcaacttacagaaaacayttgctgagcagaatttggaggataccagacaacagctcttggcagccagaagcagccaggctaaggccattaacaccctggagactcgggtactgacctt

SEQ ID NO: 42599 - DNA, 201 bp, Homo sapiens
gctgttagcagattccttcagcacccccttcacacatttcccagaatccaccacttcacatcgctgccacctgcttcaggttaccattgtctcttctctgraagatggtatcagacttctaactggtttccctggcactcttgtcttagccctctgatgaaagcctgtctctgttgatctcttatgaaagcctgagtcctt

SEQ ID NO: 42600 - DNA, 201 bp, Homo sapiens
tgtcctggccaacatggtgaaaccccgtctctattaaaaatacaaaaattagcaaccaggtgcggtggctcatgcctgtaattgcagcactttgggaggcsgaggtgggcggatcacgaggtcagcagatcgagaccatcctggctaacatggtgaaaccctgtctgtactaaaaatacaaaacattagctgggtgtggtg

SEQ ID NO: 42601 - DNA, 201 bp, Homo sapiens
tgctgaaactcaagagaaagaagacgttatcacacatttgcaagagaaggttgcatccttggagaagagactagaacagaacttatcaggagaagaacacktgcaagaactcctgaaagaggtaacttctgttctctttgggctggctggtgttggaaaggcagggttgattctggtgacttcacaattcctagagtttca

SEQ ID NO: 42602 - DNA, 201 bp, Homo sapiens
ctcaggtgagagaactggagcagaccttgcaggcctctgaggagcagctccaacagagcaagggcattgtggctgcccaggaaactcagatacaggagctsgtaagtgcttattggagctgctgcattccaggcccttaatgctttctctccaggcctttgcagatgctccaaactcattccgaacttcggcaacggtacc

SEQ ID NO: 42603 - DNA, 201 bp, Homo sapiens
tctgctgggcttcttgcgtggcatacagctaaaaaactgtgaactaagttttggggctcagtggttttctgcattgtaggaagaatggagccaaagagaarttgtgagcgtggccatggctcaagccctggaggaggtgcggaagcaaagggaagagttccagcaacaggtgggccctgtttcacgctgaggggcgatgtc

SEQ ID NO: 42604 - DNA, 201 bp, Homo sapiens
gtgtcttttgggtattgaggccccgccctacagtctgtcctgcagggacccctgcccagcccctttctctcttttcctcgtacatcctggtttgacgcccytgtggtcacccagtcatttctcctgctggcgttggcctgcggagtgagcggctggcgggagaggccgtgcaggaactggctcctggtgggagacataggc

SEQ ID NO: 42605 - DNA, 201 bp, Homo sapiens
aacttcggcaacggtacctggacctgcccatagatacagttcttgtgctggatgtgagcaggccagcagcagggggtggagggagtcaggacctaatggtsggcctgagttacctgggaggtgcaccagcagctcctttccaccttacatcccaccttctggtccagcctggtcctggggctgtcagaggtggcagctccg

SEQ ID NO: 42606 - DNA, 201 bp, Homo sapiens
atcacttgaacccaggaggcggaggttgcagtgagctgagatcgtgtcattgcactccagcctgggcaacagagtgagactccatctcaaaaaaaaaaaaattattttccaaattatttatctaaaactggatgttgatgagttgtgcagaaaaaccatgatctttttagggtgttcaaaataagcattgcagattattaa

SEQ ID NO: 42607 - DNA, 201 bp, Homo sapiens
ttcctccaccactccacagaaaaacactcttgtcaagctcatcagtaacatctgcactgctaaatccagaaggcagttcctaattttccctctgattggcctgttggcagccttggacaggcgtctcttcctcctcctgaagctcccatccatggcctgctccttctccgtctcctctgacaggccagtctccttcccact

SEQ ID NO: 42608 - DNA, 201 bp, Homo sapiens
ttatatagtaatatagtagggacataccaaaattttaatttttgtcgatggtgggttttttttttgttttcgtttttttttttttttttttttttttgggkgtcagggtctcactctgtcacccaggctggagtgcaatggtgcaatcatggctcactgcagcctcaaattcctgggtgtaagtgatcctcctacttcagc

SEQ ID NO: 42609 - DNA, 201 bp, Homo sapiens
aattatatagtaatatagtagggacataccaaaattttaatttttgtcgatggtgggttttttttttgttttcgtttttttttttttttttttttttttgkgtgtcagggtctcactctgtcacccaggctggagtgcaatggtgcaatcatggctcactgcagcctcaaattcctgggtgtaagtgatcctcctacttca

SEQ ID NO: 42610 - DNA, 201 bp, Homo sapiens
tcagtaatcacatatataattactaaccgtgatgagtgttctgaaagaaaactacgagatttagtgagatcctattaaaagatatcagatcagggctgggyttggtggcttacgcctgcagtcccagcactttgggaggccgaggcaggtggatcacctgaggttgggagttcgagaccagcttgaccaacatggagaaac

SEQ ID NO: 42611 - DNA, 201 bp, Homo sapiens
atcagtaatcacatatataattactaaccgtgatgagtgttctgaaagaaaactacgagatttagtgagatcctattaaaagatatcagatcagggctggscttggtggcttacgcctgcagtcccagcactttgggaggccgaggcaggtggatcacctgaggttgggagttcgagaccagcttgaccaacatggagaaa

SEQ ID NO: 42612 - DNA, 201 bp, Homo sapiens
cccacctcagcctcctgagtagctgggattacaagcacatgccaccatgcctggctaatttttttgtattttttatagagatggggtttcaccatgttgcrcaggctggtctccaactcctgtgctcaaccgataggcccaccttggcctcccaaagtgctgggattagaggcaagagtccactgctagaaatgatcattt

SEQ ID NO: 42613 - DNA, 201 bp, Homo sapiens
tcttggctcactgcaagctctgcctcccgggtttactccattctcctgcctcagcctcccaagtagctgggactacaggcacccgccaccacacctggctwatttttttatatttttagtagagacagggtttcactgtgttagccaggatggtctcgatctcctgacctcgtgatctgtctgcctcggcctcccaaagtg

SEQ ID NO: 42614 - DNA, 201 bp, Homo sapiens
ttctcaattatatagtaatatagtagggacataccaaaattttaatttttgtcgatggtgggttttttttttgttttcgtttttttttttttttttttttktttgggtgtcagggtctcactctgtcacccaggctggagtgcaatggtgcaatcatggctcactgcagcctcaaattcctgggtgtaagtgatcctccta

SEQ ID NO: 42615 - DNA, 201 bp, Homo sapiens
aatgagcctaagttcttacagctcgtaagtggtaaagctgcaacctgaagcaaggttttctgacaccagagactctcctcttaactgtccactgtcctgaytctcagtacatattggatgggcaagtggctggacatgtagatgaatatttgaggtgaattattgaataatctttaaaaacattttggggatacaatggga

SEQ ID NO: 42616 - DNA, 201 bp, Homo sapiens
ttatagctgtacaagagcctgtacatctgattcttcttactctgaggtacctttttgttaatgtttggtttgtaaatgttaaggtactctattttttttccttatttttctgtgagttcctctccatattctctccagtgtcctcttgtactgtttttccgtctatataccttatacatcttcttttgcatttcatttctg

SEQ ID NO: 42617 - DNA, 201 bp, Homo sapiens
aatcatagaagtaattcatttggaggatataattactcgattttctagtggtgtgaaatactttttaacaattgtgcttgtctgtaactgaaatgttataraattttaacactatagggattatagagttatattagctctcctcaagagactgaagcacaatatttttcatgtaacaattcttatccaagtgctgctaat

SEQ ID NO: 42618 - DNA, 201 bp, Homo sapiens
gggttctagggaataaattgatttctagaatcagaatgtccatgcttgcattttgcctcttctgcttaccagctttgacttggagcagcagttcccaaccsttttggcaccagggactggtttcgtggaagacagtttttccacagatggggtcaggttgggtcgggtgagggggtggtttcagaataaaactgttccacc

SEQ ID NO: 42619 - DNA, 201 bp, Homo sapiens
attttggataggagctctttgtttcaccactattcctagtgcttagcacagtagtgagacataggatgtctcctatgtctcactaacagtaataatcatarcagcttcttatactgctagtggtgtggtctgaatgtatgtctccaaaaattgatatgttgaaacctaatcactagagtgatggaatgaggaggtgaatcg

SEQ ID NO: 42620 - DNA, 201 bp, Homo sapiens
tgagttatatgtttatttatacccttttatccccattggcctccctcccataggataccattccgttgtggttcatatagatgctctttttgttgggttgycttaaaatatgtagcactgggtttttaatttctgtaaatgatgcagctatgggtatgttttctctattacttttagctgcctcaacttctgtctgtaccc

SEQ ID NO: 42621 - DNA, 201 bp, Homo sapiens
ccttgtcttctgctaacctctgtaatagcacctgctgtactgcattattattgatgatttgcttgtttgtctcttccactgaactgggagtttcatgaaakacaataaagtgtagcccttaggaactcaggtcaggttatagagtcatatctgctctattattattatgtgactttgggcaaatttcttcatttttccttg

SEQ ID NO: 42622 - DNA, 201 bp, Homo sapiens
agactccgtctcaataaataaataaatagataaataaataaagtagggcactcatatggctaggaggccatgagtcctgaagagcccatcacagatggcasccctgtcggtaggcaggggagagcaagccccttcatcccagcaaagactagtcgtgtgattagttgtgggcattgggcattggatcttctccaggaattg

SEQ ID NO: 42623 - DNA, 201 bp, Homo sapiens
tttcatggtttatagctgtacaagagcctgtacatctgattcttcttactctgaggtacctttttgttaatgtttggtttgtaaatgttaaggtactctattttttttccttatttttctgtgagttcctctccatattctctccagtgtcctcttgtactgtttttccgtctatataccttatacatcttcttttgcatt

SEQ ID NO: 42624 - DNA, 201 bp, Homo sapiens
gagttatatgtttatttatacccttttatccccattggcctccctcccataggataccattccgttgtggttcatatagatgctctttttgttgggttgcyttaaaatatgtagcactgggtttttaatttctgtaaatgatgcagctatgggtatgttttctctattacttttagctgcctcaacttctgtctgtaccca

SEQ ID NO: 42625 - DNA, 201 bp, Homo sapiens
cctcagcctcccaagtagctgggactgcaggtgcccacgaccacacccggctaatttttttttgtttttagtttattgtttttgagatagggtctcgctcygtcacctagggtggagtgcagcagcacaatctcggctcactgcaacctccatctcccgggttcaggcgattctcctgcctcagcctcctgagtagcttgg

SEQ ID NO: 42626 - DNA, 201 bp, Homo sapiens
ggcagcagtggggacacatggtggacacgacgctcccctgcatgtagggtcctttctttgaagtagggcacttggccaggcgcagtggctcacgcctgtawtcccagcactttgggaggccgaggcgggtggatcacgagttcaggagatcgagaccatcctggctaacacggtgaaacccagtctctactaaaaatacaa

SEQ ID NO: 42627 - DNA, 201 bp, Homo sapiens
cccaggaggtggaggttgcggtgagccgagatagtgccattgcattccagcttaggcaacaagagcgaaactccatctcaaaaaaaaaaaaaaaaaaaaaraaaaaaagaaagaaagaaaataaactcattggaggtaattttatcaaactcaaaaccacacagcgtctctagaaaatgttcaaggatatcagatacttat

SEQ ID NO: 42628 - DNA, 201 bp, Homo sapiens
aaatacaaaaaaaaaaaaaaaaaaaaaaaaattagccaggcatggtggtgtgcgcctgtaatcccagctacttgggaggctgaggcaggagaactgcttgtaacctgggaggcggaggttgcagtgagccgagatcgtgccattgcactccagtctgggtgacagagcaagactcattctcaaaaaaaaaaaaaaaaggaa

SEQ ID NO: 42629 - DNA, 201 bp, Homo sapiens
atggctcaagccctggaggaggtgcggaagcaaagggaagagttccagcaacaggtgggccctgtttcacgctgaggggcgatgtccccctgcagtcccayaggcagcaggcccatcctgccgtgagactgttggagagggcctgtctctccagggtagggtagtagactcaggactcagggaatgcagtcagctgcgtgg

SEQ ID NO: 42630 - DNA, 201 bp, Homo sapiens
gccactgtggccggcctaaaaaaaattctttttaatagttatcagactactttaaccagtgccatgtttaaacatacttggacaatagactcagtttttttaatagtttgaagtacattatattaaaactacaaactcacttattcaagcctaaatttcatcatagactataaattgggtatcaatttcctattttggtgg

SEQ ID NO: 42631 - DNA, 201 bp, Homo sapiens
ctaaatatggagaaattctgcatatttctcaaaatcatttactaaacagtctgtcctttctgaattgattcctcttgctaactttatcacgtattgtttcygtctgcacatgggtttgtctctgcattctctgtccattggtctgattgtctgctcttgtgtaaacactacaatgtttttattactatagtgatatctgta

SEQ ID NO: 42632 - DNA, 201 bp, Homo sapiens
caccagcagctcctttccaccttacatcccaccttctggtccagcctggtcctggggctgtcagaggtggcagctccgctaggagtcaagcctcaacttgmaatcaggggcggggagaacaagtccagactctggggaggatggcctgtgatgacaggccaagcgtggtgtggagttagaagatagggaaatcaaaccagc

SEQ ID NO: 42633 - DNA, 201 bp, Homo sapiens
tcatcgcagaggcagccgtgcatgggtggcctggtggcttctgcaagctgcaggccctgctttgtgccacagtgaacctgagcaggcactgtcaaccccasctcccacagtgctggatcttacgtggctctgaggcgctagggcagactttggagccacagagactcagttctgtcttgtcagcctagcccctcactagct

SEQ ID NO: 42634 - DNA, 201 bp, Homo sapiens
ataatattccattatatgtatagaccacattttgtttctccattcattcattgatgaacacttgaattccatttgtcttttttttttttttttttttttgktctttttctcccctttttgtggagaacagggtctccctatgttgcccaggcaggtctccaattcctgggctcaagctatacctttgtttccctaagtgct

SEQ ID NO: 42635 - DNA, 201 bp, Homo sapiens
actgtcatcctcatcctgtagacgaggcaagctcagaaagattggctcagtagcccacaggctcgcagccagtaaatggcagaatccacatctttctcctstcaaagccctgttcttcattgctgtattatactgcctccccagtataatttctccccagggaaagccgcagccactgaggcaacactgagtagtgtgaag

SEQ ID NO: 42636 - DNA, 201 bp, Homo sapiens
caggagagcagccatgtgcagcagcaggcccttgctctggagcagcagttcttggagcgcacccaggcgctagaagcccagatagtggccctggagagaaygcgggcagctgaccagaccaccgcagagcaagggatggtgagtgaagagctaagagagggtgggcccaggagcaccagggtcccccacagcgaagtcagc

SEQ ID NO: 42637 - DNA, 201 bp, Homo sapiens
gcagggttgattctggtgacttcacaattcctagagtttcagagctgtagggccagcaaacagcatggtaacaaaagaagtgtctccaactttggcttgtyctgcttacatcagaaagagccttatgtcccctgtgggtgacatgcttttctcagggaaagggagagctgtattcagagatacatacaaacggatagcatc

SEQ ID NO: 42638 - DNA, 201 bp, Homo sapiens
ggatgcctctttcattccctaaacataactggataaaaaggaggaaagattctgtcactttcttatatgcccccagactcccgtggcccctttcaaagcamcttggataatgggacattgtagtacttgcccagcttggtcatgactcaaagatcttattgatcccttggcagcagtcttctctgagagtgtccatagatg

SEQ ID NO: 42639 - DNA, 201 bp, Homo sapiens
caccgcagagcaagggatggtgagtgaagagctaagagagggtgggcccaggagcaccagggtcccccacagcgaagtcagcctcgtgcttgacagtgtgkcaccgcctctgcactaggaaaccactttagaaggcagctttttttttgtttgagacagggtctcactctgtcacccaggctggagcacagtggcatgatt

SEQ ID NO: 42640 - DNA, 201 bp, Homo sapiens
cagagcaagggatggtgagtgaagagctaagagagggtgggcccaggagcaccagggtcccccacagcgaagtcagcctcgtgcttgacagtgtggcaccrcctctgcactaggaaaccactttagaaggcagctttttttttgtttgagacagggtctcactctgtcacccaggctggagcacagtggcatgattacaac

SEQ ID NO: 42641 - DNA, 201 bp, Homo sapiens
atggcagggaggggccaggctgggagcctgggaagtggggagcatgttggtctggctctgcaaagccatgccctgtctgctgggcttcttgcgtggcatayagctaaaaaactgtgaactaagttttggggctcagtggttttctgcattgtaggaagaatggagccaaagagaaattgtgagcgtggccatggctcaagc

SEQ ID NO: 42642 - DNA, 201 bp, Homo sapiens
gcctcccgggtttactccattctcctgcctcagcctcccaagtagctgggactacaggcacccgccaccacacctggctaatttttttatatttttagtaragacagggtttcactgtgttagccaggatggtctcgatctcctgacctcgtgatctgtctgcctcggcctcccaaagtgctgggattacaggtgtgagag

SEQ ID NO: 42643 - DNA, 201 bp, Homo sapiens
agccaatggggaggtgggagaggagaggtctcttttccatatggagttagggaaggctttgatgctggcagaagggcctacaatgtgaatatttgaggagraatattctagactgaagaaataacaaatacaaaggctctgaggcaggaaaaagcctagtctgttcaaagaatagcacagaggccagtgtggctgcagcta

SEQ ID NO: 42644 - DNA, 201 bp, Homo sapiens
ggcagtgggaggcgactgcccctgtgcagggcccctaccaaggagaatagatttgtgcatgttcataggagcagagcttagctgggggtttgctctgggtmgtggacttcagggagggattcgtggtgtaccctggagagcggggaagtggagatttctgtgggaagatggagtcactgctcacaaccttccctcttgttg

SEQ ID NO: 42645 - DNA, 201 bp, Homo sapiens; identical to SEQ ID NO: 7461

SEQ ID NO: 42646 - DNA, 201 bp, Homo sapiens
ggagcttgcagtgtgcaagatcgtaccactgcactccagcctggatgacagagcaagaacctatttcaaacacacacacacacacacacacacacacacamaaaactttaaattaggaaaccatcaatcagcatagctcataggcaaaattacagccaaatggctatcaatgagtgcagatagaaaagaggccaaaatgaa

SEQ ID NO: 42647 - DNA, 201 bp, Homo sapiens
tgcaggccgagctggaggccctgaggaccctcaaggcggaggaggctgcagtggtcgcggagcaggaggacctgctgaggctgcggggcccattgcaggcygaagcactctcagtcaatgagtcgcacgtaagtcccagctgcacctgcatgggtgctacagcaagatgcagggcaggtgccgagagtgcccctaaggagg

SEQ ID NO: 42648 - DNA, 201 bp, Homo sapiens
tgaaagagtgtaggagatgtttaatatacacttaaatacattcactgcagaaattaagtagaggttatttttgcatgataaaatataactgcaaagcaacwttttacaccgtattctttggaagattaaatctatctgatccaatattatcttaaaatagagaaattatctcaggagtctgttttaccacccaaaaaaatg

SEQ ID NO: 42649 - DNA, 201 bp, Homo sapiens
gttctttgttgtgggtggttctctgttgtggatggttctttgttgtgggtggttctctgttgtgaatggttctttgttgtggatgggtctctgttgtggakggttctctgttgtggatgggtctctgttgtggatgggtctctgttgtggagggtctctgttgtggatggttctctgttttggatgggtctctgttgtgga

SEQ ID NO: 42650 - DNA, 201 bp, Homo sapiens
tttatagctgtacaagagcctgtacatctgattcttcttactctgaggtacctttttgttaatgtttggtttgtaaatgttaaggtactctattttttttscttatttttctgtgagttcctctccatattctctccagtgtcctcttgtactgtttttccgtctatataccttatacatcttcttttgcatttcatttct

SEQ ID NO: 42651 - DNA, 201 bp, Homo sapiens
acttgaacccaggaggtggaggttacagtgagccaagattgcactactgcacgccagcctgggcaacagagtgagactccatctcaaaaaaaaaaaaaaaatagctgggcgtggtggcgtgcgcttgtagtcctagctacccaggaggctgaggcaggagaatcgcttgaacccagcaggcggaggttgcagtgagctgag

SEQ ID NO: 42652 - DNA, 201 bp, Homo sapiens
agggattatagagttatattagctctcctcaagagactgaagcacaatatttttcatgtaacaattcttatccaagtgctgctaatctgtcgtgcaaatartgaagctatttggttgcctatttagctattcacaaatcactgtaatctttgaaacaatcttgtcgttcatttgtattaatatttggatattgtgagttaa

SEQ ID NO: 42653 - DNA, 201 bp, Homo sapiens
ggacgattgttggaaagatggccccagtgattacagtatgttgctttttttcttttttctttcttttttttttttttttgagatggattctcgctctgtarcccaaagtggagtgcagtggcctgatcttggttcaccacaacctctgcctctggggctcaagcaattctcgtgcctcagcctcccgagtagctgggacta

SEQ ID NO: 42654 - DNA, 201 bp, Homo sapiens
gctgaggcaggagaatcgcttgaacccaggaggtggaggttgcggtgagccgagatagtgccattgcattccagcttaggcaacaagagcgaaactccatytcaaaaaaaaaaaaaaaaaaaaaaaaaaaaagaaagaaagaaaataaactcattggaggtaattttatcaaactcaaaaccacacagcgtctctagaaaa

SEQ ID NO: 42655 - DNA, 201 bp, Homo sapiens
aggctgaggcaggagaatcgcttgaacccaggaggtggaggttgcggtgagccgagatagtgccattgcattccagcttaggcaacaagagcgaaactccwtctcaaaaaaaaaaaaaaaaaaaaaaaaaaaaagaaagaaagaaaataaactcattggaggtaattttatcaaactcaaaaccacacagcgtctctagaa

SEQ ID NO: 42656 - DNA, 201 bp, Homo sapiens
aatctgcaggaaaaattgcttagtgttttagcacaataagaatttttattactcaggagttggagaccagtctgggcaatacagtgaaaccctgtcgctaytaaaatacaaaaaaaaaaaaaaaaaaaaaaaaattagccaggcatggtggtgtgcgcctgtaatcccagctacttgggaggctgaggcaggagaactgct

SEQ ID NO: 42657 - DNA, 201 bp, Homo sapiens
acccttaaagaagcatgctactaattgctttttttctaaattaaaactatgtactgtggtaaattaaaaatctgcaggaaaaattgcttagtgttttagcmcaataagaatttttattactcaggagttggagaccagtctgggcaatacagtgaaaccctgtcgctactaaaatacaaaaaaaaaaaaaaaaaaaaaaaa

SEQ ID NO: 42658 - DNA, 201 bp, Homo sapiens
tcactgattttcttttctcttctgaagctgttgtgaatgtccactttgccatgattaaaagttgagatttgtaaacattacaatttgaaccataaattttytcaaacatgaaatcagtatgaataagtataaaatttgaaatgatcatacatgagaatcccaaaagtaaatacttccaaaccatagagggataaccactgt

SEQ ID NO: 42659 - DNA, 201 bp, Homo sapiens
caatttgtgaacctatagaatgttgccaagtatcaatgtttggttacttcagttgacatatttatttgcatgaaagagtgtaggagatgtttaatatacayttaaatacattcactgcagaaattaagtagaggttatttttgcatgataaaatataactgcaaagcaactttttacaccgtattctttggaagattaaat

SEQ ID NO: 42660 - DNA, 201 bp, Homo sapiens
aggctttgatgctggcagaagggcctacaatgtgaatatttgaggaggaatattctagactgaagaaataacaaatacaaaggctctgaggcaggaaaaarcctagtctgttcaaagaatagcacagaggccagtgtggctgcagctagtggccaggggagagcatggctggtggtgaggcgggacacaggcattaaaaag

SEQ ID NO: 42661 - DNA, 201 bp, Homo sapiens
aaatatgcatgataagatgcttaggagcatctacccactagatgtcagtagcagccccacttaggacaaccacagtgtctccagacattgccaaatgtctygtgggggcaaaagcactgctggcagagaaccactggggtaactgaatgaatagggtacgtaccattcactgagatgggggtcctgggaggtatgtcaaga

SEQ ID NO: 42662 - DNA, 201 bp, Homo sapiens; identical to SEQ ID NO: 33720

SEQ ID NO: 42663 - DNA, 201 bp, Homo sapiens
attggtcaagtataactaaagcagtgcatggaaggaaatttcagtctcagtggcatctcttaggaagaaagcctgaaaattgagccatgtatgcatctcaraaagtcagaagaaggcacaaatcaaactcaaggaagaaataacaaatataagcacagaaattaatgaaatagaaaataaaatgggcccggcgtggtggct

SEQ ID NO: 42664 - DNA, 201 bp, Homo sapiens
tttctccacctcagcgctattgacgtttgaggccggatggttctctgttgtagaggttctctgttgtggatggttctctgttgtggatggttctctgttayagagggtctctgttgtggagggtctctgttgtggatggttctctgttgtgggtgggtctctgttgtgggtgggtctctgttgtggagggttctctgttgt

SEQ ID NO: 42665 - DNA, 201 bp, Homo sapiens
tctcagtcaatgagtcgcacgtaagtcccagctgcacctgcatgggtgctacagcaagatgcagggcaggtgccgagagtgcccctaaggaggcagcagtrgggacacatggtggacacgacgctcccctgcatgtagggtcctttctttgaagtagggcacttggccaggcgcagtggctcacgcctgtattcccagcac

SEQ ID NO: 42666 - DNA, 201 bp, Homo sapiens; identical to SEQ ID NO: 7455

SEQ ID NO: 42667 - DNA, 201 bp, Homo sapiens
tggctcagcttcacctgacctgtcctggctctcaatttgctgctgccaccttgtaggtgacctcgagggccatgcaggaccctgtgttccagcttccaackgcaggaagaacaccaaatggtgaggttggggccatggatctcacacagctacagaaggagaaacaggacttggagcagcaacttctggagaaaaataagg

SEQ ID NO: 42668 - DNA, 201 bp, Homo sapiens; identical to SEQ ID NO: 7459

SEQ ID NO: 42669 - DNA, 201 bp, Homo sapiens
gtactcgcatgggagctggccccacttcccagcactccccctgctgcctgtgcccggtcctcctgaggtccctcgccgcctgactatgctccctccacccmctaattaattgcaagggatcgctgggcaatccaacgttagctggtgggacagcctgccagcctgcatgcacctctgaagcagctccgtggctacagccct

SEQ ID NO: 42670 - DNA, 201 bp, Homo sapiens; identical to SEQ ID NO: 7462

SEQ ID NO: 42671 - DNA, 201 bp, Homo sapiens
actccttccacatcgggtttccggaacaacaactgaactctcattcattaccatcccattcattaccatttttttttacatacacgaaacacaccgcaatrtatagactaataagccaagagctttattgatgcagcaggcactttacaatgagcccaagagtgtccaccttctctgggaagacaggatgtctgtacaaac

SEQ ID NO: 42672 - DNA, 201 bp, Homo sapiens
gggtttttttccacttcaaaaacacaagctctcccgtttaccacagcccttggatctgcacctgcccaaaccatccctcccccagtgcacacaggtgcatytgaccaacaccagccgccacgctggtagaccgtcaaaatgtcagttctgcagtactcggagacaaaggcatagactatcagatcctaaacaggatttagg

SEQ ID NO: 42673 - DNA, 201 bp, Homo sapiens
gctccctccaccccctaattaattgcaagggatcgctgggcaatccaacgttagctggtgggacagcctgccagcctgcatgcacctctgaagcagctccrtggctacagccctgttcctgccttctctgagcctgcatcctcatctggaagtggggttgcctgccacgccagcgcagtgatgctctaacagtgtgtgtgt

SEQ ID NO: 42674 - DNA, 201 bp, Homo sapiens
ttatgggtgtgtaccaccacacccggctcatttttttttttgtatttttttaatttattttattttatttatttttttttttttgagacagagtctggctstgtagcctgggttggcgtccagtggtgcaatcttggctcactgctctctctgcctcctgtgtcctggttcaagcagttctcctgcctcagcctcccaagt

SEQ ID NO: 42675 - DNA, 201 bp, Homo sapiens
tcctcctccagcatgcatgagcgttcctatatatgcctttctgacttttccagcattggcatttccaagcctttacaatttttgccagtttactgagtgtsgagtggtatttcattgctttaatttgcattgctatggtgattaatgagtttggccttgtcttcatgtgcctgttaattcctgggggtttctgcttttgga

SEQ ID NO: 42676 - DNA, 201 bp, Homo sapiens; identical to SEQ ID NO: 33750

SEQ ID NO: 42677 - DNA, 201 bp, Homo sapiens; identical to SEQ ID NO: 33756

SEQ ID NO: 42678 - DNA, 201 bp, Homo sapiens
ggctcagcactcagattccaaaagcgtctgcataaatgctctaataggaaaaaatacctgcagttccactaccttgttcctgtcaactcagtgtttttctstcatttccctcctgtactgagcacgggcctgcagactggttactggcaccatcttcttgctctgctcagagccagaggcaggatgtgtggggggcaggag

SEQ ID NO: 42679 - DNA, 201 bp, Homo sapiens
tgctcaatctcactgctcttgaagtttgtgagcactttcagcaccacgccctgggctcgctcctgcagacgaaaaagagcaagtgagtcccagagctgcgmaggcaccgccatgccatgccccacaccaaagcaaggacacagatcaccagaaacactgcccagtttctaattcgtccaggatggttaaaataagtgggtt

SEQ ID NO: 42680 - DNA, 201 bp, Homo sapiens
accagcacacaaagcagagccctcgagcttcccttttgagatggggtctcactctgttgcccagatcacagctcactgcacagccttgatgtcctgggttsaagccatcctcctgagtagctgggaccacaggtgtgcaccaccaggcccggctaatttattttttttgagacggagtttcgctcttgtcacccaggctgg

SEQ ID NO: 42681 - DNA, 201 bp, Homo sapiens; identical to SEQ ID NO: 7457

SEQ ID NO: 42682 - DNA, 201 bp, Homo sapiens
ctttgtgcccaaatgtctgtgctgtacttgaccaacaggccacgtatttttcaaagcattttcattgatagcgctttatcgagagccccaggtctggctcrgcactcagattccaaaagcgtctgcataaatgctctaataggaaaaaatacctgcagttccactaccttgttcctgtcaactcagtgtttttctctcatt

SEQ ID NO: 42683 - DNA, 201 bp, Homo sapiens
gcgggatgcgagcagcttcaggccccagggacgtgtgttcttgccatggaaaacggaatgtctgaatttacccaaacgatgtcactccctcctcaagcctmcctggaggtgcttccttcccaggtggggccctttttgccctacgatagtgatcatagtttggaccaggtgaacctcccgtgtgattttttccacctgtct

SEQ ID NO: 42684 - DNA, 201 bp, Homo sapiens
ggttgcctgccacgccagcgcagtgatgctctaacagtgtgtgtgtgtggcagagtgcttggcctgatgcgggatgcgagcagcttcaggccccagggacrtgtgttcttgccatggaaaacggaatgtctgaatttacccaaacgatgtcactccctcctcaagcctacctggaggtgcttccttcccaggtggggccct

SEQ ID NO: 42685 - DNA, 201 bp, Homo sapiens
gcctctcaggatgacttctcagggcagaggctcctcacaggtgtacaggggatcccgtgggatcttcgggtctgtttcctttggtgaaacatgcatctaaygattggctttctgtggggtggggcttgtcgcagaccataaagcagatgcagcagcggatgctggagctccggaagactctgcagaaggagctggtgagta

SEQ ID NO: 42686 - DNA, 201 bp, Homo sapiens
cttcttgctctgctcagagccagaggcaggatgtgtggggggcaggagtgacaggctcacgggaggggaggggcggttcagtttccctggcaccaagtccygatttgcatctcagaagccttttctgtttcaaatgcagatgtcatggtttgggtccaaaccagctcccaagggcagcatccggccgtctatctcaaaccc

SEQ ID NO: 42687 - DNA, 201 bp, Homo sapiens
aaagagaagcttgaaattgcattagaaaaacaccaggattgtacgtatttttttcctgcttttttcaatcttttcaaggtttagtttttgaaatgaaacartagtgtatggttaagtttgtccttcttcaaagcacaaatctttattttataagtagtgtacttcttaatcaggttgatataacatttggatgatatttat

SEQ ID NO: 42688 - DNA, 201 bp, Homo sapiens
tcgcttgaacccaggaggtggaggttgcagtgagccgagattgcaccattgcactccagcctgggcaaaaagagcgaaactccgtctcaaaaaaaaaatawatatatatatcagatcagatccagttggagccgtagaacacttaaggaagtaacactcgatacagtgctcaggctggagagaaagggatgatgggagaga

SEQ ID NO: 42689 - DNA, 201 bp, Homo sapiens
aatcgcttgaacccaggaggtggaggttgcagtgagccgagattgcaccattgcactccagcctgggcaaaaagagcgaaactccgtctcaaaaaaaaaawatatatatatatcagatcagatccagttggagccgtagaacacttaaggaagtaacactcgatacagtgctcaggctggagagaaagggatgatgggaga

SEQ ID NO: 42690 - DNA, 201 bp, Homo sapiens
acagtcgtgagccactgtgcctggcaacagttttatataaggaaagaattatagaaaagtcaagtcccaaggaaacctgtgcttgaaaaaaaaaaaaaaaatcctcaaccatatgctattaatgacagtcttcttaaatatggagatatgggttgggttaaggttttcttgctgtaaaagaaactcttaagattatggcaa

SEQ ID NO: 42691 - DNA, 201 bp, Homo sapiens
cactcagccctagatttttcaaatacaaaagatataccataggggaagtacattccagcccaggagtcaaggaaatcttcctagaggaactggaatgtcamggatcaggaggacagcaggaggcagaaaaggcagaaggtcagagagtacatttggggtcatggaagaagggggaaaatagatacacaactttggtttttg

SEQ ID NO: 42692 - DNA, 201 bp, Homo sapiens; identical to SEQ ID NO: 34067

SEQ ID NO: 42693 - DNA, 201 bp, Homo sapiens; identical to SEQ ID NO: 34070

SEQ ID NO: 42694 - DNA, 201 bp, Homo sapiens; identical to SEQ ID NO: 34072

SEQ ID NO: 42695 - DNA, 201 bp, Homo sapiens; identical to SEQ ID NO: 34074

SEQ ID NO: 42696 - DNA, 201 bp, Homo sapiens
ctttttgtttgagatagagtttcgctcttgttgcccaggctggagtgcaatggcgcgatcttgactcactgcaacctacacctcccgggttcaagcgattmtcctgcctcagcctcccaagtaattgggattacaggcatgggccaccatgcccggctaattttgtatttttagtagagacgaggtttcgctatgttaggc

SEQ ID NO: 42697 - DNA, 201 bp, Homo sapiens
ggcgggctgccccggcctgggagtctggagcctagggttccgggattcctccctgcgcgaccttggacaagtcgctcctcctctctagggctcagtttccytgctgtcaaatgggagagatgttggatccttcctttctttgacagtccaaagcacgggcggggctggaggtagcctgagggagtgagatccaaactgccg

SEQ ID NO: 42698 - DNA, 201 bp, Homo sapiens
ctcaagcaattctcgtgcctcagcctcccgagtagctgggactacaggtgtgttccaccatgcctggctaattttttgtattttagtagagacaggttttyaccatgttgcccagggtggtctcaaactcctgagctcaggcgatccgcccaccttggcctcccaaagtgctgggattacaggcgtgagccaccatgccca

SEQ ID NO: 42699 - DNA, 201 bp, Homo sapiens
cctgtgcttgaaaaaaaaaaaaaaaatcctcaaccatatgctattaatgacagtcttcttaaatatggagatatgggttgggttaaggttttcttgctgtraaagaaactcttaagattatggcaattgaaattctcattgaactgtttttttatcttttaaaattttggtaaagggtatccatataggactgaaccaact

SEQ ID NO: 42700 - DNA, 201 bp, Homo sapiens
agtagagacagagtttcactgtgttggccaggctggtctggaactcctgacctcgtgatcctcccgcgtcggtctcccaaagtgctaggattacaggggtragccaccacacttggcaataaatttctttaaaactcatttataatgctggatatatatataaaagaatgtatgtaatatatatgtaaagtataaagcata

SEQ ID NO: 42701 - DNA, 201 bp, Homo sapiens
ctgacctcgtgatcctcccgcgtcggtctcccaaagtgctaggattacaggggtgagccaccacacttggcaataaatttctttaaaactcatttataatrctggatatatatataaaagaatgtatgtaatatatatgtaaagtataaagcataaagtaaatctatcactcatctgaagagatagaacactatcaattct

SEQ ID NO: 42702 - DNA, 201 bp, Homo sapiens
aattattttccaaattatttatctaaaactggatgttgatgagttgtgcagaaaaaccatgatctttttagggtgttcaaaataagcattgcagattattmatgtatttcaagagagcagtagtgatgagaaccgtaagtcctcgcctaagtatcctacttggggatcacagcataaaaatcgaattttgagggcaaaatc

SEQ ID NO: 42703 - DNA, 201 bp, Homo sapiens
agaaattttcacattgataaatgttctctaggaatgtgtctacattcatcaggtgtgaactcttgtacatgaattttgtaccttgaatccacatatatatwaagtgtatcatcaatataaaaataaacattatttgcttaaagtttttggtactttttcggtattgacagctgaactgttagggtttgcttcattcaaata

SEQ ID NO: 42704 - DNA, 201 bp, Homo sapiens
ataagcattgcagattattaatgtatttcaagagagcagtagtgatgagaaccgtaagtcctcgcctaagtatcctacttggggatcacagcataaaaatygaattttgagggcaaaatctatggtccagagccttttccagctgggctgtgtgtggtggaccaagcccccgggaagggataggcagcgctggggcactca

SEQ ID NO: 42705 - DNA, 201 bp, Homo sapiens
ggcaaccatgacccctctcacccaaaggccttcctcctgatcttccgttcctcctgcactgtcctcctccacaccctccccagccctcttctccccacccsctggagaactggacaagtgtcaggcttgggcagctgcaagcctgcatgttccctgccagctctgctgtccccagccaggccatagcgacagtcctctttc

SEQ ID NO: 42706 - DNA, 201 bp, Homo sapiens
cattcacgtggcctgcgagtctgacttcttgttcttggctactgtccttagaccagctcttcaggataggcccctagccttggtgtgggtcctggcggggrtgctcgtggggcaatcgatcctcagtggtgtgccatttccagagaagtcggtgggttgcctgccaggatagctctgagagggatactgagggcatggcag

SEQ ID NO: 42707 - DNA, 201 bp, Homo sapiens
tgggtggcctggtggcttctgcaagctgcaggccctgctttgtgccacagtgaacctgagcaggcactgtcaaccccagctcccacagtgctggatcttasgtggctctgaggcgctagggcagactttggagccacagagactcagttctgtcttgtcagcctagcccctcactagctgatgcttgaaggaatccatttt

SEQ ID NO: 42708 - DNA, 201 bp, Homo sapiens
cagatactcttcactggaaaccatacttttttattgttttgttttaggaatggtcagaaaagatggatcagcttgaaaaggttagttcatctttatttttrtctcatttttgttggtctcgtctctggggtatggaaaacgttttatccggtaaccaacatactgattgctataccacctcttggaagcaggacagtttat

SEQ ID NO: 42709 - DNA, 201 bp, Homo sapiens
atgagggaaatgtcatgcttaaaaaataaagtgtggcttttgcatatgacaggatcctcttaagttagataaatttcttttctcttcttttttttttttttgagacagagtctcactctgtcagccaggccggagtgcagtggcatgatctcagctcattgcatcctccacctcccgggttcaagcagttctcctgcctca

SEQ ID NO: 42710 - DNA, 201 bp, Homo sapiens
gtttatagctgtacaagagcctgtacatctgattcttcttactctgaggtacctttttgttaatgtttggtttgtaaatgttaaggtactctatttttttkccttatttttctgtgagttcctctccatattctctccagtgtcctcttgtactgtttttccgtctatataccttatacatcttcttttgcatttcatttc

SEQ ID NO: 42711 - DNA, 201 bp, Homo sapiens
tgtctctaaagacaaaaattttaaaaaagaaaagattttcactttcgtaatacagatttctaatgctttcgttgcctgagttgatgtcttcttctttcaartaggagaaaaatattctgacagcccagttacaggaaatgaagaaccagagtatgaatcttttccaaaggagagatgaaatggatgaattagaggggttcc

SEQ ID NO: 42712 - DNA, 201 bp, Homo sapiens
cagcttttaaaaaaagaagaaagtctagggaaaatggaacaagaattggaggcacgaaccagagaacttagtcgtacccaggaggagttgatgaactccartcagatgtcatcagacttaagccagaagctagaagaattgcagagacactactcaacgctggaagagcagaggttcttgcttggtctgtggggcccttgg

SEQ ID NO: 42713 - DNA, 201 bp, Homo sapiens
ttcatggtttatagctgtacaagagcctgtacatctgattcttcttactctgaggtacctttttgttaatgtttggtttgtaaatgttaaggtactctatwttttttccttatttttctgtgagttcctctccatattctctccagtgtcctcttgtactgtttttccgtctatataccttatacatcttcttttgcattt

SEQ ID NO: 42714 - DNA, 201 bp, Homo sapiens
gtgtggagctgggaaggagaggggagagagggttgggctggtacaagaggcagaaaaatgagattaggaaagtacaccgaaaccaaattgtgaaaggcttkatgtgccacaccaagcagtgtgacctttctttttcagtgggcacagggaaccttggaagtttatcagatctctattacagaaacaaaactgtgggaagaa

SEQ ID NO: 42715 - DNA, 201 bp, Homo sapiens
cctcccaaagtgctgggtattacaggggtgagtcaccgtgcccagccagaaaagatttaagagaagcttcagaaatagaattaagagtacatggctgttgyttaaatgtagaggatgagggagcacaaagcagttgatgtctgatttaaatgttaggtaataggatggatggctacccttttaagtggcaggaatagattg

SEQ ID NO: 42716 - DNA, 201 bp, Homo sapiens
aagttaaaatgaggctgttaaaggtagccccacactccaatctgactggtgttagaagaataggaagagacatcagagggaagaggaagtaagagggctgycatcggcaagccaaggagagaggcctcagaatcccaccttgatcttggacttctagcctccagaacttcgagaaaataaactagttttgttcaggccacc

SEQ ID NO: 42717 - DNA, 201 bp, Homo sapiens
tgctgggtattacaggggtgagtcaccgtgcccagccagaaaagatttaagagaagcttcagaaatagaattaagagtacatggctgttgtttaaatgtaraggatgagggagcacaaagcagttgatgtctgatttaaatgttaggtaataggatggatggctacccttttaagtggcaggaatagattgtgggaaagaa

SEQ ID NO: 42718 - DNA, 201 bp, Homo sapiens
agtcttgctctgtcgcccaggcttgagtacagtggcgtgatattggctcactgcaacctccacctcctgggttcaagcgaatctcctgcctctgcctcccragtaccggggattacaggcacgtgccaccacacccaactaatttttgtatttttagtagagacggggtttcaccatgttggccaggctggtgtccaactc

SEQ ID NO: 42719 - DNA, 201 bp, Homo sapiens
gggaatacagaaagtatagggacatataacaaaaaagtaaaaatcacttaccaaaaatatctgtaagacattaacagcagttatttccttttctctctctstgtgtgtgtatatctatatacaccttactttagaaaataaaattggaattctactctaacattttggatacaatattaaaatataagtatttcccatatt

SEQ ID NO: 42720 - DNA, 201 bp, Homo sapiens
cttttcaattttcagttttatagtgggtgagttacttctggatacaatttttgggatttgagagtgtttaatgcctgagtcactaatcaagaaaatgctartgtatgcaaatctggcttccaaaaccgaatgaggaaaagttctttatagaaaaatcctaactaggccgggagtagtggctcacgcctgtaatcccagcac

SEQ ID NO: 42721 - DNA, 201 bp, Homo sapiens
ttgtctggcacagaaaaattgtcactattttcctgttagcccattttaaaaagaaatatgcttgaaaatatctagtttgttgtattttttctttgtagtcwtttaaataattctctttactttttcgcctccatgcacacccactgtacttttgtctgttgtattctttccagccatccaacatattctttacaatggatg

SEQ ID NO: 42722 - DNA, 201 bp, Homo sapiens
gagcagaaccgggatcaaaacctaggtatttagattcctagtgttttgtctacccgcgtgcaccaagctgtctagggattggtaaattcttacatgatgtratcaggttttctttcattttaacctgggtttgcctttgctgaccaccagcaggaaagcaggcatagggttggggaagttaagagcctgggccagcaacac

SEQ ID NO: 42723 - DNA, 201 bp, Homo sapiens
acccctttgtatttctcccacttttagcacagactggccactcagctctcctagcccaatggatgcaccatcagttaaaatacgcagaatggatcctttckctacaaaagaacatattgaaatcatagctccttcaccacaaagaagcaggtctttttcagtagggatttcctgtgaccagacaagttcatctgagagcca

SEQ ID NO: 42724 - DNA, 201 bp, Homo sapiens; identical to SEQ ID NO: 7491

SEQ ID NO: 42725 - DNA, 201 bp, Homo sapiens
tagtcacatgagctagactgagtttatatttttgcttttaacttttttctttcataagtatacatgtatatatacacataaacacatacaaattaccttaraagttcaaagtaagcagccctggatcataaacttttgtttgagtagcactttatagtttgtaaagtgatatctattcttagtcatttacatagccctgtg

SEQ ID NO: 42726 - DNA, 201 bp, Homo sapiens
ttgttgctttagtgggattttgattacgtcaatggaaaaaataagctcctggaagataagggaaattgacagttccactaagaacagatgttttaaattayatttagaatgaattgtatgaattgtgtaccttgggacacacatctcatttgccactatctcctgaaaagagtgtggatacataaccaagctaaaaccgtt

SEQ ID NO: 42727 - DNA, 201 bp, Homo sapiens
cttttatttttcttgatgctacttatgtatttttcagtgttgtttattttataacctaaaattgttagctaacttcagttcagctttgtactggtagtgawtttgtttttcaccttatcagcaaaggaaggagtctgaaactcagtgtcaaactgaaaataaatatgattctgtaagtggtgaagccaatgacagtagctg

SEQ ID NO: 42728 - DNA, 201 bp, Homo sapiens
ctccatagaaacaaagatttccaatattttctttgtgctttaatatggccctttctctctctctctctcccctttctctttctccctccctccacacatayatatatacacatatatgtaaatgtacatacacacacacacacacacacacacacacacacacagtcatcttggtatccacaggggattggttccaggact

SEQ ID NO: 42729 - DNA, 201 bp, Homo sapiens
ttctttgtgctttaatatggccctttctctctctctctctcccctttctctttctccctccctccacacatacatatatacacatatatgtaaatgtacayacacacacacacacacacacacacacacacacacagtcatcttggtatccacaggggattggttccaggactccctgtggataccaaatctgcagatgct

SEQ ID NO: 42730 - DNA, 201 bp, Homo sapiens
gataactaaacaaaaagaaagctaaaaataccctgaaggaagattgagtattaattcttatatttaaagaattgaattattaatgaggttatgaatggagyagcccttaagatttttttctagtcttattacttaatataaagaaaatttaatatgcttataggataaaggaaaatgtctatatttacgggagaaaaatga

SEQ ID NO: 42731 - DNA, 201 bp, Homo sapiens
attcaacagacatttgttagactttcggtttgtcaggtagtgcccacccattggaaatacaaagagaaacaagaatgattttctgcattcatggcccccawaatacagtggcggtgggagaagggagctgcttacacataattgcaaaaaattaagattaagtttaaatacttcaaagtattatgtgcagagtgttatggg

SEQ ID NO: 42732 - DNA, 201 bp, Homo sapiens
accagcaggcagtgagagaaagaataaaggatccaacaactcccatgaggtagtctactactgaagttattcactgttcattaaacatttattcggaacarctgtgtgcaggacaatatttcaggctttgggagaaataaaaagactgctcctatcctggagaagcttaaagtctatgggaaagatactactgggtaaaac

SEQ ID NO: 42733 - DNA, 201 bp, Homo sapiens
tttggtatggagcataaatgtttttctgaatattttccattttgtcagattattaaaaaggtgtatatttaaaggttgagatttaataaattaataatttytactgctaaggacattttaagtgaaatgttttttggttttgcctgtgagcacgtggtgctgaagaatgtaattgctactggtacagcttggcactgctcg

SEQ ID NO: 42734 - DNA, 201 bp, Homo sapiens
acccttttcaattttcagttttatagtgggtgagttacttctggatacaatttttgggatttgagagtgtttaatgcctgagtcactaatcaagaaaatgmtaatgtatgcaaatctggcttccaaaaccgaatgaggaaaagttctttatagaaaaatcctaactaggccgggagtagtggctcacgcctgtaatcccag

SEQ ID NO: 42735 - DNA, 201 bp, Homo sapiens
aattgctgccttggatcctgaaaatcatggtaaaaagcagtgggatttggatgtgggatccggttccttggtgtcatccagccttagcaaaccagaggtaagaattttctgttaactgttgactagaaaacttaattctaatgagtaattgctgatattaagaagtttggggccctattgcccaggtttgaggcctgtctg

SEQ ID NO: 42736 - DNA, 201 bp, Homo sapiens
tgagtcaccgtgcccagccagaaaagatttaagagaagcttcagaaatagaattaagagtacatggctgttgtttaaatgtagaggatgagggagcacaawgcagttgatgtctgatttaaatgttaggtaataggatggatggctacccttttaagtggcaggaatagattgtgggaaagaagtttcctgagcctgttat

SEQ ID NO: 42737 - DNA, 201 bp, Homo sapiens
cagatgcagtctctctctgttaagggattgaactcactgtttctaaatctcagacctattttgctgattttttgggccacactcagttgtagaatcttggktgttttgggcaaccctggctcagggtacctgagcaccagcttcttttcctggcccagcctcacgggccagctctcatgcccggtccccactttcttacat

SEQ ID NO: 42738 - DNA, 201 bp, Homo sapiens
ccaaaatggaaaatttgtgttttgttcccaagtataaagcttgactctccttactggcattttccaccactgtgctcttctgcccgcgcctttttcatcayagcacttatctcagttttaataatatatgtgtgattgttaatgtctgtctccctaactagataggtgttaaccttcagaagggcgggaaccacatctatt

SEQ ID NO: 42739 - DNA, 201 bp, Homo sapiens
agtatttacaggtggcaagtagactcctaattcattagttcagattaatagccttgttcatgccatgatcattttttgaaaaaattacaaaaccatgaagmccaggcccactaaaatatatacactaatttcaaacaggtagttaacaatcatttttcatcttatgttaattttctgacaccttcctcataccaactagta

SEQ ID NO: 42740 - DNA, 201 bp, Homo sapiens
catcagagggaagaggaagtaagagggctgtcatcggcaagccaaggagagaggcctcagaatcccaccttgatcttggacttctagcctccagaacttcragaaaataaactagttttgttcaggccacctggtctgtggtatttgttagggcaactctagcaaactcatatacctgggaagtttcctaggcaggcaaaa

SEQ ID NO: 42741 - DNA, 201 bp, Homo sapiens
tcagagtcagaagacatgaattaaagtcatgattctgtgaccaaccagctacgtgatcttaggctaactacgtcagtgcactgggccggggctccttcccsttcctaaggaggcgggaggcgtgtcgggcagactggattgtcacaggtcactgccatctctaacaagcggacttctgagccccgttgcggccacaagtag

SEQ ID NO: 42742 - DNA, 201 bp, Homo sapiens
cgccgtggctgcggccgaggtgactgtggaggacgctgaggcgctgccggcagccgcgggagagcaggagcctcggggtccggaaccagacgatgagacakagttgcgaccgcgcggcaggtgaggggctgccgacccgggggaggcaacttgtttacgcgcgcgagccgcggaggatgcggtgtaggggggcggagatcc

SEQ ID NO: 42743 - DNA, 201 bp, Homo sapiens
cacagcattgctatgccaatagctaactggtacaacacaacaaatttcactgtgtggcaaactcttcaagagtgcctacccataaacatttctctctttayaaacacttttaatagacattttacaaaagatgatatataatgtccaacaagcacattaaaagatgttcaaaatcactagtcgtcagggatatgcaaacca

SEQ ID NO: 42744 - DNA, 201 bp, Homo sapiens
atgggtaaaattgtaatggaaagtcactggacttgaggaaacagcaagaggcacagaggccggagattatgtttggaaaacattttgtctctgtgtatgtstgtgtgtgtgtgtgtgtgtgtgtgtgtgtgtgtgtgtgtgtgtacgtaagcgatatagacatgcacatatgtatgctaggcagggagaagtagatgagga

SEQ ID NO: 42745 - DNA, 201 bp, Homo sapiens
agaaacagaaggagcataagtttaaataaaacatcactgtagagctgtggtgtcagtaaaaaaaaaaaacccacttcttgcttcacccactatatggcaasgtttttgttattcacaatcaaatatcatttcaacagatgcagtctctctctgttaagggattgaactcactgtttctaaatctcagacctattttgctga

SEQ ID NO: 42746 - DNA, 201 bp, Homo sapiens
ttgaactgattttcacattaccacaaaatttaaaactgttgcaaacctttataaattttatctctttttaaagatatctaactgattttgagccaattcartgcctgggacgtggtggctttggagttgtttttgaagctaaaaacaaagtagatgactgcaattatgctatcaagaggatccgtctccccaataggtaat

SEQ ID NO: 42747 - DNA, 201 bp, Homo sapiens
aaaagtcaacaatttagcatttttaatggcatatttttatttttcttttttttttactttaagttccaggatatagcagaatgtgcaggtttgttacatargtatacatgtgtcatggtggtttgctttacctatgaacccatcatctaggttttaaaccccacatacattaggtgtttgtcctaatgctcttcctcccct

SEQ ID NO: 42748 - DNA, 201 bp, Homo sapiens
ttccagataataaaaaagtcaacaatttagcatttttaatggcatatttttatttttcttttttttttactttaagttccaggatatagcagaatgtgcargtttgttacataggtatacatgtgtcatggtggtttgctttacctatgaacccatcatctaggttttaaaccccacatacattaggtgtttgtcctaatg

SEQ ID NO: 42749 - DNA, 201 bp, Homo sapiens
tgtcgcccaggcttgagtacagtggcgtgatattggctcactgcaacctccacctcctgggttcaagcgaatctcctgcctctgcctcccgagtaccgggrattacaggcacgtgccaccacacccaactaatttttgtatttttagtagagacggggtttcaccatgttggccaggctggtgtccaactcccgacgtcag

SEQ ID NO: 42750 - DNA, 201 bp, Homo sapiens
atggctgaaagcagtgctgtgaactaagctaatttatcccagcattgcatgtcaccaaaggagaaactgatttggccctggtttttttattttttattttwtttttttaggaaattgactcttcatgtacattgtttatgtcatgaatatatattaatctaggtgaaggcagagatagttattaaaatcagtgttctttta

SEQ ID NO: 42751 - DNA, 201 bp, Homo sapiens
tattaccattctacttaccgtcaaatctaggtccagaaaggtgctgtgatttgttcaaggccacaaagacagcaagagcagaaccgggatcaaaacctagrtatttagattcctagtgttttgtctacccgcgtgcaccaagctgtctagggattggtaaattcttacatgatgtaatcaggttttctttcattttaacct

SEQ ID NO: 42752 - DNA, 201 bp, Homo sapiens
tgttatattaatcccttagcatggctgaaagcagtgctgtgaactaagctaatttatcccagcattgcatgtcaccaaaggagaaactgatttggccctgktttttttattttttattttttttttttaggaaattgactcttcatgtacattgtttatgtcatgaatatatattaatctaggtgaaggcagagatagtta

SEQ ID NO: 42753 - DNA, 201 bp, Homo sapiens
atggtaagtatttgtgtgtctaaacacagaaaagggacagtaaaactacagtattataaacttttttttttttgagatggagtctcactctgtcacccagkctggagtgtagcggcacgacctcagctcactgtatcctccacctcccaggttcaaacgattcttgtgcctcagcctctggagtagctgggattacaggtg

SEQ ID NO: 42754 - DNA, 201 bp, Homo sapiens
agtaatactaccttcaaaatgcatctggtgcagtgttttcttaaggtccttaaccttcataatagttaacttttttaaaagtagttaacttcctctctcaraaacccagtgtgtttggttgtaaaggctggtgtagggaagagggccagttgtagcaggcagaaagagctggcatggatatatagcaggtgtcacctccca

SEQ ID NO: 42755 - DNA, 201 bp, Homo sapiens
attctatttgaattgctgtatccattcagcactcagatggagagagtcagggtaagtaccctccctactcaaaaaaaaagtttcaaacagaaaataatctmacatttacaaaagagttttttaaagacttagttcttcttaataccagcagattggttaactaaaagtgaaagaggtgatgtgagtaacacagagaggagt

SEQ ID NO: 42756 - DNA, 201 bp, Homo sapiens
tgaggtgggaggatcacttgggcctgggagacggaggttgcggtgagtcaggtcacaccactgcactccagcctgggtgacagagtgagaccctgtctcawaaaaaaaaaaaaaaaaaaaaaaaagaaatcaaaaactgccatttgaaatgctgtgaactggatgcatagagtaatactaccttcaaaatgcatctggtgc

SEQ ID NO: 42757 - DNA, 201 bp, Homo sapiens
tctgaaactcagtgtcaaactgaaaataaatatgattctgtaagtggtgaagccaatgacagtagctggaatgacataaaaaactctggatatatatcacrgtaagagtcttataaaatacaaccatctgaatcaaagaagaaatgacctaagatcttgtttaactttttttttaatgtgtggatatctagaaaaataaaa

SEQ ID NO: 42758 - DNA, 201 bp, Homo sapiens
agaaaatcggaagctgtagaaaattactgaactgaggaaggacatgatgagagattttaagatcactataggctggacacagaggctcactcctataatcycaacacattgggaggtcgagggagaaggattgcttaagcccaggagttcaagactagactgggcaccacagcgagatccctatctctaattttttttttt

SEQ ID NO: 42759 - DNA, 201 bp, Homo sapiens
tttgagatgcagagcagcgaatcagaacaaatagctgcttacatgaacaaatcagtgggatgtgaaaatgcatcaccgtaacctacatttttttctaccargagatttgcagctgactatcgggtgactcattcctatgcttagggggtgaggtaatgctattgtgaagggtgatgtcatctctgtacctgaactgcatgc

SEQ ID NO: 42760 - DNA, 201 bp, Homo sapiens
ctgggattacaggcataagccaccacgaccagcctaaaacaaatgtttaaaaaacatgtattttattaaagaaataacaataaacccactccacaataacrtaacatttttatgaataataactatattctttaatacaaaaaatttaatgagaaaagtagcattttacatttttgcaagtctcttaaatttttggtttaa

SEQ ID NO: 42761 - DNA, 201 bp, Homo sapiens
tatttcagatacaggaagtacatgtgctgatttgttacatagtatattacacccaggtagtgagcatagtacccaatggtagtttttctttttttttttttgagatggagtctcgctgtgttgccaggctggagtgcagtggcgtgatcttggctcactgcaacctctgcctcctgggttcaagcgattcccctgccttag

SEQ ID NO: 42762 - DNA, 201 bp, Homo sapiens
ctgtctgtttatatatatataattatttataagtaattacatatatgtattacatatataattatttatatgtaattacatataaaatatatagttaggtrtatatcctcaaagtctataattttctgtatttgtatttgcatccatattagtttgtgaccctcccctctttaagattagatttctttcttttttatcagt

SEQ ID NO: 42763 - DNA, 201 bp, Homo sapiens
gcgggtggatcacctgaggtcaggagtttgagaccggcctggccaacatgatgaaaccccatctctactaaaaatacaaaaaattagccaggcatggtggygggtgcctgtaatccgagctactcgggaggctgaggcaggagaatcacttgaacctgggaggcggaggttgcagtgagctgagatcgtgacactgcactc

SEQ ID NO: 42764 - DNA, 201 bp, Homo sapiens
ggcgagagttatcatggcatgtttggggaactgagagaagttgaggatggcaacaggaatgagggttgggagagagcagccgaaatgagcccattgaggtrggccaggatcaggttatgcagggtctagtaagctatgttagacattccagattttatcctgagccatgagaaaccattgaaggtttaagtggaagagatc

SEQ ID NO: 42765 - DNA, 201 bp, Homo sapiens; identical to SEQ ID NO: 7486

SEQ ID NO: 42766 - DNA, 201 bp, Homo sapiens
aaatacaaaatacaaaaaaaaaaaaaaatacaaaaattagccaggtgtggtgacatgcacctgtagttccagctactttggaggctgaggtgggaggatcrcttgggcctgggagacggaggttgcggtgagtcaggtcacaccactgcactccagcctgggtgacagagtgagaccctgtctcaaaaaaaaaaaaaaaaa

SEQ ID NO: 42767 - DNA, 201 bp, Homo sapiens
taatttttgtatttttagtagagatgggatttcaccacattggccagaatatagtgcacctgacctcaggtgatccacccacctcggcctcccaaagtgcygggattacaggcatgagccaccacgcccagcccaattctgaaatttttaattactgtcgcatattctttttctctgaggtctatattagaaaggcttaga

SEQ ID NO: 42768 - DNA, 201 bp, Homo sapiens
tgtttgagttctttccaatgcagataatactttaatccaatgtgattaataaattagattttaaaattaagaaaaaggaaaccaataaacaacatttacartatctttttttttttttttttttttttttttgagacagtgtttcactcttgttacccaggctgggctggagtgcaatggcgtgatctcggctcactacaa

SEQ ID NO: 42769 - DNA, 201 bp, Homo sapiens
tgggcaagccgagatcgtgccactgcactccagcctgggccacagagcgagactccgtctcaaaacaaaacaaacaaacaaaaaaaacccagctgaataartgaagatatattcatactatagataacgcaatgagtcagtagcataagtggaattactaaatggtttattaagcagataaatgacagattcaagttgcag

SEQ ID NO: 42770 - DNA, 201 bp, Homo sapiens
gggttggtggtgtacagaacacacttaagtgtgttaacttgtgacttctttcaagtctaaatgatttaataaaactttttttaaattaagtatgttgactsttattttgaggagttagtcccaaaatggtagattttctaatttataaaatgggatcatagatctaggaagagtcataaacctatcctcaaaaaaacttct

SEQ ID NO: 42771 - DNA, 201 bp, Homo sapiens
gtcggacctcgcagtggcaatgagaagtgtgtattcagataatgttgctgttggtattatttagaaatacacctaataccaaaatttatcagatttctgtwtgtggagattttgactattttgttgccttaaaagcatatatatatatatttttttgatacggagtcttgctctgtcgcccaggcttgagtacagtggcgt

SEQ ID NO: 42772 - DNA, 201 bp, Homo sapiens
attaatgttatggcccttttaaaaagttagcttctgttttaggtatttgggaataagatgatcattccttccctggatggagccctcttccagtgggaccragaccgtgaaagcatggaaacagttcctttcacagttgaatcacttcttgaatcttcttataaatttggagatgatgttgttttggttggaggaaaatct

SEQ ID NO: 42773 - DNA, 201 bp, Homo sapiens
gctaacttcagttcagctttgtactggtagtgattttgtttttcaccttatcagcaaaggaaggagtctgaaactcagtgtcaaactgaaaataaatatgwttctgtaagtggtgaagccaatgacagtagctggaatgacataaaaaactctggatatatatcacggtaagagtcttataaaatacaaccatctgaatca

SEQ ID NO: 42774 - DNA, 201 bp, Homo sapiens
cataaatgtcagaattcttaactatgccattttatatctaagtgaaaagacacaatactctcagtagttgagtgatttttctatttactaattatagaggraacattattactgccactttaggataagactgctgaaacttacttaggaaagggtaaatgacttgccacatcttgttcagtggagatccaagattggggc

SEQ ID NO: 42775 - DNA, 201 bp, Homo sapiens
taccaaaatttatcagatttctgtttgtggagattttgactattttgttgccttaaaagcatatatatatatatttttttgatacggagtcttgctctgtygcccaggcttgagtacagtggcgtgatattggctcactgcaacctccacctcctgggttcaagcgaatctcctgcctctgcctcccgagtaccggggatt

SEQ ID NO: 42776 - DNA, 201 bp, Homo sapiens
aaaaaattattgagggctctaaagagctttttatcaggctggagtgcaatggtgtgatcatatctctctgcagccttgaatcctgggctcaagcaatcctsctgcctcagcctcctgagtagctgggactacagacatgcaccaccatgcccagctaacttttttttttgtggagacagagtctcgatattgcctaggctg

SEQ ID NO: 42777 - DNA, 201 bp, Homo sapiens
ctacagctggcttgtaatgcaagagagtcttggtcaacttgcggctttactttgaatttatatacattgtgcatcaagtgatatagaagagataaagttgyatcttgtattcctgaccaggaatataactatacatgcttacagtgtgcatggtctttaaagctgataaatacacataatgaattcatagaacaactgtac

SEQ ID NO: 42778 - DNA, 201 bp, Homo sapiens
ttgttttaataagagaactgtgaggtaggaaggggaaactaataacagaataaatggcagagccaggaatagcaggaggaagagaattcataaatatggtytactgtgtctcaggtgtttttttttttttttttttttttgagacagagtctcactctgttgcccaggctgatctcagctcatggcaatcccccaccccca

SEQ ID NO: 42779 - DNA, 201 bp, Homo sapiens
taagataaatataaataaaaactttattgaattttactagttagaaatctgtgctgcaaaatcccataaattattattccctaattataagcagaattcayctgaaatttttttgtaatgtaattccaggtaaatttgattatttgcagaaaaagtgtacttaataatttggagctctagaatagtagaggggaaagagca

SEQ ID NO: 42780 - DNA, 201 bp, Homo sapiens
aggtcattagtaattatcagcactttagatgggagaattgctgccttggatcctgaaaatcatggtaaaaagcagtgggatttggatgtgggatccggttscttggtgtcatccagccttagcaaaccagaggtaagaattttctgttaactgttgactagaaaacttaattctaatgagtaattgctgatattaagaagt

SEQ ID NO: 42781 - DNA, 201 bp, Homo sapiens
gggaaaatagtagcaggtttgaatgctgctataacaaaatactgtagactgggtggtttatagacaacagacctttatttctcatagttctagaggctgggaagttcaagatcaaggtactggcagattcagtatctggtgaagactgattcttcacagaagcactcctacatggtggaaggggcaagggcatctctgggg

SEQ ID NO: 42782 - DNA, 201 bp, Homo sapiens
gcccggctaatttttttttatattttagtagagatggggtttcaccacgttggccaggatggtcttgatctcctgacctcgtgagccaccgcacctggccscaatggtagtttttcaactcacccccggccagtactctgcagtgtctattgctcccatgtttatgtccatgtgtgctcaatatttagcttccacttataa

SEQ ID NO: 42783 - DNA, 201 bp, Homo sapiens
ctttggactatgaatagggctttgcatttacagacaacttgaccttctttatcctgactggattttgtttttttaagtgtttgagtgcttactgggagctyagccaccatagcagcagatgtccaacttaacagatttttgagttaccagaataggaaggatctgggtttctaagatccatgattctttaaaatataatta

SEQ ID NO: 42784 - DNA, 201 bp, Homo sapiens
ggagccaccatgcccagcctcaggttcttttttttatacattattttgcaatcttcacagtcttcctaagtgtaactttcgttttttttttttttttttttacattttgacagatgaagaaccttataaagattaatagtaatcctaatgataagaataattgatactactcatttatagggtttgatcctataataaggt

SEQ ID NO: 42785 - DNA, 201 bp, Homo sapiens; identical to SEQ ID NO: 7482

SEQ ID NO: 42786 - DNA, 201 bp, Homo sapiens; identical to SEQ ID NO: 7483

SEQ ID NO: 42787 - DNA, 201 bp, Homo sapiens
attagtcatccagccagcacagtagctgtcttctttgttgattggaaggcatgaggagttcaaagttgctgttgtatctcctggtggaagtgttcctctcycttagacaaagacctctaggcctgccgaacataaggtcacaggaacaggaagcaaaaatgttgccagtggatcactaggtggtaatggtgggtgatgcca

SEQ ID NO: 42788 - DNA, 201 bp, Homo sapiens
catctcactctgtcacccaagctggaatgcagtggcaccatctcagctcactgcaacctccgcctcctgggttcaagcaattcttgttcttcagcctcccragtagctgggactattggcatataccaccacacccagctaatttttgtattttttgtagagatggggtttcattatgttggtcaggctggtctggaactc

SEQ ID NO: 42789 - DNA, 201 bp, Homo sapiens
aaccgaaaggacctaccaaatgttctgtacaatgaatgaaaaaaaaaaaaaaccagtcaaaataaccattttcagaacaccagaaataaaggccctaaaascttccagaaaggaaaataaaacaggtctaacctaagtaaaggatcaagaatcagatggcatcaaaatttatatagttataaatgcctcagagaatactgt

SEQ ID NO: 42790 - DNA, 201 bp, Homo sapiens
caccaaagctactcttgccaaagttctcagtgatcttccttgtgttaaatgtaatggacatttttcagtccttatctaactgaacctctttgtatttgacmctgttgaacatctccctttgacctttcttgcctgacttccttgacaccatgctctcctggtctccttgggtgtgatgtggatgcttcaggacctgatctt

SEQ ID NO: 42791 - DNA, 201 bp, Homo sapiens
ttcaacatgtaaagttattcctccctcccctcaaatgttcaacacatcacgagaacaagcatgtcaacataatctaaacatgccagatattgcaaaattcraccgtataaagtcccacatgccatgaactgcttttaaatttctcacgtgaacaatgacttaaaacaacaaatgggccagctgcagtggctcacttctata

SEQ ID NO: 42792 - DNA, 201 bp, Homo sapiens
tctaatttataaaatgggatcatagatctaggaagagtcataaacctatcctcaaaaaaacttcttcctaacccatttcagacaggtatctttttcatcayttcccaaagacttggcaggccctttcaaaattcacaagatccataattgacagacatttgcccagtacctaccctgtgccaaggactgagaatatagagg

SEQ ID NO: 42793 - DNA, 201 bp, Homo sapiens
tccaccaaagctactcttgccaaagttctcagtgatcttccttgtgttaaatgtaatggacatttttcagtccttatctaactgaacctctttgtatttgrcactgttgaacatctccctttgacctttcttgcctgacttccttgacaccatgctctcctggtctccttgggtgtgatgtggatgcttcaggacctgatc

SEQ ID NO: 42794 - DNA, 201 bp, Homo sapiens
ctggggaggctgaggccggagaaccacttgaaccctggaggtggtagcaggaattgtcggtacaaagacctagcccaggaggaagaggagcttgggcaagycgagatcgtgccactgcactccagcctgggccacagagcgagactccgtctcaaaacaaaacaaacaaacaaaaaaaacccagctgaataaatgaagata

SEQ ID NO: 42795 - DNA, 201 bp, Homo sapiens
gtagaaggcccttgttgcttttttttttttttttgagacagggtcttgcaccgtcacccaggctggagtgcaatggcacaatctcggctctctgcaacctytgcctccctggttcaagtgattctcatgcctcagcctcccgagtagctgggattacagacacccaccaccacacccagctaattttgtatttttagtaga

SEQ ID NO: 42796 - DNA, 201 bp, Homo sapiens
cttaagatgatagggttccagcaataccttttattctaactatgtagaaggcccttgttgcttttttttttttttttgagacagggtcttgcaccgtcacmcaggctggagtgcaatggcacaatctcggctctctgcaacctctgcctccctggttcaagtgattctcatgcctcagcctcccgagtagctgggattaca

SEQ ID NO: 42797 - DNA, 201 bp, Homo sapiens
atagacaagagaacttttgaaaagttcaccccatggaaaggggggagtgtggagctgggaaggagaggggagagagggttgggctggtacaagaggcagamaaatgagattaggaaagtacaccgaaaccaaattgtgaaaggctttatgtgccacaccaagcagtgtgacctttctttttcagtgggcacagggaacctt

SEQ ID NO: 42798 - DNA, 201 bp, Homo sapiens
gtgagccgacatcttgccattgcactccagcctgggcaacaagagtgaaactccgtctcaaaaaaaaaaaaaaacacctttttaattgtgtttttaaaaakttattattatttaagaggctggaaataatacttttacattttaaatattgtgaaaacaaataaaaggaattctatctggatgcttattaatgaaggctca

SEQ ID NO: 42799 - DNA, 201 bp, Homo sapiens
acctgtacgtacataaatgttctcatagtagctttatgtgtaatcgccaaaaattgaaaatataccaaatgtactccaacaagtaaatggataaagaaacrtggaacatataaagcagagtactactcagcagtaaaaaggaactaagtattgctacattcaacaacatgaataaatttaaaaacattatatggagtgaaa

SEQ ID NO: 42800 - DNA, 201 bp, Homo sapiens
gaggcaggataatcaattgaacccgggatgcagagtttgctgtgaaccaagatcatgccactgcactccagcctgggtgacagagtgagactctgcctcaaaaaaaaaaaaaaaaaaattatagaataaagtagaaaaggtactttcaaaaatgttttaatgtaacaggaaaaggatatctgttacgcttatgttaaacct

SEQ ID NO: 42801 - DNA, 201 bp, Homo sapiens
tctttgtgctttaatatggccctttctctctctctctctcccctttctctttctccctccctccacacatacatatatacacatatatgtaaatgtacatacacacacacacacacacacacacacacacacacagtcatcttggtatccacaggggattggttccaggactccctgtggataccaaatctgcagatgctc

SEQ ID NO: 42802 - DNA, 201 bp, Homo sapiens
aacctgaggcaggaaaatgtgttagaaagcattttaaggtgttctgatgagaaatgagaatcttctagagcaagagctgtggtaatgaagaaggcaaagattttttttttttttttttttgagacggagtctcgctctgtcgtgcaggctggagtgcagtggtgcaatcttagcttactgcaacctccgcctcccaggttc

SEQ ID NO: 42803 - DNA, 201 bp, Homo sapiens
ctttgtgctttaatatggccctttctctctctctctctcccctttctctttctccctccctccacacatacatatatacacatatatgtaaatgtacatacacacacacacacacacacacacacacacacacagtcatcttggtatccacaggggattggttccaggactccctgtggataccaaatctgcagatgctca

SEQ ID NO: 42804 - DNA, 201 bp, Homo sapiens
acctgaggcaggaaaatgtgttagaaagcattttaaggtgttctgatgagaaatgagaatcttctagagcaagagctgtggtaatgaagaaggcaaagattttttttttttttttttttgagacggagtctcgctctgtcgtgcaggctggagtgcagtggtgcaatcttagcttactgcaacctccgcctcccaggttca

SEQ ID NO: 42805 - DNA, 201 bp, Homo sapiens
ttagcatggctgaaagcagtgctgtgaactaagctaatttatcccagcattgcatgtcaccaaaggagaaactgatttggccctggtttttttattttttwttttttttttttaggaaattgactcttcatgtacattgtttatgtcatgaatatatattaatctaggtgaaggcagagatagttattaaaatcagtgttc

SEQ ID NO: 42806 - DNA, 201 bp, Homo sapiens
ggaccaggaagtatagtctaatcagtactactttgtttctaaacaagaacatatgcctcctttagtgagggcacaagtttgggcaaaggattctcagctacgccaaaaaaacaggttcaaccaaatcacatttatagttttgtgaaataacgccctctccccaacccccagaaaggatatttgaaattttaaaataagcag

SEQ ID NO: 42807 - DNA, 201 bp, Homo sapiens
acatatgtttatgtaattttgtgaattaccagtcttctgacttcaacacaaatagcaaattgcaaagtgttacttggggttcttgggatgggttgggaagwcattctgacaatctcagaagttctaaagaactagttttatcttaactatcactaatttgcaaagtacatgttcctttttcctctggctctaattcctctc

SEQ ID NO: 42808 - DNA, 201 bp, Homo sapiens
ctgtatatgcatatagtctgatgctaatagcatcattgtcacttgggagtatgttaaaactccggagtggggcaccaccccacactccctgaatgagagtrtctgcattttaacaagatcaccgtgtgattcacatgcacgttaaagtttgagaaatgttgggtagagtatcctgagtgccaggcttgatcaaaattacac

SEQ ID NO: 42809 - DNA, 201 bp, Homo sapiens
tagaagaggatgtagttctcacatagagcaaaatgactcatatcttctaaccgaaaggacctaccaaatgttctgtacaatgaatgaaaaaaaaaaaaaamcagtcaaaataaccattttcagaacaccagaaataaaggccctaaaagcttccagaaaggaaaataaaacaggtctaacctaagtaaaggatcaagaatc

SEQ ID NO: 42810 - DNA, 201 bp, Homo sapiens
taacagactttcctgtgctttccagtaaacccagcccaaatcttttctggtgcacccaaactgatatttaaggaaacaacactgccaaatttccacatttkctgtgtgctgaaccctgagtagactttataagtggctactgtttctcagtatactgaaaatatattttgagaatagagaacttctattgtattatgaatt

SEQ ID NO: 42811 - DNA, 201 bp, Homo sapiens
catggtaaactgagtttgagaaaaatcttactagagtactatgtgtagggcctgggagtgattggcagttcttttaaattacttttggttgatggactgcrctgcttcatgtgctactcagaaggaggctggagtacatcaggatcaagactccagctcttaattactattattcttttaaaggtatgatgcttctatttt

SEQ ID NO: 42812 - DNA, 201 bp, Homo sapiens
aaaaatgggtaaaattgtaatggaaagtcactggacttgaggaaacagcaagaggcacagaggccggagattatgtttggaaaacattttgtctctgtgtmtgtctgtgtgtgtgtgtgtgtgtgtgtgtgtgtgtgtgtgtgtgtgtacgtaagcgatatagacatgcacatatgtatgctaggcagggagaagtagatg

SEQ ID NO: 42813 - DNA, 201 bp, Homo sapiens
gtgtgctacctcattttaaggtgacattgatgtgtttggggaaaatcactctgatgtagaagtacaaacatttgtaagtttttgagagaaaatctgtcccwtagctgttgtaagggacacatcaagtcagtccacaaccctcaaaaccattgtgtctgaagggtcaggacaaagttcttgtgggccctcttgtggcataaa

SEQ ID NO: 42814 - DNA, 201 bp, Homo sapiens
cctgaaaaatgggtaaaattgtaatggaaagtcactggacttgaggaaacagcaagaggcacagaggccggagattatgtttggaaaacattttgtctctrtgtatgtctgtgtgtgtgtgtgtgtgtgtgtgtgtgtgtgtgtgtgtgtgtacgtaagcgatatagacatgcacatatgtatgctaggcagggagaagta

SEQ ID NO: 42815 - DNA, 201 bp, Homo sapiens
gttcaggccacctggtctgtggtatttgttagggcaactctagcaaactcatatacctgggaagtttcctaggcaggcaaaacaacaaaggaaaacccccmaggtgggtcttgattggcccagtggagtgagcaaagacagtatgaaatgagatcagaaaagccataggaaccagatgctgtagcaccctgtagtctattt

SEQ ID NO: 42816 - DNA, 201 bp, Homo sapiens
gataatggtcaattggtttgagttcgctcatctattttctctacttttcaaaataacttactctctaggaatacctcctacgctctactttcaacatggamggcagagctgccccttttcctccagatactctggaatcttgctctcgtaatcaaccccctctgtctacagcaactgcagtctcttcctttccagttgtct

SEQ ID NO: 42817 - DNA, 201 bp, Homo sapiens
tgtgactcggaggtgcaggcaggacatccagagggaggtaggcgggtggaaatgagtgactagagccagtgagaaggcagcataaatatgaataggtgaarctgtgggaaagggaaagctcatgagaaaacctcaggaaatgccttttattttagggaggaagatgagccagcaaaggagacagaaatacagctggctagg

SEQ ID NO: 42818 - DNA, 201 bp, Homo sapiens
agatctttgtggctgactgtatatccagactcgctcgcagcagtgctgctcaaacgacttccttccccagcttctgcttggttcctgtccagctcaccccygtcatcttcatctcttggtcagcctgctttagttgctattccttttctcccttcctctttaccccagccaggggtgaaggtttgttgacttctggcagca

SEQ ID NO: 42819 - DNA, 201 bp, Homo sapiens
ctttgtatttgacactgttgaacatctccctttgacctttcttgcctgacttccttgacaccatgctctcctggtctccttgggtgtgatgtggatgcttyaggacctgatctttctcatcctctcagtattgttggtattcctcagcactccctcttttcactgttcatcccacaaactctccttagatggtcttcccta

SEQ ID NO: 42820 - DNA, 201 bp, Homo sapiens; identical to SEQ ID NO: 7490

SEQ ID NO: 42821 - DNA, 201 bp, Homo sapiens
acgcgcgcgagccgcggaggatgcggtgtaggggggcggagatccgggacccgggcgggcgtcttccctcggctgcggagggcagctggcgacctggggasgagcgcggggccacgacgccctcccatcccccggccagcgacctgcctgggctcggctcccgagggcctggtgctggccgacgggtcagagcagcatcct

SEQ ID NO: 42822 - DNA, 201 bp, Homo sapiens
actcagtgtcaaactgaaaataaatatgattctgtaagtggtgaagccaatgacagtagctggaatgacataaaaaactctggatatatatcacggtaagwgtcttataaaatacaaccatctgaatcaaagaagaaatgacctaagatcttgtttaactttttttttaatgtgtggatatctagaaaaataaaacatagg

SEQ ID NO: 42823 - DNA, 201 bp, Homo sapiens
gccagggtgcatgccgggcatagcacatgtgtccctgagaggcccctgatcaggggtggaaacccagcaaagtgaaaatcagaaatagtgattctccagtycctgttcacagataaagaaagaaagaaataataagcaatactaggcctggtgtggtagttcacacctgtaatcccagcactttgggaggccaaggcaggc

SEQ ID NO: 42824 - DNA, 201 bp, Homo sapiens
ttggtattaaaatgctttgaggtaggctggatgaacccagcttagtgaagatgacatgaaaacccttagctaatggggtctttattgagtagaactcaggkaagttcagatgtaagcagtgtctctcagtaaacatgaaaagactgaagatgcagacaatcaaatacttaagtctcttgaagagctgggtggtgggcgggg

SEQ ID NO: 42825 - DNA, 201 bp, Homo sapiens
ttcccgggccccactccagacctagggagtcaggaacttggcggggccaggggggtggaagggcctgcaatctttgtctgaaccagctcacagggtggttytgatgcctgccttccactcgaagtctgcttgtcacgaacgcctgtctcagctcagggacatccccggcttaggaagtatgctcaggtgtgtgcagggcca

SEQ ID NO: 42826 - DNA, 201 bp, Homo sapiens
agaaattttgcttgttggcatatgtttggtgttttgattcagtttggaggatgaactagttaatttccctgggagtacatgcctattaaaaatatagcatsctgcatctgaccaagatgctatcttactatcttattgtgcctatcttttatgcggagagagaaaggggggtgttgggaaggagaccagactgtggaaaca

SEQ ID NO: 42827 - DNA, 201 bp, Homo sapiens
actcagggaccagaaggcggctgcaggacgcgaccgagcaggaccccaggcccgggaacgacgtcgcgagcgctgagactgccgggcctcccagcccatcwggcattcgagcgcaggaccgggcgccccggcaccgccgcgcgccacccgctaggatgccggtggccccagcgccctcagccgacggaggtgagaggcggg

SEQ ID NO: 42828 - DNA, 201 bp, Homo sapiens
ctgcagatacatgactaacaaggatagctggccatgcccagggctggtgttggttgaggaggtggtgatggtgcggggcatgtgtgtgtgtgtgtgtgtgygcgcttgaggagttgtggaagtgttcatatctgtaaagtattatttcatggatgcagaccttaatgctaggttgaataactttgttgccatagaagaaga

SEQ ID NO: 42829 - DNA, 201 bp, Homo sapiens; identical to SEQ ID NO: 7508

SEQ ID NO: 42830 - DNA, 201 bp, Homo sapiens
gcctcactgaaagaggaatttcagtgatgccatgggtcagatcctgggtctctcttagggaaacctgccataaagcatgagagccacattactcctcaggscttctgggctccgattccgcagactagttttggaggcatcaccacgcctcaaggttgctctgttatatcagggtaactgactttctctaggaacggagac

SEQ ID NO: 42831 - DNA, 201 bp, Homo sapiens
agcatctttggcaagcacacagcaacaatgatgttgtgtgtttcttttgcatcacataatgccaggttgagccagtattagtgacactgagtttgatcttyctgtaaggtacagccagatgtctccataaaaaaatggaaaatggaaaacctttttcttttttttttccaattagcacccgttcgcctgcacactttcacc

SEQ ID NO: 42832 - DNA, 201 bp, Homo sapiens
aaaaggggcctcaggaatcactgacattggaaccaaggtttgtctgcagcttgtcggtttctgggacagaaacccaacatactggagtgggtatcccagcratctgtaggataaaccaggacactgtggtgtcatggatagctggctgtctgccaggtgatggcccctctggttgcaatgtgagccgggcaggtcatccat

SEQ ID NO: 42833 - DNA, 201 bp, Homo sapiens
atgacttaaggcccctagaagttcatgaacctggtgtgggtgtgtgtttcccactcagatgtgctgtgtaacttgcacctgagggtaacacgaactctccstgggcaagatgtaaccagggaaagaaaggagaaggcagagctcagagcaagcagaaagccaagcaggagaccaaaagaggcctcagaggccatgtttgca

SEQ ID NO: 42834 - DNA, 201 bp, Homo sapiens
ctcccaaagagctcatccctaatgtgacatcctggaatcagatggcacggacaccggcccagccccttcccagctctgtgactaaggacaagtgacacccyccctcccccagcctcggtctcctcctgtgtacattcagaaggcagatgctgccatgaggccatgtgtgctatgtccatggtgcaaggtggcacgcatgcc

SEQ ID NO: 42835 - DNA, 201 bp, Homo sapiens
cgctaatgaggaggagcgtctctaccctgcagctgtctgtactcctgtgtcttccgtaatgtgccaagctctctgaatatatgcaaaactagtctgcaaaragccatatgtctcagcatctggctttatttctaagtgttcaggtggaatttaagccgcgatcaaatttacaatgtcactgccagctctggacacttactt

SEQ ID NO: 42836 - DNA, 201 bp, Homo sapiens
atactcatcttccagaaggcgtcttattcctcctcgacaaaaaaaaaatgtgttggtattaaaatgctttgaggtaggctggatgaacccagcttagtgargatgacatgaaaacccttagctaatggggtctttattgagtagaactcaggtaagttcagatgtaagcagtgtctctcagtaaacatgaaaagactgaag

SEQ ID NO: 42837 - DNA, 201 bp, Homo sapiens
tgccttaagattttccttaagcttttggaaatgtataatgtttgagaaaaaagaaaaagaatagactgagtggaatcgtatctagtttcagttaataacaygtttcagttgatgttactgttatagctactgggcataaagtctccttcccttttttgaatcctatttttgaggcattgaagctgtgtctgtaagagacaa

SEQ ID NO: 42838 - DNA, 201 bp, Homo sapiens
aagggaagcacattcaggcccacatgaaacttgggacagaagtggcttctcagagccgtgcaccaggcactttgaacaagttggaaggctacagtgccggragactccacagtagcacaggcgaagtggcttaggcgaaaacgctgggaagtaccccagctcccgggggccagagcctctagggctggcagcctcagcagg

SEQ ID NO: 42839 - DNA, 201 bp, Homo sapiens
agctttaaggcccaggaagagggcagcagatgggggtggggcagtgggtgagtgagaggcccgtgtgtggggagacccactgaggacagggatcgttaggsaaacggagcctcactgaaagaggaatttcagtgatgccatgggtcagatcctgggtctctcttagggaaacctgccataaagcatgagagccacattact

SEQ ID NO: 42840 - DNA, 201 bp, Homo sapiens
ttcccatggtgtcccccaatcacttaggaatttagcctgtgtctaaagaccctctctgcagcctgacgtggctagccatcccagtacttccacgtttttcrtgcctttctccaacagcgttgccgtggccccttaggcggcgatcgttttatcaatggtcgctccctctttttatctgttggcaggagccctttttcaacg

SEQ ID NO: 42841 - DNA, 201 bp, Homo sapiens
cagaccttaatgctaggttgaataactttgttgccatagaagaagaaccgcacgtcaggcttttttcattagcaaaccagtaagcactcactttgggcctytgaaatcacttccatcacctaacaccagagatacaaactgaagctagcccttaagagcctccccctaagatttagagagaatgatttctcaaccagtttt

SEQ ID NO: 42842 - DNA, 201 bp, Homo sapiens
tgtctgagctttaaggcccaggaagagggcagcagatgggggtggggcagtgggtgagtgagaggcccgtgtgtggggagacccactgaggacagggatckttagggaaacggagcctcactgaaagaggaatttcagtgatgccatgggtcagatcctgggtctctcttagggaaacctgccataaagcatgagagccac

SEQ ID NO: 42843 - DNA, 201 bp, Homo sapiens
tcccggcaactccagacaccaaatcgcttcccatggtgtcccccaatcacttaggaatttagcctgtgtctaaagaccctctctgcagcctgacgtggctmgccatcccagtacttccacgtttttcatgcctttctccaacagcgttgccgtggccccttaggcggcgatcgttttatcaatggtcgctccctcttttta

SEQ ID NO: 42844 - DNA, 201 bp, Homo sapiens
ggacttgggcgcgccacggcggccggagcgctccacatcagcacccctcccccagagccgctgcaggaacagggaggaggccttttccaccgcacccggarcgtttacaacgggctggagctgaatacctggatgaaagtggagaggctgttcgtggagaagttccatcagtcgttttccttggacaattaacaagttagg

SEQ ID NO: 42845 - DNA, 201 bp, Homo sapiens
aatcccagaactttgggaagccgaggcaggtagatcacccgaggtcaggagttcaagactagcctgatcaacatggtgaaaccccgtctctattaaaaaakacaaaaattagccaggcacagtggtgggcgcctgtaatcccagctactcaggaggctgaggcaggagaattgcttgaacccaggaggcggaggttgcagt

SEQ ID NO: 42846 - DNA, 201 bp, Homo sapiens
gtgctgatttgtccagctgggagtcaatccggatttgtacttattgttatacttcttcttttcagctgttcttataccagaagaatccttcaccccttttwcttgacattgattttttttggaagagctcaggactgcagaatgcccacactctggtagtccagtttttcccatggtgtcatttaactcatggctcaaact

SEQ ID NO: 42847 - DNA, 201 bp, Homo sapiens
aagggaggctgggatcacctcccgccccttctagcatctctactgagagtgacaactccaggctgtccacccccatcctgagccttccacactcttctccrtgccactaacactcagtatctgacgcctgcagtgcgaagcctccagagtccccagactgacctgggcactccacccttgctggttctactttacttggac

SEQ ID NO: 42848 - DNA, 201 bp, Homo sapiens
ctgcatgaaggaagatctaaatctggacttgttttatcctccccttcccttcttctcacctttattctgcctccaccttcttctttctttgtcttcccccrctggcttctctgtcatttcccacagtgggttcccccaatccctgtggtcctcatgtcctgttcttgttctctttgtgctggatctcacatcctacagcat

SEQ ID NO: 42849 - DNA, 201 bp, Homo sapiens
tgggattcagctccagttgtgcacatgacggtaacttacttgataatgcacgccttccccgtcagcttccttctctccctacttccgggatcttcactcarataaactacataacctcaagtcctctctcagggtctccttctggaggaaccccaactaagaggaagtagaaacactgtctctcccatctgaatgactcag

SEQ ID NO: 42850 - DNA, 201 bp, Homo sapiens; identical to SEQ ID NO: 7506

SEQ ID NO: 42851 - DNA, 201 bp, Homo sapiens
gcctttcataagtgatagacttggtgaataaataccccagctgtctccccgccttgctgggtgaactctggggtgtcagctctgtctctcggggttccccrgtgggattcagctccagttgtgcacatgacggtaacttacttgataatgcacgccttccccgtcagcttccttctctccctacttccgggatcttcactc

SEQ ID NO: 42852 - DNA, 201 bp, Homo sapiens
tgcttgtcacgaacgcctgtctcagctcagggacatccccggcttaggaagtatgctcaggtgtgtgcagggccagtcagaaattgtttccagaaacagcytttcataagtgatagacttggtgaataaataccccagctgtctccccgccttgctgggtgaactctggggtgtcagctctgtctctcggggttccccagt

SEQ ID NO: 42853 - DNA, 201 bp, Homo sapiens
ggaccctgggatctgtgacatgaagtggtgtgaaagcataattataaattagaggggggaaagccatcaataagagacaggtaagggctggaaactctcaytagtgagtggttctcaaagtcaagacttcagagcagctgcaccagcatcacctcgagattttttgaaatgcaaattcccgggccccactccagacctagg

SEQ ID NO: 42854 - DNA, 201 bp, Homo sapiens
cctagggagtcaggaacttggcggggccaggggggtggaagggcctgcaatctttgtctgaaccagctcacagggtggttctgatgcctgccttccactcsaagtctgcttgtcacgaacgcctgtctcagctcagggacatccccggcttaggaagtatgctcaggtgtgtgcagggccagtcagaaattgtttccagaa

SEQ ID NO: 42855 - DNA, 201 bp, Homo sapiens; identical to SEQ ID NO: 7505

SEQ ID NO: 42856 - DNA, 201 bp, Homo sapiens
tgtgaccaacacacattttcctgagaagaggcctcagacaaacaaaaaaatatcatgcatgcacatttactcagataatgactgtctgttgcagcctttaygctaaacagagctaagagtagagatagtgcagattaactcagacccagaaacttggggaggcaccctgggatcctggaagcagatgctgggagggcagag

SEQ ID NO: 42857 - DNA, 201 bp, Homo sapiens; identical to SEQ ID NO: 7507

SEQ ID NO: 42858 - DNA, 201 bp, Homo sapiens
catacacaaaggctttattataaggaattggcccatgcaattatggaagctgacacatccaatgtctataggtccaaggtcccagttccagtcctaagagkattctcctagttagagacttctctctaactagggagagtgttggctttttgtcttcaataacagtctactcaggccctcaactaattgggtgaggctcac

SEQ ID NO: 42859 - DNA, 201 bp, Homo sapiens
gctcatgagtgatgggagagatctgggcaggcaacctcctctcatcctgcatcatcagcctggacttggaacttggctgctttttctttctgcagttagcrgagggccttggccaacacataagcctttctgccagcacttggcattccagctgacctcgacccaaggcctctgtgacttcaggaggcggcagctgggaag

SEQ ID NO: 42860 - DNA, 201 bp, Homo sapiens
tcagaagcaggctaaactcacctaggggagagtcctatcccaggtagtggtcatgcttggggacaggtggtgactaggaggggcacaaggaaggctgcagsgtccggcccatcttgttgctggcctgggtgctggtctcactgatctctgtgtggtggggcaggtcagcctcccaggcctgctggtgcctgcagtgcccag

SEQ ID NO: 42861 - DNA, 201 bp, Homo sapiens
gatttctcaaccagttttcatctttgaaagtgccatttctccctttatcattgtgatttttattcaaatgcatgagtctctgattttctaccatatacaaagggtagagactacagtttcctatagaagaaacttcacatagtggccgaaggatcttatttctcaaaattcaggaactggtttcctctttctggaaattat

SEQ ID NO: 42862 - DNA, 201 bp, Homo sapiens
attgcttgaacccaggaggcggaggttgcagtgagctgagattacaccattgcactccagcctgggcaacagagcaagcctccgtcttaaaaaaaaaaaaaggaacaattcctgaagcttctgatgatttctggctgaccatgaggttggaagtgggaacacattaagggcttaatgatgggacacagtgatgtaaccact

SEQ ID NO: 42863 - DNA, 201 bp, Homo sapiens
tgtgtttcttagcatttcaggaattaaaccacattcagaaccccaaataacctttcccctttcttcttacccactatcataggtggtattttaatgaagcrtctgtgccttgggtgctatttacaccaattttggtaggtcatactattttgagaatggtcttttgatagggagaaatttctaagacccatggtaataaaa

SEQ ID NO: 42864 - DNA, 201 bp, Homo sapiens
ccgtgcctgcacttggcgatcccaggagcacagaaatgcaccagacagatcatgaagggctaatgcttggaaaccacaccatttcctgacagagtgaaggratccctgtggatttatcaaaagggaggagggaatttaagctaattctcttcacctgctgtattctcaaatctccaaaacaccagataacttaggtttttt

SEQ ID NO: 42865 - DNA, 201 bp, Homo sapiens
gaggatgctggcacagggcactgttcacagactgcctttgctccatgccttttccatgagcatgagtggctgttcgtgtgggaaacggcagagccctcgcrgtccccatcagcactgtgcagtggtaccggaggtggcaggagacagcctgatggcccaggttgtcttcatacccggcttcatgccagggtgcatgccggg

SEQ ID NO: 42866 - DNA, 201 bp, Homo sapiens
ctcctccctgcgtccccagccctggaggccccccacctcttctcactctccatggccccagggaggatcagttccccttgaaaccccaccagctctgggcwgttgttccagtctgcaggggtggtggggagtgggggctgcagggcttcatgggccatttgtttccatcctgagcttccatcaggctggagttaggccctg

SEQ ID NO: 42867 - DNA, 201 bp, Homo sapiens
atggctagcgtatggaaatggagcctctggtggcttggtgcctcagcaccgaaaatatgtaaaggacttgtcatgtcactgaagtcaggtgacatcaagawgggcagttgtggtgcccgtcaaggcctgctgactttcctggaggccgagggaatacagcagggatggagccaccccacgacctgggctgttttggtttcc

SEQ ID NO: 42868 - DNA, 201 bp, Homo sapiens
gcgggcacccggctcggccaggctcgcaccgccgtgggcggcgtggcgggcacccggctgggcccggctcgcaccgccgtgggcggcgtggcgggcaccckgctgggcccggctcgcaccgccgtgggcggcgtggcgggcacccggctgggcccggttcgcaccgccgtgggcggcgtggcgggcaccggcttggccagg

SEQ ID NO: 42869 - DNA, 201 bp, Homo sapiens
acctggagagccccttctttcctgtcccagggcatattaaaatctctccttctccccaggctcctctctcagccacctgccagcaatgcctctccttctcygagcacctcccctccagacccttggtttctttctagctgggaggactgcatggctgcctccgcacgggcctgggggccttgaagacaggctctgagctgg

SEQ ID NO: 42870 - DNA, 201 bp, Homo sapiens
accaggagctgggccaggcctcctgggtcctgctgagaagcaggtaggggaggtgacctgcagctctgtctcccttggggatctcagttcctgttgagacycacagcctgaagacctctgtcctcagggtctctcctcatcacacaagatggggagactgaggcccaggggtgggaagggccagccaagtctcatggggaa

SEQ ID NO: 42871 - DNA, 201 bp, Homo sapiens
gggtgggcgcttggtggaaagtgggctcagatgaggtcttcagatggcagcagtaggctctggctgcttggggtccaccaggagctgggccaggcctcctrggtcctgctgagaagcaggtaggggaggtgacctgcagctctgtctcccttggggatctcagttcctgttgagacccacagcctgaagacctctgtcctc

SEQ ID NO: 42872 - DNA, 201 bp, Homo sapiens
cccaggaaaggcctggtggtcagcacacccatgccagccaggccagggctgcagggtcactctgtgtggatgacgggaggggcacccaggacccctgctgyctcgtgtgtgccttccacaggccacagactctcctgctccagactgggtcccttggttgtggtgcgacctcattaccttgcagcccctcagcttcttcac

SEQ ID NO: 42873 - DNA, 201 bp, Homo sapiens
gacttgtcatgtcactgaagtcaggtgacatcaagatgggcagttgtggtgcccgtcaaggcctgctgactttcctggaggccgagggaatacagcagggwtggagccaccccacgacctgggctgttttggtttccagatctccctgtagtgggtttcattgcctcacgttgcaggtcatgaaatgtgggcacagagcga

SEQ ID NO: 42874 - DNA, 201 bp, Homo sapiens
gggtggtcagacacagggcagaactttctcatgaaggcagctgaaggaactcacaagtttcttccagcagggaggacagagggaaggagaagtgtcttccmggcactgctgtgggcccaggacatctgctgcatggaggcaggggcatggatgaaaagacacagatgacctgatggaatggtgccccagcttcctcctcct

SEQ ID NO: 42875 - DNA, 201 bp, Homo sapiens
tgaagtcaggtgacatcaagatgggcagttgtggtgcccgtcaaggcctgctgactttcctggaggccgagggaatacagcagggatggagccaccccacracctgggctgttttggtttccagatctccctgtagtgggtttcattgcctcacgttgcaggtcatgaaatgtgggcacagagcgagtgacttgcagtcat

SEQ ID NO: 42876 - DNA, 201 bp, Homo sapiens
tgcccgtcaaggcctgctgactttcctggaggccgagggaatacagcagggatggagccaccccacgacctgggctgttttggtttccagatctccctgtrgtgggtttcattgcctcacgttgcaggtcatgaaatgtgggcacagagcgagtgacttgcagtcatggaattgtgagtggcacgactgggctttgaaccc

SEQ ID NO: 42877 - DNA, 201 bp, Homo sapiens
actttcctggaggccgagggaatacagcagggatggagccaccccacgacctgggctgttttggtttccagatctccctgtagtgggtttcattgcctcaygttgcaggtcatgaaatgtgggcacagagcgagtgacttgcagtcatggaattgtgagtggcacgactgggctttgaacccaggcctgcctggtgccaga

SEQ ID NO: 42878 - DNA, 201 bp, Homo sapiens
tctaactgggggtgcttgtccatctccccacactgctttttggctgaagagctttcctggtgaccccggaatcaaatgggggccacgcatctctgtgtctrtgcttacctggtcctgcctggagctgtgtctgaaggtggactgaccacttggctttgcctcctggctgcaggggctgttttgtaggtcagggtccccaga

SEQ ID NO: 42879 - DNA, 201 bp, Homo sapiens
ccagccaggacggccactcgtttccatgctgctggtctcttggcacaaaatgcccaaacagaccgtgtgtggccgcagcctaaagtgtaatgaaactgttrcttcgtctttgggtggaaacgttccccatgtgcaaaccaaggtctccagaccacagaccccagagctgcagggatggggaacacacagtccccaagtggt

SEQ ID NO: 42880 - DNA, 201 bp, Homo sapiens
tggtgagtgagaagccgtgtgctggggccacatgtagcttccatcccttcctccatgctgattcattcacccgttgtgcctgcagtggggtgatgatgccwgtgactagcctgtgtccagtggcaaggccattctgtcttctactggggtgtttagtgcctctcgcatggtgacactgcctggtacaaatgaacaaatgaa

SEQ ID NO: 42881 - DNA, 201 bp, Homo sapiens
tcggctcactgcaagctctgcctcccaggttcatgccattctcttgcctcagcctcctgagtagctgggactacaggcgcccgccaccacacccggtgaatttttttttttttttgtatttttagtagagacggggtttcaccatgtcagccaggatggtctcgatctcctgacctcgtgatccacccgcctcggcctccc

SEQ ID NO: 42882 - DNA, 201 bp, Homo sapiens
cctctcctgctgttttccccttctgctgcacttcctgtggggcctccgggtgactccagagcctcgccatgtgccagtgggtgcccctctgccttctgggccccacggaggcagccctgtctagactccagcttgagtaactcacatcagctgtgacacatcagccatccgtgcccctttcacagcagcgccagccctggc

SEQ ID NO: 42883 - DNA, 201 bp, Homo sapiens; identical to SEQ ID NO: 7516

SEQ ID NO: 42884 - DNA, 201 bp, Homo sapiens
tgaggccagcttgttctcagactgggagccacagcagcgtccatcacagctttaggggggcttctgaaggacttggggctctggggaaactaaggcagcacccccccccccagtgtgttcttgcctctgagtgtgcctgcacgcgtgtgcactgaggcgctgcaatcaggatggtcctttcaatccctaaagtccaggaat

SEQ ID NO: 42885 - DNA, 201 bp, Homo sapiens
cctgagaccccggggtctgaggcctctctgcccacctcaccctttgcccgccctcacctcgctgttcttctctcctcctgtgtcccccaacccacatcttyctgtcttactgtttcctcccggcttctcctttctgccaacatttattatacacttactgtatgccaggttctgtgcccagcacctcctcggtgctgcctg

SEQ ID NO: 42886 - DNA, 201 bp, Homo sapiens
aggtccccacgatataggcatcgcgattaccccattgtgtggaggctaaaactgaggcccagagatgctctgtcacttgtcccaggggacccagcctgttttccccccccacaaccctctgtccaggggttcagagtccactctggtagttctcaatgctggaagatggatagccaccgggaaactcaaaatcaaacgtgg

SEQ ID NO: 42887 - DNA, 201 bp, Homo sapiens
ggtccccacgatataggcatcgcgattaccccattgtgtggaggctaaaactgaggcccagagatgctctgtcacttgtcccaggggacccagcctgttttccccccccacaaccctctgtccaggggttcagagtccactctggtagttctcaatgctggaagatggatagccaccgggaaactcaaaatcaaacgtggc

SEQ ID NO: 42888 - DNA, 201 bp, Homo sapiens
tgggccatggctctgcccaccctgacgagccccgggctgcctccgttcactgccgcttgctggccctgtttctggctgagcactgggtctatacatttccrcgttgcctctcccacggcagggggactgcgacatggcctctccctctccccgtgcctccctctgccaccaaaaagctggtcagggcggagcatcccaagg

SEQ ID NO: 42889 - DNA, 201 bp, Homo sapiens
aggggagcacccttgccagccatcctagggtcatgtcccctccaccgcaaggctgggagaaggcgtggtggggactgggagggttgtgtctagagtaggcsgagggctggcgtggggggcggagctgcccttccctgcgtccttgctccctcctgagagcgcgtgggagcgcgcaggagccctagaggccaccccgtgggc

SEQ ID NO: 42890 - DNA, 201 bp, Homo sapiens
ttgggggccccaggggccctgggcactgcttccccagaatccagccacaggtgaggtcttccagcccgtgacgcccccagggccactgtgcgcgtgcaccyggcagcctcaccactctgcgtgggctggggcttcacgttcaatcactgttactcattcacttgttctttcactaactccctcccccattcattcattcac

SEQ ID NO: 42891 - DNA, 201 bp, Homo sapiens
aggcgtgagtcccgcggacatgtaccggtggaagctctcgtcccacgagccctgcagtgccacctgcaccacaggtactggtcacgggtgccaaggggcakcaactgccctgaacccatttccatggacatgggctggggctgtggggcccacccactagcttgcagcccccaaactgccctcggggtgcttgtccgtggc

SEQ ID NO: 42892 - DNA, 201 bp, Homo sapiens
tgggagggatgggtgcttgcttcgtttcaaagagatctacatatctacagagaggatggagaccagaaaggaattgggaaatggaatcatgagggctgggycctcatccccaccccacccagcccaccccccacgccaacgcatcagaaacagacttcacaggatgcacagaggaagccagaggtgtgggcgggcccgggg

SEQ ID NO: 42893 - DNA, 201 bp, Homo sapiens
ctcggccaggctcgcaccgccgtgggcggcgtggcgggcacccggctgggcccggctcgcaccgccgtgggcggcgtggcgggcaccctgctgggcccggytcgcaccgccgtgggcggcgtggcgggcacccggctgggcccggttcgcaccgccgtgggcggcgtggcgggcaccggcttggccaggctcgcaccgccg

SEQ ID NO: 42894 - DNA, 201 bp, Homo sapiens
acccgacttggccaggctcgcaccgccgtgggcggcgtggtgggcaccggcttggccaggctcgcaccgctgtgggcggcgtggtgggcaccggcttggcmaggctcgcaccgctgtgggcggcgtggtgggcacccggcttggccaggctcgcaccgctgtgggaggcgtggtgggcacccggcttggccaggcttgcac

SEQ ID NO: 42895 - DNA, 201 bp, Homo sapiens
ttggccaggctcgcaccgctgtgggaggcgtggtgggcacccggcttggccaggcttgcaccgctgtgggcggcgtggtgggcaccggcttggccaggctygcaccgctgtgggcggcgtggtgggcacctggcttggccaggctcgcaccgctgtgggcggcgtggtgggcaccggcttggccaggcttgcaccgcctgg

SEQ ID NO: 42896 - DNA, 201 bp, Homo sapiens
tggcccaccctccatcctgtgcctcgcaagaacccaggcacagggcagttctatcagtggggcagatcagcctgccctgagctttggccgcggtggggaarcttgtttttagatttttcttcgaagacactcttttggagccatagcaacagaggagcgtgagtttggcctcggctcaggtcataggtggaagtttctgct

SEQ ID NO: 42897 - DNA, 201 bp, Homo sapiens
agagagtccaagagtctgtgaggagcgagctggggaccccagtgcggccctgctcagagattggggtccaggccccgggcccttgccaggtcccaggctcytcgtgcacgcttggtggtgtctggcctccaccctgccccgccaccccccaccccccaccccgccccagggcctctgcctgccctgtagcacacatgcttg

SEQ ID NO: 42898 - DNA, 201 bp, Homo sapiens
attggggggagtgtgagggagccaccgcctgtgggatcttggcaggaggacagcagggtgactggggccagcagatgtctctggtgttctggggagctcakcggggttttccaaggggaacatctggacggggagccactggagggggtggtgacttcgcgagatgcatttgatcggcccacaacaaacagtctgcaccac

SEQ ID NO: 42899 - DNA, 201 bp, Homo sapiens
agggagccatgctgagacctgtactttgggaaaagggtcagcttcagatggcagggccactgtggggccaagacctgaatccaggatgactcagctggagyggccaggggctggcacacagggggcagggaggggagcagctgaagcagggcctgggcacctggaggagggacagggtgccaggtgcagggcacgtgatga

SEQ ID NO: 42900 - DNA, 201 bp, Homo sapiens
cgggctgcttcctcgatgtgaggccagcttgttctcagactgggagccacagcagcgtccatcacagctttaggggggcttctgaaggacttggggctctrgggaaactaaggcagcacccccccccccagtgtgttcttgcctctgagtgtgcctgcacgcgtgtgcactgaggcgctgcaatcaggatggtcctttcaa

SEQ ID NO: 42901 - DNA, 201 bp, Homo sapiens
gggcttctgaaggacttggggctctggggaaactaaggcagcacccccccccccagtgtgttcttgcctctgagtgtgcctgcacgcgtgtgcactgaggsgctgcaatcaggatggtcctttcaatccctaaagtccaggaattaagaggcccctgggatggacttgctcaaggtcaccagcttgggccggacagaaccg

SEQ ID NO: 42902 - DNA, 201 bp, Homo sapiens
gtccccacgatataggcatcgcgattaccccattgtgtggaggctaaaactgaggcccagagatgctctgtcacttgtcccaggggacccagcctgttttycccccccacaaccctctgtccaggggttcagagtccactctggtagttctcaatgctggaagatggatagccaccgggaaactcaaaatcaaacgtggcc

SEQ ID NO: 42903 - DNA, 201 bp, Homo sapiens
tgagacccacagcctgaagacctctgtcctcagggtctctcctcatcacacaagatggggagactgaggcccaggggtgggaagggccagccaagtctcayggggaactcgggggttttcaacccctgggccatggctctgcccaccctgacgagccccgggctgcctccgttcactgccgcttgctggccctgtttctgg

SEQ ID NO: 42904 - DNA, 201 bp, Homo sapiens
ttctcctttctgccaacatttattatacacttactgtatgccaggttctgtgcccagcacctcctcggtgctgcctggatttatcttccaaaggtccccaygatataggcatcgcgattaccccattgtgtggaggctaaaactgaggcccagagatgctctgtcacttgtcccaggggacccagcctgttttcccccccc

SEQ ID NO: 42905 - DNA, 201 bp, Homo sapiens
tccccacgatataggcatcgcgattaccccattgtgtggaggctaaaactgaggcccagagatgctctgtcacttgtcccaggggacccagcctgttttccccccccacaaccctctgtccaggggttcagagtccactctggtagttctcaatgctggaagatggatagccaccgggaaactcaaaatcaaacgtggccc

SEQ ID NO: 42906 - DNA, 201 bp, Homo sapiens
gacttcacaggatgcacagaggaagccagaggtgtgggcgggcccggggggccggggctgcgagggacctcaagggcgaatgccactggcctgtccaaacsaggcaggagagaaagtaagaggaggaaaacaattgagaacataacgattgtgacttcgtcagccgttcccccgacgcctctggaaactggccatttcgtt

SEQ ID NO: 42907 - DNA, 201 bp, Homo sapiens
atgcacagaggaagccagaggtgtgggcgggcccggggggccggggctgcgagggacctcaagggcgaatgccactggcctgtccaaacgaggcaggagasaaagtaagaggaggaaaacaattgagaacataacgattgtgacttcgtcagccgttcccccgacgcctctggaaactggccatttcgtttttgagtaagg

SEQ ID NO: 42908 - DNA, 201 bp, Homo sapiens
ggggctgcgagggacctcaagggcgaatgccactggcctgtccaaacgaggcaggagagaaagtaagaggaggaaaacaattgagaacataacgattgtgwcttcgtcagccgttcccccgacgcctctggaaactggccatttcgtttttgagtaagggcaagaagtgtcctgctcaagccacccctccgctcagggaag

SEQ ID NO: 42909 - DNA, 201 bp, Homo sapiens
agtggtgaggccccatcttggtggcagattttgagtgtagggagccttggtggcaaattttggaagagccctctgggaagatggagtattggccgagcaaygtgccatgtctgcaccccttgggccacagtgggcaggtgctgacacctgtgagctgctctgtgctcggcccttcccttcatggggcgggcttgggtatag

SEQ ID NO: 42910 - DNA, 201 bp, Homo sapiens
acttagcagatggggaaaccaaggcccagagtgggaataatctgtcaaggtcccaatgaggccagttgactctggactagaaccaggcctgttagggccayggaggacccgaccgtgtcttgaaggtcgagggaatgacctcagcctgccactgagggctaactgtggcgtgagtgttggctccaggaggtgccagtggga

SEQ ID NO: 42911 - DNA, 201 bp, Homo sapiens
acccagcccagaacccctccttcccttgggcagcacctgtccccttcctaagctgcaggcatttggcccgatgtttgtgtccagctctgtcccagccctcwtcgggggtgggcgtctgtgcatgggacagcactttctacttttggagggatgtcacttgtaatgcttggcattagattgaacacacttttggttctgaag

SEQ ID NO: 42912 - DNA, 201 bp, Homo sapiens
tgcttcccaggctgtttcgttccatccagcgctggggcttggagaggcaggagccgctggcctgcagacacacgccgccgggcggctgggttctctggatrtggggaaaccgatttccttctgggggaactggcagctgcagccaagaccgttccatgatgcccgtcatcccggaaggctgggtctgtctcccgtggccac

SEQ ID NO: 42913 - DNA, 201 bp, Homo sapiens
gatctacatatctacagagaggatggagaccagaaaggaattgggaaatggaatcatgagggctgggccctcatccccaccccacccagcccaccccccaygccaacgcatcagaaacagacttcacaggatgcacagaggaagccagaggtgtgggcgggcccggggggccggggctgcgagggacctcaagggcgaatg

SEQ ID NO: 42914 - DNA, 201 bp, Homo sapiens
gtccaaacgaggcaggagagaaagtaagaggaggaaaacaattgagaacataacgattgtgacttcgtcagccgttcccccgacgcctctggaaactggcsatttcgtttttgagtaagggcaagaagtgtcctgctcaagccacccctccgctcagggaaggtcactgcccggccaagccttgtctttgagggcggtgcc

SEQ ID NO: 42915 - DNA, 201 bp, Homo sapiens
agtgtgtgtgtgagagagagggagagacgggtaggggagagagagggaaaaatggagagaaagaggctggagttcaaggtggaggagcagaatccttggtytgcaattgccagggagggccttgctgcagggccctgggcctcactgaggtcatcccttccttgagcaggtgagaagggtgagacccagggagggggtgac

SEQ ID NO: 42916 - DNA, 201 bp, Homo sapiens
tggggcctggggccaggtgggtgtgccaaaggaatccccccattgtctcaggaccttcaaggccaggatcccgggggcgggcccaggtcacacgtcggtgytgatgctgcggctcctggcgaaggcctcccgcatggctgagaggcggttggggttgagcgcctgcaggcccccgaaagccccccggggcagctccacgtc

SEQ ID NO: 42917 - DNA, 201 bp, Homo sapiens
cgggcccaggtcacacgtcggtgctgatgctgcggctcctggcgaaggcctcccgcatggctgagaggcggttggggttgagcgcctgcaggcccccgaargccccccggggcagctccacgtcctcctggctcacgctcttgtagagcacgcgctccccgccgttcagcacgtcctcttcctcctccggcggctcctgca

SEQ ID NO: 42918 - DNA, 201 bp, Homo sapiens
gggcccaggtcacacgtcggtgctgatgctgcggctcctggcgaaggcctcccgcatggctgagaggcggttggggttgagcgcctgcaggcccccgaaasccccccggggcagctccacgtcctcctggctcacgctcttgtagagcacgcgctccccgccgttcagcacgtcctcttcctcctccggcggctcctgcag

SEQ ID NO: 42919 - DNA, 201 bp, Homo sapiens
aggtcacacgtcggtgctgatgctgcggctcctggcgaaggcctcccgcatggctgagaggcggttggggttgagcgcctgcaggcccccgaaagcccccsggggcagctccacgtcctcctggctcacgctcttgtagagcacgcgctccccgccgttcagcacgtcctcttcctcctccggcggctcctgcaggaagaa

SEQ ID NO: 42920 - DNA, 201 bp, Homo sapiens
cacggtgggagtggggtggcccaagcccaggcctgacacctcagctgtttaaccagtgctatgggtctcactcaggccaggcgcagtgctgagcgcttcamaacgatccactcatctcttccgcccagcaacgtgcaggtgtgactgttatctccattttgcaggtggggagactgaggcgtggaggggttcgcagcccca

SEQ ID NO: 42921 - DNA, 201 bp, Homo sapiens
ggcagaggccattctcctgcgaggccagcaagagctgagccagttaaaatcccaaggtgctcctgccaaggcgctggactgagcccaggcccatcccttcraaccagagcctttccccccgcctgggtccccagccccctcagccgaggctggctgtctccacagcccttctctagggggcttgaggacttggaggcaaag

SEQ ID NO: 42922 - DNA, 201 bp, Homo sapiens
cgcagccccacatcagcagagccgggggtcacaggcactggcagctgtgttgcctcgccctgccccgatggctccccctcatctctcagggagacatggaractctggatggccctggagtgcaggtgggaaggattgctcactgtgacactccttttgggcagctggtgcccttggctaagtcccttcccgtctctgagc

SEQ ID NO: 42923 - DNA, 201 bp, Homo sapiens
gacaccagtggctgcccgcccctggtcactgtgggtggcatggaagaaagagctcactggcttggtgatgtcctcctgcccccagcagatatccctgacayggggcatctctggaggtcatggccgtgtgcgagcagagcccgaggggctgctgggggctggggttcttccggtccgccagctttcagatgatgcttccag

SEQ ID NO: 42924 - DNA, 201 bp, Homo sapiens
caaacacaacgcagggaggctggagtgatgctgtcagtggctgctgcattcagctcatccctgtcctgggctgtgctgataaaccagctctcaaagcaccyggctgggagcatttgctgatttttgtggtgtagattttcttaccatggccagtttcagttcaagcaaggtttgacaagcggcttacaaaattcctaaatt

SEQ ID NO: 42925 - DNA, 201 bp, Homo sapiens; identical to SEQ ID NO: 7545

SEQ ID NO: 42926 - DNA, 201 bp, Homo sapiens; identical to SEQ ID NO: 7547

SEQ ID NO: 42927 - DNA, 201 bp, Homo sapiens
agaggccgggaatttgcaggccgaagagggatcctggagagtgggggactcacctcaacagcactctctaaggggtaaggagcccctggcatcaggagctrccagagcacctgctacgtgccagtcatggctccctgtgggcctcaagtctgcaggctctggggtaaggggtgggggtggtgtggaagtgtggctggccag

SEQ ID NO: 42928 - DNA, 201 bp, Homo sapiens
gggccctcatccccaccccacccagcccaccccccacgccaacgcatcagaaacagacttcacaggatgcacagaggaagccagaggtgtgggcgggcccrgggggccggggctgcgagggacctcaagggcgaatgccactggcctgtccaaacgaggcaggagagaaagtaagaggaggaaaacaattgagaacataac

SEQ ID NO: 42929 - DNA, 201 bp, Homo sapiens
ctgagtctgagagggggtcctgggtaaagggcaggagggacggacccagacagtgcctgcctgtgggaacggcactactcaaggctgccagtctgtctgtktcttcagcgtgggccctcttcacctcccagggcagtccggggcattccctggtattccgtgtgtgaggcccacggtaaggcctccagtaagtagaagcta

SEQ ID NO: 42930 - DNA, 201 bp, Homo sapiens
gtggcaccgaggcctcgctgtggaatttggcttaaggcatggacactgtgtgagttgagcatctctgtcttcctctgggcctcagtttccccatctctcaytggggggcttgtcaggggctgccctttgggcccaccaggtcaaatattcagtgatccttaggccagggtcatggcacaagcttacggatcctcaagccgc

SEQ ID NO: 42931 - DNA, 201 bp, Homo sapiens
actgcccctcctgcatcccagacccatgtcttctatgtgctgggcacacagcaccaggactaggcacagggccagagggtatgagacagctgtgtcagcamgggacccaagctcccccatccaagacccttgctcccacatccgctttctagctcacagctatggctgtgtgggggtgccctgaagagcagagaaaaatgg

SEQ ID NO: 42932 - DNA, 201 bp, Homo sapiens
ccagaaatacctttggtgcttaaaatccaaagggttattttgaaccgggcccgctctctcttgagtcaggcatgagtcatgctgcctgctggctcagagcrtgtaattagataaagatggcggagcgtctccatgggtggggtggaggggcatgggttggatcttttcatctctttttgttcttggggagaatttaaagct

SEQ ID NO: 42933 - DNA, 201 bp, Homo sapiens
ctgctcccactgcggcagcctaacatcctccccagggaacctccaaagtggtcagccacggcccaccagcccctctgcctcaagcctgcttctctatcccygccgtgttttccctggaaccccaccctcccgggcatcccccacacatattcctgctgtcctatttctaagctcctcagatatctggaaaacactggcgga

SEQ ID NO: 42934 - DNA, 201 bp, Homo sapiens
tgggatcctcccattccagtccaagcaaaacagaagagcaatgctcacccgcttgcctaacacattgtaaactccccattcaatccaaacccatgtctgtrtcacggagtcaatctgaaagcctttctgaatataatgctctaagcctgaccacccccaggtgactgaaggtcctgaagaaggacctgtgacctggcccac

SEQ ID NO: 42935 - DNA, 201 bp, Homo sapiens
atgctcacccgcttgcctaacacattgtaaactccccattcaatccaaacccatgtctgtatcacggagtcaatctgaaagcctttctgaatataatgctstaagcctgaccacccccaggtgactgaaggtcctgaagaaggacctgtgacctggcccacgtttcagcccagtgaagtatggcggcttggggtcatctct

SEQ ID NO: 42936 - DNA, 201 bp, Homo sapiens
accgctgtgggcggcgtggtgggcaccggcttggccaggctcgcaccgctgtgggcggcgtggtgggcacccggcttggccaggctcgcaccgctgtgggmggcgtggtgggcacccggcttggccaggcttgcaccgctgtgggcggcgtggtgggcaccggcttggccaggctcgcaccgctgtgggcggcgtggtggg

SEQ ID NO: 42937 - DNA, 201 bp, Homo sapiens
aactggccatttcgtttttgagtaagggcaagaagtgtcctgctcaagccacccctccgctcagggaaggtcactgcccggccaagccttgtctttgaggrcggtgccttccctgggcagagaggggctgccccggccctggggctccatggcagggcacaaaaggagaggcagagccccagagagggaagggggctcctg

SEQ ID NO: 42938 - DNA, 201 bp, Homo sapiens
ccgctgtgggcggcgtggtgggcacccggcttggccaggctcgcaccgctgtgggaggcgtggtgggcacccggcttggccaggcttgcaccgctgtgggmggcgtggtgggcaccggcttggccaggctcgcaccgctgtgggcggcgtggtgggcacctggcttggccaggctcgcaccgctgtgggcggcgtggtggg

SEQ ID NO: 42939 - DNA, 201 bp, Homo sapiens
ctggctgttgggaggaagtcagccttgtggccctggactgctgacatgctggcacaaactgcacctcctcctgccctgcccctcccccaattccatcttcyctccggggatcgggaggcggcataggtacctgggttctgcctcacctgagtgccggctgttgctggatgctgactgtggagctgctggtctagggcgagg

SEQ ID NO: 42940 - DNA, 201 bp, Homo sapiens
tgttgctggatgctgactgtggagctgctggtctagggcgaggctgcacattcccccgggacctggccaagcccatccccatgcactgaccctagcagccwgtggcagaggccattctcctgcgaggccagcaagagctgagccagttaaaatcccaaggtgctcctgccaaggcgctggactgagcccaggcccatccct

SEQ ID NO: 42941 - DNA, 201 bp, Homo sapiens
ttttgtggtgtagattttcttaccatggccagtttcagttcaagcaaggtttgacaagcggcttacaaaattcctaaattcttcacaatcacctctcacaragcagtgggagctggcgccacttcccttcctcaatttcccaagcctcatttttatttttttttcttgctggggtatggggtggaggaagagattggagta

SEQ ID NO: 42942 - DNA, 201 bp, Homo sapiens
agtgaggacagttagatgcggccccaggagcttgccaagcccccaggccatcctggaccttaaggtcaaggaggacccgtggcccacggttccttgggagwtccccccagcgccacccaggagatctgaacccaagctgccgagtgaccctgcaagggggcccagccagggggctgtgtcttctggtcccgctgacggtga

SEQ ID NO: 42943 - DNA, 201 bp, Homo sapiens
cgaggcctggcggtcaccagaagagagaggaaggggatggcagaggcacccagagcgagtgtaatccggtcatgtgagagggactgggtgtgtgtgtgcckgtgtgtgtgtgtgtgtgtgtgtgtgtgtgtgctgggtgacaggtgccaccatgtctgtgattcagcacagcgaccccagggggcagtgtgggcctgggtt

SEQ ID NO: 42944 - DNA, 201 bp, Homo sapiens
tgttttgtaggtcagggtccccagaaaatagactctgaggtgggggtttgtgtgcaagagggcttggggggcagtgtcaggagcggtctcaggaacactgrtgtgggcaggagggcacgggactagacagagggggcagctgagttgtgatgcagtttcaacgggcttcggccagccccctgggggttgcattatctcaag

SEQ ID NO: 42945 - DNA, 201 bp, Homo sapiens
tcacccaattgctattgaccagcccgttgtcaccagagtcgccgtgggccctgtgtgtagggtcctgctgggccctggcgctgacccgctccctctgcccyggcctcagtgcaacaccacctgcgggcgcggggtcaagaagcggctggtgctctgcatggagctggccaacgggaagccgcagacgcgcagtggccccga

SEQ ID NO: 42946 - DNA, 201 bp, Homo sapiens
cctttgggcctcgtctcctgccttgtggatgcagtcagtctgagctgagtgcatcctacacctagtgacaagtggggtccccagatgagcctgagggtgcyggcctcccccgacaaggatcacacactcctcggaggctgagccctcctgctccccgcacacggccacactgcctcttcttttctggactcctccatctgg

SEQ ID NO: 42947 - DNA, 201 bp, Homo sapiens
gtcaggatgtgaggcaggactatgctgagatcgcggttctctttgtagaggggaggagagccctcccaccctgaggccctgaggcacgtgtggcaaccctsacccagttctttgcctgaagggtctcctctctcccaatagtgccatgaggagaggttcttttccccattcctcagaggttcagggagctctctggcccac

SEQ ID NO: 42948 - DNA, 201 bp, Homo sapiens
ttccccattcctcagaggttcagggagctctctggcccactcggggtcccacagttactgggggctgtagcagacattggaggccaggcctgtccatggcmctagagtgaaacccaggtggggtgtggcatctgcaagggaaggggggcctgaaccagctcatcccaaggggccctgggcagggagccccgaggtgggtgg

SEQ ID NO: 42949 - DNA, 201 bp, Homo sapiens
ctgggactcaggcgctggagtaggagtggacatctcgagcccatcagcaactggtacaggacctgtgggggcagggggcagggaccttggctaaggtgtasggcacccacctccaagtgcgtgggcaagaacagaggagatgaggcaggtgttgggggcgcggggctgggcccaccttgagcctcaggaaacagcaccgtc

SEQ ID NO: 42950 - DNA, 201 bp, Homo sapiens
ttgaggacttggaggcaaagcatggcatgcttccctgcatgcccttggatcaagggtggcacaggcttagcacgcacaccgccgctgggtgtcttgcctgmagcaggcattactaatcattcaccaagctccttcttgctaagcctagactgaggcggggggttcatccttcccaacagggtctgccagacaaccacgacc

SEQ ID NO: 42951 - DNA, 201 bp, Homo sapiens
gggggcttctgaaggacttggggctctggggaaactaaggcagcacccccccccccagtgtgttcttgcctctgagtgtgcctgcacgcgtgtgcactgasgcgctgcaatcaggatggtcctttcaatccctaaagtccaggaattaagaggcccctgggatggacttgctcaaggtcaccagcttgggccggacagaac

SEQ ID NO: 42952 - DNA, 201 bp, Homo sapiens
acccaggtgctgtgatcactctcagatggactggcttggagggagccgtgtgggcacgtgccccaggtcccagaacccatcttggctcctagaaacttctkcccagagccagtcagatcagcctctgaactggggccctggctactgtggagcccctggcgacttggcaggcgagggctgagggggctgagtgcttccctt

SEQ ID NO: 42953 - DNA, 201 bp, Homo sapiens
ttcgtcagccgttcccccgacgcctctggaaactggccatttcgtttttgagtaagggcaagaagtgtcctgctcaagccacccctccgctcagggaaggycactgcccggccaagccttgtctttgagggcggtgccttccctgggcagagaggggctgccccggccctggggctccatggcagggcacaaaaggagagg

SEQ ID NO: 42954 - DNA, 201 bp, Homo sapiens
ggctgctcttcaaggagagcccaggagcagggttgagaaggctgcggggggccctgggctagtacggagccatccactgtccagaccactgtccctgtgcycacatgtgctcagcaatgctgggacgggcggactcactctgctcctggaacttcaagtgcagcctcaaggtttggggtctctggtcgcagctccacttta

SEQ ID NO: 42955 - DNA, 201 bp, Homo sapiens
gttgggtctgagacagaatcatcaggagtaacggtggcctctgtgcctgagagccctggtgcatgcccagccggctgtatggtcacctggtccttctagcyccaggccccagctgtgcctccccccaggacacatttgtgttcaatgagccttatccctgccacgagcctgggggctccccaagcctgggcctcccctgag

SEQ ID NO: 42956 - DNA, 201 bp, Homo sapiens
gtctcttgtctgcacgctgggttcctctttatggagtcaggaccacgatcttcctgatttacgcagtgtgcatggccacggaccgtgtgccaggccctgtyccgtcactgtagacacacagtcagggcctgctgaggacacgggcgaggggagcacccttgccagccatcctagggtcatgtcccctccaccgcaaggctg

SEQ ID NO: 42957 - DNA, 201 bp, Homo sapiens
atgtcccctccaccgcaaggctgggagaaggcgtggtggggactgggagggttgtgtctagagtaggcggagggctggcgtggggggcggagctgcccttycctgcgtccttgctccctcctgagagcgcgtgggagcgcgcaggagccctagaggccaccccgtgggccgtggcccccgcacggctgtcccggctgtccc

SEQ ID NO: 42958 - DNA, 201 bp, Homo sapiens
ccaggcctgttagggccacggaggacccgaccgtgtcttgaaggtcgagggaatgacctcagcctgccactgagggctaactgtggcgtgagtgttggctscaggaggtgccagtgggagggcactggagagggtggggcttggacatgggacctagggacgggcgtgccggactgacaagggacaggcaggggtgtgaat

SEQ ID NO: 42959 - DNA, 201 bp, Homo sapiens
tgccactgagggctaactgtggcgtgagtgttggctccaggaggtgccagtgggagggcactggagagggtggggcttggacatgggacctagggacgggygtgccggactgacaagggacaggcaggggtgtgaataatgcgggctgggtgtccagcagggcgaggtgggcagaggccctttctttggaggcctcgctct

SEQ ID NO: 42960 - DNA, 201 bp, Homo sapiens
tgagggctaactgtggcgtgagtgttggctccaggaggtgccagtgggagggcactggagagggtggggcttggacatgggacctagggacgggcgtgccrgactgacaagggacaggcaggggtgtgaataatgcgggctgggtgtccagcagggcgaggtgggcagaggccctttctttggaggcctcgctctaggagc

SEQ ID NO: 42961 - DNA, 201 bp, Homo sapiens
tctcagcctggggcctggtgcttaggaagggcgtaggcttagttggagattctatctgcagctctccttgtcctttctcacccacgtctttgagtgtagckagccttgaaagccagcgtgttgttgtcacaagacaggattttaaaatggcagtgacaatgcacgcagggagctggggctccatcggctgcccagggtctc

SEQ ID NO: 42962 - DNA, 201 bp, Homo sapiens
gcctggtgcttaggaagggcgtaggcttagttggagattctatctgcagctctccttgtcctttctcacccacgtctttgagtgtagcgagccttgaaagycagcgtgttgttgtcacaagacaggattttaaaatggcagtgacaatgcacgcagggagctggggctccatcggctgcccagggtctcctgggtgacaca

SEQ ID NO: 42963 - DNA, 201 bp, Homo sapiens
ctaggcctcaggtaaccctcctgcctcagcctctcatagtgcttggatttataggcgtgagccacctgccttggcctgtctgctcttgatgatcaagttcratcacccagccaggacggccactcgtttccatgctgctggtctcttggcacaaaatgcccaaacagaccgtgtgtggccgcagcctaaagtgtaatgaaa

SEQ ID NO: 42964 - DNA, 201 bp, Homo sapiens
tggtgcttaggaagggcgtaggcttagttggagattctatctgcagctctccttgtcctttctcacccacgtctttgagtgtagcgagccttgaaagccarcgtgttgttgtcacaagacaggattttaaaatggcagtgacaatgcacgcagggagctggggctccatcggctgcccagggtctcctgggtgacacatgg

SEQ ID NO: 42965 - DNA, 201 bp, Homo sapiens
tggccaggctcgcaccgctgtgggcggcgtggtgggcacccggcttggccaggctcgcaccgctgtgggaggcgtggtgggcacccggcttggccaggctygcaccgctgtgggcggcgtggtgggcaccggcttggccaggctcgcaccgctgtgggcggcgtggtgggcacctggcttggccaggctcgcaccgctgtg

SEQ ID NO: 42966 - DNA, 201 bp, Homo sapiens
gggtgacacatggcagagccggactgaactcccagtgtgctccatgtccctgtggccctcgctgtccctcgggaggggctggggcaagcacggatgagccytcctatggccttggtaggaaggggtgagcctgggcaggtgcccagcttggtgggtcagcctctgcaatgggacggggctgagctgagctgcacaagcggg

SEQ ID NO: 42967 - DNA, 201 bp, Homo sapiens
ggccctcgctgtccctcgggaggggctggggcaagcacggatgagccctcctatggccttggtaggaaggggtgagcctgggcaggtgcccagcttggtgrgtcagcctctgcaatgggacggggctgagctgagctgcacaagcgggtgtgggggttgggccagcccttagacagccaccgctcaccctccaatagctgt

SEQ ID NO: 42968 - DNA, 201 bp, Homo sapiens
cggatgagccctcctatggccttggtaggaaggggtgagcctgggcaggtgcccagcttggtgggtcagcctctgcaatgggacggggctgagctgagctrcacaagcgggtgtgggggttgggccagcccttagacagccaccgctcaccctccaatagctgtggagtgggcgagtgccacccaaggctgcctttccaat

SEQ ID NO: 42969 - DNA, 201 bp, Homo sapiens
aggtgcagccccaaacctgacactacctgggtttactccccccactgcctcccactcttcttgagagccagaactggtggggtgaagcccatctcctaagrgggtgctggaagaggaggctttgctgaaggtcttcaggctgggacccaccttgggttctcctgttccctctccagagcctaagggccagccctccgtatg

SEQ ID NO: 42970 - DNA, 201 bp, Homo sapiens
taagggccagccctccgtatgtgccctggggtctgagtgcccctgccccagcaggtctgtgctgcagatgctggctccaccacccagcgccctgggggctrctccctggcccgagcggggagccgggcctctcgccaggccagttgctttgtcgcttgcttgctgggagagtggagaggccaggaaactccacattctctg

SEQ ID NO: 42971 - DNA, 201 bp, Homo sapiens
tgctcttgaaacagacgcgtagaaataccaagggtgggctcggagcactgggaaagccgcaggaaggaaggtcattactgtcaggaaacaggttttggacragagcctcggatttaaccctgtgcatatacctggaaacagggccgagacaaccaggccccagcacactccccctcgcagaacttggactctaatttgcgt

SEQ ID NO: 42972 - DNA, 201 bp, Homo sapiens
catcaggaatttggaagccgaactcctcttctcccactggccagttcctggaactggctttaaggacaccctttggaagacagagtgtcccgagcgccgartcggcctcctccctgcgtccccagccctggaggccccccacctcttctcactctccatggccccagggaggatcagttccccttgaaaccccaccagctc

SEQ ID NO: 42973 - DNA, 201 bp, Homo sapiens
agtgtcccgagcgccgaatcggcctcctccctgcgtccccagccctggaggccccccacctcttctcactctccatggccccagggaggatcagttccccytgaaaccccaccagctctgggcagttgttccagtctgcaggggtggtggggagtgggggctgcagggcttcatgggccatttgtttccatcctgagcttc

SEQ ID NO: 42974 - DNA, 201 bp, Homo sapiens
ttctgccaggaggaagtccgtcccgggccccgggaacaggacctgcacgggcacgtccaagcggtaccagctctgcagagtgcaggtgaggcccggcccgkgcaggggcaccatggcctgctctccctgtcatcatgcagttttcagggggtcttccaggtggctcctgggcattctgggcattctgttgtgggctgctct

SEQ ID NO: 42975 - DNA, 201 bp, Homo sapiens
ccatgaaacagtaccccccaccccataaaacagttccctgggttgctctcggagcccttctgctccagcccccatcagcttccttgggtagccgaggctgragaggaggttctgactctgaccaggcagctctcagtggggccctgggcagttggaacctgaacacctttccaaggactgcagggcgtgaggctggggcac

SEQ ID NO: 42976 - DNA, 201 bp, Homo sapiens
tggtcgcagctccactttactcacaacattcgtgcacctggtgctcacagagacccagcagttgccaggcttccccgtcccatgaaacagtaccccccacsccataaaacagttccctgggttgctctcggagcccttctgctccagcccccatcagcttccttgggtagccgaggctgaagaggaggttctgactctgac

SEQ ID NO: 42977 - DNA, 201 bp, Homo sapiens
gtgaggacagtggatcctgcggcccccaggcttcatcctcccctttcttttgtttcaaggaggggctccgtggctcagggggtttgaaaagcaccgttttygagatgggtgtcatgaagagggtgcccagaaaaaacgtcctggcatttgattctcacaggctctctggaaggttcccatttcgggaaggagcatgctgag

SEQ ID NO: 42978 - DNA, 201 bp, Homo sapiens; identical to SEQ ID NO: 7509

SEQ ID NO: 42979 - DNA, 201 bp, Homo sapiens
cccgggggtggggtccagcaggccctgtccttcccctcagagcccatcagctttggacctcttattccaagtctatctgcctggaagacttccgggtctcrctcataacccctcccagctcaagctaaggggaaggagaggtctttccccagcacgctggccatgccccctttctggacacagatccagaaatgtgccttc

SEQ ID NO: 42980 - DNA, 201 bp, Homo sapiens; identical to SEQ ID NO: 7510

SEQ ID NO: 42981 - DNA, 201 bp, Homo sapiens
gtggtccgaggtgagtgcctgcgggagcaagccgggggtcgggaagagctggggagctgggcttgggagatggaggtggctacacctgtgtcacacccccyctgccccctccccctgccgccccagtgcactgccaagtgtggggagcgcagtgtggtgaccagggacatccgctgctcggaggatgagaagctgtgtgac

SEQ ID NO: 42982 - DNA, 201 bp, Homo sapiens
ccgtctctgtttgtctccgagtctctctgtctgtctccccatctctgtctctctgtgtctgtctttgtctctttccctgtctctgtctctctcatcgagaragatgctcagatgctagctggggtcgcctctgggtggtgggtgcacagatgatctttttaagtgtgcttttctctgtgtgcttttcatcaagcatgcatt

SEQ ID NO: 42983 - DNA, 201 bp, Homo sapiens
tggatgtcccctgcctgtcctctcccctgcagtgcagtggaagctgcgggcaaggccgcaccatcaggcacgtgtactgcaagaccagcgacggacgggtrgtacctgagtcccagtgccagatggagaccaagcctctggccatccacccctgtggggacaaaaactgtcccgcccactggctggcccaggactgggagc

SEQ ID NO: 42984 - DNA, 201 bp, Homo sapiens
gcctgtcctctcccctgcagtgcagtggaagctgcgggcaaggccgcaccatcaggcacgtgtactgcaagaccagcgacggacgggtagtacctgagtcscagtgccagatggagaccaagcctctggccatccacccctgtggggacaaaaactgtcccgcccactggctggcccaggactgggagcgggtgagtgccc

SEQ ID NO: 42985 - DNA, 201 bp, Homo sapiens
ctgcttcaagtggtacaccagcccctggtcagaggtgagctcccagccggcccctctgaggttgcctgaggccagacctgaatgtcgatcccgcccctccygcctcaagcctccttaagtgcttcctgctcctccctccctgacagcctctgtgagggctttccttcccgggaaagcttctcaactccaccacgtcagctg

SEQ ID NO: 42986 - DNA, 201 bp, Homo sapiens
tccctacggcactcgtcctgggcctttttgggcccgggaactccggcctcgaattgtggcctctaagttgcatgtttggcagcccatgtgccggacaccgygggacagacagaccccaggtgggcggggggagcagattgggctgaggcagacacaggcttggccctctgggagccacagccaaggcagccgcttggaatt

SEQ ID NO: 42987 - DNA, 201 bp, Homo sapiens
tgcacgcttggtggtgtctggcctccaccctgccccgccaccccccaccccccaccccgccccagggcctctgcctgccctgtagcacacatgcttgttcrggagggagaacacacactcactcattccctgttgcccaccaaaggacccccgagtgaggaggggaaaggctgagggtgggcctggggcttcccaggggag

SEQ ID NO: 42988 - DNA, 201 bp, Homo sapiens
aaaggctaagcccggtgggagggagagtgggaaggggcagggaggctgactggggttccagggccccagggagccagcccaggtctgtagtttgggaagakcactagcttcagatgggggggccactgtggggccaggaaacacggacccactaggtgcaggtaccttgctgggtgatgagccatggcacggggggagcca

SEQ ID NO: 42989 - DNA, 201 bp, Homo sapiens
gagcgaatgaataaccaggcacttggcgatggtctgcaagtccccagccccgcacctccctgggccccagagcgggtgtctctgaggcttggaacattccragcagacctggccgggaagccagcctccccctcagagaaggctaaaggctgcacggcccagctctggcgggagaggaaccgtgattgcagcctggctcgt

SEQ ID NO: 42990 - DNA, 201 bp, Homo sapiens
agcttgcagcccccaaactgccctcggggtgcttgtccgtggcctcctgacttgggggcagtgtggcgtgataggagtttgggtgtctggtgaggccaccytcattctcacagtgtgctagaccatggtcaggtccaggcccctgggggtcatccgggctaccacccattggtggtagcccttgtctgttgccagtgatac

SEQ ID NO: 42991 - DNA, 201 bp, Homo sapiens
gggagccatgaagcgatgaagcggggaccccagaaggacagcctggggtgctggggaggagcatccccctagccctgatgaggaggtggcagggccagacraggtgcagctggcacagacggctggtgggcgcgtggactccttcttcctggtggctgccccccgatgccggtgcatagcggcggctcagtcagtgtttgt

SEQ ID NO: 42992 - DNA, 201 bp, Homo sapiens
tgccagccagtgcccttttgtcggcatctcaactcagccttggagccgcaggtctagtttcaaatgggcttccacgggtcctgtgtcagttgggactcatrgccgcctgggaagggtggggtggggaagggggagtgtgcaggttccccgccccctgcccaggcccctgccccatcaggaggctttccccatgccttctgt

SEQ ID NO: 42993 - DNA, 201 bp, Homo sapiens
gcctctggctggagaagtgggtggcctggggattggagggcccaggcctggctgtgtggggtccctccagctcactgaggcctcaggggcaggggtgggcygtgggggaccacagcacctgctctgaggagaaagacagacgcagataaaaggcaacgagaggcgtggggagtgtgcagggagggcgtctggggacactgg

SEQ ID NO: 42994 - DNA, 201 bp, Homo sapiens
gaggcccctgggatggacttgctcaaggtcaccagcttgggccggacagaaccgagtcctgagaccccggggtctgaggcctctctgcccacctcaccctktgcccgccctcacctcgctgttcttctctcctcctgtgtcccccaacccacatcttcctgtcttactgtttcctcccggcttctcctttctgccaacatt

SEQ ID NO: 42995 - DNA, 201 bp, Homo sapiens
ctccctctccccgtgcctccctctgccaccaaaaagctggtcagggcggagcatcccaagggccctgatgcccctgaaagtctcccttctagggggcagcyggtccatcttcagggagctcagcacgtgtctcagcctaggcagacacttggcccttgaacccggaagagtgtgtgtgtgagagagagggagagacgggta

SEQ ID NO: 42996 - DNA, 201 bp, Homo sapiens
cggagcatcccaagggccctgatgcccctgaaagtctcccttctagggggcagctggtccatcttcagggagctcagcacgtgtctcagcctaggcagacrcttggcccttgaacccggaagagtgtgtgtgtgagagagagggagagacgggtaggggagagagagggaaaaatggagagaaagaggctggagttcaagg

SEQ ID NO: 42997 - DNA, 201 bp, Homo sapiens
gcattaaggttgaggctggacccctccctaccccacggtggaggggtttatgcccctacctagcttcaggctccaccccctccccaggcactatggtgctsggtccttagtgccagggcccaaggtagttcccgtggcccctgcccctcccctgacatggcctccccaggatactcaggggttctggggtggggctcaggg

SEQ ID NO: 42998 - DNA, 201 bp, Homo sapiens
ggaatcgagtacatcgtggcacaggggcccaccaaccagggcctgaatgtcatggtacgtgtgctgcaggccttgggggccccaggggccctgggcactgyttccccagaatccagccacaggtgaggtcttccagcccgtgacgcccccagggccactgtgcgcgtgcacccggcagcctcaccactctgcgtgggctgg

SEQ ID NO: 42999 - DNA, 201 bp, Homo sapiens
tgctttttggctgaagagctttcctggtgaccccggaatcaaatgggggccacgcatctctgtgtctatgcttacctggtcctgcctggagctgtgtctgraggtggactgaccacttggctttgcctcctggctgcaggggctgttttgtaggtcagggtccccagaaaatagactctgaggtgggggtttgtgtgcaag

SEQ ID NO: 43000 - DNA, 201 bp, Homo sapiens
ctgaggtgggggtttgtgtgcaagagggcttggggggcagtgtcaggagcggtctcaggaacactggtgtgggcaggagggcacgggactagacagagggrgcagctgagttgtgatgcagtttcaacgggcttcggccagccccctgggggttgcattatctcaagttggggcaggagggcatcgcatactgccaggtgt

SEQ ID NO: 43001 - DNA, 201 bp, Homo sapiens
catagattctttggccccagggtcaaacaacgcctttcctactcttttttttttttttttaagtagagagagggtcttgctatgttgtccaggctggtctygaactctaggcctcaggtaaccctcctgcctcagcctctcatagtgcttggatttataggcgtgagccacctgccttggcctgtctgctcttgatgatca

SEQ ID NO: 43002 - DNA, 201 bp, Homo sapiens
actaagtgtctgcaaacatctgtgattcctcccagacacatcgctggctggagaggggacgtcgctcgagacgtctgcagggtgaggcagcctcgctggcraggggcctgatgggcagccctgcgtggaagatgtccccagggaggacacagcactgtctcccaacacccagagaatggcagggagggggctggactgggt

SEQ ID NO: 43003 - DNA, 201 bp, Homo sapiens
gaggaccctcagggagatgggagaggagggaccacccctcactgtgcatctggggagactgaggcagccctgcgtggggagagaatcagatcctcctgackgccagctagtgcctggaccccctgggaaatgagagaggagggaccacccctcactgtggatctggggagactgaggcagccctgggtgggagacaatcag

SEQ ID NO: 43004 - DNA, 201 bp, Homo sapiens
tcatccaaggtcacacagccacaagaggcagaacggggcctgaacccaggcagcctactcttggcctgtgatcctcccagctgagccacactctttccccrgacgaactgtgcttggtaaccacgctgggggctgtgggatgggctggggtattaaatgctcaagaatcttgtgagctgcttgctaatttgaaaattaaag

SEQ ID NO: 43005 - DNA, 201 bp, Homo sapiens
gataggcacggtgggagtggggtggcccaagcccaggcctgacacctcagctgtttaaccagtgctatgggtctcactcaggccaggcgcagtgctgagcrcttcacaacgatccactcatctcttccgcccagcaacgtgcaggtgtgactgttatctccattttgcaggtggggagactgaggcgtggaggggttcgca

SEQ ID NO: 43006 - DNA, 201 bp, Homo sapiens
ccctgccccgatggctccccctcatctctcagggagacatggagactctggatggccctggagtgcaggtgggaaggattgctcactgtgacactcctttygggcagctggtgcccttggctaagtcccttcccgtctctgagcctctttataagctctgggtgaggggagtcaggcgcatcttactgagccccatggtag

SEQ ID NO: 43007 - DNA, 201 bp, Homo sapiens
cacgccgccagctttagagcatcacgcttcctcaccacaaaagtcactcgtgctattctagagaactgagaagacaagctgaggggaaaaaagcaccccakgatgtgcctgtgagaggcaggggctctgccggggacggggtgcagcaggagcccaggtcctgctctgcctcagctggcctctgtccctgcccctctccca

SEQ ID NO: 43008 - DNA, 201 bp, Homo sapiens
tcaccattattctgccatatccttaaattttcttctgcaacatagtctctaacccgattccattgtttcatgtaactgactccttttctttaaaatgcttrattgtggtaaagcacacataaaatgtaccatcttcaccatttgtacgtgtgcggcttagtagcatgaattatatttcacactgttgggcaactaatctcc

SEQ ID NO: 43009 - DNA, 201 bp, Homo sapiens
gatggagtattggccgagcaatgtgccatgtctgcaccccttgggccacagtgggcaggtgctgacacctgtgagctgctctgtgctcggcccttcccttyatggggcgggcttgggtatagagacgctgttcttggacacaggtgcagccccaaacctgacactacctgggtttactccccccactgcctcccactcttc

SEQ ID NO: 43010 - DNA, 201 bp, Homo sapiens
gctgcatggaggcaggggcatggatgaaaagacacagatgacctgatggaatggtgccccagcttcctcctcctcccctttttggaggtgcctctgtttgycgaggatgggctctggggaagctggtgtgcagaggctaggtgcccagccttgctttaggaaagcctcacaaagtctggggcccgccgggagtttcccagg

SEQ ID NO: 43011 - DNA, 201 bp, Homo sapiens
cccctcccctgacatggcctccccaggatactcaggggttctggggtggggctcagggcccgagcagtgagcaggagagagcgtgggcctgttatgcccgrcttgccacaagttcttctatggctagcgtatggaaatggagcctctggtggcttggtgcctcagcaccgaaaatatgtaaaggacttgtcatgtcactga

SEQ ID NO: 43012 - DNA, 201 bp, Homo sapiens
gtcaagtaccggcggcccatggatgtctatgagaccggaatcgagtacatcgtggcacaggggcccaccaaccagggcctgaatgtcatggtacgtgtgcygcaggccttgggggccccaggggccctgggcactgcttccccagaatccagccacaggtgaggtcttccagcccgtgacgcccccagggccactgtgcgc

SEQ ID NO: 43013 - DNA, 201 bp, Homo sapiens
aggtgtagttgccccttgtggggggcatgacctggggagagacagctccccctggctgagggaaattcctggggtggggcacagctgtgaactgttgcacrcccaccccaggcagttcaccgaagggtggggtccgtggtccacccccggcacagcttggacccatgcgctttgcacgagtctgccttggcaggggaacag

SEQ ID NO: 43014 - DNA, 201 bp, Homo sapiens
catttgtttccatcctgagcttccatcaggctggagttaggccctgggagtgcccacccacccggccccaggaagagggcaactgagattgcaccaggccrccctggcctgattgggcacccaggaagagggtgactgagattggaccaggccgccctggcctgattgagcacctcggccaggcctgggtgcacgggttga

SEQ ID NO: 43015 - DNA, 201 bp, Homo sapiens
ggtttcgaactcctgacctcgagcgatccacccgcctccgtctcccaaagtgttggggttataggcatgagccaccatacctggctaacaccacactttaraaagggagaaactaaggcccaagacccattctctccacggatatgaggtttgaccctggcacgctggattctggggcctgagtttcagaggctccctgtc

SEQ ID NO: 43016 - DNA, 201 bp, Homo sapiens
aggcatgtgccaccaagcctggctaatttttctatttttagtggagatggggtttcactatgttggccaggctggtttcgaactcctgacctcgagcgatmcacccgcctccgtctcccaaagtgttggggttataggcatgagccaccatacctggctaacaccacactttaaaaagggagaaactaaggcccaagaccc

SEQ ID NO: 43017 - DNA, 201 bp, Homo sapiens
aagttaagctgccccattacagtggcttgaaattggccacagcgggggtgtttacaccacggaaattggccaatgctacaagtcacagctcctgttccccygtgtctccaaagagcccactgttaaacattttccagagcacggctgtctgtgagggacaggtcaggatctccagggacctgtaggtgtgatggtgttagg

SEQ ID NO: 43018 - DNA, 201 bp, Homo sapiens
gcatgagccaccatacctggctaacaccacactttaaaaagggagaaactaaggcccaagacccattctctccacggatatgaggtttgaccctggcacgmtggattctggggcctgagtttcagaggctccctgtcggctccaggctgacccagcccagaacccctccttcccttgggcagcacctgtccccttcctaag

SEQ ID NO: 43019 - DNA, 201 bp, Homo sapiens
gcaccagcctgctcacctcggccgggaacaggactcacaaggccaggtaggaggcactttcctgagccctgtccagggccctcagggggcaggatggggcygaggccaggtagaaagtgaggccccactgggggggtctggccagaagggctgaggtcctagaggtagaggagagagggccccttcttcccggggttctcc

SEQ ID NO: 43020 - DNA, 201 bp, Homo sapiens
ctgggcccggctcgcaccgccgtgggcggcgtggcgggcaccctgctgggcccggctcgcaccgccgtgggcggcgtggcgggcacccggctgggcccggytcgcaccgccgtgggcggcgtggcgggcaccggcttggccaggctcgcaccgccgtgggcggcgtggtgggcacccgacttggccaggctcgcaccgccg

SEQ ID NO: 43021 - DNA, 201 bp, Homo sapiens
gggtgcttgtccgtggcctcctgacttgggggcagtgtggcgtgataggagtttgggtgtctggtgaggccaccctcattctcacagtgtgctagaccatrgtcaggtccaggcccctgggggtcatccgggctaccacccattggtggtagcccttgtctgttgccagtgataccatgttttgttagggcaaacatcctt

SEQ ID NO: 43022 - DNA, 201 bp, Homo sapiens
gcaccgccgtgggcggcgtggtgggcaccggcttggccaggctcgcaccgctgtgggcggcgtggtgggcaccggcttggccaggctcgcaccgctgtggrcggcgtggtgggcacccggcttggccaggctcgcaccgctgtgggaggcgtggtgggcacccggcttggccaggcttgcaccgctgtgggcggcgtggtg

SEQ ID NO: 43023 - DNA, 201 bp, Homo sapiens
tgggagcccagctgggttgggtggggcggggtgggggtgcaaagagaagagctcagacccgcacagctcagacccacagtgctgccctcatgccacagttscacaagctgtgactgatccccaagccagaaagctgagctgagaggtcaggtgacttgccccaagtcctgaggcctgtctgctgggctccaaggtgccggc

SEQ ID NO: 43024 - DNA, 201 bp, Homo sapiens
tccagctcttgcagatgaagctggctactacttcttcaacggcaactacaaggtggacagccccaagaacttcaacatcgctggcacggtggtcaagtacmggcggcccatggatgtctatgagaccggaatcgagtacatcgtggcacaggggcccaccaaccagggcctgaatgtcatggtacgtgtgctgcaggcctt

SEQ ID NO: 43025 - DNA, 201 bp, Homo sapiens
gagtggtgaggccccatcttggtggcagattttgagtgtagggagccttggtggcaaattttggaagagccctctgggaagatggagtattggccgagcartgtgccatgtctgcaccccttgggccacagtgggcaggtgctgacacctgtgagctgctctgtgctcggcccttcccttcatggggcgggcttgggtata

SEQ ID NO: 43026 - DNA, 201 bp, Homo sapiens
tcaccagagtcgccgtgggccctgtgtgtagggtcctgctgggccctggcgctgacccgctccctctgccccggcctcagtgcaacaccacctgcgggcgyggggtcaagaagcggctggtgctctgcatggagctggccaacgggaagccgcagacgcgcagtggccccgagtgcgggctcgccaagaagcctcccgagg

SEQ ID NO: 43027 - DNA, 201 bp, Homo sapiens
ctcaggaacactggtgtgggcaggagggcacgggactagacagagggggcagctgagttgtgatgcagtttcaacgggcttcggccagccccctgggggtygcattatctcaagttggggcaggagggcatcgcatactgccaggtgtagttgccccttgtggggggcatgacctggggagagacagctccccctggctga

SEQ ID NO: 43028 - DNA, 201 bp, Homo sapiens
gacacagatgacctgatggaatggtgccccagcttcctcctcctcccctttttggaggtgcctctgtttgccgaggatgggctctggggaagctggtgtgyagaggctaggtgcccagccttgctttaggaaagcctcacaaagtctggggcccgccgggagtttcccaggggggctctgctgctccacccactctcgctc

SEQ ID NO: 43029 - DNA, 201 bp, Homo sapiens
ccatgttggccaggctggtctcgaactcctgacctcaggtaatctgcccgcctcggcctcccaaagtgtataactattttatctgtgtggcaaaaacaccrtatacgggtgtgctgcagcctctcttcccaatgccacacccagtgatatcaggttggtagtgcaaacaaacatagcttcagtcgcttgcttcaagcttct

SEQ ID NO: 43030 - DNA, 201 bp, Homo sapiens
aactggggccctggctactgtggagcccctggcgacttggcaggcgagggctgagggggctgagtgcttcccttccaagtgaaggccccagcacggccagkgtaggctgtgtcctgcagaacgcagttgggccctgagctgctccggggaaagtgaggacagttagatgcggccccaggagcttgccaagcccccaggcca

SEQ ID NO: 43031 - DNA, 201 bp, Homo sapiens
cccctgtggggacaaaaactgtcccgcccactggctggcccaggactgggagcgggtgagtgccccagagcccgcggaagggcctcctggtatctggagarcatttggccagagaggagagccagatggctgggaccacagatgggtgaaaaagaggaattcattgcaaattatgaagggacaattccctaaaaattaatt

SEQ ID NO: 43032 - DNA, 201 bp, Homo sapiens
tcgatcccgcccctcccgcctcaagcctccttaagtgcttcctgctcctccctccctgacagcctctgtgagggctttccttcccgggaaagcttctcaaytccaccacgtcagctggtgcgagagccagcacctccaggaagccttctctgatcttgtccctgggatccctacggcactcgtcctgggcctttttgggcc

SEQ ID NO: 43033 - DNA, 201 bp, Homo sapiens
tgtgcaggttccccgccccctgcccaggcccctgccccatcaggaggctttccccatgccttctgtctctcccacaccagtgcaccaagacctgcggggtrggcgtgaggatgcgagacgtcaagtgctaccaggggaccgacatcgtccgtggttgcgatccgttggtgaagcccgttggcagacaggcctgtgatctgc

SEQ ID NO: 43034 - DNA, 201 bp, Homo sapiens
gaggacccgtggcccacggttccttgggagttccccccagcgccacccaggagatctgaacccaagctgccgagtgaccctgcaagggggcccagccaggsggctgtgtcttctggtcccgctgacggtgataccctcgggcatggggtgggggcaggctggtcctcctgggcacttgagccctctaccatctgggggtcc

SEQ ID NO: 43035 - DNA, 201 bp, Homo sapiens
tcacctggtcagctgccctcctagggcagtgcagccagggttgggggaggggcatttatgagctccagcatgagagggacccaggtttgagctctggcccyggcacgactaagctgggtcccctccgaggatgagtctcttgtctgcacgctgggttcctctttatggagtcaggaccacgatcttcctgatttacgcagt

SEQ ID NO: 43036 - DNA, 201 bp, Homo sapiens
cctctctgccctggccctggctgctctagccatctggtcagcaggccacgggcacatctgtctcctccctggagcccttggttcattctcgctgggtctcyctgcgtccctccacctgcttaggcccctgcatctcgggagctttctgaggctcgtgacctggggcacggtcgtcccggaagttcagcctttccctccgta

SEQ ID NO: 43037 - DNA, 201 bp, Homo sapiens
aggccaggatcccgggggcgggcccaggtcacacgtcggtgctgatgctgcggctcctggcgaaggcctcccgcatggctgagaggcggttggggttgagmgcctgcaggcccccgaaagccccccggggcagctccacgtcctcctggctcacgctcttgtagagcacgcgctccccgccgttcagcacgtcctcttcct

SEQ ID NO: 43038 - DNA, 201 bp, Homo sapiens
tggtacaccagcccctggtcagaggtgagctcccagccggcccctctgaggttgcctgaggccagacctgaatgtcgatcccgcccctcccgcctcaagcstccttaagtgcttcctgctcctccctccctgacagcctctgtgagggctttccttcccgggaaagcttctcaactccaccacgtcagctggtgcgagagc

SEQ ID NO: 43039 - DNA, 201 bp, Homo sapiens
ccagcatggggagtgccttatcaccgccactttacaggtgaggaagctgaggcacagagaagcttctgccctcgcccaaagtcacccagctggagagagayggagtcaggatttgaacccaaagagtccggttccaggcactcacgcgtgaggctgctgttgctgtgctattggaagagctgctgcttcctatgctgagcc

SEQ ID NO: 43040 - DNA, 201 bp, Homo sapiens
cctctgtttgccgaggatgggctctggggaagctggtgtgcagaggctaggtgcccagccttgctttaggaaagcctcacaaagtctggggcccgccgggrgtttcccaggggggctctgctgctccacccactctcgctcccctctgtgccctgactcagcaggaacagaggcttgagctccaggcctggcctgccaggg

SEQ ID NO: 43041 - DNA, 201 bp, Homo sapiens
tgaccggcggctttgcccttccagctcttgcagatgaagctggctactacttcttcaacggcaactacaaggtggacagccccaagaacttcaacatcgcwggcacggtggtcaagtaccggcggcccatggatgtctatgagaccggaatcgagtacatcgtggcacaggggcccaccaaccagggcctgaatgtcatgg

SEQ ID NO: 43042 - DNA, 201 bp, Homo sapiens
gagtgcagatggaggtctgcaggggagggaggtggggggcaggcggcgggggcaggggaggtcagactcaggctccccactccagggtgcactgctgcgtsgtccgggctgcagtggtgtccttggagtggcccctgaaaatctgcaggtgccgggcctgcaaggaaactcttcaagttggatggaggctgctgaggaggg

SEQ ID NO: 43043 - DNA, 201 bp, Homo sapiens
gctgcctcactgagcttttggttgtggagcgttgtgcgtggcagagaaggggcacttgaccctggaccccttcctccaggacagggatggaccagtgctgygggcatggctgcaggagccagaacttgagccagctgtgtgggtgtggctggggtgctcataggggagccagctttacccctgtgcatggcaggaccttga

SEQ ID NO: 43044 - DNA, 201 bp, Homo sapiens
gggagagaaacttaaacaacccggcagaggagagaacccgacactcaggagcgctggcatcccagccttgcctactggagaggtgacttggtccccgaacytcagttcttccacctgtgaaatgcagatcataaaggtggatctggcctcacagctctgggcccgtaggacaagctggacagagggcagacggtattatcg

SEQ ID NO: 43045 - DNA, 201 bp, Homo sapiens
gacagagatgggccaggaaggagggggcagagagctagagatggagacccaccacggggtgggaggcccactgcccctggaaaacggcacgtgggggtccytggggttttcgccccttggccacctcctgaaactgccctgcttcgctctgtgttccttctccagatgacagctgccaggaccagccaggcaccaactgtg

SEQ ID NO: 43046 - DNA, 201 bp, Homo sapiens; identical to SEQ ID NO: 7517

SEQ ID NO: 43047 - DNA, 201 bp, Homo sapiens
gaggcctgggcactggctgggccccgagggctcttcccaaagcgtaccctggtcatctggaagaggatcggagctggcctggtggtgacagtggccttgcytcctaggatggatggcagatggcaatgttcctgctgggcctggttcctgctggttctggcagttgtagctggggacacagtgtcaaccgggtccacggtg

SEQ ID NO: 43048 - DNA, 201 bp, Homo sapiens
ggccagggtcatggcacaagcttacggatcctcaagccgctttgtaaagagtctctcctgccccatcttggttgactcttaccctcccctcttagcccccygccccaggatatattgaatttccagggcctgtcaggggcctcaagggtcgatcaactaggctgtcagcactcagaaaggccctgactgctgagatgccgc

SEQ ID NO: 43049 - DNA, 201 bp, Homo sapiens
gcagggctggtggtggttccctgagttggtgacactggctcctcccccagccagtttggccttttgtgaccggcggctttgcccttccagctcttgcagaygaagctggctactacttcttcaacggcaactacaaggtggacagccccaagaacttcaacatcgctggcacggtggtcaagtaccggcggcccatggatg

SEQ ID NO: 43050 - DNA, 201 bp, Homo sapiens
tgagacgctggccacagccgctagagctggagctgcctctgctgcccactctagtaccctcccctgggggatgccgcgaggtctgatgtcaaacccaggakcaggatacagggccgttgatgggagaaaatatggcagggagaccccagtgccggctgtgaggtcacattttatctattcttggggcttcatgtttggatg

SEQ ID NO: 43051 - DNA, 201 bp, Homo sapiens
ggggtggggctcagggcccgagcagtgagcaggagagagcgtgggcctgttatgcccggcttgccacaagttcttctatggctagcgtatggaaatggagsctctggtggcttggtgcctcagcaccgaaaatatgtaaaggacttgtcatgtcactgaagtcaggtgacatcaagatgggcagttgtggtgcccgtcaag

SEQ ID NO: 43052 - DNA, 201 bp, Homo sapiens
tgagagtgcagatggaggtctgcaggggagggaggtggggggcaggcggcgggggcaggggaggtcagactcaggctccccactccagggtgcactgctgygtcgtccgggctgcagtggtgtccttggagtggcccctgaaaatctgcaggtgccgggcctgcaaggaaactcttcaagttggatggaggctgctgagga

SEQ ID NO: 43053 - DNA, 201 bp, Homo sapiens
cttgcttcctaggatggatggcagatggcaatgttcctgctgggcctggttcctgctggttctggcagttgtagctggggacacagtgtcaaccgggtccrcggtgagtggggtgttgtggtctgagggcccatgccagtcccctacccaggtgctgtgatcactctcagatggactggcttggagggagccgtgtgggca

SEQ ID NO: 43054 - DNA, 201 bp, Homo sapiens
gacattcctgaaactcctctgcagccctcactccgagcctgcatctttctgccaggaggaagtccgtcccgggccccgggaacaggacctgcacgggcacrtccaagcggtaccagctctgcagagtgcaggtgaggcccggcccgggcaggggcaccatggcctgctctccctgtcatcatgcagttttcagggggtctt

SEQ ID NO: 43055 - DNA, 201 bp, Homo sapiens
ccggctgtcccggctgtcccggctgcagccacttcctgcttagcctggacaaaaatgcctttgtcgggccgagttcctcccggagcctccctgtcccttcrcttcccaggagtgtccgccggacgggaggagcttccgcgaggagcagtgcgtctccttcaactcccacgtgtacaacgggcggacgcaccagtggaagcc

SEQ ID NO: 43056 - DNA, 201 bp, Homo sapiens
tcaactcccacgtgtacaacgggcggacgcaccagtggaagcctctgtacccgggtacctgccgccctggggacccaccttgcagggagctgactgagctwtgggggtagcccttccggcacctgggaccaaactcgacgggtgggcaggtggggaaatggaggtggtcagacgaagagccaggaatgaacctgggtctcc

SEQ ID NO: 43057 - DNA, 201 bp, Homo sapiens
ggactagacagagggggcagctgagttgtgatgcagtttcaacgggcttcggccagccccctgggggttgcattatctcaagttggggcaggagggcatcrcatactgccaggtgtagttgccccttgtggggggcatgacctggggagagacagctccccctggctgagggaaattcctggggtggggcacagctgtgaa

SEQ ID NO: 43058 - DNA, 201 bp, Homo sapiens
tcgtgatccacccgcctcggcctcccaaagtgctgggattacaggcaagagtcactgcgcctggcccccacccccatttttaaagcttcctctaagttctraaagagggaggagaaggcactcttcccttccccttgagccccaggatgggacagactctcctggcttgaagctcccaggtgaaggaggctttgaagaaac

SEQ ID NO: 43059 - DNA, 201 bp, Homo sapiens
ttctgaatataatgctctaagcctgaccacccccaggtgactgaaggtcctgaagaaggacctgtgacctggcccacgtttcagcccagtgaagtatggcrgcttggggtcatctctagccagcccctctgggcccagaggaaagtggagttgggcaatgccacctgctgcactgtccagtttaaaaaggaagtcgaggct

SEQ ID NO: 43060 - DNA, 201 bp, Homo sapiens
ggacctgtgacctggcccacgtttcagcccagtgaagtatggcggcttggggtcatctctagccagcccctctgggcccagaggaaagtggagttgggcartgccacctgctgcactgtccagtttaaaaaggaagtcgaggctcgaaggacctgctgtccaccgcgccggcttgccatcgccccttctctggctcagggg

SEQ ID NO: 43061 - DNA, 201 bp, Homo sapiens
aaggcgtgagtcccgcggacatgtaccggtggaagctctcgtcccacgagccctgcagtgccacctgcaccacaggtactggtcacgggtgccaaggggcrgcaactgccctgaacccatttccatggacatgggctggggctgtggggcccacccactagcttgcagcccccaaactgccctcggggtgcttgtccgtgg

SEQ ID NO: 43062 - DNA, 201 bp, Homo sapiens
gcgtggtggggactgggagggttgtgtctagagtaggcggagggctggcgtggggggcggagctgcccttccctgcgtccttgctccctcctgagagcgcrtgggagcgcgcaggagccctagaggccaccccgtgggccgtggcccccgcacggctgtcccggctgtcccggctgtcccggctgtcccggctgtcccggc

SEQ ID NO: 43063 - DNA, 201 bp, Homo sapiens
ctgacccgtcccgagcctgtccacgagttctgcgctgggagggagtgccagcccaggtacctgccaccaggggccctgggcagggggtcggcagggggcgwgaggggctctgcccaaaggagcagtcagacttaccccctgccccgtagaggttcttcgtgtgcagggccgtgggggctcttcgaggaggggcatacagac

SEQ ID NO: 43064 - DNA, 201 bp, Homo sapiens
ggtggtagcccttgtctgttgccagtgataccatgttttgttagggcaaacatcctttgggttaaaagtaagaaatcttaggtagcagagattttactttygcttccagcaaacataggaagggagtcataggcccctgtgatctgtgacgaagggaagtaggcaaattctaggacctcatcagcaggggagaagttagga

SEQ ID NO: 43065 - DNA, 201 bp, Homo sapiens
gtggactgaccacttggctttgcctcctggctgcaggggctgttttgtaggtcagggtccccagaaaatagactctgaggtgggggtttgtgtgcaagagrgcttggggggcagtgtcaggagcggtctcaggaacactggtgtgggcaggagggcacgggactagacagagggggcagctgagttgtgatgcagtttcaa

SEQ ID NO: 43066 - DNA, 201 bp, Homo sapiens
tccacatccgtagaaggtggatgctaatagcacagggttttgtgacacttttacaagcgtgtctctccatgcttagtgtagcatgctgtcaatgaatggcrcccttccagcctggctctacaagcttgcacgtttttaaatttacccaaatgcagtcaggccgaacatatggttttgtaacctgcttccctgcattttcat

SEQ ID NO: 43067 - DNA, 201 bp, Homo sapiens
tctgtgacgaagggaagtaggcaaattctaggacctcatcagcaggggagaagttaggaggggaaaaaagaccctcctcggtggtgcctggacagacagakgtgtgtggttagtaagagttgagctgggatttgaacccacagctgtctggttgcacggccaccatcgccctgagacgctggccacagccgctagagctgg

SEQ ID NO: 43068 - DNA, 201 bp, Homo sapiens
tgcagggtgcggcttccaccatacccaggagcagctggccttggaagtgagccatgtgacctgccttccgggcagacccctagcggagctgagcatggtgrtggggtgtcagcagggtgtctgctttgccaagtcctttgcggacctgccctgagttcctccactcttcctggccaggggactccaagcgtgtgggcgttg

SEQ ID NO: 43069 - DNA, 201 bp, Homo sapiens
gagctgggagggatgggtgcttgcttcgtttcaaagagatctacatatctacagagaggatggagaccagaaaggaattgggaaatggaatcatgagggcygggccctcatccccaccccacccagcccaccccccacgccaacgcatcagaaacagacttcacaggatgcacagaggaagccagaggtgtgggcgggccc

SEQ ID NO: 43070 - DNA, 201 bp, Homo sapiens
tgggagatgttttattggctttcactttcctcagggagccagcggctcccccagcaggtccccacggtggagccgagtgagctgggagggatgggtgcttrcttcgtttcaaagagatctacatatctacagagaggatggagaccagaaaggaattgggaaatggaatcatgagggctgggccctcatccccaccccacc

SEQ ID NO: 43071 - DNA, 201 bp, Homo sapiens; identical to SEQ ID NO: 7525

SEQ ID NO: 43072 - DNA, 201 bp, Homo sapiens
cggcggctcctgcaggaagaaggtggggggctcgcagtgggagcagctgcggcagagggcgcgggcctgcggggacttctggctgaaggaggtggaggcgrtggggtagagcgccggcccgttggtcagcaccaggttgcggttggagtgcagcgggggcaggtgcgagtgaacggcgaagtctggttcctcctcgtcctc

SEQ ID NO: 43073 - DNA, 201 bp, Homo sapiens
tttccagtctcccattcactcatcagttcattaattcatttacctgttcacttctcactcaaccacctattctctcacccacttcttgaaatcattcattsctccatccattcactgtggctagcttccctggaggaccagcgggggttccgtgctggcccatttcctgccctttgggaagtccacagggagctcggggca

SEQ ID NO: 43074 - DNA, 201 bp, Homo sapiens
caaggtagttcccgtggcccctgcccctcccctgacatggcctccccaggatactcaggggttctggggtggggctcagggcccgagcagtgagcaggagrgagcgtgggcctgttatgcccggcttgccacaagttcttctatggctagcgtatggaaatggagcctctggtggcttggtgcctcagcaccgaaaatatg

SEQ ID NO: 43075 - DNA, 201 bp, Homo sapiens
ggttgttaaacgttgtagcaaaagtaccgccggtctcactgtgctgactgcccgcccgcctgtgggaggcagtggcggccccggggcctggccacagcgcmctcccagcagccctctccctctcccttcctgcagcccatcggctgtgacggggtgcttttctccacccacacactggacaagtgtggcatctgccagggg

SEQ ID NO: 43076 - DNA, 201 bp, Homo sapiens
gccagcccttagacagccaccgctcaccctccaatagctgtggagtgggcgagtgccacccaaggctgcctttccaatcaagaggggctcactgtcatccktttgcctccaggttactctctggtgacccacatcccggctggtgcccgagacatccagattgtagagaggaagaagtccgctgacgtgctaggtgggtac

SEQ ID NO: 43077 - DNA, 201 bp, Homo sapiens
cctggaccccttcctccaggacagggatggaccagtgctgtgggcatggctgcaggagccagaacttgagccagctgtgtgggtgtggctggggtgctcayaggggagccagctttacccctgtgcatggcaggaccttgaactcagagctgctggacaatgggagggtggtgatgttgggtggtgagctccctgtcactc

SEQ ID NO: 43078 - DNA, 201 bp, Homo sapiens
tttttttttttttttttgttatttttgagatggagtcttaccctgttgcccaggctggagtgcagtggcacagtctcagctccctgcaacctccgcctccyaggttcaaacgattctcctgcctcagcctccagagtagctgggattacaggcgcccaccaccacacccagctaaattttgtatttttagtagagatgggg

SEQ ID NO: 43079 - DNA, 201 bp, Homo sapiens
gctcttccccacttcccgggccgtgacccttgtgaccttcaggcggggctccctcccgaggtaggggcaccctctgggcctccctgccctgtccccttccscgccgcccgggaatacctggagccggcagtagcacagaacagcgatgatgcagagcaaaatcacagtcgccaagatgcccccggtgatgaccacggtccc

SEQ ID NO: 43080 - DNA, 201 bp, Homo sapiens
ggggccctgggcagggggtcggcagggggcgtgaggggctctgcccaaaggagcagtcagacttaccccctgccccgtagaggttcttcgtgtgcagggcygtgggggctcttcgaggaggggcatacagacctcacccctcagagaccttctgggtcttcccaggagttgcaatttaatctgtcactgtgcctcgtagac

SEQ ID NO: 43081 - DNA, 201 bp, Homo sapiens
cttctggttggtctctgtcctgggcatagcaggcctagcagagttgggaagagcacgctctctgctccttggaggtgcctctgcctctcccgccttccagytgcaggacacgagggtgtctttctctgcggctgcgcagaccctcaccctcacctttccatgccatccttccgttcttggggtcctttacttccacaaacc

SEQ ID NO: 43082 - DNA, 201 bp, Homo sapiens
ttcagatggcagcagtaggctctggctgcttggggtccaccaggagctgggccaggcctcctgggtcctgctgagaagcaggtaggggaggtgacctgcarctctgtctcccttggggatctcagttcctgttgagacccacagcctgaagacctctgtcctcagggtctctcctcatcacacaagatggggagactgagg

SEQ ID NO: 43083 - DNA, 201 bp, Homo sapiens
agcacgctctctgctccttggaggtgcctctgcctctcccgccttccagttgcaggacacgagggtgtctttctctgcggctgcgcagaccctcaccctcmcctttccatgccatccttccgttcttggggtcctttacttccacaaacctctgcaagtttttaacccctacccctgccccagccaactctcaaacacttg

SEQ ID NO: 43084 - DNA, 201 bp, Homo sapiens
cccacccacccggccccaggaagagggcaactgagattgcaccaggccgccctggcctgattgggcacccaggaagagggtgactgagattggaccaggcygccctggcctgattgagcacctcggccaggcctgggtgcacgggttgactgggtgaagggtcagcatggccctgcctgcaagggcagcaggaagtctctg

SEQ ID NO: 43085 - DNA, 201 bp, Homo sapiens
ggtccccagccagccgtgttcaatgtctagaccagtccttcattgctgattttaggctgagaggaacgtgcgtttgcccctcctccgcattcactggccasactctccatgatgggagtttcctgtctcgggagcatttgagccggggttctggagggcagggctggtggtggttccctgagttggtgacactggctcctc

SEQ ID NO: 43086 - DNA, 201 bp, Homo sapiens
agaccagtccttcattgctgattttaggctgagaggaacgtgcgtttgcccctcctccgcattcactggccagactctccatgatgggagtttcctgtctygggagcatttgagccggggttctggagggcagggctggtggtggttccctgagttggtgacactggctcctcccccagccagtttggccttttgtgaccg

SEQ ID NO: 43087 - DNA, 201 bp, Homo sapiens
aacctccgccttctgggttccagcgattctcctgcctcagcctctcaagtagcggggattacaggctcccaccgccatgcccagctaaattttttttgcatttttagtagagacagtgtttcaccatgttggccaggctggtctcgaactcctgacctcaggtaatctgcccgcctcggcctcccaaagtgtataactatt

SEQ ID NO: 43088 - DNA, 201 bp, Homo sapiens
gcaactacaaggtggacagccccaagaacttcaacatcgctggcacggtggtcaagtaccggcggcccatggatgtctatgagaccggaatcgagtacatygtggcacaggggcccaccaaccagggcctgaatgtcatggtacgtgtgctgcaggccttgggggccccaggggccctgggcactgcttccccagaatcca

SEQ ID NO: 43089 - DNA, 201 bp, Homo sapiens
ggcagtgaaggaaaatcctttgatttatgtgggtggtgcctcatgggagatgccccatcctcacgggcgtgctgcctttcagctggcactgtggctccccsctccattgctccatcaggctggcatttctgggtgttggaggatacggcaggcccagtggatctcacagtcatgcgcccattgtggcacgtcctctgctat

SEQ ID NO: 43090 - DNA, 201 bp, Homo sapiens
ccagggcccaaggtagttcccgtggcccctgcccctcccctgacatggcctccccaggatactcaggggttctggggtggggctcagggcccgagcagtgrgcaggagagagcgtgggcctgttatgcccggcttgccacaagttcttctatggctagcgtatggaaatggagcctctggtggcttggtgcctcagcaccg

SEQ ID NO: 43091 - DNA, 201 bp, Homo sapiens
gcaggcccagtggatctcacagtcatgcgcccattgtggcacgtcctctgctataaagcgggtccctttgtttaatgccatgttctcggtaccctgtcccrttcaatcaaatactctgtgagcctttgggcgttggggctgtggctgagcttctgtgggcaggaaaggcaacttttatttaggaccagattcagcacttcc

SEQ ID NO: 43092 - DNA, 201 bp, Homo sapiens
aggatggaaggggtctgatgtgatcagcttgtcacccagtagctgagtggcctttagaggtggtactttagaggcttagtgttgaggccagagactggactccagttcaggagcggaaggagctatggtggctgtggtgagtgagaagccgtgtgctggggccacatgtagcttccatcccttcctccatgctgattcatt

SEQ ID NO: 43093 - DNA, 201 bp, Homo sapiens
ggatggaaggggtctgatgtgatcagcttgtcacccagtagctgagtggcctttagaggtggtactttagaggcttagtgttgaggccagagactggactccagttcaggagcggaaggagctatggtggctgtggtgagtgagaagccgtgtgctggggccacatgtagcttccatcccttcctccatgctgattcattc

SEQ ID NO: 43094 - DNA, 201 bp, Homo sapiens
gatggaaggggtctgatgtgatcagcttgtcacccagtagctgagtggcctttagaggtggtactttagaggcttagtgttgaggccagagactggactccagttcaggagcggaaggagctatggtggctgtggtgagtgagaagccgtgtgctggggccacatgtagcttccatcccttcctccatgctgattcattca

SEQ ID NO: 43095 - DNA, 201 bp, Homo sapiens
atggaaggggtctgatgtgatcagcttgtcacccagtagctgagtggcctttagaggtggtactttagaggcttagtgttgaggccagagactggactccagttcaggagcggaaggagctatggtggctgtggtgagtgagaagccgtgtgctggggccacatgtagcttccatcccttcctccatgctgattcattcac

SEQ ID NO: 43096 - DNA, 201 bp, Homo sapiens
agagactggactccagttcaggagcggaaggagctatggtggctgtggtgagtgagaagccgtgtgctggggccacatgtagcttccatcccttcctccaygctgattcattcacccgttgtgcctgcagtggggtgatgatgccagtgactagcctgtgtccagtggcaaggccattctgtcttctactggggtgtttag

SEQ ID NO: 43097 - DNA, 201 bp, Homo sapiens
gcctgcagtggggtgatgatgccagtgactagcctgtgtccagtggcaaggccattctgtcttctactggggtgtttagtgcctctcgcatggtgacactkcctggtacaaatgaacaaatgaaaggaagacctccatcctttatgcctactccctagatccagccacaggtacctcctccagacctcctggtccccaacc

SEQ ID NO: 43098 - DNA, 201 bp, Homo sapiens
tatgtgctgggcacacagcaccaggactaggcacagggccagagggtatgagacagctgtgtcagcaagggacccaagctcccccatccaagacccttgcwcccacatccgctttctagctcacagctatggctgtgtgggggtgccctgaagagcagagaaaaatggccaaacttgatttagagatgggtcggcttgccc

SEQ ID NO: 43099 - DNA, 201 bp, Homo sapiens
ctgacacagctttgtcgtaccctctggccctgggtgtgcctagtcctggtgtaacacttccaccttacaatggattgctgctggcggagctggtagaactygtgttggaggcagctctggctgtgtgggtcgcctgatgtcccgtagcccaagtgttccatctctagtagggcctcgcagtgtgccagaagttttttgcaa

SEQ ID NO: 43100 - DNA, 201 bp, Homo sapiens
ttaaacattttccagagcacggctgtctgtgagggacaggtcaggatctccagggacctgtaggtgtgatggtgttaggggagggatggcaggcgggtacyggcctgcaggagacactcaccccagcagggagatgcacgcggaatcctccgttcccggagggatccggtgagaaaagcgtcaagcctcaggaaacgtctg

SEQ ID NO: 43101 - DNA, 201 bp, Homo sapiens
tgcatcccagacccatgtcttctatgtgctgggcacacagcaccaggactaggcacagggccagagggtatgagacagctgtgtcagcaagggacccaagmtcccccatccaagacccttgctcccacatccgctttctagctcacagctatggctgtgtgggggtgccctgaagagcagagaaaaatggccaaacttgat

SEQ ID NO: 43102 - DNA, 201 bp, Homo sapiens
ctcaggggttctggggtggggctcagggcccgagcagtgagcaggagagagcgtgggcctgttatgcccggcttgccacaagttcttctatggctagcgtmtggaaatggagcctctggtggcttggtgcctcagcaccgaaaatatgtaaaggacttgtcatgtcactgaagtcaggtgacatcaagatgggcagttgtg

SEQ ID NO: 43103 - DNA, 201 bp, Homo sapiens; identical to SEQ ID NO: 7520

SEQ ID NO: 43104 - DNA, 201 bp, Homo sapiens
gcctccgtctcccaaagtgttggggttataggcatgagccaccatacctggctaacaccacactttaaaaagggagaaactaaggcccaagacccattctstccacggatatgaggtttgaccctggcacgctggattctggggcctgagtttcagaggctccctgtcggctccaggctgacccagcccagaacccctcct

SEQ ID NO: 43105 - DNA, 201 bp, Homo sapiens
agctccccaagtgcagagtggctcagtcccaagcctcagcaagggctggagaggatctagtggattcctccatgaggggcaagagcctgaaatcagggatraagaacaaggctggcattgcagctggcaagggccatgagagagtccacctggggccaggcctccagagccaaggccacagctgggtctacatgggcagcc

SEQ ID NO: 43106 - DNA, 201 bp, Homo sapiens
tctccacggatatgaggtttgaccctggcacgctggattctggggcctgagtttcagaggctccctgtcggctccaggctgacccagcccagaacccctcyttcccttgggcagcacctgtccccttcctaagctgcaggcatttggcccgatgtttgtgtccagctctgtcccagccctcatcgggggtgggcgtctgtg

SEQ ID NO: 43107 - DNA, 201 bp, Homo sapiens
gtttacaccacggaaattggccaatgctacaagtcacagctcctgttcccccgtgtctccaaagagcccactgttaaacattttccagagcacggctgtcygtgagggacaggtcaggatctccagggacctgtaggtgtgatggtgttaggggagggatggcaggcgggtactggcctgcaggagacactcaccccagca

SEQ ID NO: 43108 - DNA, 201 bp, Homo sapiens
ctgcaatgggacggggctgagctgagctgcacaagcgggtgtgggggttgggccagcccttagacagccaccgctcaccctccaatagctgtggagtgggygagtgccacccaaggctgcctttccaatcaagaggggctcactgtcatccgtttgcctccaggttactctctggtgacccacatcccggctggtgcccga

SEQ ID NO: 43109 - DNA, 201 bp, Homo sapiens
ctgtaggtgtgatggtgttaggggagggatggcaggcgggtactggcctgcaggagacactcaccccagcagggagatgcacgcggaatcctccgttcccrgagggatccggtgagaaaagcgtcaagcctcaggaaacgtctgacctggagagccccttctttcctgtcccagggcatattaaaatctctccttctcccc

SEQ ID NO: 43110 - DNA, 201 bp, Homo sapiens
ttaggggagggatggcaggcgggtactggcctgcaggagacactcaccccagcagggagatgcacgcggaatcctccgttcccggagggatccggtgagamaagcgtcaagcctcaggaaacgtctgacctggagagccccttctttcctgtcccagggcatattaaaatctctccttctccccaggctcctctctcagcc

SEQ ID NO: 43111 - DNA, 201 bp, Homo sapiens
ctggcctgcaggagacactcaccccagcagggagatgcacgcggaatcctccgttcccggagggatccggtgagaaaagcgtcaagcctcaggaaacgtcygacctggagagccccttctttcctgtcccagggcatattaaaatctctccttctccccaggctcctctctcagccacctgccagcaatgcctctccttct

SEQ ID NO: 43112 - DNA, 201 bp, Homo sapiens
tgcacgcggaatcctccgttcccggagggatccggtgagaaaagcgtcaagcctcaggaaacgtctgacctggagagccccttctttcctgtcccagggcrtattaaaatctctccttctccccaggctcctctctcagccacctgccagcaatgcctctccttctccgagcacctcccctccagacccttggtttctttc

SEQ ID NO: 43113 - DNA, 201 bp, Homo sapiens
ccaggtgtagttgccccttgtggggggcatgacctggggagagacagctccccctggctgagggaaattcctggggtggggcacagctgtgaactgttgcrcgcccaccccaggcagttcaccgaagggtggggtccgtggtccacccccggcacagcttggacccatgcgctttgcacgagtctgccttggcaggggaac

SEQ ID NO: 43114 - DNA, 201 bp, Homo sapiens
gggtgtgcctagtcctggtgtaacacttccaccttacaatggattgctgctggcggagctggtagaacttgtgttggaggcagctctggctgtgtgggtcrcctgatgtcccgtagcccaagtgttccatctctagtagggcctcgcagtgtgccagaagttttttgcaagtgatgtgtatttatttactgcagatggcct

SEQ ID NO: 43115 - DNA, 201 bp, Homo sapiens
ctccgttcccggagggatccggtgagaaaagcgtcaagcctcaggaaacgtctgacctggagagccccttctttcctgtcccagggcatattaaaatctcyccttctccccaggctcctctctcagccacctgccagcaatgcctctccttctccgagcacctcccctccagacccttggtttctttctagctgggaggac

SEQ ID NO: 43116 - DNA, 201 bp, Homo sapiens
ggctgtgtgggtcgcctgatgtcccgtagcccaagtgttccatctctagtagggcctcgcagtgtgccagaagttttttgcaagtgatgtgtatttatttrctgcagatggccttgctccagaaccatagggtgctatgttatgctttccctacaggctttccagaaattccatctgacatctttccctaccacagatatc

SEQ ID NO: 43117 - DNA, 201 bp, Homo sapiens
gtgccatgtctgcaccccttgggccacagtgggcaggtgctgacacctgtgagctgctctgtgctcggcccttcccttcatggggcgggcttgggtatagrgacgctgttcttggacacaggtgcagccccaaacctgacactacctgggtttactccccccactgcctcccactcttcttgagagccagaactggtgggg

SEQ ID NO: 43118 - DNA, 201 bp, Homo sapiens
gtcatacggcccatgtggcgggctgcttgcctcacagcctggacctgctgcagggccccttccactcaggatcccacccaaagcagcagctttttttttttttttttttttttgttatttttgagatggagtcttaccctgttgcccaggctggagtgcagtggcacagtctcagctccctgcaacctccgcctcccaggt

SEQ ID NO: 43119 - DNA, 201 bp, Homo sapiens
gatgcagagcaaaatcacagtcgccaagatgcccccggtgatgaccacggtcccggctgtcatccgcccccttctccatcaacagcctgcaacacacgccrccagctttagagcatcacgcttcctcaccacaaaagtcactcgtgctattctagagaactgagaagacaagctgaggggaaaaaagcaccccaggatgtg

SEQ ID NO: 43120 - DNA, 201 bp, Homo sapiens
ccacgcatctctgtgtctatgcttacctggtcctgcctggagctgtgtctgaaggtggactgaccacttggctttgcctcctggctgcaggggctgttttrtaggtcagggtccccagaaaatagactctgaggtgggggtttgtgtgcaagagggcttggggggcagtgtcaggagcggtctcaggaacactggtgtggg

SEQ ID NO: 43121 - DNA, 201 bp, Homo sapiens
ccatgtggcgggctgcttgcctcacagcctggacctgctgcagggccccttccactcaggatcccacccaaagcagcagcttttttttttttttttttttkttgttatttttgagatggagtcttaccctgttgcccaggctggagtgcagtggcacagtctcagctccctgcaacctccgcctcccaggttcaaacgatt

SEQ ID NO: 43122 - DNA, 201 bp, Homo sapiens
agcacgtgtcttgtagggcacgtagtgtgtgccaggcactgtgcacacagtgaggcctgagagatagggctcatgtcctcgtggaactcagcctggggccmaggggctgacatgcaaacagcgcccctcattcttctccatattcacaaggtaactcattcacgcctggcaacagctctacaaggctggcactattactgt

SEQ ID NO: 43123 - DNA, 201 bp, Homo sapiens
tcagctccctgcaacctccgcctcccaggttcaaacgattctcctgcctcagcctccagagtagctgggattacaggcgcccaccaccacacccagctaawttttgtatttttagtagagatggggtttcactatgttggccaggctggtctcaaactactgacctcatgatttgcccgcctcggcctcccaaagtgctgg

SEQ ID NO: 43124 - DNA, 201 bp, Homo sapiens
tctatacatttccgcgttgcctctcccacggcagggggactgcgacatggcctctccctctccccgtgcctccctctgccaccaaaaagctggtcagggcrgagcatcccaagggccctgatgcccctgaaagtctcccttctagggggcagctggtccatcttcagggagctcagcacgtgtctcagcctaggcagacac

SEQ ID NO: 43125 - DNA, 201 bp, Homo sapiens
ctgcaacctccgcctcccaggttcaaacgattctcctgcctcagcctccagagtagctgggattacaggcgcccaccaccacacccagctaaattttgtayttttagtagagatggggtttcactatgttggccaggctggtctcaaactactgacctcatgatttgcccgcctcggcctcccaaagtgctgggattacag

SEQ ID NO: 43126 - DNA, 201 bp, Homo sapiens
ccccaaggagctccctggccgagagcttcttcgtggattatgaggagaacgagggggctggcccttacctgctcaacgggtcctacctggagctgagcagygacagggttgccaacagctcctccgaggccccattccccaacgttagcaccagcctgctcacctcggccgggaacaggactcacaaggccaggtaggagg

SEQ ID NO: 43127 - DNA, 201 bp, Homo sapiens
ctcctgcctcagcctccagagtagctgggattacaggcgcccaccaccacacccagctaaattttgtatttttagtagagatggggtttcactatgttggscaggctggtctcaaactactgacctcatgatttgcccgcctcggcctcccaaagtgctgggattacaggcgtgagccaccgcacctggccagcagcagct

SEQ ID NO: 43128 - DNA, 201 bp, Homo sapiens
caggccccagctgtgcctccccccaggacacatttgtgttcaatgagccttatccctgccacgagcctgggggctccccaagcctgggcctcccctgaggrcagggattccaggagggctcagccaagccccacttggggcctggggccaggtgggtgtgccaaaggaatccccccattgtctcaggaccttcaaggccag

SEQ ID NO: 43129 - DNA, 201 bp, Homo sapiens
acctggagctgagcagcgacagggttgccaacagctcctccgaggccccattccccaacgttagcaccagcctgctcacctcggccgggaacaggactcayaaggccaggtaggaggcactttcctgagccctgtccagggccctcagggggcaggatggggccgaggccaggtagaaagtgaggccccactgggggggtc

SEQ ID NO: 43130 - DNA, 201 bp, Homo sapiens
ccctgacatttccactaatgtaaggggctgccgaatcttcacagggttgaatctctgctcctctggaagacaggtgctttaccaagacctctggcaccagygtctgctcctctgatctgataagtgtggcgccatcagtgcagaggacaaaggtcaagtgcttggagtggtccagatgcctttatagtgtattgtaattgg

SEQ ID NO: 43131 - DNA, 201 bp, Homo sapiens
gacggtgctgtttcctgaggctcaaggtgggcccagccccgcgcccccaacacctgcctcatctcctctgttcttgcccacgcacttggaggtgggtgccstacaccttagccaaggtccctgccccctgcccccacaggtcctgtaccagttgctgatgggctcgagatgtccactcctactccagcgcctgagtcccag

SEQ ID NO: 43132 - DNA, 201 bp, Homo sapiens
tgcgaacccctccacgcctcagtctccccacctgcaaaatggagataacagtcacacctgcacgttgctgggcggaagagatgagtggatcgttgtgaagygctcagcactgcgcctggcctgagtgagacccatagcactggttaaacagctgaggtgtcaggcctgggcttgggccaccccactcccaccgtgcctatc

SEQ ID NO: 43133 - DNA, 201 bp, Homo sapiens
gttctgtccggcccaagctggtgaccttgagcaagtccatcccaggggcctcttaattcctggactttagggattgaaaggaccatcctgattgcagcgcstcagtgcacacgcgtgcaggcacactcagaggcaagaacacactgggggggggggtgctgccttagtttccccagagccccaagtccttcagaagccccc

SEQ ID NO: 43134 - DNA, 201 bp, Homo sapiens
ctaccatggggctcagtaagatgcgcctgactcccctcacccagagcttataaagaggctcagagacgggaagggacttagccaagggcaccagctgcccraaaggagtgtcacagtgagcaatccttcccacctgcactccagggccatccagagtctccatgtctccctgagagatgagggggagccatcggggcaggg

SEQ ID NO: 43135 - DNA, 201 bp, Homo sapiens; identical to SEQ ID NO: 7549

SEQ ID NO: 43136 - DNA, 201 bp, Homo sapiens
tgggagaggggcagggacagaggccagctgaggcagagcaggacctgggctcctgctgcaccccgtccccggcagagcccctgcctctcacaggcacatcmtggggtgcttttttcccctcagcttgtcttctcagttctctagaatagcacgagtgacttttgtggtgaggaagcgtgatgctctaaagctggcggcgtg

SEQ ID NO: 43137 - DNA, 201 bp, Homo sapiens
ctcaggggaggcccaggcttggggagcccccaggctcgtggcagggataaggctcattgaacacaaatgtgtcctggggggaggcacagctggggcctggrgctagaaggaccaggtgaccatacagccggctgggcatgcaccagggctctcaggcacagaggccaccgttactcctgatgattctgtctcagacccaac

SEQ ID NO: 43138 - DNA, 201 bp, Homo sapiens
ggagattagttgcccaacagtgtgaaatataattcatgctactaagccgcacacgtacaaatggtgaagatggtacattttatgtgtgctttaccacaatyaagcattttaaagaaaaggagtcagttacatgaaacaatggaatcgggttagagactatgttgcagaagaaaatttaaggatatggcagaataatggtga

SEQ ID NO: 43139 - DNA, 201 bp, Homo sapiens
gggctgggagaccccccggaatctggcaatggaagaactggccgagagcagctgcagtcattagctgattgtgacgtcaagatgagggggacagcagacaycaggcccctgggagtgatgcaacaggaagccagtttagaggagaaacactgataaaggagcatgttcaatgccatgcgaggaatcccggccagctccagt

SEQ ID NO: 43140 - DNA, 201 bp, Homo sapiens
aaaggagctgtggcattcaaggcattcacgtggaggagacatggggttcagcagtcggggtagggtggcaggggccccaaggtggatggtagcagcggatmcagccctgacctgacccagatccctcatcttactggtgctggggcctgggcgggtcatttctctccaggcctcggtttgctccctagtgggatcatttga

SEQ ID NO: 43141 - DNA, 201 bp, Homo sapiens
cctcagaaggggactgttgcccgcccaggcccccttgccacagactctgtggactggggtgggggacgcacaggggagccccatctcacaacctgtccctstaaaaacccggggtgggaacagggaagcaaagccatttataaagctttaaaaccatttatggtcccagggggcagataaacaattcagcgctattctcgc

SEQ ID NO: 43142 - DNA, 201 bp, Homo sapiens
tgaactgtggtctgatgtcaggctgggcgctggtggagctgccagcggagtgtgtgtctgtcggccatgcctggccctgggacctggcgccgtctcgggcrttgctgctcctcggcaggcgtgtatctgcagagcgaggctgagaggctccagctggaccagcctgggtgttggagggtggctgctgacagccctgggcac

SEQ ID NO: 43143 - DNA, 201 bp, Homo sapiens; identical to SEQ ID NO: 7555

SEQ ID NO: 43144 - DNA, 201 bp, Homo sapiens; identical to SEQ ID NO: 7554

SEQ ID NO: 43145 - DNA, 201 bp, Homo sapiens
ggaaaaggagatacatcagatttgatgtggcacaccatgttcacccctggagccctcacccctcaccatgtgaccttgtgcttttctctccccatgctagrctccttggctctcttgtttccttgtctgtaaaatgggcataataataatctttgccttggctgtcccggcaattgaaggagacattggtgaagggtgcca

SEQ ID NO: 43146 - DNA, 201 bp, Homo sapiens
gcggcccccactgcattgaaatcagcaccaatgccgccctactgtgtgtgtgcgctgtgtcgccccctggtggccggaggactgcagtgggaaaccaggtycttgccttcatggggcttaggtctgatgcagggaaggcggtgagtttaccccgtccctacaggcaagctgagggtgggggatggaaggaaaaggagatac

SEQ ID NO: 43147 - DNA, 201 bp, Homo sapiens
gctggggatagagctgggaaggcagacattccaggtgctgttgggaactgccctccaggccccgcagactcccttctgccagcccacccccagccgggctmtggataacatctcggagaccaaccgcggcagcacagggcagccgagcacttcctcgtctgtttattactgaacgcaggcatctgggagcccgcggagcat

SEQ ID NO: 43148 - DNA, 201 bp, Homo sapiens
ctacagcctggccacagcctgagcactcatgtctctacccaaggtcaagcgaccagcagggaccggccagtgtctcaggccttaattccatttcccaggasagaggccggctggcccagcctggggtgcacgtccatcccaaacccaataaactgtggccgaaaggacagcagcagagggctcagaagtggccaccagcct

SEQ ID NO: 43149 - DNA, 201 bp, Homo sapiens
cttccatgtgtctactggctctcggggctctcctgggactccaggcgtgtccccactgagcagagagtccacctgctcctgtccgtaaggctgagtcagcragggctttactgagcatccaggagttttctcgaacattatctcaaggtgctgggccattttggtgggtaaaggcctggaagtgcatcaagcctgtgcttc

SEQ ID NO: 43150 - DNA, 201 bp, Homo sapiens
agggtggtcatggcagtgcaaggtagacccagaagggaggcagctgctcatgagtggggtggtccgggcttgggccttggaagacagaccaggatgccccrgtagctgggccctgccctatccagagcctgcctgcctgctgagggacccaaggagagaggctttctgccaacgcagggggcagggccaggagcttcagag

SEQ ID NO: 43151 - DNA, 201 bp, Homo sapiens
cagacaacaggctgggaccagtaggcacgcggggcctgcaaagggggcagggtcacttttggttcactgagaggtgtggatctgggctggcctgttctccrtcctctcggcacacacacagccacaaacctcagggcaccagctcattctgatccctgataaagggaggaatggaacctctgagccttccctctgcaggcc

SEQ ID NO: 43152 - DNA, 201 bp, Homo sapiens
gccagggctggcgctgctgtgaaaggggcacggatggctgatgtgtcacagctgatgtgagttactcaagctggagtctagacagggctgcctccgtggggcccagaaggcagaggggcacccactggcacatggcgaggctctggagtcacccggaggccccacaggaagtgcagcagaaggggaaaacagcaggagagg

SEQ ID NO: 43153 - DNA, 201 bp, Homo sapiens
tgggaccagtaggcacgcggggcctgcaaagggggcagggtcacttttggttcactgagaggtgtggatctgggctggcctgttctccgtcctctcggcayacacacagccacaaacctcagggcaccagctcattctgatccctgataaagggaggaatggaacctctgagccttccctctgcaggccgcatgctagggt

SEQ ID NO: 43154 - DNA, 201 bp, Homo sapiens
ggccctgccacccagagagggcgtgggctacgggcccggagcaagacacctccaccgctggctgtgggccctgggcccctcggctgggggctgctggggggctggggagtgggagccacaaacacaggatccacgcaggaacacggacaggttcccacggcaggggtggctctgtctgggggaggccactgggtgccggag

SEQ ID NO: 43155 - DNA, 201 bp, Homo sapiens
atgaaaatgcagggaagcaggttacaaaaccatatgttcggcctgactgcatttgggtaaatttaaaaacgtgcaagcttgtagagccaggctggaagggygccattcattgacagcatgctacactaagcatggagagacacgcttgtaaaagtgtcacaaaaccctgtgctattagcatccaccttctacggatgtgga

SEQ ID NO: 43156 - DNA, 201 bp, Homo sapiens
attcctggactttagggattgaaaggaccatcctgattgcagcgcctcagtgcacacgcgtgcaggcacactcagaggcaagaacacactgggggggggggtgctgccttagtttccccagagccccaagtccttcagaagcccccctaaagctgtgatggacgctgctgtggctcccagtctgagaacaagctggcctca

SEQ ID NO: 43157 - DNA, 201 bp, Homo sapiens
caggcagcaccgaggaggtgctgggcacagaacctggcatacagtaagtgtataataaatgttggcagaaaggagaagccgggaggaaacagtaagacagraagatgtgggttgggggacacaggaggagagaagaacagcgaggtgagggcgggcaaagggtgaggtgggcagagaggcctcagaccccggggtctcagg

SEQ ID NO: 43158 - DNA, 201 bp, Homo sapiens
gggcccgcccacacctctggcttcctctgtgcatcctgtgaagtctgtttctgatgcgttggcgtggggggtgggctgggtggggtggggatgagggcccrgccctcatgattccatttcccaattcctttctggtctccatcctctctgtagatatgtagatctctttgaaacgaagcaagcacccatccctcccagctc

SEQ ID NO: 43159 - DNA, 201 bp, Homo sapiens
ggtggggtggggatgagggcccagccctcatgattccatttcccaattcctttctggtctccatcctctctgtagatatgtagatctctttgaaacgaagyaagcacccatccctcccagctcactcggctccaccgtggggacctgctgggggagccgctggctccctgaggaaagtgaaagccaataaaacatctccca

SEQ ID NO: 43160 - DNA, 201 bp, Homo sapiens
ccacgtttgattttgagtttcccggtggctatccatcttccagcattgagaactaccagagtggactctgaacccctggacagagggttgtggggggggaaaacaggctgggtcccctgggacaagtgacagagcatctctgggcctcagttttagcctccacacaatggggtaatcgcgatgcctatatcgtggggacct

SEQ ID NO: 43161 - DNA, 201 bp, Homo sapiens
accactttattaacgtagatgagcactgacgctgactgcaggggcgggggccgaggtccatccccaaacgtcccgtgggcaagcgcctctgcccggggtaraaagtgcggcgggaagagagctccatgggaggggctccataagagggagcacgcctgggcctccttggctgcctgagcccctctcaccccatggcctctg

SEQ ID NO: 43162 - DNA, 201 bp, Homo sapiens
gccacgtttgattttgagtttcccggtggctatccatcttccagcattgagaactaccagagtggactctgaacccctggacagagggttgtggggggggaaaacaggctgggtcccctgggacaagtgacagagcatctctgggcctcagttttagcctccacacaatggggtaatcgcgatgcctatatcgtggggacc

SEQ ID NO: 43163 - DNA, 201 bp, Homo sapiens; identical to SEQ ID NO: 7573

SEQ ID NO: 43164 - DNA, 201 bp, Homo sapiens
catgtgtctactggctctcggggctctcctgggactccaggcgtgtccccactgagcagagagtccacctgctcctgtccgtaaggctgagtcagcgaggsctttactgagcatccaggagttttctcgaacattatctcaaggtgctgggccattttggtgggtaaaggcctggaagtgcatcaagcctgtgcttcctcc

SEQ ID NO: 43165 - DNA, 201 bp, Homo sapiens
attcctggctgggggcagagtttccgggccacgctgctggctggggtctggggtgccttccatgtgtctactggctctcggggctctcctgggactccagscgtgtccccactgagcagagagtccacctgctcctgtccgtaaggctgagtcagcgagggctttactgagcatccaggagttttctcgaacattatctca

SEQ ID NO: 43166 - DNA, 201 bp, Homo sapiens
gccgaggatgtaggccttggcttctccctggctcctaccacgagcgctgggcatctcaggtgaacgaggcagacagaagccttcattaagcgtcgcctggrccctgtaccatgcaaggcagtggcgggggctggggctggggcacaaaataaataagctctggaggggtccgttcccgtgggctttacggcaagtgagggg

SEQ ID NO: 43167 - DNA, 201 bp, Homo sapiens
aatgctgttctgtcggccccttgacacccagcggcccctcaggcagaggagaccttggtaagggctggaattcctggctgggggcagagtttccgggccaygctgctggctggggtctggggtgccttccatgtgtctactggctctcggggctctcctgggactccaggcgtgtccccactgagcagagagtccacctgc

SEQ ID NO: 43168 - DNA, 201 bp, Homo sapiens
acactgtgtgccctgcttctgctgggcagtgaaccacagaccctaagagcccctccatggtactgaccccagggggctctccagctggggtctggggggakcttctagaaatctgtgaaaccccagaagtggccagcaaaatgccatggtccctgtgctctttctgggggcccctcaaggaatccaggcaaccacgggggc

SEQ ID NO: 43169 - DNA, 201 bp, Homo sapiens
gagcctgcctgcctgctgagggacccaaggagagaggctttctgccaacgcagggggcagggccaggagcttcagagctggtacctctctcaggatccccrgaagcttccttcacaaagggcaatggtagtatccagggttctttctcaacctggccccatgtgtcccatgtcctgaccgagaatgctgttctgtcggccc

SEQ ID NO: 43170 - DNA, 201 bp, Homo sapiens
cccctgacatggttgggtggcagtcctgagaaaggcagggacccactgctccccatcacaccccacccctgccttactcccacccaactgcccagcagctycggctggcccaacgtggaaacagcttccattctttaagagcacagagacccctgggcaccacaatctgcacttttgtgccaaacacacactgtgtgccct

SEQ ID NO: 43171 - DNA, 201 bp, Homo sapiens
ggccatgctggttcttacaacccctgacatggttgggtggcagtcctgagaaaggcagggacccactgctccccatcacaccccacccctgccttactccyacccaactgcccagcagctccggctggcccaacgtggaaacagcttccattctttaagagcacagagacccctgggcaccacaatctgcacttttgtgcc

SEQ ID NO: 43172 - DNA, 201 bp, Homo sapiens
ttctgccagcccacccccagccgggctctggataacatctcggagaccaaccgcggcagcacagggcagccgagcacttcctcgtctgtttattactgaasgcaggcatctgggagcccgcggagcatgaaattaggaacaaatgtgcaggaggtctagacaggaactctgcgggctgctctcctccgatcgaggacgccg

SEQ ID NO: 43173 - DNA, 201 bp, Homo sapiens
aggccaggcctcccaccagcatgatctatctgagccccccatgacactgcctgctgctctgccccagacagggccagtggttcccccatctcccacgatcyccgactcggtctcagcagaaaggggctgggactggtcagtgatttttgaacagggtctgcgattccttagtgccaaagcagggaatgctactggcttccc

SEQ ID NO: 43174 - DNA, 201 bp, Homo sapiens
ccccgggcccgcccacacctctggcttcctctgtgcatcctgtgaagtctgtttctgatgcgttggcgtggggggtgggctgggtggggtggggatgaggrcccagccctcatgattccatttcccaattcctttctggtctccatcctctctgtagatatgtagatctctttgaaacgaagcaagcacccatccctccca

SEQ ID NO: 43175 - DNA, 201 bp, Homo sapiens; identical to SEQ ID NO: 7553

SEQ ID NO: 43176 - DNA, 201 bp, Homo sapiens
caagcatgtgtgctacagggcaggcagaggccctggggcggggtggggggtggggggtggcggggcagggtggaggccagacaccaccaagcgtgcacgargagcctgggacctggcaagggcccggggcctggaccccaatctctgagcagggccgcactggggtccccagctcgctcctcacagactcttggactctct

SEQ ID NO: 43177 - DNA, 201 bp, Homo sapiens
gtggtgcagactgtttgttgtgggccgatcaaatgcatctcgcgaagtcaccaccccctccagtggctccccgtccagatgttccccttggaaaaccccgmtgagctccccagaacaccagagacatctgctggccccagtcaccctgctgtcctcctgccaagatcccacaggcggtggctccctcacactccccccaat

SEQ ID NO: 43178 - DNA, 201 bp, Homo sapiens
tcatcacgtgccctgcacctggcaccctgtccctcctccaggtgcccaggccctgcttcagctgctcccctccctgccccctgtgtgccagcccctggccrctccagctgagtcatcctggattcaggtcttggccccacagtggccctgccatctgaagctgacccttttcccaaagtacaggtctcagcatggctccct

SEQ ID NO: 43179 - DNA, 201 bp, Homo sapiens
ttgaaaggaccatcctgattgcagcgcctcagtgcacacgcgtgcaggcacactcagaggcaagaacacactgggggggggggtgctgccttagtttcccyagagccccaagtccttcagaagcccccctaaagctgtgatggacgctgctgtggctcccagtctgagaacaagctggcctcacatcgaggaagcagcccg

SEQ ID NO: 43180 - DNA, 201 bp, Homo sapiens
cggttctgtccggcccaagctggtgaccttgagcaagtccatcccaggggcctcttaattcctggactttagggattgaaaggaccatcctgattgcagcscctcagtgcacacgcgtgcaggcacactcagaggcaagaacacactgggggggggggtgctgccttagtttccccagagccccaagtccttcagaagccc

SEQ ID NO: 43181 - DNA, 201 bp, Homo sapiens
ggccacgtttgattttgagtttcccggtggctatccatcttccagcattgagaactaccagagtggactctgaacccctggacagagggttgtgggggggraaaacaggctgggtcccctgggacaagtgacagagcatctctgggcctcagttttagcctccacacaatggggtaatcgcgatgcctatatcgtggggac

SEQ ID NO: 43182 - DNA, 201 bp, Homo sapiens; identical to SEQ ID NO: 7568

SEQ ID NO: 43183 - DNA, 201 bp, Homo sapiens
ggggggggaaaacaggctgggtcccctgggacaagtgacagagcatctctgggcctcagttttagcctccacacaatggggtaatcgcgatgcctatatcrtggggacctttggaagataaatccaggcagcaccgaggaggtgctgggcacagaacctggcatacagtaagtgtataataaatgttggcagaaaggagaa

SEQ ID NO: 43184 - DNA, 201 bp, Homo sapiens
gggccacgtttgattttgagtttcccggtggctatccatcttccagcattgagaactaccagagtggactctgaacccctggacagagggttgtggggggggaaaacaggctgggtcccctgggacaagtgacagagcatctctgggcctcagttttagcctccacacaatggggtaatcgcgatgcctatatcgtgggga

SEQ ID NO: 43185 - DNA, 201 bp, Homo sapiens; identical to SEQ ID NO: 7570

SEQ ID NO: 43186 - DNA, 201 bp, Homo sapiens; identical to SEQ ID NO: 7571

SEQ ID NO: 43187 - DNA, 201 bp, Homo sapiens; identical to SEQ ID NO: 7572

SEQ ID NO: 43188 - DNA, 201 bp, Homo sapiens
tgtaactcctagtgaagtaacagatccaggtcacgcacaggatgctgcagcaatgggctgggagaccccccggaatctggcaatggaagaactggccgagrgcagctgcagtcattagctgattgtgacgtcaagatgagggggacagcagacatcaggcccctgggagtgatgcaacaggaagccagtttagaggagaaa

SEQ ID NO: 43189 - DNA, 201 bp, Homo sapiens
aggaccagggagcccccaggaggctttggcacagccccatgatggaggccaggaggcctgatcctgacactccctgtcctgccctacggttcctgaggttrgcagacagtgacttcctggtggggaccaggccagggggggacaatcacctagtcctttcagcttcgtgcttcctgcttatggctccagggcttcccagcc

SEQ ID NO: 43190 - DNA, 201 bp, Homo sapiens
gaagttttgaagttctgtggtgtgtattaaagttcaggaaggcttcctgggagaggagggcacgtgctgggctttgatggcgtggtaggtccgggggggggatgggcatcccagagggtggggcacagctagagcagaggggaggcaggagggtggaggcccagggaggccgtgtttttgggagctgctcggagtgaactg

SEQ ID NO: 43191 - DNA, 201 bp, Homo sapiens
aactgaacccagggagaggcctctgacccaaggtcacccgcaagagtagagcaggacagaggccccgcagactcgtatcacctgggccacagctgagtagmgtcctggggtccccagggaggaggctgaaggtaagcactcagggagggcagcaggtggtccatattcttcccccattaaatgaaggggtgggacctggtc

SEQ ID NO: 43192 - DNA, 201 bp, Homo sapiens
gggaccgtggtcatcaccgggggcatcttggcgactgtgattttgctctgcatcatcgctgttctgtgctactgccggctccaggtattcccgggcggcgsggaaggggacagggcagggaggcccagagggtgcccctacctcgggagggagccccgcctgaaggtcacaagggtcacggcccgggaagtggggaagagc

SEQ ID NO: 43193 - DNA, 201 bp, Homo sapiens
atgctagatccctcagcatgctagatctctcaatatgctagatccctcagcatgctagatccttcaacctgctagatccctcagcatgctagatccttcarcatgctagatccctcaacacactagatccttcagcatcctagatccttcagcatcctagatccctcaacatgctagatccctcagcatgctaatccctca

SEQ ID NO: 43194 - DNA, 201 bp, Homo sapiens
atccacgcaggaacacggacaggttcccacggcaggggtggctctgtctgggggaggccactgggtgccggaggctctgccccaggagcacaaaggtccaygggccgtgggaagtcccctctcgacagccgaggctcagtgccacgtctcttaggccagcgtgccccgcaggaggggggtctgtggaggccccagaagctg

SEQ ID NO: 43195 - DNA, 201 bp, Homo sapiens
cacaaaggtccacgggccgtgggaagtcccctctcgacagccgaggctcagtgccacgtctcttaggccagcgtgccccgcaggaggggggtctgtggagsccccagaagctgcagcagccccaggaggggcgcttggtcttcatctggaaggggctgcagctgccgggcctaggagtgggggggcctgcaggagcggcag

SEQ ID NO: 43196 - DNA, 201 bp, Homo sapiens
gcagatcacaggcctgtctgccaacgggcttcaccaacggatcgcaaccacggacgatgtcggtcccctggtagcacttgacgtctcgcatcctcacgccyaccccgcaggtcttggtgcactggtgtgggagagacagaaggcatggggaaagcctcctgatggggcaggggcctgggcagggggcggggaacctgcaca

SEQ ID NO: 43197 - DNA, 201 bp, Homo sapiens
ctcccctgggaagccccaggcccaccctcagcctttcccctcctcactcgggggtcctttggtgggcaacagggaatgagtgagtgtgtgttctccctccygaacaagcatgtgtgctacagggcaggcagaggccctggggcggggtggggggtggggggtggcggggcagggtggaggccagacaccaccaagcgtgca

SEQ ID NO: 43198 - DNA, 201 bp, Homo sapiens
tggctccccccgtgccatggctcatcacccagcaaggtacctgcacctagtgggtccgtgtttcctggccccacagtggcccccccatctgaagctagtgmtcttcccaaactacagacctgggctggctccctggggccctggaaccccagtcagcctccctgccccttcccactctccctcccaccgggcttagccttt

SEQ ID NO: 43199 - DNA, 201 bp, Homo sapiens
cacaagcttcttcagggatgtgcataaatatttcagaccacgaggtggtcagaacaggagagcaggggtttctgggagaggctgctgagctcagcatccasaaacccagtccttttcccttctcccatctcctctaccaacaacttggcgcccacgaccattcagggtgactggcctgtgtctcactctgcagcagatgtg

SEQ ID NO: 43200 - DNA, 201 bp, Homo sapiens
gctgtgtcgccccctggtggccggaggactgcagtgggaaaccaggtccttgccttcatggggcttaggtctgatgcagggaaggcggtgagtttaccccrtccctacaggcaagctgagggtgggggatggaaggaaaaggagatacatcagatttgatgtggcacaccatgttcacccctggagccctcacccctcacc

SEQ ID NO: 43201 - DNA, 201 bp, Homo sapiens
gggcaagaccccagctcactcagggcctgcggtgcaagtgtgggccgcggcccccactgcattgaaatcagcaccaatgccgccctactgtgtgtgtgcgstgtgtcgccccctggtggccggaggactgcagtgggaaaccaggtccttgccttcatggggcttaggtctgatgcagggaaggcggtgagtttaccccgt

SEQ ID NO: 43202 - DNA, 201 bp, Homo sapiens; identical to SEQ ID NO: 7558

SEQ ID NO: 43203 - DNA, 201 bp, Homo sapiens
cattcgcccttgaggtccctcgcagccccggccccccgggcccgcccacacctctggcttcctctgtgcatcctgtgaagtctgtttctgatgcgttggcrtggggggtgggctgggtggggtggggatgagggcccagccctcatgattccatttcccaattcctttctggtctccatcctctctgtagatatgtagatc

SEQ ID NO: 43204 - DNA, 201 bp, Homo sapiens
gggacttgcccggggttttcaggccctaccctcccaccccccatttcctgacccacggctgggagatcgggaaactgcagcccagaatgttcttggtgcakctcatctgccttttcctggcggcctgaagccctggcctggcctacagctctgtgctgctgttcccgccccctgggaaacactggggatcagctaggtgag

SEQ ID NO: 43205 - DNA, 201 bp, Homo sapiens; identical to SEQ ID NO: 7560

SEQ ID NO: 43206 - DNA, 201 bp, Homo sapiens; identical to SEQ ID NO: 7559

SEQ ID NO: 43207 - DNA, 201 bp, Homo sapiens
tcgggggatgctggtgtaagcccaatgtgagggacgggtgctatgggggcaccagggaggactggaccagggagggctcacattggctgtggagaaggccrggcagggtcccctgcagggacacaagccaggaggaggggcaggatgagcttgtgtgtgcacggccccaacaggaaaatgtgggtgtcatctccgccacag

SEQ ID NO: 43208 - DNA, 201 bp, Homo sapiens; identical to SEQ ID NO: 7561

SEQ ID NO: 43209 - DNA, 201 bp, Homo sapiens
agccaggtttcagtgcattcgggggatgctggtgtaagcccaatgtgagggacgggtgctatgggggcaccagggaggactggaccagggagggctcacaytggctgtggagaaggccaggcagggtcccctgcagggacacaagccaggaggaggggcaggatgagcttgtgtgtgcacggccccaacaggaaaatgtgg

SEQ ID NO: 43210 - DNA, 201 bp, Homo sapiens; identical to SEQ ID NO: 7562

SEQ ID NO: 43211 - DNA, 201 bp, Homo sapiens; identical to SEQ ID NO: 7563

SEQ ID NO: 43212 - DNA, 201 bp, Homo sapiens; identical to SEQ ID NO: 7564

SEQ ID NO: 43213 - DNA, 201 bp, Homo sapiens; identical to SEQ ID NO: 7567

SEQ ID NO: 43214 - DNA, 201 bp, Homo sapiens
tggggctgcgaacccctccacgcctcagtctccccacctgcaaaatggagataacagtcacacctgcacgttgctgggcggaagagatgagtggatcgttktgaagcgctcagcactgcgcctggcctgagtgagacccatagcactggttaaacagctgaggtgtcaggcctgggcttgggccaccccactcccaccgtg

SEQ ID NO: 43215 - DNA, 201 bp, Homo sapiens
gctcagagacgggaagggacttagccaagggcaccagctgcccaaaaggagtgtcacagtgagcaatccttcccacctgcactccagggccatccagagtytccatgtctccctgagagatgagggggagccatcggggcagggcgaggcaacacagctgccagtgcctgtgacccccggctctgctgatgtggggctgcg

SEQ ID NO: 43216 - DNA, 201 bp, Homo sapiens
aatttaggaattttgtaagccgcttgtcaaaccttgcttgaactgaaactggccatggtaagaaaatctacaccacaaaaatcagcaaatgctcccagccrggtgctttgagagctggtttatcagcacagcccaggacagggatgagctgaatgcagcagccactgacagcatcactccagcctccctgcgttgtgtttg

SEQ ID NO: 43217 - DNA, 201 bp, Homo sapiens
gttatgttctcaattgttttcctcctcttactttctctcctgcctcgtttggacaggccagtggcattcgcccttgaggtccctcgcagccccggcccccygggcccgcccacacctctggcttcctctgtgcatcctgtgaagtctgtttctgatgcgttggcgtggggggtgggctgggtggggtggggatgagggccc

SEQ ID NO: 43218 - DNA, 201 bp, Homo sapiens
acaaacactgactgagccgccgctatgcaccggcatcggggggcagccaccaggaagaaggagtccacgcgcccaccagccgtctgtgccagctgcacctygtctggccctgccacctcctcatcagggctagggggatgctcctccccagcaccccaggctgtccttctggggtccccgcttcatcgcttcatggctccc

SEQ ID NO: 43219 - DNA, 201 bp, Homo sapiens
acagaaggcatggggaaagcctcctgatggggcaggggcctgggcagggggcggggaacctgcacactcccccttccccaccccacccttcccaggcggcyatgagtcccaactgacacaggacccgtggaagcccatttgaaactagacctgcggctccaaggctgagttgagatgccgacaaaagggcactggctggca

SEQ ID NO: 43220 - DNA, 201 bp, Homo sapiens
cacagttggtgcctggctggtcctggcagctgtcatctggagaaggaacacagagcgaagcagggcagtttcaggaggtggccaaggggcgaaaaccccarggacccccacgtgccgttttccaggggcagtgggcctcccaccccgtggtgggtctccatctctagctctctgccccctccttcctggcccatctctgtc

SEQ ID NO: 43221 - DNA, 201 bp, Homo sapiens
ccagtgtccccagacgccctccctgcacactccccacgcctctcgttgccttttatctgcgtctgtctttctcctcagagcaggtgctgtggtcccccacrgcccacccctgcccctgaggcctcagtgagctggagggaccccacacagccaggcctgggccctccaatccccaggccacccacttctccagccagaggc

SEQ ID NO: 43222 - DNA, 201 bp, Homo sapiens
gccggaggctctgccccaggagcacaaaggtccacgggccgtgggaagtcccctctcgacagccgaggctcagtgccacgtctcttaggccagcgtgcccygcaggaggggggtctgtggaggccccagaagctgcagcagccccaggaggggcgcttggtcttcatctggaaggggctgcagctgccgggcctaggagtg

SEQ ID NO: 43223 - DNA, 201 bp, Homo sapiens
aatgttggcagaaaggagaagccgggaggaaacagtaagacaggaagatgtgggttgggggacacaggaggagagaagaacagcgaggtgagggcgggcamagggtgaggtgggcagagaggcctcagaccccggggtctcaggactcggttctgtccggcccaagctggtgaccttgagcaagtccatcccaggggcctc

SEQ ID NO: 43224 - DNA, 201 bp, Homo sapiens; identical to SEQ ID NO: 7551

SEQ ID NO: 43225 - DNA, 201 bp, Homo sapiens
gaaggccaggcagggtcccctgcagggacacaagccaggaggaggggcaggatgagcttgtgtgtgcacggccccaacaggaaaatgtgggtgtcatctcmgccacagttaccacccccacaggacacccaggtggccagtgccctgaggctgggcctgggtgtctcccccatccggaacagcacctggttcctggcctaa

SEQ ID NO: 43226 - DNA, 201 bp, Homo sapiens; identical to SEQ ID NO: 7552

SEQ ID NO: 43227 - DNA, 201 bp, Homo sapiens; identical to SEQ ID NO: 7556

SEQ ID NO: 43228 - DNA, 201 bp, Homo sapiens
tactccaatctcttcctccaccccataccccagcaagaaaaaaaaataaaaatgaggcttgggaaattgaggaagggaagtggcgccagctcccactgctytgtgagaggtgattgtgaagaatttaggaattttgtaagccgcttgtcaaaccttgcttgaactgaaactggccatggtaagaaaatctacaccacaaaa

SEQ ID NO: 43229 - DNA, 201 bp, Homo sapiens
gcctacccttggagggtgtcatctggctttttcgccttatcacttgatgtttgtttacattttcataatcctgactttgttgggtgtctaaatcatctggwttcctggcaggaccaattaaaaatccaagtcccccagagttgggaggaatcagcgtctaaaccctgccacacccattgtacagataagaaaactgaaccc

SEQ ID NO: 43230 - DNA, 201 bp, Homo sapiens
cacatcctggggtgcttttttcccctcagcttgtcttctcagttctctagaatagcacgagtgacttttgtggtgaggaagcgtgatgctctaaagctggyggcgtgtgttgcaggctgttgatggagaagggggcggatgacagccgggaccgtggtcatcaccgggggcatcttggcgactgtgattttgctctgcatc

SEQ ID NO: 43231 - DNA, 201 bp, Homo sapiens
cagataaacaattcagcgctattctcgccaaattgccttggctggcagtgcggaggcttcagggagctggaagaggggtggggctcgagtcacaagcaggyggcagagtagcctctgccaggctgttgctgggcctgacccgcatggctctgcctccgaggcttggcctgtgctgttcccagcaccaacaggccctctcct

SEQ ID NO: 43232 - DNA, 201 bp, Homo sapiens
aaactagcagagtctgaaattcagcacgggacgtgtggcccagatggtggttagcagggggtctcctgccagggaaaggtgggtgtggggagggggctccygggggaggcaggtggaggcccgtgtctggctctgctgccaggtgtttcctgccccacccccagctccacgccattcattcctcggtgccggtgccgcagg

SEQ ID NO: 43233 - DNA, 201 bp, Homo sapiens; identical to SEQ ID NO: 7565

SEQ ID NO: 43234 - DNA, 201 bp, Homo sapiens; identical to SEQ ID NO: 7566

SEQ ID NO: 43235 - DNA, 201 bp, Homo sapiens
cctggcttcctgggcagatagcagcagtgaggtcctggtgagcactgggctcccaccctcccctcccctcccctcccaggctcgccccccgttctcccccycgttcgcccatcacctttttctcttttctctgtcccttccctatctgctccaggggctcccagggagatcccaggaaagagcttcagggaccccagcctg

SEQ ID NO: 43236 - DNA, 201 bp, Homo sapiens
ctggccttgaaggtcctgagacaatggggggattcctttggcacacccacctggccccaggccccaagtggggcttggctgagccctcctggaatccctgycctcaggggaggcccaggcttggggagcccccaggctcgtggcagggataaggctcattgaacacaaatgtgtcctggggggaggcacagctggggcctg

SEQ ID NO: 43237 - DNA, 201 bp, Homo sapiens
gctgctcctggcttcctgggcagatagcagcagtgaggtcctggtgagcactgggctcccaccctcccctcccctcccctcccaggctcgccccccgttckccccctcgttcgcccatcacctttttctcttttctctgtcccttccctatctgctccaggggctcccagggagatcccaggaaagagcttcagggacccc

SEQ ID NO: 43238 - DNA, 201 bp, Homo sapiens
acagggccagtggttcccccatctcccacgatctccgactcggtctcagcagaaaggggctgggactggtcagtgatttttgaacagggtctgcgattccytagtgccaaagcagggaatgctactggcttccccactgcccagcctcacagctcagggtgcggggacttctcacctttgcctctgtggctgctcctggct

SEQ ID NO: 43239 - DNA, 201 bp, Homo sapiens
tctttctgttcaaggtccttaagtagcgtggtagccttcctgacagaagggccccacaggccaggcctcccaccagcatgatctatctgagccccccatgrcactgcctgctgctctgccccagacagggccagtggttcccccatctcccacgatctccgactcggtctcagcagaaaggggctgggactggtcagtgat

SEQ ID NO: 43240 - DNA, 201 bp, Homo sapiens
cccacccccaccccagagttgggatccaacctccttgggccatgcagcccaggtgtgccctcttctgggcaagcaggacctggagccaaaggtggcaactycaggcctgacagcagcggccacaactcaagctttatttttgcaagttcttccccaaatctttctgttcaaggtccttaagtagcgtggtagccttcctga

SEQ ID NO: 43241 - DNA, 201 bp, Homo sapiens
ctgattgtctcccacccagggctgcctcagtctccccagatccacagtgaggggtggtccctcctctctcatttcccagggggtccaggcactagctggcmgtcaggaggatctgattctctccccacgcagggctgcctcagtctccccagatgcacagtgaggggtggtccctcctctcccatctccctgagggtcctc

SEQ ID NO: 43242 - DNA, 201 bp, Homo sapiens; identical to SEQ ID NO: 7576

SEQ ID NO: 43243 - DNA, 201 bp, Homo sapiens
gcttaatagtcctcctattccctgcagagggtaattttttggaacagattcttgattagttttttgatgttaggaagatgagaattcacaaaataactgaygacttcatacactgtatgctgtttctaggaatcctgaaagcatttacgagcaaatgctctcctcagttgtctggagggcatctggttgcctgtgttcaaa

SEQ ID NO: 43244 - DNA, 201 bp, Homo sapiens
aattgcctattcaatggataatttattctatttcatacatatttttggcggagaagtcttccatgcataatggaaacaaagaaaaatcctttatacatatraatgaaaccacacccacctacccctaatacgacaaaacaatgagaccaaatcttgatttctgacataagtgtcgagttactatttgcttaatagtcctcc

SEQ ID NO: 43245 - DNA, 201 bp, Homo sapiens
tgtcagatgagtaggttgcaaaaattttctcccattttgtaggttgcctgttcactctgatgatagtttcttttgctgtgcagaagctctttagtttaatkagatcccatttctcaattttgtcttttgttgccattgcttttggtgttttggacatgaagtccttgcccatgcctgtgtcctgaatggtgatgcctaggt

SEQ ID NO: 43246 - DNA, 201 bp, Homo sapiens
attactgacttcaatattttttaggcttttaaaaaatgcgtcctttcatttccacagtaaaattgggaattctcataataaggcatatgaatgggaagagygagtacttctgcaacactaaaaagtattcctatcatttatatcatcacatatatgtaaatatagatatagttttactattgtctaatgagtattgcctaa

SEQ ID NO: 43247 - DNA, 201 bp, Homo sapiens
acttacctaaacaattttacagtaaaaacatgtagctcttatgttaatacattcttcctgttaataaaatgttttatttgatcaattttttttttttttttgagacagagtcttgctctgtcacccaggctggagtgcaatggtgcgatctcagctcactgcaatctccacttcccgagttcaagggattctactgcctca

SEQ ID NO: 43248 - DNA, 201 bp, Homo sapiens
tttagtacaaagaaaaatgttttatagaaaagtcacatgctgtcatcattgggcatgactacagagaggattgaatgactagaggcagctaatcaacactscaaatcgaagcctaacagaggttgttgattgatgggctggcaagtccacttcagtggcagtggttgcttggcagcatagttggctgaaatatgggctcgt

SEQ ID NO: 43249 - DNA, 201 bp, Homo sapiens
tggaatactatgcagccataaaaaatgatgagttcatgtcctttgtagggacatggatgaaattggaaatcatcattctcagtaaactatcgcaagaacamaaaaccaaacaccacatattctcactcataggtgggaactgaacaatgagatcacatggacacaggaaggggaatatcacactctggggactatggtggg

SEQ ID NO: 43250 - DNA, 201 bp, Homo sapiens
gctagccagttttcccagcaccatttattaaatagggaatcctttctccattgcttgtttttctcaggtttgtcaaagatcagatagttgtagatatgcgkcgttatttctgagggctctgttctgttccattgatctatatctctgttttggtaccagtaccatgctgttttggttactgtagccttgtagtatagtttg

SEQ ID NO: 43251 - DNA, 201 bp, Homo sapiens
ttgatttttgtataaggtgtaaggaagggatccagtttcagctttctacatatggctagccagttttcccagcaccatttattaaatagggaatcctttcyccattgcttgtttttctcaggtttgtcaaagatcagatagttgtagatatgcggcgttatttctgagggctctgttctgttccattgatctatatctctg

SEQ ID NO: 43252 - DNA, 201 bp, Homo sapiens
ctcaaaaactaaagatatgtaatagctgtgaccatgtttacacttctgaaataaataagaataatccagagttctgtaaaatggaacaaaaatagaaaccmtacaacacatggaattcagaagtttagtacaaagaaaaatgttttatagaaaagtcacatgctgtcatcattgggcatgactacagagaggattgaatga

SEQ ID NO: 43253 - DNA, 201 bp, Homo sapiens; identical to SEQ ID NO: 7578

SEQ ID NO: 43254 - DNA, 201 bp, Homo sapiens
tgaattgtacatgtacaaatcaaatgaactaattaattgcctattcaatggataatttattctatttcatacatatttttggcggagaagtcttccatgcwtaatggaaacaaagaaaaatcctttatacatatgaatgaaaccacacccacctacccctaatacgacaaaacaatgagaccaaatcttgatttctgacat

SEQ ID NO: 43255 - DNA, 201 bp, Homo sapiens
tactatttgcttaatagtcctcctattccctgcagagggtaattttttggaacagattcttgattagttttttgatgttaggaagatgagaattcacaaartaactgatgacttcatacactgtatgctgtttctaggaatcctgaaagcatttacgagcaaatgctctcctcagttgtctggagggcatctggttgcctg

SEQ ID NO: 43256 - DNA, 201 bp, Homo sapiens; identical to SEQ ID NO: 7579

SEQ ID NO: 43257 - DNA, 201 bp, Homo sapiens
gaaatctgtagaaagtttggctggcaattatactttacgcttgaagagtactggaggcttgtgcaactatttatttgtgcaaatatttattgtcaactgaygcctgaattgtacatgtacaaatcaaatgaactaattaattgcctattcaatggataatttattctatttcatacatatttttggcggagaagtcttcca

SEQ ID NO: 43258 - DNA, 201 bp, Homo sapiens
ttagaagagggctgaataatgtggggaagtccattaagatgttattgaaatgttgatatttgggtctagagagtgactgtaggactggtaagacgtcagtraagcagaaaaatattcaggatttggatccaaaaggatataatatttttgcaagtagagttcataagtcaaacacctatttattgagcttactcctccttt

SEQ ID NO: 43259 - DNA, 201 bp, Homo sapiens
ttcaatgtaaagttgaaaatgaagatcatattacacagtgttttacaggcaatatgagtgttcggattttatcatcatgaaaatagcatgatgaaagttgwcttaatattgatgtaatatggagaatgaattagaagagggctgaataatgtggggaagtccattaagatgttattgaaatgttgatatttgggtctagag

SEQ ID NO: 43260 - DNA, 201 bp, Homo sapiens
atccatacctttaataaagcctatcacacaccaatgccttggataagttacacatgcctccagaaatctgtagaaagtttggctggcaattatactttacrcttgaagagtactggaggcttgtgcaactatttatttgtgcaaatatttattgtcaactgacgcctgaattgtacatgtacaaatcaaatgaactaatta

SEQ ID NO: 43261 - DNA, 201 bp, Homo sapiens
tccccagcttgtagttctggggtatttgccttaaatacatagcactgtggttggttctaagctgttgttctgtcctcatacagttgacatgaacattaacrcgtccaccagtaacacactgccctcacagtgcagccattcaaatcatggtgaggctttgtgagaaggaatttaaaagcattttaaaaggaatatttggtt

SEQ ID NO: 43262 - DNA, 201 bp, Homo sapiens
gtcctgatcactgtgagatttgagaaaatgcttatcctgttcactgtcatacctgagcacctccttcagcgtggttttttctctcaaagatgagtttacastaaccaacacattgaaatgtatgtgtgatgttattaatttccaatgagaaatagaattattgcattggcacaaattatcttgtcaacttgaatagtaaac

SEQ ID NO: 43263 - DNA, 201 bp, Homo sapiens
gaatatattcaatgtaaagttgaaaatgaagatcatattacacagtgttttacaggcaatatgagtgttcggattttatcatcatgaaaatagcatgatgraagttgacttaatattgatgtaatatggagaatgaattagaagagggctgaataatgtggggaagtccattaagatgttattgaaatgttgatatttggg

SEQ ID NO: 43264 - DNA, 201 bp, Homo sapiens
ttggagcccttggacttagcagaaccaggggactctgaagacgcagctttatagagctcagagcagggagtgggtggaggctggcagtggggctgtgtgcwgtgtgtgcagtacttggtatttctcccttcagtggacacttcaccagcctctctcctcccacccaccagagctaccctgaggaggtaagtggggacctca

SEQ ID NO: 43265 - DNA, 201 bp, Homo sapiens
acttcaccagcctctctcctcccacccaccagagctaccctgaggaggtaagtggggacctcatctcttcccccacagaggccctcaggcacctccttcayagcttcgaaatcctttagtgattagggtacagggatttgaaggagaggcagtctgtgatttaaggtaatttttattttcctacactccatttctctcccc

SEQ ID NO: 43266 - DNA, 201 bp, Homo sapiens
tcctcccacccaccagagctaccctgaggaggtaagtggggacctcatctcttcccccacagaggccctcaggcacctccttcacagcttcgaaatccttwagtgattagggtacagggatttgaaggagaggcagtctgtgatttaaggtaatttttattttcctacactccatttctctccccacatgcacatccccca

SEQ ID NO: 43267 - DNA, 201 bp, Homo sapiens
acctcatctcttcccccacagaggccctcaggcacctccttcacagcttcgaaatcctttagtgattagggtacagggatttgaaggagaggcagtctgtsatttaaggtaatttttattttcctacactccatttctctccccacatgcacatcccccatctagttggtgcctgaactgccactatgctggcttcgtgct

SEQ ID NO: 43268 - DNA, 201 bp, Homo sapiens
aaaattcactgaataatttgtcccagtcagagacattaggtttagctattaagactaattaaaaactgactgccagtcatagttgcttattgtctgttttycatcataaaaaagcaatttccccagcttgtagttctggggtatttgccttaaatacatagcactgtggttggttctaagctgttgttctgtcctcataca

SEQ ID NO: 43269 - DNA, 201 bp, Homo sapiens
agaaaaatgttttatagaaaagtcacatgctgtcatcattgggcatgactacagagaggattgaatgactagaggcagctaatcaacactccaaatcgaarcctaacagaggttgttgattgatgggctggcaagtccacttcagtggcagtggttgcttggcagcatagttggctgaaatatgggctcgtgtcctgcagt

SEQ ID NO: 43270 - DNA, 201 bp, Homo sapiens
aggttgcaaaaattttctcccattttgtaggttgcctgttcactctgatgatagtttcttttgctgtgcagaagctctttagtttaatgagatcccatttstcaattttgtcttttgttgccattgcttttggtgttttggacatgaagtccttgcccatgcctgtgtcctgaatggtgatgcctaggttttcttctaggg

SEQ ID NO: 43271 - DNA, 201 bp, Homo sapiens
gttcagctctgttattggcttactgaatggattcttcctgggcgtcagctctcctacaaaatgaggagctgaaaatgttgatcacttcaggacaagccagycttcattctcaattcctttgaaacttctaagtgggagaaatggcagagcacagaggagtccttcactcaagattttttagaatccctgctgcccagctac

SEQ ID NO: 43272 - DNA, 201 bp, Homo sapiens; identical to SEQ ID NO: 7574

SEQ ID NO: 43273 - DNA, 201 bp, Homo sapiens; identical to SEQ ID NO: 7575

SEQ ID NO: 43274 - DNA, 201 bp, Homo sapiens
gaacgtctcattaagcaacgaggagagaaaagcaaaacaaaattaaaacttacagatgacatctttggcaaaatcacatgacagaaaaatcttgcccccarttggagaggactgtatactaagcaaaaatctgggcatatggttttgagattgactggtgaaactgggaacaatacttgcaggctctaagtgctcataaac

SEQ ID NO: 43275 - DNA, 201 bp, Homo sapiens
aaagatatgtaatagctgtgaccatgtttacacttctgaaataaataagaataatccagagttctgtaaaatggaacaaaaatagaaaccatacaacacakggaattcagaagtttagtacaaagaaaaatgttttatagaaaagtcacatgctgtcatcattgggcatgactacagagaggattgaatgactagaggcag

SEQ ID NO: 43276 - DNA, 201 bp, Homo sapiens
taaaatgttttatttgatcaattttttttttttttttgagacagagtcttgctctgtcacccaggctggagtgcaatggtgcgatctcagctcactgcaayctccacttcccgagttcaagggattctactgcctcagactcccgagtaactgggattacagtcatgtgtgaccacgcctgggtagtttttatatttttag

SEQ ID NO: 43277 - DNA, 201 bp, Homo sapiens
atccatgttaaaatatagaaaggcaaaaccaagagagtcaggtgtggaggaatgtgacattctggacccttggtgaataagtgaggggttcaagccacaakgaaaaggcagagaactgaaataatgcttgagtataggcaagagaggagagacagcttagaatatacacaaaagatgtcatcacttgcacaagacagaatc

SEQ ID NO: 43278 - DNA, 201 bp, Homo sapiens
acttggctgcacacgggaattgcctatgagtttaaacacatgctgatttgtgagttctacttgcacagtgtcaaatttaattggtataggtttcttctgargaaaggaatattttaatgcttcttaaaataatctagcatacagcacaatttgagaatctgtggtctaaacagagattaaaacaaaatccatgttaaaata

SEQ ID NO: 43279 - DNA, 201 bp, Homo sapiens
agtcttgctctgtcacccaggctggagtgcaatggtgcgatctcagctcactgcaatctccacttcccgagttcaagggattctactgcctcagactcccragtaactgggattacagtcatgtgtgaccacgcctgggtagtttttatatttttagtagagacggggtttcaccatgttgtccaggctggtctcaaactc

SEQ ID NO: 43280 - DNA, 201 bp, Homo sapiens
caaagaagaatatgtgtgagtatgtacagcagccaaaattatgagaagaaatgaaatgaatgatcagaattattggaagacgacaagttcttatgtggtcktgcagcttctatgatccatggtaaggacttgaatttttatttcttatttcataaggtaagtgaagccattgataggtttctagtaaaagagtaacatcac

SEQ ID NO: 43281 - DNA, 201 bp, Homo sapiens
aaattagtcaaaggtttctatggggaagaacctggagcttatgacagatctaagggtgctgccaggctatagaaggtctgaaatgtaatctggttttttttgaactttccaaatctttggcactggaatctaagcatcattgtctctcctagttttagatatcaaccactcctagtcttcacttctcccaccatctcacct

SEQ ID NO: 43282 - DNA, 201 bp, Homo sapiens
aaagtcacaaagaagaatatgtgtgagtatgtacagcagccaaaattatgagaagaaatgaaatgaatgatcagaattattggaagacgacaagttcttakgtggtcttgcagcttctatgatccatggtaaggacttgaatttttatttcttatttcataaggtaagtgaagccattgataggtttctagtaaaagagta

SEQ ID NO: 43283 - DNA, 201 bp, Homo sapiens
aataaatgcactaaaatttaagctgtgataagaaaagtcacaaagaagaatatgtgtgagtatgtacagcagccaaaattatgagaagaaatgaaatgaawgatcagaattattggaagacgacaagttcttatgtggtcttgcagcttctatgatccatggtaaggacttgaatttttatttcttatttcataaggtaag

SEQ ID NO: 43284 - DNA, 201 bp, Homo sapiens; identical to SEQ ID NO: 7582

SEQ ID NO: 43285 - DNA, 201 bp, Homo sapiens
acacagacagttacagggagttataaatttttggggaaacaaagatactaatcaaataactaaacaagtacataataaatgcactaaaatttaagctgtgwtaagaaaagtcacaaagaagaatatgtgtgagtatgtacagcagccaaaattatgagaagaaatgaaatgaatgatcagaattattggaagacgacaagt

SEQ ID NO: 43286 - DNA, 201 bp, Homo sapiens
tgctttgtgtcgaatgaattagacagaggcatgatactaagctgggtgatcctcaggaaggttctgcagatattttggttgaagatgttgagggatgagtsacagttggaagtgagatggagagaggaaaccagcgtttacgatggattaatagacttgtaaataggagagggtgagaaatattaagaatgacttccaggg

SEQ ID NO: 43287 - DNA, 201 bp, Homo sapiens
taagtggggacctcatctcttcccccacagaggccctcaggcacctccttcacagcttcgaaatcctttagtgattagggtacagggatttgaaggagagrcagtctgtgatttaaggtaatttttattttcctacactccatttctctccccacatgcacatcccccatctagttggtgcctgaactgccactatgctgg

SEQ ID NO: 43288 - DNA, 201 bp, Homo sapiens
aggtattagttgtgaaagtgagtggaaaatgggtgattactcagaagaaatgagggggcaattaagaggtttgctgaagtttgtgattgtttgttttctaygatagtaactcccaaaattgatcctcggggggaagaagtgataatgggtgggacatatttgaatgctgataggagtgacctaaattcctgatactcacac

SEQ ID NO: 43289 - DNA, 201 bp, Homo sapiens; identical to SEQ ID NO: 7584

SEQ ID NO: 43290 - DNA, 201 bp, Homo sapiens
aggagattcgcaggagactacacaagatgttattgggagctaagttctgatcaaggaaaactgtcctggaaaggcttagagtttctttgttgttgctgatrtttgggtgtaccaggttagtccttcggagcctttcaatctccctccagacgtacacctataattgtgtacctgccagaagttatatgggttagccaggct

SEQ ID NO: 43291 - DNA, 201 bp, Homo sapiens
caaggaaaactgtcctggaaaggcttagagtttctttgttgttgctgatgtttgggtgtaccaggttagtccttcggagcctttcaatctccctccagacrtacacctataattgtgtacctgccagaagttatatgggttagccaggctacaacttgtaacgcaaaacatcaggctgccctatgttgtaattaactgtca

SEQ ID NO: 43292 - DNA, 201 bp, Homo sapiens
ataacttttttaaaataaagccatagggatcaaataacatgatcatttactaaacatagttgcagtatagacttgaatttctcccaaacaccccctgaacrtctcattaagcaacgaggagagaaaagcaaaacaaaattaaaacttacagatgacatctttggcaaaatcacatgacagaaaaatcttgcccccaattgg

SEQ ID NO: 43293 - DNA, 201 bp, Homo sapiens
agatatagttttactattgtctaatgagtattgcctaattccctaattaacagacttatgaaaaaagcctcatctttatgaaataaaatatatttgttcawactggtaatataaatattttacagtgtattgtcgtctacgtaaatgataaattatcaaccttcgcccactttttgatggggttgtttgtttttgtaaatt

SEQ ID NO: 43294 - DNA, 201 bp, Homo sapiens
caaatcatggtgaggctttgtgagaaggaatttaaaagcattttaaaaggaatatttggttagcaaacaaatctcaggatatgttgacatatccctcctgyatctctttagacaggtttctcccataaaacctaatgactaaatcccagggtcactgagtccttcaaatgtaacactgggattggcaaatagtaggtttca

SEQ ID NO: 43295 - DNA, 201 bp, Homo sapiens
aaagacgtcaaccaatgtaaaaaactatatagacacaagaaaaataaaggataatatctaaaaattagtcaaaggtttctatggggaagaacctggagctyatgacagatctaagggtgctgccaggctatagaaggtctgaaatgtaatctggttttttttgaactttccaaatctttggcactggaatctaagcatcat

SEQ ID NO: 43296 - DNA, 201 bp, Homo sapiens; identical to SEQ ID NO: 7577

SEQ ID NO: 43297 - DNA, 201 bp, Homo sapiens
agtcaaacacccctcagactcctccaaaactccagagtcaacaggcatttgcaccccttattcaagattttttttctggcatataaaaaattggcaagtcyttatgatagttcttgtttaataagtgtttacaatgtgatactgtttcaaatatgccaagatgtgtaggaatttgtgtatcattttacaaataaggaattt

SEQ ID NO: 43298 - DNA, 201 bp, Homo sapiens; identical to SEQ ID NO: 7580

SEQ ID NO: 43299 - DNA, 201 bp, Homo sapiens; identical to SEQ ID NO: 7583

SEQ ID NO: 43300 - DNA, 201 bp, Homo sapiens; identical to SEQ ID NO: 7581

SEQ ID NO: 43301 - DNA, 201 bp, Homo sapiens
tattttcctacactccatttctctccccacatgcacatcccccatctagttggtgcctgaactgccactatgctggcttcgtgcttggagcttcactgtgyggttctgagcgtgcacagctctggctcagaggtgcatcttctgaagcctttgtttggtgtgaatgcctcagtgcgattaactcatatgccaatattctca

SEQ ID NO: 43302 - DNA, 201 bp, Homo sapiens
ccatttctctccccacatgcacatcccccatctagttggtgcctgaactgccactatgctggcttcgtgcttggagcttcactgtgcggttctgagcgtgyacagctctggctcagaggtgcatcttctgaagcctttgtttggtgtgaatgcctcagtgcgattaactcatatgccaatattctcatagatggtggataa

SEQ ID NO: 43303 - DNA, 201 bp, Homo sapiens
cataatggaaacaaagaaaaatcctttatacatatgaatgaaaccacacccacctacccctaatacgacaaaacaatgagaccaaatcttgatttctgacrtaagtgtcgagttactatttgcttaatagtcctcctattccctgcagagggtaattttttggaacagattcttgattagttttttgatgttaggaagatg

SEQ ID NO: 43304 - DNA, 201 bp, Homo sapiens
tttagctattaagactaattaaaaactgactgccagtcatagttgcttattgtctgtttttcatcataaaaaagcaatttccccagcttgtagttctgggktatttgccttaaatacatagcactgtggttggttctaagctgttgttctgtcctcatacagttgacatgaacattaacacgtccaccagtaacacactgc

SEQ ID NO: 43305 - DNA, 201 bp, Homo sapiens
ggactgtaaactagttcaaccattgtggaagtcagtgtggtgattcctcagggatctagaactagaaataccatttgacccagccatcccattactgggtrtatacccaaaggaatataaatcttgctgctgtaaagacacatgcacacgtatgtttattgtggcattattcacaatagcaaagacttggaaccaacccaa

SEQ ID NO: 43306 - DNA, 201 bp, Homo sapiens
gttttagccgggatggtctcgatctcctgacctcgcgatccgcccgcctcggcctcccaaagtgctgggattacaggcgtgagccaccgcgcccagccaayaggaacacttttacactgttggtgggactgtaaactagttcaaccattgtggaagtcagtgtggtgattcctcagggatctagaactagaaataccattt

SEQ ID NO: 43307 - DNA, 201 bp, Homo sapiens
taagcacatgcctgagcagaagagggatagctgaaggctgtcagcaaattcacagagaaagccacaaagaaagaaatcctctgaaaaaccatgccaagaaracacaacccaggccacacaggcaggtgcacacttaacagatttaaaaagaatgatatgtggactttaactggagagtaaacagttagtggacaggccatg

SEQ ID NO: 43308 - DNA, 201 bp, Homo sapiens
tttagtagagacggggtttcaccgttttagccgggatggtctcgatctcctgacctcgcgatccgcccgcctcggcctcccaaagtgctgggattacaggygtgagccaccgcgcccagccaataggaacacttttacactgttggtgggactgtaaactagttcaaccattgtggaagtcagtgtggtgattcctcaggg

SEQ ID NO: 43309 - DNA, 201 bp, Homo sapiens
gatctcggctcactgcaagctccacctcccgggttcacgccattctcctgcctcagcctcccaagtagctgggactacaggcgcccgccactacgcccggmcaattttctgtatttttagtagagacggggtttcaccgttttagccgggatggtctcgatctcctgacctcgcgatccgcccgcctcggcctcccaaagt

SEQ ID NO: 43310 - DNA, 201 bp, Homo sapiens
ggtgatgggggctcttttttggttccatatgaactttaaagtagttttttccaattctgtgaagaaagtcattggtagcttgacacttctcaaaagaagayatttatgcagccaaaaaacacatgaaaaaatgctcaccatcactggccatcagagaaatgcaaatcaaaaccacaatgagataccatctcacaccagtta

SEQ ID NO: 43311 - DNA, 201 bp, Homo sapiens
tagttgtagatatgcggcgttatttctgagggctctgttctgttccattgatctatatctctgttttggtaccagtaccatgctgttttggttactgtagmcttgtagtatagtttgaagtcaggtagtgtgatgcctccagctttgttcttttggcttaggattgccttggtgatgggggctcttttttggttccatatg

SEQ ID NO: 43312 - DNA, 201 bp, Homo sapiens
tctccattgcttgtttttctcaggtttgtcaaagatcagatagttgtagatatgcggcgttatttctgagggctctgttctgttccattgatctatatctstgttttggtaccagtaccatgctgttttggttactgtagccttgtagtatagtttgaagtcaggtagtgtgatgcctccagctttgttcttttggcttag

SEQ ID NO: 43313 - DNA, 201 bp, Homo sapiens
agccagctgtgggggagcccgctgaggtcacgaccacggtgctggtgaggagagatcaccatggagccaatttctcgtgccgcactgaactggacctgcgsccccaagggctggagctgtttgagaacacctcggccccctaccagctccagacctttggtgaggattgaagaagccagcagggagaaggtgggggtgggg

SEQ ID NO: 43314 - DNA, 201 bp, Homo sapiens
gccagctgtgggggagcccgctgaggtcacgaccacggtgctggtgaggagagatcaccatggagccaatttctcgtgccgcactgaactggacctgcggscccaagggctggagctgtttgagaacacctcggccccctaccagctccagacctttggtgaggattgaagaagccagcagggagaaggtgggggtggggt

SEQ ID NO: 43315 - DNA, 201 bp, Homo sapiens
gatcttgagggcacctacctctgtcgggccaggagcactcaaggggaggtcacccgcaaggtgaccgtgaatgtgctctgtgagtgagccggcgggcagarctgggtgggggcaggggccatggacctaatgcaatcctcaccgcctgttgtatcctccccacagccccccggtatgagattgtcatcatcactgtggtag

SEQ ID NO: 43316 - DNA, 201 bp, Homo sapiens
cagcccccggggtcatcgccctgccaccgccgcccgattgctttagcttggaaattccggagctgaagcggccagcgagggaggatgaccctctcggcccsggcaccctgtcagtccggaaataactgcagcatttgttccggaggggaaggcgcgaggtttccgggaaagcagcaccgccccttggcccccaggtggcta

SEQ ID NO: 43317 - DNA, 201 bp, Homo sapiens
cagcaccgccccttggcccccaggtggctagcgctataaaggatcacgcgccccagtcgacgctgagctcctctgctactcagagttgcaacctcagcctmgctatggctcccagcagcccccggcccgcgctgcccgcactcctggtcctgctcggggctctgttcccaggtgagtcggggtggggattgccgtcgggcc

SEQ ID NO: 43318 - DNA, 201 bp, Homo sapiens
ccctctcggcccgggcaccctgtcagtccggaaataactgcagcatttgttccggaggggaaggcgcgaggtttccgggaaagcagcaccgccccttggcycccaggtggctagcgctataaaggatcacgcgccccagtcgacgctgagctcctctgctactcagagttgcaacctcagcctcgctatggctcccagcag

SEQ ID NO: 43319 - DNA, 201 bp, Homo sapiens
tgtaatctcagctcactgcaacctctccctcccgggttcaagcaattctcctgcctcagcctcccaagtagctggaattacaggcgcccagcaccacgccyggctaatttttgtatttttagtagagacgggatttcatcatgttggccaggctggtcttgatctcctgaccttgtgatctgcccgcctcggcctcccaaa

SEQ ID NO: 43320 - DNA, 201 bp, Homo sapiens
cgaacattcccagcagcttctggaaaccccagggaaacctctttgaaggtcttttctgcatctctgcctgataggtctttttttttttttttttttttttytttttttgacacacagtcttgctctgtcgcccaggctggatcactgcaacctccatctcccgggttcaagcagttctcctgcctcatcctctccagtagc

SEQ ID NO: 43321 - DNA, 201 bp, Homo sapiens
aggcattctgggcaggaggaacagcctgggcaaaagttgggagcagggagaaatcttgatggaggcaggaggaggaggaggtaggttggtgtaggccaggygcagtggctcacacctgtaatcccagtgctttgggaggccaaagcaagaggattgtttgagcccaggagttcgagaccagcctgggcaacatagcgagac

SEQ ID NO: 43322 - DNA, 201 bp, Homo sapiens
cacaagtaaacctcagcctctcaagtagctgggactacaggcacacaacaccacgcctggctaatttttgtatttttaggtagagacggggtttcactatrttggccaggctggtcttgaactcctgacctcaggtgatccgcctgcctcggccccccaaagtgttgggattacaggcgtgagccaccacacgcagccttt

SEQ ID NO: 43323 - DNA, 201 bp, Homo sapiens
gtgcgtggtgacacgcacctgtagtcccagctatttgggaggctgaggcaggagaatcacttgaacctgggaggtggaggttgcagtgagccgagatcgcwccactgcactccagcctgggccacagagtgagactccatcttgaaaaaaaaaaaaaatacaaaagttagccaggggtgttggtgggtgcctgtaatccca

SEQ ID NO: 43324 - DNA, 201 bp, Homo sapiens
cctcaggtgatccgcctgcctcggccccccaaagtgttgggattacaggcgtgagccaccacacgcagcctttttgttattagactctgtcattactgactttttttttttttttaatagaaacagggtctttctttcccaggctaaagtacagtggcatgatcacagttcactatagccttaaactcctgggctcaagtg

SEQ ID NO: 43325 - DNA, 201 bp, Homo sapiens
gacacgcacctgtagtcccagctatttgggaggctgaggcaggagaatcacttgaacctgggaggtggaggttgcagtgagccgagatcgcaccactgcamtccagcctgggccacagagtgagactccatcttgaaaaaaaaaaaaaatacaaaagttagccaggggtgttggtgggtgcctgtaatcccagctatttgg

SEQ ID NO: 43326 - DNA, 201 bp, Homo sapiens
ctcaggtgatccgcctgcctcggccccccaaagtgttgggattacaggcgtgagccaccacacgcagcctttttgttattagactctgtcattactgactttttttttttttttaatagaaacagggtctttctttcccaggctaaagtacagtggcatgatcacagttcactatagccttaaactcctgggctcaagtga

SEQ ID NO: 43327 - DNA, 201 bp, Homo sapiens
ggcttatctcgaactcctgacttcgtggatccaccctccttggcctcccaaagtgctgggattaaaggcgtgagccaccgcgccctgccaacctttttttratttttcttagagatgggggtctccctatgttgcccaggcttgtcttgaactcctggcctcaagtgaccctcttgccttggcctcacaaagtgctaggat

SEQ ID NO: 43328 - DNA, 201 bp, Homo sapiens
catttgttccggaggggaaggcgcgaggtttccgggaaagcagcaccgccccttggcccccaggtggctagcgctataaaggatcacgcgccccagtcgaygctgagctcctctgctactcagagttgcaacctcagcctcgctatggctcccagcagcccccggcccgcgctgcccgcactcctggtcctgctcggggct

SEQ ID NO: 43329 - DNA, 201 bp, Homo sapiens
agggggttggagatggaggggaggggcgggcctcgttttgttgcccaggccggtcttgaactccgggggtctagccttacctcctgcctcagcctcccgastagctgggatgagaggtgtgaaccaccgccttgcttggctagattgcgtctcttacagtttctcagctgtaaaacgggaaacgttatagcggccacctgg

SEQ ID NO: 43330 - DNA, 201 bp, Homo sapiens; identical to SEQ ID NO: 7592

SEQ ID NO: 43331 - DNA, 201 bp, Homo sapiens
ggtctagccttacctcctgcctcagcctcccgagtagctgggatgagaggtgtgaaccaccgccttgcttggctagattgcgtctcttacagtttctcagytgtaaaacgggaaacgttatagcggccacctggcagggtatcttggcccagcgcagcacctggccccaggactcgatcatgatggtttgggaacttggct

SEQ ID NO: 43332 - DNA, 201 bp, Homo sapiens; identical to SEQ ID NO: 7594

SEQ ID NO: 43333 - DNA, 201 bp, Homo sapiens
tgttcctcatcctctctgcccctggggaagtccagggctgcttctacttgggggaattccagagctgacttatccgtggcccaaagctgagaagtgggacrccccagcacaccctcccccagctccagcccagctagggaagagggaaggggtcagagggtctttcatggtggtgtaagtttggggaaccaggagggtggg

SEQ ID NO: 43334 - DNA, 201 bp, Homo sapiens
accttttgggctcaagtgatcctcccacctcagcctcctgagtagctgggaccataggctcacaacaccacacctggcaaatttgattttttttttttttycagagacggggtctcgcaacattgcccagacttcctttgtgttagttaataaagctttctcaactgcctcagccttgtgtgagttgaggggaggtgtcac

SEQ ID NO: 43335 - DNA, 201 bp, Homo sapiens
ttaaggtcaggagtttgagaccagcctggccaacatggcaacatcccgtctctactaaaaatacaaaaattagctggcatggtggtgggcgcctgtgatcscagctgctcgggaggctgagggaggaaaatcccttaagcccacgaggctgaggttgcagtgaaccaagattgtgccactgcactccagcctgggagacat

SEQ ID NO: 43336 - DNA, 201 bp, Homo sapiens
cccgtctctactaaaaatacaaaaattagctggcatggtggtgggcgcctgtgatcccagctgctcgggaggctgagggaggaaaatcccttaagcccacsaggctgaggttgcagtgaaccaagattgtgccactgcactccagcctgggagacatagcgagattctgtctcaaaaaacaaagcgttctgatccggactc

SEQ ID NO: 43337 - DNA, 201 bp, Homo sapiens
tcacacccccatccaagatagaacaaatctgagacaggaatctttgagtgaggcagtgctgggctcagacattttttcccaccttcggaggcagcagaatytgagggacctgatccaaataagccccttctttctttcttttcttttcttttttttttttttttttttttgagacggagtctcactctgtcgcccaggctg

SEQ ID NO: 43338 - DNA, 201 bp, Homo sapiens
ctgttgggagcataaataagcccaaccctgtggcgggaaattgggcatcagttctcaaaatgtcatgggctgggcacggtggctcacgcctgtaatcccascactttgggaggctgagggaggcggatcacttgaggtcaggagttcgagaccagcctgaccaccatggagaaaccccgtctctattaaaaatacaaaaaa

SEQ ID NO: 43339 - DNA, 201 bp, Homo sapiens
aggtccacctggcactgggggaccagaggttgaaccccacagtcacctatggcaacgactccttctcggccaaggcctcagtcagtgtgaccgcagaggaygagggcacccagcggctgacgtgtgcagtaatactggggaaccagagccaggagacactgcagacagtgaccatctacagtaagaaggggcaggggcgga

SEQ ID NO: 43340 - DNA, 201 bp, Homo sapiens
agccgggaaggggtgatcagatggtccacagggaatatcacaaactcgaattctgacgatgttctggtagtcacccagccagatgagcgcatggagttggsggtggggggtgtcaaagcttggggcccggaagcggagtcaaaagcatcaccctcggtcccttgttctcgcgtggatgtcagggcccccacccaccgagca

SEQ ID NO: 43341 - DNA, 201 bp, Homo sapiens
catccctgtctgctcacacctttcttctctccctagtcctgccagcgactcccccacaacttgtcagcccccgggtcctagaggtggacacgcaggggacmgtggtctgttccctggacgggctgttcccagtctcggaggcccaggtccacctggcactgggggaccagaggttgaaccccacagtcacctatggcaacg

SEQ ID NO: 43342 - DNA, 201 bp, Homo sapiens
ctcaattgcagcaacagctgtccccagccgcagaattccagcctccgcaccccgctgcggcaaggcaagacgctcagagggccgggttgggtgtcttaccrgctgctcgacgtgagggcctggagctccctcgcgcactgcctcgtgacctgcgcaggaaaaacacgctgggccacctccaggatcaccgcctacagtgag

SEQ ID NO: 43343 - DNA, 201 bp, Homo sapiens
acctaagggtccgcattactgcccttcttcggaggaactggtttgtttttgttgttgttgttgtttttgcgatcactttctccaagttccttgtctccctragggcacctgaggtttcctcactcagggcccacctggggtcccgaagccccagactctgtgtatccccagcgggtgtcacagaaacctctccttctgctg

SEQ ID NO: 43344 - DNA, 201 bp, Homo sapiens
ctttcttctctccctagtcctgccagcgactcccccacaacttgtcagcccccgggtcctagaggtggacacgcaggggaccgtggtctgttccctggacrggctgttcccagtctcggaggcccaggtccacctggcactgggggaccagaggttgaaccccacagtcacctatggcaacgactccttctcggccaaggc

SEQ ID NO: 43345 - DNA, 201 bp, Homo sapiens
cgggcaggggcggggtggggttcatggtatggctttcctgattggcgccgccgccaccacgcggcagctctgattggatgttaagtttcctatcccagccscaccttcagaccctgtgctttcctggaggccaaacaactgtggagcgagaactcatctccaaaataacttaccacgctggagtgagaccacgaatggtgg

SEQ ID NO: 43346 - DNA, 201 bp, Homo sapiens
taggcaacatagcaaaaccccatttttatttaaaaaaaaaaaaaaagatatgagttaaaactagccctgggatggcatttttcacatattggtaacaaacraaagaattgatggccgggcgcagtggctcacgcctgtaatcccagcactttgggaggccgaggcgggcggatcacaaggtcaggagatcgagaccatcct

SEQ ID NO: 43347 - DNA, 201 bp, Homo sapiens
tgactcagaggcgctgttcccgctccacccagagccctggcaaccgggtccctcagctgttcccgcggttccttccatgagcccagccttgcgtcccggckccgtgttcttcaccgggtgtagggtccttcctgatccttgacccagcctcgtctctcctttgcccttgccgcaaacgcactctcctcgtatcccggcatt

SEQ ID NO: 43348 - DNA, 201 bp, Homo sapiens; identical to SEQ ID NO: 7608

SEQ ID NO: 43349 - DNA, 201 bp, Homo sapiens
gtaaggaaggaggcggggtctccgcggctccgaggtgggaccagaggaatgcgaaggcggggcgaagagtgggcgggacctcagtaccggaacaggcgtgkcccgagggggcggggcaggtgggggcggagacgtaatcgctggggaggaggagcctgtacagcctgagaggcggggcgccgtaccctagttcgttctcag

SEQ ID NO: 43350 - DNA, 201 bp, Homo sapiens
cactttcccactgcccatcggggaatcagtgactgtcactcgagatcttgagggcacctacctctgtcgggccaggagcactcaaggggaggtcacccgcraggtgaccgtgaatgtgctctgtgagtgagccggcgggcagagctgggtgggggcaggggccatggacctaatgcaatcctcaccgcctgttgtatcctc

SEQ ID NO: 43351 - DNA, 201 bp, Homo sapiens; identical to SEQ ID NO: 7587

SEQ ID NO: 43352 - DNA, 201 bp, Homo sapiens
acgtggcgaaaccccgtctctattaaaaatacaaaaattagctgggcgtggtggtgcttgcctgtaatcccagatactctggaggctgaggcaggagaatmacttgaacccgggaggcaaaggttgcagtgagctgagattgcgccactgcactccagtctgagtgacaaagcgagactccatctcaaaaaaaaaaaaaat

SEQ ID NO: 43353 - DNA, 201 bp, Homo sapiens
ttagcgcacgctcgcctcccgcccccccgccgcctctgccgccgccccctccttggaaaccaagttaccaacgttaaaccaatccccaagcgcaactctgyctcccccacaccccacccgccgcgccgcgcggagccgtcctctagcccagctcctcggctcgcgctctcctcgcctcctgtgctttccccgccgcggcga

SEQ ID NO: 43354 - DNA, 201 bp, Homo sapiens
ccttttgggctcaagtgatcctcccacctcagcctcctgagtagctgggaccataggctcacaacaccacacctggcaaatttgatttttttttttttttyagagacggggtctcgcaacattgcccagacttcctttgtgttagttaataaagctttctcaactgcctcagccttgtgtgagttgaggggaggtgtcaca

SEQ ID NO: 43355 - DNA, 201 bp, Homo sapiens
aggagctgggactttccttcttggggtgatagggagtcatggagggtttctgagcaggccagggattagatagctgaaggctggatttactggaagccaawgagcagttggctatggtccttgtccacgcggcccatgttgtgggcagtgaccgtattcaagaagggaaggacagacaagtatttgaatacttcagtgacc

SEQ ID NO: 43356 - DNA, 201 bp, Homo sapiens
tcttgaactcctggcctcaagtgaccctcttgccttggcctcacaaagtgctaggattacagcctgagccatcacacctggccaacaggtttttttttttkttttgttttgttttttaaagaatgtctaggccaggctcatttactttcacctgtaatcccagcactttgggaggccggggtgggcagatcacttgaggtc

SEQ ID NO: 43357 - DNA, 201 bp, Homo sapiens
gagctgtttgagaacacctcggccccctaccagctccagacctttggtgaggattgaagaagccagcagggagaaggtgggggtggggtatcctgcaatgyggtgcctgtggccacaggatcttttgagatgggtgtggccccggctaaggggtgcatgtgttctaggcgtatgtgacctaggctgctgagtggccctgga

SEQ ID NO: 43358 - DNA, 201 bp, Homo sapiens
gtgaggcccaccctagagccaaggtgacgctgaatggggttccagcccagccactgggcccgagggcccagctcctgctgaaggccaccccagaggacaaygggcgcagcttctcctgctctgcaaccctggaggtggccggccagcttatacacaagaaccagacccgggagcttcgtgtcctgtgtgagtggggctgct

SEQ ID NO: 43359 - DNA, 201 bp, Homo sapiens
actccaatgtgccaggcttgggggaacccattgcccgagctcaagtgtctaaaggatggcactttcccactgcccatcggggaatcagtgactgtcactcragatcttgagggcacctacctctgtcgggccaggagcactcaaggggaggtcacccgcaaggtgaccgtgaatgtgctctgtgagtgagccggcgggcag

SEQ ID NO: 43360 - DNA, 201 bp, Homo sapiens
cgccgcggcgatgccagggccttcgccagggctgcgccgggcgctactcggcctctgggctgctctgggcctggggctcttcggcctctcaggtaagagcyccgctctggttcggggtggacagggcgggggcggagtccctggacctgagaaacggcctcctgtccctcccagctctgccctcgcctcgctcccacgcct

SEQ ID NO: 43361 - DNA, 201 bp, Homo sapiens
ggtgttcttccgcacccaacccttcgccctggagacccagtgtctctcctgtccgctccccgggtacctccttacgctgtgctgtgcaccatggtccacgractggcatcttccccactcgcggtccgcgaagactccatctctccaactaccctgactcagaggcgctgttcccgctccacccagagccctggcaaccgg

SEQ ID NO: 43362 - DNA, 201 bp, Homo sapiens; identical to SEQ ID NO: 7601

SEQ ID NO: 43363 - DNA, 201 bp, Homo sapiens
ggctgacgtgtgcagtaatactggggaaccagagccaggagacactgcagacagtgaccatctacagtaagaaggggcaggggcggagtggggcttcttgrgggtgtgacctgaacccggggcggggctcactgtgtgcctattccaggctttccggcgcccaacgtgattctgacgaagccagaggtctcagaagggacc

SEQ ID NO: 43364 - DNA, 201 bp, Homo sapiens
atcccttaagcccacgaggctgaggttgcagtgaaccaagattgtgccactgcactccagcctgggagacatagcgagattctgtctcaaaaaacaaagcrttctgatccggactcagacccagatcgcactgctttctagctgagtaaccatttctctctatgaaatgggaatggtcccagaatctcccttggagaatgt

SEQ ID NO: 43365 - DNA, 201 bp, Homo sapiens
acatagcgagaccctgtctctaagaaaaaataaaaaaattagggtacagtggcatatgcttgtattctcaactactctggaggctcaagtgggaggatcayttgaacccaggaatttttttgtttttgtttttgtttttttgagatggagtctcactctgtggcccaggctggagtgcagtggtgccatcttggctcactg

SEQ ID NO: 43366 - DNA, 201 bp, Homo sapiens
ctcctgagtagctgggactacaggcgcccaccaccacgcctggctaattttttgtatttttagtagagacggggtttcaccgtgttagccaggatggtctygatctcctgacctcgtgatccgcccgccttggcctcccaaagtgctgggattacaggcgtgagccaccatgtctggcctggccaggctggtcttgaactc

SEQ ID NO: 43367 - DNA, 201 bp, Homo sapiens
tctcaagtagctgggactacaggcacacaacaccacgcctggctaatttttgtatttttaggtagagacggggtttcactatattggccaggctggtcttsaactcctgacctcaggtgatccgcctgcctcggccccccaaagtgttgggattacaggcgtgagccaccacacgcagcctttttgttattagactctgtc

SEQ ID NO: 43368 - DNA, 201 bp, Homo sapiens
gtcggtcggtgtttaggaggtttagaggtagatacatctgaatgctgaccccgacttcaaccctcgccggctgagctgtttccccctccgtgccttgaggrtgataatacgataagatagtgcatgtcaagtgcttaggacatattgagcgctcggagttagttcaaacttggttcttcgacccctagccctgtctccgga

SEQ ID NO: 43369 - DNA, 201 bp, Homo sapiens
tcggtcggtgtttaggaggtttagaggtagatacatctgaatgctgaccccgacttcaaccctcgccggctgagctgtttccccctccgtgccttgaggakgataatacgataagatagtgcatgtcaagtgcttaggacatattgagcgctcggagttagttcaaacttggttcttcgacccctagccctgtctccggat

SEQ ID NO: 43370 - DNA, 201 bp, Homo sapiens
tacaggcgtgagccaccacacgcagcctttttgttattagactctgtcattactgactttttttttttttttaatagaaacagggtctttctttcccaggstaaagtacagtggcatgatcacagttcactatagccttaaactcctgggctcaagtgatcctcctgcctcagcctcccaagtagcagggactacaggtgt

SEQ ID NO: 43371 - DNA, 201 bp, Homo sapiens
ccacgtcccagagacaccctcgaggtttagactctgggagtgcgcctttaaaccggaggcctgggcacgacgcgggacgcctgggttctttccctggctgsagcctctcctcctcctccccgccctctgagaacccttgactcgacataggggcgctaagatgtcagggagttggctccccaggctcagcccgcgtttccc

SEQ ID NO: 43372 - DNA, 201 bp, Homo sapiens
ctctcagccttgctgtgttcatccaagaacccacctttcctctcctctacgccctccccccatgctttcccgccgctccatcggcgctttggagaccatgsctctctgctaccacgtcccagagacaccctcgaggtttagactctgggagtgcgcctttaaaccggaggcctgggcacgacgcgggacgcctgggttctt

SEQ ID NO: 43373 - DNA, 201 bp, Homo sapiens; identical to SEQ ID NO: 7633

SEQ ID NO: 43374 - DNA, 201 bp, Homo sapiens
cagtttcccagcgacaggcagggatttcgagcgtccccctcccctccctcgtcaagatccaagctagctgcctcagtttccccgcggagcctgggacgccagcggaggggctcggcgcgtagggatcacgcagcttccttcctttttctgggagctgtaaagacgcctccgcggccaaggccgaaaggggaagcgaggagg

SEQ ID NO: 43375 - DNA, 201 bp, Homo sapiens
actgtcctttccccatccagtgcctcccaaatctctcttagtccccaaatgtatccccgccctaaggggcgctggtgggaggagctaaatgtgggggcggrgctcggagtccagcttattatcatggcatctcagccagggctggggtaggggtttgggaagggcaacccagcatcccccgatcccagagtcgcggccggg

SEQ ID NO: 43376 - DNA, 201 bp, Homo sapiens
ctgcatgttggtcagtccagtccctgcagagggaattcccagcatgacctcattcacttgtgaagacagagcaatccttgtgttttatttttttaagatgkatctcactctgttgcccagactggagtgcagtggcatgatctcagccctctgccacctccaccttccgggttcaagagattctcatgcctcagcctcctg

SEQ ID NO: 43377 - DNA, 201 bp, Homo sapiens
ggaccagaatctgagtcctgatgtcaccctcgaaggggacgcattcgtggccactgccacagccacagctagcgcagagcaggagggtgccaggcagctgrtctgcaacgtcaccctggggggcgaaaaccgggagacccgggagaacgtgaccatctacagtaaggaaggaggcggggtctccgcggctccgaggtggga

SEQ ID NO: 43378 - DNA, 201 bp, Homo sapiens
attttatttatttttttgagacagagtctcactctgttgtccaggttggagtccagtggcgtgatttcggctcactgcaacctctacttcccaggttcgascaattctcctgcctcagcttcccgagtagctgggattacaggcccgcgtccccacacctagctaatttttgtatttttagtagagacagggtttcaccat

SEQ ID NO: 43379 - DNA, 201 bp, Homo sapiens; identical to SEQ ID NO: 7591

SEQ ID NO: 43380 - DNA, 201 bp, Homo sapiens
gagctgagatcgtgccactgcactctagccagggtgacagagtgaaactctgtctcaaaaaattaaaaaagaaattcagcaagtaatgagttaaggaattygaatattaaggcgagtgacaaggaacgcccaggatgtggcccaggatggagtaggggggacactcatttaggagaaagctcaggccacaagacaggagga

SEQ ID NO: 43381 - DNA, 201 bp, Homo sapiens; identical to SEQ ID NO: 7593

SEQ ID NO: 43382 - DNA, 201 bp, Homo sapiens
ctattaaaaatacaaaaattagctgggcgtggtggtgcttgcctgtaatcccagatactctggaggctgaggcaggagaatcacttgaacccgggaggcaraggttgcagtgagctgagattgcgccactgcactccagtctgagtgacaaagcgagactccatctcaaaaaaaaaaaaaataaaagaacacatctttagc

SEQ ID NO: 43383 - DNA, 201 bp, Homo sapiens; identical to SEQ ID NO: 7595

SEQ ID NO: 43384 - DNA, 201 bp, Homo sapiens
gggctcaagtgatcctcccacctcagcctcctgagtagctgggaccataggctcacaacaccacacctggcaaatttgatttttttttttttttcagagayggggtctcgcaacattgcccagacttcctttgtgttagttaataaagctttctcaactgcctcagccttgtgtgagttgaggggaggtgtcacatccagc

SEQ ID NO: 43385 - DNA, 201 bp, Homo sapiens; identical to SEQ ID NO: 7598

SEQ ID NO: 43386 - DNA, 201 bp, Homo sapiens; identical to SEQ ID NO: 7600

SEQ ID NO: 43387 - DNA, 201 bp, Homo sapiens; identical to SEQ ID NO: 7630

SEQ ID NO: 43388 - DNA, 201 bp, Homo sapiens
gaggcaggagaatcacttaaacctgggaggcaggggttgcagtgagctgagatcgtgccactgcactctagccagggtgacagagtgaaactctgtctcawaaaattaaaaaagaaattcagcaagtaatgagttaaggaattcgaatattaaggcgagtgacaaggaacgcccaggatgtggcccaggatggagtagggg

SEQ ID NO: 43389 - DNA, 201 bp, Homo sapiens
gtgatcctcccacctcagcctcctgagtagctgggaccataggctcacaacaccacacctggcaaatttgatttttttttttttttcagagacggggtctygcaacattgcccagacttcctttgtgttagttaataaagctttctcaactgcctcagccttgtgtgagttgaggggaggtgtcacatccagctggagtcc

SEQ ID NO: 43390 - DNA, 201 bp, Homo sapiens
tgaggcaggagaatcacttgaacccgggaggcaaaggttgcagtgagctgagattgcgccactgcactccagtctgagtgacaaagcgagactccatctcaaaaaaaaaaaaaataaaagaacacatctttagcatggccttcagtgctcacgggatcttcctgaattaatctccccctcttcatccttgctcactcagct

SEQ ID NO: 43391 - DNA, 201 bp, Homo sapiens
cattaccctgtcaccaaagcactgtctattctatcaccctgttttgtttttgtcaaagctcatattaacatcagttattaattatcttgtttgctcataatttttttttttttttttttggagacagagtctcgttctgttgctcaggctggagtgcagtggcacaatcttggctcactgtaacctccacctcccaggttc

SEQ ID NO: 43392 - DNA, 201 bp, Homo sapiens
ttttgcgatcactttctccaagttccttgtctccctgagggcacctgaggtttcctcactcagggcccacctggggtcccgaagccccagactctgtgtakccccagcgggtgtcacagaaacctctccttctgctggccttatcgagtgggatcagcgcgggccggggagagccacgggcaggggcggggtggggttcat

SEQ ID NO: 43393 - DNA, 201 bp, Homo sapiens
accatggtccacggactggcatcttccccactcgcggtccgcgaagactccatctctccaactaccctgactcagaggcgctgttcccgctccacccagarccctggcaaccgggtccctcagctgttcccgcggttccttccatgagcccagccttgcgtcccggctccgtgttcttcaccgggtgtagggtccttcctg

SEQ ID NO: 43394 - DNA, 201 bp, Homo sapiens
gcgcatggagttgggggtggggggtgtcaaagcttggggcccggaagcggagtcaaaagcatcaccctcggtcccttgttctcgcgtggatgtcagggccyccacccaccgagcagaaggcggactcaggggcgctccagggtggctcgagctcacacacgctgagtagacacgtgcccgctgcaccctgggtaaatacag

SEQ ID NO: 43395 - DNA, 201 bp, Homo sapiens
gagccgagcggattctaatttagacgcccgcgaacgctgcgcgcacgcacacgtgtcctcggctcgctggcactttcgtcccgccccctccgtcgcgtgcsggagctgacccggaggggtgcttagaggtatggctccgcggggtcaaaaggagaaggatcagtgagagaggcatccccacaccctcccctagaactgtcc

SEQ ID NO: 43396 - DNA, 201 bp, Homo sapiens
ccctacccgcttcgagatcctaggtgttcttccgcacccaacccttcgccctggagacccagtgtctctcctgtccgctccccgggtacctccttacgctstgctgtgcaccatggtccacggactggcatcttccccactcgcggtccgcgaagactccatctctccaactaccctgactcagaggcgctgttcccgctc

SEQ ID NO: 43397 - DNA, 201 bp, Homo sapiens
cgtggatgtcagggcccccacccaccgagcagaaggcggactcaggggcgctccagggtggctcgagctcacacacgctgagtagacacgtgcccgctgcmccctgggtaaatacagacccggagccgagcggattctaatttagacgcccgcgaacgctgcgcgcacgcacacgtgtcctcggctcgctggcactttcgt

SEQ ID NO: 43398 - DNA, 201 bp, Homo sapiens
tgagttgaggggaggtgtcacatccagctggagtcctttctaagcagccacagcctgatcctcccacttcctcccccaagaaaacattgtgggttgatggycataccctgaggttctggtccaaatcggactttctatgaccttctgggtctctagtgaaaactaaagactcctctccagaaaaaaacatttggtttctaa

SEQ ID NO: 43399 - DNA, 201 bp, Homo sapiens
gtaagagccccgctctggttcggggtggacagggcgggggcggagtccctggacctgagaaacggcctcctgtccctcccagctctgccctcgcctcgctsccacgcctctgcccccacctcgagcctgagtcttctccccttccccctcctccccaacacacacccgagccccagcttcctgactcctcgatagccccta

SEQ ID NO: 43400 - DNA, 201 bp, Homo sapiens
catcggcgctttggagaccatggctctctgctaccacgtcccagagacaccctcgaggtttagactctgggagtgcgcctttaaaccggaggcctgggcasgacgcgggacgcctgggttctttccctggctgcagcctctcctcctcctccccgccctctgagaacccttgactcgacataggggcgctaagatgtcagg

SEQ ID NO: 43401 - DNA, 201 bp, Homo sapiens; identical to SEQ ID NO: 7644

SEQ ID NO: 43402 - DNA, 201 bp, Homo sapiens
ggccacgcgcgtactccactactctccctccctcccaggccccgccccctgggtcccagggtcctccccttcaggccccaccttctgttccaagtcccggygttcaaagagctgcggactcttcccccttgcagagcgaccagatcgcgtagagctgatgccgctgcctccctggcagccggtgggcgagaacttcaccct

SEQ ID NO: 43403 - DNA, 201 bp, Homo sapiens
gggactacaggcgcccaccaccactcccggctaatttttgtatttttagtagagatggggtttcactgtgttagccaggatagtctcgatctcctgacctygtgatccgcctgcctcggcctcccaaagtgctgggattacttattttgttttttgtagagacaggttctcactgtgttgcccaggctggtcttgaactcc

SEQ ID NO: 43404 - DNA, 201 bp, Homo sapiens
ccaaggcccaatctccctgaaggtcccataaggtcttgcctccaagtcctgcccccacccacctccatgtcatctcatcgtgtttttccagatggcccccractggacgagagggattgtccgggaaactggacgtggccagaaaattcccagcagactccaatgtgccaggcttgggggaacccattgcccgagctcaag

SEQ ID NO: 43405 - DNA, 201 bp, Homo sapiens
agtggcatgatctcagccctctgccacctccaccttccgggttcaagagattctcatgcctcagcctcctgagtagctgagattacaggcttgtgcctccrtgcccagctaatttttttatttttactagagatgaggtttcaccagtttgggcaggccggtctcaaactcctgacctcaagtgatccacccacctcggcc

SEQ ID NO: 43406 - DNA, 201 bp, Homo sapiens
ctggtcaatggcccctatcccccaaggcccaatctccctgaaggtcccataaggtcttgcctccaagtcctgcccccacccacctccatgtcatctcatcrtgtttttccagatggcccccgactggacgagagggattgtccgggaaactggacgtggccagaaaattcccagcagactccaatgtgccaggcttggggg

SEQ ID NO: 43407 - DNA, 201 bp, Homo sapiens
gagtagctgggattacaggcccgcgtccccacacctagctaatttttgtatttttagtagagacagggtttcaccatgttggccaggctggtctcgaactsctgacctcaggtgattctcctgccttggcctcccaaagtgctgagattacaggtgtgagccactgcacacggccttaaattttatttattatttatttat

SEQ ID NO: 43408 - DNA, 201 bp, Homo sapiens
agtaagaaggggcaggggcggagtggggcttcttgggggtgtgacctgaacccggggcggggctcactgtgtgcctattccaggctttccggcgcccaacrtgattctgacgaagccagaggtctcagaagggaccgaggtgacagtgaagtgtgaggcccaccctagagccaaggtgacgctgaatggggttccagccca

SEQ ID NO: 43409 - DNA, 201 bp, Homo sapiens
aggcccgcgtccccacacctagctaatttttgtatttttagtagagacagggtttcaccatgttggccaggctggtctcgaactcctgacctcaggtgatyctcctgccttggcctcccaaagtgctgagattacaggtgtgagccactgcacacggccttaaattttatttattatttatttatttatttatttagagac

SEQ ID NO: 43410 - DNA, 201 bp, Homo sapiens
agtgctgagattacaggtgtgagccactgcacacggccttaaattttatttattatttatttatttatttatttagagacttagtctcactctgttgcccmggctggagtgcagtggcatggtctcggctcactgcactccacctcctgggttcacgccattctcctgcctcagcctcccgagtagctgggactacaggcg

SEQ ID NO: 43411 - DNA, 201 bp, Homo sapiens
gtgctgagattacaggtgtgagccactgcacacggccttaaattttatttattatttatttatttatttatttagagacttagtctcactctgttgcccasgctggagtgcagtggcatggtctcggctcactgcactccacctcctgggttcacgccattctcctgcctcagcctcccgagtagctgggactacaggcgc

SEQ ID NO: 43412 - DNA, 201 bp, Homo sapiens
ttcttctctccctagtcctgccagcgactcccccacaacttgtcagcccccgggtcctagaggtggacacgcaggggaccgtggtctgttccctggacggkctgttcccagtctcggaggcccaggtccacctggcactgggggaccagaggttgaaccccacagtcacctatggcaacgactccttctcggccaaggcct

SEQ ID NO: 43413 - DNA, 201 bp, Homo sapiens
agccactgcacacggccttaaattttatttattatttatttatttatttatttagagacttagtctcactctgttgcccaggctggagtgcagtggcatgrtctcggctcactgcactccacctcctgggttcacgccattctcctgcctcagcctcccgagtagctgggactacaggcgcccaccaccactcccggctaa

SEQ ID NO: 43414 - DNA, 201 bp, Homo sapiens
cgagggcccagctcctgctgaaggccaccccagaggacaacgggcgcagcttctcctgctctgcaaccctggaggtggccggccagcttatacacaagaaycagacccgggagcttcgtgtcctgtgtgagtggggctgctggtcaatggcccctatcccccaaggcccaatctccctgaaggtcccataaggtcttgcct

SEQ ID NO: 43415 - DNA, 201 bp, Homo sapiens; identical to SEQ ID NO: 7619

SEQ ID NO: 43416 - DNA, 201 bp, Homo sapiens
acctgggaagtagaggttgcagtgagccgagattgcaccactgcactccagcctgggcgacggagtgagacgacctcacaaaaatttacataaataaaatraaaagtaaaataaaaatacaaaagttggccgggtgcgtttgctcacgcctgtaatcccagcactttgggagggtgaggcaggcagataatgaggtaagaa

SEQ ID NO: 43417 - DNA, 201 bp, Homo sapiens
tgctgagattacaggcatgagccaccgtgcccggcctttttttttttttttttttttgagacagagtctcactctgtcgcccaggcaggagtgcagtggtkcgatctgggctcactgcaagctccgcctcccgggttcactccatcctcctgccttagcctcctgagtagctgggactacaggcgcccaccaccacgcctg

SEQ ID NO: 43418 - DNA, 201 bp, Homo sapiens
gaaagcagcaccgccccttggcccccaggtggctagcgctataaaggatcacgcgccccagtcgacgctgagctcctctgctactcagagttgcaacctcmgcctcgctatggctcccagcagcccccggcccgcgctgcccgcactcctggtcctgctcggggctctgttcccaggtgagtcggggtggggattgccgtc

SEQ ID NO: 43419 - DNA, 201 bp, Homo sapiens
acggtgaaaccctgtctctactaaaaatacaaaaaattagctgtgcgtggtgacacgcacctgtagtcccagctatttgggaggctgaggcaggagaatcmcttgaacctgggaggtggaggttgcagtgagccgagatcgcaccactgcactccagcctgggccacagagtgagactccatcttgaaaaaaaaaaaaaat

SEQ ID NO: 43420 - DNA, 201 bp, Homo sapiens
gctgtgcgtggtgacacgcacctgtagtcccagctatttgggaggctgaggcaggagaatcacttgaacctgggaggtggaggttgcagtgagccgagatsgcaccactgcactccagcctgggccacagagtgagactccatcttgaaaaaaaaaaaaaatacaaaagttagccaggggtgttggtgggtgcctgtaatc

SEQ ID NO: 43421 - DNA, 201 bp, Homo sapiens
ataaggacaggcattctgggcaggaggaacagcctgggcaaaagttgggagcagggagaaatcttgatggaggcaggaggaggaggaggtaggttggtgtrggccaggtgcagtggctcacacctgtaatcccagtgctttgggaggccaaagcaagaggattgtttgagcccaggagttcgagaccagcctgggcaacat

SEQ ID NO: 43422 - DNA, 201 bp, Homo sapiens
ttgattgatgggaggaagggtgaggttggcagagccttgaatgccaggtggaggagctgggactttccttcttggggtgatagggagtcatggagggtttstgagcaggccagggattagatagctgaaggctggatttactggaagccaatgagcagttggctatggtccttgtccacgcggcccatgttgtgggcagtg

SEQ ID NO: 43423 - DNA, 201 bp, Homo sapiens
aataccataagattcatcccttttaagcacataattcaatgacttctgtacaaacaaccatgactacaatctaattttaaaatatttcaatcactctaaamaagaaacctcctgcttatgtacagcgactctgtctacctcttaagtgaattctcctacctttaatagccctattttacagttcaggaaactgaggttcag

SEQ ID NO: 43424 - DNA, 201 bp, Homo sapiens
aatgtgctattcaaactgccctgatgggcagtcaacagctaaaaccttcctcaccgtgtactgtgagtaactgagcccggagggctggactaggcagaccsggtgggagagacgtgcaggggcacctgcagaggcctgggggaatctttgccacttgctcgtagggtcaaggaggggctccttgcagggcaggtggggaca

SEQ ID NO: 43425 - DNA, 201 bp, Homo sapiens; identical to SEQ ID NO: 43313

SEQ ID NO: 43426 - DNA, 201 bp, Homo sapiens; identical to SEQ ID NO: 43314

SEQ ID NO: 43427 - DNA, 201 bp, Homo sapiens; identical to SEQ ID NO: 43315

SEQ ID NO: 43428 - DNA, 201 bp, Homo sapiens; identical to SEQ ID NO: 43322

SEQ ID NO: 43429 - DNA, 201 bp, Homo sapiens; identical to SEQ ID NO: 43324

SEQ ID NO: 43430 - DNA, 201 bp, Homo sapiens; identical to SEQ ID NO: 43326

SEQ ID NO: 43431 - DNA, 201 bp, Homo sapiens; identical to SEQ ID NO: 43327

SEQ ID NO: 43432 - DNA, 201 bp, Homo sapiens; identical to SEQ ID NO: 7592

SEQ ID NO: 43433 - DNA, 201 bp, Homo sapiens; identical to SEQ ID NO: 7594

SEQ ID NO: 43434 - DNA, 201 bp, Homo sapiens; identical to SEQ ID NO: 43334

SEQ ID NO: 43435 - DNA, 201 bp, Homo sapiens
ggaggatggaagggaccgggtgggcgtgcccctagcctagggcgtggtatttgggcggagtcgtggaaaggcgggcagtccagagtgtttaagtttttagrcgaaaaaggcgccactggtggctcaggaagctcccagacagagtgcatgcctcgactagcgtgacacctccttggatcggcgtccaagggttatgcaggg

SEQ ID NO: 43436 - DNA, 201 bp, Homo sapiens; identical to SEQ ID NO: 43339

SEQ ID NO: 43437 - DNA, 201 bp, Homo sapiens; identical to SEQ ID NO: 43340

SEQ ID NO: 43438 - DNA, 201 bp, Homo sapiens; identical to SEQ ID NO: 43341

SEQ ID NO: 43439 - DNA, 201 bp, Homo sapiens; identical to SEQ ID NO: 43342

SEQ ID NO: 43440 - DNA, 201 bp, Homo sapiens; identical to SEQ ID NO: 43343

SEQ ID NO: 43441 - DNA, 201 bp, Homo sapiens; identical to SEQ ID NO: 43344

SEQ ID NO: 43442 - DNA, 201 bp, Homo sapiens; identical to SEQ ID NO: 43345

SEQ ID NO: 43443 - DNA, 201 bp, Homo sapiens; identical to SEQ ID NO: 43347

SEQ ID NO: 43444 - DNA, 201 bp, Homo sapiens
caaaacagtcgtcgtgagcgcggagtgtgagcgaggcccaggcgggtagggagcaggggtgccccacggtccaggcactccctgacatcccccatggctgytttgcagcgccaccggagatggatgaatctacctgcccaagtcaccagacgtggctggaaggggctgaggcttccgcgctggcctgcgccgcccggggtc

SEQ ID NO: 43445 - DNA, 201 bp, Homo sapiens
cgggcgctctcaggcacttaccgctgcaaggcggccaatgatcaaggcgaggcggtcaaggacgtaacgctaacggtggagtgtgagtgggggtgcgcagrgtgcatttctatctggttcaaggtctggagggtggccagcctccagggaagagtaggagtagggtatgaggtgtccctttgggtgaggttttgggaaagg

SEQ ID NO: 43446 - DNA, 201 bp, Homo sapiens; identical to SEQ ID NO: 7608

SEQ ID NO: 43447 - DNA, 201 bp, Homo sapiens; identical to SEQ ID NO: 43349

SEQ ID NO: 43448 - DNA, 201 bp, Homo sapiens; identical to SEQ ID NO: 43350

SEQ ID NO: 43449 - DNA, 201 bp, Homo sapiens; identical to SEQ ID NO: 7587

SEQ ID NO: 43450 - DNA, 201 bp, Homo sapiens
tcatcgaggggctgttgcgtgtggcccgggagcatgcgggcacttaccgctgcgaagccaccaaccctcggggctctgcggccaaaaatgtggccgtcacrgtggaatgtgagtaggggcaccgcggagttaggcaggatctgtgggacaaccccggctggacttcctggcccccgtgtgagcccctgcaatcctgtttcc

SEQ ID NO: 43451 - DNA, 201 bp, Homo sapiens; identical to SEQ ID NO: 43353

SEQ ID NO: 43452 - DNA, 201 bp, Homo sapiens; identical to SEQ ID NO: 43354

SEQ ID NO: 43453 - DNA, 201 bp, Homo sapiens; identical to SEQ ID NO: 43356

SEQ ID NO: 43454 - DNA, 201 bp, Homo sapiens; identical to SEQ ID NO: 43357

SEQ ID NO: 43455 - DNA, 201 bp, Homo sapiens; identical to SEQ ID NO: 43358

SEQ ID NO: 43456 - DNA, 201 bp, Homo sapiens; identical to SEQ ID NO: 43359

SEQ ID NO: 43457 - DNA, 201 bp, Homo sapiens; identical to SEQ ID NO: 43360

SEQ ID NO: 43458 - DNA, 201 bp, Homo sapiens; identical to SEQ ID NO: 43361

SEQ ID NO: 43459 - DNA, 201 bp, Homo sapiens; identical to SEQ ID NO: 7601

SEQ ID NO: 43460 - DNA, 201 bp, Homo sapiens; identical to SEQ ID NO: 43363

SEQ ID NO: 43461 - DNA, 201 bp, Homo sapiens; identical to SEQ ID NO: 43366

SEQ ID NO: 43462 - DNA, 201 bp, Homo sapiens; identical to SEQ ID NO: 43368

SEQ ID NO: 43463 - DNA, 201 bp, Homo sapiens; identical to SEQ ID NO: 43369

SEQ ID NO: 43464 - DNA, 201 bp, Homo sapiens; identical to SEQ ID NO: 43367

SEQ ID NO: 43465 - DNA, 201 bp, Homo sapiens; identical to SEQ ID NO: 43370

SEQ ID NO: 43466 - DNA, 201 bp, Homo sapiens; identical to SEQ ID NO: 43371

SEQ ID NO: 43467 - DNA, 201 bp, Homo sapiens; identical to SEQ ID NO: 43372

SEQ ID NO: 43468 - DNA, 201 bp, Homo sapiens; identical to SEQ ID NO: 7633

SEQ ID NO: 43469 - DNA, 201 bp, Homo sapiens
gccttgccgcgccaaggagggtctagggacgtcagatttgcccccaaaccccaaagccaacaatacactccctcctccagacgcaccagcgctggacagcrtgggctgcccagaacgcattacttggctggagggaacagaagcctcgctgagctgtgtggcgcacggggtaccgccgcctgatgtgatctgcgtgcgctc

SEQ ID NO: 43470 - DNA, 201 bp, Homo sapiens; identical to SEQ ID NO: 43375

SEQ ID NO: 43471 - DNA, 201 bp, Homo sapiens; identical to SEQ ID NO: 43377

SEQ ID NO: 43472 - DNA, 201 bp, Homo sapiens; identical to SEQ ID NO: 7591

SEQ ID NO: 43473 - DNA, 201 bp, Homo sapiens; identical to SEQ ID NO: 7593

SEQ ID NO: 43474 - DNA, 201 bp, Homo sapiens; identical to SEQ ID NO: 7595

SEQ ID NO: 43475 - DNA, 201 bp, Homo sapiens; identical to SEQ ID NO: 43384

SEQ ID NO: 43476 - DNA, 201 bp, Homo sapiens; identical to SEQ ID NO: 7598

SEQ ID NO: 43477 - DNA, 201 bp, Homo sapiens; identical to SEQ ID NO: 7600

SEQ ID NO: 43478 - DNA, 201 bp, Homo sapiens; identical to SEQ ID NO: 43389

SEQ ID NO: 43479 - DNA, 201 bp, Homo sapiens; identical to SEQ ID NO: 7639

SEQ ID NO: 43480 - DNA, 201 bp, Homo sapiens; identical to SEQ ID NO: 43392

SEQ ID NO: 43481 - DNA, 201 bp, Homo sapiens; identical to SEQ ID NO: 43393

SEQ ID NO: 43482 - DNA, 201 bp, Homo sapiens; identical to SEQ ID NO: 43394

SEQ ID NO: 43483 - DNA, 201 bp, Homo sapiens; identical to SEQ ID NO: 43395

SEQ ID NO: 43484 - DNA, 201 bp, Homo sapiens; identical to SEQ ID NO: 43396

SEQ ID NO: 43485 - DNA, 201 bp, Homo sapiens; identical to SEQ ID NO: 43398

SEQ ID NO: 43486 - DNA, 201 bp, Homo sapiens; identical to SEQ ID NO: 43397

SEQ ID NO: 43487 - DNA, 201 bp, Homo sapiens; identical to SEQ ID NO: 43399

SEQ ID NO: 43488 - DNA, 201 bp, Homo sapiens; identical to SEQ ID NO: 43400

SEQ ID NO: 43489 - DNA, 201 bp, Homo sapiens; identical to SEQ ID NO: 7644

SEQ ID NO: 43490 - DNA, 201 bp, Homo sapiens; identical to SEQ ID NO: 43402

SEQ ID NO: 43491 - DNA, 201 bp, Homo sapiens
accaaatgctccgcccccaggcttcccggcaccactcctgaccctgagcgaacccagcgtctccgaggggcagatggtgacagtaacctgcgcagctgggrcccaagctctggtcacactggagggagttccagccgcggtcccggggcagcccgcccagcttcagctaaatgccaccgagaacgacgacagacgcagctt

SEQ ID NO: 43492 - DNA, 201 bp, Homo sapiens; identical to SEQ ID NO: 43404

SEQ ID NO: 43493 - DNA, 201 bp, Homo sapiens
ctctcaggcacttaccgctgcaaggcggccaatgatcaaggcgaggcggtcaaggacgtaacgctaacggtggagtgtgagtgggggtgcgcagggtgcayttctatctggttcaaggtctggagggtggccagcctccagggaagagtaggagtagggtatgaggtgtccctttgggtgaggttttgggaaagggaagag

SEQ ID NO: 43494 - DNA, 201 bp, Homo sapiens; identical to SEQ ID NO: 43406

SEQ ID NO: 43495 - DNA, 201 bp, Homo sapiens
ttgggcggagtcgtggaaaggcgggcagtccagagtgtttaagtttttagacgaaaaaggcgccactggtggctcaggaagctcccagacagagtgcatgsctcgactagcgtgacacctccttggatcggcgtccaagggttatgcagggacaacacttcgtggaagccttgccgcgccaaggagggtctagggacgtca

SEQ ID NO: 43496 - DNA, 201 bp, Homo sapiens; identical to SEQ ID NO: 43408

SEQ ID NO: 43497 - DNA, 201 bp, Homo sapiens; identical to SEQ ID NO: 43412

SEQ ID NO: 43498 - DNA, 201 bp, Homo sapiens; identical to SEQ ID NO: 7619

SEQ ID NO: 43499 - DNA, 201 bp, Homo sapiens; identical to SEQ ID NO: 43414

SEQ ID NO: 43500 - DNA, 201 bp, Homo sapiens; identical to SEQ ID NO: 7653

SEQ ID NO: 43501 - DNA, 201 bp, Homo sapiens; identical to SEQ ID NO: 43423

SEQ ID NO: 43502 - DNA, 201 bp, Homo sapiens; identical to SEQ ID NO: 43315

SEQ ID NO: 43503 - DNA, 201 bp, Homo sapiens
tggaaggttgaggcggatgaatcacttgaggccaggagttcgagaccagcccggccaacatggcgaaaacccgtctctacaaaaattagccggtcgtggtsgtgggcgcctgtggtcccagctacttgggaggctgaggcaggagaatcgcttgagcctgggaggcagaggttgcagggagccgagatcccgccactgcac

SEQ ID NO: 43504 - DNA, 201 bp, Homo sapiens
ggggcgtgacctgggtcttggggcggccggccccgcctgcctccctctcggtcccggtagactagacggaagtgggacagagtagaagtcaaaggtgcctkagcgggtggggctgttgatcgcactttgaggggtgggagatggaggtggcagggggactgaattcaaggggagggaccctccggggctgtcactgctgca

SEQ ID NO: 43505 - DNA, 201 bp, Homo sapiens; identical to SEQ ID NO: 7592

SEQ ID NO: 43506 - DNA, 201 bp, Homo sapiens; identical to SEQ ID NO: 7594

SEQ ID NO: 43507 - DNA, 201 bp, Homo sapiens; identical to SEQ ID NO: 43334

SEQ ID NO: 43508 - DNA, 201 bp, Homo sapiens
gcgcccccgggggccctcaacatcggcctgtcgagcaacaacagcacactgagcgtggcaggcgccatgggaagccacggcggcgagtacgagtgcgcagscaccaacgcgcacgggcgccacgcgcggcgcatcacggtgcgcgtggccggtaagtggcagctggggagaggcggggcgaggtatctgagagggggcgtg

SEQ ID NO: 43509 - DNA, 201 bp, Homo sapiens; identical to SEQ ID NO: 43435

SEQ ID NO: 43510 - DNA, 201 bp, Homo sapiens
caccagccaggtgcagtccctgccactaacagcacctcaccttttctgcctgtgccctccctacttaatgatctctctccgctcctactgacctcaaggtstctttcagagccttcagatgagatatttattttagtaggttggtgcaaaagtaattgctgtttttgccattgaaagtaatggcaggcagggcatggtggc

SEQ ID NO: 43511 - DNA, 201 bp, Homo sapiens; identical to SEQ ID NO: 43339

SEQ ID NO: 43512 - DNA, 201 bp, Homo sapiens
ggggcgaggtatctgagagggggcgtgacctgggtcttggggcggccggccccgcctgcctccctctcggtcccggtagactagacggaagtgggacagartagaagtcaaaggtgccttagcgggtggggctgttgatcgcactttgaggggtgggagatggaggtggcagggggactgaattcaaggggagggaccctc

SEQ ID NO: 43513 - DNA, 201 bp, Homo sapiens
cgcgcccccgggggccctcaacatcggcctgtcgagcaacaacagcacactgagcgtggcaggcgccatgggaagccacggcggcgagtacgagtgcgcasccaccaacgcgcacgggcgccacgcgcggcgcatcacggtgcgcgtggccggtaagtggcagctggggagaggcggggcgaggtatctgagagggggcgt

SEQ ID NO: 43514 - DNA, 201 bp, Homo sapiens; identical to SEQ ID NO: 43340

SEQ ID NO: 43515 - DNA, 201 bp, Homo sapiens; identical to SEQ ID NO: 7655

SEQ ID NO: 43516 - DNA, 201 bp, Homo sapiens; identical to SEQ ID NO: 43341

SEQ ID NO: 43517 - DNA, 201 bp, Homo sapiens; identical to SEQ ID NO: 43342

SEQ ID NO: 43518 - DNA, 201 bp, Homo sapiens; identical to SEQ ID NO: 43343

SEQ ID NO: 43519 - DNA, 201 bp, Homo sapiens; identical to SEQ ID NO: 43344

SEQ ID NO: 43520 - DNA, 201 bp, Homo sapiens; identical to SEQ ID NO: 43345

SEQ ID NO: 43521 - DNA, 201 bp, Homo sapiens; identical to SEQ ID NO: 43347

SEQ ID NO: 43522 - DNA, 201 bp, Homo sapiens; identical to SEQ ID NO: 43444

SEQ ID NO: 43523 - DNA, 201 bp, Homo sapiens; identical to SEQ ID NO: 43445

SEQ ID NO: 43524 - DNA, 201 bp, Homo sapiens
accttctgtgcccttcagaccggccagtggtggccgaacttgctgcctcgccccctggaggcgtgcgcccaggaggaaacttcacgttgacctgccgcgcrgaggcctggcctccagcccagatcagctggcgcgcgcccccgggggccctcaacatcggcctgtcgagcaacaacagcacactgagcgtggcaggcgcca

SEQ ID NO: 43525 - DNA, 201 bp, Homo sapiens; identical to SEQ ID NO: 7608

SEQ ID NO: 43526 - DNA, 201 bp, Homo sapiens; identical to SEQ ID NO: 43349

SEQ ID NO: 43527 - DNA, 201 bp, Homo sapiens; identical to SEQ ID NO: 43350

SEQ ID NO: 43528 - DNA, 201 bp, Homo sapiens; identical to SEQ ID NO: 7587

SEQ ID NO: 43529 - DNA, 201 bp, Homo sapiens
tcacgtctgtaatcccagcactttgcgaggctgaggcgggcggatcatggggttagaagatcaagactgtcctggctaacatggtgaaaccccgtcactamtaaaaacacaaaaattagccgggcgtggtggcacatgcctgtagtcccagctactcaagaggctgaggcaggagaatcgctttaaccccggaggcagagg

SEQ ID NO: 43530 - DNA, 201 bp, Homo sapiens; identical to SEQ ID NO: 43353

SEQ ID NO: 43531 - DNA, 201 bp, Homo sapiens; identical to SEQ ID NO: 43450

SEQ ID NO: 43532 - DNA, 201 bp, Homo sapiens; identical to SEQ ID NO: 43354

SEQ ID NO: 43533 - DNA, 201 bp, Homo sapiens
ggtaagtggcagctggggagaggcggggcgaggtatctgagagggggcgtgacctgggtcttggggcggccggccccgcctgcctccctctcggtcccggkagactagacggaagtgggacagagtagaagtcaaaggtgccttagcgggtggggctgttgatcgcactttgaggggtgggagatggaggtggcaggggga

SEQ ID NO: 43534 - DNA, 201 bp, Homo sapiens
gcagctggggagaggcggggcgaggtatctgagagggggcgtgacctgggtcttggggcggccggccccgcctgcctccctctcggtcccggtagactagrcggaagtgggacagagtagaagtcaaaggtgccttagcgggtggggctgttgatcgcactttgaggggtgggagatggaggtggcagggggactgaattc

SEQ ID NO: 43535 - DNA, 201 bp, Homo sapiens
ctggggagaggcggggcgaggtatctgagagggggcgtgacctgggtcttggggcggccggccccgcctgcctccctctcggtcccggtagactagacggwagtgggacagagtagaagtcaaaggtgccttagcgggtggggctgttgatcgcactttgaggggtgggagatggaggtggcagggggactgaattcaagg

SEQ ID NO: 43536 - DNA, 201 bp, Homo sapiens
ctgaggcaggagaatcgctttaaccccggaggcagaggttgcagtgagccgagatcgtgccactgaactccagcctggcgacagagcgagattccgtcttaaaaaaaaaaccaggcgtggtggctcacgcctgtaatcccagcactttgggaggccgaggcgggcggatcacgaggtcgggagatcgagaccatcctcgct

SEQ ID NO: 43537 - DNA, 201 bp, Homo sapiens
tgatcttggctcactgcaacctctgcctcctgggttcaagcaattcccctgccttggcttcccaaatagctgggactataggcatgcaccaccacacccarctaatttttgtatttttagtagagacagggtttcaccatgttggccaggctggtctcgaactcctgacctaaggtgatccacctgcctcggtctcccaaa

SEQ ID NO: 43538 - DNA, 201 bp, Homo sapiens
ccagaccctgtctctaaaaacaaacaacgaaaaaatccaaaaactttttttgaacacctactatgcatcaggcacaatctaagctgtctttttctttttcttttttttatttttgagacggagtctctctgtcgcccaggctggagtgcagtggtgtaatctcagctcactgcaagctctgcctcccacgttcaagcgatt

SEQ ID NO: 43539 - DNA, 201 bp, Homo sapiens
tgtctctaaaaacaaacaacgaaaaaatccaaaaactttttttgaacacctactatgcatcaggcacaatctaagctgtctttttctttttcttttttttwtttttgagacggagtctctctgtcgcccaggctggagtgcagtggtgtaatctcagctcactgcaagctctgcctcccacgttcaagcgattttcctgcc

SEQ ID NO: 43540 - DNA, 201 bp, Homo sapiens; identical to SEQ ID NO: 43358

SEQ ID NO: 43541 - DNA, 201 bp, Homo sapiens
aggctggtctcgaactcctgatccacccacctcagcttcccaaagtgctgggattacaggcaggcatgagccatggtgcccgacatttttttttttttttytttttttttttgagacagagtctcactttgtcacccaggctggagtgcaaaggcaagatctcactgcagcctctgcctcctgggttaaagcgattctccc

SEQ ID NO: 43542 - DNA, 201 bp, Homo sapiens; identical to SEQ ID NO: 43359

SEQ ID NO: 43543 - DNA, 201 bp, Homo sapiens
gtgcaaaggcaagatctcactgcagcctctgcctcctgggttaaagcgattctcccaccttagccccctgagtaggtgagattacaggcacatgccaccamacctgcctaatttttgtatttttaatagagagggggtttcaccattttgtccacgctggtctcgaactcctgacctcaagggattcgcccacctcagcct

SEQ ID NO: 43544 - DNA, 201 bp, Homo sapiens; identical to SEQ ID NO: 43360

SEQ ID NO: 43545 - DNA, 201 bp, Homo sapiens; identical to SEQ ID NO: 43361

SEQ ID NO: 43546 - DNA, 201 bp, Homo sapiens
cttgcagtgagccgagatcgcgccactgcactccaccctggcagacagcaagactccgtctcaaaaaaaaaaaaaaaaattagccagggccgagcacagtrctctcgcttgaatcccagaactttgggaaactaaggcggggggggggggtcacttgaggtcaggagttcgagaccaccctggccaacgtggtgaaacacc

SEQ ID NO: 43547 - DNA, 201 bp, Homo sapiens
ttagccttccaaaatgctgggattacaggcatgaggcaccgcgtcctgcctctgagttttttttttttttttttttactgtctcctagaacatcagccccrgtagagcagggatctttgttctgttcaccactgagggtcctcattgggtcctagcacacacagttgctcaataaatgttgaataagtgggtaaagacagc

SEQ ID NO: 43548 - DNA, 201 bp, Homo sapiens; identical to SEQ ID NO: 7601

SEQ ID NO: 43549 - DNA, 201 bp, Homo sapiens; identical to SEQ ID NO: 43363

SEQ ID NO: 43550 - DNA, 201 bp, Homo sapiens; identical to SEQ ID NO: 43368

SEQ ID NO: 43551 - DNA, 201 bp, Homo sapiens
aaggactttaaaacttgggctggattctgcgtggtggaaacttgacccaattcacaatccactgtggggaagattggggagggaccaaagtcattggatgwtggagggagagaggggtcaagatcgccttctctcacttcctgaagctcctggggctgggttctctctggggtcgggggaacctgacctggtcctgccggt

SEQ ID NO: 43552 - DNA, 201 bp, Homo sapiens; identical to SEQ ID NO: 43369

SEQ ID NO: 43553 - DNA, 201 bp, Homo sapiens; identical to SEQ ID NO: 43371

SEQ ID NO: 43554 - DNA, 201 bp, Homo sapiens; identical to SEQ ID NO: 43372

SEQ ID NO: 43555 - DNA, 201 bp, Homo sapiens
cagtccgcctgccttagccttccaaaatgctgggattacaggcatgaggcaccgcgtcctgcctctgagttttttttttttttttttttactgtctcctaraacatcagccccagtagagcagggatctttgttctgttcaccactgagggtcctcattgggtcctagcacacacagttgctcaataaatgttgaataagt

SEQ ID NO: 43556 - DNA, 201 bp, Homo sapiens; identical to SEQ ID NO: 7633

SEQ ID NO: 43557 - DNA, 201 bp, Homo sapiens; identical to SEQ ID NO: 43469

SEQ ID NO: 43558 - DNA, 201 bp, Homo sapiens; identical to SEQ ID NO: 43375

SEQ ID NO: 43559 - DNA, 201 bp, Homo sapiens
agatggaggtggcagggggactgaattcaaggggagggaccctccggggctgtcactgctgcaggaaaggactttaaaacttgggctggattctgcgtggyggaaacttgacccaattcacaatccactgtggggaagattggggagggaccaaagtcattggatgttggagggagagaggggtcaagatcgccttctctc

SEQ ID NO: 43560 - DNA, 201 bp, Homo sapiens; identical to SEQ ID NO: 43377

SEQ ID NO: 43561 - DNA, 201 bp, Homo sapiens
aataaagtttttataaaggaactccctgtctccgcttctgtttctgcaaggtggaacaagcccagggttccagtcgtgacctcccgagttattcattcaawaagcgatttttgagagggcctggggtggtggcttaggcctgtaatcccaggacttgtgggaggcccaggtgggaggatcccttgcacccaagagtttcag

SEQ ID NO: 43562 - DNA, 201 bp, Homo sapiens; identical to SEQ ID NO: 7591

SEQ ID NO: 43563 - DNA, 201 bp, Homo sapiens
ggagcacggccctcctcaaatcctggattagaacactgacctgggcttcacctccttccattcggtgaagaagggcgaggaattttagccgcaacagcagyctgattgtcggggaaggaggctctgataggaggcaggatcctcttctgcccatcagaggcgcggtggtctcccatcgatcgttgtgggccggagcagggc

SEQ ID NO: 43564 - DNA, 201 bp, Homo sapiens; identical to SEQ ID NO: 7593

SEQ ID NO: 43565 - DNA, 201 bp, Homo sapiens; identical to SEQ ID NO: 7595

SEQ ID NO: 43566 - DNA, 201 bp, Homo sapiens; identical to SEQ ID NO: 43384

SEQ ID NO: 43567 - DNA, 201 bp, Homo sapiens; identical to SEQ ID NO: 7598

SEQ ID NO: 43568 - DNA, 201 bp, Homo sapiens; identical to SEQ ID NO: 7600

SEQ ID NO: 43569 - DNA, 201 bp, Homo sapiens; identical to SEQ ID NO: 43389

SEQ ID NO: 43570 - DNA, 201 bp, Homo sapiens
agatcacgaggtcgaggtcatgagatcgagaccatcctggccaatatggtgaaaccctgtctctactaaaaatacaaaaattagctgggcatggtggtgcrcgcctgtagtcccagctattcgggaggctgaggcaggagaatcgctttaaccccggaggcagaggttgcagtgagccgagatcgtgccactgaactccag

SEQ ID NO: 43571 - DNA, 201 bp, Homo sapiens
acgaggtcgaggtcatgagatcgagaccatcctggccaatatggtgaaaccctgtctctactaaaaatacaaaaattagctgggcatggtggtgcgcgccygtagtcccagctattcgggaggctgaggcaggagaatcgctttaaccccggaggcagaggttgcagtgagccgagatcgtgccactgaactccagcctgg

SEQ ID NO: 43572 - DNA, 201 bp, Homo sapiens; identical to SEQ ID NO: 7639

SEQ ID NO: 43573 - DNA, 201 bp, Homo sapiens; identical to SEQ ID NO: 43392

SEQ ID NO: 43574 - DNA, 201 bp, Homo sapiens; identical to SEQ ID NO: 43393

SEQ ID NO: 43575 - DNA, 201 bp, Homo sapiens; identical to SEQ ID NO: 43394

SEQ ID NO: 43576 - DNA, 201 bp, Homo sapiens; identical to SEQ ID NO: 43395

SEQ ID NO: 43577 - DNA, 201 bp, Homo sapiens; identical to SEQ ID NO: 43396

SEQ ID NO: 43578 - DNA, 201 bp, Homo sapiens; identical to SEQ ID NO: 7641

SEQ ID NO: 43579 - DNA, 201 bp, Homo sapiens; identical to SEQ ID NO: 43397

SEQ ID NO: 43580 - DNA, 201 bp, Homo sapiens; identical to SEQ ID NO: 43398

SEQ ID NO: 43581 - DNA, 201 bp, Homo sapiens; identical to SEQ ID NO: 43400

SEQ ID NO: 43582 - DNA, 201 bp, Homo sapiens; identical to SEQ ID NO: 43399

SEQ ID NO: 43583 - DNA, 201 bp, Homo sapiens; identical to SEQ ID NO: 7642

SEQ ID NO: 43584 - DNA, 201 bp, Homo sapiens
cagacatggtggtgcatgcctgtagtcccagctacttgggaggctgaggcaggaggatcctttgagcctaggaggtcaaagccacttccagctatgatatygtcattgtgctccagcccaggtgacagaaccagaccctgtctctaaaaacaaacaacgaaaaaatccaaaaactttttttgaacacctactatgcatcag

SEQ ID NO: 43585 - DNA, 201 bp, Homo sapiens; identical to SEQ ID NO: 7644

SEQ ID NO: 43586 - DNA, 201 bp, Homo sapiens
gtattcaactccaagggcgtcacccccattttctacccatcccctcaataaagtttttataaaggaactccctgtctccgcttctgtttctgcaaggtggracaagcccagggttccagtcgtgacctcccgagttattcattcaaaaagcgatttttgagagggcctggggtggtggcttaggcctgtaatcccaggact

SEQ ID NO: 43587 - DNA, 201 bp, Homo sapiens; identical to SEQ ID NO: 43402

SEQ ID NO: 43588 - DNA, 201 bp, Homo sapiens
aactccaagggcgtcacccccattttctacccatcccctcaataaagtttttataaaggaactccctgtctccgcttctgtttctgcaaggtggaacaagsccagggttccagtcgtgacctcccgagttattcattcaaaaagcgatttttgagagggcctggggtggtggcttaggcctgtaatcccaggacttgtggg

SEQ ID NO: 43589 - DNA, 201 bp, Homo sapiens; identical to SEQ ID NO: 43491

SEQ ID NO: 43590 - DNA, 201 bp, Homo sapiens; identical to SEQ ID NO: 43493

SEQ ID NO: 43591 - DNA, 201 bp, Homo sapiens
acacgggggcttatttattgctttatttatttacttattcatttatttatgtattcaactccaagggcgtcacccccattttctacccatcccctcaataragtttttataaaggaactccctgtctccgcttctgtttctgcaaggtggaacaagcccagggttccagtcgtgacctcccgagttattcattcaaaaagc

SEQ ID NO: 43592 - DNA, 201 bp, Homo sapiens; identical to SEQ ID NO: 43404

SEQ ID NO: 43593 - DNA, 201 bp, Homo sapiens; identical to SEQ ID NO: 43495

SEQ ID NO: 43594 - DNA, 201 bp, Homo sapiens
acgccccccagactcacacgggggcttatttattgctttatttatttacttattcatttatttatgtattcaactccaagggcgtcacccccattttctasccatcccctcaataaagtttttataaaggaactccctgtctccgcttctgtttctgcaaggtggaacaagcccagggttccagtcgtgacctcccgagtt

SEQ ID NO: 43595 - DNA, 201 bp, Homo sapiens; identical to SEQ ID NO: 43406

SEQ ID NO: 43596 - DNA, 201 bp, Homo sapiens; identical to SEQ ID NO: 43408

SEQ ID NO: 43597 - DNA, 201 bp, Homo sapiens
ttatttattgctttatttatttacttattcatttatttatgtattcaactccaagggcgtcacccccattttctacccatcccctcaataaagtttttatraaggaactccctgtctccgcttctgtttctgcaaggtggaacaagcccagggttccagtcgtgacctcccgagttattcattcaaaaagcgatttttgag

SEQ ID NO: 43598 - DNA, 201 bp, Homo sapiens; identical to SEQ ID NO: 43412

SEQ ID NO: 43599 - DNA, 201 bp, Homo sapiens; identical to SEQ ID NO: 43414

SEQ ID NO: 43600 - DNA, 201 bp, Homo sapiens; identical to SEQ ID NO: 7653

SEQ ID NO: 43601 - DNA, 201 bp, Homo sapiens
gtggcaggcgccatgggaagccacggcggcgagtacgagtgcgcagccaccaacgcgcacgggcgccacgcgcggcgcatcacggtgcgcgtggccggtamgtggcagctggggagaggcggggcgaggtatctgagagggggcgtgacctgggtcttggggcggccggccccgcctgcctccctctcggtcccggtagac

SEQ ID NO: 43602 - DNA, 201 bp, Homo sapiens
cgtggcaggcgccatgggaagccacggcggcgagtacgagtgcgcagccaccaacgcgcacgggcgccacgcgcggcgcatcacggtgcgcgtggccggtmagtggcagctggggagaggcggggcgaggtatctgagagggggcgtgacctgggtcttggggcggccggccccgcctgcctccctctcggtcccggtaga

SEQ ID NO: 43603 - DNA, 201 bp, Homo sapiens
taaacaccagtgatatcaagtgcttgtttaaaatggaaaggatctgacttattaaatgtaaattgcataataattctttaccatgtgacagtccctatttmagtatattaaaagatgtgtattagtccgttttcacgccgctgataaagacatacctgagactgggcaatttacaaaagaggtttaatggacttaacagtt

SEQ ID NO: 43604 - DNA, 201 bp, Homo sapiens
agggacatgactgaataggtaagaaacggattcttcattgtgaattttcctgatggcttctgcaaggctcatagagatgttgatcacctgtattttggaayggtgcttcatcttgtcctcctggggtatgttattggtgactactactgctttaaagcatgcgttgttgatgtgagaaatagctggaccagagaagattct

SEQ ID NO: 43605 - DNA, 201 bp, Homo sapiens
tcaaataccaagggaaaacaaggggtggggtggattttattcttaaaaagcctcagaagttactgtattataaagggacatgactgaataggtaagaaacrgattcttcattgtgaattttcctgatggcttctgcaaggctcatagagatgttgatcacctgtattttggaatggtgcttcatcttgtcctcctggggta

SEQ ID NO: 43606 - DNA, 201 bp, Homo sapiens
ttgtttaagaagccatttcagctagctcacaaattcgttaagtgtggcctgtggacccttgggtctctaaggtggtacagaggcaatggagggtaaaactrctcgtgccttagcatgaaccaagggaatgacactagaatatactgattatcattgagttcttcaccaacatgcctgcacagtaaaataaaatgccagttt

SEQ ID NO: 43607 - DNA, 201 bp, Homo sapiens
agccagaatgagacaatgcagataggaagtcccagcagttaatctcaatccttctttcttcatttcggataagctcagatatacctgatgtgggatatagmaagctacactggagcaagctgggtcttctgctgaattcgtcatcaaataccaagggaaaacaaggggtggggtggattttattcttaaaaagcctcagaa

SEQ ID NO: 43608 - DNA, 201 bp, Homo sapiens
aagccagaatgagacaatgcagataggaagtcccagcagttaatctcaatccttctttcttcatttcggataagctcagatatacctgatgtgggatatasaaagctacactggagcaagctgggtcttctgctgaattcgtcatcaaataccaagggaaaacaaggggtggggtggattttattcttaaaaagcctcaga

SEQ ID NO: 43609 - DNA, 201 bp, Homo sapiens
tgctaaaaaaaaaaaaaaaaagaaaaagaaaaatacttgtgaaattctttgagtcatgagttaaaataactgcttttttatggaacactatttttacttgrgaatgactgacaaactgtgattatttagacttgggtatttggcaactatatttgcaaaagtgaaggaagtgggccagtcacttcaaggagaacaattgac

SEQ ID NO: 43610 - DNA, 201 bp, Homo sapiens
ggctaattttgtatttttagtagagacggggtttcaccatgttggtgaggctggtcttgaactcctgacctcaggtcatctgcccaccttggtctcccaargtgctgggattacaggcgtgagccaccgcgcccagcctacgtcaaatcttttttttctttttaacagaaatctctgttcatttgaaaagccaaatagatc

SEQ ID NO: 43611 - DNA, 201 bp, Homo sapiens
gctcactgcaacctccgcctctggggctcaagcaatcctcccgcctcagcctcttgagtagctgggactacaggcacatgccagcatgcccggctaatttktatattttttgtagagatggggttttgccatgtttcccaggctggtctcgaactcctgggcccaagcaatctgcccacctcagcctcccaaagtgctggg

SEQ ID NO: 43612 - DNA, 201 bp, Homo sapiens; identical to SEQ ID NO: 33639

SEQ ID NO: 43613 - DNA, 201 bp, Homo sapiens
ccgagtagctgggattacagctgtgcaccccacgcctggctactttttttttttttttttttttttttgagagggagtctctctgctgcccaggctggagkgcaatgggtgcaatctcggctcactgcaacctttgcctcccagattcaagtgattctcctgcctcagcctcagctgaggattacaggcacctgccaccac

SEQ ID NO: 43614 - DNA, 201 bp, Homo sapiens
gagattgcagtgagctgagattgcgccactgcactccagcctggcaacagagcgagattctgtctcaaaaaaataaaattaaaaaaggctcatcttttttkttgttgttgttgtttgtttgttttgagaaagagtctcaccctgtttcccaagctggagtgcagtggcgcgacctcggttttcggcaacctctgtctcctg

SEQ ID NO: 43615 - DNA, 201 bp, Homo sapiens
tcatatattaatgagattatagcatttagattccttaattaatgtttaagtgatttcattatgcttgttagtttaatttctcctttcttggcagacctatygtaaaatccaataagcctttggcaatagtacaaactggtctcaggtaggaaggaaggttccacctgagacctccagttccctgtatatagcagggatgta

SEQ ID NO: 43616 - DNA, 201 bp, Homo sapiens
attttattttgaagttttctgattttttgtataatgtttaggaaattaacaactctatttcccctcattgtcttttgggagcccttttttcccccctcccmctcccattgagttctgttcttgctactgtgtagctattgttgtagctgtaactgttaaagtgtttctcatatattaatgagattatagcatttagattcc

SEQ ID NO: 43617 - DNA, 201 bp, Homo sapiens
tagaagcccaggtccttattttcaccaccagtgacctaaataattctgtgatgctctcctgtttttcttctcattcagtttactctaaacacaccagcctygatgatgtttcttagacacaagcatgcttcacatcaggacttttggtctttatttctctgcctgtagtattgtgtccccatagccttacctcctttagag

SEQ ID NO: 43618 - DNA, 201 bp, Homo sapiens
gctggagtgcagtggcgcgatctcagctcaccgcaacctctgcctcccgcattcaagcaattctcctgcctctgcctttcgagtagctgggattataggcmtgcgccaccacacccggctaattttgtattttttagtagagatggggtttctctgcgttggtcatgctggtctcgaactcctgacctcaggtgatctgac

SEQ ID NO: 43619 - DNA, 201 bp, Homo sapiens
tgccaccactgtgaatataatgaaaaccattgactcttacccttcaaagggatgcattttatgtaggtgaattatgttgcaatagttgttttaaaaaattrtattcgggctgggtgtgatgctcacacttgtaatcctagcactttgggaggctgaggcgggtggatcacctgaggtcaggagctcgagaccagcctggcc

SEQ ID NO: 43620 - DNA, 201 bp, Homo sapiens
tggattattaatagaagtaggatgctgtgcaacactgatattttgaaattgactggaaagacagccgtctatccacaaggactaactggattgagtggttrtggtcaaggttgtgattattattatttatgaggtaatacatagggctgtggggtgttggtatggggatgaggggagtgactgctaatgtgtatatggttt

SEQ ID NO: 43621 - DNA, 201 bp, Homo sapiens
aataaatagaaaacagaacacaaaaaaagaaagaaaaaatatttgggcacgatgaggagaaaggggtatagtttaccctaaatttgggataaagctgtaargggtttgggaggagaggagcatgtgtctttactatgatgacaaggcagggctctttgaggccgctgtgagtgtagttgattgagtcacgtagcgtttata

SEQ ID NO: 43622 - DNA, 201 bp, Homo sapiens
aggagaaagatctagaccagtcgttctcaactgggggcaattttgccccccaaagaatttttggcagtgtctggagacatttttggttgtcacagctgggkcaggggaggggtgggaagttactatgggtatctagtaggcgtagatgtcggagattttgctaaacatccacaagacagcaagcagtcccctgcaatgaat

SEQ ID NO: 43623 - DNA, 201 bp, Homo sapiens
agtagagatgggatttcaccgtgttggctaggctggtcttgaactcctgacctcaggtgatccacccgcctcagcctcccaaagtgctgggattataggtrtgagccaccgcacccggccagcccctttcctttcaagtactgtagttaagtaacaaaatggcaagaccaagataggcaatacttttttttttttttctca

SEQ ID NO: 43624 - DNA, 201 bp, Homo sapiens
aactctttgttatccttttttgctagttaatagatgagcagattttgtgtgtccatggtggtttatctcctgatatcaaaacactggatcaaattcgaacyatcgaacggaatcaggaaattcctcataaaggagcattttgtgatctggtttggtcagatcctgaagatgtggatacctgggctatcagtccccgaggag

SEQ ID NO: 43625 - DNA, 201 bp, Homo sapiens
cagtagcagctgtaagtttctatttttaaagtctcatgtacgttcctgccaataacacattgcatatttttatctagttgtcatctcaattatattgatakctttagtattcactgatgagtttagatatgcctgaggttatatgttcaactctttgttatccttttttgctagttaatagatgagcagattttgtgtgtc

SEQ ID NO: 43626 - DNA, 201 bp, Homo sapiens
ggaaattagggctagggtaataatctagtggactgaaatttgacaaatgcacaatttgccagttaccaaatttcagtaaatagaaatatgatgaaatatcmttgggtgtcatggatcacacttgtaatcccagcactttgggagactgaggtgggaggattgcctgaagccagtagtttgagaccagcttgggcaaaaaag

SEQ ID NO: 43627 - DNA, 201 bp, Homo sapiens
aggaggggcatacctcatatttagattctgttgtcagtgtttagtctcatgtatatttgtagaattttttcactgggaaatgaaagctgaacagattactyatagagtgctatatgcatacagtgtagttggggccataagacttaataatacattgcaaacaatgtagtctttaaaggatgccaacaggacttactgtca

SEQ ID NO: 43628 - DNA, 201 bp, Homo sapiens
cccactcccattgagttctgttcttgctactgtgtagctattgttgtagctgtaactgttaaagtgtttctcatatattaatgagattatagcatttagaktccttaattaatgtttaagtgatttcattatgcttgttagtttaatttctcctttcttggcagacctatcgtaaaatccaataagcctttggcaatagta

SEQ ID NO: 43629 - DNA, 201 bp, Homo sapiens
gtatagacagggttttgctatgttggctaggctggtctcgaactcctgacctcaaatgatccacctgcctgagcctcctaaagtgctggaattataggtgygagccaccacggctggcctgtttttgttattttttttaatgagtgatggatgtactatatggcaggaccatggattgatttgttgaagcatataggtgtg

SEQ ID NO: 43630 - DNA, 201 bp, Homo sapiens
agaggtgtccagaattactcttggatacttatgttacttagataacaactacttgttgattgccaaatgtgctctaaacactgttctaatagtattaaackcaggagaaagatctagaccagtcgttctcaactgggggcaattttgccccccaaagaatttttggcagtgtctggagacatttttggttgtcacagctgg

SEQ ID NO: 43631 - DNA, 201 bp, Homo sapiens
tttagagtcagagatgatttcataaaggagcagttacgaggggcagagttcaggtagacaaaatgagaaggaaagaacatgcaaacagaataaacaccatrtgcaatagtataatgtaatttgcaagaacatggctggttcggggaacttgaagtggtttggtatggctggaggtggtactggaaagaaagatgccaaatc

SEQ ID NO: 43632 - DNA, 201 bp, Homo sapiens
gcagtggtgcagttgtagcttgctgcaacctcaaactcctgggctcaattgatccttctgcctcagcctcaaaagtagctgggagtacaggtgtgcaataktgtgcccagctgattaattattatttttatttttgagatggagtctcactctgtcaccaggctggagtgtaatggcgcgatctcggctcactgcaacctc

SEQ ID NO: 43633 - DNA, 201 bp, Homo sapiens
ctttatgacaaatacttgtttcttcttcttctttttttttttttctttgaggtagggtctcagtctgctgcccagggtggagtgcagtggtgcagttgtarcttgctgcaacctcaaactcctgggctcaattgatccttctgcctcagcctcaaaagtagctgggagtacaggtgtgcaatagtgtgcccagctgattaa

SEQ ID NO: 43634 - DNA, 201 bp, Homo sapiens
ttactgctttatgacaaatacttgtttcttcttcttctttttttttttttctttgaggtagggtctcagtctgctgcccagggtggagtgcagtggtgcarttgtagcttgctgcaacctcaaactcctgggctcaattgatccttctgcctcagcctcaaaagtagctgggagtacaggtgtgcaatagtgtgcccagct

SEQ ID NO: 43635 - DNA, 201 bp, Homo sapiens
gtgagccactgtgtttggccattccttatttgtgttttccacaattttagaacactgccctgtatgtgataatcagtaaaggtttattgactcaaactgtwtactgctttatgacaaatacttgtttcttcttcttctttttttttttttctttgaggtagggtctcagtctgctgcccagggtggagtgcagtggtgcag

SEQ ID NO: 43636 - DNA, 201 bp, Homo sapiens
gggattacagatgtgagccactgtgtttggccattccttatttgtgttttccacaattttagaacactgccctgtatgtgataatcagtaaaggtttattractcaaactgtttactgctttatgacaaatacttgtttcttcttcttctttttttttttttctttgaggtagggtctcagtctgctgcccagggtggagt

SEQ ID NO: 43637 - DNA, 201 bp, Homo sapiens
gtagagatggggtttcaccatgttggccaggctggtctcgaacttctggcctcaggtgatccgcccacctcggcctcccaaagtgttgggattacagatgkgagccactgtgtttggccattccttatttgtgttttccacaattttagaacactgccctgtatgtgataatcagtaaaggtttattgactcaaactgttt

SEQ ID NO: 43638 - DNA, 201 bp, Homo sapiens
taccacacccagctaatttttgtatatatatattttttggtagagatggggtttcaccatgttggccaggctggtctcgaacttctggcctcaggtgatcygcccacctcggcctcccaaagtgttgggattacagatgtgagccactgtgtttggccattccttatttgtgttttccacaattttagaacactgccctgt

SEQ ID NO: 43639 - DNA, 201 bp, Homo sapiens
ttagtttgtttttttgagacggagtcttgctctgttgcccaggctagagtgcaggtgcacgttctcagctcactgcaacctccgcctcccggattcaagckattctcctgcctcagcctcctgagtagctgggattacaggcacccaccaccactcctggctaatttttgtatttttagtagagatggggtttcaccatgt

SEQ ID NO: 43640 - DNA, 201 bp, Homo sapiens
gaagcatgcttaagcttaagccatttttcaatcttgaccccaccattttgttccctgtgagatttggggtgaactgcagtttcctagcctcactttcctawcaatcgttacgaagattaaaaggaaaaatatcatttgtatcgcatttagcatcagaaatgctttaataatattcgtttcccttcctttcaggctggaaga

SEQ ID NO: 43641 - DNA, 201 bp, Homo sapiens
gttggataaacgaacgctgaaggtatgctagtaccaggtactgttctcggtgctggagttacagcaaaaaactccctgccctcgtgggattctcactggargcatgcttaagcttaagccatttttcaatcttgaccccaccattttgttccctgtgagatttggggtgaactgcagtttcctagcctcactttcctatca

SEQ ID NO: 43642 - DNA, 201 bp, Homo sapiens
tctttgtctattttgttcacgaagtactgcaagcgccttgagctgtacctggcacatctttgttgctcagcaaagagtggttggataaacgaacgctgaasgtatgctagtaccaggtactgttctcggtgctggagttacagcaaaaaactccctgccctcgtgggattctcactggaagcatgcttaagcttaagccat

SEQ ID NO: 43643 - DNA, 201 bp, Homo sapiens
atttttagtagagacagggtttcactatattgaccaggctggtctcaaactcctgacctcatgatccgtccgcctcggcctcccaaagtgctgggattacmggcgtgtgccaccatgctgggcccttttttttcccccaaaggacacaagtacaggtaagaaaatgtagttttttgttttttttttttttttagacagggt

SEQ ID NO: 43644 - DNA, 201 bp, Homo sapiens
caactttggctcactgcaacctccgcctctggggctcaagcaatcctcccgcctcagcctcttgagtagctgggactacaggcacatgccagcatgcccgrctaatttttatattttttgtagagatggggttttgccatgtttcccaggctggtctcgaactcctgggcccaagcaatctgcccacctcagcctcccaaa

SEQ ID NO: 43645 - DNA, 201 bp, Homo sapiens
gcttgggcaaaaaagcgagaccctgtctctataaaaatttgctgggcatggtggtgtgtaactgtggtcctagctactgaggagggcaaggtaggagggtyacttgagcccaggaatttgtggctgcagtgagttatgattgcaccactgcattccggcctgggtaacagagccaaaccctgtcttaaaacaaaaaacaaa

SEQ ID NO: 43646 - DNA, 201 bp, Homo sapiens
gctcctcagttttagatttgaattttataattaattatagttagcctttttatttcaaaataacccagttttccccagtggtaacattttgtagaactatrgtgtaatgccacaaccaatacaacatcagccaacattgacactgatacaactcatgatctttaggtacaacccaagatcatcacctcatgatgttcagat

SEQ ID NO: 43647 - DNA, 201 bp, Homo sapiens
cgcgcctggcaaaaaaaaaatttttttaagggatagcgtcttgctatgctgtccaggctggtcccaaatgcttcaggtgattctcctgccttggcctcccmaaatgctgagattataggtgtgagccactgtgcccagccaacaaacacttatttacatggttccttgtgttgagtactgttccctgtgggtgccaggggc

SEQ ID NO: 43648 - DNA, 201 bp, Homo sapiens
tgcctcagccttcctgagtagctgtgattacaggcatgtgccaccacgcccagttaattttgtatttttagtagagaccaggtttccccatgttgttcagkctggtctcgaactcctcacctcagatgatgcacccacctcggcctcccaaagtgctgggattataggtgtgagcctggcctgttagtttgtttttttgag

SEQ ID NO: 43649 - DNA, 201 bp, Homo sapiens
ttaatcacaatttctgtttcgctaagttggaaatggtcacatcactagtactggatcaaatctacataactgtttttgtttgtttgttcgctcttgttgcycagggtggagtgcaatggcgtgagcttggctcactgcaacctctgcctcccgggttcaagcgattctcctgcctcagccttcctgagtagctgtgattac

SEQ ID NO: 43650 - DNA, 201 bp, Homo sapiens
aaagtatgccaggagtactttttctgaggctgtaaaggcaaaataaaacattctattaagaaaagtaatcattgaggccacttaatgagcaagatggaaargatttgttctgtagaaaagaagacagaaatttacttgtgttttaaattgattagaagataaaatactaaatgcatacgatgttccagatttaatcacaat

SEQ ID NO: 43651 - DNA, 201 bp, Homo sapiens
ttggtagagacagggtcttgctatgttacccaggccagtcttgaactcctgggctcaagcgatcctcccaccttggcttcccaaaatgctgggataacagkcatgagccactatacttggcctgtatccatttcttaataaacttaaaaatatatgttttgggcaaccaagacaaaagtattctgaatttttctttatagg

SEQ ID NO: 43652 - DNA, 201 bp, Homo sapiens
aaacaccagtgatatcaagtgcttgtttaaaatggaaaggatctgacttattaaatgtaaattgcataataattctttaccatgtgacagtccctatttcrgtatattaaaagatgtgtattagtccgttttcacgccgctgataaagacatacctgagactgggcaatttacaaaagaggtttaatggacttaacagttt

SEQ ID NO: 43653 - DNA, 201 bp, Homo sapiens
agaccattttatttcttgttgaaacatagctgcattgtacttgacttgtatttgtttctttttttttcttaaaaaaatttttaatcttttttttggtgggrgagcggggacatggtctcactctcacccatgctgtagtgtggtggcacaatcatggctcattgcagcctcgacctcctgggctcaggcagtcctcccacc

SEQ ID NO: 43654 - DNA, 201 bp, Homo sapiens
ttaaaataacagcacctactctccaccccagcaccccatccctcttctagtgtgtctgtttgctctatacttccttgatatcactatgtgacaaattactrttatatattttacttatttattgtctgtctcattctattagaatgtaagccccttgagagcagagcttttagtctgttttggttgttgctatttactttg

SEQ ID NO: 43655 - DNA, 201 bp, Homo sapiens; identical to SEQ ID NO: 7678

SEQ ID NO: 43656 - DNA, 201 bp, Homo sapiens
acaatttttagaccattttatttcttgttgaaacatagctgcattgtacttgacttgtatttgtttctttttttttcttaaaaaaatttttaatctttttwttggtgggggagcggggacatggtctcactctcacccatgctgtagtgtggtggcacaatcatggctcattgcagcctcgacctcctgggctcaggcagt

SEQ ID NO: 43657 - DNA, 201 bp, Homo sapiens
tgaggcaggagaatcgcttgaaccagggaggcggaggttgcagtgagccaagattgcgccactgcagtccagcctgggtgacagagggagactccgtctcmccaaaaaaaaaaaaaaaaaaaaaaagaaagaaaaatctgttggacttctttgtacctcttagtttgataaacattagatttccttcttaccttaaggaag

SEQ ID NO: 43658 - DNA, 201 bp, Homo sapiens; identical to SEQ ID NO: 33981

SEQ ID NO: 43659 - DNA, 201 bp, Homo sapiens
taatctcagtacttggggaggctgaggtgggcagatcatttgagatcaggagtttgagaccagactgaccgacttggtgaaaccccctctctactaaaaayacagaaattagccgagcatggtggtaggtgcctgtaatcccagtttacttacttgggaggctgaggcagggagaatggcttgaacccgggagaattgctt

SEQ ID NO: 43660 - DNA, 201 bp, Homo sapiens; identical to SEQ ID NO: 33983

SEQ ID NO: 43661 - DNA, 201 bp, Homo sapiens
agtgccgcgatctcagctcactgcaacctccgcctcccaactcaagcggttctcctgcctcagcctccagagtagctgggaccacaagcacgcactaccgsgccaggctaattttggtactttttgtagctacagatagaatagagatctttgtctattttgttcacgaagtactgcaagcgccttgagctgtacctggca

SEQ ID NO: 43662 - DNA, 201 bp, Homo sapiens; identical to SEQ ID NO: 33671

SEQ ID NO: 43663 - DNA, 201 bp, Homo sapiens; identical to SEQ ID NO: 33985

SEQ ID NO: 43664 - DNA, 201 bp, Homo sapiens; identical to SEQ ID NO: 33986

SEQ ID NO: 43665 - DNA, 201 bp, Homo sapiens
ggattacaggcgtgtgccaccatgctgggcccttttttttcccccaaaggacacaagtacaggtaagaaaatgtagttttttgttttttttttttttttaracagggtctcactttctctcccaggctagagtgcagtggtgggatctcagctggtcaggaactcctgacctcaaaaagacctgcccgcctcggtctccca

SEQ ID NO: 43666 - DNA, 201 bp, Homo sapiens; identical to SEQ ID NO: 33988

SEQ ID NO: 43667 - DNA, 201 bp, Homo sapiens; identical to SEQ ID NO: 33991

SEQ ID NO: 43668 - DNA, 201 bp, Homo sapiens; identical to SEQ ID NO: 7664

SEQ ID NO: 43669 - DNA, 201 bp, Homo sapiens
gcaaaatggtacagccactttggaagacggtttggcagtttcttataaaactaaacaaactcttcatataatccagcagtcctgctccttgatatttaccsaaatgagttgtaaacttatgtccatacaaaaacctgtacatagatttttatagccactttattcataattgccaaaacttggaaggaaccaagatgtcct

SEQ ID NO: 43670 - DNA, 201 bp, Homo sapiens; identical to SEQ ID NO: 34008

SEQ ID NO: 43671 - DNA, 201 bp, Homo sapiens; identical to SEQ ID NO: 34010

SEQ ID NO: 43672 - DNA, 201 bp, Homo sapiens; identical to SEQ ID NO: 34012

SEQ ID NO: 43673 - DNA, 201 bp, Homo sapiens; identical to SEQ ID NO: 7668

SEQ ID NO: 43674 - DNA, 201 bp, Homo sapiens
atgtgctctaaacactgttctaatagtattaaacgcaggagaaagatctagaccagtcgttctcaactgggggcaattttgccccccaaagaatttttggyagtgtctggagacatttttggttgtcacagctgggtcaggggaggggtgggaagttactatgggtatctagtaggcgtagatgtcggagattttgctaaa

SEQ ID NO: 43675 - DNA, 201 bp, Homo sapiens; identical to SEQ ID NO: 7658

SEQ ID NO: 43676 - DNA, 201 bp, Homo sapiens
gtcacagctgggtcaggggaggggtgggaagttactatgggtatctagtaggcgtagatgtcggagattttgctaaacatccacaagacagcaagcagtcmcctgcaatgaataattagtagtgccatggttgagaaactctgatctggcctgaggatacagatactaccttctggatcataagcgtgtgaatatcatggt

SEQ ID NO: 43677 - DNA, 201 bp, Homo sapiens
ggaatcacttgaactgggaggcagtttgcagtgaactgaaattgtgctactggactccagcctgggcaacagaccaagactctgtctcaaaaaaaaagggraaaaaagaaggttatataaatggaattatacagtatataaccttttgggacagttttctgttgtttcatttttttcactcaacataaatgccttgagatg

SEQ ID NO: 43678 - DNA, 201 bp, Homo sapiens; identical to SEQ ID NO: 7660

SEQ ID NO: 43679 - DNA, 201 bp, Homo sapiens
ctaagtgatcactgctgctgcagagactgcaaccaaagtcggcccagagactcaatactaatctctttgcgatgctactccgccatcttcaagataggcartactttgaactttcaactgttttcagttaaaacacacacacacactttgaactttcaactgttttcaattaaaacacacacacacacacacacacacccc

SEQ ID NO: 43680 - DNA, 201 bp, Homo sapiens
agttttctgttgtttcatttttttcactcaacataaatgccttgagatgaatccaggttgttgtgtggcagtattcgtttctttttattgctgagtagtaktacatggtgtggatgtaccaaaatgtgtttaaccattcactcattgaaggatatctgatttgtttttagttttgggctatgatgcattaggcttctgcga

SEQ ID NO: 43681 - DNA, 201 bp, Homo sapiens
cttcaagataggcagtactttgaactttcaactgttttcagttaaaacacacacacacactttgaactttcaactgttttcaattaaaacacacacacacwcacacacacaccccttatattgggaagtgctccagcatcataatgaagtcaaaaaactagattctgatcctgcatcagtgtatcttaatttagataagtt

SEQ ID NO: 43682 - DNA, 201 bp, Homo sapiens
ctgcctcagccttcccagtaggtgggattacaggcatgcaccaccatgcctggctaatttttgtatttttagtagagacggggtttcaccatgttgaccasgcctgtcttgaactcctgacctcaagtgatctgcccgcctgggcctcccaaagtgctgtgattacaggcgtgagccaccatgcccagcctcctacatttt

SEQ ID NO: 43683 - DNA, 201 bp, Homo sapiens
ttgatggagtctcgctttgtcacccagtctggagtgcagtggcgcaatgtcggctcaatgcaacctctgcctcccgggttcaagcgattctcctgcctcarccttcccagtaggtgggattacaggcatgcaccaccatgcctggctaatttttgtatttttagtagagacggggtttcaccatgttgaccaggcctgtct

SEQ ID NO: 43684 - DNA, 201 bp, Homo sapiens
ttgcacctgtcctgcctttttttcctcccctcccctccctctctctctttctctctttctttctttttgatggagtctcgctttgtcacccagtctggagygcagtggcgcaatgtcggctcaatgcaacctctgcctcccgggttcaagcgattctcctgcctcagccttcccagtaggtgggattacaggcatgcacca

SEQ ID NO: 43685 - DNA, 201 bp, Homo sapiens
aaacaagaacagcatcttcttccatttgaatttttttctccaagaaattctgagcagattatccctttacctttttttccttttttttttttgagacaggktctcactctgttgcctaggctggagtgcagtggcacaactttggctcactgcaacctccgcctctggggctcaagcaatcctcccgcctcagcctcttga

SEQ ID NO: 43686 - DNA, 201 bp, Homo sapiens; identical to SEQ ID NO: 7663

SEQ ID NO: 43687 - DNA, 201 bp, Homo sapiens
caaagtgctgggattataggtgtgagccaccgcacccggccagcccctttcctttcaagtactgtagttaagtaacaaaatggcaagaccaagataggcartacttttttttttttttctcaaagacctcaaatcacacagatacagacactttattagtttcctctacaagagacaataacatgaatctttttttttttg

SEQ ID NO: 43688 - DNA, 201 bp, Homo sapiens
gctctgtcgcccaggctggagtgcagtggcgcaatctcggctcactgcaacctctgcctcctgggtccacaccattctcctgcctcagcctcccaggtagytgggactacaggcgcctgccaccatgcccggctaatttttttgtatttttagtagagacggggtttcaccgtgttagccaggatggtctcaatctcctga

SEQ ID NO: 43689 - DNA, 201 bp, Homo sapiens; identical to SEQ ID NO: 7659

SEQ ID NO: 43690 - DNA, 201 bp, Homo sapiens
aaaattagccaggtgtggtggcacttgcctgtagttccagctgttcagaaggctgaggtggtgggatcgcttgaacccaagtggttgaggttgcagtgagytgtgatcgcgccactgctgattgtgccactgtattccaacttgggcaatagagtgagaccttgtctcaaaaacaaaaaactacgtaggcagcagaaagag

SEQ ID NO: 43691 - DNA, 201 bp, Homo sapiens
ggagttcaagaccagcctggacaacatagggagatccccatctctaccagaaataaaattagccaggtgtggtggcacttgcctgtagttccagctgttcmgaaggctgaggtggtgggatcgcttgaacccaagtggttgaggttgcagtgagctgtgatcgcgccactgctgattgtgccactgtattccaacttgggc

SEQ ID NO: 43692 - DNA, 201 bp, Homo sapiens
gcttcacgtagatatataattgagaaaatcttggggattggtcataacctgcagacttctttcctatatcattttcagcttcacttaaggcaatagtgatrtgtcaggtttttttttttctaaaattatggaagaagccaaagtacagagcttccatggtgttaacaaaagaagtgtgtaccctattaactatgtagacag

SEQ ID NO: 43693 - DNA, 201 bp, Homo sapiens
atatttgaggccacacgtgctgttgtgaatgtgactgaattgtacttacctgttaattttatgtggcatatgataggggagtcattcttgtgcattttccygtttttaatagaataatttcaaataaggacagccttcgttagtagtaatgtagcatttgtgctcatctgagtccttcagacattccttttgtggcttctt

SEQ ID NO: 43694 - DNA, 201 bp, Homo sapiens
gaggggggagggatagcgttaggagacatacctaatgtaaatgacgagttaatgggtgcagcacaccaacatgacacatgtatacatatgtaaaagaccgrcacgttgtgcacatgtaccctagaacttaaagtttaataataaaaaaaatttagccgggcatggtggtgggggcctgtaatcccagctactcaggagact

SEQ ID NO: 43695 - DNA, 201 bp, Homo sapiens
ttgggaggctgaggcaggcggatcacaagatcaggagatcgagaccatcctgaccaatatggtgaaaccccttctcttctaaaaatacaaaaatgagctgrgcgtggtggtgtgtgcatgtaatcccagttactcgggaggctgaggcaggagaattgcttgaaccaaggagtcagagtttgtggtgagccgagatcatgc

SEQ ID NO: 43696 - DNA, 201 bp, Homo sapiens
gattgccggccgggtggggtggctcacacctgtaatctcagcactttgggaggctgaggcaggcggatcacaagatcaggagatcgagaccatcctgaccmatatggtgaaaccccttctcttctaaaaatacaaaaatgagctgagcgtggtggtgtgtgcatgtaatcccagttactcgggaggctgaggcaggagaat

SEQ ID NO: 43697 - DNA, 201 bp, Homo sapiens
ccagcctgaccaacctggtgaaacccccgtctctacaaaaaatacaaaaatcagccgggtgtggtggcggcttgtacctgtaatcccagctactcaggagkctgaggcaagagaatcgcttgaacccgggaggcggaggttgcagtgaaccgagattgtgccactgcactccagcctgggtgacagagtgatactgtctca

SEQ ID NO: 43698 - DNA, 201 bp, Homo sapiens
ggaggccaacgtgggtggatcacaaggtcaggagtttgagaccagcctgaccaacctggtgaaacccccgtctctacaaaaaatacaaaaatcagccgggygtggtggcggcttgtacctgtaatcccagctactcaggagtctgaggcaagagaatcgcttgaacccgggaggcggaggttgcagtgaaccgagattgtg

SEQ ID NO: 43699 - DNA, 201 bp, Homo sapiens
gcttccatactctccctgtttaaaataacagcacctactctccaccccagcaccccatccctcttctagtgtgtctgtttgctctatacttccttgatatyactatgtgacaaattactgttatatattttacttatttattgtctgtctcattctattagaatgtaagccccttgagagcagagcttttagtctgttttg

SEQ ID NO: 43700 - DNA, 201 bp, Homo sapiens
cgggcgcagtggctcacgcctgtaatcccagcactttgggaggccgaggcaggtggatcacctgaggtcaggagtttgagaccagcctgaccaacatggaraaaccccgtctctactaaaaaaaaaaaaaaaatacaaaattagccgggcttggtggtgcatgcctgtaatcccagctactcaggaagctgaggtgggaga

SEQ ID NO: 43701 - DNA, 201 bp, Homo sapiens
cataatatttgaggccacacgtgctgttgtgaatgtgactgaattgtacttacctgttaattttatgtggcatatgataggggagtcattcttgtgcattytcccgtttttaatagaataatttcaaataaggacagccttcgttagtagtaatgtagcatttgtgctcatctgagtccttcagacattccttttgtggct

SEQ ID NO: 43702 - DNA, 201 bp, Homo sapiens
ttccacgtacacttttgccaatttccacacaggtctcctagttgctgaatttctcaatcactgccttgccgagctccaggcccaggcgatcggcagttttytgagataagccctggtgggagctgccgctgaagattttgatattcaggatcctggccaactaccctaagcactcttcactaagtgatcactgctgctgca

SEQ ID NO: 43703 - DNA, 201 bp, Homo sapiens
ccccttctggccttcgggctgccccaggacccgcagctgtaacagctttatttagaaggctcggctccccaccccatccctgggtctcccgcagtcggagscgagcccccgcggcagtgccctcgggatggggtcgcctccaccggaggtgacaggagcgcggagtggccggcgtctgacaggagatgccaccggctaccg

SEQ ID NO: 43704 - DNA, 201 bp, Homo sapiens
gagacaatgcagataggaagtcccagcagttaatctcaatccttctttcttcatttcggataagctcagatatacctgatgtgggatatagaaagctacastggagcaagctgggtcttctgctgaattcgtcatcaaataccaagggaaaacaaggggtggggtggattttattcttaaaaagcctcagaagttactgta

SEQ ID NO: 43705 - DNA, 201 bp, Homo sapiens
gccccttctggccttcgggctgccccaggacccgcagctgtaacagctttatttagaaggctcggctccccaccccatccctgggtctcccgcagtcggarccgagcccccgcggcagtgccctcgggatggggtcgcctccaccggaggtgacaggagcgcggagtggccggcgtctgacaggagatgccaccggctacc

SEQ ID NO: 43706 - DNA, 201 bp, Homo sapiens
tgagacaatgcagataggaagtcccagcagttaatctcaatccttctttcttcatttcggataagctcagatatacctgatgtgggatatagaaagctacwctggagcaagctgggtcttctgctgaattcgtcatcaaataccaagggaaaacaaggggtggggtggattttattcttaaaaagcctcagaagttactgt

SEQ ID NO: 43707 - DNA, 201 bp, Homo sapiens
tagcgcggctgtgcaagtacctgccagagaacgacctgaaggtgagccctatttgcgggctcgccccttccggctgtggggcgcccgccggccggcccttyctttctccaggacccccgccgggtatccagtccagtcgcggtggagggcctcccccattgccagtcgacccggtcctacccggcgtcacgccgagggtct

SEQ ID NO: 43708 - DNA, 201 bp, Homo sapiens
gagaggggtggctgtccacaacagaaaactacacatcccagcacccccgcggcagacgactacgggtcccagcaggtttcgcggggtggaccgaagcgggmtctcttggggcctgcagtcggggttcagccagagggggcgccgggcgtaccgacgtagcggggagaaacgggtcgcgctttaacggcgctgcgcaggcgc

SEQ ID NO: 43709 - DNA, 201 bp, Homo sapiens
aggattataaatcattctactataaagatgcatgcacttgcatgtttactgcagcactattcacaatagcaaagacttggaactagctcaaatgcccatcratgatagactggttaaagaaaatgtggcacatatacaccatggaatactttgcagggacatggatgaagctggaaaccatcattctcagcaaactaacac

SEQ ID NO: 43710 - DNA, 201 bp, Homo sapiens; identical to SEQ ID NO: 34040

SEQ ID NO: 43711 - DNA, 201 bp, Homo sapiens
tcgctctgtcacccaggctggagtgcagtggtgcgatcttcgctcactgcaagctctgcctactgggttcacgccattctcctgcctccgcctcccaagtwgctgggactacaggcgcccgccaccatgcccggctaatttttttgtattttttagtagagacagggtttcaccgtgttagccaggatggtctcaatctcc

SEQ ID NO: 43712 - DNA, 201 bp, Homo sapiens
gggtggctcacacctgtaatctcagcactttgggaggctgaggcaggcggatcacaagatcaggagatcgagaccatcctgaccaatatggtgaaaccccktctcttctaaaaatacaaaaatgagctgagcgtggtggtgtgtgcatgtaatcccagttactcgggaggctgaggcaggagaattgcttgaaccaaggag

SEQ ID NO: 43713 - DNA, 201 bp, Homo sapiens
atttgctcactgccaggtatggtggcttacacgtataatcccagcactttgggaggccaaagcagcggaatagcttgaggccaggaatttaaaaccagccwcagcaagacctcacctcaacaattttttttttttttctgttggccaggctggagtgcagtggcacgacctcagctccctgtaacccccacctcaaagcaa

SEQ ID NO: 43714 - DNA, 201 bp, Homo sapiens
cagctacttgggaggctgaggtgggatgattgtttaagctcaggagttctagaccaacctgggcaacatagtgagaccccatctctaaaaaaaaaaaaaaattgaatttttaaaaattaaattacttggccgggcgcagtggctcacgcctgtaatcccagcactttgggaggccgaggcaggtggatcacctgaggtcag

SEQ ID NO: 43715 - DNA, 201 bp, Homo sapiens
tgtgaattctcctctcactaaacaatttttttgttttggaaaagttaatttttcattaaaatgtgtttgtgatactttttgatgggtatgttattgatttktttttttgagatggaatttcactcttgtcacccagactgcagtgcaatggtgtgatctcagctcactgcaacctctgcctcccgggttcaagcgattctt

SEQ ID NO: 43716 - DNA, 201 bp, Homo sapiens
atcctcctgtctcctgtctcggcctcccaaagtgctgggattacaggcgtgagtcaccatgcccggccttttttttatttcttttttttttttttttttttggacagggtctcgctctgtcacccaagctggagtgcagtggtgtgatctcagttcattgcagcctctgcctcccgggttcaagtgattcttgtgcctcag

SEQ ID NO: 43717 - DNA, 201 bp, Homo sapiens
agtagttggttctcaataaatacaaatactttctccttaaccccttcttaactcagtatttcattttcttcgttttctaaaggaggtgagttccttgttaytcctgagtccaagtaagagtaaatgtatgtatgggtaaaggaatgactttggtatactgcttttcttttttaaaactttttaattattattattattatt

SEQ ID NO: 43718 - DNA, 201 bp, Homo sapiens
gaccccatctctaaaaaaaaaaaaaaattgaatttttaaaaattaaattacttggccgggcgcagtggctcacgcctgtaatcccagcactttgggaggcygaggcaggtggatcacctgaggtcaggagtttgagaccagcctgaccaacatggagaaaccccgtctctactaaaaaaaaaaaaaaaatacaaaattagc

SEQ ID NO: 43719 - DNA, 201 bp, Homo sapiens
cccacctcggcccctgccttggcctcccaaagtgctgggattacaggggtgagccaccacgccggccactttcctattctttcagctgttttcctattggkgtaatattggcccaagtcagacattaatgggaagtgtaaatagtatattatcatatatggttgttaaatgcaaaactgagcctagaacgctgttataatt

SEQ ID NO: 43720 - DNA, 201 bp, Homo sapiens
ggaggaccaagtcacatcttatgtggatggcggcaggcaaagagagagagactgtgcagggatctcttgtttttaaaaccatcagatctcatgagacttaytgtcatgagaacagcacaggaaagacttgcccccatgattcaattactttccatcgagtccctcccacaacatgtgggaattcaagatgagatttgggtg

SEQ ID NO: 43721 - DNA, 201 bp, Homo sapiens
tattaaaagatgtgtattagtccgttttcacgccgctgataaagacatacctgagactgggcaatttacaaaagaggtttaatggacttaacagtttcacwtggctggagaggcctcacaatcatgcagaaggcaaggaggaccaagtcacatcttatgtggatggcggcaggcaaagagagagagactgtgcagggatct

SEQ ID NO: 43722 - DNA, 201 bp, Homo sapiens
caccaaaccgtgaacaattgtttatgttgtatgtgttccttaaaaaacaattgttccaggtgcagtggctcacgcctgtaatcccagcactttgggaggcygaggcaggcagatcagaaggtcaggagttcaagaccagcctagccaacatggtgaaaccctgtctctacgaaaaatacaaaaattagccaggtgtggtgg

SEQ ID NO: 43723 - DNA, 201 bp, Homo sapiens
ccacttgtttctgtaatcttttgtctcattaaaatagatacagaatttgggtgggctgttagattagcttactgagaaattagacaattgataaaggatgycagaattctcaagagatagatggggagatgtatgaaagaaaatgagaaagggaatcctatgataataatctaggagtgactttatggtaactgagcttta

SEQ ID NO: 43724 - DNA, 201 bp, Homo sapiens
tgtctgactttttagacttatggaacattgttataaaaggtgttactttatttctttcagtagttaacatctcactttcagttttcttcactttgactaasattcctattaagtgttaaaagtttaaatgataattttatttcaagtgtaaaagatgaatgtgttagaagttgttagttgtaattggtccaatgtattgta

SEQ ID NO: 43725 - DNA, 201 bp, Homo sapiens
ctcccaaagttccaggattacaggtgtgagcagcttggcctgttagctaattttcagatacattttatattaagcttcctaaagttgtttttttttttttrtctgactttttagacttatggaacattgttataaaaggtgttactttatttctttcagtagttaacatctcactttcagttttcttcactttgactaaca

SEQ ID NO: 43726 - DNA, 201 bp, Homo sapiens
cgcctcggcctcccaaagtgctgggattacaggcgtgagcctctgtgcttggcccactttttttttttttttttgagacggagtcttgctctgtcacccargctagagtgcagtggcgtgatcttggcttactgcatcctccacctctcaggttcaggtgattctcctgcctcagcctcccgagtagcagggattgattac

SEQ ID NO: 43727 - DNA, 201 bp, Homo sapiens
tgcactccagcctggacaacaagaacgaaactccgtctcaaaaaaaaaaaaaaaagaattgcccaagttctcgggaaatgggaacctatgtatcactgacrcagaatatttaatcgtctacctgtgtgtctggtaaatacaaactttaaaagcttttgtttaagaacagatatctggccaggcgtagtggctcacgcctgt

SEQ ID NO: 43728 - DNA, 201 bp, Homo sapiens
acaaaaatcagcgggggtgcggtggcagataagctactcgggaggctgaggcaggaaaatcacttgaacccaggaggtggaggttgcagtgagctgagatmgtgccattgcactccagcctggacaacaagaacgaaactccgtctcaaaaaaaaaaaaaaaagaattgcccaagttctcgggaaatgggaacctatgtat

SEQ ID NO: 43729 - DNA, 201 bp, Homo sapiens
ttatagtacctcctattttcccttttgagtactaatcacaatttgcaattaaatatttgctcactgccaggtatggtggcttacacgtataatcccagcastttgggaggccaaagcagcggaatagcttgaggccaggaatttaaaaccagcctcagcaagacctcacctcaacaattttttttttttttctgttggcca

SEQ ID NO: 43730 - DNA, 201 bp, Homo sapiens
gacctcaggtgatccacctgccttggcctcccagagtgctgggattacaggcgtgagccactgcgtccggcctgagactccccatctctaaaaaaaaaaawttttttttttttgagacagagtttctctcttgttatccaggctggagtgcaatggcacgatcctggctcactgcaacctctgcctcccaggttcaagcga

SEQ ID NO: 43731 - DNA, 201 bp, Homo sapiens
actcttaagcaacttggaaataaggttgatggaaaataggcatcagtttctttttttttttttttgtttgagacagtctcgctctttcgccaggctggagsgcagtggcgcaatctcggctcactgaaacctctgactccctgtttcaagcaattctcctgcctcagcctcctgagtagctgggattacaggcaggctaat

SEQ ID NO: 43732 - DNA, 201 bp, Homo sapiens
acgccattctcctgcctcagcctttcaagtagctgagactacaggcgcccgccaccacgcccggctaattttttgtatttttagtagagatggggtttcaytgtgttagccaggatggtctcactctcctgacctcgtgatccgcctgcctcgaccccccaaagtgctgggattacaggcgtgagccaccgcgcccggccg

SEQ ID NO: 43733 - DNA, 201 bp, Homo sapiens
ctcaagggatcctcctgtctttgcctccctaagtggtgggattacaggcgcgagccactgtgcccagcaggggaactctgtactttaagattttttttgttgtttgttttgagacagagtcttgctgtcaccccaggctggagtgcagtggcgccatctctgctcactgcaagttcggcctcccgggttcacgccattctc

SEQ ID NO: 43734 - DNA, 201 bp, Homo sapiens; identical to SEQ ID NO: 33733

SEQ ID NO: 43735 - DNA, 201 bp, Homo sapiens
gctcaagggatcctcctgtctttgcctccctaagtggtgggattacaggcgcgagccactgtgcccagcaggggaactctgtactttaagattttttttgttgtttgttttgagacagagtcttgctgtcaccccaggctggagtgcagtggcgccatctctgctcactgcaagttcggcctcccgggttcacgccattct

SEQ ID NO: 43736 - DNA, 201 bp, Homo sapiens; identical to SEQ ID NO: 7670

SEQ ID NO: 43737 - DNA, 201 bp, Homo sapiens; identical to SEQ ID NO: 34054

SEQ ID NO: 43738 - DNA, 201 bp, Homo sapiens
ggctcaagggatcctcctgtctttgcctccctaagtggtgggattacaggcgcgagccactgtgcccagcaggggaactctgtactttaagattttttttkttgtttgttttgagacagagtcttgctgtcaccccaggctggagtgcagtggcgccatctctgctcactgcaagttcggcctcccgggttcacgccattc

SEQ ID NO: 43739 - DNA, 201 bp, Homo sapiens
ttaaagaaaatgtggcacatatacaccatggaatactttgcagggacatggatgaagctggaaaccatcattctcagcaaactaacacaggaacagaaaaygaaacaccgcatgttctcactcgtaagcgggagttgaacaatgagaacatatgggcagaggggaggggaacatcacatgctggggcctgtcagggggtcc

SEQ ID NO: 43740 - DNA, 201 bp, Homo sapiens
ctcaaactcctgggctcaattgatccttctgcctcagcctcaaaagtagctgggagtacaggtgtgcaatagtgtgcccagctgattaattattatttttwtttttgagatggagtctcactctgtcaccaggctggagtgtaatggcgcgatctcggctcactgcaacctctgcctcctgggttcaaacaattctcctgc

SEQ ID NO: 43741 - DNA, 201 bp, Homo sapiens
tttggggagcaggggttctataacttggaggttgtctaatctcttggacagttcttaagggtgacatgtttacctgaggttttttttttttttttttttttgagactgaatctaactctattgcccaggctggagtacagtggtaccatctcagctcactgcagtctccacctcctgggttcaagcagttctgcctcagct

SEQ ID NO: 43742 - DNA, 201 bp, Homo sapiens
ccatctaggtttatgtaaggacatccgatgatgttcacacaacgatgaaatcacctaacaatgcattttttagaatgtatccccatggttaagggacatayaactgtatgtagttagtcactagcgttcttttggctctatgtggaggtcctagcaggactaaatatgtgtcatatcttgctatcctagtttaagctgaat

SEQ ID NO: 43743 - DNA, 201 bp, Homo sapiens
ataaaggatattaatataagcagtgtcttaacacattcctgaaaactggaataaaccaagtcatgttttcccccagtgtagtgtttcccccagttgtagastttttaagatgtgaagtacagccatgatcaaaggtcagaaagttagagaccaacctcgaactactaaaattggaagcataaaattgaacttttgtattat

SEQ ID NO: 43744 - DNA, 201 bp, Homo sapiens
ggcctcccaaagtgctgggattacaggcgtgtgccaccatgctgggcccttttttttcccccaaaggacacaagtacaggtaagaaaatgtagttttttgktttttttttttttttagacagggtctcactttctctcccaggctagagtgcagtggtgggatctcagctggtcaggaactcctgacctcaaaaagacctg

SEQ ID NO: 43745 - DNA, 201 bp, Homo sapiens
cggcctcccaaagtgctgggattacaggcgtgtgccaccatgctgggcccttttttttcccccaaaggacacaagtacaggtaagaaaatgtagttttttkttttttttttttttttagacagggtctcactttctctcccaggctagagtgcagtggtgggatctcagctggtcaggaactcctgacctcaaaaagacct

SEQ ID NO: 43746 - DNA, 201 bp, Homo sapiens; identical to SEQ ID NO: 33747

SEQ ID NO: 43747 - DNA, 201 bp, Homo sapiens; identical to SEQ ID NO: 33753

SEQ ID NO: 43748 - DNA, 201 bp, Homo sapiens
atccaagctacatagtcaagcagatgatgatggatcaggcttcttcctcccaagaaacatttgctgcgctgtgctgcctcccccctcaaccaccccccacyccctaccccatggctgctcaagcccaactgcctactcctgccttacagggtgctcagccaccgggactaggtttggggttgcccagggctcttgccataa

SEQ ID NO: 43749 - DNA, 201 bp, Homo sapiens
ctgtagaaaagaagacagaaatttacttgtgttttaaattgattagaagataaaatactaaatgcatacgatgttccagatttaatcacaatttctgtttygctaagttggaaatggtcacatcactagtactggatcaaatctacataactgtttttgtttgtttgttcgctcttgttgctcagggtggagtgcaatggc

SEQ ID NO: 43750 - DNA, 201 bp, Homo sapiens
gagccagaggcagcagtgagctgagattgcaccactggactccaggctgggtaacagactgagactccgtctcaaaaaaaaaaaaaaaaaaaaaaaaaaaragagtgagggagagacatagagtagatggtagatattatttgacgatgaggtaggtgtctagtaatgtaggatgaaaatagggccgtgtgctgtggctca

SEQ ID NO: 43751 - DNA, 201 bp, Homo sapiens
tttttaagatcacaaatgaatcctgaaaccaaaaagtttgagaactactgggcagactggatgtttccttgcctctgataaaaaaaaaaattccacttccyagccgggcgcggtggctcacgcctgtaatcccagcactgtgggaggccgaggcgggcggatcacgaggtcaagagatcaagaccatcctggccaatgtgg

SEQ ID NO: 43752 - DNA, 201 bp, Homo sapiens
cactccagcctgggcagcagagtgagaccccatctaaaaagaaaaagaaaaaagtctgtgtgatgaaatgggaagtatgcataaagcatatctactgcatrctgaagaaagatagtttactcaaggaaaagtagttgtgggttgggcacggtggctcacacctgtaatcccagcaccagatcacctgaggtcgggagttca

SEQ ID NO: 43753 - DNA, 201 bp, Homo sapiens
catgcccggccttttttttatttcttttttttttttttttttttggacagggtctcgctctgtcacccaagctggagtgcagtggtgtgatctcagttcawtgcagcctctgcctcccgggttcaagtgattcttgtgcctcagcatcccgagtagctgggactacaggcacgcaccaccacgcctggctgatttttgtat

SEQ ID NO: 43754 - DNA, 201 bp, Homo sapiens
acccctgacctcatgtgatcctcctgtctcctgtctcggcctcccaaagtgctgggattacaggcgtgagtcaccatgcccggccttttttttatttcttktttttttttttttttttggacagggtctcgctctgtcacccaagctggagtgcagtggtgtgatctcagttcattgcagcctctgcctcccgggttcaag

SEQ ID NO: 43755 - DNA, 201 bp, Homo sapiens
ccactgcgtccggcctgagactccccatctctaaaaaaaaaaaattttttttttttgagacagagtttctctcttgttatccaggctggagtgcaatggcmcgatcctggctcactgcaacctctgcctcccaggttcaagcgattctcctgcctcagcctcctgagtagctgagattacaggcatgtgccaccacgcctg

SEQ ID NO: 43756 - DNA, 201 bp, Homo sapiens
gcagttcttgctaacatatatcttgtgttttgaggttaacaaagtactttttcacatattctgtgtcagttttttcccaaagtcctgtgagataggattaytttgtagacaatgaaagggagactgaaagattgaagagaaatagcccaaactcacacacagctactacagggcagattgagatttgaaactaatttgggt

SEQ ID NO: 43757 - DNA, 201 bp, Homo sapiens
ggctgaggcaggagaatctcttgaacccgggaggtgaaggttgcagtgagccgagaccgcaccactgcactccagcctgggcaacagagcaagactctgtytaaaaaaaaaaaaaagaatttcaaagcagtaacaggaggggcatacctcatatttagattctgttgtcagtgtttagtctcatgtatatttgtagaattt

SEQ ID NO: 43758 - DNA, 201 bp, Homo sapiens
aaaaaacaaaaaaacccaaaaaccttttactgttaaaattatttcttcatatatatatatatatatatatatatatatatatatatatatatgtgtgtgtrtgtgtgtatatgtgtgtgtgtgtttggtgaaaaacatcattttacagttcttgtaaagctgtctgtctcctagaaccttagtgtctctgtaggtagtttg

SEQ ID NO: 43759 - DNA, 201 bp, Homo sapiens
aaaaaaaacaaaaaaacccaaaaaccttttactgttaaaattatttcttcatatatatatatatatatatatatatatatatatatatatatatgtgtgtrtgtgtgtgtatatgtgtgtgtgtgtttggtgaaaaacatcattttacagttcttgtaaagctgtctgtctcctagaaccttagtgtctctgtaggtagtt

SEQ ID NO: 43760 - DNA, 201 bp, Homo sapiens
cccgttacactcagtagaagcccaggtccttattttcaccaccagtgacctaaataattctgtgatgctctcctgtttttcttctcattcagtttactctraacacaccagccttgatgatgtttcttagacacaagcatgcttcacatcaggacttttggtctttatttctctgcctgtagtattgtgtccccatagcct

SEQ ID NO: 43761 - DNA, 201 bp, Homo sapiens; identical to SEQ ID NO: 33782

SEQ ID NO: 43762 - DNA, 201 bp, Homo sapiens; identical to SEQ ID NO: 33783

SEQ ID NO: 43763 - DNA, 201 bp, Homo sapiens; identical to SEQ ID NO: 33784

SEQ ID NO: 43764 - DNA, 201 bp, Homo sapiens; identical to SEQ ID NO: 33785

SEQ ID NO: 43765 - DNA, 201 bp, Homo sapiens; identical to SEQ ID NO: 33786

SEQ ID NO: 43766 - DNA, 201 bp, Homo sapiens; identical to SEQ ID NO: 7666

SEQ ID NO: 43767 - DNA, 201 bp, Homo sapiens; identical to SEQ ID NO: 7656

SEQ ID NO: 43768 - DNA, 201 bp, Homo sapiens
tgtttatgtagctgtacagtttccatagttgtgcacttgactcaggccaaaattgctgtttgcctaaacttattaaattgttggagataattatagagtgygttctataatcttgatgcctttagtagtaataggatttggtattttatttaaatgattatgtaggccgattgttttttaagtgctaagtacttacagtgc

SEQ ID NO: 43769 - DNA, 201 bp, Homo sapiens
tgcagggattataggcgttagccaccgcgcctggcaaaaaaaaaatttttttaagggatagcgtcttgctatgctgtccaggctggtcccaaatgcttcargtgattctcctgccttggcctcccaaaatgctgagattataggtgtgagccactgtgcccagccaacaaacacttatttacatggttccttgtgttgagt

SEQ ID NO: 43770 - DNA, 201 bp, Homo sapiens
acaaagactgtaatagaggctgaccagggtgttggcaaacagaagaagcagtatgtaactttagagtcagagatgatttcataaaggagcagttacgaggrgcagagttcaggtagacaaaatgagaaggaaagaacatgcaaacagaataaacaccatgtgcaatagtataatgtaatttgcaagaacatggctggttcg

SEQ ID NO: 43771 - DNA, 201 bp, Homo sapiens
ttttgagacggagtctcgctctgttgtccaggctggagtgcagtggtgcgatctcggctcactgcaacctctgcctcccaggttcaagtgattctcctgcytcagtctcctgagtagctgggatcacaggcacgtgccaccacaccaggctaagtttttctttttctttctttctttttttctttttcttttttttaagac

SEQ ID NO: 43772 - DNA, 201 bp, Homo sapiens
gggtctcactctgttgcctaggctggagtgcagtggcacaactttggctcactgcaacctccgcctctggggctcaagcaatcctcccgcctcagcctctygagtagctgggactacaggcacatgccagcatgcccggctaatttttatattttttgtagagatggggttttgccatgtttcccaggctggtctcgaact

SEQ ID NO: 43773 - DNA, 201 bp, Homo sapiens
atcctgaagagattgaaaaagaagagcaagctgctactgaaaaggctgtgacaaaggaggaatttcagggtgaatggactgctccagctcctgagttcacygttactcagcctgaggttgcagactggtctgaagggtgcaggtatcctctgtgcctattcagcagttccctactgaagactggagcactcagcctgccac

SEQ ID NO: 43774 - DNA, 201 bp, Homo sapiens
tttttttttttttatttgagacgcagtctcgctctgtcgcccaggctggagtgcagtggcgcaatctcggctcactgcaacctctgcctcctgggtccacrccattctcctgcctcagcctcccaggtagctgggactacaggcgcctgccaccatgcccggctaatttttttgtatttttagtagagacggggtttcacc

SEQ ID NO: 43775 - DNA, 201 bp, Homo sapiens
acctgtgggagctcatgcctgatctctacttctttttttttttttatttgagacgcagtctcgctctgtcgcccaggctggagtgcagtggcgcaatctcrgctcactgcaacctctgcctcctgggtccacaccattctcctgcctcagcctcccaggtagctgggactacaggcgcctgccaccatgcccggctaattt

SEQ ID NO: 43776 - DNA, 201 bp, Homo sapiens
caacaacaagggagctcactcagtgggtttgatgtggtggatgctggctcaggaagttctgcacaaaggtggcaccatttcctgtgaacacctgtgggagstcatgcctgatctctacttctttttttttttttatttgagacgcagtctcgctctgtcgcccaggctggagtgcagtggcgcaatctcggctcactgcaa

SEQ ID NO: 43777 - DNA, 201 bp, Homo sapiens
ccgtttaaaaaaaaaaaaaacaaaaaaacccaaaaaccttttactgttaaaattatttcttcatatatatatatatatatatatatatatatatatatatrtatatgtgtgtgtgtgtgtgtatatgtgtgtgtgtgtttggtgaaaaacatcattttacagttcttgtaaagctgtctgtctcctagaaccttagtgtct

SEQ ID NO: 43778 - DNA, 201 bp, Homo sapiens
ctccgtttaaaaaaaaaaaaaacaaaaaaacccaaaaaccttttactgttaaaattatttcttcatatatatatatatatatatatatatatatatatatrtatatatgtgtgtgtgtgtgtgtatatgtgtgtgtgtgtttggtgaaaaacatcattttacagttcttgtaaagctgtctgtctcctagaaccttagtgt

SEQ ID NO: 43779 - DNA, 201 bp, Homo sapiens
ccgggtgtggtggcacatgcctgtaaccccagctacttgggaggctgaggcaggaaaattgcttgaatctgggagatggaggtagaagtgagccgagatcrtgtcactgcatttcagcctgggagacagagtgagactccgtttaaaaaaaaaaaaaacaaaaaaacccaaaaaccttttactgttaaaattatttcttca

SEQ ID NO: 43780 - DNA, 201 bp, Homo sapiens
tttttattgctgagtagtattacatggtgtggatgtaccaaaatgtgtttaaccattcactcattgaaggatatctgatttgtttttagttttgggctatkatgcattaggcttctgcgagtatttatatacagattttgaacatgtttttattgccaagactacagttgctgggtcaaatggtaagtgtgtggtttgcaa

SEQ ID NO: 43781 - DNA, 201 bp, Homo sapiens
actgatacaactcatgatctttaggtacaacccaagatcatcacctcatgatgttcagatttcttcagttttacttgtgtttgtgtgtgtgtgtgtgtgtktgtgtgtgtgtgtgtgtgtgtgtgtgtgtttgtgtgtattcagttctttgcagttttattgggtaagggctcatgtatccaactctatagtcaaaataca

SEQ ID NO: 43782 - DNA, 201 bp, Homo sapiens
cactgatacaactcatgatctttaggtacaacccaagatcatcacctcatgatgttcagatttcttcagttttacttgtgtttgtgtgtgtgtgtgtgtgkttgtgtgtgtgtgtgtgtgtgtgtgtgtgtttgtgtgtattcagttctttgcagttttattgggtaagggctcatgtatccaactctatagtcaaaatac

SEQ ID NO: 43783 - DNA, 201 bp, Homo sapiens
attgacactgatacaactcatgatctttaggtacaacccaagatcatcacctcatgatgttcagatttcttcagttttacttgtgtttgtgtgtgtgtgtktgtgtttgtgtgtgtgtgtgtgtgtgtgtgtgtgtttgtgtgtattcagttctttgcagttttattgggtaagggctcatgtatccaactctatagtcaa

SEQ ID NO: 43784 - DNA, 201 bp, Homo sapiens
atacaacatcagccaacattgacactgatacaactcatgatctttaggtacaacccaagatcatcacctcatgatgttcagatttcttcagttttacttgwgtttgtgtgtgtgtgtgtgtgtttgtgtgtgtgtgtgtgtgtgtgtgtgtgtttgtgtgtattcagttctttgcagttttattgggtaagggctcatgta

SEQ ID NO: 43785 - DNA, 201 bp, Homo sapiens
agggggttttgccatgttggtcaggctggtcttgaactcctgacctcaaatgatccacccactttggcctcccaaaatgctgggattacaggcgagagccrccgtgcccagctggctcctcagttttagatttgaattttataattaattatagttagcctttttatttcaaaataacccagttttccccagtggtaacat

SEQ ID NO: 43786 - DNA, 201 bp, Homo sapiens
gttgatgcggggaggctgtggggaggggcagggggtatatgggaactctgcacttttttctttttttctttttctttttttccctttatatggagaacgargtctctctatattgctgagggcggtcttgaactcctgggctcaagggatcctcctgtctttgcctccctaagtggtgggattacaggcgcgagccactgt

SEQ ID NO: 43787 - DNA, 201 bp, Homo sapiens; identical to SEQ ID NO: 7661

SEQ ID NO: 43788 - DNA, 201 bp, Homo sapiens
acccacctcagcctcccaaagttctgggattacaggcgtgattcaccatgcccagcctaatttttatatttagtagagatagggggttttgccatgttggycaggctggtcttgaactcctgacctcaaatgatccacccactttggcctcccaaaatgctgggattacaggcgagagccgccgtgcccagctggctcctc

SEQ ID NO: 43789 - DNA, 201 bp, Homo sapiens
tctgcacttttttctttttttctttttctttttttccctttatatggagaacgaggtctctctatattgctgagggcggtcttgaactcctgggctcaagsgatcctcctgtctttgcctccctaagtggtgggattacaggcgcgagccactgtgcccagcaggggaactctgtactttaagattttttttgttgtttgt

SEQ ID NO: 43790 - DNA, 201 bp, Homo sapiens
aagagagggaggagtgttttaggcagagcaatagaaagtacaaaggctgccgggcaaggtggctcgcgcctgtaatcctagcactttgggaggctcaggcrggtggatcacgaggtcaggaaatcgagaccatcctggctaacacgatgaaaccccgtctctactaaaaatacaaaaaattagccgggcatggaggcaggc

SEQ ID NO: 43791 - DNA, 201 bp, Homo sapiens
gtagggcagagggaggggtctcccatggtcttccctggcaaagactgcttggggcgggggtctgggtcatgtcctgagagggccaaccacgggagtgggargcttgtgccaggagcgacagtatacgctgggaggaggcagcaggtatgagaagccagggaggagcagacgtggcctcccatgtcagccagggaggtggat

SEQ ID NO: 43792 - DNA, 201 bp, Homo sapiens
gcttcggccttgaccgctaccagtgtgactgcacccgcacgggctattccggccccaactgcaccatccgtgagctgggccttcagccctcactccttccrtcttgagcccttctgctccccgggccctttctcctagaccctaacttcctaccctcctctctgaccatggccctgttctccttccttgcctggttctgcc

SEQ ID NO: 43793 - DNA, 201 bp, Homo sapiens
cccaaacccttggaaaggtcctggaaccaggcagttctggacagtcctcatctgtggggatggggactagcagcttggcctttgggctgcgtgtgtctggyatgcagcgtggtgtgctgatcatctctgcctccgcgtgtcttggggactcagtgagagcaaatgggaaggttctctgctgatggggcagttgtgggaggg

SEQ ID NO: 43794 - DNA, 201 bp, Homo sapiens
aggtgggtggatcaattgagcccaggaggtcgaggctgtagtgagccataattgcggcactgcactctggcctgggcaatagagtgagaccctgtctcaaaaataaataaataaataaataaataaataaataaataaataaataggttggcaaactacagcctgcaggccaaattcggcccacctctccatttttgtaaa

SEQ ID NO: 43795 - DNA, 201 bp, Homo sapiens
ggtgggtggatcaattgagcccaggaggtcgaggctgtagtgagccataattgcggcactgcactctggcctgggcaatagagtgagaccctgtctcaaaaataaataaataaataaataaataaataaataaataaataaataggttggcaaactacagcctgcaggccaaattcggcccacctctccatttttgtaaat

SEQ ID NO: 43796 - DNA, 201 bp, Homo sapiens
gtgcagagactggcctgtctggggataggagtggaaatagggagcccacttagggaaaggagtcagagtggaagatgagcgggggttgcttgaggtagtgrtggtagagatggagagcaggggactgattttaagagacattttggaggtggaatcaacagccttggctgaggggaactggcagctggaggcaggagtggg

SEQ ID NO: 43797 - DNA, 201 bp, Homo sapiens
gtgggtggatcaattgagcccaggaggtcgaggctgtagtgagccataattgcggcactgcactctggcctgggcaatagagtgagaccctgtctcaaaaataaataaataaataaataaataaataaataaataaataaataggttggcaaactacagcctgcaggccaaattcggcccacctctccatttttgtaaata

SEQ ID NO: 43798 - DNA, 201 bp, Homo sapiens
agccctggctttctggctgggctgtgatggtcaggctgtagtctagtggcacccagtctcctctccgcccaccctgacaccttggggcaccagcggcaggmccactgttgtccttcctgggagaacttttcctgccccagagcagtggtgtttatggaaagaacgtggcgggggaggcgggaggggggaagctggatgggc

SEQ ID NO: 43799 - DNA, 201 bp, Homo sapiens
tgggtggatcaattgagcccaggaggtcgaggctgtagtgagccataattgcggcactgcactctggcctgggcaatagagtgagaccctgtctcaaaaataaataaataaataaataaataaataaataaataaataaataggttggcaaactacagcctgcaggccaaattcggcccacctctccatttttgtaaataa

SEQ ID NO: 43800 - DNA, 201 bp, Homo sapiens
aagatcttgacaatggaaaataaaacactatgaaagaaattggagaggacacacgaaaaacagaaaaatattccatattcatagattggaagaatcaacaytgttaaaatgtccatacaacccaaagcagtctatagattcaatacaatccttatcaaaataccaatgacattctccatataaacagaaaaaacaatccta

SEQ ID NO: 43801 - DNA, 201 bp, Homo sapiens
gtgagacctctccaggagcattacaatccaggctgtagctagggtgagcaggagggcacgtgattggtgtggataatggggagggggctatgcagagagaratcctatcccttgttaccagtggggtatagggaaggaggtccttgctgccttagctgggaagggctcagggcctggggtgaagctgggcctgtgggacag

SEQ ID NO: 43802 - DNA, 201 bp, Homo sapiens
caggcccactgttgtccttcctgggagaacttttcctgccccagagcagtggtgtttatggaaagaacgtggcgggggaggcgggaggggggaagctggaygggccggactgggagggaggagcctcagctcccgcacagcctctcttggcagggagggtgtgggcagccgttccagcttcagcgtctggagcttgtggct

SEQ ID NO: 43803 - DNA, 201 bp, Homo sapiens
gggtggatcaattgagcccaggaggtcgaggctgtagtgagccataattgcggcactgcactctggcctgggcaatagagtgagaccctgtctcaaaaatwaataaataaataaataaataaataaataaataaataaataggttggcaaactacagcctgcaggccaaattcggcccacctctccatttttgtaaataaa

SEQ ID NO: 43804 - DNA, 201 bp, Homo sapiens
ggatggctgggtgtgctggggaaactgagggagatgacttgtgggtgccagcaccatgggactttgggtgatcttggacctattccttcctccttctaggwgcttcctgagctggcgaaaaggagagctggatgctgggattctataaattcggcggtggatgtgagtctagctacagcatggaccctggccagccctgga

SEQ ID NO: 43805 - DNA, 201 bp, Homo sapiens
ctttcttttttgcccaattatagttgttgatcaaaatgactatctcttaagcatgaacgttattatttcatcctaagcaccagagctttcttttctttcctttttttttttttttttttgagatacaatcttgctctcttgcctgggctggagtgcagtggtgtgattttggctcactgtaacctctatctcctgggttca

SEQ ID NO: 43806 - DNA, 201 bp, Homo sapiens
agtagaaggggctcttcaggttgcctcgctgacccatcttgtcagtccctggatcagcccagcacttcctctgaggccccatctggcctcatccaggcacycttggtatacaggtcccacccgtctgtattcttttttagtccattcactaatgcacaatgagccatggtctgtgctattttgttttttgccttttctgtt

SEQ ID NO: 43807 - DNA, 201 bp, Homo sapiens
tttttttctctctggctgccaggtccccagagactctctaaatattactctttaggggatttgggtcctgcctcttcactgggcaatcttgcagcctgacrcctctgcatcctggaggacttggtgttccctggctgtgcctgtcccctagtcacgctcagtcctggacctggagccctgacttttgggctagggggtgtt

SEQ ID NO: 43808 - DNA, 201 bp, Homo sapiens
aggaacttacccaggctccaggacagcctggcctggctcccagaccactgctgtgcttctctctcggcagatcggtgggggcaggaacatggaccaccacrtcctgcatgtggctgtggatgtcatcagggagtctcgggagatgcggctgcagcccttcaatgagtaccgcaagaggtttggcatgaaaccctacacctc

SEQ ID NO: 43809 - DNA, 201 bp, Homo sapiens
tatatatacatatatatcaatatatacatatacatatcaatacatatatacatatacacacacatatatatgtgtgtgtatatatatactatatatatacatatatatatatacatatatatatatacatatatatatacatatatatatacatatatatatatatatacatatatatatatatatttcccccaatatcct

SEQ ID NO: 43810 - DNA, 201 bp, Homo sapiens
agttgccagggcttaagcaaaactatttgcatgattcttgtggtccttgcttgtgtgtgtgtgtgtgtgtgtgtgtgtgtgtgtgtgtgtgtgtgtatttraggtggtgttgccgtcttcgaagtggggaccaagaggactctgctgcccaggtcaagccctgtgctgtgaagtgaggagtgaggagactgagaccagggc

SEQ ID NO: 43811 - DNA, 201 bp, Homo sapiens
atatatacatatatatcaatatatacatatacatatcaatacatatatacatatacacacacatatatatgtgtgtgtatatatatactatatatatacatatatatatatacatatatatatatacatatatatatacatatatatatacatatatatatatatatacatatatatatatatatttcccccaatatcctc

SEQ ID NO: 43812 - DNA, 201 bp, Homo sapiens
ttgtccattccacaataccagacattactccaggtactggagatgtagtgggaacaagacttttgtggttcttggctcatcttttagtgctcccaccctakaaagtgatggcagtcatacgacagctgacagcattagggcccttactgcgtgtcaggcactgttctaagagcttctcctatgttatcagaattctaagag

SEQ ID NO: 43813 - DNA, 201 bp, Homo sapiens
gccaagagggatttccttatagagtttctccaggaggcagcagggcggatgccagagctccatgcaccctcccaggagattttctagccctatctctcctrttcccttggtctgtgaccttcttctggatcctagagcccagaccccaccctgatgtgggccaagtctgattccatcaggaatgggggctgaggcagctga

SEQ ID NO: 43814 - DNA, 201 bp, Homo sapiens
ccaggtagagggtttagcaagtacaaaagcttagaggtggagaacagcttggtgacttggagggagtgtaaaaatgggagcgtttgctgagcctagtgatsgagcgtaagaatgactttacaggaaggtggagatgtctgtggggaccgtgttaaggaattctactttctgccaagagcagagagagtatttggaaaggtt

SEQ ID NO: 43815 - DNA, 201 bp, Homo sapiens
aattctactttctgccaagagcagagagagtatttggaaaggttttaagtcagctcatgatgcaagatttgttgtttttttttttttaagttttttttttyttttttttttttttcttttttgcttgggtgcagtgcagagactggcctgtctggggataggagtggaaatagggagcccacttagggaaaggagtcagag

SEQ ID NO: 43816 - DNA, 201 bp, Homo sapiens
gccaagagcagagagagtatttggaaaggttttaagtcagctcatgatgcaagatttgttgtttttttttttttaagttttttttttcttttttttttttytcttttttgcttgggtgcagtgcagagactggcctgtctggggataggagtggaaatagggagcccacttagggaaaggagtcagagtggaagatgagcg

SEQ ID NO: 43817 - DNA, 201 bp, Homo sapiens
aaggttttaagtcagctcatgatgcaagatttgttgtttttttttttttaagttttttttttcttttttttttttttcttttttgcttgggtgcagtgcaragactggcctgtctggggataggagtggaaatagggagcccacttagggaaaggagtcagagtggaagatgagcgggggttgcttgaggtagtggtggta

SEQ ID NO: 43818 - DNA, 201 bp, Homo sapiens
tgggcagccgttccagcttcagcgtctggagcttgtggctcttctgcctgccgaggcagagctctagggccatggcgggaggccttccggctccacctcaracagctgttgagggcctggaagatgagggactccttttggtcaggctggaggtgaccaatctcctcacttcattttatttattccacaaacattcgttaa

SEQ ID NO: 43819 - DNA, 201 bp, Homo sapiens
agaatatacctggcacaggtgattgagtagtgaccattatagttaatgggccctgccctcaaaaaaccacaggcaaactctaggatgttcattctatgagsgcttttgtttaaatcagaacggtccaacagaaatataatgtgaaccacatacatagttaaaattttctaatgtccatattaaaagagggaaaaagaaaca

SEQ ID NO: 43820 - DNA, 201 bp, Homo sapiens
tctctggacttgactcagtgcccatcttctagatggggatagggcatgacctggcaaccagagctgcatgccaggcagaggagccccaggccagctgaccygggcacatggggcaagatgccagctgtgccaaggctgcccgggtgcctgcacctgctctcgccagcaccagttgggtctgtgggccgggagagggcttcc

SEQ ID NO: 43821 - DNA, 201 bp, Homo sapiens
aaacttctggcaagatgggtcctggcttcaccaaggccttgggccatggggtgagtacctaggaggggctcaggactgctctggacctaatttggcacgcrtatgtcatcgacagtgggccggcaccctggtgacctgagggaacccctctctgtccacaggtagacctcggccacatttatggagacaatctggagcgtc

SEQ ID NO: 43822 - DNA, 201 bp, Homo sapiens
tgagagagctggaggctgtccagcacactggctggagatgaagctgtgaccaaaggcaggaccctagggcaccatttaactcccctacaacctcatgagcygggtatgattaccctgtgaaaatcaagattcagagaggtgaagtgaactctccagggacactcagcagatggagacttgaggtctggttgccaccaaaat

SEQ ID NO: 43823 - DNA, 201 bp, Homo sapiens
accaaaggcaggaccctagggcaccatttaactcccctacaacctcatgagccgggtatgattaccctgtgaaaatcaagattcagagaggtgaagtgaaytctccagggacactcagcagatggagacttgaggtctggttgccaccaaaatctatgctacttccactccatcacaaagggggctcttcttgaatgggaa

SEQ ID NO: 43824 - DNA, 201 bp, Homo sapiens
cacctgctctcgccagcaccagttgggtctgtgggccgggagagggcttccccaccagcaggctcttccagctgctgggcccagttgtctggatctggtgyggtggtgcttaggtgtggggactggggcccaggccaaaccagtcagggttccccaccttttttttttttctctctggctgccaggtccccagagactctc

SEQ ID NO: 43825 - DNA, 201 bp, Homo sapiens
gggcagaaggtctgggttgccctcatatttccaagtctgcgagtaaactgagggccaagctacttgggcatctgccccaggaagccaaagcctgtcttttrcctctagaggcaaaggagatgaagagatgagggctgcactcacctaagagggcaggcggagggagagaatgctgcttttgcctctctggtgggtgaggag

SEQ ID NO: 43826 - DNA, 201 bp, Homo sapiens
gaccccggtgcccggtggggaattttcttggcctcctggtggagccttgaatgccaggctcagcccctcatctctctcctctgcagggagtctcttgctcyggttcttgctgttcctgctcctgctcccgccgctccccgtcctgctcgcggacccaggggcgcccacgccaggtaggcggccccatccctccccaaggga

SEQ ID NO: 43827 - DNA, 201 bp, Homo sapiens
gcaggtcggtctccctcctgccttcaactggagtataacatacagcaaagagcattaatcttaagtgcataattcgacatatttttacacatgtataaacygccatagaaatcaagatatagaacattcccagcactctagaaggctcttttgtgctccttcccagtcaaaaaccactgaaaggtaaccactattttcact

SEQ ID NO: 43828 - DNA, 201 bp, Homo sapiens
aattctgaaaatagtaatcccatttacgatagctacaaataaaattaagtacctggaaattaatcaaagaagtgaaagatcttgacaatggaaaataaaayactatgaaagaaattggagaggacacacgaaaaacagaaaaatattccatattcatagattggaagaatcaacattgttaaaatgtccatacaacccaaa

SEQ ID NO: 43829 - DNA, 201 bp, Homo sapiens
tccctagaatgttacaaagaccatcacaatggccttactgttgacctggtagcagctcgatatagttgcaagcaaagagcttaagaagtgaagttatgtawttatagaacaacagagaaacaaagactgttgggtacacacagtccactcttttagtaatttttgagttaaaaaaagtgtcagaaacgcaggaggcagagc

SEQ ID NO: 43830 - DNA, 201 bp, Homo sapiens
atcccagttgctgaatgggctaaagggctctggggttctaaataaacttgaaaggcagtataggccacaaggattacaactcctaggaaagtctgatctgygcttggagccagtggacttgaggggcatgtgacctgctgcgatagccaagggagtgcttgtgccacccctctcccaaccctaggcagtgcaactcacagc

SEQ ID NO: 43831 - DNA, 201 bp, Homo sapiens
atccaaaaacctgggatattattcatttcagacccatcagttcagcatcaagtacagagaggacaagagaggctcatcagtccactgctgctatactccakttcctgccacatggtggcactgttgaatgccagtcctgtgcagcctcatggttatgtgcttttttgggttcaaaaccttgcaccatgtccctgcttgggt

SEQ ID NO: 43832 - DNA, 201 bp, Homo sapiens
gtgtctgtactgcagctacaagaaagaatggaaagtgagttttctggtttgtgccttgaaaaggaggaacccatgataaggaaaattcctcatacataggraaggtgttcaaaggggctgggaaacgtggaaagtctgcttcagtgaatctgaattttcttagttctgttctgcctctgtgggccctatccctagaatgtt

SEQ ID NO: 43833 - DNA, 201 bp, Homo sapiens
gaaacagaggcccagtgaggcctagcggcttgtttaaggtcacgctatggaagaagtgacttgaactcacttctgattctgaggtgaaggctcttcccatyagtgccagggccacacaagtgtttcttgttttgagtgcagatgggtggcttggaagtcagcaggaggcacaggtgtggtgacttgatgggctcagggccc

SEQ ID NO: 43834 - DNA, 201 bp, Homo sapiens
agccgggcatggaggcaggcgcctgtagtcccagctactcgggaggctgaggcaggagaatggtgtgaacctgggaggcagagcttgcagtgagctgagaytgcgccactgcactccagcctgggcgacagagcgagacaccatctcaaaaaaaagaaagtacaaaggcatagaggtcagacagcaggtatctagggaaac

SEQ ID NO: 43835 - DNA, 201 bp, Homo sapiens; identical to SEQ ID NO: 7708

SEQ ID NO: 43836 - DNA, 201 bp, Homo sapiens; identical to SEQ ID NO: 7710

SEQ ID NO: 43837 - DNA, 201 bp, Homo sapiens
tatcaatatatacatatacatatcaatacatatatacatatacacacacatatatatgtgtgtgtatatatatactatatatatacatatatatatatacatatatatatatacatatatatatacatatatatatacatatatatatatatatacatatatatatatatatttcccccaatatcctcagatgttgggcag

SEQ ID NO: 43838 - DNA, 201 bp, Homo sapiens
atggcccatgagagttcccagtggaggatggatttgaggaactgggcagggaagcagggaagctccatatttgtctccccttggccacatgaacatgtggrtattgcagagtggagcagattctgtgcatgagctccttgtgatcctggaacagcatcttattctttactctcccatgacaaatggtccccgggggcagaa

SEQ ID NO: 43839 - DNA, 201 bp, Homo sapiens
agcacatagcaggccttcagaaaatagatgactgtgatggttgattattagctgggtgactcagcacatttgattagccaccctgagtctcggtttccccygtgtgctgcgcccggatgcatacttgtggtccccagcacgtgcagggtcaaactgtaacttgcccggccttcaggaatcttcatgttcccttccctgcat

SEQ ID NO: 43840 - DNA, 201 bp, Homo sapiens
ctgggctggagtgcagtggtgtgattttggctcactgtaacctctatctcctgggttcaagtgattcacctgcctcagtctcccaaatagctgggattacwggcacctgccaccacgcccagctaatttttgtatttttagtagagacgagtctttgccatgttggccaggctggtcttgaactcctggcctcaagtgatc

SEQ ID NO: 43841 - DNA, 201 bp, Homo sapiens
atcaatatatacatatacatatcaatacatatatacatatacacacacatatatatgtgtgtgtatatatatactatatatatacatatatatatatacatatatatatatacatatatatatacatatatatatacatatatatatatatatacatatatatatatatatttcccccaatatcctcagatgttgggcagc

SEQ ID NO: 43842 - DNA, 201 bp, Homo sapiens
agatacaatcttgctctcttgcctgggctggagtgcagtggtgtgattttggctcactgtaacctctatctcctgggttcaagtgattcacctgcctcagyctcccaaatagctgggattactggcacctgccaccacgcccagctaatttttgtatttttagtagagacgagtctttgccatgttggccaggctggtctt

SEQ ID NO: 43843 - DNA, 201 bp, Homo sapiens; identical to SEQ ID NO: 7712

SEQ ID NO: 43844 - DNA, 201 bp, Homo sapiens
tgaatatatatattatacatatatatacacacagaactgaatatatatatatatatatacacacacacgactgaatatatatatatatatatatatatatacacacacaggactgaatatatatatatatatacacaggactgaatatatatatatatatacaagactgaatatatatatacatatacaagactatatata

SEQ ID NO: 43845 - DNA, 201 bp, Homo sapiens
atcctaagcaccagagctttcttttctttcctttttttttttttttttttgagatacaatcttgctctcttgcctgggctggagtgcagtggtgtgatttyggctcactgtaacctctatctcctgggttcaagtgattcacctgcctcagtctcccaaatagctgggattactggcacctgccaccacgcccagctaatt

SEQ ID NO: 43846 - DNA, 201 bp, Homo sapiens
attcaagactgactatatatatattcaagactgactatatatatatattcaagactgactctctctctatatattcaagactgaatatatatatatatatwtttctatctctctaataatacaagaacagaaaaccaaatactgcatgttctcacttatgcgtgggagatgaatgatgagaatacgtggacatatggtggg

SEQ ID NO: 43847 - DNA, 201 bp, Homo sapiens
cgcacagcctctcttggcagggagggtgtgggcagccgttccagcttcagcgtctggagcttgtggctcttctgcctgccgaggcagagctctagggccayggcgggaggccttccggctccacctcagacagctgttgagggcctggaagatgagggactccttttggtcaggctggaggtgaccaatctcctcacttca

SEQ ID NO: 43848 - DNA, 201 bp, Homo sapiens
tttttttttcttttttgcttgggtgcagtgcagagactggcctgtctggggataggagtggaaatagggagcccacttagggaaaggagtcagagtggaaratgagcgggggttgcttgaggtagtggtggtagagatggagagcaggggactgattttaagagacattttggaggtggaatcaacagccttggctgaggg

SEQ ID NO: 43849 - DNA, 201 bp, Homo sapiens
gcaccaagtgggctctcagtatccctgattccaggccttggctctcgcacagcatttctggacctgacctgggccagaggggagaccactgccctgatacrtgagtcctaggtctggcagcattcaccacaagcttcctgaagagctcttggccttgtgtgaacattggtggtagccaggcagtactccccatgggcctgt

SEQ ID NO: 43850 - DNA, 201 bp, Homo sapiens
ggctcccaggagtacagctacgagcagttcttgttcaacacctccatgttggtggactatggggttgaggccctggtggatgccttctctcgccagattgytggccgggtaagccccagaggagtgctggtgagggcaggtgggctgagggatccagcagacctgggtccaaattccaggttcttcttctgtaaaatgggg

SEQ ID NO: 43851 - DNA, 201 bp, Homo sapiens; identical to SEQ ID NO: 7716

SEQ ID NO: 43852 - DNA, 201 bp, Homo sapiens
cggagccactctgggtttcatgggggaggttgatggggaaattccgcccttccctcccccatgcatgtgccaggttccaggtgaaggaattcagctcctcsctcagccaaccttcctcccccagctcgctgcttgtgtgtgtgcgtgtgtgtgagcatgtgtcccagttggatatagtttcctccaccacctagctgtgta

SEQ ID NO: 43853 - DNA, 201 bp, Homo sapiens
ttttctgcagcttttttatcttgccaggttacctgggctttgagttctattttccctcccttcacagggggttacactacctcttggtgtaattcaacggwctggggagcagtgtgagccacaaaagaggtcctcttggcccattccacacttcaaagatgaggaagctgccggatgtggtggttcatgcctgtaatcccg

SEQ ID NO: 43854 - DNA, 201 bp, Homo sapiens
tagaactcagtgttgccttgttacactggaaagcaacaccaggcagaactcagctaatacccatgagggagaatttagatcagccctagccagaggggaascatccatcccagttgctgaatgggctaaagggctctggggttctaaataaacttgaaaggcagtataggccacaaggattacaactcctaggaaagtctg

SEQ ID NO: 43855 - DNA, 201 bp, Homo sapiens
cacagttgatttatctagtcttctgttgatggacatttgggttgtttccattttttttactattatgaataaaactaccctctatggtagattttaactcttttttttttttttgagatggagtctcactctgtcgcccaggctggagtgcagcggtgcgatcttggctcactgcaagctccaccttccgggttcacgcca

SEQ ID NO: 43856 - DNA, 201 bp, Homo sapiens; identical to SEQ ID NO: 7718

SEQ ID NO: 43857 - DNA, 201 bp, Homo sapiens
agaatttagatcagccctagccagaggggaagcatccatcccagttgctgaatgggctaaagggctctggggttctaaataaacttgaaaggcagtatagrccacaaggattacaactcctaggaaagtctgatctgcgcttggagccagtggacttgaggggcatgtgacctgctgcgatagccaagggagtgcttgtgc

SEQ ID NO: 43858 - DNA, 201 bp, Homo sapiens
ttttcaatgtccagacaccagtgaacatccacaagcatcaataccactcaagaaaacatgaccttactaaacaaactaaataagtcatcagggatttatcytagagagatagaaatatgtgatctttctctatctctcagagagaggtcatatatctacacctctaggcttttcagacagagaatttgaaatagctatttt

SEQ ID NO: 43859 - DNA, 201 bp, Homo sapiens
attgcaaagatacacaaaagttgagagaaaagcagaatgaactatgtacccatctttcagtttcaacatttacccacagtttcttcatcttatttcatttstcccctctcatatttttataaagtattttaaatcaaattctaaaaatcatgccacttaaaattctaaaaatcatgccacttcacccataaatacttctag

SEQ ID NO: 43860 - DNA, 201 bp, Homo sapiens
cttacattatctctcgcagtcctcagattcactgtatcaaatgggtatcatttgcccctttttaaagatggagaaattgacacccagagagatgagatgayttatctgtattcacacagctagcaaatagcatagtcagttgcaaacacaggctaccttgactcagggcaagggagttcatgtttgtttttttctgtttct

SEQ ID NO: 43861 - DNA, 201 bp, Homo sapiens
atgggggactcaaagtgaattagacttggtacctgcatctccttggttttctttcttgatgaacaggggtgtcctccactgagcatagaactgagttggcrtgaaaacatgcaggattgaagttagaccgaaggaaggccttcctgtacgaatacttcctaaagatctggttgtggcaggagatggtgatccccctggggt

SEQ ID NO: 43862 - DNA, 201 bp, Homo sapiens
aggagcttatgttgtgggaatgattagtgatgggaggttggggccaaaccgtgtagaatcttggttttcatactaaatattttgagttttatttggtctartgctttctaagtacccacttacgggccagctgcataaaaatcatttagaaagctgattaagataccaaatctcagatgcctctcctacggattctgattc

SEQ ID NO: 43863 - DNA, 201 bp, Homo sapiens; identical to SEQ ID NO: 7689

SEQ ID NO: 43864 - DNA, 201 bp, Homo sapiens
gttccccaccttttttttttttctctctggctgccaggtccccagagactctctaaatattactctttaggggatttgggtcctgcctcttcactgggcartcttgcagcctgacacctctgcatcctggaggacttggtgttccctggctgtgcctgtcccctagtcacgctcagtcctggacctggagccctgactttt

SEQ ID NO: 43865 - DNA, 201 bp, Homo sapiens
taggtgtggggactggggcccaggccaaaccagtcagggttccccaccttttttttttttctctctggctgccaggtccccagagactctctaaatattaytctttaggggatttgggtcctgcctcttcactgggcaatcttgcagcctgacacctctgcatcctggaggacttggtgttccctggctgtgcctgtcccc

SEQ ID NO: 43866 - DNA, 201 bp, Homo sapiens
gcccatcttctagatggggatagggcatgacctggcaaccagagctgcatgccaggcagaggagccccaggccagctgacccgggcacatggggcaagatsccagctgtgccaaggctgcccgggtgcctgcacctgctctcgccagcaccagttgggtctgtgggccgggagagggcttccccaccagcaggctcttcca

SEQ ID NO: 43867 - DNA, 201 bp, Homo sapiens
gactgctttcccgctacaatagcaaaaactgaatagatgtgacatgtctgtatggtctgcaaagcctaaaatgtttactatctggctttttccagaaaaakcttgctgacctatgatttaaaaaattctacccactggttctctgccatgcttacattatctctcgcagtcctcagattcactgtatcaaatgggtatcat

SEQ ID NO: 43868 - DNA, 201 bp, Homo sapiens
tgatcaaaatgactatctcttaagcatgaacgttattatttcatcctaagcaccagagctttcttttctttcctttttttttttttttttttgagatacartcttgctctcttgcctgggctggagtgcagtggtgtgattttggctcactgtaacctctatctcctgggttcaagtgattcacctgcctcagtctcccaa

SEQ ID NO: 43869 - DNA, 201 bp, Homo sapiens
gggctgcactcacctaagagggcaggcggagggagagaatgctgcttttgcctctctggtgggtgaggagatggaggccagcctggaggcaaggctgtgcygggggcgccctgaatgctcaagtacttcccctctagtctctggacttgactcagtgcccatcttctagatggggatagggcatgacctggcaaccagagc

SEQ ID NO: 43870 - DNA, 201 bp, Homo sapiens
ttccactccatcacaaagggggctcttcttgaatgggaaggggttgcaaacctgagtctgatctgtgacatgtgagtattggaaagggattccccctcgcrtctacacttagtattcctacttttggctgacatatatggacaccccgtcttatgccaggcactgtgccagcagttttgctgtattcattgtctacttctc

SEQ ID NO: 43871 - DNA, 201 bp, Homo sapiens
gtctggagcttgtggctcttctgcctgccgaggcagagctctagggccatggcgggaggccttccggctccacctcagacagctgttgagggcctggaagwtgagggactccttttggtcaggctggaggtgaccaatctcctcacttcattttatttattccacaaacattcgttaagctctggctaccacatctggatc

SEQ ID NO: 43872 - DNA, 201 bp, Homo sapiens
gtggcgggtgggggaaacactaagagactcgaccaggaaacaccgtaagggtaatgtggagcaggaggctgaggttggatgcgtaatgtggggatgagacyggaggccagaaaactggtaccgaggctcctgcaaggatctaggaaagaacgaatgactggtggagtgcaggggcagaaggtctgggttgccctcatattt

SEQ ID NO: 43873 - DNA, 201 bp, Homo sapiens
tacatatgcgggaactcaaacttagcttgaatagctgcccaaggtccctatattagtttcctcaggctgctgcaacaaagtaccacaaactgggaagctcrgagcaacagatggaggctagaagtctgaattcaaggtgtcagcagtgccatgttctctctcaaggctctatgcctccttggcatctggtggtggccgaca

SEQ ID NO: 43874 - DNA, 201 bp, Homo sapiens
tatctctcctattcccttggtctgtgaccttcttctggatcctagagcccagaccccaccctgatgtgggccaagtctgattccatcaggaatgggggctraggcagctgagaccttggagtccccctcctcctgcacacccaccctctgtccccagggttctggaaaacttctttccttagacttggctgctgaggctgt

SEQ ID NO: 43875 - DNA, 201 bp, Homo sapiens
agtttctccaggaggcagcagggcggatgccagagctccatgcaccctcccaggagattttctagccctatctctcctattcccttggtctgtgaccttcktctggatcctagagcccagaccccaccctgatgtgggccaagtctgattccatcaggaatgggggctgaggcagctgagaccttggagtccccctcctcc

SEQ ID NO: 43876 - DNA, 201 bp, Homo sapiens
agtagtgagtttctcatctaggaaaccatcagcaggccaggctggactgccccatttctagccccctttcttctctgcagactgccctgtttctagccccytttcttctctacccttttctgtagagtgcgttagacccattttacagaaggggactctgagaccctttcttctctgcggggcagggtatgtggttcagac

SEQ ID NO: 43877 - DNA, 201 bp, Homo sapiens
gttgctcaagttagtctcctggagtccctattatccccagaaaaaggtggacctggaagggtcccgccccaggttgaccttaatggcatcatggatctgaygctagcatttccccttatctccttgtaggagagaaggagatggcagcagagttggaggaattgtatggagacattgatgcgttggagttctaccctggac

SEQ ID NO: 43878 - DNA, 201 bp, Homo sapiens
tgagtctagctacagcatggaccctggccagccctggaatctgagttcagagatctttgaaaaaatgccttccgataactgagcacctactacatgctggrcactgcaccaggagatttgtgtgcattccctcattgaatcttacaaccaccctctgggatggtttttgctattaagccgattttatagatgagaatactg

SEQ ID NO: 43879 - DNA, 201 bp, Homo sapiens
aatggcatcatggatctgatgctagcatttccccttatctccttgtaggagagaaggagatggcagcagagttggaggaattgtatggagacattgatgcrttggagttctaccctggactgcttcttgaaaagtgccatccaaactctatctttggggagagtatgatagagattggggctcccttttccctcaagggtc

SEQ ID NO: 43880 - DNA, 201 bp, Homo sapiens
gtacatggattttggatcagaccaagtttcctgaaacgggctttgggtgggtggcatttaggggacccaaagagaggacggagggtgctctaggaaagggwttgcgttgaataaaagtctggtttatgggaagaggaggaggaagactcatgtggccagcactttaaagtttacaaaggttggttgtggacatccacctct

SEQ ID NO: 43881 - DNA, 201 bp, Homo sapiens
agacacggagctgggaggagctgacaggctgatggtggagccagaaatgccaacagactgtcatccaaggggaccagggctgtgcggagctcatgggaggragcaggggtatagggagcccagggaagggagcaggggtgtgcggagctcaggggagggagcagctgcctctcagtgcgaagaattgagggaggcttcttg

SEQ ID NO: 43882 - DNA, 201 bp, Homo sapiens; identical to SEQ ID NO: 7694

SEQ ID NO: 43883 - DNA, 201 bp, Homo sapiens
aggccttcagaaaatagatgactgtgatggttgattattagctgggtgactcagcacatttgattagccaccctgagtctcggtttcccctgtgtgctgcrcccggatgcatacttgtggtccccagcacgtgcagggtcaaactgtaacttgcccggccttcaggaatcttcatgttcccttccctgcatgtatctacct

SEQ ID NO: 43884 - DNA, 201 bp, Homo sapiens
ttgccatgttggccaggatgatcttgaactgctgacctcaggtgatccacccgccttggcatcccaaagttctgggtttataggcatgagccacagcgccyggccgcactgatattattataacacacattttacagttaaggaaagtgagattctgagagattaagtaactcagcccaagctcaggtggctggaaatggt

SEQ ID NO: 43885 - DNA, 201 bp, Homo sapiens; identical to SEQ ID NO: 7696

SEQ ID NO: 43886 - DNA, 201 bp, Homo sapiens
ctaaatattttgagttttatttggtctagtgctttctaagtacccacttacgggccagctgcataaaaatcatttagaaagctgattaagataccaaatcycagatgcctctcctacggattctgattcaaccagcctgggtggtgcccaagaatctgcgtattcatatgaataaagtatatatacatatatatgaatata

SEQ ID NO: 43887 - DNA, 201 bp, Homo sapiens
ccaggtgaaggaattcagctcctcgctcagccaaccttcctcccccagctcgctgcttgtgtgtgtgcgtgtgtgtgagcatgtgtcccagttggatatartttcctccaccacctagctgtgtaaaatctctaaaatgaggcccagagagggcaggagggagcagagggagtccgcactttctgctgtgatgctctaagg

SEQ ID NO: 43888 - DNA, 201 bp, Homo sapiens; identical to SEQ ID NO: 7698

SEQ ID NO: 43889 - DNA, 201 bp, Homo sapiens
tgtgggtgccagcaccatgggactttgggtgatcttggacctattccttcctccttctaggtgcttcctgagctggcgaaaaggagagctggatgctgggrttctataaattcggcggtggatgtgagtctagctacagcatggaccctggccagccctggaatctgagttcagagatctttgaaaaaatgccttccgata

SEQ ID NO: 43890 - DNA, 201 bp, Homo sapiens; identical to SEQ ID NO: 7699

SEQ ID NO: 43891 - DNA, 201 bp, Homo sapiens
ggaaataatttctattgtttgagccactcattctgtggtacattgtcatggcagccctagcaaacaaacacattctctttccctggaattcccagccaacrccttcctcaatctccccttctccacattcggaagctcccatctgcttcatcgcagtctctggctcccctgttgcctcacagtcctctgcttctctctaat

SEQ ID NO: 43892 - DNA, 201 bp, Homo sapiens
aagataaacctaaataaaataaattaagtaacattcagttcttcattcacactagccaaatttctagtgctcagtagctacacgtggctagtggctaccayattggatcgtacaaatcttaggcaagcaccaaaacaaagtttgatgctgaatctttagggctaagaacagtacttggcatgtagtagtctcttggcatgt

SEQ ID NO: 43893 - DNA, 201 bp, Homo sapiens
tgagagattaagtaactcagcccaagctcaggtggctggaaatggtaaagccaagatttgaatccaggtctgctgatcccacagtctgtagctccaggtcratttccaaaagccaatttgtctaatggctaattggcctgcatatcagtttctttcaatatctagttgcccagttttaattttgttacagaatgttcaatt

SEQ ID NO: 43894 - DNA, 201 bp, Homo sapiens
gtgctgcgcccggatgcatacttgtggtccccagcacgtgcagggtcaaactgtaacttgcccggccttcaggaatcttcatgttcccttccctgcatgtrtctaccttcctgcagtttggtagcttctaggtgactcagggacaggatatttttgtgttccctatgggggcgagtctgcaacctaaaatgtcagatggtt

SEQ ID NO: 43895 - DNA, 201 bp, Homo sapiens
gaatatatatattatacatatatatacacacagaactgaatatatatatatatatatacacacacacgactgaatatatatatatatatatatatatatayacacacaggactgaatatatatatatatatacacaggactgaatatatatatatatatacaagactgaatatatatatacatatacaagactatatatat

SEQ ID NO: 43896 - DNA, 201 bp, Homo sapiens
tgaggtgggaggattgcttgagcctgaggaagttgaggctacactgagtcaagatcatgccactgcactccagccagggcaacagagtgagacagtgtctwaaaaaaaacccacaaaaaaaaaatgaggaagctgagactcagaggggcttcctgagagagcatgacagcagcaggcccggggcaggtctgcagcatcaca

SEQ ID NO: 43897 - DNA, 201 bp, Homo sapiens
aattatccaaaaacctgggatattattcatttcagacccatcagttcagcatcaagtacagagaggacaagagaggctcatcagtccactgctgctatacwccagttcctgccacatggtggcactgttgaatgccagtcctgtgcagcctcatggttatgtgcttttttgggttcaaaaccttgcaccatgtccctgctt

SEQ ID NO: 43898 - DNA, 201 bp, Homo sapiens
cctaaaatgtttactatctggctttttccagaaaaagcttgctgacctatgatttaaaaaattctacccactggttctctgccatgcttacattatctctygcagtcctcagattcactgtatcaaatgggtatcatttgcccctttttaaagatggagaaattgacacccagagagatgagatgatttatctgtattcac

SEQ ID NO: 43899 - DNA, 201 bp, Homo sapiens; identical to SEQ ID NO: 7702

SEQ ID NO: 43900 - DNA, 201 bp, Homo sapiens
atttgagaccaggagtttgagaccagcctgggcaatatagtgagacctcacctctacaaaaataaaataaaacaaaattagccaggcatggtggcacgtgyctgtagtcctagctacttgagaagctgaggtgggaggattgcttgagcctgaggaagttgaggctacactgagtcaagatcatgccactgcactccagcc

SEQ ID NO: 43901 - DNA, 201 bp, Homo sapiens
caggagatgaacatttgtagtctgcatttatttatttaattattccacaatattaattggacacgagaatatacctggcacaggtgattgagtagtgaccrttatagttaatgggccctgccctcaaaaaaccacaggcaaactctaggatgttcattctatgagggcttttgtttaaatcagaacggtccaacagaaata

SEQ ID NO: 43902 - DNA, 201 bp, Homo sapiens
atcagcccagcacttcctctgaggccccatctggcctcatccaggcactcttggtatacaggtcccacccgtctgtattcttttttagtccattcactaaygcacaatgagccatggtctgtgctattttgttttttgccttttctgtttccttttgtataataaatgtttacacggaattgtttttttttatccccaagg

SEQ ID NO: 43903 - DNA, 201 bp, Homo sapiens
cgcccggatgcatacttgtggtccccagcacgtgcagggtcaaactgtaacttgcccggccttcaggaatcttcatgttcccttccctgcatgtatctacyttcctgcagtttggtagcttctaggtgactcagggacaggatatttttgtgttccctatgggggcgagtctgcaacctaaaatgtcagatggtttcctgc

SEQ ID NO: 43904 - DNA, 201 bp, Homo sapiens
agctgggaagggctcagggcctggggtgaagctgggcctgtgggacagctgggggtgctggcccatgggacaagctggagaaggcagggaaactgaggcargcagtgatacttttggtggccgtcacagcagatgggtggttggcagtcacttcgatgaggctggtgctggacctggtctgtttttttaatgcattcacta

SEQ ID NO: 43905 - DNA, 201 bp, Homo sapiens; identical to SEQ ID NO: 7711

SEQ ID NO: 43906 - DNA, 201 bp, Homo sapiens; identical to SEQ ID NO: 7714

SEQ ID NO: 43907 - DNA, 201 bp, Homo sapiens
tgagatccctgctgtggcagggatggggaaattgagcctaggggaggcctaacccctgtgcccttagagtggtagaactagaccgtgagtcctagcggacyttgtgtgccagggttgggagctgggcagtgggtgctacaggggctcctgggcaggtgagagagccaggccagcaggaggggcaagaagaagagttctagc

SEQ ID NO: 43908 - DNA, 201 bp, Homo sapiens
aagaacctctgagctctcctgccggctttccccactgtggggcccacaggatggctgggtgtgctggggaaactgagggagatgacttgtgggtgccagcrccatgggactttgggtgatcttggacctattccttcctccttctaggtgcttcctgagctggcgaaaaggagagctggatgctgggattctataaattcg

SEQ ID NO: 43909 - DNA, 201 bp, Homo sapiens
ctgatgctagcatttccccttatctccttgtaggagagaaggagatggcagcagagttggaggaattgtatggagacattgatgcgttggagttctacccyggactgcttcttgaaaagtgccatccaaactctatctttggggagagtatgatagagattggggctcccttttccctcaagggtctcctagggaatccca

SEQ ID NO: 43910 - DNA, 201 bp, Homo sapiens
tcctgcatgtggctgtggatgtcatcagggagtctcgggagatgcggctgcagcccttcaatgagtaccgcaagaggtttggcatgaaaccctacacctcyttccaggagctcgtaggtgagcagctgtttcctggatgcagtccctgcccttgagggactggcagcaaagtcagggagacatcaaggaaatagaacggga

SEQ ID NO: 43911 - DNA, 201 bp, Homo sapiens; identical to SEQ ID NO: 7719

SEQ ID NO: 43912 - DNA, 201 bp, Homo sapiens
taatgtggagcaggaggctgaggttggatgcgtaatgtggggatgagactggaggccagaaaactggtaccgaggctcctgcaaggatctaggaaagaacraatgactggtggagtgcaggggcagaaggtctgggttgccctcatatttccaagtctgcgagtaaactgagggccaagctacttgggcatctgccccagg

SEQ ID NO: 43913 - DNA, 201 bp, Homo sapiens
cttttttgcttgggtgcagtgcagagactggcctgtctggggataggagtggaaatagggagcccacttagggaaaggagtcagagtggaagatgagcggrggttgcttgaggtagtggtggtagagatggagagcaggggactgattttaagagacattttggaggtggaatcaacagccttggctgaggggaactggca

SEQ ID NO: 43914 - DNA, 201 bp, Homo sapiens
cttgggaggctgaggtgggaggattgcttgagcccgggaaagttcaggctgaagtgagctgtaattataccattgcgctccagcttgggtgacagaccaakaccttgtctgtaaaaataaaaataaacatcaacagcaacaacaacaataaagagaccaaaagcaagcacctctcatgaactggcctgctttccaagctgg

SEQ ID NO: 43915 - DNA, 201 bp, Homo sapiens
ccctcctttcccctccagcgggcccagcttcccctttctgctcgcggtgctgagaaagactgaggctgagtcttttggtgggatgggggctccctgaagcycccccggcggtgtggccttggctaatgggctatctagttctttcaggggaaacagcagactgggatctggtgccaacttggggagaagggacagtcccta

SEQ ID NO: 43916 - DNA, 201 bp, Homo sapiens
cggtgggggcaggaacatggaccaccacatcctgcatgtggctgtggatgtcatcagggagtctcgggagatgcggctgcagcccttcaatgagtaccgcragaggtttggcatgaaaccctacacctccttccaggagctcgtaggtgagcagctgtttcctggatgcagtccctgcccttgagggactggcagcaaagt

SEQ ID NO: 43917 - DNA, 201 bp, Homo sapiens
taattataccattgcgctccagcttgggtgacagaccaagaccttgtctgtaaaaataaaaataaacatcaacagcaacaacaacaataaagagaccaaargcaagcacctctcatgaactggcctgctttccaagctgggcatctaaatcactgtgcttggctgaccctatttccaatcctgccctgcccaggggagacc

SEQ ID NO: 43918 - DNA, 201 bp, Homo sapiens
ttttaaaattcaaatagaaattaagataaacctaaataaaataaattaagtaacattcagttcttcattcacactagccaaatttctagtgctcagtagcyacacgtggctagtggctaccatattggatcgtacaaatcttaggcaagcaccaaaacaaagtttgatgctgaatctttagggctaagaacagtacttggc

SEQ ID NO: 43919 - DNA, 201 bp, Homo sapiens
ccataggtgctactctgttccaccctggcccttgtcctcagtgccccatcttccaccctggctacttctggttctggtaggagggaccaactgagtgactsccattgcccctgcagctggcctgtggacctggctccggaattcactgcggcccagcccctctttcacccacttcctgctcactcacgggcgctggttctg

SEQ ID NO: 43920 - DNA, 201 bp, Homo sapiens
tggctgaccctatttccaatcctgccctgcccaggggagaccatcaagattgtcatcgaggagtacgtgcagcagctgagtggctatttcctgcagctgaratttgacccagagctgctgttcggtgtccagttccaataccgcaaccgcattgccatggagttcaaccatctctaccactggcaccccctcatgcctgac

SEQ ID NO: 43921 - DNA, 201 bp, Homo sapiens
tggctgtgggccaggaggtgtttgggctgcttcctgggctcatgctgtatgccacgctctggctacgtgagcacaaccgtgtgtgtgacctgctgaaggcygagcaccccacctggggcgatgagcagcttttccagacgacccgcctcatcctcataggtgaggactccagacctgccctgccctggaaggtcattccct

SEQ ID NO: 43922 - DNA, 201 bp, Homo sapiens
ggctgccgggcaaggtggctcgcgcctgtaatcctagcactttgggaggctcaggcgggtggatcacgaggtcaggaaatcgagaccatcctggctaacaygatgaaaccccgtctctactaaaaatacaaaaaattagccgggcatggaggcaggcgcctgtagtcccagctactcgggaggctgaggcaggagaatggt

SEQ ID NO: 43923 - DNA, 201 bp, Homo sapiens
ttggcacgcgtatgtcatcgacagtgggccggcaccctggtgacctgagggaacccctctctgtccacaggtagacctcggccacatttatggagacaatmtggagcgtcagtatcaactgcggctctttaaggatgggaaactcaagtaccaggtagtgctgggccagggggtagggcagagggaggggtctcccatggt

SEQ ID NO: 43924 - DNA, 201 bp, Homo sapiens
tccacaggtagacctcggccacatttatggagacaatctggagcgtcagtatcaactgcggctctttaaggatgggaaactcaagtaccaggtagtgctgrgccagggggtagggcagagggaggggtctcccatggtcttccctggcaaagactgcttggggcgggggtctgggtcatgtcctgagagggccaaccacgg

SEQ ID NO: 43925 - DNA, 201 bp, Homo sapiens
acgttttcaaggaatgaccatgatgatgtacgtgaaaagccccggcgtcgtacctggcacaaggcagaaaggccgcagagatgtatggactgtcaagattktttttcttttttctttttttttaaatagagatggggttttgccatattgcccaggctggtcttgaactcctgggctcaagcgatctgcccgcctaggcct

SEQ ID NO: 43926 - DNA, 201 bp, Homo sapiens
tcctgctcaggaggaagttcatacctgacccccaaggcaccaacctcatgtttgccttctttgcacaacacttcacccaccagttcttcaaaacttctggmaagatgggtcctggcttcaccaaggccttgggccatggggtgagtacctaggaggggctcaggactgctctggacctaatttggcacgcgtatgtcatcg

SEQ ID NO: 43927 - DNA, 201 bp, Homo sapiens
acctggctccggaattcactgcggcccagcccctctttcacccacttcctgctcactcacgggcgctggttctgggagtttgtcaatgccaccttcatccragagatgctcatgcgcctggtactcacaggtgggtgtggggcagggccccctgacctgggggagcaagcaagcctgctagtccttttggattcttggcat

SEQ ID NO: 43928 - DNA, 201 bp, Homo sapiens
gtctcagcctcccgagtagctgggattacaggtgcccgccaccatgcctggctaatttttgtatttttagtagagacagggttttgccatgttggccaggmtgatcttgaactgctgacctcaggtgatccacccgccttggcatcccaaagttctgggtttataggcatgagccacagcgcctggccgcactgatattat

SEQ ID NO: 43929 - DNA, 201 bp, Homo sapiens
tctgcagtgcgctccaaccttatccccagtccccccacctacaactcagcacatgactacatcagctgggagtctttctccaacgtgagctattacactcktattctgccctctgtgcctaaagattgccccacacccatgggaaccaaaggtaaaatggggtgaggagctgggcctggggattacaggaggtgctcagtt

SEQ ID NO: 43930 - DNA, 201 bp, Homo sapiens
gaaggccacatgaagatgtagggagaagaaagccatctacaagccaaggaaagaggcctcaggagataccaaccctgctgacaccttgatcttgaacctcyggtctccagacagaggaaataatttctattgtttgagccactcattctgtggtacattgtcatggcagccctagcaaacaaacacattctctttccctgg

SEQ ID NO: 43931 - DNA, 201 bp, Homo sapiens
tctgggcaagcctcctgctttctctgggccctacattcctcattatgcaatggggagtctcacctacctctcttagggagtgctggggagataaatgagcrtgggtgtggaaggttgtggacttggtcggctggagccctggctttctggctgggctgtgatggtcaggctgtagtctagtggcacccagtctcctctccg

SEQ ID NO: 43932 - DNA, 201 bp, Homo sapiens
catagtcagttgcaaacacaggctaccttgactcagggcaagggagttcatgtttgtttttttctgtttctttatttctttttggtgaaatgtttcattayggaaaaattgcaaagatacacaaaagttgagagaaaagcagaatgaactatgtacccatctttcagtttcaacatttacccacagtttcttcatcttatt

SEQ ID NO: 43933 - DNA, 201 bp, Homo sapiens
cccgtggctgaggagttttatcagctctttcttaactttcagtgtcacagccggggaatcttctcctgccgccgtttggtggcaatagggagggagggggygcttcccctgggggcctgatgtgggctaggctggagttccagagcagggcctggaaatgtcaggatgggtggtttatgttcacagaggtgggaacagggg

SEQ ID NO: 43934 - DNA, 201 bp, Homo sapiens
ttctttcgttactcaagacttcacttagccacactggcaggggtcttccttgtaagaccttcccatgccacctgtaattatccaaaaacctgggatattaytcatttcagacccatcagttcagcatcaagtacagagaggacaagagaggctcatcagtccactgctgctatactccagttcctgccacatggtggcact

SEQ ID NO: 43935 - DNA, 201 bp, Homo sapiens
attttccctggctttttgctttctagctggttatagctacaaatggggcagaggaaaaacttatttataagaatcctgttatataagaacatataggaaayatgttttttgaaatatatttagggctaggctccccttctgtcctcagtattctcttttgccactgcagcagctctgagtggtctccttgaagtccccctc

SEQ ID NO: 43936 - DNA, 201 bp, Homo sapiens
ttgacactgacataattaaggaaggcctctcaatacttattctaaggatgacttgtctttatgccagacatagaaagattggcatcatttaaaataggttsacacacctattttaaggggagcaagcaagcctgctagtccttttggactcttggcatctgataagggtagtgggtggggagagtctatgatgcctgatag

SEQ ID NO: 43937 - DNA, 201 bp, Homo sapiens
agacgacccgcctcatcctcataggtgaggactccagacctgccctgccctggaaggtcattccctccatcctgagaagttgggggcgggggggtacttaraggtggaggctgggattagaatcctcacccttctgcttagtggctagaagaccttgagcaggcccctcaacctctgtgagcctcggtctccaaatctgta

SEQ ID NO: 43938 - DNA, 201 bp, Homo sapiens
aagccccggcgtcgtacctggcacaaggcagaaaggccgcagagatgtatggactgtcaagattttttttcttttttctttttttttaaatagagatgggrttttgccatattgcccaggctggtcttgaactcctgggctcaagcgatctgcccgcctaggcctctcaaggtgctgggattataggcgactctcaggata

SEQ ID NO: 43939 - DNA, 201 bp, Homo sapiens
gagggaggagcctcagctcccgcacagcctctcttggcagggagggtgtgggcagccgttccagcttcagcgtctggagcttgtggctcttctgcctgccraggcagagctctagggccatggcgggaggccttccggctccacctcagacagctgttgagggcctggaagatgagggactccttttggtcaggctggagg

SEQ ID NO: 43940 - DNA, 201 bp, Homo sapiens
atagaaagtacaaaggctgccgggcaaggtggctcgcgcctgtaatcctagcactttgggaggctcaggcgggtggatcacgaggtcaggaaatcgagacyatcctggctaacacgatgaaaccccgtctctactaaaaatacaaaaaattagccgggcatggaggcaggcgcctgtagtcccagctactcgggaggctga

SEQ ID NO: 43941 - DNA, 201 bp, Homo sapiens
aaattgacacccagagagatgagatgatttatctgtattcacacagctagcaaatagcatagtcagttgcaaacacaggctaccttgactcagggcaaggragttcatgtttgtttttttctgtttctttatttctttttggtgaaatgtttcattatggaaaaattgcaaagatacacaaaagttgagagaaaagcagaa

SEQ ID NO: 43942 - DNA, 201 bp, Homo sapiens
gcttgagcccgggaaagttcaggctgaagtgagctgtaattataccattgcgctccagcttgggtgacagaccaagaccttgtctgtaaaaataaaaataracatcaacagcaacaacaacaataaagagaccaaaagcaagcacctctcatgaactggcctgctttccaagctgggcatctaaatcactgtgcttggctg

SEQ ID NO: 43943 - DNA, 201 bp, Homo sapiens
tatttggtctagtgctttctaagtacccacttacgggccagctgcataaaaatcatttagaaagctgattaagataccaaatctcagatgcctctcctacrgattctgattcaaccagcctgggtggtgcccaagaatctgcgtattcatatgaataaagtatatatacatatatatgaatatatatatgaatagagtata

SEQ ID NO: 43944 - DNA, 201 bp, Homo sapiens
atgatgtacgtgaaaagccccggcgtcgtacctggcacaaggcagaaaggccgcagagatgtatggactgtcaagattttttttcttttttcttttttttwaaatagagatggggttttgccatattgcccaggctggtcttgaactcctgggctcaagcgatctgcccgcctaggcctctcaaggtgctgggattatagg

SEQ ID NO: 43945 - DNA, 201 bp, Homo sapiens
tgtttgggctgcttcctgggctcatgctgtatgccacgctctggctacgtgagcacaaccgtgtgtgtgacctgctgaaggctgagcaccccacctggggygatgagcagcttttccagacgacccgcctcatcctcataggtgaggactccagacctgccctgccctggaaggtcattccctccatcctgagaagttggg

SEQ ID NO: 43946 - DNA, 201 bp, Homo sapiens
ccctgtccagaccatgttcgctctgagtcaccagtaactcccttcccccacctctggcaccactgggcatggctggtcccaattatagagcctaattcacyggagccatgaagagccaggcattgggaataggaacagtcattagagggaagaggggctggttctgaagtttcagcgttgcaaagaccttgacctgagaga

SEQ ID NO: 43947 - DNA, 201 bp, Homo sapiens
gttatagctacaaatggggcagaggaaaaacttatttataagaatcctgttatataagaacatataggaaatatgttttttgaaatatatttagggctagkctccccttctgtcctcagtattctcttttgccactgcagcagctctgagtggtctccttgaagtccccctctatcaccgagggtgtcagcatgatgacag

SEQ ID NO: 43948 - DNA, 201 bp, Homo sapiens
tccagataggagaagctactgctgtttcctaccccccaaccagggaagaagcagttgccagatgcccagctcctggcccgccgcttcctgctcaggaggamgttcatacctgacccccaaggcaccaacctcatgtttgccttctttgcacaacacttcacccaccagttcttcaaaacttctggcaagatgggtcctggc

SEQ ID NO: 43949 - DNA, 201 bp, Homo sapiens
ttacactcgtattctgccctctgtgcctaaagattgccccacacccatgggaaccaaaggtaaaatggggtgaggagctgggcctggggattacaggaggygctcagttcttctctttgggaaaaatcaggcgaagaacaattattgacccaattctgcagatggctagaccaaggcaagacatatgacatgtccagagcc

SEQ ID NO: 43950 - DNA, 201 bp, Homo sapiens
ttacagaatgttcaatttgcattttccctggctttttgctttctagctggttatagctacaaatggggcagaggaaaaacttatttataagaatcctgttrtataagaacatataggaaatatgttttttgaaatatatttagggctaggctccccttctgtcctcagtattctcttttgccactgcagcagctctgagtg

SEQ ID NO: 43951 - DNA, 201 bp, Homo sapiens
tgagccagcacgggggctgctccagaggcttcttggcctttctgggcctgtggctgggggaggcgggggctggggtactgccaggccctttccctggatcytgcctgccaggtttgcctgtggctgcctgataaagcctttttgtccagccttcttcccctgacccctccctcctacacccctgctggggccattgtgggg

SEQ ID NO: 43952 - DNA, 201 bp, Homo sapiens
ccccatcaggggctagatgggggtcaggaggccaccctagcatggtctctgacctccatttctcacccacagtgaatccctgttgttactatccatgccarcaccagggcatctgtgtccgcttcggccttgaccgctaccagtgtgactgcacccgcacgggctattccggccccaactgcaccatccgtgagctgggcc

SEQ ID NO: 43953 - DNA, 201 bp, Homo sapiens
ggaactggaccagtcctcagagaccatctgatctgctcattctgttgttcaaatggggaaacagaggcccagtgaggcctagcggcttgtttaaggtcacrctatggaagaagtgacttgaactcacttctgattctgaggtgaaggctcttcccattagtgccagggccacacaagtgtttcttgttttgagtgcagatg

SEQ ID NO: 43954 - DNA, 201 bp, Homo sapiens
cctgactttctctttagtagcattttccttccctagacccagtccctgaggaggggcaatttgtgcttttcctcttgacccttttccccagtgccaaccakgccaaattctagggcacatgctcagttgctcaagttagtctcctggagtccctattatccccagaaaaaggtggacctggaagggtcccgccccaggttg

SEQ ID NO: 43955 - DNA, 201 bp, Homo sapiens
tagcccgcctgctaaacccccttcatgggatatacagaaaaatgaggctccagaggtgggagggactcacccaagaatgcacagccagtaagagcagccaytctctaatacagctctcccaagcaactacttggtgcctggccctgtgctgagtatgggggactcaaagtgaattagacttggtacctgcatctccttggt

SEQ ID NO: 43956 - DNA, 201 bp, Homo sapiens
cctgtcttttgcctctagaggcaaaggagatgaagagatgagggctgcactcacctaagagggcaggcggagggagagaatgctgcttttgcctctctggkgggtgaggagatggaggccagcctggaggcaaggctgtgccgggggcgccctgaatgctcaagtacttcccctctagtctctggacttgactcagtgccc

SEQ ID NO: 43957 - DNA, 201 bp, Homo sapiens; identical to SEQ ID NO: 7722

SEQ ID NO: 43958 - DNA, 201 bp, Homo sapiens
tgtcggattggtggagcccagctcatgtgtctgtactgcagctacaagaaagaatggaaagtgagttttctggtttgtgccttgaaaaggaggaacccatrataaggaaaattcctcatacatagggaaggtgttcaaaggggctgggaaacgtggaaagtctgcttcagtgaatctgaattttcttagttctgttctgcc

SEQ ID NO: 43959 - DNA, 201 bp, Homo sapiens; identical to SEQ ID NO: 7683

SEQ ID NO: 43960 - DNA, 201 bp, Homo sapiens
cgcactgatattattataacacacattttacagttaaggaaagtgagattctgagagattaagtaactcagcccaagctcaggtggctggaaatggtaaakccaagatttgaatccaggtctgctgatcccacagtctgtagctccaggtcgatttccaaaagccaatttgtctaatggctaattggcctgcatatcagtt

SEQ ID NO: 43961 - DNA, 201 bp, Homo sapiens
tgttctccttccttgcctggttctgcccctctccctgacctggcttcagcatgagctctcgctcttggtccaccctcactccctgcttctgagttccatgrtgagtcttcaccacatgccctggcccctgtcctcacgcccggttctgtctctgtcatgtgtcattgctcccaaggttccatccttacccacttccccata

SEQ ID NO: 43962 - DNA, 201 bp, Homo sapiens
ttggtgtaattcaacggtctggggagcagtgtgagccacaaaagaggtcctcttggcccattccacacttcaaagatgaggaagctgccggatgtggtggytcatgcctgtaatcccggcagtttgggaggctgtggtgggaggatcatttgagaccaggagtttgagaccagcctgggcaatatagtgagacctcacctc

SEQ ID NO: 43963 - DNA, 201 bp, Homo sapiens
gccactgcactccagccagggcaacagagtgagacagtgtctaaaaaaaaacccacaaaaaaaaaatgaggaagctgagactcagaggggcttcctgagasagcatgacagcagcaggcccggggcaggtctgcagcatcacaactgctaggctgcccaacactctccatcctagctcagaagggactcccactggaagct

SEQ ID NO: 43964 - DNA, 201 bp, Homo sapiens
tacaacctcatgagccgggtatgattaccctgtgaaaatcaagattcagagaggtgaagtgaactctccagggacactcagcagatggagacttgaggtckggttgccaccaaaatctatgctacttccactccatcacaaagggggctcttcttgaatgggaaggggttgcaaacctgagtctgatctgtgacatgtgag

SEQ ID NO: 43965 - DNA, 201 bp, Homo sapiens; identical to SEQ ID NO: 7688

SEQ ID NO: 43966 - DNA, 201 bp, Homo sapiens
catgctcttggtcctgcctcatccctggagggctgcctcggcaccctgcctgctctctcagactccatcctctcctgtattgcagctgtgttgagatctgyggtgctggtcacagagcctggctgcagtgagggctcaattgctccatgctggaactggaccagtcctcagagaccatctgatctgctcattctgttgttc

SEQ ID NO: 43967 - DNA, 201 bp, Homo sapiens
aggtggaggctgggattagaatcctcacccttctgcttagtggctagaagaccttgagcaggcccctcaacctctgtgagcctcggtctccaaatctgtamgttggggtgaacgatgattgtaaggatttattgagatcatgaatgggaaggcaactagcacatagcaggccttcagaaaatagatgactgtgatggttga

SEQ ID NO: 43968 - DNA, 201 bp, Homo sapiens
ggcagagcaatagaaagtacaaaggctgccgggcaaggtggctcgcgcctgtaatcctagcactttgggaggctcaggcgggtggatcacgaggtcaggaratcgagaccatcctggctaacacgatgaaaccccgtctctactaaaaatacaaaaaattagccgggcatggaggcaggcgcctgtagtcccagctactcg

SEQ ID NO: 43969 - DNA, 201 bp, Homo sapiens; identical to SEQ ID NO: 7690

SEQ ID NO: 43970 - DNA, 201 bp, Homo sapiens
gagtagctgggattacaggtgcccgccaccatgcctggctaatttttgtatttttagtagagacagggttttgccatgttggccaggatgatcttgaactsctgacctcaggtgatccacccgccttggcatcccaaagttctgggtttataggcatgagccacagcgcctggccgcactgatattattataacacacatt

SEQ ID NO: 43971 - DNA, 201 bp, Homo sapiens
ggtggcttggaagtcagcaggaggcacaggtgtggtgacttgatgggctcagggcccaaagggagggagggcctgggagtggaagatggaacctcattcawgcccgtctctcctttcttctcaccagaaactccccctttctttggacaactggacccccacacctccaccctgtccccatcccttttgctgataatccca

SEQ ID NO: 43972 - DNA, 201 bp, Homo sapiens
gagccacaaaagaggtcctcttggcccattccacacttcaaagatgaggaagctgccggatgtggtggttcatgcctgtaatcccggcagtttgggaggcygtggtgggaggatcatttgagaccaggagtttgagaccagcctgggcaatatagtgagacctcacctctacaaaaataaaataaaacaaaattagccagg

SEQ ID NO: 43973 - DNA, 201 bp, Homo sapiens
tccagcgggcccagcttcccctttctgctcgcggtgctgagaaagactgaggctgagtcttttggtgggatgggggctccctgaagcccccccggcggtgyggccttggctaatgggctatctagttctttcaggggaaacagcagactgggatctggtgccaacttggggagaagggacagtccctatccatccccctca

SEQ ID NO: 43974 - DNA, 201 bp, Homo sapiens
cgggaggctgaggcaggagaatggtgtgaacctgggaggcagagcttgcagtgagctgagattgcgccactgcactccagcctgggcgacagagcgagacwccatctcaaaaaaaagaaagtacaaaggcatagaggtcagacagcaggtatctagggaaacagtcatagatgtggctggggcaaggagcttatgttgtgg

SEQ ID NO: 43975 - DNA, 201 bp, Homo sapiens
cacaagacatgaacagagacaatagcctttgtgtgaggctggatggttttcagaacgttttcaaggaatgaccatgatgatgtacgtgaaaagccccggcrtcgtacctggcacaaggcagaaaggccgcagagatgtatggactgtcaagattttttttcttttttctttttttttaaatagagatggggttttgccata

SEQ ID NO: 43976 - DNA, 201 bp, Homo sapiens; identical to SEQ ID NO: 7697

SEQ ID NO: 43977 - DNA, 201 bp, Homo sapiens
aaatggggcagaggaaaaacttatttataagaatcctgttatataagaacatataggaaatatgttttttgaaatatatttagggctaggctccccttctrtcctcagtattctcttttgccactgcagcagctctgagtggtctccttgaagtccccctctatcaccgagggtgtcagcatgatgacagctctcaccagt

SEQ ID NO: 43978 - DNA, 201 bp, Homo sapiens
aagatgtagggagaagaaagccatctacaagccaaggaaagaggcctcaggagataccaaccctgctgacaccttgatcttgaacctctggtctccagacrgaggaaataatttctattgtttgagccactcattctgtggtacattgtcatggcagccctagcaaacaaacacattctctttccctggaattcccagcca

SEQ ID NO: 43979 - DNA, 201 bp, Homo sapiens
tgtgtcggattggtggagcccagctcatgtgtctgtactgcagctacaagaaagaatggaaagtgagttttctggtttgtgccttgaaaaggaggaacccmtgataaggaaaattcctcatacatagggaaggtgttcaaaggggctgggaaacgtggaaagtctgcttcagtgaatctgaattttcttagttctgttctg

SEQ ID NO: 43980 - DNA, 201 bp, Homo sapiens
ctgttgtccttcctgggagaacttttcctgccccagagcagtggtgtttatggaaagaacgtggcgggggaggcgggaggggggaagctggatgggccggmctgggagggaggagcctcagctcccgcacagcctctcttggcagggagggtgtgggcagccgttccagcttcagcgtctggagcttgtggctcttctgcc

SEQ ID NO: 43981 - DNA, 201 bp, Homo sapiens; identical to SEQ ID NO: 7700

SEQ ID NO: 43982 - DNA, 201 bp, Homo sapiens
tgtggatgtcatcagggagtctcgggagatgcggctgcagcccttcaatgagtaccgcaagaggtttggcatgaaaccctacacctccttccaggagctcrtaggtgagcagctgtttcctggatgcagtccctgcccttgagggactggcagcaaagtcagggagacatcaaggaaatagaacgggacaatacatgcggc

SEQ ID NO: 43983 - DNA, 201 bp, Homo sapiens
gcaagcaagcctgctagtccttttggactcttggcatctgataagggtagtgggtggggagagtctatgatgcctgataggtggtggtgtggtggcacacrtctgtaatcccagcactttgggaggttggggtgggtggattgcttgagctcaggagttcaagtccaacctggatgacatggtgagacaccttgtctacaa

SEQ ID NO: 43984 - DNA, 201 bp, Homo sapiens
accatgctctgggagtcaggaagggacatctgacccagagttgcgggttatgggaaaagaagggatgtccaagcagaaattggaaggagggatagagattkcccagggtaagaggtggtgttagtggcaggggatggctgtgttccagatagagaggacggcatgggtgaaaggcatggaagtcagaggacatggcagttt

SEQ ID NO: 43985 - DNA, 201 bp, Homo sapiens
gcaaggtggctcgcgcctgtaatcctagcactttgggaggctcaggcgggtggatcacgaggtcaggaaatcgagaccatcctggctaacacgatgaaacmccgtctctactaaaaatacaaaaaattagccgggcatggaggcaggcgcctgtagtcccagctactcgggaggctgaggcaggagaatggtgtgaacctg

SEQ ID NO: 43986 - DNA, 201 bp, Homo sapiens
gttgttactatccatgccagcaccagggcatctgtgtccgcttcggccttgaccgctaccagtgtgactgcacccgcacgggctattccggccccaactgyaccatccgtgagctgggccttcagccctcactccttccgtcttgagcccttctgctccccgggccctttctcctagaccctaacttcctaccctcctctc

SEQ ID NO: 43987 - DNA, 201 bp, Homo sapiens; identical to SEQ ID NO: 7704

SEQ ID NO: 43988 - DNA, 201 bp, Homo sapiens; identical to SEQ ID NO: 7705

SEQ ID NO: 43989 - DNA, 201 bp, Homo sapiens
aagcccaccatgctctgggagtcaggaagggacatctgacccagagttgcgggttatgggaaaagaagggatgtccaagcagaaattggaaggagggatakagatttcccagggtaagaggtggtgttagtggcaggggatggctgtgttccagatagagaggacggcatgggtgaaaggcatggaagtcagaggacatgg

SEQ ID NO: 43990 - DNA, 201 bp, Homo sapiens
agcttggtgacttggagggagtgtaaaaatgggagcgtttgctgagcctagtgatggagcgtaagaatgactttacaggaaggtggagatgtctgtggggrccgtgttaaggaattctactttctgccaagagcagagagagtatttggaaaggttttaagtcagctcatgatgcaagatttgttgtttttttttttttaa

SEQ ID NO: 43991 - DNA, 201 bp, Homo sapiens
ctgattttaagagacattttggaggtggaatcaacagccttggctgaggggaactggcagctggaggcaggagtgggagggagttggttgtgggcagctgygggtgacccccaaccccaggttgccaggtggccccatcccacaggtgctggatggagaaatgtacccgccctcggtagaagaggcgcctgtgttgatgca

SEQ ID NO: 43992 - DNA, 201 bp, Homo sapiens; identical to SEQ ID NO: 7709

SEQ ID NO: 43993 - DNA, 201 bp, Homo sapiens
tggcctcctggtggagccttgaatgccaggctcagcccctcatctctctcctctgcagggagtctcttgctccggttcttgctgttcctgctcctgctccygccgctccccgtcctgctcgcggacccaggggcgcccacgccaggtaggcggccccatccctccccaagggaatccccggtcttgcgcccctggcctggt

SEQ ID NO: 43994 - DNA, 201 bp, Homo sapiens
gctaagttgcccaggttggtcttgaactcctgaactcaagcaatcctcccaccttggcctcccaaagtgggattacaggcataagccaccgcgcctggccrctattctctcttaaattctttctaagcgtctagtccaacttttttttttttcttgcctttggggccataatgacagaattggagtaattttatacttatt

SEQ ID NO: 43995 - DNA, 201 bp, Homo sapiens
caggctcttccagctgctgggcccagttgtctggatctggtgcggtggtgcttaggtgtggggactggggcccaggccaaaccagtcagggttccccaccttttttttttttctctctggctgccaggtccccagagactctctaaatattactctttaggggatttgggtcctgcctcttcactgggcaatcttgcagcc

SEQ ID NO: 43996 - DNA, 201 bp, Homo sapiens
aggtcatgcagtgatttcagggggtcatgttacaagaaatcagacagactgggtccccattccagggctctttctatgatatcctgctgcttagcaaatgscagggcctgaagtccaggctgaggtctggggatgatgggagctattgaatgttctaagcagaattaggagagtgttccacatgccagacgagggttgtgg

SEQ ID NO: 43997 - DNA, 201 bp, Homo sapiens
agaatgttacaaagaccatcacaatggccttactgttgacctggtagcagctcgatatagttgcaagcaaagagcttaagaagtgaagttatgtaattatrgaacaacagagaaacaaagactgttgggtacacacagtccactcttttagtaatttttgagttaaaaaaagtgtcagaaacgcaggaggcagagcaagaa

SEQ ID NO: 43998 - DNA, 201 bp, Homo sapiens
aggctcttccagctgctgggcccagttgtctggatctggtgcggtggtgcttaggtgtggggactggggcccaggccaaaccagtcagggttccccaccttttttttttttctctctggctgccaggtccccagagactctctaaatattactctttaggggatttgggtcctgcctcttcactgggcaatcttgcagcct

SEQ ID NO: 43999 - DNA, 201 bp, Homo sapiens
atttttcatgcaaccctcttgctcaggtagggagtagaagcgagggccaataaagaactagcattgagctcctactgaatgctggggatgctcacagggastatcttacttcatcctcacaacaactcttgcaagagtggcattattaaccacgtttttacaggtgggggaactgaggtccacaaagggcagtttgctgct

SEQ ID NO: 44000 - DNA, 201 bp, Homo sapiens
tgggtgatcttggacctattccttcctccttctaggtgcttcctgagctggcgaaaaggagagctggatgctgggattctataaattcggcggtggatgtragtctagctacagcatggaccctggccagccctggaatctgagttcagagatctttgaaaaaatgccttccgataactgagcacctactacatgctggac

SEQ ID NO: 44001 - DNA, 201 bp, Homo sapiens
gccggggctgggcagaggaagtaagcgggcagccgaggtgacagctggagggaggagcgggggtggagccgggggaagggtggggaggggatgggctggasctccgggcagtgtgcgaggcgcacgcacaggagcctgcactctgcgtcccgcaccccagcagccgcgccatgagccgtgagtgcgaccccggtgcccggt

SEQ ID NO: 44002 - DNA, 201 bp, Homo sapiens
aagaactagcattgagctcctactgaatgctggggatgctcacagggactatcttacttcatcctcacaacaactcttgcaagagtggcattattaaccaygtttttacaggtgggggaactgaggtccacaaagggcagtttgctgcttaaggtcacactgagaggtcaggtggggtggaggactgggatttgaagagat

SEQ ID NO: 44003 - DNA, 201 bp, Homo sapiens
aaaatacatggtgggcccaggatctgaactcaggtctgtctgcgtccacacacttcgcaaggtctttccacagaaagctgcttctacccacaatggaccckgagccactctgggtttcatgggggaggttgatggggaaattccgcccttccctcccccatgcatgtgccaggttccaggtgaaggaattcagctcctcgc

SEQ ID NO: 44004 - DNA, 201 bp, Homo sapiens
cctagcatggtctctgacctccatttctcacccacagtgaatccctgttgttactatccatgccagcaccagggcatctgtgtccgcttcggccttgaccrctaccagtgtgactgcacccgcacgggctattccggccccaactgcaccatccgtgagctgggccttcagccctcactccttccgtcttgagcccttctg

SEQ ID NO: 44005 - DNA, 201 bp, Homo sapiens
agggactatcttacttcatcctcacaacaactcttgcaagagtggcattattaaccacgtttttacaggtgggggaactgaggtccacaaagggcagtttkctgcttaaggtcacactgagaggtcaggtggggtggaggactgggatttgaagagatattggattgagtccagagccttcctgcctgactgagaagctgc

SEQ ID NO: 44006 - DNA, 201 bp, Homo sapiens
aaggaaagaggcctcaggagataccaaccctgctgacaccttgatcttgaacctctggtctccagacagaggaaataatttctattgtttgagccactcaktctgtggtacattgtcatggcagccctagcaaacaaacacattctctttccctggaattcccagccaacgccttcctcaatctccccttctccacattcg

SEQ ID NO: 44007 - DNA, 201 bp, Homo sapiens
gaacacatgaagcaaaactgatataactgaaaggagaaatagaaaaatctaaaattatagttggagacctcaacactactctttttttttttgagataggktgtcactcctgtcacccaggctggagtgcagtggtgccgtctcagctcactacaatctctgcttcccgggttcaagggctcctcctacctcagcctccca

SEQ ID NO: 44008 - DNA, 201 bp, Homo sapiens
acaaaaatagctcttggtccattattctaatatttcttctgtttgaatctacagtccattgctttgggggtgttttatggttatgtttctcaaattattaktttttgcctctgagcttttttcccctgcaactgttcgctattctaacacatcaagcagtgtgaataggagaatggccagatccctgtccttaacaaccca

SEQ ID NO: 44009 - DNA, 201 bp, Homo sapiens
gccatggcagaaccgcagcccccgtccggcggcctcacggacgaggccgccctcagttgctgctccgacgcggaccccagtaccaaggtgggcacaggacmgaagggaacggctcccccagctccgctgggccgggaccgggccgcattctatccaaccccatcccgccgccgctgcaggtccgccggcctcgggcggacg

SEQ ID NO: 44010 - DNA, 201 bp, Homo sapiens
aaagtacaaagtaggtcacaagaagtaagttttcttattttccatgatcatggtcaatgtaaaacaagtcagtctcctatgagccctacatagctaaggckagaatgattataatacaggtggtttgaatgaagagcagatggctgaaagggaatcacttgaggctttcccacacagtattttgaccatgattgcatagag

SEQ ID NO: 44011 - DNA, 201 bp, Homo sapiens
caggctggtctcaaactcctggcctcaagtgatccttctgcctcagcctcccaaagtattgggattacagatgtgaaccaccacacccggccggtcattayttttacatgtctaaatagtccttgggtctgggcatggtggctcatgcctgtaattgcagcactttgggaggccgaggcagaggattgggaggttcgggag

SEQ ID NO: 44012 - DNA, 201 bp, Homo sapiens
ttctttctttccttttcttttcttttcttttcttttccttttcttttccttccttccttccttcctctctctccctccctccttccttccttctctctttytctctttctctttctctttctctttctctctttctttctttttcctgcattttccatctatgttcctctaggattgatcttggagaaaggaggcagagat

SEQ ID NO: 44013 - DNA, 201 bp, Homo sapiens
ttcttttccttccttccttccttcctctctctccctccctccttccttccttctctctttctctctttctctttctctttctctttctctctttctttctytttcctgcattttccatctatgttcctctaggattgatcttggagaaaggaggcagagataagagtcaaaccaattcaacataatggtccccaaataaat

SEQ ID NO: 44014 - DNA, 201 bp, Homo sapiens
ctttctttctttccttttcttttcttttcttttcttttccttttcttttccttccttccttccttcctctctctccctccctccttccttccttctctctytctctctttctctttctctttctctttctctctttctttctttttcctgcattttccatctatgttcctctaggattgatcttggagaaaggaggcagag

SEQ ID NO: 44015 - DNA, 201 bp, Homo sapiens
ttctccccagctgtcaccagccgggtttctttctttctttccttttcttttcttttcttttcttttccttttcttttccttccttccttccttcctctctytccctccctccttccttccttctctctttctctctttctctttctctttctctttctctctttctttctttttcctgcattttccatctatgttcctcta

SEQ ID NO: 44016 - DNA, 201 bp, Homo sapiens
tcttttccttccttccttccttcctctctctccctccctccttccttccttctctctttctctctttctctttctctttctctttctctctttctttcttyttcctgcattttccatctatgttcctctaggattgatcttggagaaaggaggcagagataagagtcaaaccaattcaacataatggtccccaaataaatt

SEQ ID NO: 44017 - DNA, 201 bp, Homo sapiens
gcctgggtgacataggaagaccttgtttctacaaaaaggtttttttttaaattatctgggcatggtggcacatgcctgtagtctgtatgcctagctactcrggaggctgaggtgggaggattgcttgggcccaggagttggaggctgcagtgagctatgatccactgtacttcatttcagtataaacgacagagcaagacc

SEQ ID NO: 44018 - DNA, 201 bp, Homo sapiens
tactatgtatctcaggctggtctcaaactcctggcctcaagtgatccttctgcctcagcctcccaaagtattgggattacagatgtgaaccaccacacccrgccggtcattacttttacatgtctaaatagtccttgggtctgggcatggtggctcatgcctgtaattgcagcactttgggaggccgaggcagaggattgg

SEQ ID NO: 44019 - DNA, 201 bp, Homo sapiens
tgttactaaacagcagagctagggaacacatgaagcaaaactgatataactgaaaggagaaatagaaaaatctaaaattatagttggagacctcaacactrctctttttttttttgagatagggtgtcactcctgtcacccaggctggagtgcagtggtgccgtctcagctcactacaatctctgcttcccgggttcaagg

SEQ ID NO: 44020 - DNA, 201 bp, Homo sapiens
tctgaaggacagttttatggaaaagcctaggtttaatttccttcagtcttgaaaatactcttctattttctttttgcatatgatgttgctgttgaaaaatstgtcaattcatgttcctttgtatattcttctgttttattctagaagctttttatattatttctttgtcactgcctgcattctgggagatttcctcaaact

SEQ ID NO: 44021 - DNA, 201 bp, Homo sapiens
ggtctcaaactcctggcctcaagtgatccgcccgcctcggcctcccagactgctgggattataagcatgagccaccacgcctggcccatttgtcttttatwtttatttatttatttatttattttttgagacagagtcttgctctgttgcccaggctggagtgcagtggcgcgatctcggctcactgcaagctctgcctcc

SEQ ID NO: 44022 - DNA, 201 bp, Homo sapiens
gaaatggttatgagatatccagtggaaaaagcaagtttatgtacattatgcttttgttagaaaagatacatgtacacatagaaatcactagaaggaaatayaccaaattttgattattgctggctgctgggattaccaatgattttatttccttcattatatttttctgtattttccaaattctctaaaatgaacaagtgt

SEQ ID NO: 44023 - DNA, 201 bp, Homo sapiens
gatcgctccactgcactccagcctgggtgacagagctagactctgtctcaaaacaaaacaaaacaaaacaaatatatatatatatatatatatatatatakagagagagagagagagagagagagagctgaatgaaaatgaaaaagggatcatagctaaacagtgcaaagggggaaatgtatagcactgactgcatacatt

SEQ ID NO: 44024 - DNA, 201 bp, Homo sapiens
gagatcgctccactgcactccagcctgggtgacagagctagactctgtctcaaaacaaaacaaaacaaaacaaatatatatatatatatatatatatatakagagagagagagagagagagagagagagctgaatgaaaatgaaaaagggatcatagctaaacagtgcaaagggggaaatgtatagcactgactgcataca

SEQ ID NO: 44025 - DNA, 201 bp, Homo sapiens
ctcccaggttcaagtgattctcctaccttagcctcctaagtagctgggattacaggcatgtgccaccacacctggctaatttttgtacttttagtagaggkggggtttcactacgtagggcagacttggagcaatttttcatatgaatatatgctatttctattctctcttttgtaaattgcctattcttctttttggcca

SEQ ID NO: 44026 - DNA, 201 bp, Homo sapiens
cagctgcttgggaggctgaggcaggataatcacttgaacctggggggtgagctgagatcacgccattgtactccagcctgggcaacaagagcgaaacttcrtctcaaaaataataataaaatgggttggtagagggttcagagataacaagaaccccagattatttccatctttcccatcctgtcatttttagcatttttt

SEQ ID NO: 44027 - DNA, 201 bp, Homo sapiens
cattagtgtgggacatttatcacaattaatgaaactatattgatattattaactgaagtccatacttattccaatttccttcatttttacctgctgtttcyttacaggtgacattcaggaaaccacattccatttagtcaccatgtatccttaggctactccagactgtgacagtttttcagactttccttgtttttgatg

SEQ ID NO: 44028 - DNA, 201 bp, Homo sapiens
attatctattctactttaacaccactaaattgtgtctttaaagaatgcttaaagatgtagagaaatggttatgagatatccagtggaaaaagcaagtttaygtacattatgcttttgttagaaaagatacatgtacacatagaaatcactagaaggaaatataccaaattttgattattgctggctgctgggattaccaat

SEQ ID NO: 44029 - DNA, 201 bp, Homo sapiens; identical to SEQ ID NO: 7769

SEQ ID NO: 44030 - DNA, 201 bp, Homo sapiens
cttctattcaggatggtaacatattaaagattagaaggtactttttttttttattttttgagacagagtttcgctctgttgccaggctggagtgcagtggygtgatctctgctcactgcaacctccaactcctgggttcaagtgactctcctgcctgggcctcccaagtagcagggactacaggtgtgcaccaccacgccc

SEQ ID NO: 44031 - DNA, 201 bp, Homo sapiens
ctatgtatctcaggctggtctcaaactcctggcctcaagtgatccttctgcctcagcctcccaaagtattgggattacagatgtgaaccaccacacccggscggtcattacttttacatgtctaaatagtccttgggtctgggcatggtggctcatgcctgtaattgcagcactttgggaggccgaggcagaggattggga

SEQ ID NO: 44032 - DNA, 201 bp, Homo sapiens
caaaaatagctcttggtccattattctaatatttcttctgtttgaatctacagtccattgctttgggggtgttttatggttatgtttctcaaattattatkttttgcctctgagcttttttcccctgcaactgttcgctattctaacacatcaagcagtgtgaataggagaatggccagatccctgtccttaacaacccac

SEQ ID NO: 44033 - DNA, 201 bp, Homo sapiens
tcaccagccgggtttctttctttctttccttttcttttcttttcttttcttttccttttcttttccttccttccttccttcctctctctccctccctcctkccttccttctctctttctctctttctctttctctttctctttctctctttctttctttttcctgcattttccatctatgttcctctaggattgatcttgg

SEQ ID NO: 44034 - DNA, 201 bp, Homo sapiens
aggtcatatttttccatttaagcaaacagctctgacatactagactctcaatctcagttttgaattcctgggagaaagactctcgcagagcttgggttgcytaggatagtatttaaaagggtttgtatgacccaagcatctgggtcttttggttgtgggggtaagccatgctaccagctcccttcagcacctccctatttt

SEQ ID NO: 44035 - DNA, 201 bp, Homo sapiens
taccagctcccttcagcacctccctattttctttttcttctttaaaataagacaatttctgtaactactgaactggtagtgtggtatcatgaaggtgaggsaaatgcctgatacctaaaagatgcagccagtcccacagtttatttcaggagggctggtatttgcaatgtgtgcaagataacattttagtcattatgaaaa

SEQ ID NO: 44036 - DNA, 201 bp, Homo sapiens
acttcgtgcttttatatctcattaagaaacttctttctttctttctttctttttttttggagatggagtcttgctctgtcacccaggctggagtgcagtgrcacgatctcggctcactgcaacccctgcctcccaggttcaaacaattctcctgcctcagcctcccgagtagctgggactacaagcacacgccaccacgcc

SEQ ID NO: 44037 - DNA, 201 bp, Homo sapiens
acaattgtgtttgtatcttgttacagaaagcacaattaatgttggtaataaatggtaaaagtgaaagatgtttaatataaatatttttccataggattttytattgcagcagaccatgctacgagtgaaggatcctaagaagtcactggatttttatactagagttcttggaatgacgtaagtcaagtacttattggcacc

SEQ ID NO: 44038 - DNA, 201 bp, Homo sapiens
tttctttctttctttctttccttctttctttctttcttcctttctttctttctctctctctttcttccttccttccttccctccctccctccctccctccytccttccttccttcctctttctttctttcctcccttcctttcctttctttcctcccttcctttcctttctttcctcccttcctttcctttctttcctttt

SEQ ID NO: 44039 - DNA, 201 bp, Homo sapiens
tttctttctttctttctttctttctttctttccttctttctttctttcttcctttctttctttctctctctctttcttccttccttccttccctccctccytccctccctccttccttccttccttcctctttctttctttcctcccttcctttcctttctttcctcccttcctttcctttctttcctcccttcctttcct

SEQ ID NO: 44040 - DNA, 201 bp, Homo sapiens
tctctctctttctttctttctttctttctttctttctttccttctttctttctttcttcctttctttctttctctctctctttcttccttccttccttccytccctccctccctccctccttccttccttccttcctctttctttctttcctcccttcctttcctttctttcctcccttcctttcctttctttcctccctt

SEQ ID NO: 44041 - DNA, 201 bp, Homo sapiens
aaagtctgtgtgattgtgtgtggtcgggcctgacagatcatacataagactttgtcctgcaggtggcttcctcaagcaaacattgtaatcaatagagaagyagctaccactcatattagctgggaaagaaggatgtttgttattttggtagtgttcatagtgccttgttttaatgtatacttagaccggaatatgaagtgg

SEQ ID NO: 44042 - DNA, 201 bp, Homo sapiens
tgagcccccactcccggactctctctctttctttctttctttctttctttctttctttccttctttctttctttcttcctttctttctttctctctctctytcttccttccttccttccctccctccctccctccctccttccttccttccttcctctttctttctttcctcccttcctttcctttctttcctcccttcct

SEQ ID NO: 44043 - DNA, 201 bp, Homo sapiens
acaggcgtgagcccccactcccggactctctctctttctttctttctttctttctttctttctttccttctttctttctttcttcctttctttctttctcyctctctttcttccttccttccttccctccctccctccctccctccttccttccttccttcctctttctttctttcctcccttcctttcctttctttcctc

SEQ ID NO: 44044 - DNA, 201 bp, Homo sapiens
acaggtttttaattttttaatttctgtcaatctcaagagcataaaagaaaactcatttctatattaaattgcatttacctatttaccagaaaattggagcratttttttttcttttactttttttgagacagagtctcactctgtcacccaggctggagtgcagtggcgtgatctcagctcactgcaacctctgcctcccg

SEQ ID NO: 44045 - DNA, 201 bp, Homo sapiens
ctcagctaatcgggaggctgaggccagaggacagctagagccccggaagtcgaggcagcagtgactgcagtaagctgagagcacaccactgcactccagcmtgggcgacagagcgagacactgttaaaaaaattaaaaaaaaaaaaaaaagaaagaaagaaagaaaagaaaaaagaaaaaggaaaagaaaacttatttaat

SEQ ID NO: 44046 - DNA, 201 bp, Homo sapiens
ttcgactcaacaattgttttaattactctgcgctgcgtaaactgagaaacctctgaatccttacaattttaaaagaacaacttacagttttcagtttccaycagattccaattttctaccaaattgcagccctgaggtatgaatggttaccaaactttagttaaacaaacaaaattagctcattaagtaacagagaaacca

SEQ ID NO: 44047 - DNA, 201 bp, Homo sapiens
actttccatttgctatatggcaataacagccatttgctcttattgattatgaacaaagtcatctttgaataatctaaagaaaatcatatatgcattctcakgccaccttactccttgccaaataatcctataccatttaaagtcatttaaggttcaggacttcagttatctttcttaaaacctcaggattcataattcatt

SEQ ID NO: 44048 - DNA, 201 bp, Homo sapiens
tctttacattgtttatctgcatactttaaaagagattgatttcagagtgtgtgatttcgtgtgtcccttgattcaaaataaagctttggaatcaggcaggsttagatatgagtctgtgactctaaacaagtaagtggcagtttcatcaatagaatggagatgttcacacctagcccatggagctgttttaagggtttaaat

SEQ ID NO: 44049 - DNA, 201 bp, Homo sapiens
ttaaatgaaatataaagtacttagcacaataaatgagcattattattattcttattattgttcttgtccagtacctgtatttactgtctctttagtctcgktaaaatcatactttggccatttgtcctttctatagttgaaaacttaatatttttgtagcaggggttaggccaattatgtaaagtagcatataaacgtggt

SEQ ID NO: 44050 - DNA, 201 bp, Homo sapiens
ttccttttcttttcttttcttttcttttccttttcttttccttccttccttccttcctctctctccctccctccttccttccttctctctttctctctttytctttctctttctctttctctctttctttctttttcctgcattttccatctatgttcctctaggattgatcttggagaaaggaggcagagataagagtca

SEQ ID NO: 44051 - DNA, 201 bp, Homo sapiens
gttaaaacagtcacccggccccatcctcacccattctccccagctgtcaccagccgggtttctttctttctttccttttcttttcttttcttttcttttccttttcttttccttccttccttccttcctctctctccctccctccttccttccttctctctttctctctttctctttctctttctctttctctctttcttt

SEQ ID NO: 44052 - DNA, 201 bp, Homo sapiens
tgcactgccttctggtccaggccagaactaccacctcccacacagcccaagttaaaacagtcacccggccccatcctcacccattctccccagctgtcacyagccgggtttctttctttctttccttttcttttcttttcttttcttttccttttcttttccttccttccttccttcctctctctccctccctccttcctt

SEQ ID NO: 44053 - DNA, 201 bp, Homo sapiens
gggctggggagatcattcggccctaccagtttttctcagtttctcacaagcacaaggctcctgcactgcccttgtttactggtaaggacatctgaacaagygagagggcaggtgccgatgcacacagcagtgagggaggagcaagagcaaaactctgttctctcgcagccattatgcactgccttctggtccaggccagaa

SEQ ID NO: 44054 - DNA, 201 bp, Homo sapiens
aaatagctcttggtccattattctaatatttcttctgtttgaatctacagtccattgctttgggggtgttttatggttatgtttctcaaattattattttttgcctctgagcttttttcccctgcaactgttcgctattctaacacatcaagcagtgtgaataggagaatggccagatccctgtccttaacaacccacatg

SEQ ID NO: 44055 - DNA, 201 bp, Homo sapiens
agctgggactacaggcaaatgccaccatgtatggctaattttttattttttgtagagacagggtcttactatgtatctcaggctggtctcaaactcctggsctcaagtgatccttctgcctcagcctcccaaagtattgggattacagatgtgaaccaccacacccggccggtcattacttttacatgtctaaatagtcct

SEQ ID NO: 44056 - DNA, 201 bp, Homo sapiens
gagtgcaatggcacggtcttggctcaccgcaacctctgcctcctgggttcaagtgattctcttgcctcagcctcccgagtagctgggattacaggcatgcrccaccgtgcctggctaattttgtatttttagtagagacggggtttctccatgttggtcaggctggtctcaaaatcccaacctcaggtgatccgcctgcct

SEQ ID NO: 44057 - DNA, 201 bp, Homo sapiens
cattccatttagtcaccatgtatccttaggctactccagactgtgacagtttttcagactttccttgtttttgatgactttgacagctttgaggagtactmactaggtattttgcaaaacgtttttcaattgggatcttctgattttttttgtcatgataaaactgggattattgttttttggaggaataccacagagaca

SEQ ID NO: 44058 - DNA, 201 bp, Homo sapiens
ttttatttttatttatttatttatttattttttgagacagagtcttgctctgttgcccaggctggagtgcagtggcgcgatctcggctcactgcaagctcygcctcccggattcactccattctcctgcctcagcctcccaagtagctgggactacaggcgcccgccactacgcccagctaattttttgtattttttgtag

SEQ ID NO: 44059 - DNA, 201 bp, Homo sapiens
ccttcttgtttttatatccatttaacaatttgtagcaaaggatttataagcctctattttatcaataaattcactaacattgaatatatcttactttttttgccacgtatagactttttaaagtgaattttaatattctttatgtgtatgtgtttaggcagatacagtacatagttctcttaataataaagttaaagtctg

SEQ ID NO: 44060 - DNA, 201 bp, Homo sapiens
taaactatgaagagtgatacaattcaaggttgtatttcagctgtggggatcagggcacacatcaaaaagatggtggtgatgggcctatgccttgatagatkgggtaggattccagcagagtacatgggaaggcattctgatgaaggaaacatcttagcaaaaatgtgttttgatacggggggaacccaccccaatatttca

SEQ ID NO: 44061 - DNA, 201 bp, Homo sapiens
gattccaattttctaccaaattgcagccctgaggtatgaatggttaccaaactttagttaaacaaacaaaattagctcattaagtaacagagaaaccactytgcccagcctgcattttttttttttttttgtatgagtttgcctcctttatgcgcaaggctccttgggagttgtagtctgaggcatagtcctgtgggtgga

SEQ ID NO: 44062 - DNA, 201 bp, Homo sapiens
acaagtaccataatttcagctaaatgttactatatttacagaattgatgaattacagaagttttcatttttgtatttcaaatatttacagatgcatttttmatgatattttttcactgatttttcctcctgcttattccattaaaataggcttactacatatagctcttctttttagtaaaacttgaatattaagttatgt

SEQ ID NO: 44063 - DNA, 201 bp, Homo sapiens
accataatttcagctaaatgttactatatttacagaattgatgaattacagaagttttcatttttgtatttcaaatatttacagatgcatttttaatgatwttttttcactgatttttcctcctgcttattccattaaaataggcttactacatatagctcttctttttagtaaaacttgaatattaagttatgttgatta

SEQ ID NO: 44064 - DNA, 201 bp, Homo sapiens
tttctatagttgaaaacttaatatttttgtagcaggggttaggccaattatgtaaagtagcatataaacgtggtaagatttcaaagatgttacttgctttkcagaatatctattccctaggacattgtagctatgttttccttccttttgtagcaattggggcactgaagatgatgagacccagagttaccacaatggcaa

SEQ ID NO: 44065 - DNA, 201 bp, Homo sapiens
agaaggctttctgttgggggcaatataacacttttgaaagttatttgagagacaaagtagatagtctctaaagggaattggtctcagtcttattaaggtcraaagacaacattttttaaaccagagaaattttttaatttctgaaaatatggctaatgcaagtgtggaacttctcctttctgcagactgagggtaataaag

SEQ ID NO: 44066 - DNA, 201 bp, Homo sapiens
gtagttgggattacaggcacatgccaccacacctggttaatttttgtatttttagtagagacggggtttcaccatgttggtcaggctggtctcaaactccygacctcgtgatcctcctgcctcagcctcccaaactgctgggattacaggcgtgagcccccactcccggactctctctctttctttctttctttctttctt

SEQ ID NO: 44067 - DNA, 201 bp, Homo sapiens
aattaaggactatcaggtgagacaagacatgagcatagcataagtcttactttttaaaacaggagatacatgtattttaaacgatattttagaaccataccaataaagcaataatttttaggaacttaactttttaaaacaggaactttttctcaagatcatgcaagtgttcacaagaggcacatggagttaacagactat

SEQ ID NO: 44068 - DNA, 201 bp, Homo sapiens
tcgcttgaagctcgggaggcggagcttgcagtgagccaagattgcgccactgcactccagcctgggtgacagagcgagactccatcttaaaaaaaaaaaaagttttcttacagtagttttcttaattaaatttggagaatgacacttcccctccccccgaaaaaaaccttattatttctattgtccaccttttgataaggc

SEQ ID NO: 44069 - DNA, 201 bp, Homo sapiens
caattatacacaaccccttccagaaaactgaagacgggagaacacttcccaattcatttgataaagctaatattaccctgataccaaaaacaaatgaagayagtacaagaaaactacagaccaatatctccaatgaatataaatgtaaaaacccttgacaaaatgttagtaaacagaattcaacagtatatatagaaagaa

SEQ ID NO: 44070 - DNA, 201 bp, Homo sapiens
tgagccgagatcgctccactgcactccagcctgggtgacagagctagactctgtctcaaaacaaaacaaaacaaaacaaatatatatatatatatatatakatatatagagagagagagagagagagagagagagctgaatgaaaatgaaaaagggatcatagctaaacagtgcaaagggggaaatgtatagcactgactg

SEQ ID NO: 44071 - DNA, 201 bp, Homo sapiens
acaaagatcacaaggcaaagggcaaaagcagaactactgataagggtctatgttcagcagtgcacgtattgtcttgataaacatcttaaacaacagaaaasagggttcgagagcagagaagcggtctgaccacaaatttactagggtgaagttttttccccaccctagtaagcctgagggtactgcaggagacgagggcgt

SEQ ID NO: 44072 - DNA, 201 bp, Homo sapiens
tctattttccataagtattggccagctgagaaataaagagtacaaagagaggaattttacagctgggctgccggggggtgacatcacatatcagtaggacygtgatgcccacctgagtcttagaccagcaagtttttattaagggtttcaaaaggggagggggtgtaagaacagggagtaggtacaaagatcacatgcttc

SEQ ID NO: 44073 - DNA, 201 bp, Homo sapiens
acttgaacccatgaggtggaggttgcagggagccgagatcatgccactgcattccagcttgggtgacagagtgagactttgtccaaaaaaaaaaaaaaaaaccctcaatgaattaaattcagtttgatcacttgatacatttatgctatatgtaaagaagatggtaagtactttggggatactgggataaacaagatgagg

SEQ ID NO: 44074 - DNA, 201 bp, Homo sapiens
agagtcaacttgctctccgcgcagcgattggctggaagtcagcggtctcccgcccgcggcgccatcgcgccattcctagttaaggcggcacagggccgagkcgtagtgtgggtgactcctccgttccttgggtcccgtcgtctgtgatactgcagtgcagccatggcagaaccgcagcccccgtccggcggcctcacggac

SEQ ID NO: 44075 - DNA, 201 bp, Homo sapiens
tggcgggtgcctgtagtcccagctactcgggaggctgaggcaggagaatggcatgaacccgggaggcggagcttgcagtgagctgagatcgtgccactgcmctccagcctgggcgacagagtgagactctgtctaaaaaaaaaaaaaaaaaaaaattcaggcacagtaaccgctgtttattccagtgaagtcatcagtgtc

SEQ ID NO: 44076 - DNA, 201 bp, Homo sapiens
attttatccttttttaaaaaaactgagcaacaaataatgttgggtgcagcttggttggaaatatattatctcataattccataggctagaggtccgacttrggtctgtcccactgtattgacaggactgtgttccttactcagaggctctggggaagaatctgcatctaaatccatttagattgttccctgaattcagttt

SEQ ID NO: 44077 - DNA, 201 bp, Homo sapiens
tactaaaaatacaaaaaaatgagctgggcgtggtggcgggtgcctgtagtcccagctactcgggaggctgaggcaggagaatggcatgaacccgggaggcrgagcttgcagtgagctgagatcgtgccactgcactccagcctgggcgacagagtgagactctgtctaaaaaaaaaaaaaaaaaaaaattcaggcacagta

SEQ ID NO: 44078 - DNA, 201 bp, Homo sapiens
ccgtctctactaaaaatacaaaaaaatgagctgggcgtggtggcgggtgcctgtagtcccagctactcgggaggctgaggcaggagaatggcatgaacccsggaggcggagcttgcagtgagctgagatcgtgccactgcactccagcctgggcgacagagtgagactctgtctaaaaaaaaaaaaaaaaaaaaattcagg

SEQ ID NO: 44079 - DNA, 201 bp, Homo sapiens
agcaaatctttgtcacccagtagccatccctgtaaaaccaaagatagtttaggcataaaagacaccttatttttattgttctaaatttaaagcatgataarggaaagacaaaattaaggactatcaggtgagacaagacatgagcatagcataagtcttactttttaaaacaggagatacatgtattttaaacgatatttt

SEQ ID NO: 44080 - DNA, 201 bp, Homo sapiens
tgaaaacagcaatggcgatgcaaaaagtcatagatctaaataaatggagagatttattgtgttcatgattggaagactcagcacagtaaggatatcaattmtccccaaatcaatatacatgtttaacacactccttatcaaacttttttagacagagacagggttattctagattgaaaggcaaaaaaactagaataacaa

SEQ ID NO: 44081 - DNA, 201 bp, Homo sapiens
cacacaggcaccaaaaattaaaaaatacattaccatttacaattgcccaataaaatgaaatacttagatataaatctaataaacatttacaggacacataygctgaaaacagcaatggcgatgcaaaaagtcatagatctaaataaatggagagatttattgtgttcatgattggaagactcagcacagtaaggatatcaa

SEQ ID NO: 44082 - DNA, 201 bp, Homo sapiens
agcctggttcagtatacaaaaatcagtcagtataatccaccatattaagagggtaaagaagaatcacatgatcatatcagttggtacagaaaaggcatttracaaaattcaacactcattcattattttttttaagttcagaaaaaaataggaatgggggcatttctttaacttgataaagagcttctcttgaaaagttag

SEQ ID NO: 44083 - DNA, 201 bp, Homo sapiens
aagtaaatctttaattaataaaagtttttaaggccaggtgcagtggtttgtgcttgtaatcccaccactttgggaggcaaggcaggaggattgcttgaggscaggagtttgatagcagcctgggcagtacattgagatcccgcctctacaaaatcaaaaaattagccaggcaaggtggtgcgtgcctgtcgccccagctac

SEQ ID NO: 44084 - DNA, 201 bp, Homo sapiens
ttctcacaagcacaaggctcctgcactgcccttgtttactggtaaggacatctgaacaagcgagagggcaggtgccgatgcacacagcagtgagggaggarcaagagcaaaactctgttctctcgcagccattatgcactgccttctggtccaggccagaactaccacctcccacacagcccaagttaaaacagtcacccg

SEQ ID NO: 44085 - DNA, 201 bp, Homo sapiens
cttttttgttttgtttactgaccagtataattcaaaccagatctgcctatgacttcacatttttaataatatattgaagtgtttttcatgcatcttttgayctttgtattgttcttgggcaaatgagatgtgttttttttagagacaggctctctgaagcctctaacttctaggtagtcttcctgcctcagcctcctgagc

SEQ ID NO: 44086 - DNA, 201 bp, Homo sapiens
tgaccagtataattcaaaccagatctgcctatgacttcacatttttaataatatattgaagtgtttttcatgcatcttttgatctttgtattgttcttggscaaatgagatgtgttttttttagagacaggctctctgaagcctctaacttctaggtagtcttcctgcctcagcctcctgagcaccttggactacacatgt

SEQ ID NO: 44087 - DNA, 201 bp, Homo sapiens
tgtgatttcgtgtgtcccttgattcaaaataaagctttggaatcaggcaggcttagatatgagtctgtgactctaaacaagtaagtggcagtttcatcaawagaatggagatgttcacacctagcccatggagctgttttaagggtttaaatgaaatataaagtacttagcacaataaatgagcattattattattcttat

SEQ ID NO: 44088 - DNA, 201 bp, Homo sapiens
ttgagacagagtcttgctctgttgcccaggctagagtgcagtggtgtgatcatagctcactgcaacctcaaactcctgggatcaaacaataatccacctcrgcctcctgagtagctgggactacaggcaaatgccaccatgtatggctaattttttattttttgtagagacagggtcttactatgtatctcaggctggtct

SEQ ID NO: 44089 - DNA, 201 bp, Homo sapiens
gagacggggtttctccatgttggtcaggctggtctcaaaatcccaacctcaggtgatccgcctgcctcagcctcccaaagtgctgggattacagctatgarccaccgcacccagccctttaaagggtttttaaggcaaaacttttgagattctgtgtaactgaggatgatgcctttatgtctgaaggacagttttatggaa

SEQ ID NO: 44090 - DNA, 201 bp, Homo sapiens
aaacagttaattactcagtgtcagcttctcatctacaacatggggtatgaatatcgacagtaataccatatagagttattacacctagttaagtcctaagkagaattattaatgctattaataatcttaactccatgaatttacataccttctacccttttctcagtcaagccttctgtttcctgataagtaagttgaatt

SEQ ID NO: 44091 - DNA, 201 bp, Homo sapiens
ctgcatactttaaaagagattgatttcagagtgtgtgatttcgtgtgtcccttgattcaaaataaagctttggaatcaggcaggcttagatatgagtctgwgactctaaacaagtaagtggcagtttcatcaatagaatggagatgttcacacctagcccatggagctgttttaagggtttaaatgaaatataaagtactt

SEQ ID NO: 44092 - DNA, 201 bp, Homo sapiens
aaggcttgtaggctcattctgaagagagaacaattgtgattctgtacagcccgtaaagcaggtagtgtctatggataagggagtgtgggaaaggtgggaaraagaaagtgaatacggaataaaggattgtggtagataaagtgcaaacagaagaatatcaaaaggtaaggaacttatgaagaccaatttcacatgttgagt

SEQ ID NO: 44093 - DNA, 201 bp, Homo sapiens
gcttgtaggctcattctgaagagagaacaattgtgattctgtacagcccgtaaagcaggtagtgtctatggataagggagtgtgggaaaggtgggaagaaraaagtgaatacggaataaaggattgtggtagataaagtgcaaacagaagaatatcaaaaggtaaggaacttatgaagaccaatttcacatgttgagtgct

SEQ ID NO: 44094 - DNA, 201 bp, Homo sapiens
tcctcctgcctcagcctcccaaactgctgggattacaggcgtgagcccccactcccggactctctctctttctttctttctttctttctttctttctttcyttctttctttctttcttcctttctttctttctctctctctttcttccttccttccttccctccctccctccctccctccttccttccttccttcctcttt

SEQ ID NO: 44095 - DNA, 201 bp, Homo sapiens
gaaattccttctcttaccctctcgttttacagtaatgacccagtaagagaaatgacctgttgcatacaaaggctttcacttaccgaacatgtctttactgrgtaagaatcagtgtaactcactcaggtgtggtgtttcggttgccttgttaagatcagacacagttggcgggcgcggtggctcacgcctgtaatcccagca

SEQ ID NO: 44096 - DNA, 201 bp, Homo sapiens
gggattacaggcacatgccaccacacctggttaatttttgtatttttagtagagacggggtttcaccatgttggtcaggctggtctcaaactcctgacctygtgatcctcctgcctcagcctcccaaactgctgggattacaggcgtgagcccccactcccggactctctctctttctttctttctttctttctttctttc

SEQ ID NO: 44097 - DNA, 201 bp, Homo sapiens
ctgcctcccgggttcaagtgattctcctgcctcagcctcctaagtagttgggattacaggcacatgccaccacacctggttaatttttgtatttttagtasagacggggtttcaccatgttggtcaggctggtctcaaactcctgacctcgtgatcctcctgcctcagcctcccaaactgctgggattacaggcgtgagcc

SEQ ID NO: 44098 - DNA, 201 bp, Homo sapiens
ggagtgcagtggcgtgatctcagctcactgcaacctctgcctcccgggttcaagtgattctcctgcctcagcctcctaagtagttgggattacaggcacawgccaccacacctggttaatttttgtatttttagtagagacggggtttcaccatgttggtcaggctggtctcaaactcctgacctcgtgatcctcctgcct

SEQ ID NO: 44099 - DNA, 201 bp, Homo sapiens
gtcctttctatagttgaaaacttaatatttttgtagcaggggttaggccaattatgtaaagtagcatataaacgtggtaagatttcaaagatgttacttgyttttcagaatatctattccctaggacattgtagctatgttttccttccttttgtagcaattggggcactgaagatgatgagacccagagttaccacaatg

SEQ ID NO: 44100 - DNA, 201 bp, Homo sapiens
ccggcggcctcacggacgaggccgccctcagttgctgctccgacgcggaccccagtaccaaggtgggcacaggaccgaagggaacggctcccccagctcckctgggccgggaccgggccgcattctatccaaccccatcccgccgccgctgcaggtccgccggcctcgggcggacgggagtgtgatgggaagagggataat

SEQ ID NO: 44101 - DNA, 201 bp, Homo sapiens
gcactccagcctgggcgacagagtgagactccgtcacaaaaatatatatatatttaatatccaaatcttctccccaataagaaaggaatttgcttcactcygtcctcattgtgtcactattacctagagtgggatagtattgattttattttttaaagataataataaatatatcacggtgtttgatcactttttcttcat

SEQ ID NO: 44102 - DNA, 201 bp, Homo sapiens
ttgccttgttaagatcagacacagttggcgggcgcggtggctcacgcctgtaatcccagcactttgggaggccaaggcgggcggatcacgaggtcaagagrtagagaccatcctaacacggtgaaaccccgtctctactaaaaatacaaaaaaatgagctgggcgtggtggcgggtgcctgtagtcccagctactcgggag

SEQ ID NO: 44103 - DNA, 201 bp, Homo sapiens
ttctaggtagtcttcctgcctcagcctcctgagcaccttggactacacatgtgtgccaccacacccagctagtttttgtttgtttgtttttggtagaggcrtagaggcaaggtctcactatgttgcccaggctggtctcaaactcctggcctcaagtgatccgcccgcctcggcctcccagactgctgggattataagcat

SEQ ID NO: 44104 - DNA, 201 bp, Homo sapiens
cctaagaagtcactggatttttatactagagttcttggaatgacgtaagtcaagtacttattggcaccttaatgtttaaatatatagctttgcaaatctakagagtgttttcagacccatcttaaagtttgtttcagaagtaacagaagttcttttggccaggagtctgtgattaggcctggctggacagggcttctctcg

SEQ ID NO: 44105 - DNA, 201 bp, Homo sapiens
aaagtttgtttcagaagtaacagaagttcttttggccaggagtctgtgattaggcctggctggacagggcttctctcgtaagttctttttcttctctatcycagccagcctgaaagggcaaaacaagacacaaatagttgcattttctccagtctgccttctctgagcgctcccagctaaatccttaatgtgttcagaccc

SEQ ID NO: 44106 - DNA, 201 bp, Homo sapiens
ttttaagggtttaaatgaaatataaagtacttagcacaataaatgagcattattattattcttattattgttcttgtccagtacctgtatttactgtctcyttagtctcgttaaaatcatactttggccatttgtcctttctatagttgaaaacttaatatttttgtagcaggggttaggccaattatgtaaagtagcata

SEQ ID NO: 44107 - DNA, 201 bp, Homo sapiens
cacaggcacatgccaccacacccagctaattgttttatttttttgtagagatgagttcctgctatgttgcccaggtttgtctcaaactcctgagctcaagygattctttcaccttggcctcccaaagcactgggattacaggcgtgagccactatgcccagcctttttagcatcttttggatttttctgttcttttattta

SEQ ID NO: 44108 - DNA, 201 bp, Homo sapiens
ctaggacattgtagctatgttttccttccttttgtagcaattggggcactgaagatgatgagacccagagttaccacaatggcaattcagaccctcgaggwttcggtaagtttgcctgtttttatgtgatatatgtagatttgtgtgattttgtattatgtatataattatgattttaataaacctaaaacattaatgtcc

SEQ ID NO: 44109 - DNA, 201 bp, Homo sapiens
accccacacttccaacctccaccctgttctgcttctggggtgctgactccagcagtaattttggaatttgccataaaggaaaataaaaaacctcaatgaasgctgggtgcagtggctcatgcctgtaatcccagcactttgggagagcgaggtgggcagatcacctgaggttagcagttcgagaccagcctggccaacatg

SEQ ID NO: 44110 - DNA, 201 bp, Homo sapiens
aatactaaaaacaactttgtatacataaatttgacaacttgaattggaccaattcctcatccaatatgaactaatatgatgagtcctataacttaaggcarttgaatttatgattaacaaacttccaaagaagatttgtccagacccaggtgatttcactggagaattctgccaaatgtaaaagaagaattaacatcaatt

SEQ ID NO: 44111 - DNA, 201 bp, Homo sapiens
gctagcacatacacttctgccttgatctccagtctctcaatcaagatgacagtattgcaggcttcagctggctgctatagtcaatgccaaccacaaacctrttaagtattagtaaatgattactgttttttggtgtcgattattcttaactgattagactgtatatgagctgatattgattaattttaaataatttataat

SEQ ID NO: 44112 - DNA, 201 bp, Homo sapiens
gatttcaaagatgttacttgcttttcagaatatctattccctaggacattgtagctatgttttccttccttttgtagcaattggggcactgaagatgatgmgacccagagttaccacaatggcaattcagaccctcgaggattcggtaagtttgcctgtttttatgtgatatatgtagatttgtgtgattttgtattatgt

SEQ ID NO: 44113 - DNA, 201 bp, Homo sapiens
acagcagcacctaggttagtgtttgagagaataaggaaggacatctttagaatttagtccttgcttgcacctccctccagggactgcagtgctccctcctragactgagaaccagtgctgggaggacagatctcccccatgaggcctgccagctaaagtctgtgtgattgtgtgtggtcgggcctgacagatcatacataa

SEQ ID NO: 44114 - DNA, 201 bp, Homo sapiens
aatagctcttggtccattattctaatatttcttctgtttgaatctacagtccattgctttgggggtgttttatggttatgtttctcaaattattatttttygcctctgagcttttttcccctgcaactgttcgctattctaacacatcaagcagtgtgaataggagaatggccagatccctgtccttaacaacccacatga

SEQ ID NO: 44115 - DNA, 201 bp, Homo sapiens
tgtagctgatggcaggtgtctggccttcactggctgttgaccagagacattggttccttgccacatgcatctctccttagagttgctcacaacgtgacaasttgcttaccctccaagtgagagatcaaagaaagtgacagagctcccaagataagaatcacaacatttcattctctaatctcagaaatgacatgaagtgac

SEQ ID NO: 44116 - DNA, 201 bp, Homo sapiens
agaaatttctaccatgaattcacaaaggcattttctaatattttattcttcaaggttttaagttttgccttttcacatttatgtctataatcctcttggayttacgttttcctttatggtatgaaatagagatctttttttatcacatacataatcaattgtccttaccccattcattgaaaaaataatcttttccccact

SEQ ID NO: 44117 - DNA, 201 bp, Homo sapiens
gggaggcggagcttgcagtgagctgagatcgtgccactgcactccagcctgggcgacagagtgagactctgtctaaaaaaaaaaaaaaaaaaaaattcagrcacagtaaccgctgtttattccagtgaagtcatcagtgtctgtaaacacctttgtatttatttatttgactacatcatttgtaaattccttgaagattga

SEQ ID NO: 44118 - DNA, 201 bp, Homo sapiens
gatcattttcttaaaaataagcccttcttgtttttatatccatttaacaatttgtagcaaaggatttataagcctctattttatcaataaattcactaacrttgaatatatcttactttttttgccacgtatagactttttaaagtgaattttaatattctttatgtgtatgtgtttaggcagatacagtacatagttctc

SEQ ID NO: 44119 - DNA, 201 bp, Homo sapiens
acaattgcccaataaaatgaaatacttagatataaatctaataaacatttacaggacacatatgctgaaaacagcaatggcgatgcaaaaagtcatagatytaaataaatggagagatttattgtgttcatgattggaagactcagcacagtaaggatatcaattctccccaaatcaatatacatgtttaacacactcctt

SEQ ID NO: 44120 - DNA, 201 bp, Homo sapiens
taatatttcttctgtttgaatctacagtccattgctttgggggtgttttatggttatgtttctcaaattattattttttgcctctgagcttttttcccctrcaactgttcgctattctaacacatcaagcagtgtgaataggagaatggccagatccctgtccttaacaacccacatgatctcaggacaatgggctggata

SEQ ID NO: 44121 - DNA, 201 bp, Homo sapiens
ggtcatatttttccatttaagcaaacagctctgacatactagactctcaatctcagttttgaattcctgggagaaagactctcgcagagcttgggttgccyaggatagtatttaaaagggtttgtatgacccaagcatctgggtcttttggttgtgggggtaagccatgctaccagctcccttcagcacctccctattttc

SEQ ID NO: 44122 - DNA, 201 bp, Homo sapiens
gatgcagccagtcccacagtttatttcaggagggctggtatttgcaatgtgtgcaagataacattttagtcattatgaaaagtatgacttttcatactttyctgacaataagaatttttaaaatttaaaactgtaaacaaaataatgtacttcattaaaatgcaaagtaaatctttaattaataaaagtttttaaggccag

SEQ ID NO: 44123 - DNA, 201 bp, Homo sapiens
ggcaaagggcaaaagcagaactactgataagggtctatgttcagcagtgcacgtattgtcttgataaacatcttaaacaacagaaaacagggttcgagagyagagaagcggtctgaccacaaatttactagggtgaagttttttccccaccctagtaagcctgagggtactgcaggagacgagggcgtatctcagtcctta

SEQ ID NO: 44124 - DNA, 201 bp, Homo sapiens
tataggttggaaaggaagaaatcaaactgtccttatttgaagatgacatgattgtctacatagggaataataagtaatttacagaaaactcccagaattcrtaaatgagttcagcaaggttgcagggtacaaaataaacatacagaaatcaatcgcgtttctatatactagcaaagaacacacaggcaccaaaaattaaaa

SEQ ID NO: 44125 - DNA, 201 bp, Homo sapiens
tccctaaaatcgctgtttttctgttgtttttcaaggtgcgccgatttcatattgttcaaacacagttttacaatcaatttgtacagttaacacaattatckcagtggtcctgaggtgatgtacatcctcagcttacgaagataacaggattaagagattaaagacaggcataagaaattataaaagtattatttgggaact

SEQ ID NO: 44126 - DNA, 201 bp, Homo sapiens
taaaatcgctgtttttctgttgtttttcaaggtgcgccgatttcatattgttcaaacacagttttacaatcaatttgtacagttaacacaattatcgcagyggtcctgaggtgatgtacatcctcagcttacgaagataacaggattaagagattaaagacaggcataagaaattataaaagtattatttgggaactgata

SEQ ID NO: 44127 - DNA, 201 bp, Homo sapiens
atgactatatttagatttctctagactctagtggaagacctttggaaaggccatgccaaccgtgcttgtactgctagaagcactttatgtttcctttttgrgtgaaatggatttatgtgagtgctttaaacaaatagcaatacttatagactgaaataaaatgaaacttcaaataagactatgtttaatttgtaaaccttt

SEQ ID NO: 44128 - DNA, 201 bp, Homo sapiens
aagcaggtagtgtctatggataagggagtgtgggaaaggtgggaagaagaaagtgaatacggaataaaggattgtggtagataaagtgcaaacagaagaawatcaaaaggtaaggaacttatgaagaccaatttcacatgttgagtgctagaactgacaaacgggagggctaatacattcacaaattcagtaatttaagct

SEQ ID NO: 44129 - DNA, 201 bp, Homo sapiens
tcaggctggtctcaaactcctgacctcgtgatcctcctgcctcagcctcccaaactgctgggattacaggcgtgagcccccactcccggactctctctctytctttctttctttctttctttctttctttccttctttctttctttcttcctttctttctttctctctctctttcttccttccttccttccctccctccct

SEQ ID NO: 44130 - DNA, 201 bp, Homo sapiens
atgctttatatctcacatagtctgagaagctcaccagaaagattagtgcaaaagggctgggaacagtggctcatgcctgtaatcccagcactttgggaggycgaggtgggcggatcacctgaggtcaggagtttgagaccagcctggccaacatggtgaaaccgtgtctctactaaaaatacaaaaattagccagcatggt

SEQ ID NO: 44131 - DNA, 201 bp, Homo sapiens
caaagctctctagtaatacttctagagaaataagtatcttcatcactagaagcaaatttgagattttgtagggagaaaacacaaagtcaaacaacgttttwatcattgttgtagctttttgaccagttttgattcatcctgaaaatagacatattgtaaccaaatacactcatatcccattgtgggaggcagttgtataaa

SEQ ID NO: 44132 - DNA, 201 bp, Homo sapiens
taccacacccagctaatttttctattttttgtagaaatggggtctcactatcttgcctaggctggtcttgaactctggggctcaagcaatccagccacctyggcctcccaaagtgctgggattacaagcatgagccaccaagcccagccaacgctcctctttcaacaattgatagaactagacagaaaattaacaaggaaa

SEQ ID NO: 44133 - DNA, 201 bp, Homo sapiens
gcggcgccatcgcgccattcctagttaaggcggcacagggccgaggcgtagtgtgggtgactcctccgttccttgggtcccgtcgtctgtgatactgcagygcagccatggcagaaccgcagcccccgtccggcggcctcacggacgaggccgccctcagttgctgctccgacgcggaccccagtaccaaggtgggcacag

SEQ ID NO: 44134 - DNA, 201 bp, Homo sapiens
aataactgctctactccaactaaactccatagagaaaactgtggcctcagtcccacccatgccagcaaaagctgagtggggagcctagattttcacccaascagatgtaatgagctgcccagccttcccctgccaaggtgatgtgggggaaggctgggtagggagccaggactttcatcctgccaggctttcccctcttgc

SEQ ID NO: 44135 - DNA, 201 bp, Homo sapiens
cctatgccttgatagattgggtaggattccagcagagtacatgggaaggcattctgatgaaggaaacatcttagcaaaaatgtgttttgatacggggggarcccaccccaatatttcaacgtaggttctttctattttccataagtattggccagctgagaaataaagagtacaaagagaggaattttacagctgggctgc

SEQ ID NO: 44136 - DNA, 201 bp, Homo sapiens
tctcaggctggtctcaaactcctggcctcaagtgatccttctgcctcagcctcccaaagtattgggattacagatgtgaaccaccacacccggccggtcawtacttttacatgtctaaatagtccttgggtctgggcatggtggctcatgcctgtaattgcagcactttgggaggccgaggcagaggattgggaggttcgg

SEQ ID NO: 44137 - DNA, 201 bp, Homo sapiens
tttccaagtgtctgtagaaaatataccaaagtagaccatgccctgggtcctaaagccaacttcagcaaatttaaaagaatggaatgatgtattcttcagcmacagtggaattaaactagaaatcagtagcagaaacataataagaacatcttcaagcactgggaaaataaacagcacacttctaaataaataatccatgga

SEQ ID NO: 44138 - DNA, 201 bp, Homo sapiens
tgtatggttaaaatgacttataattccaaacgatcaagttccatttagtgacatgcaaaatttctttaatcatttaaggataatgtttagttgtgttcttktttttttttttttttttttttgagatggagtctcactctgtcgcccaggctggagtgcagtggcgcaacctcggctcactgcaagctccgcctcctgggt

SEQ ID NO: 44139 - DNA, 201 bp, Homo sapiens
ctctgtatggttaaaatgacttataattccaaacgatcaagttccatttagtgacatgcaaaatttctttaatcatttaaggataatgtttagttgtgttyttttttttttttttttttttttttgagatggagtctcactctgtcgcccaggctggagtgcagtggcgcaacctcggctcactgcaagctccgcctcctg

SEQ ID NO: 44140 - DNA, 201 bp, Homo sapiens
aaagctctgtatggttaaaatgacttataattccaaacgatcaagttccatttagtgacatgcaaaatttctttaatcatttaaggataatgtttagttgwgttcttttttttttttttttttttttttgagatggagtctcactctgtcgcccaggctggagtgcagtggcgcaacctcggctcactgcaagctccgcct

SEQ ID NO: 44141 - DNA, 201 bp, Homo sapiens
cttcaattttacagtaagtttcacgagttattttataaagacttaaaatgttcacatcttatctggaaataatgtgatattctgggaattctgtatcctaraaaatattgtatccttgaaaatttattgcttgtatcacttttcataatagcaaaaaataaacaaatgtccaaaacttgggaaatcattaacttttatagt

SEQ ID NO: 44142 - DNA, 201 bp, Homo sapiens; identical to SEQ ID NO: 7774

SEQ ID NO: 44143 - DNA, 201 bp, Homo sapiens
ccaccacgcctggcccatttgtcttttatttttatttatttatttatttattttttgagacagagtcttgctctgttgcccaggctggagtgcagtggcgygatctcggctcactgcaagctctgcctcccggattcactccattctcctgcctcagcctcccaagtagctgggactacaggcgcccgccactacgcccag

SEQ ID NO: 44144 - DNA, 201 bp, Homo sapiens
tagtgagttctcacgggatctgatggtttgataaggggcttcccctttctccttcctgccaccctgtgaagaatgatgtgtttgcttccccttccgccgtkattgtaagtttcctgaaaccttcccacccttgcagaactgtgagtcaattaaacctcattcctttataaattacccagtctcgggcatgtccttatagca

SEQ ID NO: 44145 - DNA, 201 bp, Homo sapiens
agcataaagatatctcagagagctgctatgaggataaaatgacatgtattatgttctctaaactatgaagagtgatacaattcaaggttgtatttcagctktggggatcagggcacacatcaaaaagatggtggtgatgggcctatgccttgatagattgggtaggattccagcagagtacatgggaaggcattctgatga

SEQ ID NO: 44146 - DNA, 201 bp, Homo sapiens
ttttagtagagacggggtttcaccatgttgatcagtctgtttctcgagctcctgacctcgtgatccgcccgtctcagccccccaaagtgctgggattacargcgtgagccactgcacctggccaagaatatgaattcttgaggactcttgatattccagttgttttccagaaagattgtaagataaggatatgatagacta

SEQ ID NO: 44147 - DNA, 201 bp, Homo sapiens
gctcctcagcaaaattcccgtcatatctcaaccagtactgggtcacttacctgtctaatcactggccaagggggtgggaacactctgacttagatggatcrtatttacccaagctggctgcatgagggtggacagtgaatcagaattgagactgccagaatggaggagcaaataggggcttctgggtaggtgtaaacagaa

SEQ ID NO: 44148 - DNA, 201 bp, Homo sapiens
atggttgtcttataagtctggatgtttagttgagccttaagaagactttctgggccaggcccggtggctcacgtctgtaatcccagcactttgggagaccraggtgggtggatcatgaggtcaggagttcgagaccagcctaaccaacatggtgaaaccctgtgtctactaaaaatacaaaaaaattagccagacatggtg

SEQ ID NO: 44149 - DNA, 201 bp, Homo sapiens
agtttctatatttatatatattatagattttttaaggtagtttttaaaaatcttttttgttttgtttactgaccagtataattcaaaccagatctgcctakgacttcacatttttaataatatattgaagtgtttttcatgcatcttttgatctttgtattgttcttgggcaaatgagatgtgttttttttagagacaggc

SEQ ID NO: 44150 - DNA, 201 bp, Homo sapiens
ctggataaaatccagagggagagtttactcccactcctagtgagagaacagctgccaaatttctagtcttatggagctggtgtctgacaaactgaagctgmgatgcagaaaaaagctgagatgagagacggggacatcttggtggtggccaggtggctagtgccatatacatccctgcccaacctcattttggttaggtga

SEQ ID NO: 44151 - DNA, 201 bp, Homo sapiens
taccatctgtatatatctccatgccatttaatatacctcgacgcagcattttaaatgtttttcataatattcttttatgcctgtgtcatactatctaactrttcctttgttagaggcagttagtggtttaaaagcaaggactttggaatcagattgcttgggccagaattttttctctgccacttactttctcagcagtaa

SEQ ID NO: 44152 - DNA, 201 bp, Homo sapiens
tctctcacaagacagtgactaagaggttggccaaagcagcagtcattttgaagctctactgaaaaaggacccacttgcaattttactgtgtagctgatggsaggtgtctggccttcactggctgttgaccagagacattggttccttgccacatgcatctctccttagagttgctcacaacgtgacaacttgcttaccctc

SEQ ID NO: 44153 - DNA, 201 bp, Homo sapiens
atggccagatccctgtccttaacaacccacatgatctcaggacaatgggctggataagcctaggccagagattcctaggcacctagaaatgagacttaaayttatttcaccttccacaaaacacctcttcaggttggatcttcccacttcatccctcagggaagagtattagtaggagacacttccgatagtgttattccc

SEQ ID NO: 44154 - DNA, 201 bp, Homo sapiens
tctaaataaataatccatggattacaaaggaagtcttgggaactttttaaaaatattttgagctgaggccgggtgcagtggctcacgcctgtaatcccagyactttgggaggctgaggcaggcggatcacgaggtcaggagatcgagaccatcctggctaacatggtgaaaccccgtctctactaaaaacacaaaaaatta

SEQ ID NO: 44155 - DNA, 201 bp, Homo sapiens
gtgatttcgtgtgtcccttgattcaaaataaagctttggaatcaggcaggcttagatatgagtctgtgactctaaacaagtaagtggcagtttcatcaatrgaatggagatgttcacacctagcccatggagctgttttaagggtttaaatgaaatataaagtacttagcacaataaatgagcattattattattcttatt

SEQ ID NO: 44156 - DNA, 201 bp, Homo sapiens
gtaagcctgagggtactgcaggagacgagggcgtatctcagtccttatctcaacctcataagacagacattcccagagcgggcgtttatagacctcccccmaggaatgcgttcctttcccagggtattaatattaatattccttgctaggaaaataatttagcaatatctctcctacttgcacgtccgtttataggctctc

SEQ ID NO: 44157 - DNA, 201 bp, Homo sapiens
tcagtcttgaaaatactcttctattttctttttgcatatgatgttgctgttgaaaaatctgtcaattcatgttcctttgtatattcttctgttttattctrgaagctttttatattatttctttgtcactgcctgcattctgggagatttcctcaaactggaataccaattagctaattttctcccaaatgtatctgttct

SEQ ID NO: 44158 - DNA, 201 bp, Homo sapiens
aagacccttcctcaggacggccatggcagtgctgtgtgggtggcccagtaaggggcccacgggcactagggacagcctgatccttgggaatccatggagcycggggagcagcccacagggcctcctttctaccttgcctgtgtactgcctgttgttcctgagaaggatgcctgccactttccctagcttgtgccccatgtg

SEQ ID NO: 44159 - DNA, 201 bp, Homo sapiens
aggttttgcagtgtgcgtgacctggggtcaggatcatgggctcaggaaggaagaatggttggggcttggaggtgaagctcagctgccaggctgaaagaggwggagcatgcagcagcctcctgggacatctgcttagtggtgggggactgcagtgctctgcaggaggtgggcgcagctgggcagaagcaaggttggggcaaa

SEQ ID NO: 44160 - DNA, 201 bp, Homo sapiens
tgcctccctgggctcactctcacttctgctccccaggttggacccagagggagggcactggggagactgggaggtctggtgagactgcggggctccacctrggcctgacctccctccctccactttgctgcccggggctcggccacgcctccttctccagccttctatgaccttcaggaggctgaccttgataaggagttc

SEQ ID NO: 44161 - DNA, 201 bp, Homo sapiens
gccctgtgctggcttctctcttgagggcctgggatccatttgtcctctctaccccagagtcttcacctgagatgcagggatgtgaggacactacagtagcytcctgagaggttttgcagtgtgcgtgacctggggtcaggatcatgggctcaggaaggaagaatggttggggcttggaggtgaagctcagctgccaggctg

SEQ ID NO: 44162 - DNA, 201 bp, Homo sapiens
taccagtgactagtcttaggttggggaccttggattttccaaatgcctttgccggggcgtccctgggtcaggcagaagagcaggaaagcaagggctcccayacaggggctggaacgcagcctggaacgtgggcagaattctgcagctgaaaggacggtggcttgccggggcctggaccaatgaccgagggcagccccccca

SEQ ID NO: 44163 - DNA, 201 bp, Homo sapiens
ttcctgctcagtctgtagtgggtccacgtagctctcggcaccacatctgtgcccgtgacagtagctcttttcagggtgggtgtggcgagctgggcagctcyagatgccacactcccagctgggtaccagtgactagtcttaggttggggaccttggattttccaaatgcctttgccggggcgtccctgggtcaggcagaag

SEQ ID NO: 44164 - DNA, 201 bp, Homo sapiens
aagagagatggtgtgtcgcattcctgctcagtctgtagtgggtccacgtagctctcggcaccacatctgtgcccgtgacagtagctcttttcagggtgggygtggcgagctgggcagctctagatgccacactcccagctgggtaccagtgactagtcttaggttggggaccttggattttccaaatgcctttgccggggc

SEQ ID NO: 44165 - DNA, 201 bp, Homo sapiens
caacactgtgcctcgaagggagattggttgggatgcaagagagatggtgtgtcgcattcctgctcagtctgtagtgggtccacgtagctctcggcaccacrtctgtgcccgtgacagtagctcttttcagggtgggtgtggcgagctgggcagctctagatgccacactcccagctgggtaccagtgactagtcttaggtt

SEQ ID NO: 44166 - DNA, 201 bp, Homo sapiens
ccaacactgtgcctcgaagggagattggttgggatgcaagagagatggtgtgtcgcattcctgctcagtctgtagtgggtccacgtagctctcggcaccayatctgtgcccgtgacagtagctcttttcagggtgggtgtggcgagctgggcagctctagatgccacactcccagctgggtaccagtgactagtcttaggt

SEQ ID NO: 44167 - DNA, 201 bp, Homo sapiens
cttgcctgctgtgtgatcctgggcaggtttctttgcctctcaggtcctcagtcatcaaagcctgttgctttccctttgctgaatcagccagtgggtggtgrttttgattgagaggccctggccatgtcctgctcagccacacctgagccctgccgtgccccctttgtcgtgctatgctgcctccatatgctcctttgtatg

SEQ ID NO: 44168 - DNA, 201 bp, Homo sapiens
caaatccagcgagatggggattgagaatgtcatcttggggatgccacacaggtgggtccccctccctgctgtgccttgcgcattctcctccagcccagggracagaggtgggagagatgagatggaaatcagagcggaggtgttggtgggacctgggggtagaggtgggtttcctggaaagttctgagtcctgggcctggc

SEQ ID NO: 44169 - DNA, 201 bp, Homo sapiens
cctctggctccaggggaaggctgaacgtgctggccaacgtgatccgcaaggacctggagcagatcttctgccagtttgaccccaagctggaggcggcggaygaggtgggtgccatgcccaggtcccggcacccttggagagctgggtgtttgggaggtggactgtggaggggctgagccgggagcttccgggctgagataa

SEQ ID NO: 44170 - DNA, 201 bp, Homo sapiens
ctccggggatgtcaagtaccacctgggcatgtaccatgagaggatcaaccgcgtcaccaaccggaacatcactctgtcgctggttgccaacccctcccacytggaggcagtggaccctgtggtgcaggggaagacaaaggcagagcagttctaccgtggagatgcccagggcaagaaggtgagctcacctgggggaaccca

SEQ ID NO: 44171 - DNA, 201 bp, Homo sapiens
tgggagcctgtaatcccagctactcaggaggctgaggcagaagaattgcttgaacctgggaggtggaggttgcagtgagctgagatccagccactgcactytagccttggtgacagagcaagactccatcttgaaaaaaaaaaaaaaaagaaaaaaagaaagaaagaaagaaagaaagagaaatcaatgttaccatagtag

SEQ ID NO: 44172 - DNA, 201 bp, Homo sapiens
gttggggcaggtggaagggggcttttcacattttgttctgtatccttctgtatcatttaagttctgtacaactagaataaataaaaacttccatgttctgmcacacacacacacacacacacacacacacacacacacacgccacaggcatgggaaaaaaagaaaggtgtctgtttctgaagatctctgcaaagcctacag

SEQ ID NO: 44173 - DNA, 201 bp, Homo sapiens
ccacgcctggctgatttttgtgttttcagtggagacggggtttcaccatgttggccaggctggtcttgaattcctgacctcaagtgatctgcccgccttgscctcccaaagtgctgggattacagcgtgagccattgcacccagcctgtgctttctttttactgcttctttgaagcaggatccagctaaatccacaggttg

SEQ ID NO: 44174 - DNA, 201 bp, Homo sapiens
tgatggcttcctcatgatgtcatttcatctgtcccattgtcccatgtaatttctgtactttgacaattagatctagaggctcgatcccatagacatttgattttttttttttttcaaaatcagcttcctggtggtgatggtgatggcacttgagcagttagcagctgtggatagtgatttcctagatccattaactcacta

SEQ ID NO: 44175 - DNA, 201 bp, Homo sapiens
ggtttcctgggacagtgacggaggcttgcctgcctcctgctgcccagctcccctgctccaggtgaacaggtgccagcccacctgccctctgtccctgcccyggtctgtgtctctgcagtcaccggcaccatgttctccatgaccaggaggttgaccgcaggacgtgtgtgcctatgaatcatctctggcctgaccaggccc

SEQ ID NO: 44176 - DNA, 201 bp, Homo sapiens
gccgatgacccagaggctgtgatatatgtgtgcagtgtggcagccgaatggagaaacactttcaacaaagatgttgtcgtggacctggtgggtctggggaytgaggccaaggcatgggtgggtggcccatccctgctgtgctgagccagccatgtcatcagcatcttcagcactcagggctgggagtgcttcttggatgag

SEQ ID NO: 44177 - DNA, 201 bp, Homo sapiens
ctttggcttctagccatgaggtccctataggccagagacagagagttctagaagaacttggtgatggggaccaggacttacgagtccaagtggactgggcrtctggctgcgcagggctttggtgctctgtccacatcttcatcctgattccaggaagaaattgccaaatacgaccggatctgtgaggaggcttatggcagg

SEQ ID NO: 44178 - DNA, 201 bp, Homo sapiens
gtaggaggcagccctgagctggggttgtccccataattatctatggagtgttcgtccttccaccttcatggagctctgagggcaaggactacaagtttccrgagccttctccaagccccttgctgagcgcactgcaggcctgcccagcctcggggtacctgtacaggatcccctgaactctgagactttggcttctagcca

SEQ ID NO: 44179 - DNA, 201 bp, Homo sapiens
tgataaggagttccagctgccgacaaccaccttcattgggggctctgaaaacaccctttctctgcgggagatcattcggcgcctggaggtgagcacaggcrggtgtgtggggtgcagctgaagcagctctttggagcttgccagaggacgggaaggcactgtcttttttgttctagacagcagggatgtcagccgtccctc

SEQ ID NO: 44180 - DNA, 201 bp, Homo sapiens
atttgctagaatttaggtgtcttttgtgttttctggtgttaggatattgtgtagaatgctgtaagtcttccttgcttcagggtcataaaatgttgtgtgtycctcattgctaccattggtgtgaggagtcaggggattcagcttcagtgtttgctggtggcctggccgagggtctctgcgctgatgcctaggcactgccct

SEQ ID NO: 44181 - DNA, 201 bp, Homo sapiens
tattttccctgggaaggcacaggtgacagagtgaggtgagatgagctgcagggcctggttccccgtggtctgggtgggcttccagtctgtacctgcctggrctgttagctgtcttgagtggcgctgggctgggcctggggctgccttccattctactcttcctgcccctccagaccttagcccttcctgcaatgaagtggg

SEQ ID NO: 44182 - DNA, 201 bp, Homo sapiens
cagccccttacaggcgagtagcaggcacagctgtggttagaatcacctgcacactgtgctgaaaaaaaaacactgtattattataagcattttcaaacatrtaaaaggcagaaggatagtgcagtgagcccaccacccatcaatcatggccagccttgtttcatcaatttcccccttagcccccgctcactgctgattatc

SEQ ID NO: 44183 - DNA, 201 bp, Homo sapiens
atttacaaggtttgaaagtcaaatcttcaaagtaagataacttcttaaaaatctggctcctagccctgcctctctatcctattttgtcccctcccctagakgataatttttcttatgttgtggtttttttaaattttatgattttcccttctaatgcatatatttatttgtgtctcctttttattagataatgtgtagttc

SEQ ID NO: 44184 - DNA, 201 bp, Homo sapiens
aaatttgactggagccactgccacttggtgactgcgtgcagcaagctctatcttgtcttctgtttaggctttgagctgggctatgccatggccagccccartgccctggtcctctgggaggcccagtttggggacttccacaacacggcccagtgcatcatcgaccagttcatcagcaccggccaggccaagtgggtgcgg

SEQ ID NO: 44185 - DNA, 201 bp, Homo sapiens
ggatccatcatgttcccatctccaccttcagggctccggggatgtcaagtaccacctgggcatgtaccatgagaggatcaaccgcgtcaccaaccggaacmtcactctgtcgctggttgccaacccctcccacctggaggcagtggaccctgtggtgcaggggaagacaaaggcagagcagttctaccgtggagatgccca

SEQ ID NO: 44186 - DNA, 201 bp, Homo sapiens
gcaagaaggtgagctcacctgggggaacccagaggacctgggcccttcagggtgggcccagagggctgggctggaccctgggtctccacagtacaggtgcyggctgggctacatgggctggggcacgcagcccctcctggctcacacctgccctgcaggtcatgtccatcctggttcatggggacgccgcctttgctggcc

SEQ ID NO: 44187 - DNA, 201 bp, Homo sapiens
tgctcccagaggagccggccccaagtgccccgcgctctagggcttggcatcactggctcgtgggctgggccacatgacccgaagcctcaggggctgagcaytggggagggaaacttgggggcactcagaggctcccaagctcacctccctcctccctgcagtggaatcttttttgttttgaaaattttctctgttcaggct

SEQ ID NO: 44188 - DNA, 201 bp, Homo sapiens
gatggcttcctcatgatgtcatttcatctgtcccattgtcccatgtaatttctgtactttgacaattagatctagaggctcgatcccatagacatttgattttttttttttttcaaaatcagcttcctggtggtgatggtgatggcacttgagcagttagcagctgtggatagtgatttcctagatccattaactcactag

SEQ ID NO: 44189 - DNA, 201 bp, Homo sapiens
atctgctgtaggtatactgtccttatagttgctcaaaacttgtccttattcccagcactcgtggtgtttgaacactgccttgatgttggtataacaagatrcttcaagctcagcttgtacatttctgcctattccagaactgtccaggtctctggctgtttcctgctattggtttgatcattacttctgggccctttcagg

SEQ ID NO: 44190 - DNA, 201 bp, Homo sapiens
gcagagctggcccagtggcctgaggcagcaagaaagcatggggctttaagcctcgggccattacagcagcaggagaggatggtgcctggtgattgggtggyctgaggagggctctgggcacgaaggggctgtattaggccaggccaggcctccacagtgggggagggaaccctgaggcctgcgggctttgccaggtgagag

SEQ ID NO: 44191 - DNA, 201 bp, Homo sapiens
cctcacccccccaactctttcccttgagtccccagagttcattgtatcattctttattcttttctttttttttctctattgcgcaggctggagtgcagtgrtgcaatctcagctcactgcagcctccacctcccaggttcaagcgattctcctgcctcagcctcctgagtagctgggattacaggtgcacaccaccataca

SEQ ID NO: 44192 - DNA, 201 bp, Homo sapiens
caatggcatgatcttggctcactgcaacctctgcctcctgggttcaagcgattctcctgcctcaaccttccaagcagctgggattacaggcatgcgccacsacgcccggctaatttttgtatttttagtagagatggggttttgccatgttggtcaggctggtcttgaactcctggcctcaggtgatctgcctgcctcggc

SEQ ID NO: 44193 - DNA, 201 bp, Homo sapiens
tgtgctggacattgggttgttctcatgagggtccttgcacatgtgtgagcgagtttatctgttagatggtgtccgagcagtgcagcggctggagctacggrggtgggactgaacgaccctcccaggagctggcagatgtcagcgagcccatccacagtgtgtgatggtgccagagcccccaccccacttcctcctacacgc

SEQ ID NO: 44194 - DNA, 201 bp, Homo sapiens
gtgtggacccatacctactggctcctatcccaggtctttctgacatcctgttccttttgttctagcaccttcagccttctaagcctcactttgctcttccrtaaaacagggataaaagcgcatgcccgagaatggttgcaatgagtcaaagatgacctgtgtgtatagtggaaaacttggccaaaggatgtttaaaatgaa

SEQ ID NO: 44195 - DNA, 201 bp, Homo sapiens
tgggattacaggcatggagccaccgcttccggccactgcctagcctctttcaaagtcctgcccatcttccctttcggtggctctctgggtcccctgggcartgagcctgtcactccctcctctgtgtccctttgccctcaggactatctctcctgctgtctccagcctgctgccgtgtgtgtgtgtgtgtgtgtgtgtgtg

SEQ ID NO: 44196 - DNA, 201 bp, Homo sapiens
tacagtcaagtgatgggcaagctcacgtcgctggccccggctctggccaatgtgccaggcaggccagatgaaggccggtgaggccctgtgcctcctgtccrggggtgctggggacataccgcccctcctctggctatgctcctttgtttctgcctccccagatctctccattccccttcgacctgatcaagcaggaggcag

SEQ ID NO: 44197 - DNA, 201 bp, Homo sapiens
atgtgggagggaaataggtgtggctatagaagggcattttgagggatccttgtggtgatagaaatgttttatatagtagtttgtgcttatcctggggagayacgttccaaggcccccatggatgcccaaatcctcacatagtatcaaaccctatatataccctgttttttcctatacatacctatgataatttttttttct

SEQ ID NO: 44198 - DNA, 201 bp, Homo sapiens
gtgtggtgcgtgtgtgtggtgtgtttgttgtatgtgtggtgtatttggtgtgtgtgtgtgtatggtgtggggtatgtgtgtggcatgtttgtgtggtgtgkgtgtggtgtgggtgtgtgatgtgtgtgtaggtgtatttgtgtggtgtttggagtatgtgtgtggagtttggagtgtgtgtgtgtgggtgtgtggtgtgtg

SEQ ID NO: 44199 - DNA, 201 bp, Homo sapiens
ctgttgcctccccaggatacctaaataaggttgaacctgaccacacatgatagcagggctgagggtagcatctctgagcatgttgtcagcccccaggatgktacattgtaccctttgaatcccagggaatccctgggttcgtcctggcttgtgagaaggatgggtgggggcatggaggatatactgagaaaggctaaattt

SEQ ID NO: 44200 - DNA, 201 bp, Homo sapiens
tttcatggagcagagcggtccgtgtgggtgagggtgggcgaggcccaggccgagttgggttggcccctgcctggctgtgtggtcatgggtggtttcttacmctctccttgcctcttcatctgtgcagtggggaagagtgtctgcatcatggggctactttgggggttagcgataaggcgtgtgggattcctagaactctgc

SEQ ID NO: 44201 - DNA, 201 bp, Homo sapiens; identical to SEQ ID NO: 7792

SEQ ID NO: 44202 - DNA, 201 bp, Homo sapiens
gtttgcccagcagagccttgggaggtgaggatggttttccgtacccatcgacctgctgaggaaatgttgttcctgctcccacccgctccctgggaggcctkggccaggccttcagcccatactgcctagcctctttctttccttttctttttgagatggggttttgctcttgttgcccaggctggagtgcaatggcatgat

SEQ ID NO: 44203 - DNA, 201 bp, Homo sapiens
actcccttgctcatttgtttgcccagcagagccttgggaggtgaggatggttttccgtacccatcgacctgctgaggaaatgttgttcctgctcccacccsctccctgggaggccttggccaggccttcagcccatactgcctagcctctttctttccttttctttttgagatggggttttgctcttgttgcccaggctgg

SEQ ID NO: 44204 - DNA, 201 bp, Homo sapiens
gccccagggctggctgtcccttggccctcaggccagcactcctttcccacaggcctctctcgcattctgcggggccgtgcggacatgaccaagaaccggayggtggactgggcgttggcagagtacatggcctttggctccctgctgaaggaaggcatccacgtgcggctcagcgggcaggatgtggagaggggcacattc

SEQ ID NO: 44205 - DNA, 201 bp, Homo sapiens; identical to SEQ ID NO: 7788

SEQ ID NO: 44206 - DNA, 201 bp, Homo sapiens
cctgggcttttcccgtgaccagagagctgcttgtggttggactagcccagggctacatcagcatgagggcatccaaatgcatggtgcaggggtccccattygtggctggcctgccaggactttggggtttgtctgtcatggggggcctgggaatgcccagtgtctggtcagagagttaggcagagctggcccagtggcctg

SEQ ID NO: 44207 - DNA, 201 bp, Homo sapiens
ccataatcccagcacttgggaggccaaggtgggggatgatgaggtcaggagttcaagaccagcctggccaacatgatgaaactccatctctactaaaaatwaaaaaattagcgaggcatggtggtgggagcctgtaatcccagctactcaggaggctgaggcagaagaattgcttgaacctgggaggtggaggttgcagtg

SEQ ID NO: 44208 - DNA, 201 bp, Homo sapiens
agcaaggctagggtacaggggggcattagcaaatggaaatgatgctttgcctctgaatgagctgcccaatctgtgggatggaacagagttccctgtacacyacccacctggggatggaagagggaaggtgagcagggttgggttcccttctggcctgaggacccatcaattgtgggccacctaggagcaaacagcagctat

SEQ ID NO: 44209 - DNA, 201 bp, Homo sapiens
tgctgggattataggcatgagccaccgtgcccggccaatagttttaacttttaagtttaggtctataaacatacattttgagttattttgtatatggtgtraggtgagggtccagatttattatttactggatgataatcaattgaccttgtaccatttgtttaaaagactatccattactcatggaattaacttggcacc

SEQ ID NO: 44210 - DNA, 201 bp, Homo sapiens
cccaagtctggattttgctgatggcttcctcatgatgtcatttcatctgtcccattgtcccatgtaatttctgtactttgacaattagatctagaggctcratcccatagacatttgattttttttttttttcaaaatcagcttcctggtggtgatggtgatggcacttgagcagttagcagctgtggatagtgatttcct

SEQ ID NO: 44211 - DNA, 201 bp, Homo sapiens
caggagaaacttccgtttgttaactctgtttatcctgaggtgcagattgtgtaggaaagacaggatcactgctttatttttttcttttattcagtgatttycaaaattatgaggtgattccctagcacactccaaaagtgactaatgaaagtttatcttcttttttttggattcatatgaatgcatgaatataaacatatt

SEQ ID NO: 44212 - DNA, 201 bp, Homo sapiens
gagacagggtcttactctgtcacccaggctggagtgcagtggcaccatctaggctcactgcaacctccgcctcctgaattcaagtgattctcgtgccccarccccccaagtagctgggattacagatgtgtgccaccacacccggctaatttttgtatttttagtagagacaggttttcaccatgttggccaggctggtct

SEQ ID NO: 44213 - DNA, 201 bp, Homo sapiens
aggagaaacttccgtttgttaactctgtttatcctgaggtgcagattgtgtaggaaagacaggatcactgctttatttttttcttttattcagtgattttmaaaattatgaggtgattccctagcacactccaaaagtgactaatgaaagtttatcttcttttttttggattcatatgaatgcatgaatataaacatattt

SEQ ID NO: 44214 - DNA, 201 bp, Homo sapiens
tcagtgattttcaaaattatgaggtgattccctagcacactccaaaagtgactaatgaaagtttatcttcttttttttggattcatatgaatgcatgaatrtaaacatatttgatgagtttcaatctgctgtaggtatactgtccttatagttgctcaaaacttgtccttattcccagcactcgtggtgtttgaacactgc

SEQ ID NO: 44215 - DNA, 201 bp, Homo sapiens
tttttagtttaattaagtctcatctatttatctttgtttttgttgcatttgcttgtgggttcttaatcatgaagtctttgcctaagccagtttctagaagrgtttttccaatgttatcttctagagtttttatgggttcagttcttagatttaagtctttgatccatcttgagttgatttttgtataaggtgagagatgaa

SEQ ID NO: 44216 - DNA, 201 bp, Homo sapiens
catatgaatgcatgaatataaacatatttgatgagtttcaatctgctgtaggtatactgtccttatagttgctcaaaacttgtccttattcccagcactcrtggtgtttgaacactgccttgatgttggtataacaagatacttcaagctcagcttgtacatttctgcctattccagaactgtccaggtctctggctgttt

SEQ ID NO: 44217 - DNA, 201 bp, Homo sapiens
ttttttttttttttttagatggagtttctccttgtagcccaggctagagcgcagtggtgcgacctcagctcactgcagcctccacttcccagattcaagcrattctcctgcctcatcctcccaagtagctgggattacaggcatgtgccgccacgcccagctaattttgtatttttagtagagatggggtttcaccatgtt

SEQ ID NO: 44218 - DNA, 201 bp, Homo sapiens
tagcttagcttcgccttatgagtgagaacatagaatgtttggttttccattcctgagttacttcacttagaataatggtctccaattccatccaggttgcygcaaatgccattatttcattcctttttatggatgagtagtattccatggtgtgtgtgtgtgtgtgtgtgtgtgtgtgtgtattacattttctttatccac

SEQ ID NO: 44219 - DNA, 201 bp, Homo sapiens
cttgaactcctgacctcaagtgatctacctgctttggcttcccaaagtgctgggattacaggtgtgagccaccatgcccagttccgttatatcattcttakgcctttgcgtcctcatagcttagcttcgccttatgagtgagaacatagaatgtttggttttccattcctgagttacttcacttagaataatggtctccaa

SEQ ID NO: 44220 - DNA, 201 bp, Homo sapiens
agagatgatgccttcctgcagtgtcctccatggtagaaggggcaaacaagtctgcccctggacctctcttttaaaaaatttttaatttaatttaatttttwaaaatttcaataggtttttggggaacaggtggtgtgtggttacatgaattttagtggttgatttctgaaattttggtgcacccatcacctgagcagtgta

SEQ ID NO: 44221 - DNA, 201 bp, Homo sapiens
ccctaaggctttttggagcaagggctgcagtctctggtagctgggagggccctcagataatctgggtcaacctccctgttttgagctagggaaactgaagyccaaagatgcaaaggcttgctggaagttgctcagttctgctcatgtggctgtgcctccatgtccaaagtcctgtccaccagccaggaatgactcccttgc

SEQ ID NO: 44222 - DNA, 201 bp, Homo sapiens
cagggcaggggtcacaggcagggggcctggccaggcagggccagctggcagctgggcgtgtatttcccttccagctgattatcttcacacctaaatctctkctgaggcacccagaggccaagtccagctttgaccaaatggtatccggtacgtgcctggcctgggtgtgtggggtagcccacaatggggcggtggcccatt

SEQ ID NO: 44223 - DNA, 201 bp, Homo sapiens
aaaccccgtctctactaaaaatacaaaaaaaaattagccgggcatggtggtgggcgcctgtagtcccagctagttgggaggctaaggcaggagaatggcgkgaacccaggaggtggagcttgcagtgagctgagatcacaccactgcactccaccctgggtgatagagcgagacgccatctcaaaaaacacaaccaaaaaa

SEQ ID NO: 44224 - DNA, 201 bp, Homo sapiens
tgggaacatttgggcagaaaattatccctggtgtggagtgactgtggccacaccacctgtctgttcactggacttttctgaagctgggtcccccagggctkcaggggcttgggggagcacctgactcagctgctggatgcaaagtggattcctgagcagcgaggtgtgggctggagtttggatctggctgggtggagatct

SEQ ID NO: 44225 - DNA, 201 bp, Homo sapiens
gccacaggaaggcaggactggatcggcctcaccactggctgcagggaggagagttgggaccaggtgtttaggcagtttggccaagagctggcccaaggcasagcaggtcaggtgggcagggatgaggctctaggagaacaagagagcggggacactgagcaaggccagaagtggcgggaagtggctgtgggaacatttggg

SEQ ID NO: 44226 - DNA, 201 bp, Homo sapiens
gctgattgccgagggcacagtcaccctgcaggagtttgaggtgggcaggcaggctgcaggggcgcccaagacaaactttgggtggggaccctggagagggkttgtagatgttaccagcccagtgctgggcactaaggatttaaagaagtagccactatggtccttgtccccaagaggccccagttaccaaaggggaccaag

SEQ ID NO: 44227 - DNA, 201 bp, Homo sapiens
ttcaccatgttagccaggatggtctccatctcctgaccttgtgatccgcctgcctcagcctcccaaagtgctgggattataggcatgagccaccgtgcccrgccaatagttttaacttttaagtttaggtctataaacatacattttgagttattttgtatatggtgtgaggtgagggtccagatttattatttactggat

SEQ ID NO: 44228 - DNA, 201 bp, Homo sapiens
acggagtctcactctgtcacccaggctggagtgcagtggtgtgatcttggctcactgcaagctccgcctcccaggtcatgccattctcctgcctcagcctyccgagtagctgggactacaggtgcccaccaccatgcccggctaattttttttttttgtatttttagtagagacagggtttcaccatgttagccaggatgg

SEQ ID NO: 44229 - DNA, 201 bp, Homo sapiens
gctttgttgaagatcagttgactgtaagtatttggttttacttttggattctctattctgttccattcgtccataagcctgtttttgttgttgttgttttrttttgttttttgagacagggtcttactctgtcacccaggctggagtgcagtggcaccatctaggctcactgcaacctccgcctcctgaattcaagtgatt

SEQ ID NO: 44230 - DNA, 201 bp, Homo sapiens
tgctgaggcacccagaggccaagtccagctttgaccaaatggtatccggtacgtgcctggcctgggtgtgtggggtagcccacaatggggcggtggcccaytgtgtggcttctgcttctggggcttctccaacctcccctctgcctgtggctctgctgacctgcagcagctcctggcatggtcccactagcagtagggttg

SEQ ID NO: 44231 - DNA, 201 bp, Homo sapiens
gacagtggggaagtttctagaatttcactattactagtagcaccgcagtgaacacctttgtgcataggtctttttcctgtttttgcccgtgcatgttgtasttccaaaccaggttgagctcctgccaccttactggctgtggctggggtctcgcaggcagcagtgaagtagccgcggggcagagacatggggaagcttaac

SEQ ID NO: 44232 - DNA, 201 bp, Homo sapiens
tgtacccggtgtgtagtcttttatccctcacccccccaactctttcccttgagtccccagagttcattgtatcattctttattcttttctttttttttcthtattgcgcaggctggagtgcagtggtgcaatctcagctcactgcagcctccacctcccaggttcaagcgattctcctgcctcagcctcctgagtagctgg

SEQ ID NO: 44233 - DNA, 201 bp, Homo sapiens
agggaccagcttccagcgggtgattcctgaagatggggccgcagcacgggcccctgagcaggtgcagcggctcatcttctgcacgggaaaggtgtactatracctggtgaaggagcggagcagccaggacctggaggagaaagtggccatcacgcgcctggagcaggtgtgcctgaaccccttgtacagtcaagtgatggg

SEQ ID NO: 44234 - DNA, 201 bp, Homo sapiens
catactgcctagcctctttctttccttttctttttgagatggggttttgctcttgttgcccaggctggagtgcaatggcatgatcttggctcactgcaacytctgcctcctgggttcaagcgattctcctgcctcaaccttccaagcagctgggattacaggcatgcgccacgacgcccggctaatttttgtatttttagt

SEQ ID NO: 44235 - DNA, 201 bp, Homo sapiens
taatttaatttaattttttaaaatttcaataggtttttggggaacaggtggtgtgtggttacatgaattttagtggttgatttctgaaattttggtgcacycatcacctgagcagtgtacactgtacccggtgtgtagtcttttatccctcacccccccaactctttcccttgagtccccagagttcattgtatcattctt

SEQ ID NO: 44236 - DNA, 201 bp, Homo sapiens
tggcctcaggtgatctgcctgcctcggcctcccaaagtgctgggattacaggcatggagccaccgcttccggccactgcctagcctctttcaaagtcctgyccatcttccctttcggtggctctctgggtcccctgggcaatgagcctgtcactccctcctctgtgtccctttgccctcaggactatctctcctgctgtct

SEQ ID NO: 44237 - DNA, 201 bp, Homo sapiens
ggacactagggcccgggtggaaggcatctgtctgcatgctggcttttcgcatcgggagtccagtggggagacatgtcagctgtttaattcattgagttacragttatgttggaagtcaatgcagacagctgtgggtgtcagggaaggatccctggaagaggtggtgttcaaaggaagaggaaaagagagatgaacctctct

SEQ ID NO: 44238 - DNA, 201 bp, Homo sapiens
tgtgtggacccatacctactggctcctatcccaggtctttctgacatcctgttccttttgttctagcaccttcagccttctaagcctcactttgctcttcygtaaaacagggataaaagcgcatgcccgagaatggttgcaatgagtcaaagatgacctgtgtgtatagtggaaaacttggccaaaggatgtttaaaatga

SEQ ID NO: 44239 - DNA, 201 bp, Homo sapiens; identical to SEQ ID NO: 7791

SEQ ID NO: 44240 - DNA, 201 bp, Homo sapiens
ggaggtgggactgaacgaccctcccaggagctggcagatgtcagcgagcccatccacagtgtgtgatggtgccagagcccccaccccacttcctcctacaygctctcgaatcctttcatctttgccgatataataggttcaaaagaggattttgttgtaatgcatttctttgttatgaattcagttgcttatcttttcaca

SEQ ID NO: 44241 - DNA, 201 bp, Homo sapiens
gtcctgagctgccccaacccctctgggtaccaacgcctctgccatgtcctgttggtccctcagggaccagcttccagcgggtgattcctgaagatggggcygcagcacgggcccctgagcaggtgcagcggctcatcttctgcacgggaaaggtgtactatgacctggtgaaggagcggagcagccaggacctggaggaga

SEQ ID NO: 44242 - DNA, 201 bp, Homo sapiens
ggactgaacgaccctcccaggagctggcagatgtcagcgagcccatccacagtgtgtgatggtgccagagcccccaccccacttcctcctacacgctctcraatcctttcatctttgccgatataataggttcaaaagaggattttgttgtaatgcatttctttgttatgaattcagttgcttatcttttcacatgctttt

SEQ ID NO: 44243 - DNA, 201 bp, Homo sapiens
cgctgatgcctaggcactgcccttctctccctgccttccccaccgctggatggccttccccactcttgtgctctcctgctccatggtcagtgtacagagargctctgagccaaggcctggggtccctgccttcctccctcaggccagtgaggaggggcagtgtgatgaggagagaggggtcagagacagcttggccctctg

SEQ ID NO: 44244 - DNA, 201 bp, Homo sapiens
cattcttggttcttttctatggttcaggctccagggtgagggcacctctgctgagaagccctccagactttcccctgagcctggggtccctgcagggccakatgtctttcccatggtggggtccagccttggctgtctggcgtttgctttcagggcccagagcactcgtcagcgaggcccgaaaggttcctgcagatgagc

SEQ ID NO: 44245 - DNA, 201 bp, Homo sapiens
acacaggggctggaacgcagcctggaacgtgggcagaattctgcagctgaaaggacggtggcttgccggggcctggaccaatgaccgagggcagccccccmactccggggtgagactagaatgtgggtggtcaccgactgcatcccttggctggggccactgtgacctttgcctgggaagtccggagggtcccctgtggct

SEQ ID NO: 44246 - DNA, 201 bp, Homo sapiens
cggtggtggctggtggcttggtgggttctggcgggccttgaaggggcgggatggaccctgggccccttgtcgggttggacggtatatgccttccaggcccytggagcacgtgggtctgtgcagggtggggtctgcacatgtgcatgctgcagctgctgagacgatgatgctacccctggcagcagaaggcgctaccacgta

SEQ ID NO: 44247 - DNA, 201 bp, Homo sapiens
gctccatgaggttggcaccacctggagggccaagtggctggaggtcctgctccagggctctatgagacgtcccacaccctgcctaagagagcaggagggtrccacaggaaggcaggactggatcggcctcaccactggctgcagggaggagagttgggaccaggtgtttaggcagtttggccaagagctggcccaaggcac

SEQ ID NO: 44248 - DNA, 201 bp, Homo sapiens
ctgggaagggaccggggccagggcctgggaggggcgagagatgctcagaggcccttaggggatggccctgggggatggtgattgggctgccctcacctaargccatgtgggaggtgaaatcgtgtcccatctgggccccttggggatcccagttggggggacctccttgccttgaggggttttgtgggtatcagggcccca

SEQ ID NO: 44249 - DNA, 201 bp, Homo sapiens
ggaccacctggctgtgcagtccctgatccgggcctaccaggtgaggggcagctgaggcacagcctgggaggctgcactggctcctggggtgtggccaggcrctgaagggaaggggtctcagctccaacatcatctccccagagagcccttctccttgtcctctactgagcggcacctactcctctagccagtctttgccac

SEQ ID NO: 44250 - DNA, 201 bp, Homo sapiens
cgcctccttctccagccttctatgaccttcaggaggctgaccttgataaggagttccagctgccgacaaccaccttcattgggggctctgaaaacaccctytctctgcgggagatcattcggcgcctggaggtgagcacaggcgggtgtgtggggtgcagctgaagcagctctttggagcttgccagaggacgggaaggca

SEQ ID NO: 44251 - DNA, 201 bp, Homo sapiens
cttggcaatattccatgtccacaatactgaaagcacctttttaaaagactgtgtaatcttccagattctaaatgtaaaatcgttatttagccagttttctrtggatagccatgtaggttgttttcacattgtcaatttttgtaaacagttctgcagggaacatcgttgtatgtacatctaggcaccctgggaaggccctga

SEQ ID NO: 44252 - DNA, 201 bp, Homo sapiens
accacctgtctgttcactggacttttctgaagctgggtcccccagggcttcaggggcttgggggagcacctgactcagctgctggatgcaaagtggattcstgagcagcgaggtgtgggctggagtttggatctggctgggtggagatctttgggacttggcgaagagagcccttgagtgtggcaggagggtagtgggcta

SEQ ID NO: 44253 - DNA, 201 bp, Homo sapiens
gcctttagagatgtcaaaaatagaggttctcaaagatgccagtacaatggcttgtttgatttcccagagctcacatgcaacaatcttagaataacagttctttttttttttttttttttttttagatggagtttctccttgtagcccaggctagagcgcagtggtgcgacctcagctcactgcagcctccacttcccagat

SEQ ID NO: 44254 - DNA, 201 bp, Homo sapiens
ttgaccagacaggactaattggaggactgctgcggtgttcaggccataacaagcgtaatcatttggaatatctctgggaactgctggcaggaggtattccrtcagggaaatgtgaggcagcagcaagccacagcaaggctagggtacaggggggcattagcaaatggaaatgatgctttgcctctgaatgagctgcccaat

SEQ ID NO: 44255 - DNA, 201 bp, Homo sapiens
caatctgtgcaaaggcctgggacgggacattcattcggtgataggtgatagtggagctcaaagggctcccagtgggtgtgccctacccagatattccccarttttgcagcagctacattgaccacacagcgtagggaagggcctgagcccctctggctgctcctgcaggtctgttaccgccggcgtggccacaatgagatg

SEQ ID NO: 44256 - DNA, 201 bp, Homo sapiens
acacagtgtggacagagcctctctccctctcaggcttcttcaacgtagatggggagcccaagagcatgacatgcccagccacggggatccctgaggacatsctcacccacatcggcagtgtggccagctctgtgcccctggaggactttaagatccacactggtgaggttgctggacaggctgcagcccaggctgctggcc

SEQ ID NO: 44257 - DNA, 201 bp, Homo sapiens; identical to SEQ ID NO: 7801

SEQ ID NO: 44258 - DNA, 201 bp, Homo sapiens
tgggggatggtgattgggctgccctcacctaaggccatgtgggaggtgaaatcgtgtcccatctgggccccttggggatcccagttggggggacctccttrccttgaggggttttgtgggtatcagggccccagtgggcgcagacagagagcccaacacagtctgctgtgggttccagctgctgagcagtccagtcttggc

SEQ ID NO: 44259 - DNA, 201 bp, Homo sapiens
tccctgggttcgtcctggcttgtgagaaggatgggtgggggcatggaggatatactgagaaaggctaaatttgactggagccactgccacttggtgactgygtgcagcaagctctatcttgtcttctgtttaggctttgagctgggctatgccatggccagccccaatgccctggtcctctgggaggcccagtttggggac

SEQ ID NO: 44260 - DNA, 201 bp, Homo sapiens
actaaaaatacaaaaaaaaattagccgggcatggtggtgggcgcctgtagtcccagctagttgggaggctaaggcaggagaatggcgtgaacccaggaggyggagcttgcagtgagctgagatcacaccactgcactccaccctgggtgatagagcgagacgccatctcaaaaaacacaaccaaaaaaacaactaaccctg

SEQ ID NO: 44261 - DNA, 201 bp, Homo sapiens
gctgtctaatcttcaccatggctttgcatgttgggaatatttccattttatagacgaggaaatcgaggttcatataaagttatttgcccaaggtcacttcytaaggaagtggtggttttggacttcacctctgtcctcaagaccacattgcttcccttggggaaatcagctcttcccataccatgcattcctagccccaca

SEQ ID NO: 44262 - DNA, 201 bp, Homo sapiens
gggtttcaccatgttggccaggctggtctcaaactcctgacctcaagtgatccgcctgccttggcctcccaaagtgctgggatgacaggtgtgagccactrcgccagattttcatttgagcaccaggtagtgtctgttggcttctccactctggccttttgtgggttttgcttccctgtggagatactggagaagctgcca

SEQ ID NO: 44263 - DNA, 201 bp, Homo sapiens
agttcaagaggtgtccactgcagccacaagtccaaacctgcagttagtgtcagtggctaaggagagcctggggatgcaggcctggtcctgagctgccccarcccctctgggtaccaacgcctctgccatgtcctgttggtccctcagggaccagcttccagcgggtgattcctgaagatggggccgcagcacgggcccctg

SEQ ID NO: 44264 - DNA, 201 bp, Homo sapiens
ccacgcttcatgaccatcctgaggcgcgcacggcccatatggtacatggtggggccgctgattgcccctcacctcggccctgaggctctgtcctggctccrtctgtcccataggccatgctacccagaactggccctgcccttctctggtgatgagcaatgatggggcatcatcagtactggctttgtgtttgttctgcag

SEQ ID NO: 44265 - DNA, 201 bp, Homo sapiens
tggccagctctgtgcccctggaggactttaagatccacactggtgaggttgctggacaggctgcagcccaggctgctggccccaccccaacactgtgcctygaagggagattggttgggatgcaagagagatggtgtgtcgcattcctgctcagtctgtagtgggtccacgtagctctcggcaccacatctgtgcccgtga

SEQ ID NO: 44266 - DNA, 201 bp, Homo sapiens
tggagaagctgaccagccgggcctaggatcaacacctgctgtatcacaggcttatcagaggaggcgccttctgcacttcggggcacccacagaagattttyagtatgatgcaggtcttggatcaacttgatattcttaaggtggtaaaattcccctttcaaaggtttctttgtcagataatgaaatgttctaaaattgcac

SEQ ID NO: 44267 - DNA, 201 bp, Homo sapiens
ctgctgggcccaagctgtccactaaggtcaagctggtggccatctgtggtcctcaggatcatgtgtgtgtggggggtgtgtggtgagtgtgggcgagttgygtgtggtgtgtgtgtgtggtgtgtttggtgtgtatgtggtgtgtggtatgtggtgagtggggggagtgtatagggggtgtgtgtggtgcgtgtgtgtggt

SEQ ID NO: 44268 - DNA, 201 bp, Homo sapiens
gctccctctcggagtacggagtcctgggtgggtccacgctctcctgcaggccaggcaggccccagacacctggggacaagagatgggctgggaagggaccrgggccagggcctgggaggggcgagagatgctcagaggcccttaggggatggccctgggggatggtgattgggctgccctcacctaaggccatgtgggagg

SEQ ID NO: 44269 - DNA, 201 bp, Homo sapiens
ggcctggtgggggacaggctgcaggagggaccacatggctctggttttccacagccttcttggatgccatgttgtgggaccctgcaggtttcctgggacartgacggaggcttgcctgcctcctgctgcccagctcccctgctccaggtgaacaggtgccagcccacctgccctctgtccctgccccggtctgtgtctctg

SEQ ID NO: 44270 - DNA, 201 bp, Homo sapiens
ttccacattcttggttcttttctatggttcaggctccagggtgagggcacctctgctgagaagccctccagactttcccctgagcctggggtccctgcagrgccagatgtctttcccatggtggggtccagccttggctgtctggcgtttgctttcagggcccagagcactcgtcagcgaggcccgaaaggttcctgcaga

SEQ ID NO: 44271 - DNA, 201 bp, Homo sapiens
cccaccctaccctgggccaccgcaagggagggaagccctcgggggccgggctgtggcagggcagtggggagaagcagcttgcctgctgtgtgatcctgggyaggtttctttgcctctcaggtcctcagtcatcaaagcctgttgctttccctttgctgaatcagccagtgggtggtggttttgattgagaggccctggcca

SEQ ID NO: 44272 - DNA, 201 bp, Homo sapiens
tgtggcttccaggacttgaccagctggctttctcattcctggttgcttatctcggctggtcttgctccagccagggcccaggtggccctctgatgcacccwgagctacctgtcagtccttgccagggactggggttcagccaggcgcccctcacttactgtgcccacctcggctactgcacagtggtttctgcctcttgtg

SEQ ID NO: 44273 - DNA, 201 bp, Homo sapiens
gtggccctctgatgcaccctgagctacctgtcagtccttgccagggactggggttcagccaggcgcccctcacttactgtgcccacctcggctactgcacrgtggtttctgcctcttgtgagttgggacagggctggtgagatggtaaagaagccagcaaggcggggcaggggaagtggcctcctagggtctctggctcta

SEQ ID NO: 44274 - DNA, 201 bp, Homo sapiens
ggcgcccctcacttactgtgcccacctcggctactgcacagtggtttctgcctcttgtgagttgggacagggctggtgagatggtaaagaagccagcaagrcggggcaggggaagtggcctcctagggtctctggctctagctggcacctgggaagtgtcttatcaggtcccctttatgggtgaaaagctgacattcagag

SEQ ID NO: 44275 - DNA, 201 bp, Homo sapiens; identical to SEQ ID NO: 7785

SEQ ID NO: 44276 - DNA, 201 bp, Homo sapiens
agggccctctggggagaacccttcccggcctctgtttactgatctctgcaatgggtgcattagggagtagtcctcactagggcaccccagacagggttgtrtgtgtgggagtcttagtggccatggtgtcggcagttttctggggttgggttgaggttctgaggttgggttggggatgctatgtgaccttgtcctcagaga

SEQ ID NO: 44277 - DNA, 201 bp, Homo sapiens
ctgatgggaactgcatcgctaagagaaatctggcttacatattgactgcagtgatcagggcacagtcgctggaaccccacacagccctgtcactcaccagmttagccagcttagcctcttgcacctcagtttctctgtttataaagtggaactgatatgagtgcccaccccatgggatgttgggaggattaaatgagcaca

SEQ ID NO: 44278 - DNA, 201 bp, Homo sapiens
agggaaggggtctcagctccaacatcatctccccagagagcccttctccttgtcctctactgagcggcacctactcctctagccagtctttgccacatcaycattcagagcacttaccacctgcttgaatttttttttgtgcatactgacttgtgtccttgtggtctgttccttgcacacaccatgccccgagtacgtgga

SEQ ID NO: 44279 - DNA, 201 bp, Homo sapiens
gccgtgcggacatgaccaagaaccggacggtggactgggcgttggcagagtacatggcctttggctccctgctgaaggaaggcatccacgtgcggctcagygggcaggatgtggagaggggcacattcaggtgagcgcagtggggctcagcatccgcacaggagacctggagcagaagctgggcctggcttggggatcccg

SEQ ID NO: 44280 - DNA, 201 bp, Homo sapiens
ttgacagctgtgtgatctgagtaaatgactctgagcctgacggtgtctgcagcgtggccaatgcttgccaagtggtacctgctccacccctccacaggctyggggtagccccttgtctcagctggaggaggggtgcctggccctgggccctcctgcagcatccctgccctccaaccaaatcaacagatggctgccctgctt

SEQ ID NO: 44281 - DNA, 201 bp, Homo sapiens
gccaggcatggtggctcctagctatagtcccagttactcaggagactgatgcaggaggatcacttgagcccaggagtttaagaccagcctgggtaatgtarcaagaccctgtctctttaggaaaaaaaaaagggaagaggtgcaaccaccagattaccaaattggggaaaaccaaccacataaaaaacggctccaaaccct

SEQ ID NO: 44282 - DNA, 201 bp, Homo sapiens
gacaggagcacagcataagcctggggacttggagtcaaatccgtgtaccttgacagctgtgtgatctgagtaaatgactctgagcctgacggtgtctgcarcgtggccaatgcttgccaagtggtacctgctccacccctccacaggcttggggtagccccttgtctcagctggaggaggggtgcctggccctgggccctc

SEQ ID NO: 44283 - DNA, 201 bp, Homo sapiens
tgcatcccttggctggggccactgtgacctttgcctgggaagtccggagggtcccctgtggctgtattggggtgcctacacaccctctgacccacctgggrgagttctgagggggttcccttacagtgtgcaccgagaccgagaccgaatgtcctggggcagctgctgacagcgtttggggcatgtgcccgctctgtttgt

SEQ ID NO: 44284 - DNA, 201 bp, Homo sapiens
gccctgctttgtgcggggtgtgtgctgagcacctacctacccgccccagggctggctgtcccttggccctcaggccagcactcctttcccacaggcctctstcgcattctgcggggccgtgcggacatgaccaagaaccggacggtggactgggcgttggcagagtacatggcctttggctccctgctgaaggaaggcatc

SEQ ID NO: 44285 - DNA, 201 bp, Homo sapiens
ggtttgtccttgaccctgtcaatcttatggcaacattgcctttagagatgtcaaaaatagaggttctcaaagatgccagtacaatggcttgtttgatttcscagagctcacatgcaacaatcttagaataacagttctttttttttttttttttttttttagatggagtttctccttgtagcccaggctagagcgcagtgg

SEQ ID NO: 44286 - DNA, 201 bp, Homo sapiens
gaaacactttcaacaaagatgttgtcgtggacctggtgggtctggggactgaggccaaggcatgggtgggtggcccatccctgctgtgctgagccagccakgtcatcagcatcttcagcactcagggctgggagtgcttcttggatgagagatttatgccaccaagagcaatctgtgcaaaggcctgggacgggacattca

SEQ ID NO: 44287 - DNA, 201 bp, Homo sapiens
ggatgtcagccgtccctcttccccgctcctcatggggtcccaatgtgtctccccagaacacctactgccagcacattggcctggagttcatgttcatcaaygatgtggagcagtgccagtggatccggcagaagtttgagacccctggtgtgatgcagttctccagcgaggagaagcggaccctgctggcccggctagtgc

SEQ ID NO: 44288 - DNA, 201 bp, Homo sapiens
ttccccgctcctcatggggtcccaatgtgtctccccagaacacctactgccagcacattggcctggagttcatgttcatcaacgatgtggagcagtgccartggatccggcagaagtttgagacccctggtgtgatgcagttctccagcgaggagaagcggaccctgctggcccggctagtgcgctccatgaggttggcac

SEQ ID NO: 44289 - DNA, 201 bp, Homo sapiens
attgcctttagagatgtcaaaaatagaggttctcaaagatgccagtacaatggcttgtttgatttcccagagctcacatgcaacaatcttagaataacagktctttttttttttttttttttttttagatggagtttctccttgtagcccaggctagagcgcagtggtgcgacctcagctcactgcagcctccacttccca

SEQ ID NO: 44290 - DNA, 201 bp, Homo sapiens
ctgccctcaagaccatcatcgacaaatccagcgagatggggattgagaatgtcatcttggggatgccacacaggtgggtccccctccctgctgtgccttgygcattctcctccagcccaggggacagaggtgggagagatgagatggaaatcagagcggaggtgttggtgggacctgggggtagaggtgggtttcctggaa

SEQ ID NO: 44291 - DNA, 201 bp, Homo sapiens
ctttgattatttgaccaaaagaactaccagattgactcttgagtggtagcaataaaaataaaataaaataaagaacaagaggcaataggcgcctgctttgyttgatcttcctaattttctaggtacaacttttttttctctcttttttttgagatggagtcttgctctgttacccaggctggagtgcagtggcataatctc

SEQ ID NO: 44292 - DNA, 201 bp, Homo sapiens; identical to SEQ ID NO: 7846

SEQ ID NO: 44293 - DNA, 201 bp, Homo sapiens
tgagcttttcagtgcctcaagtttatggacctgtgaatacagacccaagaattactgagcaattaaagggagcctctaatgtgaaaggcaaagtcaaaagyaaacaaatagaaaatgaatccagaggcactgcaaagggcaaaagaaacctcaggggggaccactatacttaatatcttcagaaagataggagaataaaca

SEQ ID NO: 44294 - DNA, 201 bp, Homo sapiens
ctcacgcttgtgatgccagtactttggaaggctgagatgggaggatcccttgtggccaagggttcgagaccagcctaggcagcatagaaagactccatctsaacaagagaaaaattttaaaattggctgggcacaatggtgcatgcctatggtcccacctacttcggaggatgagccaggaggatcacttgaacccgggag

SEQ ID NO: 44295 - DNA, 201 bp, Homo sapiens
atacagggcataaaagacagaattcctcatcgtccatagtaagaaatcaatagataatgtataaaatggaaaaagcaagaaaagcagtaaaaacctattctttgaaaatatagaggtaaacatgaaaaaattgctaaaataattgaaggcagtgtctctgaggaatgggaatcagagatggtagggaaaagcaggggatgt

SEQ ID NO: 44296 - DNA, 201 bp, Homo sapiens
gaggtcatatggatcatataacactaatgaagatatggaacctgattggttaacttggcctgctgatatgctgcactgtactgaatgtgttgtttgcctakagaattttgaaaatggatgtttgctaatggggttgccttgtggtcatgtgtttcatcagaattgcattgtgatgtggttggctgggggccgacattgttg

SEQ ID NO: 44297 - DNA, 201 bp, Homo sapiens
aagacaaaatgttgctggcacttgctagatgtgacagttcaccttttagcttggttagctgtgatgggaaagagtttcatggtgggcttttgaaaaagtamtaaataatttatcagtacttagcacattcatctaaataaaatcaactatagcatattagccacacataaattatgttttttctgacttttgaaatttttt

SEQ ID NO: 44298 - DNA, 201 bp, Homo sapiens
aaagagtttcatggtgggcttttgaaaaagtactaaataatttatcagtacttagcacattcatctaaataaaatcaactatagcatattagccacacatwaattatgttttttctgacttttgaaattttttaaagctacagaaagctgtaaacatagtacagtgaacatccatttctttttatctaattcaccaagtgt

SEQ ID NO: 44299 - DNA, 201 bp, Homo sapiens
cttgagtggtagcaataaaaataaaataaaataaagaacaagaggcaataggcgcctgctttgcttgatcttcctaattttctaggtacaacttttttttctctcttttttttgagatggagtcttgctctgttacccaggctggagtgcagtggcataatctcggctcactgcaacctctgcttcccaggttcaagcgat

SEQ ID NO: 44300 - DNA, 201 bp, Homo sapiens
attaggagataaagggaaaaggtggtaatgattagaaaggctgacacttataagagaagtcttgacatattttgaaggtcttgctctgtcacccaggctgkattgcagtggtgcaacctctactcactgcaacctccacctcacaggttcaagtgattctcatgcctcagccttctgagcagctgggactataggtgcctg

SEQ ID NO: 44301 - DNA, 201 bp, Homo sapiens; identical to SEQ ID NO: 7849

SEQ ID NO: 44302 - DNA, 201 bp, Homo sapiens
tggcataatctcggctcactgcaacctctgcttcccaggttcaagcgattctgctgcctcagcctcccaagtagctaggattacaggtgtgcaccaccacrcccggcaaatttttgttttttttaatagaggcggggtttcgccatgttggccaggctggtcttgaactcctgacctcaaatgatccaccagcctcagcct

SEQ ID NO: 44303 - DNA, 201 bp, Homo sapiens
gaggcagaaggaaccctgaggccaggtatttgaggctgcagtgagccatgattgagccattgcacttcagcctggggaacagagtgagaccctgtcccttwaaaaaaaatgtaatatcaaaaccatttgcttaatgccctaaattgtgtatatgtattcattaagcttcaaacttatgtgataagatgttatgtatgcacg

SEQ ID NO: 44304 - DNA, 201 bp, Homo sapiens
tcactgcaacctctgcttcccaggttcaagcgattctgctgcctcagcctcccaagtagctaggattacaggtgtgcaccaccacgcccggcaaatttttsttttttttaatagaggcggggtttcgccatgttggccaggctggtcttgaactcctgacctcaaatgatccaccagcctcagcctccaaaagtgctggga

SEQ ID NO: 44305 - DNA, 201 bp, Homo sapiens
agtcactggaattgaggtagcagtgagaagcatcatatgatttaaaataaagctttgggtcaatatttactgaagtattacatcaatatatttcctgtttsgctgacaagagttaatagctgattttaaacttgtttatctttgctcctagacaaaagttttgttcgaggagattctaaattacgtatttctttcttgata

SEQ ID NO: 44306 - DNA, 201 bp, Homo sapiens
agtcttgacatattttgaaggtcttgctctgtcacccaggctgtattgcagtggtgcaacctctactcactgcaacctccacctcacaggttcaagtgatwctcatgcctcagccttctgagcagctgggactataggtgcctgccaccatgcctggctaatttttgtatttctagtagagacggggttttgccatgttgg

SEQ ID NO: 44307 - DNA, 201 bp, Homo sapiens
actctgagaggtgaagtagcttgcccaaggtcatggaactagttggtagtattgaaccaggatgaaacccaggtcttctgatttcttgactggtactcttrtcatttcacactggagtgggcaaagtttgattcagggcatgaaaattaaaacagtttcttcatatttctttctgagagtaaagactgcaaaatatggtag

SEQ ID NO: 44308 - DNA, 201 bp, Homo sapiens
taaaatttaagtgtttattgtgaatggttttgctgctatcatggtgcagtacttggtttctcactgtttaatatttaaggcgaaagttaaaataatttgaytttagtgttttcctttcctttttgtttaatgatacaagctctaaatttataatataaatttgtatatgaatatggagtttgttctgtctaacaggtaaag

SEQ ID NO: 44309 - DNA, 201 bp, Homo sapiens
aaaataaaataactaaaaattaaaaaataaaaacaaaaggaaaatattttcacttacagtctctttactgggatacaacagctgttttcattgttctttcttttttttttttcttttttttttgagacgaagttttgctctgtcgcccaggctggagtgcagtggcgtgatctcggctcactgcaccctctgcctcccggg

SEQ ID NO: 44310 - DNA, 201 bp, Homo sapiens
ctaaaaattaaaaaataaaaacaaaaggaaaatattttcacttacagtctctttactgggatacaacagctgttttcattgttctttcttttttttttttyttttttttttgagacgaagttttgctctgtcgcccaggctggagtgcagtggcgtgatctcggctcactgcaccctctgcctcccgggttcaagcggttc

SEQ ID NO: 44311 - DNA, 201 bp, Homo sapiens
attcctaaaccattcatgaaatctgcaccagcccaaactttgaacttcttttgcattatttagcaacagaatatatacagttttatctctattttgtctcattaataggattttaaattccttctgaacatgaattattttcttgtcttctggatcttagcacataacgcagttgtaggtacatgagagatgctgaagtat

SEQ ID NO: 44312 - DNA, 201 bp, Homo sapiens
ttcctaaaccattcatgaaatctgcaccagcccaaactttgaacttcttttgcattatttagcaacagaatatatacagttttatctctattttgtctcattaataggattttaaattccttctgaacatgaattattttcttgtcttctggatcttagcacataacgcagttgtaggtacatgagagatgctgaagtatt

SEQ ID NO: 44313 - DNA, 201 bp, Homo sapiens
gtgagttatttttaaaagagggcaaagagtagagagtatggtagtatgattgcacagatacttcttaatcttcctaaggaatctgaaaaataagttaaacktgtctttgattatttgaccaaaagaactaccagattgactcttgagtggtagcaataaaaataaaataaaataaagaacaagaggcaataggcgcctgct

SEQ ID NO: 44314 - DNA, 201 bp, Homo sapiens
tcctaaaccattcatgaaatctgcaccagcccaaactttgaacttcttttgcattatttagcaacagaatatatacagttttatctctattttgtctcattaataggattttaaattccttctgaacatgaattattttcttgtcttctggatcttagcacataacgcagttgtaggtacatgagagatgctgaagtattt

SEQ ID NO: 44315 - DNA, 201 bp, Homo sapiens
attctatgtaagaatacaaaaaaattaaaagaccactgttttttgtcaatcacttgtccttactcttaatggttttatatagtttgcatgtatatactagrttggcttatgattttgaaagtagagactccctattataatgaaatactgagaatgcagaaaatatcatagcacaatactctcattgttccagggagttat

SEQ ID NO: 44316 - DNA, 201 bp, Homo sapiens
cttccgtgtccttgtgtcttgtttctcacacataactcagttctcttagggaggctccagtatcttcttaaaaaggttttggagactgaggaagatgaaarttgagtagtgggaaagagaaagatgggggatgggggtcaactttttgtttagaatccccagaagcaaatctattttagttattggacctttgttgaattg

SEQ ID NO: 44317 - DNA, 201 bp, Homo sapiens; identical to SEQ ID NO: 7844

SEQ ID NO: 44318 - DNA, 201 bp, Homo sapiens
gaaactggcatctttgccacccagctggtggatccggtggcgctgagcttcaagaagctgaagaccattttggagtgccgggggttgggctactcagggtkgcccgagaagaaggatgtccgggagctggtggaaaagtcaggcgagtatcgggcttcccctagggtcccctccacctgggagaggggacgacctgtacct

SEQ ID NO: 44319 - DNA, 201 bp, Homo sapiens
atctgcccgcctcggcctcccaaagtgctgggattacaggcgtgagccactgtgccaggcccatgtacaaaataaagcacccggaactttgcacctggacktatctacactcgacaatctttgtcctaggaactcagggagtccacaccaggcttttaacacccttgagactgaaggagggaaaaggctgtaactggcagc

SEQ ID NO: 44320 - DNA, 201 bp, Homo sapiens
ggatggagtgcagtggcgcgatctcagctccctacaagctccgcctcccgggttcacgccattctcctgccttagcctcccgagtagctgggactacaggsgcccaccaccacgccggcctaattttttgtatttttaatagaggcagggtttcaccgtgttaaccaggatggtctcgaactcctgacctcgtgatctgcc

SEQ ID NO: 44321 - DNA, 201 bp, Homo sapiens
ggtagccccgcggctccccgaattccccgccctcggcccctgcgggcgcaccctgcaggccccgccccggccccgcctcatcgcgacgtcagttgttatgkctcggctccggccgcggccgccgctgatacacggttgtggagggtacggccgcggtctccggaggtggcgggggtgttggggacgggtgctgcgaccggc

SEQ ID NO: 44322 - DNA, 201 bp, Homo sapiens
aagagttctttaattccttctttctagtccctcccacactctaatgtttttttccaatttggaactctggcctgactggttccaccctcagctcacacacyaactttccctgcccatgcctattctgtatttttgagattgggtcagtctctcctcactagcgagtacatacattcctttgaggtgagggacatcaccttc

SEQ ID NO: 44323 - DNA, 201 bp, Homo sapiens
gaggagtgttggtgtatccttttaaggttatcgtaaaatgacagtttaaagtgtggcttcttagcgttgtttactaagttgagtgattttctcaaaattckggaatatcaactagttacaaactggaaagcattatttgtcagttgaagttcataaaaacgtaagaaaaactccaaaacgttgtctgtcaatagcaatatt

SEQ ID NO: 44324 - DNA, 201 bp, Homo sapiens; identical to SEQ ID NO: 7853

SEQ ID NO: 44325 - DNA, 201 bp, Homo sapiens
cctgtcatctttggagtcccagaggatgaaccgctgctgctaaacctccggaccaggaaaacagtcctagtgggtttttttgttttgttttgttgttgttkttttttttttagattacaaagtaatacatgattatttcagaaaatataataaaacagagatatagcataaaagaaaaaatattctaaatcccatcactta

SEQ ID NO: 44326 - DNA, 201 bp, Homo sapiens
ttatatccttaacatattagaaccagagtagatattcggtcaataattgttggcttgaactttaagaatctattttattttttccctttaccaaacttttwtttatttatttatttatttatttatttatttatttatttatttatttttgagatggagtctcattctgttgcccaggctggagtgcagtggcacgatctt

SEQ ID NO: 44327 - DNA, 201 bp, Homo sapiens
tgagaaatatggttaatttttttcactgctgcacaaagtatatctttggatatacttcctgaaagtggaatgtaatttgagaaaggctttctgcgttgctrtgggaagcagctgaaactgatggttatcttttttgttgtttcaagtatttttgtcagctgtatcttttacaagacaaatcttttccttctttagtacctt

SEQ ID NO: 44328 - DNA, 201 bp, Homo sapiens
taaattggggactcttactggtatgacatagtgtgtgtgtgtatatatattatatatatatatatatataaggcatatgtatatatatatattaggctgayaatattttgttgtgctgtgtgactcaaccagatgagttattttgtgaaaatattagcatttttatagtggttggttaatttaaactccaccaaatttaat

SEQ ID NO: 44329 - DNA, 201 bp, Homo sapiens
tgttcccaactcttttcactcacttctactatctctgctataaccaagaggtacctgggaagaacccctctcattcctccttcttttcctaacattggagytcttatcacatgtctcaaagatacctgtgcagtgaacaagatcttcactgaaagatgcctccagacttaggaactaaatatttacactggcgaggcaacc

SEQ ID NO: 44330 - DNA, 201 bp, Homo sapiens
aaaaaaaaaaaaaaaaaaaaaaaagaggttagggaggtcttctgattgtctaccaaggtgacactagtccactggaccaggccctttaattgcagtttgcrcactcttgccacaatatcaaatgataaagcatttaagccatcctacatatgaacagaatctgagatataaaaccaataacccagattaatagcctattag

SEQ ID NO: 44331 - DNA, 201 bp, Homo sapiens
gcccagctaggcttagtggaaactgaaatcaatctcatgggaagacagcccacacctccaacccctgtcatctttggagtcccagaggatgaaccgctgcygctaaacctccggaccaggaaaacagtcctagtgggtttttttgttttgttttgttgttgtttttttttttttagattacaaagtaatacatgattattt

SEQ ID NO: 44332 - DNA, 201 bp, Homo sapiens
aaagggaatggaaagattgcttcacttctagcctgtattgccaggtctgttccacacctggaactcaagctgtactttgtccagtttttttgtagtctttraaaatgttccccacatacagtgttccttcctgagctgctgaggaaaatgtctccccttttaatgagaccagccatatgaatgccactcagaatcatcatg

SEQ ID NO: 44333 - DNA, 201 bp, Homo sapiens
taactgccacagagtgtgggagagtttaatttacgtttcagtgtttcaagtctttttcctattggatagttgctccttctataagaattgtaatgataatktgatgatacagtaaacaagaactgggaacagaatatctttttttttaagtgaaattatattgttgatgtaaacggttggcttgactccattttaggtaat

SEQ ID NO: 44334 - DNA, 201 bp, Homo sapiens
atgccagtactttggaaggctgagatgggaggatcccttgtggccaagggttcgagaccagcctaggcagcatagaaagactccatctcaacaagagaaawattttaaaattggctgggcacaatggtgcatgcctatggtcccacctacttcggaggatgagccaggaggatcacttgaacccgggagttcaaggctgca

SEQ ID NO: 44335 - DNA, 201 bp, Homo sapiens
ttacgtaactcaggatgatgagattataatttttaacccttgtttttatgatagcaaaactgtgagacttaattagcatattagaattttagagctatgawggaccttaaaaatattttatgctttccaagatgtaatttatggtgagtgggcatgcattatcatttacatattttaatgtaaattagaaaaattatatta

SEQ ID NO: 44336 - DNA, 201 bp, Homo sapiens
ataaaaagagaaggctctttggaccttaaataaaataactctggttcatcaagctcagtcaaagactttaattttcttttttccaaaaaccgattcttggktttttttttttcaatttttaccctctgtacattagaatgtatccaaaaactaattcttcattttaaattaattacaagcaatgtgtacttcaaagcactt

SEQ ID NO: 44337 - DNA, 201 bp, Homo sapiens
ggcgtggtggcacgtgcctgtagtcccagctacctgggaggctgaggcaggggaattgcttgaacccaggaggcggaggttgcagtgaactgagatcgtgytactgaactccagcctgacaacagaggaaaactcccaaaaaaaaaaaaaaaaaaaaaaaaagaggttagggaggtcttctgattgtctaccaaggtgaca

SEQ ID NO: 44338 - DNA, 201 bp, Homo sapiens
attcttgttctttgttgtcaattaaatatattgacatgatcaatttaggcaatcttttcatttaattttttaataaatgtaatgatgtaaaatcattacaytttttgtaatgatgtaaaatctcatcaaaatattttattgttttatatatactagattatttcacttcataaaatccctgtgcaacaggtcgagtagaag

SEQ ID NO: 44339 - DNA, 201 bp, Homo sapiens
ctctctgctttgcctggcaaaatcccacattctccagaaattctgtcccttcctacctatcttctccttcctcaccaggcttataaagagacaaaaatatrcaatggacactcaggtgaatgtcacccaagtgatcaaacttatcatcatccaatgtgtgcctttcctccatatcccactgatataccatgtacatgcctg

SEQ ID NO: 44340 - DNA, 201 bp, Homo sapiens
agcctctctctgtcgcccaggctggagtgcagtggcatggtctcagctcactgcaacctccgcctccctggttcaggcgattcccctgcctcagcctccckagtagctgggattacggacatgcaccaccatgcctggctaatttttgtatttttagtagagatgcggtttcactatgtaggccaggcttgtctcgaactc

SEQ ID NO: 44341 - DNA, 201 bp, Homo sapiens
acaatctctgtccagcacctcttggttaaataatgtatgctgtgagacatgaaattaaaacagacctatgaaataaattattttaaaaccagaagattacrgattttccaatgttaaatttttttgataaggtggctgaatgatataggtgttttgctggtttgttaatttcacagatagatcaaacatgattcttgactc

SEQ ID NO: 44342 - DNA, 201 bp, Homo sapiens; identical to SEQ ID NO: 7847

SEQ ID NO: 44343 - DNA, 201 bp, Homo sapiens
taatataaatttgtatatgaatatggagtttgttctgtctaacaggtaaagttctaacctccaagtcatacaaaccctgttgctcttttaagcagggctgmtggcaaattctgtgaacccaattctacatcttttaagtaagaagcatataagccatactgtttaaaaatgtatatgaagcctgtatgtgtcattcataaa

SEQ ID NO: 44344 - DNA, 201 bp, Homo sapiens
cctagacagttttccagagtcatcactaaccttgtcttaagacatagcgtgttgtcttcatttatcttaaactatatcacagaatccctgagataaaattmgtcatattatcattatacagccatatgctacctacgtcaagactcttctcttcatctgatcatatgatgtgtaatatgtttatttaataaaatataatcc

SEQ ID NO: 44345 - DNA, 201 bp, Homo sapiens
ataaggcgagcattttgtataaatgcctgccatgttcgagtttatattatatttctgttaggatttttaaaaatttgcatcttggatgtgtaaaagaaaawttttttttgtcttctgtgtcacaggtacccttgcattgtttaatgggttgagaaatatacgtgaaatagtgctgagagaatattcaatgtcttaaagaat

SEQ ID NO: 44346 - DNA, 201 bp, Homo sapiens
acaggtacccttgcattgtttaatgggttgagaaatatacgtgaaatagtgctgagagaatattcaatgtcttaaagaatgtgtttttagtaattgttggktttggtaggattgggtgagaaatatggttaatttttttcactgctgcacaaagtatatctttggatatacttcctgaaagtggaatgtaatttgagaaag

SEQ ID NO: 44347 - DNA, 201 bp, Homo sapiens
ttttttcttttctttctttcttttttttttttttttttttgagacggagtcttgctatgtcacccaggctggatggagtgcagtggcgcgatctcagctcmctacaagctccgcctcccgggttcacgccattctcctgccttagcctcccgagtagctgggactacaggggcccaccaccacgccggcctaattttttgt

SEQ ID NO: 44348 - DNA, 201 bp, Homo sapiens
accaaagatgaaaggaagttcaaaaaacatacagatagaacaaacaagtcacttttaaagggcaggagtcagaacgatgctagccttccaacagcaacaayagaagccaaaggctaatagatcagtgctttcaaacttctgagggaaaatgatgtccagcttagaattctatatttggccaaactatcatccaacatgagg

SEQ ID NO: 44349 - DNA, 201 bp, Homo sapiens
cccaaggagttgactgtcagcactcattttacacacccacctgcaacttcacttcctggaggctttgtgagtgtgaaaatggtccttcctcccagaaagaktagaggcccccagagtattatgttgtaattttgaattgtatagtatcagaaatataacatttatgaaaataaacttggcctatataccctggacttaaac

SEQ ID NO: 44350 - DNA, 201 bp, Homo sapiens
agtgctttcaaacttctgagggaaaatgatgtccagcttagaattctatatttggccaaactatcatccaacatgaggataactgcaactaactctcaaayggttcacaaaaaaaaaaaaagtatgcgcttataatctagagaaaagatgtaattcaacaaatagggcaaaaggttaacaattggtgaattggtaaggaca

SEQ ID NO: 44351 - DNA, 201 bp, Homo sapiens
gggaggctgaggcaggggaattgcttgaacccaggaggcggaggttgcagtgaactgagatcgtgctactgaactccagcctgacaacagaggaaaactcycaaaaaaaaaaaaaaaaaaaaaaaaagaggttagggaggtcttctgattgtctaccaaggtgacactagtccactggaccaggccctttaattgcagttt

SEQ ID NO: 44352 - DNA, 201 bp, Homo sapiens
tgagtcctgaccaggatctttcttatttaaaaagggcaatgatactagaagcctgcttgaactgaaagcttattataatgtgtagcacactcttagttacmtaggtgcttgattaatggtttttgataaactggcagctaatgactttcactctaagatctctctctgtctcctctatctccctctctctccccgtccctt

SEQ ID NO: 44353 - DNA, 201 bp, Homo sapiens
ctttgtcctaggaactcagggagtccacaccaggcttttaacacccttgagactgaaggagggaaaaggctgtaactggcagcgacaactgggcctagtakaacgcgaactccagttttggccaaacctcctccaacacacatgtgcaaagccacattctcatgaagagggggcaaaacatttgctttctgggtttaacct

SEQ ID NO: 44354 - DNA, 201 bp, Homo sapiens
gcaacttctgactgtctagttgtagcagctttaatttctttccctatgtacccagaaggagtggccttgcctggctctacctcttctcattccctaaccarcagatcgatttcagagggcttttcctgtgaggttcatactctgtactttttttgacaaagtaggagatgaggtggtaatgatgtgtagagagggttgggg

SEQ ID NO: 44355 - DNA, 201 bp, Homo sapiens
tttgtcctaggaactcagggagtccacaccaggcttttaacacccttgagactgaaggagggaaaaggctgtaactggcagcgacaactgggcctagtataacgcgaactccagttttggccaaacctcctccaacacacatgtgcaaagccacattctcatgaagagggggcaaaacatttgctttctgggtttaacctt

SEQ ID NO: 44356 - DNA, 201 bp, Homo sapiens
cagtatacaccgtacagtattagcttttcagactttaagtttggtgaaaataaggcgagcattttgtataaatgcctgccatgttcgagtttatattatatttctgttaggatttttaaaaatttgcatcttggatgtgtaaaagaaaaattttttttgtcttctgtgtcacaggtacccttgcattgtttaatgggttga

SEQ ID NO: 44357 - DNA, 201 bp, Homo sapiens
tatttattactatgcatatacaaatctgtaacaaataaaacgtttccatgtggtagattgtcttttttacaactttattgaggtaaattttacttaaaaayttcacatggtaggttttggaaaaaaaaatactttttaaaaacaaaagattaactcttctgtgtggtacatgaaaaactaactaaaaccaaaaacaaaagg

SEQ ID NO: 44358 - DNA, 201 bp, Homo sapiens
catatgaatgccactcagaatcatcatgcatccttctaggatatgagctataaattggggactcttactggtatgacatagtgtgtgtgtgtatatatattatatatatatatatatataaggcatatgtatatatatatattaggctgagaatattttgttgtgctgtgtgactcaaccagatgagttattttgtgaaaa

SEQ ID NO: 44359 - DNA, 201 bp, Homo sapiens
ggcacagtggataggcttctgaagtggagaagttagcataatttatgggttttatggatttatcctcctcctaacatttctgtttctccgttttgactttygtcatagttcaaagaaggacatatttgttccctactggctgtgttacatcatatggaatttaaagtcactggaattgaggtagcagtgagaagcatcata

SEQ ID NO: 44360 - DNA, 201 bp, Homo sapiens
taaatactccccttcatgatcttcactgaagaaataagagaatacaaaaatatatggggcttgctgttgctcttttcttggttggcttttgtgcagattastttgtagcagtcaggcattgtggtagttgttaattaaatgggtaagcatgactcctaccctcaaggagcttgcaccaaaccagtgactcagccttaggat

SEQ ID NO: 44361 - DNA, 201 bp, Homo sapiens
atatgaatgccactcagaatcatcatgcatccttctaggatatgagctataaattggggactcttactggtatgacatagtgtgtgtgtgtatatatattatatatatatatatatataaggcatatgtatatatatatattaggctgagaatattttgttgtgctgtgtgactcaaccagatgagttattttgtgaaaat

SEQ ID NO: 44362 - DNA, 201 bp, Homo sapiens
atccttctaggatatgagctataaattggggactcttactggtatgacatagtgtgtgtgtgtatatatattatatatatatatatatataaggcatatgwatatatatatattaggctgagaatattttgttgtgctgtgtgactcaaccagatgagttattttgtgaaaatattagcatttttatagtggttggttaat

SEQ ID NO: 44363 - DNA, 201 bp, Homo sapiens
tttaaatgggcaccattcggaggctacattctcacagtccattctttgcttcccgttcctcccttgctccatgacctgggatcatgatccctttcttcctraaactttcacccctagtttcagatagttgacagttttgcacaaatagtaacatttccccgtaattactgttttttttttccttccttatcaaaaggggct

SEQ ID NO: 44364 - DNA, 201 bp, Homo sapiens
cagtctctttactgggatacaacagctgttttcattgttctttcttttttttttttcttttttttttgagacgaagttttgctctgtcgcccaggctggaktgcagtggcgtgatctcggctcactgcaccctctgcctcccgggttcaagcggttctcctgcctcagcctcccaagtagctgggattacaggcacgcgtt

SEQ ID NO: 44365 - DNA, 201 bp, Homo sapiens; identical to SEQ ID NO: 7842

SEQ ID NO: 44366 - DNA, 201 bp, Homo sapiens; identical to SEQ ID NO: 7843

SEQ ID NO: 44367 - DNA, 201 bp, Homo sapiens
catattttgaaggtcttgctctgtcacccaggctgtattgcagtggtgcaacctctactcactgcaacctccacctcacaggttcaagtgattctcatgcytcagccttctgagcagctgggactataggtgcctgccaccatgcctggctaatttttgtatttctagtagagacggggttttgccatgttggccaggctg

SEQ ID NO: 44368 - DNA, 201 bp, Homo sapiens
aaaatgtaaagctagggacttactgggtagggaaacgtgtgagcatccttcaaaagagctttcacctattaagtgcatgtccccagattgccttcttcctsgttacttcagctgtctgagtatttgaataaattgtatctgcctcaataagaccacttattttcattaaaaagtactatcaaaaccatggttgggtgcagt

SEQ ID NO: 44369 - DNA, 201 bp, Homo sapiens
gtctttgctattgtgaataatgctgcaatgaacatactcatgcatgcgtccttatggtagaacaatttatattcttttgggcatatacccagtagtgggaytgctgggtcaaatggtaattctgttttaagttctttgaggaatcaccacactgctttccacaatggctgaattaattcacactctcaccagtagtctgaa

SEQ ID NO: 44370 - DNA, 201 bp, Homo sapiens
taatccagtcatttacacacacacacacacacacacacacacacacacacactaggaattctcatgccagttcttaagacaatggattttttacttccttrcatatacaaaaatgaaaaatcagcatcccatctggagaccagggtctaatatggacccctttagtacaatagacatgttaaaagatgtataatcaaagct

SEQ ID NO: 44371 - DNA, 201 bp, Homo sapiens
gcctctctgtgcttcacaacaaactggcacatcccaaggccactggaagccctgctgggccatctccccaaggccagtgctgtacacataaccctacaagrccagtttcctacacataaccctacaagaccagtttcctacacataaccccagatcccttgtcctgtcttctcagtggggctggagcaagtcagcaggtgc

SEQ ID NO: 44372 - DNA, 201 bp, Homo sapiens; identical to SEQ ID NO: 7862

SEQ ID NO: 44373 - DNA, 201 bp, Homo sapiens
gttggtggtgctctgagcgtgtggctcccagtgcttgaggggagaggggaggtgaagcatggggagcggctcacataccctaatgccacccctccaccctycaacccccaaacttctttcctgtggtcagtatctgccagcacttactgaggatccatcatgtcccaggcagtttacacacattatcactaatcctttctg

SEQ ID NO: 44374 - DNA, 201 bp, Homo sapiens
ccctcaggtgtatggagcgctgactgtgccaggcgactgtgctgaccatgggatatgcaataccccatctattccttgccaaaaaactaagctgggtaccrttattttcccactttacagttaatgcaactgaagcccagaaaggtttagtaatcacaagcaaggtcatgcaagtaggaagtgtttaagttaggattggaa

SEQ ID NO: 44375 - DNA, 201 bp, Homo sapiens
ataaagagaatcccattcatggtcatattatggcagcttacaagcctggcacagtccagttatgcagtcagccttggtgcctggctgccagccacatcctrtaccctatttgggggtgaatggtgcagtgtttctcctgcaggtatgtccccctgactcttctttgcccccagaatatgctttagggagtcacagacaaca

SEQ ID NO: 44376 - DNA, 201 bp, Homo sapiens; identical to SEQ ID NO: 7866

SEQ ID NO: 44377 - DNA, 201 bp, Homo sapiens
ttaggggttgagttgcattcccccaaaatttatatgttgaagttctagcccccggtatcttgtaatgtgacttcatttggaaataaggtcattgcaaatgrccataggtgggcccctaatccactatgtctggcgtccttataaaagggggaaacttggacacagagacatgcacatggggagtgtccatgtgaagactag

SEQ ID NO: 44378 - DNA, 201 bp, Homo sapiens
tggaggaaacatccttaaaaactcaaaagctgatgcatccactgtttttatatgcttcacagctataggaggacaattatgcactacccactgccttccargctgtgtgcctagttgtgtccatgtacatgtatccttggtgctcaacatgtatttggtgcatagtaggtactcaatgaaattttgagaaattagattggg

SEQ ID NO: 44379 - DNA, 201 bp, Homo sapiens
cacaaatacttatttctgccattgcagtgcaaaagcagccacatccaaatggtgtggctgtgttccaacaaaactctaccagcactgaaatttgaatttcatataacttgtacatcataaactattactcttcttttaatttgttccaccatttgaacatgtggaaaccattattagtttgtaccttgtatagaaacaggt

SEQ ID NO: 44380 - DNA, 201 bp, Homo sapiens
cattaacagacatctcacaatataaaatacgtttagtcttgtagtaaccagggaggagggatacaagatgaggtaccatttaaaaaatcaaactagtaaamaattaaaaggttgataacacctggggtttataaggatgtgatgagctctgcctttggtggtaaagatataaagtggtgggctgggattggtggctgatgc

SEQ ID NO: 44381 - DNA, 201 bp, Homo sapiens
acaaatacttatttctgccattgcagtgcaaaagcagccacatccaaatggtgtggctgtgttccaacaaaactctaccagcactgaaatttgaatttcatataacttgtacatcataaactattactcttcttttaatttgttccaccatttgaacatgtggaaaccattattagtttgtaccttgtatagaaacaggtg

SEQ ID NO: 44382 - DNA, 201 bp, Homo sapiens
atataaaatacgtttagtcttgtagtaaccagggaggagggatacaagatgaggtaccatttaaaaaatcaaactagtaaaaaattaaaaggttgataacrcctggggtttataaggatgtgatgagctctgcctttggtggtaaagatataaagtggtgggctgggattggtggctgatgcctgtaatcccagcactttg

SEQ ID NO: 44383 - DNA, 201 bp, Homo sapiens
aaggtagactggagttgccttttgagggctggcagccctgctagaagtttaggcaatgggagtcattttccaagccaaaaattagaactcatgatagggamatggaagtgttattgggggtggccatcatgacccgtcacgtgacactaggccatccaggacctgtggcctctgaagtgatgggaaccactgaggctcatg

SEQ ID NO: 44384 - DNA, 201 bp, Homo sapiens
atttctgccattgcagtgcaaaagcagccacatccaaatggtgtggctgtgttccaacaaaactctaccagcactgaaatttgaatttcatataacttgtacatcataaactattactcttcttttaatttgttccaccatttgaacatgtggaaaccattattagtttgtaccttgtatagaaacaggtggcagccagat

SEQ ID NO: 44385 - DNA, 201 bp, Homo sapiens
acctggggtttataaggatgtgatgagctctgcctttggtggtaaagatataaagtggtgggctgggattggtggctgatgcctgtaatcccagcactttrggaggccgaggcaggcagatcacctgaggccaggagttcgagaccagcctggccaagagaccagcctggccaatatggtgaaacctcacctctactgaaa

SEQ ID NO: 44386 - DNA, 201 bp, Homo sapiens
cagggagggccagagcacccctctgtgctggagggaaaggtctgctggtgccagaatctgcatggcaggacactccattagtgagtgttctctgcccacastgctccaaaggtgaggacctccctgtggcagggtacaccttaacaccacctgtcagggatgctgtagaaggaccctggcactgggactgtgggtggagga

SEQ ID NO: 44387 - DNA, 201 bp, Homo sapiens
tttctgccattgcagtgcaaaagcagccacatccaaatggtgtggctgtgttccaacaaaactctaccagcactgaaatttgaatttcatataacttgtacatcataaactattactcttcttttaatttgttccaccatttgaacatgtggaaaccattattagtttgtaccttgtatagaaacaggtggcagccagatt

SEQ ID NO: 44388 - DNA, 201 bp, Homo sapiens
gggctgggattggtggctgatgcctgtaatcccagcactttgggaggccgaggcaggcagatcacctgaggccaggagttcgagaccagcctggccaagasaccagcctggccaatatggtgaaacctcacctctactgaaaatacaaaaattagctgggcatggtggcgggcacctgtaattccagctgctcgggatgct

SEQ ID NO: 44389 - DNA, 201 bp, Homo sapiens
ccattgcagtgcaaaagcagccacatccaaatggtgtggctgtgttccaacaaaactctaccagcactgaaatttgaatttcatataacttgtacatcataaactattactcttcttttaatttgttccaccatttgaacatgtggaaaccattattagtttgtaccttgtatagaaacaggtggcagccagatttggcct

SEQ ID NO: 44390 - DNA, 201 bp, Homo sapiens
gaggcccagaggatgaaggctggaggctgcaggtgaaaaggttgacgccaaagtccagacaaagaagggagagaatctaggggtgagggggtgcttgtaargagctgcctcagaggcaggaactgggacgtgcacccattgggcaccacgcctctctgtgcttcacaacaaactggcacatcccaaggccactggaagccc

SEQ ID NO: 44391 - DNA, 201 bp, Homo sapiens
ttttgtacaggtgcccagagaactttgggccggaagcctgcttaaataaatggaataaacagctgttgatggtgtgggctatttttaccttgacccctccygcacttcgggaccctccacgcctcctctctgcctgtcctgtgggcatcccaccaacagaaagtgctgtttcccggtgacagaccattaatttgcaaagag

SEQ ID NO: 44392 - DNA, 201 bp, Homo sapiens
tctgcaggcaagccataccacctctgtgtctctcatctctccctcatgcaacaggaccctctgtgctcactgtccacccacaaaatttttgtgaacctcawtttgtataacagcatagacaagttctgaaactggtaaagctctatcccagggcaagggattgctggtatgtcttcctccagagccttgactgcagaggtg

SEQ ID NO: 44393 - DNA, 201 bp, Homo sapiens
cttttgtaaggagcccatgaaatgatgcaagccaaatgccatccaaataaaacatgtcattatttccattctcagattcctcaggggatgtcagttgggtytgatactgagattgttagcagaagctgtggtgcccagagaagtgaacctctgagaacagatgcagaggctcagggaggaaaagaggtttgctctggccca

SEQ ID NO: 44394 - DNA, 201 bp, Homo sapiens
acctctgggaacagaactggtgggaggtcgagagctttttgcattatttatatcgtttgaatcttctgcaaagaactcattttgtgaaactattatttttwatgagcaataaatttttttaaaggcagatgacaaagtaaaaatattgggcatgaagacatggttctagttaactaatctacaactgtggacctcagcttt

SEQ ID NO: 44395 - DNA, 201 bp, Homo sapiens
ttcttaaactagagagagtgtgagcatcaaccacccaatgtgcagtttccacctccgccccagcacattcccaggagagcaggggagcaggagatgagctrtcctgcagtaagtcctggccaacgccctttgataggttccatctcacctaatcctcctgtctccttcgagggaggctggatgagggattcaatagacagg

SEQ ID NO: 44396 - DNA, 201 bp, Homo sapiens; identical to SEQ ID NO: 7861

SEQ ID NO: 44397 - DNA, 201 bp, Homo sapiens
gcaggaggactttccaggtgaggaggagaagtgacaaagacttggcataggattttggaaaacattgccaacctttcctccggtcctacaggaaaccagaygaatttttgaattgtttcatatgccaacatatttggtgctgttttttaagcttaattttgttttttatgcttaattttgttttttacaatacaacatcag

SEQ ID NO: 44398 - DNA, 201 bp, Homo sapiens
tttaaaaaaaaatgtcttctcaatgccttttcattgatggtgctattgctcaccatattctcgtaaatatactttcgtaaatgttgataatccacatgatycacactaccaggtcaaatccgaagagtaattccctgaacacaaaacccatgctgcacacccaggtgttctgccaggaaagccaggtgtggctagatctgc

SEQ ID NO: 44399 - DNA, 201 bp, Homo sapiens
aaagcatctaagggtatttgcttcacagggagatgtgtataaatggggcttggcagaagaggaggcagagaaggaacagaatctctaccatgagtatcctwtgactctagcaatgagtctgaatttgatcctgaagacagtagagaatcattgaggggttttaagctctaagagtaacatgatactaaatggtttgtaaaa

SEQ ID NO: 44400 - DNA, 201 bp, Homo sapiens
caaaatacatatatgtatatataaacaccgatgtacaaacacatacgcacacatctatatacatacacatgtgtgtgcacatatacacatacctgcatatrcacacatttcgtggggtgcggagagtcacttaaaggctgcagggccataaggcttcctgcttgactgatattcattaatgtttgctgaattacagcaaac

SEQ ID NO: 44401 - DNA, 201 bp, Homo sapiens
agtaggaagtgtttaagttaggattggaagcaggcactggttctcagagaccctgctttaacccctgtgcctcctagggtcatgtacaggaggatgtggcycacagagagcatggggggatggctcagtggaggtaaagagaaggctcaggctgagctttggaagacaggtgtctagggaactgggggcagggagcatgct

SEQ ID NO: 44402 - DNA, 201 bp, Homo sapiens
caatacaacatcagatgaacacttcataatttcttttctggctttcagaccatgacattgggtgacattgtcttcaagagaatcagcaagagaatttaaasaagtctgcatttcatattattttagtgtgtaaaattaatgtaataaagtgaactttgttttaaaaaaaaatgtcttctcaatgccttttcattgatggtg

SEQ ID NO: 44403 - DNA, 201 bp, Homo sapiens
tcgtaaatatactttcgtaaatgttgataatccacatgatccacactaccaggtcaaatccgaagagtaattccctgaacacaaaacccatgctgcacacmcaggtgttctgccaggaaagccaggtgtggctagatctgcaggaaggccctggaatgccctttcccagtcaggcacacgggcaaggagctggagccagag

SEQ ID NO: 44404 - DNA, 201 bp, Homo sapiens
taagccctgaggatacagtgatccccgggtgactcactgtcagtgggaccataagcgtgacagtgtcatccactgtgatgcaggtgggtactagctccagyccctgctgcagaccggataggggtggtgcctagaaaaaacatctcagaggcggtatgaaagcatctaagggtatttgcttcacagggagatgtgtataaa

SEQ ID NO: 44405 - DNA, 201 bp, Homo sapiens
cattgcagtgcaaaagcagccacatccaaatggtgtggctgtgttccaacaaaactctaccagcactgaaatttgaatttcatataacttgtacatcataaactattactcttcttttaatttgttccaccatttgaacatgtggaaaccattattagtttgtaccttgtatagaaacaggtggcagccagatttggcctg

SEQ ID NO: 44406 - DNA, 201 bp, Homo sapiens
ggcagaagaggaggcagagaaggaacagaatctctaccatgagtatcctatgactctagcaatgagtctgaatttgatcctgaagacagtagagaatcatygaggggttttaagctctaagagtaacatgatactaaatggtttgtaaaaaaaatttttctggccacagtgtcaaggaccagtgaaaagaaccaaagctga

SEQ ID NO: 44407 - DNA, 201 bp, Homo sapiens
gactacctcaaaaacttaaagttttatataaaaaaggcaccataaacatagtttcaaaaaaaggtgtggcttacataacaaaggttaatagatataaaaatattccccaaatcaaaaagaaaatcaacaagtcaatggaaaggtgagttaaggacattaacagacatctcacaatataaaatacgtttagtcttgtagtaa

SEQ ID NO: 44408 - DNA, 201 bp, Homo sapiens
tgtcacaaatacttatttctgccattgcagtgcaaaagcagccacatccaaatggtgtggctgtgttccaacaaaactctaccagcactgaaatttgaatwtcatataacttgtacatcataaactattactcttcttttaatttgttccaccatttgaacatgtggaaaccattattagtttgtaccttgtatagaaaca

SEQ ID NO: 44409 - DNA, 201 bp, Homo sapiens
tttctggccacagtgtcaaggaccagtgaaaagaaccaaagctgaatagagagaggcaatggtccaggcaagagatgctgggggcctcaaccaaagccgtkcccatgaggacggaacatagcaaaaggtttaagcatatttaggaattagaatccacgggctctagttactagacctgggatgtgcgttagcaagatgtat

SEQ ID NO: 44410 - DNA, 201 bp, Homo sapiens
aattagctgggcatggtggcgggcacctgtaattccagctgctcgggatgctgaggtaggagaattgcttgaacccgggaggcgaaggttgcagtgagccragatcacgccattgcacttcaggctcagcaacagagcaagactctgtctcaaaaaaataaataaaattaaaaaaaaatatatatatatatatatataaag

SEQ ID NO: 44411 - DNA, 201 bp, Homo sapiens
tgaacccgggaggcgaaggttgcagtgagccgagatcacgccattgcacttcaggctcagcaacagagcaagactctgtctcaaaaaaataaataaaattaaaaaaaaatatatatatatatatatataaagtggtgaaccccatatggagcaactttgacagcatccattaatattttcaatgtgaagtccctaaaacct

SEQ ID NO: 44412 - DNA, 201 bp, Homo sapiens
gggaggcgaaggttgcagtgagccgagatcacgccattgcacttcaggctcagcaacagagcaagactctgtctcaaaaaaataaataaaattaaaaaaawatatatatatatatatatataaagtggtgaaccccatatggagcaactttgacagcatccattaatattttcaatgtgaagtccctaaaacctagcaaag

SEQ ID NO: 44413 - DNA, 201 bp, Homo sapiens
gaggcgaaggttgcagtgagccgagatcacgccattgcacttcaggctcagcaacagagcaagactctgtctcaaaaaaataaataaaattaaaaaaaaawatatatatatatatatataaagtggtgaaccccatatggagcaactttgacagcatccattaatattttcaatgtgaagtccctaaaacctagcaaagcc

SEQ ID NO: 44414 - DNA, 201 bp, Homo sapiens
tggcaagatagcagcaggccaggccaggtcactgtcccttcctttctgaggccacagccgatgctgctgacaagcccccagtgagtttctgtggccccttkggagacacagtgcccttctctgtccctccatgtcatgtcgtttctctcacctacctaccacggtcatgaaactcccacctctgcccatatctaaacctca

SEQ ID NO: 44415 - DNA, 201 bp, Homo sapiens
ggcgaaggttgcagtgagccgagatcacgccattgcacttcaggctcagcaacagagcaagactctgtctcaaaaaaataaataaaattaaaaaaaaatatatatatatatatatataaagtggtgaaccccatatggagcaactttgacagcatccattaatattttcaatgtgaagtccctaaaacctagcaaagccac

SEQ ID NO: 44416 - DNA, 201 bp, Homo sapiens
aatattttcaatgtgaagtccctaaaacctagcaaagccactgttgtgtctcccttaaggagagtttacacacatgcacaagaagcgaataaaggatgtartcgccaaaaactggaaacaaatgctcctcagtaaaaacagggttcgattaactgtggtacagccatactctgtcataacctacaatagagtaaaccaatg

SEQ ID NO: 44417 - DNA, 201 bp, Homo sapiens
acagaaagtgctgtttcccggtgacagaccattaatttgcaaagagccagtttggatatctatgtccacacaaaagtagccttttatttcctttttttttwaaactcactgccattagagtaagtacagtgattggtgggcaggggaaggggcgggggtgctgcctaacttagtccatgctttatcttcagagcacttttt

SEQ ID NO: 44418 - DNA, 201 bp, Homo sapiens
aggggtacatgtgcaggtttgttatttaggtaaaatgcatgtaacaggggtttggtttacagataatttcatcacccaggtagtaagcataggacccaatrggtattttttctgatcctctccctcctctcaccctcaccctcaactacgccccagtgtctgttgttcccctactagtatccatgtgttctcattgtttag

SEQ ID NO: 44419 - DNA, 201 bp, Homo sapiens
atttttttatttttacaataaccacttaaagttttttaaaaaaattttaacttttattttagatgcaggggtacatgtgcaggtttgttatttaggtaaamtgcatgtaacaggggtttggtttacagataatttcatcacccaggtagtaagcataggacccaatgggtattttttctgatcctctccctcctctcaccc

SEQ ID NO: 44420 - DNA, 201 bp, Homo sapiens
aggggaggtgaagcatggggagcggctcacataccctaatgccacccctccaccctccaacccccaaacttctttcctgtggtcagtatctgccagcactwactgaggatccatcatgtcccaggcagtttacacacattatcactaatcctttctgctcagcgcaaccaaccagccacagaggcctccacctgccctgca

SEQ ID NO: 44421 - DNA, 201 bp, Homo sapiens; identical to SEQ ID NO: 7863

SEQ ID NO: 44422 - DNA, 201 bp, Homo sapiens
tccaccaggtctgccggaagagctcatccagaaggggaaggatatcaagggggtgtcggaaatcgtgcagaatgggaagcacttcaagttcaccatcaccrctgggtccaaagtgatccaaaacgaattcacggtgggggaggaatgtgagctggagacaatgacaggggagaaagtcaaggtaggagggcatcccttctg

SEQ ID NO: 44423 - DNA, 201 bp, Homo sapiens
cacctgcaactctccagcccacaacagcgtcctcctccttaaacaggccaccaaccataatgcatcctacctcattgtccagcacgtaacagtcacactcmtaaatctggcatccaagcccctatatcatgggtcagcaaactttttctgtaaagatccagagaatacattttctcagctctgcgggccatttggtctctg

SEQ ID NO: 44424 - DNA, 201 bp, Homo sapiens
gaccttcctctaggaaccttcaactagtgaggaaaaaaacacctcagatgagcatgtgcgcaactccagtaaacacactgcgcgtgcagccccgcccaagygctggcaggccactgcacatgcggacagcctgccccaaagaaaaatcaggggaggagagacacaaaaacccaggagcatgccaacatataaaaccccaga

SEQ ID NO: 44425 - DNA, 201 bp, Homo sapiens
tataaacaccgatgtacaaacacatacgcacacatctatatacatacacatgtgtgtgcacatatacacatacctgcatatacacacatttcgtggggtgyggagagtcacttaaaggctgcagggccataaggcttcctgcttgactgatattcattaatgtttgctgaattacagcaaacctttgctgtgcccatcctg

SEQ ID NO: 44426 - DNA, 201 bp, Homo sapiens
acggttcttcaggccagaagagtgtcctttttataaattgactggcaagatagcagcaggccaggccaggtcactgtcccttcctttctgaggccacagcygatgctgctgacaagcccccagtgagtttctgtggccccttgggagacacagtgcccttctctgtccctccatgtcatgtcgtttctctcacctacctac

SEQ ID NO: 44427 - DNA, 201 bp, Homo sapiens
aatacttatttctgccattgcagtgcaaaagcagccacatccaaatggtgtggctgtgttccaacaaaactctaccagcactgaaatttgaatttcatataacttgtacatcataaactattactcttcttttaatttgttccaccatttgaacatgtggaaaccattattagtttgtaccttgtatagaaacaggtggca

SEQ ID NO: 44428 - DNA, 201 bp, Homo sapiens
tacttatttctgccattgcagtgcaaaagcagccacatccaaatggtgtggctgtgttccaacaaaactctaccagcactgaaatttgaatttcatataasttgtacatcataaactattactcttcttttaatttgttccaccatttgaacatgtggaaaccattattagtttgtaccttgtatagaaacaggtggcagc

SEQ ID NO: 44429 - DNA, 201 bp, Homo sapiens
ttatttctgccattgcagtgcaaaagcagccacatccaaatggtgtggctgtgttccaacaaaactctaccagcactgaaatttgaatttcatataacttgtacatcataaactattactcttcttttaatttgttccaccatttgaacatgtggaaaccattattagtttgtaccttgtatagaaacaggtggcagccag

SEQ ID NO: 44430 - DNA, 201 bp, Homo sapiens
gccagggaaaagcagtctcccaatagatagaaaatcccttaagatggtggtcagcagcttcccaataagagctcaggatttgggcaagtgggttcaagcawgttcattaagagacaaaatggcggagcttaactaatacatgaccttcctctaggaaccttcaactagtgaggaaaaaaacacctcagatgagcatgtgcg

SEQ ID NO: 44431 - DNA, 201 bp, Homo sapiens
atgagtatcctatgactctagcaatgagtctgaatttgatcctgaagacagtagagaatcattgaggggttttaagctctaagagtaacatgatactaaayggtttgtaaaaaaaatttttctggccacagtgtcaaggaccagtgaaaagaaccaaagctgaatagagagaggcaatggtccaggcaagagatgctgggg

SEQ ID NO: 44432 - DNA, 201 bp, Homo sapiens
ctctcacctgcaactctccagcccacaacagcgtcctcctccttaaacaggccaccaaccataatgcatcctacctcattgtccagcacgtaacagtcacwctcctaaatctggcatccaagcccctatatcatgggtcagcaaactttttctgtaaagatccagagaatacattttctcagctctgcgggccatttggtc

SEQ ID NO: 44433 - DNA, 201 bp, Homo sapiens
atatccttaaatagttttttgttgcggtttgcacatcctgaaattctaccaaaaggattgaaaacagcacatagtaaaaacacaagactttcaggaccaaygacatggccaatgaagctgatgcaaactcttcccgcagcatggctagagtgtccaggttgaagcataataatttttcagctgaggtcacaagaaaaaagg

SEQ ID NO: 44434 - DNA, 201 bp, Homo sapiens
atgggaaggcctcatgtcatacaacaaggacattcctaacaagttatcatgtaaaggaaaagattgttcattcaatacacttttctgtgtagtataattcracagtgcaaaccaccacccacaatttttgtttagcatatttttatttttgctcctccccatgggttcttttagcagggaagcctctaaaaatgctaagga

SEQ ID NO: 44435 - DNA, 201 bp, Homo sapiens
tatagagctgaatttagccctgggctgaaccttcacatggtcattagacagacatatgccagctattggtgcaggctttaggtgtcacatgtaacccagawgggatctaaataaaatgaccttgaattcctccaaagcccttcctaggatgtctagggacctggggaaccctgtagggaatgcatccccacagacactcca

SEQ ID NO: 44436 - DNA, 201 bp, Homo sapiens
cccacctctgcccatatctaaacctcagacggtttccaccaggtctgccggaagagctcatccagaaggggaaggatatcaagggggtgtcggaaatcgtkcagaatgggaagcacttcaagttcaccatcaccgctgggtccaaagtgatccaaaacgaattcacggtgggggaggaatgtgagctggagacaatgacag

SEQ ID NO: 44437 - DNA, 201 bp, Homo sapiens
ctcccacctctgcccatatctaaacctcagacggtttccaccaggtctgccggaagagctcatccagaaggggaaggatatcaagggggtgtcggaaatcvtgcagaatgggaagcacttcaagttcaccatcaccgctgggtccaaagtgatccaaaacgaattcacggtgggggaggaatgtgagctggagacaatgac

SEQ ID NO: 44438 - DNA, 201 bp, Homo sapiens
gggggtgaatggtgcagtgtttctcctgcaggtatgtccccctgactcttctttgcccccagaatatgctttagggagtcacagacaacagaacactgccycagggcgctgtcatcactctattcaaatggaaaaattcttaaactagagagagtgtgagcatcaaccacccaatgtgcagtttccacctccgccccagca

SEQ ID NO: 44439 - DNA, 201 bp, Homo sapiens
tccaccctccaacccccaaacttctttcctgtggtcagtatctgccagcacttactgaggatccatcatgtcccaggcagtttacacacattatcactaaycctttctgctcagcgcaaccaaccagccacagaggcctccacctgccctgcatgcccagggtgcttcataaatgcctttgcccatttagcgtttataaag

SEQ ID NO: 44440 - DNA, 201 bp, Homo sapiens
attagaactcatgatagggacatggaagtgttattgggggtggccatcatgacccgtcacgtgacactaggccatccaggacctgtggcctctgaagtgawgggaaccactgaggctcatgcctggagcagtggcccgactcagcctatgcttcaggatgatctgtctaaccacagagtagaggaggcccagaggatgaag

SEQ ID NO: 44441 - DNA, 201 bp, Homo sapiens
acgcctcctctctgcctgtcctgtgggcatcccaccaacagaaagtgctgtttcccggtgacagaccattaatttgcaaagagccagtttggatatctatrtccacacaaaagtagccttttatttccttttttttttaaactcactgccattagagtaagtacagtgattggtgggcaggggaaggggcgggggtgctgc

SEQ ID NO: 44442 - DNA, 201 bp, Homo sapiens
ctgccattgcagtgcaaaagcagccacatccaaatggtgtggctgtgttccaacaaaactctaccagcactgaaatttgaatttcatataacttgtacatsataaactattactcttcttttaatttgttccaccatttgaacatgtggaaaccattattagtttgtaccttgtatagaaacaggtggcagccagatttgg

SEQ ID NO: 44443 - DNA, 201 bp, Homo sapiens
ttgtctgtcttagaagagtgaatggtttccactcagaaaattcagatctggaagctcatagttcatagctgtttttttcttttctatttctttttcctttytttctttctttttctctcttttttttaagagataatgtcttgctctgttgcccaggctggagtgcagcggtgggatcattgctcactgcagccttgaatt

SEQ ID NO: 44444 - DNA, 201 bp, Homo sapiens
agaccaacctgcccaatatgatgaaaccctgtctctactaaaaacacaaaaattagctgggcctggtggcacacacctctagtccgagctactagggaggstgaggcaggagaatcacttgaacctgggaggaggaggttgcagtgagttgagattgtgctgttgcactccagcctgggcgacatagcaagatcctatctc

SEQ ID NO: 44445 - DNA, 201 bp, Homo sapiens
aagtgctgggattacaggtgtgagccactgcacctggcctatttcttactttctaaacatatatgtgtatatgtatatatatgtatgtgtttgtatatatrtatatacactgtataaataaaatgttatgtcttcatagtggagggtgtggagaagacttctatacaggaaacaaatgtatcataattgccatgtgagcag

SEQ ID NO: 44446 - DNA, 201 bp, Homo sapiens
aaatggagaggagatctcttgggagaagttgggacacaaaagcttactggacagagtgtgcgataatcacgttagatgggcctcccggggaggtggaccarcttgtacacagcccctccactgtgcagagtctcattgtccccgtctgtatgatgacggcctggaccagatgactgctacaacctctataggctttgattt

SEQ ID NO: 44447 - DNA, 201 bp, Homo sapiens
gggtgaacaaaaccagattctcacgttctctctttcttgtgtcacttcagaaaataacttcatgagcatacttgaaccttaacatctagaaattaaaatgkaaaaagtatttggggactatctctaaagtgttctttttttggcaattttctaagggatcattcaggcatgtgagaagaagaatcaaaagacttggaaata

SEQ ID NO: 44448 - DNA, 201 bp, Homo sapiens
gaatgatccagctgccagttttatattatgcagcctacacttttccccccaagtttgattatgaaaatgttcatacatacagcaaagctgacttttacagkgaacacctgtatacctaccacctgcataaattctatattttattaagcttgctttatcacctagataccacctgtattcattatttattgctgtataaca

SEQ ID NO: 44449 - DNA, 201 bp, Homo sapiens
cattcacaggtgaggatggctgtgggtttctccccctgtgggagccttcttccagtgagaagagtgagagcccagagtggcacgaggaacctgaaggtccrttcggcccagaagtttcatttgcagaaaaggctagaagctgattgatattccaggtcaggagcaagcgcaccaacagcgccaaaaccctgcttatgtgag

SEQ ID NO: 44450 - DNA, 201 bp, Homo sapiens
tcctctgtggtgtttccccaactgaaacattccccctggatgctgtctgagtgctacgttccctcccctctttgcagggaagcactccttggtgggtggtrcccaggccttggcctcctaaagcacttcttgcccccttggtctgcccttgccctctggtgtcatatattttacttagcgtgtcttccagtgtgacccacc

SEQ ID NO: 44451 - DNA, 201 bp, Homo sapiens
acattttcagctggaacaggtaatctgataaaagcactgggtatgctgagaagtctgagatatctctggagcagattattaaagacaataactcaggctcrtgacccttcacttttctgctactcctttcaccaaagtcaccttttccttccctcatctagacaatatattttgagcttcagctgtgcactggtgaacaag

SEQ ID NO: 44452 - DNA, 201 bp, Homo sapiens
tgagaagaattaggtcttgggtaatgtgcctttcccacctgtgtgtcttccttaggatgggaatacagccttgcatgaagcatcctggcatggtttcagcsagtcagccaagctgctcgttaaagcaggagccaacgtgcttgccaagaacaaggtgaggcctggcagatgctagaatgcctcattcacaggtgaggatgg

SEQ ID NO: 44453 - DNA, 201 bp, Homo sapiens
tgtacatagtaggtgctcagtgtatatctgttgggtaagtgagtggttactgaaggtcggagtggagagccggatggtgatggctggtgttgcttagcatygccctggacagggaataaagggagcggtagaatcacctgctgacaacatctcctcttcatccagagacttctgtgtcagggcttattataaggatgtgat

SEQ ID NO: 44454 - DNA, 201 bp, Homo sapiens
gctgattgccctgcacccttccttctccgggctcttccctccctggaactcctgccttcccgcccccaccccactcaattcattgcacttaatgatatttmtttgtttaaaatagtaagctaagcaaatatgagctatgttcattaaatgacttctatttaaaagcaacacattaggccgggcacggtggctcacgcctgt

SEQ ID NO: 44455 - DNA, 201 bp, Homo sapiens
tggtccttctttttggtggatctttatagaaggaagcccagccctagcaattactgagttacctcaaaaggaattcttggccgggcacagtggctcatggytaaaatcctagcactttgggaggctgaggtgggtggatcacttaaggtcagaagttcaaaaccagcctggccaacatggtgaaaccccacctctactaaa

SEQ ID NO: 44456 - DNA, 201 bp, Homo sapiens
tcagtatttcgttaaggttgtttataggtagcagtgcatccttcttttaaaaaatctgttttatcttatgatggcctctgtcctcttttgggccaagcacsagggacgccccagaatgttttctttgcccctctggtgctctgccaggaaacttcacaaaactctgaccagccacatcatagaatccaagaaggcaatgga

SEQ ID NO: 44457 - DNA, 201 bp, Homo sapiens
tatccgtgttaaatataaaaagctggaaaatattaaaaagtataaaaagttaaaagagaaaaatcctttcatggatttttaaagggagactttttaatttwaagaaagcaattttgagttttaactaggattttttattgtaataaaatatacatagcattaaatttactgtctgaacatatttacgtatacggttcagtg

SEQ ID NO: 44458 - DNA, 201 bp, Homo sapiens
aagtgatgatgctgaagagtgtagatactcttttatctacatattttaaaatactaaattttaaaataataatttaaaatcggtaacattacaagcaatgrtcaagatataccagctcagtggcactatattccaagatgtctgctaaacttaaaaaaaaaaattcactgatcaataaaaagggttaggatctgtcctcac

SEQ ID NO: 44459 - DNA, 201 bp, Homo sapiens
aatggtcttctctatgacccagcaacagggctaagaaggctactcaggtgcacaaggagaggaacacgctgtgttctgcaacctcctggcattagcctggrtgcccatcaggaggaggatgagtaaataataagtgaaccagaactacatgaataacatgaaaaacaaatctcaaaaatacaaggttagacaaaaaatgcc

SEQ ID NO: 44460 - DNA, 201 bp, Homo sapiens
acttttctgacccaaatttacaccattccaggctgttgaagctctcagggaacaccatctatgataagaggacccttggggcacttagaaaagttggtggrgtcttccactttttaaaatctaaacgaggagccaggtggccagaattccagctattgcagttctgccagaaataagattggaggtattgagaattcattt

SEQ ID NO: 44461 - DNA, 201 bp, Homo sapiens
aggttctcaaaaacaagaaggacccaaaaagcaagagggtctcaatctgtgtcctaagtgatagatgcaactgtactgcctgaaaggcagggcctggtgtycatagttaaaattttgatgtttcaagaaaaatacaagaatgggtgacttgaaaaaggctaacaagttaaatctcagttgcattagcctgcccttccagga

SEQ ID NO: 44462 - DNA, 201 bp, Homo sapiens
tgaaaccatcgggcaagaggcagagaatgtgagcgttgccttttcccccgagtaagtactgcccctctgcaaggcatgcaagtctgtgcggaagcatgttrctaatatgtcctccctctctctgcctctctccaaggcggggaacacagctctgcacctggcctgccagaacagccactcccagagcacgcgcgtcctcct

SEQ ID NO: 44463 - DNA, 201 bp, Homo sapiens
tacccacatagagtgttgagtgttgtactattatcagcaaatatgagctggtgccatttacaggggaggtcctctaatgccccatgcccagcatctatagygagcaggtcctactgatgactgaggcgtccttgggatgagctgaccggaaaggtcacatgggtatcgcttcttcacaaagaagctgtatttcctttataa

SEQ ID NO: 44464 - DNA, 201 bp, Homo sapiens
aacaatgtaagttgagttgcaacattgctttctaaagtggttcccacccctttccagaatgggatgtgtactaaacccctgcagacccccaggcccagcgyactctggaagacgggggatctctgctggaaccacagcccccagggccattggggtggacttgaagggtacccctgctctgagcagccccaggagttgaca

SEQ ID NO: 44465 - DNA, 201 bp, Homo sapiens
cactggtagggaataggcccagacattagagaatgggaatacatattctcatagataaatgtccaaatctgctttgagatacttggtgagcggcatcatcyttaggcatcaggaaacaggaccagagccttctcaggtagattgaggcgggctgaaggaaaagccagcaacttttttggcttaaatgggaccagtgtggct

SEQ ID NO: 44466 - DNA, 201 bp, Homo sapiens
tgggtggctgaggtgggtggatcacctgaggtcaagggtttgagaccagcctggccaacatggtgaaaccccatctctaataaaaatacaaaaattatccrggaatggtggctcatgcctgtagtcccagctacttgggaggctgaggcaggagaatcgcttgaacctaggaagcagaggttacagtgagccaagattgca

SEQ ID NO: 44467 - DNA, 201 bp, Homo sapiens
taatctatttagagggcaatttgtcagtaatgatcaaaattttatgtgtaacacatgtcatgtgcatttcctctgttgactttagaaaaagaggaatgttratagctgttttataataatgttattagcaatagtgatcgtggtagtggcaggaatactgctggttgtgctgcttgcagtagtggtactggtggtacggct

SEQ ID NO: 44468 - DNA, 201 bp, Homo sapiens
gaagtttattcgagggactagctaggaaaactcaatgtggaaaagtacaagagagaaatgatcacattgaaaggtcatgtggctgggcgcggtggctcackcctgtaatcccagcactttgggaggctgaggcaggtggatcacaaggtcagcagttcgagatcagcctgaccaacatggtgaaactccgtctctactaaa

SEQ ID NO: 44469 - DNA, 201 bp, Homo sapiens
gccggtagtaccgtcgggaccaggcccaggaagtctgtcttttctccctttgccctttcagggatgtgccctggggaaagataaaattaattaattaattwatttatttattttgagatggagtctctctctcttctccaggctggagtgcagtggtgcgatctcgggtcactgcaacctcctcctcccgggtttaagcaa

SEQ ID NO: 44470 - DNA, 201 bp, Homo sapiens
tgtaaaattcttaagatagtgccttctacgcaataaatggacccaagcgttcaataaattctggccgctgctgtctcttgctctgcccaattattggtctygctgggctcaccagggcctaggttgagttaagctgaactgatctttgacgataactggggtaggactcagggcaaattgatgctttaaaacttcgtcctt

SEQ ID NO: 44471 - DNA, 201 bp, Homo sapiens
aactattgtctgattaagatatgatgtgtcactcatgtaagtagactagtagataaaatatatttgcaacaaggaaagaaaactctgaaagcttcttaaaytataaattgtttttaaatgtaaagttttattttctttgatcgatggtactttttcaatttttttctcgaatgtgttccatttttttcttgaatgtcttca

SEQ ID NO: 44472 - DNA, 201 bp, Homo sapiens
tggcgggcgcctgtagtcccagctacttgggaggctgaggcaggagaatcgcttgaactcaggaggcagaggctgcagtgagcagagactgcaccactgcrctccagcctgggcgacagagacaaaaaataaaaaacagcaaaaataaaaagaatgaaagtatatgtatacacacatacatataaataattggtttcatgt

SEQ ID NO: 44473 - DNA, 201 bp, Homo sapiens
aaaagtggcatgggaaaagaaaaaaaagcttgtgcctcccctcctaagtgtgggaaggaattaagatttttggctttctcctggccagtgagttcataaartgatttttttttgtggatagggtgatcatttagaactgtcttcagattctgtttttactttcttgattagacctctcctatctactcatccattcatcca

SEQ ID NO: 44474 - DNA, 201 bp, Homo sapiens
ctcccagggaatagcattatttatttatgacataatcctattagtctctcttctgtgcatttatatttattttaaaaacaaaacttgaatattgacaattrtaattgtatatacattattttataacctatactttgaataacacccttttaagcttccaatataaattatttggcctatgttgacagttgaaatgccttg

SEQ ID NO: 44475 - DNA, 201 bp, Homo sapiens
tcctgacctcagatgatccacccaccttggcctcccaaagtgctgggattacagacgtgagccaccatgcccagccataggatactacttttggaggcctsaaggtcaatattccctcacttctgtggactggaaaagattaatgacatcccatttcgtagatggtctggtttgctgagaaaggctggaagccatgcaaag

SEQ ID NO: 44476 - DNA, 201 bp, Homo sapiens
tgctttcatttggtgagccaggagaacgacatgggacacatgagactgttaacattggctgcctagcaaggaagacgattagctttttccccctcccgccyccttttttttttttttttttttttggaaacagagtctcactcttttgcttaggctgtagtgcagtggcccagtctcggctcactgtaacctccacctccc

SEQ ID NO: 44477 - DNA, 201 bp, Homo sapiens
acgttctatgttagttaagaccaccaagcagtgtttcctatgtctgaaatttatgttatttgcaaaggttctcgtgggtcccttaccatatggaatcttgyaaagaatatttgaccatattagtgaaaaaggccaaggaagcaaacacaatgggtctctgggctttttccttctgtagggcagtgtctcagcaggagacac

SEQ ID NO: 44478 - DNA, 201 bp, Homo sapiens
tttccttcatgatcttgaatacttaggttcttgcaaggacttgggtctttggtcttcacacagatttttttgtttgttcaatgttttgttgagcttttctkgttgttactggtggtaggattggtatggtcggcaggtaaaatgtctgccctgccaaagacatactcatttcctaaccttcagaacctgtgcatattacct

SEQ ID NO: 44479 - DNA, 201 bp, Homo sapiens
atgttagttaagaccaccaagcagtgtttcctatgtctgaaatttatgttatttgcaaaggttctcgtgggtcccttaccatatggaatcttgcaaagaawatttgaccatattagtgaaaaaggccaaggaagcaaacacaatgggtctctgggctttttccttctgtagggcagtgtctcagcaggagacacccccagc

SEQ ID NO: 44480 - DNA, 201 bp, Homo sapiens
ttgcccaaatggggtgacatgggcgccaccgactggtgtcagtcttgcagaggtcaaagcgttcaggggtgttgtctcttcctctcttacaggtgtcagcrttttctgaccccaccccaccagccgaccaacagcctggacaccagaagaacctgcatgctcataatcaccctaaaaagaggaacaggcatcggtgttcat

SEQ ID NO: 44481 - DNA, 201 bp, Homo sapiens
agctcaccagtgagccttcgcggattggctcttcctaacaatagttcctttcattctttggtccttgtcaaagcagtgaaagtttggccctcctaggtgtrggggtcccacaggaaatgccaagatgaagggtactccagaagggcatgtgattaaaaagtgacaactgcttgttctctgaagcaatcctttaagttcctt

SEQ ID NO: 44482 - DNA, 201 bp, Homo sapiens
ggctcctacttggttccccaagcccctctgcaggagctgagaagccagggctcaccctgagatcatctcagtcttacactctgctccacttcactcctagmtgcgtgttttggacaagctgatggttgagcgactttctgcagagaggacggagtgcctgaaccgcctgcaacagcactcagacacagagaagcatgaggg

SEQ ID NO: 44483 - DNA, 201 bp, Homo sapiens
tatagtgtatcatttttatgatactgaaatgaggttaatagaaaagaacctgtagttctgtttatgtccgtggctgaatatgctggcaacagatgaagacygaacatgctggggaagatgccatttctgtcctgaactcattccatgtattgtgcattgttaggccattacagttttagaacaagacatagtttctaccct

SEQ ID NO: 44484 - DNA, 201 bp, Homo sapiens
tagttccagctacttgggaggctgaggcaggagaatggcgtgaacctgggaggcggagcttgcagtgagccgagatcacgccactgcattccagcctgggygacagagccagactccatctcaaaaaaaaaaaaaagaaaagaaaagaaaaagggctgtttctactggcccagaaagttcgggggaatttgggagttcaag

SEQ ID NO: 44485 - DNA, 201 bp, Homo sapiens; identical to SEQ ID NO: 7884

SEQ ID NO: 44486 - DNA, 201 bp, Homo sapiens
gacctggtggaaggtaatttaatcatgggggcagttaccctcgtgctcttcttgtgatagtgagttctcacgagattggatagttttataaggggcttttyccccttttgattggcacttcttgctgctgccatgtgaagaaggaggtgtttgcttcctcttctgccatgattgtgagtttcctgagggttccccagccct

SEQ ID NO: 44487 - DNA, 201 bp, Homo sapiens
taagagggtgggccttgtgctaggaaagccccaggacggaggagacagcttcagcttctataggaaaccgattactgcctttgctattgctgtactttaaycagaggccagaaaaggagccaagaatgtgcagggaacacagcccctcctcagaaaagctcctgtaccattgtagctcagctcctgaagctctcaggatgt

SEQ ID NO: 44488 - DNA, 201 bp, Homo sapiens; identical to SEQ ID NO: 7894

SEQ ID NO: 44489 - DNA, 201 bp, Homo sapiens
ctttcctcaaagggaagcagtgggtttgtggccacatgcttgccccaaggccctgggcttttctgctgtaaacaaagggcagctgcctcttcacacttctytgctgctcggtgctgtcccatctgttgggaaagggggtctctggagcctccagtgctgccctgcaaacccaaatccggctgcctgttgtcaggaaccatc

SEQ ID NO: 44490 - DNA, 201 bp, Homo sapiens
tccaacttcaggactggacctctgggaggagggtagaggggatctcttccacagcagggaaggaatctgtctgccctcagaccccaagttgacctaatctstagataggaccagggctgagcccagtacagctcttttgatgggctcacctctttgcacgtagatgtcggcttgtgttgtgtctgggactctgacaggtac

SEQ ID NO: 44491 - DNA, 201 bp, Homo sapiens
gcttttcttccaatgatggaggtttggggagaaggaggattattaagaatgcttttgttgccatctttcaagtggagcaacttgtaattagcatttgacartctttaaaatcacggtggcttttctcacctatttctttagctaaatggagaggagatctcttgggagaagttgggacacaaaagcttactggacagagtg

SEQ ID NO: 44492 - DNA, 201 bp, Homo sapiens
caggacctttgccagcagcttaggacactatgtgttctcgccgcaacctcacacaagtcattagatttccttgagtcttgctagtctggaaatgtcctccyaaggtctgaactgaaagttagattgagctgcttgcattgagctagagtttcacaaaggaaaattttctcaaaggaagcaaatacagtagattgatgatga

SEQ ID NO: 44493 - DNA, 201 bp, Homo sapiens; identical to SEQ ID NO: 7873

SEQ ID NO: 44494 - DNA, 201 bp, Homo sapiens
tcagataaggggttgaagtttgcatgcaggggctcctacttggttccccaagcccctctgcaggagctgagaagccagggctcaccctgagatcatctcaktcttacactctgctccacttcactcctagatgcgtgttttggacaagctgatggttgagcgactttctgcagagaggacggagtgcctgaaccgcctgca

SEQ ID NO: 44495 - DNA, 201 bp, Homo sapiens; identical to SEQ ID NO: 7876

SEQ ID NO: 44496 - DNA, 201 bp, Homo sapiens; identical to SEQ ID NO: 7875

SEQ ID NO: 44497 - DNA, 201 bp, Homo sapiens
attctcctgcctcagcctcccaagtagctgggactacaggcaatgcaccaccacaccaagctaatttttgtatttttagtagagatgaggtttcaccatgytggccaggctggtcttgaactcctgacctcaagtgatccacctaccacagcctcctaaagtactgggattacaagcatgagccactacacccgacctcat

SEQ ID NO: 44498 - DNA, 201 bp, Homo sapiens
gaatatattcaagagttgtgcagcctacaccacaagctaactgtaggatattttcatcaccctgaaaaggaaccctacacccattagcagttactccattycatctacagccagcctaggcaaccactaatctttctgcctattctggacatttcgtatgaatggaatcatcatgtgatcttttgtgaccggcttctttca

SEQ ID NO: 44499 - DNA, 201 bp, Homo sapiens
ttgttgctgagaactaaactagcagtggttctccacctggctgcacattagaccctcctggggaactataaacaaacgaaaaaggaaaaaaaacaaaactwaaaaaaaaaaaaaacctgaagaccaggcctggggtgatggactgtcccagtttgccctgggctaaagggtttcccggaatgtgggactttcagtactaaa

SEQ ID NO: 44500 - DNA, 201 bp, Homo sapiens
atcgcttgagcccaggagtttgaggttgcagtgcaatatgatcatgcctatgaatagccactgcactccagcctaggcaacatagcaagatcccatctcgaaaaaaaaaaaaaagttgtactagactaaaggttggcaaattatagccatggcccaaatccagcttgatgcctgtttcattcctttgcatggtgtctatag

SEQ ID NO: 44501 - DNA, 201 bp, Homo sapiens
tcaagcaatcctcccacttcagcctcccatctcagccacctgagtagctgggactacaggcgcatgccactacacctggctaatttttgtattttttgtadagattttgccatgttgctgaggctggcaccctttaaataatttgagcccttatggcaatttgtcttttggttcctaaaaattgtttcgtagctctagata

SEQ ID NO: 44502 - DNA, 201 bp, Homo sapiens
tttgggaggccgaggcaggcgaatcacctgaggtcaggagtttgagaccagcctgaccaacatggtgaaactctgtctctactaaaaatacaaaattaacygggcatgctggtgcatgtctataatccaagctacttgggaggctgaggcaggagaatcccttgaatctgggaggtggaggttgcagtgagtcaagatcgt

SEQ ID NO: 44503 - DNA, 201 bp, Homo sapiens
gtacattgtttcttttagacataatactatggtgtagtaaatagactacgatatagtgtaaacataatttttatatgtactaggaaaccaaaaaaattgtgtgactcattttattgtggtacttgctttattatgggggtctgtaaccaaaccacagtatctccaaggtatgcctctataattcaaattactaaaattcag

SEQ ID NO: 44504 - DNA, 201 bp, Homo sapiens
gagaatcgcttgaacccgggaggtggaggttgcagtgggccgagatcacgccactgcactccagcctgggcaacagagtgagactccatctcaaaataatwaaaataataataataataataataataataataataaatacataaataaaaatgaaggaagtttacagtgtttatcttcttttggggttaaactgttttt

SEQ ID NO: 44505 - DNA, 201 bp, Homo sapiens
agaatcgcttgaacccgggaggtggaggttgcagtgggccgagatcacgccactgcactccagcctgggcaacagagtgagactccatctcaaaataataaaaataataataataataataataataataataataaatacataaataaaaatgaaggaagtttacagtgtttatcttcttttggggttaaactgttttta

SEQ ID NO: 44506 - DNA, 201 bp, Homo sapiens
cagaacaaagtctattgcgtaagacaataaaaagattatctttgggcaattcccataacagactttctgttttaacaaatctcttaagttactggagctgwcttatttatttttagagatgtttttacattgtagaaaagtacacgagtacccctatgtattgaccaccaagatgagtttttagttttttttttttttttt

SEQ ID NO: 44507 - DNA, 201 bp, Homo sapiens
aaacaaagctttgaatggctcacccacttcagtcttaagcacttttcatcactaataacgaggagcctaacatccctaagcctcaggcttttgcttttatktccttatagttgttttatctttcccacaatacacatgcctttgggttaaatcactagaagtggagttagcgaatctttgccatattaattttccaagtgg

SEQ ID NO: 44508 - DNA, 201 bp, Homo sapiens
taaaccatgtatcaaattcacttgattcttctatgtacttatttgtggggtttgtttttttttttaagatatccttggtggatgaattaaaaacctggtgyatgttaaagattcagaatctggagcagaagctttctggagattctagggcctgcagagctaaatccacaccatctacttgtgagtcctctacaggtaacc

SEQ ID NO: 44509 - DNA, 201 bp, Homo sapiens
tctctcgcgagggtccctgccgtgccccggctcgccgctgggaggcgctgcggcaccggcgtaggagccgccggcaggggtggggcggggccggcgggacrgggcagagggccctgcggcggcggacgcggcgggctcggccacaggtaacccgcaggagccgagagcgctgcctggcgcgcgggcggctggaggcacggc

SEQ ID NO: 44510 - DNA, 201 bp, Homo sapiens
cttgtcattcatgggattcctgagaagtgcccttgctgataaaaactgaaattggcagatcagtgtctatttcaaaattgggagttgggataaaataaagyagcacatacacatctaatcctactttatatatacacatgtatactataaaatatatatagtaaatgctccaaagatagctgcttccaaaacagactatat

SEQ ID NO: 44511 - DNA, 201 bp, Homo sapiens
gaatcgcttgaacctggggggcggaggttgcagtgagctgagattgtgccactgcactccagtttgggttacagagcaagactccatctcaaaaaaaaaawtttttttggagtttttgttttgttttgttttgttttaagctcatcagctattgttagtgttagtgtattttatatgtggcccaagacaattctacttttt

SEQ ID NO: 44512 - DNA, 201 bp, Homo sapiens
aaagatctggcattcccctttccccagcacccgcctgtggcctgtgatcctagtaggtggtagaaggttcttttgtagagggatcagtgaaatctttatcrtatgaactgtgcgtgtgggtattgcaggctccttcctcaacaagacctgtcctctcctcagacagtagactctgagactgaattgcagcatctgatgtca

SEQ ID NO: 44513 - DNA, 201 bp, Homo sapiens
ttatatattttttgtatattttgtatatatagttttgtatatttttaaaaaagatatcctcctcactaattactttttaaaaattttacttttaaaaatcrgaaaaaaaaaatgcaaagttggctagaaatagtggctcatgccttggcactttgggaggccaaggcaggaggatcacttgaggccaggagtttgagacca

SEQ ID NO: 44514 - DNA, 201 bp, Homo sapiens
ttatctcagagtcaccatatctacacttactggaatgtactaatactacatcggtgttttggaattctttttttttgagaccgagtctccctctgtcatcraggctggagtgcagtaagctgttcacagctcactgcaacttctgcctcccgggttcaagcgattctcctgcctcagcctcctgagtaactgggattacag

SEQ ID NO: 44515 - DNA, 201 bp, Homo sapiens
gtagactctgagactgaattgcagcatctgatgtcagcctctgcttttcagctccctctcttttatacaagtcaggtaacacacgtgtcagtttctgtctrtctcgcccatgccaatcagccacagatcctttgtggtcaaagaactccggttgccactctggccttgctgtccgttatgacatttacatccatccttgcc

SEQ ID NO: 44516 - DNA, 201 bp, Homo sapiens
ggagaatggcgtgaacccaggaggcagagcttgcagtgagccgacatcgtgccactgcactccagcctgggcgacagagcgagacttccatctcaaaaaamaaacaaacaaacaaaaaaaaaaactaatagagcaagaacttactaaccgtgaggatggtaccaagccagtcatgaggcattcacccccttgacacaaaca

SEQ ID NO: 44517 - DNA, 201 bp, Homo sapiens; identical to SEQ ID NO: 7879

SEQ ID NO: 44518 - DNA, 201 bp, Homo sapiens
agatctctctgtctttggtacagatgccttttgcaatatgagttcagtacacagtgtgcatccttaagccttgaatattcagatacatttttgctcttttwaaagtaattacagtaatagaattatgtttacattccagaatacccataatgagattggaaaaaaaagttcaagcagtcagtcttctatccagaagccata

SEQ ID NO: 44519 - DNA, 201 bp, Homo sapiens
tatgctttactttatgaaagaggcagtcccaaccccacagatgcatctgaccttttctgaggctcgtcctaaggttaatgacttcacaggttggaagcagsttggggtgagtgcaaagagccttgacaatttgatttctggtccaagcatgctgtcctaggcttatcaataaaatgagagaattagacatcaataaaatga

SEQ ID NO: 44520 - DNA, 201 bp, Homo sapiens
cacattaggccgggcacggtggctcacgcctgtaatcccagcactgtgggaagccaagtggatcacttgaggtcaggagttcaagaccagcctagccaacrtagtgaaaccctgtctctactaaaaatacaaaaattagcaaggcatagtggtgcatgtctgtaattccagctacttgggaggctaaggcaggagaatcgc

SEQ ID NO: 44521 - DNA, 201 bp, Homo sapiens
gaatcgcttgaacccgggaggtggaggttgcagtgggccgagatcacgccactgcactccagcctgggcaacagagtgagactccatctcaaaataataawaataataataataataataataataataataataaatacataaataaaaatgaaggaagtttacagtgtttatcttcttttggggttaaactgtttttac

SEQ ID NO: 44522 - DNA, 201 bp, Homo sapiens
ttgtgtcatcatcaccaccatccatttccagatcttttttcatcttcccaaactgtaactttgtacccattaaacactaactccccttttctccctcccamccagcccctgccagccaccattccactttctgtctctatgaatttgtgatccattttaaagtctctcacaatctttccttacctagaggcaatgaatcac

SEQ ID NO: 44523 - DNA, 201 bp, Homo sapiens
tcgcttgaacccgggaggtggaggttgcagtgggccgagatcacgccactgcactccagcctgggcaacagagtgagactccatctcaaaataataaaaawaataataataataataataataataataataaatacataaataaaaatgaaggaagtttacagtgtttatcttcttttggggttaaactgtttttacaga

SEQ ID NO: 44524 - DNA, 201 bp, Homo sapiens
ttacagattcctacctacccccaccccataaaaggcccctttatttggatgtcttatcccatttcagttctctgacatatctttcccccaccagttacaakaggctttctttctgctcagaccccagataagcccgaccagttctttttcctcagagcccccagctattcatctggatcctgaaaactccaggaccaattc

SEQ ID NO: 44525 - DNA, 201 bp, Homo sapiens
cgtgggtgttcaaccttttggcttccctgggccacatgggaagaagaattgtcttgggccacacataaaatatgctaacactaatgatagttgatgagctaaaaaaaaaaaaaaaaaaaaaaaagtccgtgcataattttcatggtatctgtcaccacagataagcaaaaaactcccctcattcaaagggttggacacctg

SEQ ID NO: 44526 - DNA, 201 bp, Homo sapiens
tccttaccacagctctgccaagctagtgctcttatcgctgagataccaataaggaaagggaggtgctagacagaaagtaacttgcccatgaccaaagaagyagtaggtgctagccctgagaaggagccagctttatgtggccctgaggcccacatgtaggcactcctgacccttgtttccagcacctccatagtccttgcc

SEQ ID NO: 44527 - DNA, 201 bp, Homo sapiens
aactgtgacccactatgagaactagtgacccagtatgtacacatacatatataaacatacacacaaatgaaacaaatgtttcccacccaaaatatatcgahctattctattctattctattctattctattctattctattctattctattctattctagttcattctttaaaatgctgcttgtgacctattaacttattt

SEQ ID NO: 44528 - DNA, 201 bp, Homo sapiens
tataaatcttatatatctgctaggtctgtaatatataattatagtacttaattcaaacatcagtctgtgcagataatagatttccctttatatatatatatttttttttaccttgtttacattttgcttttattctaaatgccaagttttgttttgttttaagggtagagagagatgtgttatagagaatgatgtgaagtg

SEQ ID NO: 44529 - DNA, 201 bp, Homo sapiens
ataaatcttatatatctgctaggtctgtaatatataattatagtacttaattcaaacatcagtctgtgcagataatagatttccctttatatatatatatwtttttttaccttgtttacattttgcttttattctaaatgccaagttttgttttgttttaagggtagagagagatgtgttatagagaatgatgtgaagtgt

SEQ ID NO: 44530 - DNA, 201 bp, Homo sapiens
atagcttattgcacccttgaactcctgggctcaagagatcctctgcctcaacttcttgagtagctgggataaagacatgtgctacccgcctggttaaattaaaaaaaaaaaaattatagcgatgtggccttgctatattgaccaggctggtctcaaactcctggactcaagcaatcctcctttcttggcctcccaaagtac

SEQ ID NO: 44531 - DNA, 201 bp, Homo sapiens
ttttattttttgagatggagtttctgtcacccaggctggggtgcagtggcgcaatctcagctcactgcaacctccacctcccgggttcaagctattcttckgcttcagcctctcgagtagctgggattacaggcgtgtgttaccgtgccaggctaatttttgtatttttagtagagacggggtttcaccatgttggccggg

SEQ ID NO: 44532 - DNA, 201 bp, Homo sapiens; identical to SEQ ID NO: 7893

SEQ ID NO: 44533 - DNA, 201 bp, Homo sapiens
ttaatatttccgcagcatttggcttttatcacagcagccacagaaaacccagctttgcaaagatgtattgtcttggataggaatgtaacatgatctactgytgaaactgcaaactacctccagttaataggttcagcagtgtccagacatgtttggtatactagtttccattgaaattttcagattttctacattgcccat

SEQ ID NO: 44534 - DNA, 201 bp, Homo sapiens
gtgaatgtgtagtcctcagactctcttccctgcaacctagtttaatgtctagacatactggaagaaaaaaaatgatctttggtaacatgatgggaaaagtrcatgaaattagctacataaattgtgaaatagcaagtcagtctttttattctgtgatgtgtaaaaatcacttatttcattgtatttacttttacttttcca

SEQ ID NO: 44535 - DNA, 201 bp, Homo sapiens
tctgtgtcctgggttgtccactgtgttttgtttaacaaatttattcccatgcagacaacatgactaattgtatgctacccaagagtcaccttttatttttyccaatggcatctaagcaccttgcatttacatgggcattttttccttagttttctggtcattcagattggtccagattaatccagttcaattgcatgcgca

SEQ ID NO: 44536 - DNA, 201 bp, Homo sapiens
gatttagtgctggaaaagaccttagcaatcacctcagtcagtgatttttcggctgtggttttcaacccattactgggtcttcaaatcagttttatgggtgyaactgacagggattgttgggagaatccagtaaatatttatcttccccaccaggtgttgtgtagtacacaaatacgtgatacctcataatgagtagcaatg

SEQ ID NO: 44537 - DNA, 201 bp, Homo sapiens
aggcggaggttacagtgagccaagatcacaccattgcactccaacatgagtgacaagagcgaaactccatgtcaaaaaaaaaaatctatgtaagactatcraaggattcctttacataatgagctcccctagtccctagatatttgatatataggcatagctcattttattgcactttgcagatacgtgtttttcacgaat

SEQ ID NO: 44538 - DNA, 201 bp, Homo sapiens
aaatacaaaaattagccgggtgtggtggcaggcgcctataatcccagctactcgggaggctgaggcaggagaatcacttgaacccaggaggtgcaggttgkggtgagcctcgcgacagagtgagactccatctcaaaaaaaaaaaagaggaagaatcagttgattcagaaacttcattgttgtctttatgaaattgcaaca

SEQ ID NO: 44539 - DNA, 201 bp, Homo sapiens; identical to SEQ ID NO: 7874

SEQ ID NO: 44540 - DNA, 201 bp, Homo sapiens
cacccgcctcgacctcccaaagtgctgggatttacaggcgtgagccaccatgcccggccagatgactttcatatacaggtgttagaaatgaaaattggtaygaccactttagaaaacaattttagaaaacaaccagtttagacagtttgacattacctagtaaatttgaacgtgcacttaccttaagacctgatgattcca

SEQ ID NO: 44541 - DNA, 201 bp, Homo sapiens
caggtgactaggtatcttgaggccccagggtatataaaagcaccttgaggagagggaccatatcttaccctctgaattttagtgtctgctacacccaaaayttggcctataagatgttccaaagttatgacaaggatgagcctatctcttccatcatctctatcccctggtatactgcctggcacgtggatggtgctcaaa

SEQ ID NO: 44542 - DNA, 201 bp, Homo sapiens
atgagacctcctgccaggaatccccattaatcaaagtctgggaacaaaagcagaccagtcagttcccaggagcgctcacatgtcttgcaggctggcttggrctttctgtttctttcggggtcattgctctgactacccacaaatataacttaaaatctcatctcaatgtgactttctggtgatgttttaaaagcctatcag

SEQ ID NO: 44543 - DNA, 201 bp, Homo sapiens
ggaagactacaagaaatggtatatatgactagatgctgcttttccacaataataggggatctttgaaatcctaggaaactgtcttgttttctaaattgtgycttttaaacactttacctgcaagtcttgtcttcctaagtgtagtattagcaaataacagtggatatgtttttttctctctctctctctgtgtatctgtgt

SEQ ID NO: 44544 - DNA, 201 bp, Homo sapiens
agtgagcctagatggtgccattgcactccagcctgggtgacagagtgagacttcgtctcaaaaaaaaattttaagcaagaaagaaaaaaaaatcagattcrtgataagcttgtcccaaaacctcaggtaagattgatagtccattttagggtgctgcttgcctcctcttccatctctccgcctttggagagcagatacctg

SEQ ID NO: 44545 - DNA, 201 bp, Homo sapiens
tgtttatttcattttacctttacaaccacctgcaagttataggtattatctctgttttttttaggtgaggaaactgaggctcagaaagtttctgacttgcscacattctcttgtgtagtaattgtggcatcaggatttggagtccatgctgttgaccccagtgtacatgttcatatgcaattccatgggcccccaagaaag

SEQ ID NO: 44546 - DNA, 201 bp, Homo sapiens; identical to SEQ ID NO: 7878

SEQ ID NO: 44547 - DNA, 201 bp, Homo sapiens
acgctgtagccattccctgggaactggcctacctcttaaccattgtctgaaaaactgctgtgtttggttcacagctttcaaagaactggcttttcttccartgatggaggtttggggagaaggaggattattaagaatgcttttgttgccatctttcaagtggagcaacttgtaattagcatttgacagtctttaaaatca

SEQ ID NO: 44548 - DNA, 201 bp, Homo sapiens; identical to SEQ ID NO: 7882

SEQ ID NO: 44549 - DNA, 201 bp, Homo sapiens
tacctgctttaaaaaaacaaaaaaacttaggttttcttggagtctgtgctagttgaatcttgcaaatgcaaaccacatacgctctttaatgaaaacctttscatgcacaccactgttaggaagagcatcattaaatcactgacttctacacccataaaaggatgattttgagtttcaagattttagatttactagagatag

SEQ ID NO: 44550 - DNA, 201 bp, Homo sapiens
gatatttgatatataggcatagctcattttattgcactttgcagatacgtgtttttcacgaattgaaggcttgtggtaattctgtgttgagcgtctatcartaccatttttccaacaacatgtgctctctctgtgtctctatgtcacactttggtaattctcacaatatttcacactttttctttattattatgaaaaatt

SEQ ID NO: 44551 - DNA, 201 bp, Homo sapiens
agaatgctgctctctgcttactgaaggtactcctgatctttacaggtgctcctttgcctccagccatcacgaatgagagagagagagagagagaaaatgaktgtgtgtgtgtgtgtgtgtgtgtgtgtgtgtgtgtgtgtgaatgaatgcttctccatgaccagtgtactcccctgagagcaaccctctctgcctgtcttc

SEQ ID NO: 44552 - DNA, 201 bp, Homo sapiens
aaagggaagcagtgggtttgtggccacatgcttgccccaaggccctgggcttttctgctgtaaacaaagggcagctgcctcttcacacttctctgctgctyggtgctgtcccatctgttgggaaagggggtctctggagcctccagtgctgccctgcaaacccaaatccggctgcctgttgtcaggaaccatctagacaac

SEQ ID NO: 44553 - DNA, 201 bp, Homo sapiens
gaatgctgctctctgcttactgaaggtactcctgatctttacaggtgctcctttgcctccagccatcacgaatgagagagagagagagagagaaaatgagtgtgtgtgtgtgtgtgtgtgtgtgtgtgtgtgtgtgtgtgaatgaatgcttctccatgaccagtgtactcccctgagagcaaccctctctgcctgtcttcc

SEQ ID NO: 44554 - DNA, 201 bp, Homo sapiens
gtcattgaaacctaactggcttctcccagcacccactacgtaggctaccctctccccagtcctgcaggaaaggccccttgcccacaaatgcacaggggccrgaatttttcattgttggaaattctccccaccttgtgtagatactgtctccatctaatcatcactcctttgttctgctgtttggaacccccagaataaatc

SEQ ID NO: 44555 - DNA, 201 bp, Homo sapiens
cagctactcatgaggctgaggcaggaggatggcttgagcccagaaggtagaggttacaaacgtgagctgtggttgtgctgacagagtgagacaatgtctcaaaaaaaaaaaaaaaaaaaagaaaagaaaaaaggcaagaatagtattatataatggactttacatgccaatccctcccaagttactttgtggcaaatccca

SEQ ID NO: 44556 - DNA, 201 bp, Homo sapiens
atgagctgagattgcaccactgcactccagcctgggcgacagagtgagactctgtctcaaaaaaaaaaaaaaagaggaaaaatacttaattaaaaaaaaawtttttttaaaagaaatgagacatacatagaaggaatatgaggtgaagagacatagagaagatggccatttacaagctaagaagaggggcctgaaaagatg

SEQ ID NO: 44557 - DNA, 201 bp, Homo sapiens
ctgaggcaggaggatggcttgagcccagaaggtagaggttacaaacgtgagctgtggttgtgctgacagagtgagacaatgtctcaaaaaaaaaaaaaaaraaaagaaaagaaaaaaggcaagaatagtattatataatggactttacatgccaatccctcccaagttactttgtggcaaatcccagacagcatgtcattt

SEQ ID NO: 44558 - DNA, 201 bp, Homo sapiens
gtgattaggccatgagagctctgcacttgtaaattgattaatgctgttattgcaggagtgagttcattataaaagagcaagtttgcctccccacccccaahcccccaccaccccacaccctcccttgcccttctgtccatagctatgtgatgatacaacaagaaggcccttgcaagatgatagcttctcaatctttgatgt

SEQ ID NO: 44559 - DNA, 201 bp, Homo sapiens
atgagagctctgcacttgtaaattgattaatgctgttattgcaggagtgagttcattataaaagagcaagtttgcctccccacccccaaccccccaccacyccacaccctcccttgcccttctgtccatagctatgtgatgatacaacaagaaggcccttgcaagatgatagcttctcaatctttgatgtcccagcctcca

SEQ ID NO: 44560 - DNA, 201 bp, Homo sapiens
aacagtgtgttttgtgtgagtgatacagatagattcttttattcgacaaatatcagatgtcattgaagcccttattgtttattggtactgtggtgaggtgygggggatacaaagatgagtgacatgggccctgccctggagatgctcagatgatagcggggagacaggtgcaaaaggctgttgtgacacagtggtgactgc

SEQ ID NO: 44561 - DNA, 201 bp, Homo sapiens
gacctagtaattctgctgttaggtatatatggtatatatatatgtgtctgtatattcaccaagagacatgcatataagaatattgatagcagcaccactatttttttttaatacacagaatgtaagattacctaaaatctcttcaacagaagaatggataaatgagctataatatagtcacataatagaactctatacagc

SEQ ID NO: 44562 - DNA, 201 bp, Homo sapiens
ccactttctgcattttgttcttgaacctgcacttctcactgctttttcctaaacagatatatttttgtggcattttatgtccttgaaatgatcaattaatrtatactcattcctgtgaggtgtagtaaacatctttaagccaggtgaagaggttcgtaacatgaaaccagtccatgcctctttcagagattcacaacaggc

SEQ ID NO: 44563 - DNA, 201 bp, Homo sapiens
tatgataataatgagactatcctgagagagatgtttattttaagactgtttaaaactctcaggaataaatatccctggggctgattctgggcattaaaaayacaattcaaggtgagtttcatttctcttcctgcggccttcacattaggaacctctttttacaaagatgtggcagaattttgattttaaataattcataat

SEQ ID NO: 44564 - DNA, 201 bp, Homo sapiens
cccatcctttgctgcagctgcttctatttctatataactctgggctgtaacccctccaccacaccctctgcaccctccctatagtgctgccccttccaatrtctctttcatcctgcaggcagcagggttcttggcttggactcacacagttctttcagccagaaccagaggtaatctgcagaagctataatatctcactga

SEQ ID NO: 44565 - DNA, 201 bp, Homo sapiens
agtcaatgctatatttgtaaaacatccagtagagaggttgggtctcctgatgaacaaaggaaagtttgcagtgttaagtgtcatacagatttgtcattgcwctctattctctccactcccacatgaactaccatggggcaaatctaagccacctcttggttttggtctcagaacaatgagtgtctgtttctaagttagggg

SEQ ID NO: 44566 - DNA, 201 bp, Homo sapiens
agtctctgtcacaatcctttaagcagtgttttgcatactcacaaagaccattaataggaacctggttttcactgtgaagttatcagcaatcaagcttgtcytggtggggaaacctcaacattgcatgcagctgctgcctaattacagaagtggcttgaactcctgcagccaatcttttttgcctatccacaccatccttgc

SEQ ID NO: 44567 - DNA, 201 bp, Homo sapiens; identical to SEQ ID NO: 7869

SEQ ID NO: 44568 - DNA, 201 bp, Homo sapiens
tttctaactgcctattgcattgtgttaaattacaaactaattccccagatgatgggataagttatttttttctctgccaagtcacaatattaataatgcarctaaatttagctctgctgtaaaagagtttaattttcaaagccaattagacaatttgatggctgacttgctgcatttgtctctaactactcagttgatacc

SEQ ID NO: 44569 - DNA, 201 bp, Homo sapiens
tggcaggactctagtttcttgtaaaaaatccattagtactgttctctataatctttagaaatgttttgtatcatttccctccaaatcatcttgtgatcttsgttggaattttgaagtagtgttgaatctatacattaatatgtgagaaagacatttttacattatttcttcttcccatcaagaaacactcaggccaggtgc

SEQ ID NO: 44570 - DNA, 201 bp, Homo sapiens
ctacttaatctctgtggcccactgttacttcactatagtggggataaatgaccttgaacaagttaccgaatgtatcttctttttttttgagacagagtctygctctgtctcccaggctggagtgcagtggtgtgatctcagttggctgcaacctctgcctcccgggttcaggtgattctcctgcctcagcctcctgagtag

SEQ ID NO: 44571 - DNA, 201 bp, Homo sapiens
gggatatatctagggaaattgatttcaaaaactgtttattaatagggactttagaaattctatttaagggctgggcgcggtggctcacgcctgtaatcccrgcactttgggaggttgaggtgggcggatcacctgagatcaggagtttgagaccagcctggccaacacagtgaaaacccatctctactaaaaataaaaaaa

SEQ ID NO: 44572 - DNA, 201 bp, Homo sapiens
agatgtggtggaaatagtaagagaactacagttagaagtgcagcctgaagatgcaactgaattgctgcaatctcatgataaaacttgaaaggctgaggagwtgctttttatggatgagcaaagaaagtggtttcttgaggtagacttgtgaaagttgcagataccagatgaaatcactttttgtcagacccaaacaaacta

SEQ ID NO: 44573 - DNA, 201 bp, Homo sapiens
gttgggaagtgcctccaacaattcctttttttttgagatggagtctcactctgtcgcctagttaggagtgctgtagcgcagtcttggctcactgcaacctytgcctcccaggttcaagctattctcctgcctcggcctgccgagtagctgagactacaggtgcacgccacccagctaatttttgtattttttatttattta

SEQ ID NO: 44574 - DNA, 201 bp, Homo sapiens
tgccattgtaataatattaagaggtgagatgtgggaccagtaagaggtgattaggccatgagagctctgcacttgtaaattgattaatgctgttattgcakgagtgagttcattataaaagagcaagtttgcctccccacccccaaccccccaccaccccacaccctcccttgcccttctgtccatagctatgtgatgata

SEQ ID NO: 44575 - DNA, 201 bp, Homo sapiens
tgttttttgttttttttgagacaaagtctcgcttgtcgcccaggctggagtgcaatggcgcaatctcagctcactgcaacctctgcctcccaggttcaagygattctcctgcctcagcctctgagtagctgggattacagacgcctgccaccacacctggctaatttttgtatttttagtagagacggggtttcaccatgt

SEQ ID NO: 44576 - DNA, 201 bp, Homo sapiens
gctcctcccacctcatcctcccaaaatgctggcatgagccattgtgcccagctgccaattgtattttttaaaaatctttttccttgttctatggcaccagkgacaaccacataaatcttaaatggtaaagaaaaaaatctagaaataaggacctatgtaggcctgggtcgggggggtaagggatgtgccccagactttctc

SEQ ID NO: 44577 - DNA, 201 bp, Homo sapiens; identical to SEQ ID NO: 7887

SEQ ID NO: 44578 - DNA, 201 bp, Homo sapiens
agctaagattgttgattgatgaagatggctacactgacgaatagattttcaatgtggatgaaacagccttctactggaaggagagtccatttaggactttstttttctttctttttcttttgaggtggagttttactcttgttgcccaggctggagagcaatggtgtgatgtcgggtcactgcaacctctgcctcctggtt

SEQ ID NO: 44579 - DNA, 201 bp, Homo sapiens
ttaagtgataaggttgattggtttgatgtggttataaaagtaatacagtgcttatagaaaaatttggaagacacaaaaaaataggatgacacatacaaatygtcctgtaactcctgttaataaattctgtgagcattaggatgtatttccttcctgtcttttcttaatattttattttcttgttttatagtctgcaaccat

SEQ ID NO: 44580 - DNA, 201 bp, Homo sapiens
atccaaagtcctgtgtgagggacctgttctggaggctgctctgtgggtgctttggtcatggtggaggggatggaatgagagaggaacattcttaagtagckgtaactgaaaagcaaaaaaatagaagggtgtttctgcttggccaatgttttctcaccactgtagtatttttctatctttaaccaaacaaaaaggaaaatt

SEQ ID NO: 44581 - DNA, 201 bp, Homo sapiens
gtatgaaaaaacaacatcagaagctattcgatatttaagtgaggggggaaatgttataatactaaatctagaagggaaaccaaagtattgattgtaacctrctcagatgtcataaatctacagcagagctgcctgagccccacagagtaaatgacattcattaaggctgaatgtattgttgcactaggatcagggaggcaa

SEQ ID NO: 44582 - DNA, 201 bp, Homo sapiens
tatatataatgcatttctttgaagactgagtttgaaaatcattgtgtaagttaacgcctgtgtgtgtgtgcacgtgcacacacttatgtgttttccttcarttagactgaagtcttctggggacctgagcctaaataatttcaggtggatcacttgagatcaggagttcgagaccaccctggccaacatggcaaaaccctt

SEQ ID NO: 44583 - DNA, 201 bp, Homo sapiens
ggctggggtgcagtggtgctatcttggctcactgcaagctccacctcccgggttcacgccattctcctgcctcagcctcctgagtagctgggactacaggygcccgccatgatgcctggctaattttttttttatttttagtagagataaggtttcaccgtgttagccaggggtggtctcgatctcctgacctcgtgatcc

SEQ ID NO: 44584 - DNA, 201 bp, Homo sapiens
ggaagaagaattgtcttgggccacacataaaatatgctaacactaatgatagttgatgagctaaaaaaaaaaaaaaaaaaaaaaaagtccgtgcataattytcatggtatctgtcaccacagataagcaaaaaactcccctcattcaaagggttggacacctgcggatagcccttttctagctaaccttttgtatttccct

SEQ ID NO: 44585 - DNA, 201 bp, Homo sapiens
attggcttctttcacttagttatatgcgtttaaggttcttccatgtcttttcatggcttgatagttcatttccttttaggactgaaaaatcttccgttgtrtggatatactacagttttggaagcattcacctactgaaggacatcttggttgcttcccaattttggtaattatgagtaaagctgctataaacattcatgt

SEQ ID NO: 44586 - DNA, 201 bp, Homo sapiens
ttcattttttttcatctcaaccacttttctcatgtaagtcagtaatttttctttatgaaggtcttatgggtgcacatctagagtcttcgcatggtggtgawgctgacattcccatggtcagctatttcttctatatgtaactctgtttacattcttttcatattttacttccagtgttaatcacttttcatttctttgcta

SEQ ID NO: 44587 - DNA, 201 bp, Homo sapiens
gatataatctgcaaatgttttattgactgggagctcaatatgcccaggtactttacttaaaaaaaaataagcgatttcccaataatgggattgtacttgtrtaaaacatttccgaattattttcatgtatatgttgcttgtccccagaggcttgtaagatatatatggtttcccttgagaggaaatgaggtcacagaagga

SEQ ID NO: 44588 - DNA, 201 bp, Homo sapiens
tgtccctttagatgtttttgttgtcttctgaggtttgtttgtttgagagggagtcttactctgtcacccaggctgatgagcagtggtgcgatctcagctcrctggaacctctgcttcctgggttcaagcgattctcttgcctcagcctcccgagtagctggaattacaggtgtgtgccatgatgctcatctaatttttttt

SEQ ID NO: 44589 - DNA, 201 bp, Homo sapiens
aagcgggaagcagccatgtccaccagaggtccgccggagcctcagcgcgcaggagcggaagtggggttcgaccaaggggtgtggcgagcccggtttcctargagacggcccgcgggttgctctcggactgagagcgcgaggcttcgggactgagccctagctgctgcgctggccgaagttttctcgtcggtaaaataggat

SEQ ID NO: 44590 - DNA, 201 bp, Homo sapiens
gtagtgctgtaaaatgaagaagccaaagagaaaaggagctctcgaagccactgagctgcccacttgggcctctgctcagatgccagtgcaggtggtcttaytggcgaattccctgaggccctcttagtagttgtcttctttttcttttctttcttttaagttataatgacttaggtttcagaaaataaattaagccaggaa

SEQ ID NO: 44591 - DNA, 201 bp, Homo sapiens
caagtgtactgtagaagctgatggaattcttaatacccagttaagttgcctgaaatattttggtccttctttttggtggatctttatagaaggaagcccarccctagcaattactgagttacctcaaaaggaattcttggccgggcacagtggctcatggctaaaatcctagcactttgggaggctgaggtgggtggatca

SEQ ID NO: 44592 - DNA, 201 bp, Homo sapiens
tttctcttgattttcccttccttagcttctcccttcctttcctcccgccccttacctcctcacctctcatttatgggtctgtttatttttcaccttaagartaatgattgttgcctgggacttgtcttataaattcagttctttctaatgaggcactaaagctgtctcctggcttttgggttttcctgagaactgttaatt

SEQ ID NO: 44593 - DNA, 201 bp, Homo sapiens
actgagttacctcaaaaggaattcttggccgggcacagtggctcatggctaaaatcctagcactttgggaggctgaggtgggtggatcacttaaggtcagragttcaaaaccagcctggccaacatggtgaaaccccacctctactaaaaatacaaaaaaactagcggggcatggtggtgggcacctgtaatctcagctac

SEQ ID NO: 44594 - DNA, 201 bp, Homo sapiens
tcaccttaagaataatgattgttgcctgggacttgtcttataaattcagttctttctaatgaggcactaaagctgtctcctggcttttgggttttcctgaraactgttaattacctttgcactttcctatacccagctcaaaagtaaattgcagagggaagagaggaggatgcacctgtttataaaaatgtggtagttgag

SEQ ID NO: 44595 - DNA, 201 bp, Homo sapiens
tatattccaagatgtctgctaaacttaaaaaaaaaaattcactgatcaataaaaagggttaggatctgtcctcaccatgattttgttctcacctcttcggkggcacttttgtttcttctgaattcttctcttgcccaatctttcaggtatttgcgatcagaatcatttggaacttgccgaattgtttgcaaaatccttctg

SEQ ID NO: 44596 - DNA, 201 bp, Homo sapiens
taatctcagctacttgggaggctgaggcaggagaatttcttgaacctgggaggcataggttgcagtgagttgagatcatgccactgcactctagcctgggygacagagtgaaactccgtctcaaaaaaaaaaaaaaaaaaggctgggtgcagtgcctcacgcctgtaatcccaacacttcgggaggccgaggcaggcagat

SEQ ID NO: 44597 - DNA, 201 bp, Homo sapiens
aggatgcacctgtttataaaaatgtggtagttgagcaaaatgcttaatggaaaatattaacagcataacctcatataatcaactcaatcttgtctagagtwtgtttactgcagttgtagctgtcaaatgtttcatgttatatatagacccctaccgtgatgcctttcatatcactcttatttgttgccactgttttcattc

SEQ ID NO: 44598 - DNA, 201 bp, Homo sapiens
acctgaagtcctcctagtcccccttatctgcagagacacttgatcccagcaaagctcagtgctgaagccaaatactgtgtcatgctgcgtgctgagtaagkccaagagaccaaatgaggatttgggcagcgcttgggaactataaagaagaggtgaaggtttaagagacagaggaaggagtagatgttgggaagggcttgg

SEQ ID NO: 44599 - DNA, 201 bp, Homo sapiens
tgaggcaggagaatttcttgaacctgggaggcataggttgcagtgagttgagatcatgccactgcactctagcctgggcgacagagtgaaactccgtctcaaaaaaaaaaaaaaaaaaggctgggtgcagtgcctcacgcctgtaatcccaacacttcgggaggccgaggcaggcagatcatgaggtcaagagatcaagac

SEQ ID NO: 44600 - DNA, 201 bp, Homo sapiens
aggcagtctgacttcaaagcttatatttttagtctctaggccttactgtctcaaatcaggatgatttggtggtttagtgaatgtgggatagggggaagggsaagaagagaaatgggggaggaatgttccagattagggaaatagatagctagatgaaagatggagcccctcatcaaggtgaggacacaggaaaaggaacag

SEQ ID NO: 44601 - DNA, 201 bp, Homo sapiens
aggcaggagaatcgcttgaacccaggaggcagaggctgcagtgagctgagattgcgccactgcactccagcctgggtgagacagagcgagactctgtctcaaaaaaaaaaaaaaaaaaaaaaaaggtgttccaggaatggctaagcaccacacctttccttctcacttttcaggtgcattctgttgggacgggtcttgtcc

SEQ ID NO: 44602 - DNA, 201 bp, Homo sapiens
ttcaactaggtcagataatttctttatggcttgcttttacgcagaaaggggaggaggggaaggttagagtaatatttttaagttttatggctggctttgasggtagcagattctggtttctatgacctgccttgggggaagagggattctagtttctatggttagcctctggggaggaattgaggggccagagataggagg

SEQ ID NO: 44603 - DNA, 201 bp, Homo sapiens
aaatgggcccaagaataagcagaaaacttagtctaattagcataggaaatattggaaacacgattagagatgcaagttttagaaagtactagggccggccrgatgtgatggctcacgcctgtaatcccagcactttgggaggccaaggcgggtggatcacttgaggccaggggtttgagaccagcctggccaatatggtga

SEQ ID NO: 44604 - DNA, 201 bp, Homo sapiens
gtttgcacgttgctgcgcgctataatcacttgtccatcattaggctcctcctcactgctttctgttctgtccatgaaaagaaccaggtcagtgcatgtatyctcttcatggctgccagcacccttcccacaaggctaccggacaggtctgttagtgcaaacgggagcagaggctgctgggaagctgccatgtcacctacct

SEQ ID NO: 44605 - DNA, 201 bp, Homo sapiens
gcaggagaatcatttgaacccgggaggtagaggttgcagtgagctgagatcatgctactgcactctagcctggtccacaaagcaagactgtcttgggggaraaaaaaagaaaatgtagtctgggctgccacctgtgaggagtgtgtgggccattaactgatgtcttaccactcagggacaagtgtactgtagaagctgatg

SEQ ID NO: 44606 - DNA, 201 bp, Homo sapiens
ctgcaggcagctttttgtctccagttctttattgtctttgtgggaacagggttctgcctgttgtgcttactgagcatcctgcccctgagtttttcttcatrccctttttttgctcccagtgattgcttccttatgagctcccctactacatagctccatataggatattggggtccaactgaagtgggatactccttgaac

SEQ ID NO: 44607 - DNA, 201 bp, Homo sapiens
gccttggtctacctggagaatccaggaaggaggctgagcaccagtctgacacctgctgggaacaaaaacacctccacttcctttcagggtttcttttaagyggattacctttggctgggctcccttgtcatcctcactggcgggagatcattatcttaacgggaattcttctcctggaagattcccactcccaactgggaa

SEQ ID NO: 44608 - DNA, 201 bp, Homo sapiens
ctacctcctgcagccactgacccagcggccacattctttttttaaccactgcaagggttctctttgaataaggggtctgggaaggtggatgagaagaaaaycagcctgaacctaactgataacaggaataatagtttaggatgctgaaggggggaggtcggtggtggcagtgctgaggacagtgatctgtcctcagtgtcc

SEQ ID NO: 44609 - DNA, 201 bp, Homo sapiens
aaattagcaaggcatagtggtgcatgtctgtaattccagctacttgggaggctaaggcaggagaatcgcttgaactctggaggcagaggtggcagtgagcygagatcacaccactgcactccactctaggtgacagaacaagactgtctcaaaaaataaaggccacacattgaggatacttgtttgttttatttccaaatc

SEQ ID NO: 44610 - DNA, 201 bp, Homo sapiens
cctcccaggttcaagtgattctcctgcctcagcctctgagtagctgggattacagacgcctgccaccacacctggctaatttttgtatttttagtagagayggggtttcaccatgttggccaggctggtctcgaactcctgaccccaggcaatccggctgtcttggcctcccaaagtgctgggattacaggcgtgagcacc

SEQ ID NO: 44611 - DNA, 201 bp, Homo sapiens
gctatggtgcgatcttggcccactgcaacctccgcctcctgggttcaagcaattctcctgcctcagcctcccgagtagctgggattacaggtgcccgccascatgcccagctaatttctttgtatttttagtagagatggggcttcaccatgtctggcaggctgttcttgaactcctgacctcaggtgatctgcccgcctt

SEQ ID NO: 44612 - DNA, 201 bp, Homo sapiens
aatcacctgaggtcaggagtttgagaccagcctgaccaacatggtgaaactctgtctctactaaaaatacaaaattaactgggcatgctggtgcatgtctrtaatccaagctacttgggaggctgaggcaggagaatcccttgaatctgggaggtggaggttgcagtgagtcaagatcgtgccattgcactccagcctggg

SEQ ID NO: 44613 - DNA, 201 bp, Homo sapiens
ttaccgtcttccttagaaatgtgcacaatttccagcagtcattggatttgaaaattagattgtcttggtatttattgacacctatgtggtacattgtttcrcttttctttgttggagtgcataaatcttaactaaaaaaaaaaaaattagattgtggtgtagattaaaaataccatggaatggtggtttctgaccctggct

SEQ ID NO: 44614 - DNA, 201 bp, Homo sapiens
tgccccagtttcctctgtttaaaatgggaataggctaggtgtggtggctgacacccataatcccagtgctttgggaggtcaaggtgggaggattgcttgargccaagaatccaagaccagcctgggcaacatggtgagaccccatctctacaaaaaattttttaaaattagccaggtgtggtagcacatacctgtggtccc

SEQ ID NO: 44615 - DNA, 201 bp, Homo sapiens
catgccaatcagccacagatcctttgtggtcaaagaactccggttgccactctggccttgctgtccgttatgacatttacatccatccttgcctctggttrattgttaccacctggcctctgctattttggaatcctaccatcccccattaattaaaaagctcaataccgtggcagtgtctcttactgtcaactccagcca

SEQ ID NO: 44616 - DNA, 201 bp, Homo sapiens
atttttctcttaaaaaaaaatttgagatcatacaccatcattgtttcttaattagggggtggtcatggacctttttaaaaatctgaaaaaatccaaattamgaattcttttttggctgggcacggtggctcatacctgtaatcccagcagtttgggaggccgaggcgggcggatcatgaggtcaggagtttgagaccatcc

SEQ ID NO: 44617 - DNA, 201 bp, Homo sapiens
cttcaagaatatcttactatgaaaaaatttcagcagaattaaacaggcttagtaatgcagtgaaatttatttatttagataaaagctaatctgttaaggtyaagactctatcatgtgttaagtggaaggtgatcataaacaatagttactacatgttgaagtatggtgggaagtatggttatctagggggaaattccatca

SEQ ID NO: 44618 - DNA, 201 bp, Homo sapiens
agaatccagctcagacccaggtaagctgctttggaaggcagagaaccgccggtacctgctttaacgttagcgtcgctgggggtaagcgggaagcagccatrtccaccagaggtccgccggagcctcagcgcgcaggagcggaagtggggttcgaccaaggggtgtggcgagcccggtttcctaggagacggcccgcgggtt

SEQ ID NO: 44619 - DNA, 201 bp, Homo sapiens
tttttagtagagacggggtttcaccatgttggccgggctgctcttgaactcctgacgtcaagcgatccgccctccttggcctcccaaagtgctgagattayaggcgtaagccaccacccccagcctaaatttatacaatttaaatttgtcagttatacctcaacgaagctggacaaaacaaaacaaaaacccacttcccat

SEQ ID NO: 44620 - DNA, 201 bp, Homo sapiens
gctcttccctccctggaactcctgccttcccgcccccaccccactcaattcattgcacttaatgatatttctttgtttaaaatagtaagctaagcaaataygagctatgttcattaaatgacttctatttaaaagcaacacattaggccgggcacggtggctcacgcctgtaatcccagcactgtgggaagccaagtggat

SEQ ID NO: 44621 - DNA, 201 bp, Homo sapiens
tagatgaggaggaagagtctcatagccttgtgccctacccatttagatttgcactcttcctggtctcaggcatctgacaccaacagccagagcataaagaragaagggattaaatctagtgtcccgaagccctacctcaatcctcctgagacccagcctccagcatgtcaggtgcggggactggggattgctccaggtcac

SEQ ID NO: 44622 - DNA, 201 bp, Homo sapiens
gggaggtggaggttgcagtgagctgagatcgtgccattgcattccagcttgggcaacaagagcgaaactcttgtctcaaaaaaaaaagaaaaagaaaaatwgattatttaaggaatcctaatgacttcttacatattaacctaatgtttttaaattttcaaacaatcttaaaacacaaaacttcacaattaagtgcaattc

SEQ ID NO: 44623 - DNA, 201 bp, Homo sapiens
tttaatttattgagacagagtctcacactgttgcccagactggagtgcagtggtgcaatcttggctcactgcaagctcttcctctcgggttcacatcattstcctgcctcagcctcctgagcagctgggaccacaggtgcccaccaccacgcctggtaatttttttgtattttttttagtagagacggggtttcaccgtgt

SEQ ID NO: 44624 - DNA, 201 bp, Homo sapiens
cattcagctcattataatttattgcattcagtaaattgcatttatcaaacaccagccctttgctgcatgctgtctaggacactttttgtttatttcatttyacctttacaaccacctgcaagttataggtattatctctgttttttttaggtgaggaaactgaggctcagaaagtttctgacttgcccacattctcttgtg

SEQ ID NO: 44625 - DNA, 201 bp, Homo sapiens
atttttacatttgtggacccttattactcttgcctgagggtaggaaccaactcatccatttctaggtcccctcagcatactcaaactgcatggcctacagyctgtgctcagtgtgacattctcttctggttcttttcctcgtcaatattctcatctctcctattgtaaaacaacagctaccccaaactctctctttacccc

SEQ ID NO: 44626 - DNA, 201 bp, Homo sapiens
aggagaatcgcttgaacttgggaggtggaggttgcctggattgcaccactgcactccagcctgggtgatggagtgagactctgtctcaaaaacaacaacamcaaaaaaaaaaaaaaaaaaaaagaggagatctaggcaggaagttaattgctggagttactagcacctggaaggtcattgaagccacgagactggatggga

SEQ ID NO: 44627 - DNA, 201 bp, Homo sapiens
tgtatttttagtagagatgaggttttaccatgttggccaggctggtctcaaactcctgacctcaggtgatccgcctgcctcagcctcccaaggtgctggasttacagatgtgagccaccgcggccggccaagaatgaatattttgaagtgttttttcttttttcctctgaaacttcagtgtcctatattcaatatgtgaat

SEQ ID NO: 44628 - DNA, 201 bp, Homo sapiens
ttcatacggctgcagaaatgaatcaacattcaacccagacttttgtgaatagagtatgagaaatgatgttattgaatctttacatccctggaagcttgtcyaataaattgagtagttgtcacactgagttttgtacaattcatatcataaaaatataactattatatttatgttctactgtactccacaagctcattagag

SEQ ID NO: 44629 - DNA, 201 bp, Homo sapiens
ctgtaatcccaacactttgggaggtggaggtgggcagatcacttgaggccaggagttcaagtccagcctggccaacatggtgacaccttactaaaaatataaaaaaaaaattaggcatggtggcaagtgtctgtaatcccagctactctggaggctgaggcagaagaatcgcttgaacctgggaggcagaggttgcagtga

SEQ ID NO: 44630 - DNA, 201 bp, Homo sapiens
tgagccaccgcggccggccaagaatgaatattttgaagtgttttttcttttttcctctgaaacttcagtgtcctatattcaatatgtgaattgtgaaataygtgatgcgcttaccacagggtagaggatatatgtctttgtcatgctgtgggcttattttttttataagtcctttactaactggccagcgattatttaaaa

SEQ ID NO: 44631 - DNA, 201 bp, Homo sapiens
agtttggtacagtggaaagaatactaaacaaagtgttttgagacgtgggctctatctctagctacctaggtggccttaggtgaatgtcttctggacctcagtgatggactgtatcaatggttctcaactcaggggcccttggaaatgttgagtgggaacatgtcaggttgccacactgtatgggggcactaatggtttggg

SEQ ID NO: 44632 - DNA, 201 bp, Homo sapiens
aactctgacgaggcagaaggggatttggtctggaaaaaagattcctggggtgtctaaattttttggtaggttggcatgattaaattactccttatttgatwgtgaagtgctgttaaatgaaagtcacacaggaaagcttctctctggattgtctttttgtagaaagcaaaggtgagttattactaatcctcaccagaaatt

SEQ ID NO: 44633 - DNA, 201 bp, Homo sapiens
taatctttcttttgttatggggcctcagccatgaacctagcatgggtaaggaaagatgcttttcctccctataagggcatttctggagagagcgccggggytgggagacagagccctgtttgggaagagagaagggagcagcctggcctgagcgcggattttgtgaaaggcatgacaggagatactgctggaaagcatgta

SEQ ID NO: 44634 - DNA, 201 bp, Homo sapiens
cctgtttgggaagagagaagggagcagcctggcctgagcgcggattttgtgaaaggcatgacaggagatactgctggaaagcatgtagctgacctggtgcytttgtgatggtttgagtaattccttgtttgtagaggatcatttggtagttcattgtgctgcctcttaggtaatggctcttaacaccgggtgacccagcaa

SEQ ID NO: 44635 - DNA, 201 bp, Homo sapiens
aggtcctctaatgccccatgcccagcatctatagtgagcaggtcctactgatgactgaggcgtccttgggatgagctgaccggaaaggtcacatgggtatygcttcttcacaaagaagctgtatttcctttataaatcccctgccttagccacgttggctaaataaataaataaatctgaggcttctttctaaagtgtcct

SEQ ID NO: 44636 - DNA, 201 bp, Homo sapiens
attactggtttggggcctggtcttggaacctttggtgacagataagaagccaaggccgggcacggtggctcacgcctgtaatcccagcactttgggaggcygaggtgggcggatcacaaggtcaggagatcgagaccatcctggctaacacagtgaaaccccacctctactaaaaatacaaaaaattagccgggcgtggtg

SEQ ID NO: 44637 - DNA, 201 bp, Homo sapiens
tcctgaagtgttgggattacaggagtgagccaccgcacctggcttggtgttttggaattcaaaggagagttttgttaatagttccttgagatttacatatrccttggaagaaactgaactttttgaaattgggataagcagtttcaggtatcatatatgcctttcacataaaggcacatatgatataagagtacattagtt

SEQ ID NO: 44638 - DNA, 201 bp, Homo sapiens
agaaaacaccttcctagacactctgagtcaatccccatagttttaggatgtgggggtcatgctccatttcccaggtaaggaatttgagcatttgaaaaggmtggcttttagttagtaagttgcagagccaggacttggaaccaaggttttatgacaaataggactcttctgcctgttcagactccaaattaaatgttctta

SEQ ID NO: 44639 - DNA, 201 bp, Homo sapiens; identical to SEQ ID NO: 7892

SEQ ID NO: 44640 - DNA, 201 bp, Homo sapiens
aaaatactttgagaacatgtggctacctaggtaagggggaaggtaagagaactaaacattaaattaaaatataaaattcttgctatgtttaaggcactacmtatgacaatctgggatataatgatgtataaatcttatatatctgctaggtctgtaatatataattatagtacttaattcaaacatcagtctgtgcagata

SEQ ID NO: 44641 - DNA, 201 bp, Homo sapiens
agaatgggtgacttgaaaaaggctaacaagttaaatctcagttgcattagcctgcccttccaggaagtggctagttttactttttttagcccaccattggyagggattgtaaccacagctattgcccatgtggggcaggaagtcatctgataggaattgagtactgtgcatgtgtccagcattgtgtgttaagaaaacacc

SEQ ID NO: 44642 - DNA, 201 bp, Homo sapiens
gagcccagagtggcacgaggaacctgaaggtccattcggcccagaagtttcatttgcagaaaaggctagaagctgattgatattccaggtcaggagcaagygcaccaacagcgccaaaaccctgcttatgtgagaggcccctgactgctgctgggaatctacatgcgattactgtcccatagtttttttgtattcaaaaaa

SEQ ID NO: 44643 - DNA, 201 bp, Homo sapiens
tttaacctcctgagtgcttgcaggctcttggatgacacaatgtcacctatcacacggccttgctttcttgttacttttctaggggttatcagcggcctcayatgccctactcccatagactcaaaagttctgttcatgtcctgcaattttttcctgcagtattgctatggaccttattctgacccttggttgtcattgtga

SEQ ID NO: 44644 - DNA, 201 bp, Homo sapiens
caccccatgagttcagggcgtatcagctctacacattgtaccggggcaaggatgggaaagtgatgcaggtacctgcaaagcagtgtcaggagaagggaacrtaggccttcagcaagggtttttgtttaacggcattcctgggggctgataggcactttaggcattgacttagttgagcacaagctttgaaggtaagccaga

SEQ ID NO: 44645 - DNA, 201 bp, Homo sapiens
aacaacattatacttttgtaaagtaatgtcttatgttaccaatttggatgatttttctaaacattgttttcaggcactgttagtccagttaatggtgagartttaggcttaaaaactgtcaacttgtagctaggtgtggtggctcacgcctgtaattctagcactttgggtggccgaggtgggtggatcacttgaggtcag

SEQ ID NO: 44646 - DNA, 201 bp, Homo sapiens
gcacttgagctcagcagaaccaacgcggagcttctgtgtttaacctcctgagtgcttgcaggctcttggatgacacaatgtcacctatcacacggccttgytttcttgttacttttctaggggttatcagcggcctcacatgccctactcccatagactcaaaagttctgttcatgtcctgcaattttttcctgcagtatt

SEQ ID NO: 44647 - DNA, 201 bp, Homo sapiens
tttattgctgaggagtattccattgtgtggatctaccacaatttgtttatccaaacctatggtttttaattttcttggtgcaaatgcttttccacatcatygatatttccttattggcaatataagctttggtatgatctatttctagaggcatcagatttctttcatttcactcatgtattcaacacgtatttagtggtt

SEQ ID NO: 44648 - DNA, 201 bp, Homo sapiens
attatctttgggcaattcccataacagactttctgttttaacaaatctcttaagttactggagctgtcttatttatttttagagatgtttttacattgtaraaaagtacacgagtacccctatgtattgaccaccaagatgagtttttagttttttttttttttttttctaagagacaaggtattagtctgttacccagcc

SEQ ID NO: 44649 - DNA, 201 bp, Homo sapiens
tgtggcagttgcttgacttttttggatatacacttctctgcaagcccttgagagcaaagtcaatgtctttatgtattcatggattcattcaatagttattwctcccttaccttgtagcaggtgctatgccaggtactgaagatactctaaacagcaaaaactgacatggttcctgttttcatggtgtctagtgggaaacag

SEQ ID NO: 44650 - DNA, 201 bp, Homo sapiens
tcttgtaagagctctacaacaattaagtattttaaacctcaccatggctattatccccattttacagatgaggaaactgaggcaaggaatgatcaggtaamctgccctaagtttcccttagaaagtgtcaaaactgggactcaaaccctggccatgtggttcgagagtccttgctcccacaggaggcaaggaggaaagttc

SEQ ID NO: 44651 - DNA, 201 bp, Homo sapiens
ggctcattgaatcatcttcttttattggatagcagtccccctaatgttctgtttccagtgttttgttattataaatagtgctgtagcatacattttttgcrtaaagcctttttccataattagaattatttctttttttattttttatttttatttatttatttatttatttatttattattattatactttaagttttag

SEQ ID NO: 44652 - DNA, 201 bp, Homo sapiens
cagcctggccaacatggtgaaaccccacctctactaaaaatacaaaaaaactagcggggcatggtggtgggcacctgtaatctcagctacttgggaggctraggcaggagaatttcttgaacctgggaggcataggttgcagtgagttgagatcatgccactgcactctagcctgggcgacagagtgaaactccgtctcaa

SEQ ID NO: 44653 - DNA, 201 bp, Homo sapiens
agagtgtggttacagaaaacccacccattttgtgcagccattatggaaagccatatggaggttcctcagaaaattcaaaatagaactgcattgtgatccarcaatcccacctctgggtatatatccaaaggaaatgaaatcactgtcataaagagacatcagcaccccacgtttgttgcagcattacttaaaatagccaag

SEQ ID NO: 44654 - DNA, 201 bp, Homo sapiens
ttgaggacgggaagcatcatcttaagaagtagctgcctcagatgaggtctttacaggatttctaggcaagaagaggttgctctcctctagtaagaaagggmtgtttcgggccaggcacggtggctcacgcctgtaatcccagcacttcgggaggcggaggcgggcagatcacgagatcaggagatccagaccatcctggct

SEQ ID NO: 44655 - DNA, 201 bp, Homo sapiens
ctaggtctgtaatatataattatagtacttaattcaaacatcagtctgtgcagataatagatttccctttatatatatatatttttttttaccttgtttayattttgcttttattctaaatgccaagttttgttttgttttaagggtagagagagatgtgttatagagaatgatgtgaagtgttctcttgaaacctgctat

SEQ ID NO: 44656 - DNA, 201 bp, Homo sapiens
taagcgctataaggaaatatttacagattcctacctacccccaccccataaaaggcccctttatttggatgtcttatcccatttcagttctctgacatatstttcccccaccagttacaagaggctttctttctgctcagaccccagataagcccgaccagttctttttcctcagagcccccagctattcatctggatcct

SEQ ID NO: 44657 - DNA, 201 bp, Homo sapiens
tgtctcatgcttgtaatcctagcactttgggaggctgaagcaggtggatcgcttgagcccaggagttcgagaccagcctgggcaaggtggcgaaaccatgrcgaacctttatttaaaaaacatggcaaagcgttattatttaaaaaaaaaaggataaagggaaataggtccaaatccctatctactaaaagcttacagcct

SEQ ID NO: 44658 - DNA, 201 bp, Homo sapiens
agttagaaacaaacatgcctgtggtgtcatttaacgtgctcttctgtttctgtatttcgtgtaccttggtagttagatttcctgaaagcttcgtcagagtygggcgctttttctgggtgagagggacaggactacttcacaactgacgttacgtacttttagcaggaggacacactgtctagttgctgcttgtctctttct

SEQ ID NO: 44659 - DNA, 201 bp, Homo sapiens
tgaaaccattgttccccactgctgagtttgtggaaaaactgtcttccattaaactggtctttggtgccaaaaagtttgaggactgctgtgttagaagacartatagacatttcttacaaagctaaacgctgtgctgccatattacccagcaattgtactccttgttatttatgcaaatgagatggaacttatgtccacaca

SEQ ID NO: 44660 - DNA, 201 bp, Homo sapiens
aaacaaaataaattaatacattatatagatggcaataagtgctaagactgcagttttaaatagggtagtcagagaaggcatcactgattaggtaacatttrtacaaacacttgtaggccctaagggagaagcctgtttcactagctggtgataagagcattccttgtagagggaccatagtgcaaggccttgaggcagggg

SEQ ID NO: 44661 - DNA, 201 bp, Homo sapiens
acccaaggctgaaggtgcaggaagaagcagaaaggaagcagaaaagaagaccctcatttgataccttcccacccacaaactgtgtgtaaatgcacctgcasgtgaaggctggagatcctagtaaggaggcgattactgggcttaaattgaaaatgagtttgagatgtccaagcacatagggatggtgttggcaacagacta

SEQ ID NO: 44662 - DNA, 201 bp, Homo sapiens
ttattacctgtgctagcattgtcatatccaagaaatcattgccagatccaatgtcatgaagcttttccccttgtagaagctttatagatttggatcttatrtttaggtttttattccatttcgagttaattttttatatagtgtaaggtaagggtccatctttacttttttgcatgtgggtatctggctttcccaggacca

SEQ ID NO: 44663 - DNA, 201 bp, Homo sapiens
aggccttgaggcaggggtgtgcctggtgtgttggtagaggagcaaggaggctggtgtggccagagcagaatgagccaagggagcaggaggtgatgtaatcrgagaggtaagtggggagcagacgctggaggactttggagaccattgtccagacctgggcgcttattctgggtaaaatgagaagccacagtggtagtgagg

SEQ ID NO: 44664 - DNA, 201 bp, Homo sapiens
tgaggcaggaggatggcttgagcccagaaggtagaggttacaaacgtgagctgtggttgtgctgacagagtgagacaatgtctcaaaaaaaaaaaaaaaaraaagaaaagaaaaaaggcaagaatagtattatataatggactttacatgccaatccctcccaagttactttgtggcaaatcccagacagcatgtcatttc

SEQ ID NO: 44665 - DNA, 201 bp, Homo sapiens
agaggattgcttgaacctagaaggcagaggttgcagtgagccaagatcgcgccactgcactccagcctgggtgacaaagtgagactccatctcaatttttyaaaaagtactcctgggtctgttggcctctttccagcctccccaggcagcttctctccttgctggtctgtattttccagctgcccagaagcacttgtgtcc

SEQ ID NO: 44666 - DNA, 201 bp, Homo sapiens
tggacaatctgcctccaggaggtctcacccacatggctgttggcttgaaccttaaaggatagctctggtcaggtacaaatgggtgttgacagtaagtgacmtagaagtgatgagagttggggaaatcagggaattcccaggaggtggaacttgccatagcatcccagccagggcacaggtgcagaaagagaaagtcatatg

SEQ ID NO: 44667 - DNA, 201 bp, Homo sapiens
aaaagcctgtaagaagtggaaatctaaccaagtcagcactaccctgaaagcgtgagctgcagtcgcgtggttcttgctaagaagggcaccgtctttcttakcaggtcagtaatcatcattgcactggaggcctattttgggaaattccgtcaccattctgatagagaaatgggaagtcttggaaatcttacggaaatttta

SEQ ID NO: 44668 - DNA, 201 bp, Homo sapiens
atggctcttaacaccgggtgacccagcaaaaaacacagggtgaggtttgtttgttacccaggtggctgtacttgtgtgtgtttgcagggagagtaatgctscctgatatgtaaatgctccttgattttgcctgctgaagacaaccacgcacaccccactagagggttgccttagccactttctgcattttgttcttgaacc

SEQ ID NO: 44669 - DNA, 201 bp, Homo sapiens
caatccaaaggggcaggagggagtgatcatccgaaagcccctgtgcaaaccttgctctaggccctctgtctcccaagggagtagcattgaggacttgttcygaaatcattgttcattttgcattcacagcatggccggactcccctgcatcttgctgccaataagggccatcttcctgtggtccagatcttgctgaaggct

SEQ ID NO: 44670 - DNA, 201 bp, Homo sapiens
gtcacattctgaggtattgggagagctttaatatatgaacttgttctgcccataacactgtccatacctttcttttctttattacttgtctatcaaaatarctaggctgtttaccactagtctcataaaacataaattatggccacagaaattttatattaaagtgttaggatcatccatgaaggacagcattgaagatta

SEQ ID NO: 44671 - DNA, 201 bp, Homo sapiens
ctgcacccagcccagaaattgtttctgtgtaaataaaatggcttcagaaggacaggtcaggaaactcatgcgtctcaaagggagggacattttgtaccagycatagcccgtagaaagatccttcttattcagcagatgtagcagctcctgtctgggaaatcagtacccactactcagggtggggaaaaacgcctgctacat

SEQ ID NO: 44672 - DNA, 201 bp, Homo sapiens
ggattatttcagatgcctcaagcagattggcaggctcaaatctagtccctcctttcatcctgctcttcctctgctcagcgaccttctcataaagctcctgyctgacactgtctataagcctctgctggcccacctctggagttcctcctggctcctttcccctagagcacctcctgtgccctcagagtggggctcactggc

SEQ ID NO: 44673 - DNA, 201 bp, Homo sapiens
cttaagcatgccctggattatttcagatgcctcaagcagattggcaggctcaaatctagtccctcctttcatcctgctcttcctctgctcagcgaccttcycataaagctcctgtctgacactgtctataagcctctgctggcccacctctggagttcctcctggctcctttcccctagagcacctcctgtgccctcagag

SEQ ID NO: 44674 - DNA, 201 bp, Homo sapiens
gacgcaattcagttcatagcagaagcttatagaaaactgtaggtgctggctgggcacggtggctcacgcctataatcccagcactttgggaggctgaggcrtttggatcacctcaggtcaggagtttgagaccagcctggccaacatggtgaaaccccgtctctgctaaaatacaaaaattggccgggcatcatggtagtc

SEQ ID NO: 44675 - DNA, 201 bp, Homo sapiens
ttaagcaatgggtagaaattgagatttgagtacatagaattggttttattgtgatgctgtgttaattattttgatttgtctttagcatttggatctttacstaacaggggttgagggtggtgagaagaaattcccagagtggccgtggtgctgtccaatgctctggtgctgacaggcctgtctcactgaataaaggatgcc

SEQ ID NO: 44676 - DNA, 201 bp, Homo sapiens
ttgcaccgggccacagtggtggggaacacggagatcatcgcggcgctcatccacgaagggtgtgccctggacagacaagacaaggtgagtggacactgagyttccttactccccaaggcaagggaagccagtggctcaggggagctggaggagcccgctctggaaacttttgagtcctcgaggtattataattcctgtctt

SEQ ID NO: 44677 - DNA, 201 bp, Homo sapiens
cactagccccctgtatggtctgtttacataaaacactctgacaagaggcacagaggaagagcagtccatagataaaggcaccatagacctagcaaacaccrccagcagtctgccccctggcaagtgggcacagtggcagtggctcctactgcattgcagctcagctgtctgttctcaacctttgccatcttgaaacaaact

SEQ ID NO: 44678 - DNA, 201 bp, Homo sapiens; identical to SEQ ID NO: 7880

SEQ ID NO: 44679 - DNA, 201 bp, Homo sapiens
gaactataaagaagaggtgaaggtttaagagacagaggaaggagtagatgttgggaagggcttggaaatctaattggagaatttagcctcttgttgacttyacataggcatacatacaccctaatatttagtgagtgctttttctgtgccaagtgccgtgcttatcatctactcccttgggagtagctccctagcgtattc

SEQ ID NO: 44680 - DNA, 201 bp, Homo sapiens; identical to SEQ ID NO: 7881

SEQ ID NO: 44681 - DNA, 201 bp, Homo sapiens
tggctaatctgtggctgaaacttaaaatatggacaatatccaatttggaagaaagccttagctcggaaataatcagatataaccaggattagggagatgcygactgaagataagctgacttcagacagggtattcttgcgaagcatgtcctccacctaactggagcattaccttccttaggggtcagagtccaccaggtta

SEQ ID NO: 44682 - DNA, 201 bp, Homo sapiens
taaatttgatctccttcaaaagtgccttgaagtcaattttggttgtaatgtatttgtctctgacgtattcttcaaattctctttgttttttttcctgtcaytggagaactgcacccagaatcttatttttactacttccatgtgaatgttaaggtactcacagaggtttcatccagaagtcttccctcttctttctggtaa

SEQ ID NO: 44683 - DNA, 201 bp, Homo sapiens
acatttttacattatttcttcttcccatcaagaaacactcaggccaggtgcggtggctcatgcctataatcccaacactttgggataccgaggtggatcacctgaggtcaggagttcgagaccagcctggccaacatggtgaaacctcgtctctactaaaatacaaaaaattagccgggcctggtggcgcacgcctgtggt

SEQ ID NO: 44684 - DNA, 201 bp, Homo sapiens
ttttaactcatccagtgcctagcaaggtactcacatcccatctgtgccgaatgaggggaataatgttattgactgtgaatttcttacactttgatagcaaktgcaaggtattaggtactcttgtaagagctctacaacaattaagtattttaaacctcaccatggctattatccccattttacagatgaggaaactgaggc

SEQ ID NO: 44685 - DNA, 201 bp, Homo sapiens
gagtttccataagcactaaatgtgatagcacatgttgccatagttataaaatctaagtggacataaaatattgattattttttaactcatccagtgcctakcaaggtactcacatcccatctgtgccgaatgaggggaataatgttattgactgtgaatttcttacactttgatagcaattgcaaggtattaggtactctt

SEQ ID NO: 44686 - DNA, 201 bp, Homo sapiens
ccttctaatcaattccaggctggagacacagcacttcacgttgctgctgccctaaatcacaagaaggtggccaaaatcttactggaagccggagcagataygaccattgttaacaatgtaagttgagttgcaacattgctttctaaagtggttcccacccctttccagaatgggatgtgtactaaacccctgcagaccccc

SEQ ID NO: 44687 - DNA, 201 bp, Homo sapiens
gagacagggtcttgctctgtcacctagtctggaatacggtggcatgatctcagctcactgcagccttgacctcctgggctcaagcaatcctcccacttcarcttcctgagtagctgggactacaggcatgcactatcatgcccagctaatttttaaatttttttttgtaaagacagggcctcactgtgttgcccaggctgg

SEQ ID NO: 44688 - DNA, 201 bp, Homo sapiens
atcggggccagccccagggcctccgcggtgccacctctctctcgcgagggtccctgccgtgccccggctcgccgctgggaggcgctgcggcaccggcgtakgagccgccggcaggggtggggcggggccggcgggacggggcagagggccctgcggcggcggacgcggcgggctcggccacaggtaacccgcaggagccga

SEQ ID NO: 44689 - DNA, 201 bp, Homo sapiens
ttatttgtttgaagtaaatttgtgcccaagagggtgcacagcatcaaatggtagacattaaaggattacaagatcatgtgaaagatcccaagacccagttrgagtcatggagaaacttcagtaatgtgcactaattctagtaatgcttcagcgtcatttatctgttactagttgacattgggctgttctacctaaggaaaa

SEQ ID NO: 44690 - DNA, 201 bp, Homo sapiens
tctctatcaccaaatactgtacatataaatagtaagactgggctttgtgttgtccattgttaatcctaaatgcaacaaaacacatggagactttgaaaatycttcagaataatgctatagttaagattttgctaaagcaagtgttttttctaactccttgagctgcatattgccttgagtaatcatcatccggattgtatc

SEQ ID NO: 44691 - DNA, 201 bp, Homo sapiens
cacagaggatgagaaagataggggcctatggtcttatcaaaatggtcttctttcagtagttcacatcactgtttcctggattattaatggctttggctgakccaggtgggatgtggtgttcagatggccagatgagctaagaagtatccctcggactttggatcctaggctgcagagtggaagaagtacacaaacccagcc

SEQ ID NO: 44692 - DNA, 201 bp, Homo sapiens
agaattaggtcttgggtaatgtgcctttcccacctgtgtgtcttccttaggatgggaatacagccttgcatgaagcatcctggcatggtttcagccagtcrgccaagctgctcgttaaagcaggagccaacgtgcttgccaagaacaaggtgaggcctggcagatgctagaatgcctcattcacaggtgaggatggctgtg

SEQ ID NO: 44693 - DNA, 201 bp, Homo sapiens
ccaaaaatgtctctggacactgacagacatcccctgaggaacaaaatcatccccgcctcagaaccatggattaggccaatcatgacaggagtctctatttyctcacaaaccttagagtttccataagcactaaatgtgatagcacatgttgccatagttataaaatctaagtggacataaaatattgattattttttaact

SEQ ID NO: 44694 - DNA, 201 bp, Homo sapiens
tccagaaggtactatcctgagttacagaatatctattgaacggcttgcttactgaagcctttgttttcctccatttgctgttcaaaaacttaggagagagyggcagatcagtaatgaataacagcaaaatcccctggcacctgttggatttttatacaaaacagaaaaagttaaaacttgaaggaacaatgaaagaacctc

SEQ ID NO: 44695 - DNA, 201 bp, Homo sapiens
tagtgtctctcttacatttatctgtgtttgacagaggagaaaggcactgaatttggaatccaaagaccttggtgtaggcacctgttctgctgcttattaawggcttattaatgtaggccagggttgttcagccttagcaacatcactgacattttgggccagatcatcctgtgctattgggactttcctgtgcattgtagg

SEQ ID NO: 44696 - DNA, 201 bp, Homo sapiens
agataagcccgaccagttctttttcctcagagcccccagctattcatctggatcctgaaaactccaggaccaattcctcaagagccaaaggaagtcccagratgaacatcttggacttctgaatagggcagatgtggaactgaagtctcacaactgccacatctctctgtgccctccttaggtctagaaaaatatgaagta

SEQ ID NO: 44697 - DNA, 201 bp, Homo sapiens
ttcagaaaataacttcatgagcatacttgaaccttaacatctagaaattaaaatgtaaaaagtatttggggactatctctaaagtgttctttttttggcarttttctaagggatcattcaggcatgtgagaagaagaatcaaaagacttggaaatactgcttttctcccatcattttcccttcatgcctcatctttggttt

SEQ ID NO: 44698 - DNA, 201 bp, Homo sapiens
cctatgaagtcagcagctatcattattatccccatttttatagatgagaatattaaggcccaaggaagttagtcatataacctgcctagggccatgaagcrcattctatgggtggactgcttaaatagattctctccttcccttgcttctccccactcctgcctcagccaaccttggaagagaattgagaaggggacctag

SEQ ID NO: 44699 - DNA, 201 bp, Homo sapiens
accctcttcccaccatgctgtttgttttgacattgaactagatataaattatccaagaggcgatctggctgaggctggggaatgtgcaggactgtcctcgyccagggctttgggagatcccccaggaaaagggttgtcaggactggaatgtccacccaggagaaggtctgtggattttccctacaaaggactccccaaaga

SEQ ID NO: 44700 - DNA, 201 bp, Homo sapiens
tcagagcatgcatgcccttgcaattttgacagctagagctaaattgctctgcagagaggttgtgccagtctatactccaccagcagtgtgtgaggagcccratgggactgacctttaaacacacagtgccagtggtacactgggctccctctgctgcctctcctggcccttcaccatctgagctcatcttacctttctagc

SEQ ID NO: 44701 - DNA, 201 bp, Homo sapiens
ttgttaggaatggggtgggatttgagaatgcctcaggaatgggagggactgagcttgagcccccacctatcgtcagtagctgcatcttttcctcacgctgrtatgctcactgtcttttcatgtcattcttcttcctttgcgtctcctctcctacccccagctcttcctgcctttttttctgtcaccctcttcccaccatgc

SEQ ID NO: 44702 - DNA, 201 bp, Homo sapiens
attgtttgagcctaggagtttgaagctgtggtgagtgagccatgatcttgccactgcacaccagtctgggcaacagaatgagaccccgtctctttaaaggaaaaaaaaaaaaaacaaaaaaaaaaacccaccaagcaagcataggaattagaagtcttataactccctaagttctgttccttgcactgccacttacttaca

SEQ ID NO: 44703 - DNA, 201 bp, Homo sapiens
cagggtgacacacctgaggtccagcagggtgacaggcttctagcaagccatgcacagcccaggcctcctgaccccttgtctcgtgctcattgctttccacmagaacatttccacactgcccacccatcctccctttcaaggctggaccacaggctcagcttgatttacctcaacttagcttcctgaggacctgtcagagat

SEQ ID NO: 44704 - DNA, 201 bp, Homo sapiens
tgtgccagctgggctatgtgcgtgtgggacccgtggccctttctcacctgtcctactctgcctctcctcaggcaggccagactccgctggagactgcccgmtaccacaataacccggaagttgctcttctccttactaaagctccccaggtaggatttactgccctttccatggtactgattatgcgggactacaaagttg

SEQ ID NO: 44705 - DNA, 201 bp, Homo sapiens
atggaaatgtaataaattcaatcagagagaatccctttgttaattcagcaaatatctgaagagcagagcctgggctgggaggcagtcttcttgttaggaakggggtgggatttgagaatgcctcaggaatgggagggactgagcttgagcccccacctatcgtcagtagctgcatcttttcctcacgctgatatgctcact

SEQ ID NO: 44706 - DNA, 201 bp, Homo sapiens
acccgcagccatatgactgtgtgaatgtggatttgctctcacgtttgttttccttctgaaaccaggtgtggaccaattagtggtgactgcaggtccagcarcagcttccgacagctcccctccagtggttaggcccaaagagaaggccctcaactccactgctacccagagactccagcaggagctgtcatcttctgactg

SEQ ID NO: 44707 - DNA, 201 bp, Homo sapiens
taatgctgttattgcaggagtgagttcattataaaagagcaagtttgcctccccacccccaaccccccaccaccccacaccctcccttgcccttctgtccrtagctatgtgatgatacaacaagaaggcccttgcaagatgatagcttctcaatctttgatgtcccagcctccagaactgtgagaaatagatctctgttca

SEQ ID NO: 44708 - DNA, 201 bp, Homo sapiens
tctatcttccagttagcttccttagaccaatacttctcaaacttatgcatatgtcaacaaaaaaagccaaactcctgtaaagcatttaaagaggtttattytgagccaactgtgagtgaccatagccttggttttcttttctttcctttttttttttttttttttttttttttgagagacagagttttgctcttattgccc

SEQ ID NO: 44709 - DNA, 201 bp, Homo sapiens
ttttttaaaaatcaaggtaaaagttaataaaagaaagagctttgatgagaggaaggacctaagtccaggcactttaagaacaaatacttgtttgtttatarttttctgaatctccagaaggtactatcctgagttacagaatatctattgaacggcttgcttactgaagcctttgttttcctccatttgctgttcaaaaac

SEQ ID NO: 44710 - DNA, 201 bp, Homo sapiens
agtccctagatatttgatatataggcatagctcattttattgcactttgcagatacgtgtttttcacgaattgaaggcttgtggtaattctgtgttgagcrtctatcaataccatttttccaacaacatgtgctctctctgtgtctctatgtcacactttggtaattctcacaatatttcacactttttctttattattat

SEQ ID NO: 44711 - DNA, 201 bp, Homo sapiens
tccccacccaaatctcatcttgaactgtagctcccataatccccatgtgtcgtgggagggacctggtggaaggtaatttaatcatgggggcagttaccctygtgctcttcttgtgatagtgagttctcacgagattggatagttttataaggggctttttccccttttgattggcacttcttgctgctgccatgtgaagaa

SEQ ID NO: 44712 - DNA, 201 bp, Homo sapiens
attagcagggcatggtgatatgcacctgtagttctagctattcgggaaggctgaggtgggaggatcacttaagcctgggaggttgaggctgcagtgagctrtgattgtgccactgtatttcagcttaggtgacagagtgagaccctgtctcaaaaaaaagggaggggggccactccactgtacacaggagtgacaagaaag

SEQ ID NO: 44713 - DNA, 201 bp, Homo sapiens
acagagtgagaccctgtctctaataaataaaaacaaaccacatgacagtgcaattatgagggaggcatccagctgatctcaaatatgttcagtttgttagmttctcattaagaacatagaatgtaaaaattctcattcaggattctcagatttctgaaaatacattttaggcccccagagctatgcttagtaaaggctgat

SEQ ID NO: 44714 - DNA, 201 bp, Homo sapiens
ctgcttcctgggttcaagcgattctcttgcctcagcctcccgagtagctggaattacaggtgtgtgccatgatgctcatctaattttttttgtatttttastagagacagggttttgtcatgttggccaggctggtctcgaactctcgatctcaagtgatctgcccaccttggtctcccaaagtgctgggattacaggtgt

SEQ ID NO: 44715 - DNA, 201 bp, Homo sapiens
ctggctataatttctaatatatatgctttttgaagtaaaatatataagagcagttttatcacttattttttcatttagtattttttctgagcattttgttrttaatttttttaaaacaatttttaataactgcaaaatattttatcgtatggatataccataattttactggtttcctattattagacattaaggaagcct

SEQ ID NO: 44716 - DNA, 201 bp, Homo sapiens
agagaaaaaagagaaaaggaaaaaaaaagaattaacagatggttagagcttgttttatactgattcttaatatttttccctctaggatacagaaaacgttkctttagtcccttccaacttaatcatccttgcctccatacagaaatcccaaggtgccctaggtggttcacagtgttaactgcaagcgcttatatctgtcag

SEQ ID NO: 44717 - DNA, 201 bp, Homo sapiens
catagatgaaagagaaacaggtggcagtgtttatgtgtcaaacttctccaaatagacgactgtctcaccttttgaaaccctgtctcaaaaaaacaaaacawaacaaaacaaaacaaaacacctgaaaacttactgggtcttgttcagtgacaccctcccaggatagcctgtgcctagagtgtgaacacactgcctatagat

SEQ ID NO: 44718 - DNA, 201 bp, Homo sapiens
agaactccttgccagtgtatatacataaacctgaggcctgttttcagtgtgcgcattatggtcccatcatggatgagacttatcaggggggaattctctasctaattctgaatctagttaacttctggcctgcaagaatgtctacatgatatgttggcatccaagccatgggagaagggtccctggcagatgctttattga

SEQ ID NO: 44719 - DNA, 201 bp, Homo sapiens
gcaaacccctggcatcaagtgatcctcccacttcagcctcccaaaatgctgagattacaagtgtgagctactacacccagcgtagaatttttttttaaaargaggaagaaccggccagtcatggtggctcatgcctgtaatcctagcacttcgggaggccaaggcgggtggatcatttgaggtcaggagttcaagaccagc

SEQ ID NO: 44720 - DNA, 201 bp, Homo sapiens
gacttattcagtaagccatgatgtaaacagatgtgctgtcatctggcctttgttgttccatttatagagtacaggcagagtagaattagcataatttgaargggccctgggattggcacatcagcattcacttcatttaaagtcaccagctgcattagcccctaacaagagagtcaccctgtcctttgaagctttgaagcc

SEQ ID NO: 44721 - DNA, 201 bp, Homo sapiens
tggttatattaaaaagcctgtaagaagtggaaatctaaccaagtcagcactaccctgaaagcgtgagctgcagtcgcgtggttcttgctaagaagggcacygtctttcttatcaggtcagtaatcatcattgcactggaggcctattttgggaaattccgtcaccattctgatagagaaatgggaagtcttggaaatctta

SEQ ID NO: 44722 - DNA, 201 bp, Homo sapiens
ttgtgcctggccttaagaaacttctttatggggcactgttgtgggccattgctaagaacggtaactagttacaacttgttatttgggggggggttacataygtgttctagcaatgagttgaggcagatgtagggggcagtggttaatctggcaagggttggtcttagaggtgggaaaccactgttggcagccctttctgct

SEQ ID NO: 44723 - DNA, 201 bp, Homo sapiens
aagagttccacatacatacatataaaatgtacaacataaaagtcaagtgatgatgctgaagagtgtagatactcttttatctacatattttaaaatactamattttaaaataataatttaaaatcggtaacattacaagcaatgatcaagatataccagctcagtggcactatattccaagatgtctgctaaacttaaaaa

SEQ ID NO: 44724 - DNA, 201 bp, Homo sapiens
gaaacatcagctacatcaaggtgggaggattattgaggccaggagttcaagaccagcctgagtaacatagtgagacctgtgtctctttaaaaaaaaaaaaraaaaaaaaagaaaaaaaaattagccagacttggtggcaggccactgtagacctagctactcaggaggctgaggcaggaggatcacctgggcccaggagtt

SEQ ID NO: 44725 - DNA, 201 bp, Homo sapiens
gtttacaaaagaaacagctgacactttgagaagttaagcagcttcttcacagtaaaaacaccaggaggggagtggggcttgaatttgaacctaaatttatmtgactctaaaatgttaaccatctggtttataacagctattttgcttctccagccaagccataaaaacttaagaaatatatataccagtcagaatctttca

SEQ ID NO: 44726 - DNA, 201 bp, Homo sapiens
gggtaatgtgcctttcccacctgtgtgtcttccttaggatgggaatacagccttgcatgaagcatcctggcatggtttcagccagtcagccaagctgctcrttaaagcaggagccaacgtgcttgccaagaacaaggtgaggcctggcagatgctagaatgcctcattcacaggtgaggatggctgtgggtttctccccct

SEQ ID NO: 44727 - DNA, 201 bp, Homo sapiens
caaacccagcccttcttgtttcatgtgagcaatggtgcgtgttttaaaaagacagccaataatattagctttaattatgatagtagttgctgtttgttttrtcctagcacagaacagtaggaatgtaggtacaggaaaaaatggcacaataaacatttgtcttgggctgggcatggtggctcacacttgtaatcccagcat

SEQ ID NO: 44728 - DNA, 201 bp, Homo sapiens
aatcctctacatgctccttagtgccaagcattggccataacattagagttgagagcctctaggagtccccaggcagagtatcatttcctagaactgttaaraagctggttagcctgggaaacatagtgagaccctgtctttacagaaaataaaaaattagctgggcatggtgatgcacacctatagtcctagctacatagg

SEQ ID NO: 44729 - DNA, 201 bp, Homo sapiens
gaaagagaaacaggtggcagtgtttatgtgtcaaacttctccaaatagacgactgtctcaccttttgaaaccctgtctcaaaaaaacaaaacaaaacaaarcaaaacaaaacacctgaaaacttactgggtcttgttcagtgacaccctcccaggatagcctgtgcctagagtgtgaacacactgcctatagattcttcca

SEQ ID NO: 44730 - DNA, 201 bp, Homo sapiens
aggacatatttctctaaattttttccttgcatttaaaaaatacagtgatgctcaacttcgttaacaaaaaatgaaatacaaagtaaacaaaaatgagcatyccccactttagctcttaaagataaaacaaaaacgtaaaaacagtagttatatccatgttggtggccacatagcaaaatgggtactctcatacaatgttgg

SEQ ID NO: 44731 - DNA, 201 bp, Homo sapiens
gcccaggctggagtgcagtggcacaatcttggccccctgcaagctccgcctcacgggttcacgccattctcctgcctcagcctcccaagtagctgggactmcaggcaccccctaccacgcccggctaattttttgcatttttagtagagacggggtttcaccgtattagccaggatggtctcgatctcctgacctcgtgat

SEQ ID NO: 44732 - DNA, 201 bp, Homo sapiens
ccaggctggagtgcagtggcacaatcttggccccctgcaagctccgcctcacgggttcacgccattctcctgcctcagcctcccaagtagctgggactacrggcaccccctaccacgcccggctaattttttgcatttttagtagagacggggtttcaccgtattagccaggatggtctcgatctcctgacctcgtgatcc

SEQ ID NO: 44733 - DNA, 201 bp, Homo sapiens
caggatggtctcgatctcctgacctcgtgatccacccacctcggcctcccaaagtgctgggattacaggcgtgagccaccgtgcccagccggtgaaaggtkttttttcttctggtgaaagtaatttgaaattgttactgtaaattgagaaataatcccagtcatctataattccatcacctagaggcaaacatcatgaata

SEQ ID NO: 44734 - DNA, 201 bp, Homo sapiens
gacgcaaacattcagtccatagcagctactggtaattcactgaaaggatggtgccgaagagtacaggtcctagagttggaccctgtgggttcataccttakccctgacacttattaactgggcaaattattgaatggctttgtgcattatttactcatctgtataatggggagaatgttaataccaaccacattggtgtgt

SEQ ID NO: 44735 - DNA, 201 bp, Homo sapiens
acccattactgggtcttcaaatcagttttatgggtgcaactgacagggattgttgggagaatccagtaaatatttatcttccccaccaggtgttgtgtagyacacaaatacgtgatacctcataatgagtagcaatgtacaaaacagtgtgttttgtgtgagtgatacagatagattcttttattcgacaaatatcagatg

SEQ ID NO: 44736 - DNA, 201 bp, Homo sapiens
cctgccctggagatgctcagatgatagcggggagacaggtgcaaaaggctgttgtgacacagtggtgactgcagtggtgaggatgcctggttacatcctcyttacctaatgagcacctgctccggaggccctgctctggaaaagcagcaggctggctgattcagctggaccaaacacagctgtgagaagctgcagggtgtg

SEQ ID NO: 44737 - DNA, 201 bp, Homo sapiens
ctgattcagctggaccaaacacagctgtgagaagctgcagggtgtgtctttgagagaaaactcacctctgcggtttagaaaacaagagcagggaaggcttytggggagaagtgccatctccgcttggcctgtgtagtgggtcaaatggtggccccccaaaagataagtccatgtcctaagccctggagcctgtgaatattc

SEQ ID NO: 44738 - DNA, 201 bp, Homo sapiens
tgatcaataaaaagggttaggatctgtcctcaccatgattttgttctcacctcttcggtggcacttttgtttcttctgaattcttctcttgcccaatcttycaggtatttgcgatcagaatcatttggaacttgccgaattgtttgcaaaatccttctgtagaggagaagaacttgttgccttcttacgaactgtaaaagg

SEQ ID NO: 44739 - DNA, 201 bp, Homo sapiens
aaagataagtccatgtcctaagccctggagcctgtgaatattcccttattttaaaaaaaggttttgcagatgtgattaagatgaggcagtcatcctggatygtttgggtgagccctaaatctaacaacaagtgttcttttaagaggcagagggagacttgacatagaacaggacaaggccatgtgacgagtgagactgaaa

SEQ ID NO: 44740 - DNA, 201 bp, Homo sapiens
ttacttagcgtgtcttccagtgtgacccacctccctcactggagggtctgaggctgatgaccagggccatatcacataggtggccatgttttgccacgtasgtgctgggtgtgactgggtgtggaactgcctgctcctggccagagctgtgccagctgggctatgtgcgtgtgggacccgtggccctttctcacctgtcct

SEQ ID NO: 44741 - DNA, 201 bp, Homo sapiens
acagcagagactcaaaatatatgttagcaattaccacagctaaaccacagaggatgagaaagataggggcctatggtcttatcaaaatggtcttctttcaktagttcacatcactgtttcctggattattaatggctttggctgagccaggtgggatgtggtgttcagatggccagatgagctaagaagtatccctcggac

SEQ ID NO: 44742 - DNA, 201 bp, Homo sapiens
tctgggcgactgtgcaccctcccactctccctgggaggcgggcgcttcctttgaagtgcaccagtgacctgcctctctcctggctgcttcctgatgtcttkctggcagcaagtgggctagggtcggcttgcccagaggggcgcatccaggtggggttcacctttctgaaccaggtagggaatgtcttggtgctcccttgat

SEQ ID NO: 44743 - DNA, 201 bp, Homo sapiens
ttgactatagtcactctgctgtgctatcaaatagtaggtcttattctttttttttttttacacccattagccatcctcacctccctccacccggcccccartaactccccaacctctggtaaccatccttctactctctatgtccataagttcaattgatttgatttttggattctacaaaaaaaaaaaaccagatgtttt

SEQ ID NO: 44744 - DNA, 201 bp, Homo sapiens
tgtagttattgactatagtcactctgctgtgctatcaaatagtaggtcttattctttttttttttttacacccattagccatcctcacctccctccacccrgcccccagtaactccccaacctctggtaaccatccttctactctctatgtccataagttcaattgatttgatttttggattctacaaaaaaaaaaaacca

SEQ ID NO: 44745 - DNA, 201 bp, Homo sapiens
ggttttttgtaaacctcccgaggggtcctgggattgcaggtgtaagccaccatgcccagtcatagcagtttttttttaaagcaattgcaagtagtagttaygatacttgtacgaaaatatacatgcacagatgagagagtttgtgatttgtgctactgtgtgtgtgtacagaaatagtgtagaaaggatgacaccgaactg

SEQ ID NO: 44746 - DNA, 201 bp, Homo sapiens
ctacatgcgattactgtcccatagtttttttgtattcaaaaaatatggcaatggagttggcattaaaaaaatcagcaaaagaactttaaaatgctaatacygaaaattagtaaagtgggctcccctagatgctgctgggaaagtgtgatacgaatagccacctttgggagacaatttggcaaaacaaatcaggagccttaa

SEQ ID NO: 44747 - DNA, 201 bp, Homo sapiens
tgactgaaatctgccaacactacactcactctttttcaccatgtaggaaagaaaaataacagtatttcaaaacaaagatttagaccttataggcaccaaarctcttaaaatcccaaagtgagaaacactgtctcagaaaaactgagagctggcagttcacgtacttcgcaaatgggtcaacatgttccaaatcaaagtgcc

SEQ ID NO: 44748 - DNA, 201 bp, Homo sapiens; identical to SEQ ID NO: 7889

SEQ ID NO: 44749 - DNA, 201 bp, Homo sapiens
ggctcagaaagtttctgacttgcccacattctcttgtgtagtaattgtggcatcaggatttggagtccatgctgttgaccccagtgtacatgttcatatgsaattccatgggcccccaagaaagagaaagaatcctggagctaactggtggccaccttcagtctttaggacatcttactaagcctgtctcccatctacaaa

SEQ ID NO: 44750 - DNA, 201 bp, Homo sapiens; identical to SEQ ID NO: 7890

SEQ ID NO: 44751 - DNA, 201 bp, Homo sapiens
cctttggcaggaaaggaaagggccatcagctcagcttttgcacccacaggagctctttctgctgttttgtttgtttttcctcttgataattttctttttawtttttttcagtagctttttgggaacaggtggtgtttggttacatggataagttctttggtgatccctgaaattttgatgcacccgtcacccaagcagtat

SEQ ID NO: 44752 - DNA, 201 bp, Homo sapiens
caccaggttaggctagctagtggcctagctagtctcgaaatcctgacctaaagtgatccacccacctcagcctcccaaagtgtgtggattacttgtgtaakccacagtgcccggccttacctgctttaaaaaaacaaaaaaacttaggttttcttggagtctgtgctagttgaatcttgcaaatgcaaaccacatacgctc

SEQ ID NO: 44753 - DNA, 201 bp, Homo sapiens
ctagtgggaaacagacaaccaaataatcataaaaataagtatcttatggccgggcgtggtggctcacgcctgtgatcctagcactttgggaggccgaggcrggtggatcacctgaggtccagagttcgtgaccagcctgaccaacatggagaaaccccgcctctactaaaaatacaaaattagctgggcgtggtggcgcat

SEQ ID NO: 44754 - DNA, 201 bp, Homo sapiens
ccagcctcctcagcctcctgagtagctgggactacaggcgcacaaaacaacactcagctaatttttgtattttttggtagagatgacattttgccatgttkcccaggctatagaactcctgggctcaagtgatccacccgccttggcctctcaaagtgctgggattacaggcgtgaaccaccttgcctggcccaaacttct

SEQ ID NO: 44755 - DNA, 201 bp, Homo sapiens
gttgtatatagcatgctccttccaaaggaccccatacacttattttaattggagtaggtaatggttctactacagaaggcacaaagtttgcctagtcctcstcccatgctgcccccaccactcagtgtttccctccctgaaggcacctgtcttacctgcttcttacattgttcctgagatatttacgtacatacactcaag

SEQ ID NO: 44756 - DNA, 201 bp, Homo sapiens
cagataaagcctcaccaatctagcctgacattcacctcatcaccctcccctttccgcctgttccccaggctcccatcagtgcagtgagtcctgtccgggcrcagtggctcacgcctgtaatcccagcactttggaggccaaggcgggcagatcacaaggtcaggagatcgagaccatcctggctagcacggtgaaacccca

SEQ ID NO: 44757 - DNA, 201 bp, Homo sapiens
tatacatagttatgaggggagtcctgcacatgaacaatgagtaaacatgtaacatatatctcatgttcactttggggtgggattttaacattaaagcaaaktggaatttggctctctgtctaaaggtgaactataggccacaaaacacagtctttgtaagctggtcaaaactggcttgaggtctgcagttgcttatcagga

SEQ ID NO: 44758 - DNA, 201 bp, Homo sapiens
tgcccctcacagatgcacttatccctttagtgaaggaagcgacctctcggccctcctgggatcatggtctgatggttggctcttctgatctttcataagasatccacactacatgcccactcttgagccttttgacctcctcaatattctgccaaggcagtaccagcatctccatttaacttacacgaggccattgttgtg

SEQ ID NO: 44759 - DNA, 201 bp, Homo sapiens
tagaagatcagagagagaaaaagaggtcagcaacttgctttacacacctaacctgtcttgagcttccttgcagtatgtctgcctgtgccacatgggggtgkttcctcttgaagaggcgcacactgcacccttgcatgactgaaatctgccaacactacactcactctttttcaccatgtaggaaagaaaaataacagtatt

SEQ ID NO: 44760 - DNA, 201 bp, Homo sapiens
atacatagttatgaggggagtcctgcacatgaacaatgagtaaacatgtaacatatatctcatgttcactttggggtgggattttaacattaaagcaaagkggaatttggctctctgtctaaaggtgaactataggccacaaaacacagtctttgtaagctggtcaaaactggcttgaggtctgcagttgcttatcaggaa

SEQ ID NO: 44761 - DNA, 201 bp, Homo sapiens
gtcctcttcaatttcttttatcagtgttttatagttttcattatagagatctttcacttctttggttaagtttatttctaggtatttaattttacgtgtgscttttttttttttttttttttttgagatggagtctcgcactgtcacccaggctggagtgcagtggcgctatctccgctcactgcagcctccacattccga

SEQ ID NO: 44762 - DNA, 201 bp, Homo sapiens
tcctcttcaatttcttttatcagtgttttatagttttcattatagagatctttcacttctttggttaagtttatttctaggtatttaattttacgtgtggyttttttttttttttttttttttgagatggagtctcgcactgtcacccaggctggagtgcagtggcgctatctccgctcactgcagcctccacattccgag

SEQ ID NO: 44763 - DNA, 201 bp, Homo sapiens
aggcaactgttaggggctttttgaggctgttgctggggcttgtgagatgcttaaggagctcgactgcatctctgaatggtcagagtaaaagagtgtcatasaaagaactgccaaatacctttctgtagaatgagctgaaatagaagtgcttcctcaaaacctgctaaaggggagattaagaaatgaaatttgattgggggt

SEQ ID NO: 44764 - DNA, 201 bp, Homo sapiens
gtagttccagctactcaggaggctgaggcaggtggattgtttgagcctaggagtttgaagctgtggtgagtgagccatgatcttgccactgcacaccagtytgggcaacagaatgagaccccgtctctttaaaggaaaaaaaaaaaaaacaaaaaaaaaaacccaccaagcaagcataggaattagaagtcttataactcc

SEQ ID NO: 44765 - DNA, 201 bp, Homo sapiens
tgtaacatatatctcatgttcactttggggtgggattttaacattaaagcaaagtggaatttggctctctgtctaaaggtgaactataggccacaaaacasagtctttgtaagctggtcaaaactggcttgaggtctgcagttgcttatcaggaaagaatgtatgtaagtcccattctctgtccaattggagttgtagtgg

SEQ ID NO: 44766 - DNA, 201 bp, Homo sapiens
tacggtgattgttattaaacattgaaacagttaatataaatatccccaagtagtgttgtccttaacccagtttaggattaataggctagaagaaaacattwaaaatttttaatatgaaaaataatgatatacatggtgtttatgcagtatgtatataagcatttattatgaagaattgctacctcctttataactttaaat

SEQ ID NO: 44767 - DNA, 201 bp, Homo sapiens
ttgtgtgggatttgaaggattaagctaagagtgacctttaaaaatggttttaacaacccaaattcctcttcctggttgatatgtttgtgttattgtctttsttttatttcttcaaggtcacatggctttccttggtgaatcttacactgttttgttacttcttggttaaggcaaagattctgaaacttggtttcatggagc

SEQ ID NO: 44768 - DNA, 201 bp, Homo sapiens
cagtcacatggcctcaactagattcaaggaagctaggaaatacagtccctggctgggcaactgtttcttagtaaaaataatttactttgggaaaggaatakaactctttggtggatgagtagccattttttgtacaataaggtgctagtgttttaactggtcaattaagtgtaactgcctttatgtaatttatttctaact

SEQ ID NO: 44769 - DNA, 201 bp, Homo sapiens
cttgttacagtccccagtagagatggttaaattgttttattgtttgagccaatgagtctcaattcctttatacaacctttccctactcccttccttcagaktttctgcccttttattcctttggcttctgccccaggtctccttttgactctggtcataagaatatcattgagaccaggcacggtggctcacgcctctaat

SEQ ID NO: 44770 - DNA, 201 bp, Homo sapiens
ctctccatgaaccacaaagactcctccaacacagaggtgcagtacccacctgggccaaggagggaagatgcaggtgaggagggtgcttccaaaaggtgtgyggagctgtttgttgagggccatgaagctcttgcacagggatgggaggaggcaactaaccagggctctgggtggaggccagctgccctccctctgggcgac

SEQ ID NO: 44771 - DNA, 201 bp, Homo sapiens
gttgcccctgaagtttttcaaaccccaaaagatgaactaaatcttgaagaaaacaacattgaacttgaatcaaacgtggttgttgttataacaatgataayagcaataataatcatggctaccatttactgaccattattaaaagatggcatctggattaaatgttctgtgtatattattttaatttattgagacagagtc

SEQ ID NO: 44772 - DNA, 201 bp, Homo sapiens
tctggggggcagcctgccctgctcagctaactcatgtaggggctccctgacagcagctgcttggcagcgcaccagcggggctcgggaaacaactcttgccrtcccctcagtattagttgctgtttctctgcttgtggatattccttgatggcaggattttcctctttttgactgaacagcaaaccagtttaactccttaca

SEQ ID NO: 44773 - DNA, 201 bp, Homo sapiens
ggcatggtggtggtgttcacctgtagtcccagctatttgggaagctgaggtaggagtattgcttgagcctgggaggttgaggctgcagtgagccatgagcrcgccactgcatgcctgcctgggtaacagagtgagactctgtctccaaaaaaagaaaaaaggaaaaagtttaattgccattgtaataatattaagaggtga

SEQ ID NO: 44774 - DNA, 201 bp, Homo sapiens
ttacatgactttcttttttttatgtgactttttgaagtcatagactgctttttagagtggtgaggaacagacagaagcccagtgccctgcactcctgcctytgggacacccaatgccttatatgcttcaaacagactgatgggtacatttgaatgtgagaaatatgcatagaaacatcagctacatcaaggtgggaggatt

SEQ ID NO: 44775 - DNA, 201 bp, Homo sapiens
catagaaacatcagctacatcaaggtgggaggattattgaggccaggagttcaagaccagcctgagtaacatagtgagacctgtgtctctttaaaaaaaaraaagaaaaaaaaagaaaaaaaaattagccagacttggtggcaggccactgtagacctagctactcaggaggctgaggcaggaggatcacctgggcccagg

SEQ ID NO: 44776 - DNA, 201 bp, Homo sapiens
gctacatcaaggtgggaggattattgaggccaggagttcaagaccagcctgagtaacatagtgagacctgtgtctctttaaaaaaaaaaaagaaaaaaaargaaaaaaaaattagccagacttggtggcaggccactgtagacctagctactcaggaggctgaggcaggaggatcacctgggcccaggagtttgaggctgt

SEQ ID NO: 44777 - DNA, 201 bp, Homo sapiens
attatgaatttcaacctgtggaaaccagttctttagattatgcaactccaggagcaaattctttcttgcttcctgccaatcgtgtcaactctcattggagygctaatgccatctctgattggtcaatgagcaatcacatagctcccgcctcagaaatagtccaggatgctgtggccacagtgaaagccatgaaagaagaca

SEQ ID NO: 44778 - DNA, 201 bp, Homo sapiens
ctacatcaaggtgggaggattattgaggccaggagttcaagaccagcctgagtaacatagtgagacctgtgtctctttaaaaaaaaaaaagaaaaaaaaaraaaaaaaaattagccagacttggtggcaggccactgtagacctagctactcaggaggctgaggcaggaggatcacctgggcccaggagtttgaggctgta

SEQ ID NO: 44779 - DNA, 201 bp, Homo sapiens
ctgttctctgtgtatttaccatgctgttgatgaccagccttgaaatacatgcaagaaatcaaggaagaaaactcttgatgtgtgtcctttaaagaatctargagatcagttatttgaaaaaatctcagaagttacctgtcttggatggtgggtagaaacagagaatgttaatgatatgaagaatttactcctaacttcata

SEQ ID NO: 44780 - DNA, 201 bp, Homo sapiens
catatcctggttttctttcctaattctctcacattcccccattctgcatggcacattcatttctccctctccgcctctctctatcctctcctccctccccsctttctctccatcctctcctcccccccttctcttctcatcctctcctccctcccccctctctcccccctcccccgcctcagcgtttttttatatagatgg

SEQ ID NO: 44781 - DNA, 201 bp, Homo sapiens
acatgataaatcattgtggctgcacacctcagagagctgtgtgtctatgggaaggagaggtggctcggggcctgtgagcatgcatccgcctgccagtgcgyggaaggtgcgctcctgtctgggaatcgagccaaagtgcggatctgttctttctcttagctcctgttttcacagttatgtcgctgttaggatgaggaaagg

SEQ ID NO: 44782 - DNA, 201 bp, Homo sapiens
tgaggtaggaactgttatcccttctattttacatgtgcagaaacagactcagagtcattaagaaatttgcccaaagtaagtggcagagctgggatttgagsccaggcagtctgacttcaaagcttatatttttagtctctaggccttactgtctcaaatcaggatgatttggtggtttagtgaatgtgggatagggggaag

SEQ ID NO: 44783 - DNA, 201 bp, Homo sapiens
caaagaataatcctaacagcaaattctctgcctccatctgataatgatgcagtccgtttggctaccaaacatgttcctataataaattgaactcatatgcmattggctaaaaggtgaatgatgtcagttcttatatggttttcaccctaggccaggagagccagactagcaggagtaggatgataacctttggcaggaaag

SEQ ID NO: 44784 - DNA, 201 bp, Homo sapiens
ttagccatggtggacgcacaaaatccaaccagggggcctttgatgatcacacacggtacagttccctgccaaaggcggtgtgtaaaccaggtggtgcttargggattataccaggcctccgctccctgggagaaaaacagagcaaaccttgcagttctggccatactcctccggaggatgtccctgataggggaagaaggg

SEQ ID NO: 44785 - DNA, 201 bp, Homo sapiens
cccagcacccactacgtaggctaccctctccccagtcctgcaggaaaggccccttgcccacaaatgcacaggggccagaatttttcattgttggaaattcyccccaccttgtgtagatactgtctccatctaatcatcactcctttgttctgctgtttggaacccccagaataaatctactctttgtatccttcatgtatt

SEQ ID NO: 44786 - DNA, 201 bp, Homo sapiens
cttttccttgtcctagagagacaatgcatatattgcttctcccagataaattaaaataaaaatacaacaacaagaaataattgggagtggagaaggtagamttgaccttcactagttctgaagaaatgcatttgccagcaatatgatccatgcctgttctctgtgtatttaccatgctgttgatgaccagccttgaaatac

SEQ ID NO: 44787 - DNA, 201 bp, Homo sapiens
gccaaatgggaccaatgctcagaaagttaagagatgtgttgagagaggtggctccatgcagaatcttttcagtcaagccaggggcactgatctttatcctrgagctatggagatctatattggtttgctagggctgccattacaaaatgccacagactggatggcttaaatgacaaacagaaatgtgttgtctcacactcc

SEQ ID NO: 44788 - DNA, 201 bp, Homo sapiens
cagcaaaagccttgctaatttcctagaactgctgctgtttataccaggcaaggtaggaagtgaaacaggcaagaattttcttaggtagccaaagtgagacrtgtcagcagaagaaaagccagctctacttttagacagagagagtcccttttatttattgaaggtattttcttgcatcttttccttgtcctagagagacaa

SEQ ID NO: 44789 - DNA, 201 bp, Homo sapiens
gagcccctgagtacccctctccattgccttccactcacttctcgcctcccacccaaggaaccactattctggatgttgtgttaactttttcccttgcttayatgaaaaaccctgaggaaaggaagtttcccaacaagcatttccacaataacctggagcattctttatttttctttttttctcaaggagcattgttattga

SEQ ID NO: 44790 - DNA, 201 bp, Homo sapiens
ttaggtgttttatattgataggctgatgagagcatcaacaagaatgtaaaagagatatggcccttgctggagcaggcctgaagtgcgggtttagcctaagkgcctgtagctgtccagggagggtttatcctggcccctcctcatcccatcctgtggttctcaacaaggtcacacattagagtcacctggggaggttgtata

SEQ ID NO: 44791 - DNA, 201 bp, Homo sapiens
cctaggctggtctcaaactcccgggctcaagcgatctctttccttgccctcccaaagtgctagaggtgcgagccaccctggttcagttctgtcaatggccstcttcctggtttccttgccatgtcctcacatttgtagagcagagagaaaggaagcaagctctcttgttatctcttctcataagggcactaatcccattgt

SEQ ID NO: 44792 - DNA, 201 bp, Homo sapiens
caggcgcctgtagtcccagttactcgggaggctgaggcaggagaaggcatgaacccgggaggcggagcttgcagcgagccaagattgtgccactgcacgcyagcctgggcaacagagcgagactccatctcaaaacaaaacaaaacaaaacaaaacaaaacagaagaaccaactggcttttctaaggccatgatttggcat

SEQ ID NO: 44793 - DNA, 201 bp, Homo sapiens
ctgctacacccaaaacttggcctataagatgttccaaagttatgacaaggatgagcctatctcttccatcatctctatcccctggtatactgcctggcacrtggatggtgctcaaaacatacctgatgaaggaatgaacaagggattgattccttttttgtttctctcttaggcaccaataaatggttgtcgatgtgaacc

SEQ ID NO: 44794 - DNA, 201 bp, Homo sapiens
gttctttttttggcaattttctaagggatcattcaggcatgtgagaagaagaatcaaaagacttggaaatactgcttttctcccatcattttcccttcatrcctcatctttggtttatcatttcttacagtacgtgtctggccaattacagactaggaaaccagttaatgttttaagaaagtctctacccacatagagtgt

SEQ ID NO: 44795 - DNA, 201 bp, Homo sapiens
ttgtgtggatatactacagttttggaagcattcacctactgaaggacatcttggttgcttcccaattttggtaattatgagtaaagctgctataaacattyatgtgcagttttttgtgtggacatacactttcagcttttttcactagataccaaggagtgcagttgctggatcacatggtaagaatgttttgttttgtaa

SEQ ID NO: 44796 - DNA, 201 bp, Homo sapiens
caccctcataacctaattacctccccaaagtcccatctccaaatcacatcacactggggattagggtttaaacatatgaatttggggttggggggtggacrcaaacattcagtccatagcagctactggtaattcactgaaaggatggtgccgaagagtacaggtcctagagttggaccctgtgggttcataccttagccc

SEQ ID NO: 44797 - DNA, 201 bp, Homo sapiens
tggtactgattatgcgggactacaaagttgttgggactcctggttgcaatctactgaagcctcttcaaactaacttaaatatggaatgtaaccaggcagtrgaggtataggcatgcatgggggcccaggatgacgggagtcaaaggcatcaagtccagctcttcgtgttcatgcctgggccgcctcatcttctccctgtgg

SEQ ID NO: 44798 - DNA, 201 bp, Homo sapiens
ctggctggtaaatattttccggcagccactttcaagagaacgctggaagtcagtaagtggtatacattcatggcctcaagaaacacagtgagaacaggctytgcaccgagaggctctcctgctgccactcgctgggcttcctgctctgaaacctgtttccagtttcgacaaaacctcacttccacgagggatttgcgatgc

SEQ ID NO: 44799 - DNA, 201 bp, Homo sapiens
aacaaacaaaaaaggaattctcttatcaattaaacccaattgttaggaataactgattcctaacaatatacatttcaaatcacctctccatatcatttatkattattattattttacagggccatcctaatacttccatccttgtgtgatgggactgttggcccccagtgcaggaattaccctctgcccccattacatttt

SEQ ID NO: 44800 - DNA, 201 bp, Homo sapiens
gctgagattgcgccactgcactccagcctgggtgagacagagcgagactctgtctcaaaaaaaaaaaaaaaaaaaaaaaaggtgttccaggaatggctaakcaccacacctttccttctcacttttcaggtgcattctgttgggacgggtcttgtccaggtctgctctgttagacctgtcattcctgggacaggtactgtt

SEQ ID NO: 44801 - DNA, 201 bp, Homo sapiens
gagttaagctgaactgatctttgacgataactggggtaggactcagggcaaattgatgctttaaaacttcgtcctttttttcttttctttctttttttagrgagaaggtcttattctgttgcccagactgaagtgcaatggtgcgatcacagctcactgcagccttgatttcctgggctccatccatccagcctcctcagc

SEQ ID NO: 44802 - DNA, 201 bp, Homo sapiens
taaaaatgataatagttgtattgggttgtggaattatagaggatattcttttccatatttttagtaatgtcattacattgcttatatactctgaagatctsggaagctgtaggttgtggcaaggcagtattttaggtgttttatattgataggctgatgagagcatcaacaagaatgtaaaagagatatggcccttgctgg

SEQ ID NO: 44803 - DNA, 201 bp, Homo sapiens
ggcaagacttgccggaaatgtgtgtcaatgaccaaatttaccattggagaaaaaatggggattaaaaacttaatttttttctcatcttaatttctcttggkcagtgaatatgacatggaaaatgatctattcaagttggggagttgggggaagacacagatctcatggaatctaagaaaaaggaggcctccagaaagagtt

SEQ ID NO: 44804 - DNA, 201 bp, Homo sapiens
cccctgcttctctcctcaactctaggtaggcttggtgggagtttgggcccagaggccccaccaacccctgagtgttcaatcagcaagccatccaccatctrccaccaccgtgatttgtccatattgcatcctgttgccttagcagattgcacttaaaagtaagtctaactacactgctgagtgctttataacccagattat

SEQ ID NO: 44805 - DNA, 201 bp, Homo sapiens
ccagagcccagatgagaactggaatgtcctggctcctgtggacattttctctgccacagataagggcatctcttctgtcctgggaattttacttcaactcmtagtgggtggttccagtatgttgtccactaagtaaggatggggttgtcatgcacagaacatgtcttcagagcaagtggggttgggagctggaaattgatg

SEQ ID NO: 44806 - DNA, 201 bp, Homo sapiens
cagtgggaagagagtctgtgacagggacagtcctgttactggggtattgtttctgctcagacttctaataagtagcggtttttcctgatgctaaaagttayccgtgttaaatataaaaagctggaaaatattaaaaagtataaaaagttaaaagagaaaaatcctttcatggatttttaaagggagactttttaattttaa

SEQ ID NO: 44807 - DNA, 201 bp, Homo sapiens
aagcctgacccagcacttgagctcagcagaaccaacgcggagcttctgtgtttaacctcctgagtgcttgcaggctcttggatgacacaatgtcacctatyacacggccttgctttcttgttacttttctaggggttatcagcggcctcacatgccctactcccatagactcaaaagttctgttcatgtcctgcaattttt

SEQ ID NO: 44808 - DNA, 201 bp, Homo sapiens
agtggttcatgcctataatcccaacactttgggaggccaaggcgggcagatcacctgaggtcaggagttcgagaccagcctggctaacatggtgaaacccygtttctactaaaaatacaaaaaattagcagggcatggtggcgcatgcctgtaaactcagctacttgggaggctgaggcaggagaatcgcttgaacccggg

SEQ ID NO: 44809 - DNA, 201 bp, Homo sapiens
ggagttcgagaccagcctggctaacatggtgaaaccccgtttctactaaaaatacaaaaaattagcagggcatggtggcgcatgcctgtaaactcagctamttgggaggctgaggcaggagaatcgcttgaacccgggaggtggaggttgcagtgagctgagatcgtgccattgcattccagcttgggcaacaagagcgaa

SEQ ID NO: 44810 - DNA, 201 bp, Homo sapiens
catgcctagctgataataatgagcaacttcctgggcgatcctactgcctcagcctcccaaataccacaattttaaaatcagacttataattattgtgactrtgtaaatgctgctcactggttagctgagaatgattacttttttaaaaaatatatatcttattatttttcctggagctgatagttaccctaattttttcac

SEQ ID NO: 44811 - DNA, 201 bp, Homo sapiens
gtagaagctttatagatttggatcttatgtttaggtttttattccatttcgagttaattttttatatagtgtaaggtaagggtccatctttacttttttgyatgtgggtatctggctttcccaggaccatttgttgaggagactatccttttcccattgagcggtcttggtatctttgctgaagatcatttgaccatatac

SEQ ID NO: 44812 - DNA, 201 bp, Homo sapiens
agccgttttagattcacagcaaaattgagaggaaggtccagagatttcccgtattgctcccgcccctaaacatgtttaacctatcccattatcaacatccrccaccagagtgatacatttgttacaactggtgagcctatactgacgcatcattatcacccaaagtccatagtttacattacggcttattcttgtacattc

SEQ ID NO: 44813 - DNA, 201 bp, Homo sapiens
agcgtttcaccatgttggccagactggttttgaaatcctgacctcaggtgatccactcaccttggcctcccaaagtgctgggattacaggagtgagccacygaacccggcctgtaatcaccacgtttttttgtttgtttgtttgttttgagacagagtctcactctgttgccaggctggagcgcgatctcggcttgctgaa

SEQ ID NO: 44814 - DNA, 201 bp, Homo sapiens
aacagtgcaccatagggtcgttttgataaagaagaaaggtagggcacttaacacagttcctggtaaagagagttcaaatgaaagtgaaggaggccgggcgyggtggctctcacctgcagtcccaagcactctgggaggcctgtaaggtgcctgtaatcccagctcctcgggatgctgaggcaggagaatcgcttgaacccg

SEQ ID NO: 44815 - DNA, 201 bp, Homo sapiens
gttgatagctgttttataataatgttattagcaatagtgatcgtggtagtggcaggaatactgctggttgtgctgcttgcagtagtggtactggtggtackgctggcagtgctggtggtactgctgctgctgctggtggtggtactgctgctggtggtggtactattggcagtgctgatactgtaccactgatagcactgg

SEQ ID NO: 44816 - DNA, 201 bp, Homo sapiens
aaggaacttaatatgctctgagcggctgcctagaccacaaaaatctgaattattatataattataatatgttttatattttataataaaaattttaaacayatatagaagtagcaagatggctcatgcctgtaatcccagcacttggggatgccgaggtaggaggattgcttgaccagcctgggtaacaaagcaagactgt

SEQ ID NO: 44817 - DNA, 201 bp, Homo sapiens
tgaggtttgtttgtttgagagggagtcttactctgtcacccaggctgatgagcagtggtgcgatctcagctcactggaacctctgcttcctgggttcaagygattctcttgcctcagcctcccgagtagctggaattacaggtgtgtgccatgatgctcatctaattttttttgtatttttagtagagacagggttttgtc

SEQ ID NO: 44818 - DNA, 201 bp, Homo sapiens
gtgagtttggagccttcacgaatgggattacgtccttataaaagagacctcagagagctttctaggcctcttgccaccatgtgaggatacaatgagcagayggtgttctatgaaccaggaaatgggccctcaccagattccaaatcttctggtttcttcattttagactttctagcctccagaactgtgagagataaatgt

SEQ ID NO: 44819 - DNA, 201 bp, Homo sapiens
tttctcattctgtggttgcctttaggagtacttttttagagccgttttagattcacagcaaaattgagaggaaggtccagagatttcccgtattgctcccrcccctaaacatgtttaacctatcccattatcaacatccgccaccagagtgatacatttgttacaactggtgagcctatactgacgcatcattatcaccca

SEQ ID NO: 44820 - DNA, 201 bp, Homo sapiens
tatggtattctgttatagcagccagaactactaagacacgaatcatttttaatggtgaaaataataagtggaaattatgaggaaaattggtaatgattttkggctataactgtggaaaagtagaatatatgtgtgcattaggtttctttagagggacagaactaacaggatatatgtaggtatgaaagggagtttattaag

SEQ ID NO: 44821 - DNA, 201 bp, Homo sapiens
tcactctaaggaatgggtatcattgttctagatgggaggtaaggatttgggacttaggaacagtgaccatgagggagggagagaggtggtgtctctgcttkgcctgcacctggtatctctgctgggcctgcacccacacccaaggctgaaggtgcaggaagaagcagaaaggaagcagaaaagaagaccctcatttgatac

SEQ ID NO: 44822 - DNA, 201 bp, Homo sapiens
ctctggtggtctagcagtgctggtcagtcaataagttattgtcctacataaaaagggacggtctctacctcccaagccttctgtcagtcacatctttattyggtgatatgtgcttattcctcctatgtgatttttacatctgtaagcagcttttcttggaagggtatgtcacaggtttcctgaataatattcagatgtcac

SEQ ID NO: 44823 - DNA, 201 bp, Homo sapiens
gaagaactagaacatcgccaggcccctggagcccctgagtacccctctccattgccttccactcacttctcgcctcccacccaaggaaccactattctggwtgttgtgttaactttttcccttgcttatatgaaaaaccctgaggaaaggaagtttcccaacaagcatttccacaataacctggagcattctttatttttc

SEQ ID NO: 44824 - DNA, 201 bp, Homo sapiens
tattgcaatcatagctcactgcagccttgaactcctaggctccagctatcctctcctctcacctcatcctgtgtgagccattgtgtccagttatctctcctttttttttttttttatttattttgggataagaagcaaaggaaataaagttggatgttatctcttaatatccaaacattatattaaagtttactgcatgct

SEQ ID NO: 44825 - DNA, 201 bp, Homo sapiens
gaattctgtaacttgggaatggaaatcaaaggctttttgatcctttgaaccagaataagcacagattcatataggtgggaagtctgtgttaacaaaattamttctcaaacattacacagtttcgggcttttgtgccaatgctttgtgcctcatactctcttctctgttagtagctagtgtgcctgtgttttcttgttgctt

SEQ ID NO: 44826 - DNA, 201 bp, Homo sapiens
tggctcattttattcatttactaaattctcatgtaattaggtaccttcttttttctttttcttttttttttcttagcagaccttaactatgtttttccacwcagataacacatgaatatgttctcattgtaaaacattcacataatacagggaaaggatcagctctcccttaatcccccttttcctttgcaggtccacctt

SEQ ID NO: 44827 - DNA, 201 bp, Homo sapiens
aacattcacataatacagggaaaggatcagctctcccttaatcccccttttcctttgcaggtccacctttctccacagaagtaccactgtaatcactttcrtatattttcttttttaaattattttttatttttattttttatgttttttgagacagagtctcactctcttgccgaggctggagtgcagtggcacaatctt

SEQ ID NO: 44828 - DNA, 201 bp, Homo sapiens
cactttcgtatattttcttttttaaattattttttatttttattttttatgttttttgagacagagtctcactctcttgccgaggctggagtgcagtggcrcaatcttggctcactgcaacctccgcctcccaggttcaagtgattctcccacctcagcctcccaagtagctgggactacaggtgtgtgccaccacgcctg

SEQ ID NO: 44829 - DNA, 201 bp, Homo sapiens
cctagacctaacaggttttactttaattgttaatggccttgtccatcattctctttattttgatcatatagtaggatcactctagtactaaatttgtttgtttggttttggtttattttttatttttattttttttgagacggaatcttgctctgttgtccaggttgtagtgcagtggcacaatctcggctcactgcaacc

SEQ ID NO: 44830 - DNA, 201 bp, Homo sapiens
gtattctcagacttcttaattattgccaactaataggtaaaaattgtgtctttgtttcaatttgcatttcttcaaaggtgaagtttaacatgttttcattyatattgacccatttgtatttttttctttgaactgcttctttatatcctttacccatttctacaatttaaaaaaatattattactggtttatgtggcctta

SEQ ID NO: 44831 - DNA, 201 bp, Homo sapiens
cccggctaatttttttgtatttttttagtagaggcagggtttctccatggtggtcaggctgggtcttgaacacctaaccccaggtgatttgcccgcctcarcctccgaaagtgctgggattacagacatgagccaccgcgccaggcttccattttcagtgagttgtttttaaaacacattaagctagttttgaaagtagtt

SEQ ID NO: 44832 - DNA, 201 bp, Homo sapiens
tttaagcttgctgttcagaaatagttgtccagtagattttcatccagtagtgacattgatatttctgtttgatggggttggggtgatttttttttttttttggtctgttctgaaaatctgtgctgtttccacatagcttatatatagttaaaagtataaatggagtgcttactatgtggcaaggactgtcccagatgcttt

SEQ ID NO: 44833 - DNA, 201 bp, Homo sapiens
tttttaattgatcattcttgggtgtgatttggcagggtcacaggacagtagtggagggaaggtcagcagataaacaagtgaacaaaggtctctggttttcytaggcagaggaccctgcggccttccgcagtgtttgtgtccctgggtgcttgagattagggagtggtaatgactcttaaggagcatgctgccttcaagcat

SEQ ID NO: 44834 - DNA, 201 bp, Homo sapiens
actaagtttattagacttctgtgtaaagtaagaataaataaactcaaagtgaagacttgaggaagtggattatgcttaaatgcatggattttgtgacatcygttactttactacctgtttcattgctatcgttaaaataagtgaagctaccgaattagatacctgctctcaaaatagaaaagttgttatggtacaaaagga

SEQ ID NO: 44835 - DNA, 201 bp, Homo sapiens
attaggtatatctcctaatgctatccctcccccctccccccacctaattgcagtctttttggagatttaaatatttcattgaatggaatcaagatttattwtttttttttttaattttttaatttttttttttttttgtgagacaaagtcttgctctgtcacccaggctggaatgtaatggcataatcccggctcactgca

SEQ ID NO: 44836 - DNA, 201 bp, Homo sapiens
tcactacattggccaagctggtctcaaactcctgaccttgagtgatccatccatgttggtcccccaaagtgctaggattacaggcatcagccatggtgctyggctcttactgaattcttacatgtgaactatagctcatctgaagcaaaaataaggcaattgggaataattgtagatattatcaggagaataatgctagcc

SEQ ID NO: 44837 - DNA, 201 bp, Homo sapiens
gctgtttgtccctgtactaaatggctccattctgctgtactcgttttagttttcatgtctttaacagtcgttctgattcttccatttctattactgcttgyttaagtgtgcctgtagcagtagcccttctccaccttcataatgtgccttctgatctgctttcattttggagaccagacaaactaagtttattagacttct

SEQ ID NO: 44838 - DNA, 201 bp, Homo sapiens
aaatacttagttaagattttgccacatagtactttaactgtgttgctcttttttttttctgttgttttatctctaaaacctaattatagtcttttttttttaattattattatactttaagttttagggtacatgtgcacaatgtgcaggttagttacatatgtatacatgtgccatgctggtgtgctgcacccattaact

SEQ ID NO: 44839 - DNA, 201 bp, Homo sapiens
taagccattcacatttgactatctcataggcacttctaatacatcaccttcctcctcagatttgttgctacgccactgtttcatatttcattaaatagcamcacctgattcttcaaatcagaaatcttaatcttgatccctccattgccaaccatttcaatcagtaatcaagttattttgattttaatacttaaacacatt

SEQ ID NO: 44840 - DNA, 201 bp, Homo sapiens
agctactcacgaggctgaagccagaggatagcttgagcccaggagttctaggccagcctggacaacacagtgagaccctatctcaaaaaaaaaaaaaaaaagaaagaaagaaaaagaaaaacagaaaacaaacaaaaagaacaggaatcagcaaattaaggtttttgggccggatttgccaccgtgacccgtacccccatt

SEQ ID NO: 44841 - DNA, 201 bp, Homo sapiens
attttgtgaagaagagtgatggtctgtcttaagactgttcctatgctgtgaatgataatattttgttcaacaagtacttacagagtacctggtgtgtaccrgatactgtgaagaggtgaagagagaagggcaggtcctcttctccaagagtttaaagacttaaagttaagttgtaaatctactaatttattgtttttcact

SEQ ID NO: 44842 - DNA, 201 bp, Homo sapiens
gtagctcacacctgtaatcccagcactttaggaggccaaggagggcagatcacttgaggtcaggagtttgagaccagcctggccaccatggtgaaacaccrtctctactaaaaatacaaaaattagccaggtgtggtggcacatgcctttaatcccagctactcgggaagctgaggcaggaaaatcacttgaacctgagag

SEQ ID NO: 44843 - DNA, 201 bp, Homo sapiens
cagctactcacgaggctgaagccagaggatagcttgagcccaggagttctaggccagcctggacaacacagtgagaccctatctcaaaaaaaaaaaaaaaaagaaagaaagaaaaagaaaaacagaaaacaaacaaaaagaacaggaatcagcaaattaaggtttttgggccggatttgccaccgtgacccgtacccccat

SEQ ID NO: 44844 - DNA, 201 bp, Homo sapiens
ctgtatgtgtggcttttgcttatagataataatgatatggattaagacacaaatagttcacaaacttttttcactaaaaaattcacagtggccatgactayacaggtttaaatttaaaaaatgttcatttgaatattttaagaagcaggtactttagttagccatatctttttttaaaaaggtcttattttgaaatcattt

SEQ ID NO: 44845 - DNA, 201 bp, Homo sapiens
cctttaagaggtaggacctaatgggaggcatttaggtcacgaggctccactttcatggatggcttggtgccattctcacaatagtgagtgagttcttgctmtctcaaaactgaattagttctcttgggaactgattaattcctgaaagagcaggttgttataaagtaaggactttcttagggcttggcccctttgcacata

SEQ ID NO: 44846 - DNA, 201 bp, Homo sapiens
tgccagagccacatggtgaaccattgtgtagcagctacagcttgcccgtgaaaattctgtaaaaacttggagaaacatctgttgccagtgaaacaatcagsatacataagtgtatatgcaatatgtccacaaccctgtttaaaaaaaaaaatgaggagaaaataccaagatatatatagctactctttggggtggtgggac

SEQ ID NO: 44847 - DNA, 201 bp, Homo sapiens
tctcaaaaaaaaaaaaaaaaaaagctccatttacccatcactcagcttcagcttcagcttcagcagctgttaacattttaccaaactgtctcatctattcytctcaccctcccccatcttttttcttggtgtattttaaagcaaataccatgtgactcccatttggcctgttataaataaataaataaaaataaagcaaat

SEQ ID NO: 44848 - DNA, 201 bp, Homo sapiens
ggaggattgcttgagcccagcagttgcagagtgcagtgagccgtgatcacaccactgcactccagcctgagcaacaaagcgagaccctgtctctaaggggraaaaaaaaagaatttattttacccatacacctattcacatgtgtgcatgcaaacctaaccttctttgtgtttctttataattaataggttttatcgtaac

SEQ ID NO: 44849 - DNA, 201 bp, Homo sapiens
atattacctaggatagtctcaaacgcctggcctcaagcaattcctcctgccttggcctcccaaagtactgggattaaaggagtgagctaccctgcctagcwcacccctcagttttaacaatgaaaaatgtctccagaaattgccaaatgtggggagggggagttgtgcagtgatgatttactttgagaaccactgctttat

SEQ ID NO: 44850 - DNA, 201 bp, Homo sapiens
cgcccggctaatttttgtatttttttttagtagagacaaggtttcaccatgttggccaggctggtttcaaactcctgacctcaagtgacccacccatcttkgcctcccagagtgctgggattacaggtgtgagccaccgtgccttgccaacaggttttgtttgtttgttttgagacgagtcttgcatggcttactgcagcc

SEQ ID NO: 44851 - DNA, 201 bp, Homo sapiens
aagtgatagagccagaatttgaacccaggtctcttggttccaaagccatgctctttctgctatagcatacgacctctctagctcaagtattattatttttyggctgactaaaattacttttttagcaatccaaattgtcaagttctttgttcagggtttcatctttgttgaaggtgtattgagaaggtcaatgaagtgtct

SEQ ID NO: 44852 - DNA, 201 bp, Homo sapiens
tcatattgattatcacaatacttagtgtaaccaagtgctataattattttggttttatattagtagctgattaaaatttcaatgcataaattctaatgcasttatttcgaaggtaactcatttcactcttagaaagcctgtttttgcaacaggctgttgagcattgcaagtcatggaaaaacagctaattttccattttgg

SEQ ID NO: 44853 - DNA, 201 bp, Homo sapiens
attttcaccactgttctacagataactgtaattttttttttttttttttgagacaaagtcgcactctgtcgcccaggctggagtgcagtggcgcgatctcrcctcactgcaacctccgcctcccaagttcaagcaattctcctgcctcagcctcccaaatagctgggactacaggcgcatgccaccatacccagctaattt

SEQ ID NO: 44854 - DNA, 201 bp, Homo sapiens
aaatttatagactataggcaattataccacaaagaatttattttttgattatgctagttttaaaaacagggtctttatttttattcagctatagtaagcgkacgttaaaagcttaccaaaagttatcagtgttagatctaatgatattggcagatatttgaatgactaaattcccactgtcattctgtactgggcatgatt

SEQ ID NO: 44855 - DNA, 201 bp, Homo sapiens; identical to SEQ ID NO: 7979

SEQ ID NO: 44856 - DNA, 201 bp, Homo sapiens; identical to SEQ ID NO: 7981

SEQ ID NO: 44857 - DNA, 201 bp, Homo sapiens
tttaggaatatcagtttctatcatggggtgataaacagaaactcatcctcaggggctactgagatatatgtcaggtacccctttacaacatgacctcacaytggtgtgcttttttcagttatgtctgtttttcacagtttctctatcttcccttataatcagctgtcacttttgccgccgtcttgtgtgcctgcctcctgc

SEQ ID NO: 44858 - DNA, 201 bp, Homo sapiens
gactattgttcccaaaaagcaccataatcagcttgtaagaactatgtatacatataagaatgggtagaaataaaaccccagttctcttccatattccccayctagacaccagaaagaattatgataaatccaacagatgggtgagcaaaaaagtagttgatgcttctcagccagcaatgctaaaaaccaaccaactcggct

SEQ ID NO: 44859 - DNA, 201 bp, Homo sapiens
ccacagttcgggtaggagagaaaagcccccgcagcgcccacattccgtcccgccgctccgcggcgcagcctgagcgccacacaaaggacgcggccgactcyagcgaccctgcggcgctcccgggcgcgagccgccggggtcgggcgggcgagcactagcaccgccccgcagagcggcaggctgacagccaggcgcgggcac

SEQ ID NO: 44860 - DNA, 201 bp, Homo sapiens
atcccctcagaaactgaggaacaataaaaagcatagccagaggttgttttaaaaaattaccaggctgggcacaatggctcatgtctataatcccggcactytgggaggctgaggcagaaggaccacttgagcccaagtgttggagaccagctggggcaacatagcaagaccccatctcaaaaaaattatcatatgtctaga

SEQ ID NO: 44861 - DNA, 201 bp, Homo sapiens
caggtgtggtggcacatgcctttaatcccagctactcgggaagctgaggcaggaaaatcacttgaacctgagaggtggaagttgcagtgagctgagattgkgccactgccctccagcctgagcaacagagggagactcgaaagagagagagagagagagagagagagagagaggagagagagagaggagacagagagagaa

SEQ ID NO: 44862 - DNA, 201 bp, Homo sapiens
ctgttaagaatttctttggctttttttttgttgttgttttgttttgtttgagacagagtctcactctgttgccgaggctggagtgcagtggtgcaatctcrgctcactgcaaggtccgcctcccaagttcacgccattcttctgcctcagcctccggagtagctgggactacaggcgcccgccaccactccggctattttt

SEQ ID NO: 44863 - DNA, 201 bp, Homo sapiens
attgtgccactgccctccagcctgagcaacagagggagactcgaaagagagagagagagagagagagagagagagaggagagagagagaggagacagagaragaaagagagaaagagaaggaaggaaggaaggaaggaaggaaggaaggaaggaaggaaggaagaagaaaagaaagaggaaaacagaaacattgcaacaat

SEQ ID NO: 44864 - DNA, 201 bp, Homo sapiens
actgccctccagcctgagcaacagagggagactcgaaagagagagagagagagagagagagagagagaggagagagagagaggagacagagagagaaagaragaaagagaaggaaggaaggaaggaaggaaggaaggaaggaaggaaggaaggaagaagaaaagaaagaggaaaacagaaacattgcaacaatgactactg

SEQ ID NO: 44865 - DNA, 201 bp, Homo sapiens
tccagcctgagcaacagagggagactcgaaagagagagagagagagagagagagagagagaggagagagagagaggagacagagagagaaagagagaaagrgaaggaaggaaggaaggaaggaaggaaggaaggaaggaaggaaggaagaagaaaagaaagaggaaaacagaaacattgcaacaatgactactgagttgga

SEQ ID NO: 44866 - DNA, 201 bp, Homo sapiens
gagagagagagaggagagagagagaggagacagagagagaaagagagaaagagaaggaaggaaggaaggaaggaaggaaggaaggaaggaaggaaggaagragaaaagaaagaggaaaacagaaacattgcaacaatgactactgagttggaagatagacaatcattgactgttcttagcccagtagatgtgctggattgt

SEQ ID NO: 44867 - DNA, 201 bp, Homo sapiens
caaataccacagattagattcaaaagcaaaaatcccctcccttaacttcaagtaactttcctaaacgtttcaatgaatttgactattgttcccaaaaagcmccataatcagcttgtaagaactatgtatacatataagaatgggtagaaataaaaccccagttctcttccatattccccatctagacaccagaaagaatta

SEQ ID NO: 44868 - DNA, 201 bp, Homo sapiens
tagtagttgttaagtagtctgccctgatattcttactatgaatattcattctgtctctttttctggtttcttttcctgtgattattcttaaattcattccrtagagttttagcagcaggcttctcgttggcttgatatcttctctggggatctcatctactttcttgccacttatgtccattctccaggctttgctgagtt

SEQ ID NO: 44869 - DNA, 201 bp, Homo sapiens
acgctttactttcatttatccaactagattttaagaaaatttaaaaatgaagtggcccatgccatacagcgagagagcgaggcacagacaggacagaatgmtaaatgttgaaatatgtacaaactgtcattgaaggattaatttctgttcttgcggcctcccagaggctacacccagtacgcgatatccgaggtgaatctt

SEQ ID NO: 44870 - DNA, 201 bp, Homo sapiens
ggtagaaataaaaccccagttctcttccatattccccatctagacaccagaaagaattatgataaatccaacagatgggtgagcaaaaaagtagttgatgmttctcagccagcaatgctaaaaaccaaccaactcggctagacacaggaagtgtcccactttaaacaccacaaaaatttctgtggatttctttaattgtaa

SEQ ID NO: 44871 - DNA, 201 bp, Homo sapiens
cgtaaaatgaagagttcttgagattggatgtaccatgtgaatgtacttaacacttctgaactatacacttaaaaatgagtaagacggtaaatttatcttaygtgctattttaccacagttggaagaaaacttcatctctcatcaaattaatcttttactttccgtatcttagaaccttgtcagaagctttagggtcattta

SEQ ID NO: 44872 - DNA, 201 bp, Homo sapiens
attcaaggcaatatttgaatatacattatgggtgatatcaagattaaccatttgtgctgccagaaattttaaatctggtagagggatatattacttttttwaaaaatatttttcttaaaaaaagagattaaacatagcttaaaagaaaggcatttgactcaattcctgttctctcaaattgatattccacaaattgctacc

SEQ ID NO: 44873 - DNA, 201 bp, Homo sapiens
gatagacaatcattgactgttcttagcccagtagatgtgctggattgtggacctgtagtattgatattaatagtgtgtcaatatccaaaagaaaccattcrgtaaagtgccatttgtggaagaggctaggtttattgagatatctaactttcctagttaatatctatggcccagatagtcagatttgcacttcttttctta

SEQ ID NO: 44874 - DNA, 201 bp, Homo sapiens
tttgaagctataaattaatctggggaaacttaacatctttacaatcaatattgaatcttccaatccgtgaacatttattgcttgccttctaaatgaatcargcaacttctcatctcgttctgtgctctaggactgattttacaaaatgagaattatctgtttcttcagagtatagctaaattggcctttcctggggaaaag

SEQ ID NO: 44875 - DNA, 201 bp, Homo sapiens
gagaaattagaaccatgctatctgtgagtagtttaattagttggaccaattttaatggacccttttagcttaatctctttaaattctatgattagattttrctttgctgattaattaattaatgcttgaatttggggctttggtatattaatttagatattatgttgaaatgtgtaagctccgaaaagcatttcctattat

SEQ ID NO: 44876 - DNA, 201 bp, Homo sapiens
attttgataacttttttattctgaaaggcagtgtaatatagttaaagatatgggctctggagctggataacctaagaaatcctaggtcagctatttattakttatattagttaatgtgactttgagcaggttacttaacttgtctaagcttcagttttctccatattaaataaaaataacagtaactatctcgtaaggtag

SEQ ID NO: 44877 - DNA, 201 bp, Homo sapiens
tctaaaatgtgtgataagctaggacgtagtggctcacacctacaatcctagcactttgagaggctgaggcaggaggatctcttgaggccaggagttcaagmccagcttaggcaagaaacagcaagacttggtctctacagaaaaacttaaaaattagctggatgtggtggcacacacctgtagtcccagctgctcagtagg

SEQ ID NO: 44878 - DNA, 201 bp, Homo sapiens
gtggaccctcgaaatcaactgccctgcttttccctcctcactagaagtacatagattacctatacttctggaaagttcctccagttctctttttttttttyccctcaggagccctatgttttctcctgtccagatctgcatttcttggttttatcattcctctttcttcccattggccccctttatagcccaggtcctcag

SEQ ID NO: 44879 - DNA, 201 bp, Homo sapiens; identical to SEQ ID NO: 7973

SEQ ID NO: 44880 - DNA, 201 bp, Homo sapiens
tagtcaagataccaaagccaggtcagtgataaaagaagaaaacttctgagtgtagttgtgagaggaaagtgattctattcagtgtaattgctgtaaaccaraaagaggattaattgattcaaggattcacacatgtaaaagtttagcatgaataaggaggaactgattttatagatattctaaaatgtgtgataagctagg

SEQ ID NO: 44881 - DNA, 201 bp, Homo sapiens; identical to SEQ ID NO: 7974

SEQ ID NO: 44882 - DNA, 201 bp, Homo sapiens; identical to SEQ ID NO: 7975

SEQ ID NO: 44883 - DNA, 201 bp, Homo sapiens
gccataggtaatgtttatgtccaataaaatctaggaacctctgtctggaactttgctcttcttgccatgaataccttaggaagtattaaaaaacaggccartgtaatatgagtaggttttcttgtttgttacttttctaagaatattttacttcccttagcaggcttttggctagctttcaaagctgccaccctggccagg

SEQ ID NO: 44884 - DNA, 201 bp, Homo sapiens
ggcctctatctcgggcccgcccagaattcccagacggtgcccggttgccaggctctgggctggagcggtgtctcttccttcctgggaatggatgtgcggcggggggggactgcgcccggctggggcggggccgaatcgtgccttttagatagtcacaacttagcctcctccttttccatccgcgatttttttgggtcagta

SEQ ID NO: 44885 - DNA, 201 bp, Homo sapiens
gaatcagaatttggccactagttagtgcagactacaaattgcttttctgaaagggtatatggctctgagatcagctcttctgataaagggaaggagagagwctcaagggtgcatcagggctagtgtgaagagctcggagggttcagacagacagaataagtgacataaggcccagcacggtagctcacacctgtaatccca

SEQ ID NO: 44886 - DNA, 201 bp, Homo sapiens; identical to SEQ ID NO: 7976

SEQ ID NO: 44887 - DNA, 201 bp, Homo sapiens
gctctgtttcccttggaaactaaatttctaaattggtaatccattgcctcttgattatttctcttctctgagtttataccttaaaatttcttgacttcttsccatttgctactttatattagccttaggctaataagtatagagctctccctgaaggatgaataaaagtcatggagcctgtagatcataataacaccaatt

SEQ ID NO: 44888 - DNA, 201 bp, Homo sapiens
gaagattgcttgagcccaggaatttgaggctgcagtgagctacaattccagcctgggtgacagagtgagaccatatctctaaataaataaataaatactcaaaatattcaaaaaataatacaaataaaaaaactatacaggataacaactatttacatagtgttcacattgtattaggtattacaaataatctagagatga

SEQ ID NO: 44889 - DNA, 201 bp, Homo sapiens
ttagagaatcccaggtcatttacctgagcctatactgtaaggatactgcttgggtaagcaagcatcctaccctctctgtcttagagatagggagaaccatraggtggggtgttccctaatcctaggaagaatgttcaaacttcctgggaaatctgaaagaaccacaagaaaacaaacatgcctgaccacctccccaaagtg

SEQ ID NO: 44890 - DNA, 201 bp, Homo sapiens
tgctaggattacaggcatcagccatggtgctcggctcttactgaattcttacatgtgaactatagctcatctgaagcaaaaataaggcaattgggaataawtgtagatattatcaggagaataatgctagcctattttgagttttctaacttaatctgctaaatagatttaaaattacaagtttagtttctagttaaataa

SEQ ID NO: 44891 - DNA, 201 bp, Homo sapiens
aacttggagtctctccactgtctctaccacacctgcagctgtgttatcaagaagctggagaatccatattggaatactgctatagaaacattttgcctccmcagctttgtttcatagccaaaaaaaaaaaaaaaaaaaaaaaaaaaaaaagagagagaaggatggagggaagagaaggaatgagagaacagacaaatgaaa

SEQ ID NO: 44892 - DNA, 201 bp, Homo sapiens; identical to SEQ ID NO: 7990

SEQ ID NO: 44893 - DNA, 201 bp, Homo sapiens
ggggcgcgatctcggctcactgcaacctctgttgcccgtgttcaagcgattctcctgcctcagcctcctgagtagctgggattacaggtgcctgccaccgygcctggctaatttttgtagtttttagtagagacagggtttcaccatcttggccaggctggtcttgaactcctgacctcgtgatccgcctgcctcagcctc

SEQ ID NO: 44894 - DNA, 201 bp, Homo sapiens
actgcagcctccacttcccaggctcaggtgattatctcatctcagcctcccaagtagctgggactacaggcatgtgccatcatgccctactaattttttcttttttttttttttttgagatggaattttgttttgctcttgtcgcccaggctggagtgcaatggcgtgatctcgggtcactgcaacctccacctcccgggt

SEQ ID NO: 44895 - DNA, 201 bp, Homo sapiens
cagcaaattactcattcaacaagtagttattaggtacttgttatatgtcaggcactgtttactgctgtatccctagcgcaaagatcaagagacaaaatgtraagcctcctacctgcctcaaggcttaaattctaacacactcgtcaattgatcctctcattactcagattatatccaccccatttaattagtaataattgt

SEQ ID NO: 44896 - DNA, 201 bp, Homo sapiens
ggcaaagctaccttttgggatgctggaaatgtgtttatcttgatctgagtagcagttactggtatgtgtacatatgtaaaaatcctgtgcacttgactgcrtgtactatgatatacctcacttttaaaaacaattttttaatgatcgcattggatattgacaaaggttacttttgttcattgtaaggaaaacctcttttcc

SEQ ID NO: 44897 - DNA, 201 bp, Homo sapiens
ccgcgccaggcttccattttcagtgagttgtttttaaaacacattaagctagttttgaaagtagttttgttttttttgttttttatttatttatttatttwttttttaattgatcattcttgggtgtgatttggcagggtcacaggacagtagtggagggaaggtcagcagataaacaagtgaacaaaggtctctggtttt

SEQ ID NO: 44898 - DNA, 201 bp, Homo sapiens
aagagtgatggtctgtcttaagactgttcctatgctgtgaatgataatattttgttcaacaagtacttacagagtacctggtgtgtaccagatactgtgawgaggtgaagagagaagggcaggtcctcttctccaagagtttaaagacttaaagttaagttgtaaatctactaatttattgtttttcactttaatatcttt

SEQ ID NO: 44899 - DNA, 201 bp, Homo sapiens
aggcttccattttcagtgagttgtttttaaaacacattaagctagttttgaaagtagttttgttttttttgttttttatttatttatttatttattttttwattgatcattcttgggtgtgatttggcagggtcacaggacagtagtggagggaaggtcagcagataaacaagtgaacaaaggtctctggttttcctaggc

SEQ ID NO: 44900 - DNA, 201 bp, Homo sapiens
acttcctcagacacccccaaaacaaacaaacaaaaaatgttccttttaatagtcccaaatcactaccccctcagacacccccaaaacaaacaaacaaaaartgttctttttaatagtcccaaatcaccaccctctcagttaccataccatttccaatcgcgctgacatagccttggtcatcaagtgatacatcaagtcagc

SEQ ID NO: 44901 - DNA, 201 bp, Homo sapiens
acttaaaggcctttattgttatttagctgagtgattaattttcttttctcttttttgagatggagtctcgcgctgtcgcccagccttgagtgcagtggtgygatctcagctcgctgcaacctccacctcccgggtgcaagcgattctcctgcctcagcctcctgagtagctgggattataggtgcccaccaccacgcccgg

SEQ ID NO: 44902 - DNA, 201 bp, Homo sapiens
catacctagaaagtaccagagcactcaatatttccttgataatgttgaaagcttgatgaaccgtggttttatcagaagtattacaagataaaactcttttrggaaaaactgttcctgttttgttttatcccctgtgcctacatgttgcctgacatggaagatgttcagtaagtatttattattgaatcagttgcctaattc

SEQ ID NO: 44903 - DNA, 201 bp, Homo sapiens
ccctcaatccatcttcccctttcagtccattgttcccacagttcgggtaggagagaaaagcccccgcagcgcccacattccgtcccgccgctccgcggcgmagcctgagcgccacacaaaggacgcggccgactccagcgaccctgcggcgctcccgggcgcgagccgccggggtcgggcgggcgagcactagcaccgccc

SEQ ID NO: 44904 - DNA, 201 bp, Homo sapiens
ctatgtattgaacttcatttagcaacatattattgcaatagtacagtatttaagctgcatattctcttgactgcattatcctttaaaatcagtatattctrtgagatatggctatggatatatatatttcctctcctatttatatcctaagattttcttaaaggataattttactgttttaggctttatgtttttcagttt

SEQ ID NO: 44905 - DNA, 201 bp, Homo sapiens
tacaaaagccttacattcctttctgtttctcacccttcttttcttaagtcaaacttcatgggagacagggaaggaatcaggggaagcttaatacttgacartatcaacctagctaattcttagttgaattaatgcctatggatttctaagtaggtagagtgtggattctcttccattttacagtatctgtgtggaccctcg

SEQ ID NO: 44906 - DNA, 201 bp, Homo sapiens; identical to SEQ ID NO: 8041

SEQ ID NO: 44907 - DNA, 201 bp, Homo sapiens; identical to SEQ ID NO: 8043

SEQ ID NO: 44908 - DNA, 201 bp, Homo sapiens
catttccaattccaacctctgagtgttaaaatagcctcagggtaagtttgaagtttgtattttgtgaagaagagtgatggtctgtcttaagactgttcctrtgctgtgaatgataatattttgttcaacaagtacttacagagtacctggtgtgtaccagatactgtgaagaggtgaagagagaagggcaggtcctcttct

SEQ ID NO: 44909 - DNA, 201 bp, Homo sapiens
acccacctccctcccggacggggcggctggccgggcagaggggctcctcacttcccagtaggggcggccgggcagaggcgcccctcacctcccggacgggkcggctggctgggcgggaggctgacctccccacctccctcccggacggggcggctggccgggcagaggggctcctcacttcccagtaggggcggccgggca

SEQ ID NO: 44910 - DNA, 201 bp, Homo sapiens
tagtaccaaggatttttttggttgggggagacaggatctagctctgttgcccaggctggagtgcagtggtgtgatcactgctcactgtagtcttgatctcyccagctcaagcgatccttccacctcagcctcccaagtagctgggattacaggtgtgcaccaccatgcccagccaatttttatttcagtttttgtagcgac

SEQ ID NO: 44911 - DNA, 201 bp, Homo sapiens
tttgggttggtttggtttgggtttttttgttcgtttgttttgttttttgggttttttgagacagagtctcactctgtcgcccaggctggagtgcagtgackcaatctcggctcactgcatcctctacttcccaagctcaagcggtcctcctgcctcagcctcctgagttgctaagagcacaggtgtgtaccaccatgtttg

SEQ ID NO: 44912 - DNA, 201 bp, Homo sapiens
ctcccggacggggcggctggccgggcagaggggctcctcacttcccagtagggccggccgggcagaggcacccctcacctcccggacggggcggctggccrggcggggggctgacccccacctccctcccggacggggcggctggccgggcggggggctgacccccacctccctcccggacggggtggttgccggccggag

SEQ ID NO: 44913 - DNA, 201 bp, Homo sapiens
aattctatgattagattttactttgctgattaattaattaatgcttgaatttggggctttggtatattaatttagatattatgttgaaatgtgtaagctcygaaaagcatttcctattattttatatctttaatatcctatgatattatctaaggtttaagggagataaaggcacgaagtagttaatttcagattatattt

SEQ ID NO: 44914 - DNA, 201 bp, Homo sapiens
aatctccagttaataaagtttcccattgttaaaaatatcacaggccaggtgcggtggctcatgcctataatctcagcactttgggagcccaaggagggagsatcacttgaaaccagtagtttgagaccagcttgggcaatatggcaaaaccccatctctaccaaaaaaaacaaaaagttacttgggaggctgaggtggaaa

SEQ ID NO: 44915 - DNA, 201 bp, Homo sapiens
cacttctcagacggggcggctgccgggcagagacgctcctcacatcccagacggggtggcagggcagaggcgctccccacatctcagacgatgggcagccrggcagagacgctcctcacttcctagatgggatggcggccgggaagaggcgctcctcacttcctagatgggatggcagccgggcagagacgctcctcactt

SEQ ID NO: 44916 - DNA, 201 bp, Homo sapiens
cgtatttaaccaagaaatataaaaacttagtgttcacacaaaagcctatacataaatattttgtttataaactaaaactagaagcagctaggctttgggakgtgactaagctgttacatccatccatacagtgaaatactactcggcaacaaaaaaagtgaactaccaatgcatacaacacgatgaatgaatctcaataca

SEQ ID NO: 44917 - DNA, 201 bp, Homo sapiens
aattgtgtttgatcttctggcctttgtcttaaagcagttgaaaatgaagttttgcttcctctccttgcttctgctctgcattcatttaagtgaccgatgtrtgccagttaattagctagatttcaaataatatttaaagtagcatcagaaccaaggggatatcaatctaccattgctgacttctctccatttagttaagac

SEQ ID NO: 44918 - DNA, 201 bp, Homo sapiens
ttcctagatgggatggcggccgggaagaggcgctcctcacttcctagatgggatggcagccgggcagagacgctcctcacttcccagacggggtggcggcygggcagaggctgcaatctcggcactttgggaggccaaggcaggcggctgggaggtggaggttgtagcgagccgagatcacgccactgcactccagcctgg

SEQ ID NO: 44919 - DNA, 201 bp, Homo sapiens
tcccagcactttgggaggctgaggtgggcagatcatgaggtcaggagatcgagaccatcctggctaacacaatgaaaccctgtctctactaaaaatacaamaaattagccgggcatggtggcgggcacctgtagtcacagctactcgggaggctgaggtaggagaatggcgtgaacccaggaggcggagcttgcagtgagc

SEQ ID NO: 44920 - DNA, 201 bp, Homo sapiens
tctttaatgtcttaaacaagcttgaacaaatccttagataggaaaagtattcactttttccaaaggaaatattaacatgctaattactgatatattacccrtaggttttcttaatatctcaaatgtaaactgtgaataattttttctccaaaggataaatctaccaagaaactctgatatatgcaaatacttatgcatatt

SEQ ID NO: 44921 - DNA, 201 bp, Homo sapiens
gtctgcaatcacggcaccttgggaggccgaggctggcggatcactcgcggttaggagctggagaccagcccggccaacacagcgaaaccccgtctccaccmaaaaaatacgaaaaccagtcaggcgtggcggcgcgcgcctgtaatcgcaggcactgggcaggctgaggcaggagaatcaggcagggaggttgcagtgagc

SEQ ID NO: 44922 - DNA, 201 bp, Homo sapiens
gcccaagagtttgaggctgcagtgagctatgatcgtgccactgctgcactccagcctgggcaacagagcgagactccgtctcaaaaaaaaaaataaataawtaaataaataaataaataaataaataaataaaaaaggccaggctcagtggctcacgcctgtaatcccagcactttgggaggctgaggtgggcagatcatg

SEQ ID NO: 44923 - DNA, 201 bp, Homo sapiens
tggagtgcaagtattgcaatcatagctcactgcagccttgaactcctaggctccagctatcctctcctctcacctcatcctgtgtgagccattgtgtccarttatctctcctttttttttttttttatttattttgggataagaagcaaaggaaataaagttggatgttatctcttaatatccaaacattatattaaagtt

SEQ ID NO: 44924 - DNA, 201 bp, Homo sapiens
aagatgaacttgaaaagcttgtttgtactaaagaaacacaagaactagtgtcagaggcttatcccatcctagaacagaaattaaagttgattcagccccaygttcaagcaagcaacaattgctgggaagaggccatttctcaggtcgacaaactgctacgaagaaatacagataaaaaaggtacctgtgagagatttcttt

SEQ ID NO: 44925 - DNA, 201 bp, Homo sapiens
cacggcaccttgggaggccgaggctggcggatcactcgcggttaggagctggagaccagcccggccaacacagcgaaaccccgtctccacccaaaaaatasgaaaaccagtcaggcgtggcggcgcgcgcctgtaatcgcaggcactgggcaggctgaggcaggagaatcaggcagggaggttgcagtgagccgagatggc

SEQ ID NO: 44926 - DNA, 201 bp, Homo sapiens
tgcttaagcccaagagtttgaggctgcagtgagctatgatcgtgccactgctgcactccagcctgggcaacagagcgagactccgtctcaaaaaaaaaaawaaataaataaataaataaataaataaataaataaataaaaaaggccaggctcagtggctcacgcctgtaatcccagcactttgggaggctgaggtgggca

SEQ ID NO: 44927 - DNA, 201 bp, Homo sapiens
attaggaaatacaggaaaagaatctattcatttccagtctctttttatattagaaatcctgactcaattttagttttccctggttctgtaccaggtgttckctgagttcctagaagcaaatcatgccttaaggatttaggagaaaaggcccaaagctcagtgtactcgacaggggcacagtgttagaaagtgtactaactt

SEQ ID NO: 44928 - DNA, 201 bp, Homo sapiens
attttgcttacatatatgtgtaatatcacttgttatttcttatgaatagcagatgagtttaatttttctttttggcccataaaatgcctagtatgtatgcmagaaatatttgttgaataaatatgtaatactctttataagctttttaaaaaattgtgtcaaagaatacataacaaaaattatcatttaatcattataaaa

SEQ ID NO: 44929 - DNA, 201 bp, Homo sapiens
aggctggcggatcactcgcggttaggagctggagaccagcccggccaacacagcgaaaccccgtctccacccaaaaaatacgaaaaccagtcaggcgtggyggcgcgcgcctgtaatcgcaggcactgggcaggctgaggcaggagaatcaggcagggaggttgcagtgagccgagatggcagcagtacagtccagcttcg

SEQ ID NO: 44930 - DNA, 201 bp, Homo sapiens
ggattgcttaagcccaagagtttgaggctgcagtgagctatgatcgtgccactgctgcactccagcctgggcaacagagcgagactccgtctcaaaaaaawaaataaataaataaataaataaataaataaataaataaataaaaaaggccaggctcagtggctcacgcctgtaatcccagcactttgggaggctgaggtg

SEQ ID NO: 44931 - DNA, 201 bp, Homo sapiens
gcttgtatttatttattcaaagtaaccagtgctattgatgcaaaaaagaaaaacccaacaattcttccaacactgctttcaaaatgagcatataaaacttkattttcattagaatgtagttattttgtcatactagtaaataaaaaaccaagacgctccccccgaccccttcttttttttttttttttttttttttttgag

SEQ ID NO: 44932 - DNA, 201 bp, Homo sapiens
aaagaaatcaaccaaccagataggaactacactggatcatcctcctgtgagaaaattgtgcatctgggtagtatcaagcagaattatcagcctccactgayatcaccaaaccagaggttaaacttgctgtaacctcagaaatgggcagtgggagaagatcaagggccattaccaaacactcaccacgtatagcccccatag

SEQ ID NO: 44933 - DNA, 201 bp, Homo sapiens
agaaactctgatatatgcaaatacttatgcatattaaactttctgatatgacatctagagcttttgtgtacattttctacaaatagaaacactcagaagamctttggttgttaaaagatgcatcctggccaggcacggtgatgggagtagctgttacccagcttctcaggaggctgaggcaggaggattgcttaagcccaa

SEQ ID NO: 44934 - DNA, 201 bp, Homo sapiens
cagacattcctggagtattgatttttttttttttggatggagtcttgctgtgtcacccaggctggagtgcagtggcgccatctcagctcactgtaacgtcygcctcccaagttcaaatgattttcctgcctcggcctccgaagtagctgagactacaagcacataccaccatgtctggctaaattttgtatttttagtaga

SEQ ID NO: 44935 - DNA, 201 bp, Homo sapiens
gccctccagcctgagcaacagagggagactcgaaagagagagagagagagagagagagagagagaggagagagagagaggagacagagagagaaagagagaaagagaaggaaggaaggaaggaaggaaggaaggaaggaaggaaggaaggaagaagaaaagaaagaggaaaacagaaacattgcaacaatgactactgagt

SEQ ID NO: 44936 - DNA, 201 bp, Homo sapiens
tactcgggaggctgaggcaggagaatcgcttgaacccaggaggcggaagttgtggtgagccaagatcgtgccattgcactccagcctgggcaacaagagcraaactccgtctcaacataaataaataaattaattgattaattaatttcttatccaaaatgcttgagactagaagtgttttggattttggattttttcaga

SEQ ID NO: 44937 - DNA, 201 bp, Homo sapiens
acaaagatattttctttaaaagctttatttgacattttcccatttagatctgtcatccatctgttactgatttttgtatggtaacaagtgaagatcaacayttttttttccccgtatggatgtccagttgacctggcaccatttactgaacagatcattttttccccactgaactgtagtgttgcctttgtcataaatcag

SEQ ID NO: 44938 - DNA, 201 bp, Homo sapiens
ctccagcctgagcaacagagggagactcgaaagagagagagagagagagagagagagagagaggagagagagagaggagacagagagagaaagagagaaagagaaggaaggaaggaaggaaggaaggaaggaaggaaggaaggaaggaagaagaaaagaaagaggaaaacagaaacattgcaacaatgactactgagttgg

SEQ ID NO: 44939 - DNA, 201 bp, Homo sapiens
ggcacacacccgcagtcccagctacttaggaggctgagacagcaggattccttgagcccaaaaggtcaaggcgcagtgagctgtgtttcagccactgcatyccagcctgggcaacagagtgagagcctgtctcaaataaactaaaataaaataataaatggacagatgggattcttcagataaaatagttactatgaagaa

SEQ ID NO: 44940 - DNA, 201 bp, Homo sapiens
ctcaggtcgacaaactgctacgaagaaatacagataaaaaaggtacctgtgagagatttctttgccatatgcttatcagacatgcttattccactctggtrggattttattaggtagacttcttgtctttatgatgaaactagcttcaaaatttcttagtttacttttttttaatgttgaatttatatgtacaaagtgaca

SEQ ID NO: 44941 - DNA, 201 bp, Homo sapiens
tctgttggccatgctggtcttgaactcttggcctcaagtgatctgcccgccttagcctcccaaagtgctgggattacaggggtgaaccacagtgcccagtsggtttgtcacattcttaaatcagatattcctaatgctattaatacttcctctaagcacgttggttttggggaggtgttatcccagttttacacataagtc

SEQ ID NO: 44942 - DNA, 201 bp, Homo sapiens
agccttaaagaatttggacatactggtcacaatagtgaagtctggtattaagtttggcccccgaaacttttgaagtagtaatgatcttgaaatttgctttrttttgtgtctttttcagaattctccactttaccaatacttacaggatctgggacacacagactttgaaatatgttcttctttgtcaccaaaaacagaaaa

SEQ ID NO: 44943 - DNA, 201 bp, Homo sapiens
gagtcaagagactgactgacataaattagcaatgaaattctgaataaatcacttaatttctctagagcttgtttcccaggatcatcctttataccatatcrtcctttggtatgaaatttttcttaaatccattctaggggatcggaaactatctagtgggttgagtaaatgagagtaggcccttagaggcttccattaatt

SEQ ID NO: 44944 - DNA, 201 bp, Homo sapiens
cagaaactctttttcagttaggataataaaagaatgagtttgatagtctggggctaggaacttgagtttttcttttaagataaaatacttaactttagtcwttcaaaaataatatacaaatgatataattagtggcactgcatatttagtactaagatctaaagacattgtgtcattatttaataatatatcagattgctt

SEQ ID NO: 44945 - DNA, 201 bp, Homo sapiens
atagaacaatcactgttcactgcagcctccacttcccaggctcaggtgattatctcatctcagcctcccaagtagctgggactacaggcatgtgccatcaygccctactaattttttcttttttttttttttttgagatggaattttgttttgctcttgtcgcccaggctggagtgcaatggcgtgatctcgggtcactgc

SEQ ID NO: 44946 - DNA, 201 bp, Homo sapiens
gagtttcaccatgttggccaggctggtctcgaactcctgacctcaggtgatccacccgccttggcctcccaaagtgctgggattacaggtgtgagccaccrtgcctgaccgcaaattttacatgtatgtatgtatgtaacaagaataccaagttagtctttcttcataaaaagcaatttcaatttgaggatacttcatatt

SEQ ID NO: 44947 - DNA, 201 bp, Homo sapiens
ccgtatgtactttcaatgttaattccattatattggagcctgactcctcctcctataagatcatttgttttaattagaatcttctaccatcattctactctaagaggctgaattgagaaggacagtataacctcagtcttggacctctcaggctaaacagcaacagaacaaagtttagaaaatgatggatactatgtctaa

SEQ ID NO: 44948 - DNA, 201 bp, Homo sapiens
tattcaaagtaaccagtgctattgatgcaaaaaagaaaaacccaacaattcttccaacactgctttcaaaatgagcatataaaacttgattttcattagartgtagttattttgtcatactagtaaataaaaaaccaagacgctccccccgaccccttcttttttttttttttttttttttttttgagatagagtctgtca

SEQ ID NO: 44949 - DNA, 201 bp, Homo sapiens
tccaggcgtgagtcttatccaggcctggcaccgtggctcacgcctgtaatcccagcactctgggaggccaaggcgggcggatcaactgaggttgggagttygcaaccagcctgaccaacatggagataccccgtctctactaaaaatacaaaaaattagccaggtgtggtggtgcatgcctgtaatcccagctactcggga

SEQ ID NO: 44950 - DNA, 201 bp, Homo sapiens
tagtgctgttaaaaaaatatttgcctactctaaggtcacaaagatattttctttaaaagctttatttgacattttcccatttagatctgtcatccatctgktactgatttttgtatggtaacaagtgaagatcaacacttttttttccccgtatggatgtccagttgacctggcaccatttactgaacagatcattttttc

SEQ ID NO: 44951 - DNA, 201 bp, Homo sapiens
ccagcctgagcaacagagggagactcgaaagagagagagagagagagagagagagagagaggagagagagagaggagacagagagagaaagagagaaagagaaggaaggaaggaaggaaggaaggaaggaaggaaggaaggaaggaagaagaaaagaaagaggaaaacagaaacattgcaacaatgactactgagttggaa

SEQ ID NO: 44952 - DNA, 201 bp, Homo sapiens
atcttgaggagctctatagactttgcaaactgttgaaaacccctgtaatgttcaaagactgtgtattacccccttctgtagttaccactgtatcgttattsagataagaaatttaaaaatagattttgtaagttaaatttttaaaagtgtgttgccccctctaaagaaaatacattttggatttattttttattgttcccg

SEQ ID NO: 44953 - DNA, 201 bp, Homo sapiens
caaaaactagctgggcatggtggcatgcacctgtagtcccagctactccagaggctgaggcatgagaatcgcttgaacccaggaggcggaggttgctctgrgtgacagagtaagattccatctcaaaaaaaaaaaaataaaggaaatactctggcccagtgaggtggctcatgcctgtaatcccagcactttgggaggcta

SEQ ID NO: 44954 - DNA, 201 bp, Homo sapiens
cagcctgagcaacagagggagactcgaaagagagagagagagagagagagagagagagaggagagagagagaggagacagagagagaaagagagaaagagaaggaaggaaggaaggaaggaaggaaggaaggaaggaaggaaggaagaagaaaagaaagaggaaaacagaaacattgcaacaatgactactgagttggaag

SEQ ID NO: 44955 - DNA, 201 bp, Homo sapiens
caggagctgagaccagcctaagcaacatgggaaacccttatctctacaaaaaaatacaaaaattagccagtcatggtggtacacgcctgtagtcccagctrcttgggaggctgaggtgggaggatcacctgacccctggaggttgaggttgcagtgagccgaaatcacaccactgcactctagcctgggtgacagagtgag

SEQ ID NO: 44956 - DNA, 201 bp, Homo sapiens
ttttaaaagcttattaaatcctgaattgtactctagcttaagtataggcagcaaagagaagttgtggaccctgtggagtcagattttccaggtttcactcyagctccgttatttgactactgtgtggtcctgagcaaatcattgtttctgtgtttattaaaatgggataattgcaatgcttgcctccaaaggattagatgt

SEQ ID NO: 44957 - DNA, 201 bp, Homo sapiens
ggtaggtcaaggctgcagtgagccatgatcgcaccgctgtactccagcctggatgacagagccagactctgccccaaaaaaataaaaaatgaaaaaagaawcaacatcaccagcacaccagaagctccctcctggtcctttccatcactactccctaccccaaaatgatcactatttaaacataataacctagattaattt

SEQ ID NO: 44958 - DNA, 201 bp, Homo sapiens
gcctgagcaacagagggagactcgaaagagagagagagagagagagagagagagagaggagagagagagaggagacagagagagaaagagagaaagagaaggaaggaaggaaggaaggaaggaaggaaggaaggaaggaaggaagaagaaaagaaagaggaaaacagaaacattgcaacaatgactactgagttggaagat

SEQ ID NO: 44959 - DNA, 201 bp, Homo sapiens
ttgtatcacaggacaagctttgtggtcccagttgaagagcaaaatgtagagtctagagtttatatttgttcatttcctaccttgcatgaaattgttggtayactaccttaattcctaaatttttatgtcccactttggtatacctttatcagctgaaaatactattttcacatatttgtacatggaagttttcaagtttaa

SEQ ID NO: 44960 - DNA, 201 bp, Homo sapiens
gtccacaaccctgtttaaaaaaaaaaatgaggagaaaataccaagatatatatagctactctttggggtggtgggactatagatactttcacaccctttcraatttaatatcctaaccttgctttattctttaaggaaaataaagatttttttcaaagtacaatttaagagattcttaatgtggaaaatggagcagacctg

SEQ ID NO: 44961 - DNA, 201 bp, Homo sapiens
gctgaggtgggagaatcacttgagcctgggtaggtcaaggctgcagtgagccatgatcgcaccgctgtactccagcctggatgacagagccagactctgcmccaaaaaaataaaaaatgaaaaaagaaacaacatcaccagcacaccagaagctccctcctggtcctttccatcactactccctaccccaaaatgatcact

SEQ ID NO: 44962 - DNA, 201 bp, Homo sapiens
cctgagcaacagagggagactcgaaagagagagagagagagagagagagagagagaggagagagagagaggagacagagagagaaagagagaaagagaaggaaggaaggaaggaaggaaggaaggaaggaaggaaggaaggaagaagaaaagaaagaggaaaacagaaacattgcaacaatgactactgagttggaagata

SEQ ID NO: 44963 - DNA, 201 bp, Homo sapiens
ggagatccttagattttgacgtccaaatacttaaaatgcttaaagaaatgccttaaattagagtttggagataagtgaatttactttaattggaggccaaygtgagtgattttataactagccatttgtttcaacaaacatggataatgggttatctccaaaattcttaagtttttttttcatacatcaaaagccacatga

SEQ ID NO: 44964 - DNA, 201 bp, Homo sapiens
gagagagagagagagaggagagagagagaggagacagagagagaaagagagaaagagaaggaaggaaggaaggaaggaaggaaggaaggaaggaaggaaggaagaagaaaagaaagaggaaaacagaaacattgcaacaatgactactgagttggaagatagacaatcattgactgttcttagcccagtagatgtgctgga

SEQ ID NO: 44965 - DNA, 201 bp, Homo sapiens
cttttgatccatgtgactcatttctttggagagaaaaaaatatatatatatatgtatatatatccactagtcctactatcttcttttctcctatgtgaaawttttttttaaataatgagtgaagattcacttttactaaattatctcattccatcaacacttcccatctagggcagaactgtagtaaattatatattgatg

SEQ ID NO: 44966 - DNA, 201 bp, Homo sapiens
atatctgaggtattatgttaatatattagatacttaaaattaatttgtgtttaaaaactgctgtaaacctcctcatccaaaagttcagaataaagattagkgaatgtgatataggacaatttcactgtatcttttatgctttcatgaaaaggctttgttgattgccttaacctaatttaacctaccccctgaactctgaga

SEQ ID NO: 44967 - DNA, 201 bp, Homo sapiens
agagagagagagaggagagagagagaggagacagagagagaaagagagaaagagaaggaaggaaggaaggaaggaaggaaggaaggaaggaaggaaggaagaagaaaagaaagaggaaaacagaaacattgcaacaatgactactgagttggaagatagacaatcattgactgttcttagcccagtagatgtgctggattg

SEQ ID NO: 44968 - DNA, 201 bp, Homo sapiens
ctgactaatttttaagaaaatattttgtagaggcaggggtctcactgtgtttcccaggctggtctcccaactactggcctcaagtaatcctcccacctgakcctcccaaagtgctgggattacaggtgggagccactgcgcctggcctttagtcttttcaaaagccgcagtaaactgtaccaacttgattcttgcagttat

SEQ ID NO: 44969 - DNA, 201 bp, Homo sapiens
agcttgtaagaactatgtatacatataagaatgggtagaaataaaaccccagttctcttccatattccccatctagacaccagaaagaattatgataaatycaacagatgggtgagcaaaaaagtagttgatgcttctcagccagcaatgctaaaaaccaaccaactcggctagacacaggaagtgtcccactttaaacac

SEQ ID NO: 44970 - DNA, 201 bp, Homo sapiens
tgcatttggatagtggaactacatggctaaggaatagaggtggaaagtagtttttgctgtatcccttaatacctcatgaattttgaatcctgtgaatataytacctattcaaaaacaaagtgaatttaaaattttttaactaccagatccagatggttttatagttaaaaaaaatttcagactatagaaaaggttagaaag

SEQ ID NO: 44971 - DNA, 201 bp, Homo sapiens
agagagagagaggagagagagagaggagacagagagagaaagagagaaagagaaggaaggaaggaaggaaggaaggaaggaaggaaggaaggaaggaagaagaaaagaaagaggaaaacagaaacattgcaacaatgactactgagttggaagatagacaatcattgactgttcttagcccagtagatgtgctggattgtg

SEQ ID NO: 44972 - DNA, 201 bp, Homo sapiens
cctgactaatttttaagaaaatattttgtagaggcaggggtctcactgtgtttcccaggctggtctcccaactactggcctcaagtaatcctcccacctgrgcctcccaaagtgctgggattacaggtgggagccactgcgcctggcctttagtcttttcaaaagccgcagtaaactgtaccaacttgattcttgcagtta

SEQ ID NO: 44973 - DNA, 201 bp, Homo sapiens
accatcatgagttgagcacagtaagttggaggttagagtatgaaatgaaacagaggtggccaggggccagatcatattctccatataaaaaaccttaatamatttaactaaaaaagaatccaccaatcattttgagaagaccagtaagatatgtaaacccttatttgcctgatcaaagtaaagagcagaaatatacaagat

SEQ ID NO: 44974 - DNA, 201 bp, Homo sapiens
ttttggattagggatactcaatcagtccctagaacacagtccttatccctctcttttcctttaagtttttaactagttttttaaatttatgaagtcatctrtttcctgctctagaaaaaataaatgcacacattgtgaaatgctttaaatcaaaattttctgtttacctatcagctatggttatctccttatccagaggag

SEQ ID NO: 44975 - DNA, 201 bp, Homo sapiens
tagttactatgaagaaaaaaaaaacgggaataggatagagaatgatcggtggggtgctgctttttattagatggtaagagaaggcctctctgaggagctgrcatttaaactgaggtttgcatgctgagaaagatctgggggaagagtatgctggttagatagaccagtgagtagaaagatcttgtggcaggaatgaattta

SEQ ID NO: 44976 - DNA, 201 bp, Homo sapiens
ggcaacagagtgagagcctgtctcaaataaactaaaataaaataataaatggacagatgggattcttcagataaaatagttactatgaagaaaaaaaaaaygggaataggatagagaatgatcggtggggtgctgctttttattagatggtaagagaaggcctctctgaggagctggcatttaaactgaggtttgcatgct

SEQ ID NO: 44977 - DNA, 201 bp, Homo sapiens
cttttaaaatatttaaaatattttcaagataaagtattatcttctctgcaaaaattcctggagtaattttctctcataatatttgaagtcagtggttctcrgttgtattagtggggtaactacatcaaaataaataaagtcttatttttaaaatgcaaattttagaccatactcccagtgattcttagttggtctttttgg

SEQ ID NO: 44978 - DNA, 201 bp, Homo sapiens
ttctcctgcttcagcctctccagtagctgggattacaataagcccacattacagtctcctgccaccacgcccggctaatttttgtatttttagtagagacrgggtttcactacattggccaagctggtctcaaactcctgaccttgagtgatccatccatgttggtcccccaaagtgctaggattacaggcatcagccatg

SEQ ID NO: 44979 - DNA, 201 bp, Homo sapiens
ttgactggtttcggagtcatagcagctcaaactaaagtccttacaaaacatactatagaagggtttgtcataacctgactacagtctgtttctatctttarttctcattcctttccttcagtccagccaaactgtataaatgccttttcccatggtccttctataagttggtgcaaaagtaattgcagcttttgccattaa

SEQ ID NO: 44980 - DNA, 201 bp, Homo sapiens
actagtgtcagaggcttatcccatcctagaacagaaattaaagttgattcagccccacgttcaagcaagcaacaattgctgggaagaggccatttctcagrtcgacaaactgctacgaagaaatacagataaaaaaggtacctgtgagagatttctttgccatatgcttatcagacatgcttattccactctggtaggatt

SEQ ID NO: 44981 - DNA, 201 bp, Homo sapiens
gactcagggtaataattcttgaagatgaacttgaaaagcttgtttgtactaaagaaacacaagaactagtgtcagaggcttatcccatcctagaacagaarttaaagttgattcagccccacgttcaagcaagcaacaattgctgggaagaggccatttctcaggtcgacaaactgctacgaagaaatacagataaaaaag

SEQ ID NO: 44982 - DNA, 201 bp, Homo sapiens
tgtttttgaagatttcaatttatccataggtatatatttgcttttttcttttcctagctctgctttaatgacctgtgccaaatgcaagtcctttttttttvatctcagagataagtaagtgcaagtaaatgaatgcttactagagaattgtttgcttcaagtaaagtgctttttcttctattcattttcaggaattagaag

SEQ ID NO: 44983 - DNA, 201 bp, Homo sapiens; identical to SEQ ID NO: 7997

SEQ ID NO: 44984 - DNA, 201 bp, Homo sapiens
aaatacaggttgaatatttcttatccaggcgtgagtcttatccaggcctggcaccgtggctcacgcctgtaatcccagcactctgggaggccaaggcgggyggatcaactgaggttgggagtttgcaaccagcctgaccaacatggagataccccgtctctactaaaaatacaaaaaattagccaggtgtggtggtgcatg

SEQ ID NO: 44985 - DNA, 201 bp, Homo sapiens
gagtcagattttccaggtttcactctagctccgttatttgactactgtgtggtcctgagcaaatcattgtttctgtgtttattaaaatgggataattgcartgcttgcctccaaaggattagatgtttgtcagttcagtgcctggtgtagagtaagcaattaatgaatgttagctgatttttaaaattctatctgatatgg

SEQ ID NO: 44986 - DNA, 201 bp, Homo sapiens
acttcccagcctgcagaactatgagctaagtaagcttctttctttataaaatatgcagtgtcaagtattctgttatagcaacacaaaacagactaaaaactctttttttttttcctttttcaagataactctggccaggcacagtgccttacacctataatcccagtgctttgggccgaggtgggaggatcacatgagccc

SEQ ID NO: 44987 - DNA, 201 bp, Homo sapiens
cactccagcctgggtgacaatagcaaaactccatctcaaaaaaaaaaaaagtaaacttttaacttcaaataatgcatacttcaaatgcaaacaagctcaaraaaaattacaatgatttataacaaagagttttaattttttttttttatgcagagcactctaaagtgtctaagatctatagaagataagttgggtgcatga

SEQ ID NO: 44988 - DNA, 201 bp, Homo sapiens
cttcccagcctgcagaactatgagctaagtaagcttctttctttataaaatatgcagtgtcaagtattctgttatagcaacacaaaacagactaaaaactctttttttttttcctttttcaagataactctggccaggcacagtgccttacacctataatcccagtgctttgggccgaggtgggaggatcacatgagccca

SEQ ID NO: 44989 - DNA, 201 bp, Homo sapiens
catgaggataagagtctgcattccagatagaaggaagcaaaaacatatggaaagaaatagagatatgacagtgtggcatgtgaactgttggtcattcagtraatatttatggagcacagactgccaggcaatatgctaatcactagacgtacagtggtaaacataatagacatgatccctgccttatggagcttgtagttc

SEQ ID NO: 44990 - DNA, 201 bp, Homo sapiens
gcactccagcctgggtgacaatagcaaaactccatctcaaaaaaaaaaaaagtaaacttttaacttcaaataatgcatacttcaaatgcaaacaagctcargaaaaattacaatgatttataacaaagagttttaattttttttttttatgcagagcactctaaagtgtctaagatctatagaagataagttgggtgcatg

SEQ ID NO: 44991 - DNA, 201 bp, Homo sapiens
ttcccagcctgcagaactatgagctaagtaagcttctttctttataaaatatgcagtgtcaagtattctgttatagcaacacaaaacagactaaaaactctttttttttttcctttttcaagataactctggccaggcacagtgccttacacctataatcccagtgctttgggccgaggtgggaggatcacatgagcccag

SEQ ID NO: 44992 - DNA, 201 bp, Homo sapiens
tcccagcctgcagaactatgagctaagtaagcttctttctttataaaatatgcagtgtcaagtattctgttatagcaacacaaaacagactaaaaactctttttttttttcctttttcaagataactctggccaggcacagtgccttacacctataatcccagtgctttgggccgaggtgggaggatcacatgagcccagg

SEQ ID NO: 44993 - DNA, 201 bp, Homo sapiens
ttctgtatatgtaggaaatgtagaggccttttgttggttctgcccagcattcagtcagcacctacagagaatttgagtttcttttgtgaaatcagctttayctgattccagaagatacctgttttcttacttaaatttatcagctcagatgttaatacctaagcactattgtctagttgcgaggtattttaaaaatctttc

SEQ ID NO: 44994 - DNA, 201 bp, Homo sapiens
tactcaattttaaaaagaaaacacctggtttatatgtagacaatgcaaaatatgaaactatttttaaaaaacaatgatagagttcttagtgctctaatgtsgatctccaagttatattaagtgaaaaaaaaacacaaagtgcacggattggtatttattgtatccttcaatttgtgcataaaagggactgtgtgtttatac

SEQ ID NO: 44995 - DNA, 201 bp, Homo sapiens
ttgagacagtgtctcatctgtcacccagactggagtgtggtggcatgatcatggctcactgtagtctcattctcatgtgatcctcctgccttagccttccragtagctggaaccaaggcacacagtaccacacctggctaatttttttgcattttgtagagacagggtttcaccattttgcccaggttggtctcgaacacc

SEQ ID NO: 44996 - DNA, 201 bp, Homo sapiens
atttctaatgaaagtttcaacgtggacaaaaacgtaaaataacccataacactctacttaatacataagttctggtttaaaaattaacctatgtacttacraagtgaacgtaacaccactttggtaattattttgtaaaacagaaattgttccttaagaatgttcagaaacacaacgtctagaattgctgaaaatccacac

SEQ ID NO: 44997 - DNA, 201 bp, Homo sapiens; identical to SEQ ID NO: 7977

SEQ ID NO: 44998 - DNA, 201 bp, Homo sapiens
tgaaaactgatacatataagacacggttattttaaatacatttgacacctccaaaaaggaaagagctaaaactggctggaaggattttaaaatttccaacyacttttaatttaaatcaatttcttgaacgaaggtaaggcacagaaatgtaggatgaaaataatttaccttatgtaagtataaagcctccctttggcaaag

SEQ ID NO: 44999 - DNA, 201 bp, Homo sapiens
agaatcgcttgaacctgggaggtggaggttgcagtgagccgacatcgcaccactgcactccagcctgggtgacagagtgagactctctctcaaaaaaaaawaataataataataataataataattcatgcttacccctttaccaagaattctgccttctccaccaagctgtcctctctactagtctctccttctccatga

SEQ ID NO: 45000 - DNA, 201 bp, Homo sapiens
ttttgttctgttttttttagcttcttgagttaaaaacctaaatgcccaaaataacttgtaaggctataaatttccctgagtattgcttcagttgtatcacraaagttttgaaatgtagtttgtctcatggttgtataagttccatttttatttcttatttaatacccaagtgtatagttgagggattgatgttatcattgg

SEQ ID NO: 45001 - DNA, 201 bp, Homo sapiens
agtagtgccatatattgaaatcatgaatgctgttttgtttctgactcaaattgtcctctctcacaaataattgaaaccttttttgccttcattcccttgtyttaacataagcctgtcagtcatcatcctctgctttttatagattttttaaaatttggtttttatagatttttaatacctgaatacattttagtatggttt

SEQ ID NO: 45002 - DNA, 201 bp, Homo sapiens
atttagtaaaatggagcacaagcagtagtgccatatattgaaatcatgaatgctgttttgtttctgactcaaattgtcctctctcacaaataattgaaacyttttttgccttcattcccttgtcttaacataagcctgtcagtcatcatcctctgctttttatagattttttaaaatttggtttttatagatttttaatac

SEQ ID NO: 45003 - DNA, 201 bp, Homo sapiens
tgcttaaaataagtaatatttccggccgggcacggtggcccacacctgtaatcccagcactttgggaggccgaggcgggcggatcacgaggtcaggagatygtagctatcctggctaacacggtgaaaccccgtctctactaaaaatacaaaaagaaattagccgggcgtggtggcgggcgcctgtagacccagctacccg

SEQ ID NO: 45004 - DNA, 201 bp, Homo sapiens
attgcttaaaccccaggaggttgaggctgtagtgagccaagattgtgccactgcactccagtttgggcaacagaactggagacaacagattctgtctaggytgggcaacagacttggtctcaaaaaaaaaagtataaaagttcttagcatctgttgatttttgtcgttgcattagttgaagtctacttcttattgacttaa

SEQ ID NO: 45005 - DNA, 201 bp, Homo sapiens
gacaaggtcctgctttgccacccaggctggagtgcagtggcatgatctcggcttactgcagcctgctcaagtgatccctccgcctcagcctccgaatagcwgggactacggatgcatgcaaccacacccagctaatttttaaattttttgtagagaaggggtcctactgtgttgcccagtctggtctcgaactcctgggct

SEQ ID NO: 45006 - DNA, 201 bp, Homo sapiens
attgaatatggctgtgtctaattggggaaccaaatagtaagatcaatttcagagattactcaaaaagctaccatgcccctgcgctccttttttctcccctytgaacaatagtataaagtgagttgtgttgctctgtttttatgaaagtggggtgggatgtcaaattaagtggttcctaatgttagaatcagaattgtggga

SEQ ID NO: 45007 - DNA, 201 bp, Homo sapiens
tgtatgtctatgtttgtgctcttatactgtgatggaatactttctgttttttttttttcttgatccattagaatcttttcaataagcactcctagcttttwctcaaagctttcccgaaacttcagcctattgtgtctcttattttctgcatcaacctagtaataattactttgtgttctataagtttttgtattgtaatat

SEQ ID NO: 45008 - DNA, 201 bp, Homo sapiens
tcagcactaaagagtctgcataatttggccctaacctacctttccagctttgtccaccagtatttgtatcaatgaacccagtcttcattttcctttattcygtacttattctgtatgtctatgtttgtgctcttatactgtgatggaatactttctgttttttttttttcttgatccattagaatcttttcaataagcact

SEQ ID NO: 45009 - DNA, 201 bp, Homo sapiens
tgaaaaaaatcgggcgagtgtttttgatgccatttttttccatcagacacaggtcaaaactcgcacccctgtacgtatgtgtattgcatgtatacgctttrctttcatttatccaactagattttaagaaaatttaaaaatgaagtggcccatgccatacagcgagagagcgaggcacagacaggacagaatgctaaatgt

SEQ ID NO: 45010 - DNA, 201 bp, Homo sapiens
aggagaatcgcttgaacctgggaggtggaggttgcagtgagccgacatcgcaccactgcactccagcctgggtgacagagtgagactctctctcaaaaaawaaaaataataataataataataataattcatgcttacccctttaccaagaattctgccttctccaccaagctgtcctctctactagtctctccttctcca

SEQ ID NO: 45011 - DNA, 201 bp, Homo sapiens
agtttcgctcttgtcacccaggctggagtgcaatggcgcgatctcggctcaccacaacctctgcctcccgggttcaagtgattcgcctgcctcagcctccygagtagctgggattacaggcatgcaccactatgcctggctaattttgtatttttcgtagagacggggtttctccatgttggtcaggctggtctcaaaccc

SEQ ID NO: 45012 - DNA, 201 bp, Homo sapiens
ccctctctactaaaaatacaaaaattagccaggtgtgatggcgcacacctataatcccagctgctctggaggctgaggcaggagaatcgcttgaacctggsaggtggaggttgcagtgagccgacatcgcaccactgcactccagcctgggtgacagagtgagactctctctcaaaaaaaaaaaataataataataataat

SEQ ID NO: 45013 - DNA, 201 bp, Homo sapiens
tttcttattgtgttgaatctaaactctttttcctgttttcaagtctcttcatcataagaattcatctatccaattatattttctactgtttttactatagmtatcttcttatgtttatcgaattaaactacagttcacaaatgtgttatttttattcatgaaaaaaattcatgctggccaagcacagtggctcacgcctct

SEQ ID NO: 45014 - DNA, 201 bp, Homo sapiens
caaactcttgacctcgtgatccacccaccttagcctcccaaagtgctggaattacaggtgtgagccactgtacctggccctttttttttttttttttttttgagacagagtcttgctctgttgcccaggctggagtgtaatgatgcaatcttggctcactgcaacctccatctcccgggttcaaacgattcttctgcctca

SEQ ID NO: 45015 - DNA, 201 bp, Homo sapiens
ttgcttaagcccaagagtttgaggctgcagtgagctatgatcgtgccactgctgcactccagcctgggcaacagagcgagactccgtctcaaaaaaaaaaataaataaataaataaataaataaataaataaataaataaaaaaggccaggctcagtggctcacgcctgtaatcccagcactttgggaggctgaggtgggc

SEQ ID NO: 45016 - DNA, 201 bp, Homo sapiens
attgcttaagcccaagagtttgaggctgcagtgagctatgatcgtgccactgctgcactccagcctgggcaacagagcgagactccgtctcaaaaaaaaaaataaataaataaataaataaataaataaataaataaataaaaaaggccaggctcagtggctcacgcctgtaatcccagcactttgggaggctgaggtggg

SEQ ID NO: 45017 - DNA, 201 bp, Homo sapiens
gattgcttaagcccaagagtttgaggctgcagtgagctatgatcgtgccactgctgcactccagcctgggcaacagagcgagactccgtctcaaaaaaaaaaataaataaataaataaataaataaataaataaataaataaaaaaggccaggctcagtggctcacgcctgtaatcccagcactttgggaggctgaggtgg

SEQ ID NO: 45018 - DNA, 201 bp, Homo sapiens; identical to SEQ ID NO: 7978

SEQ ID NO: 45019 - DNA, 201 bp, Homo sapiens
tcttatccaggcctggcaccgtggctcacgcctgtaatcccagcactctgggaggccaaggcgggcggatcaactgaggttgggagtttgcaaccagcctsaccaacatggagataccccgtctctactaaaaatacaaaaaattagccaggtgtggtggtgcatgcctgtaatcccagctactcgggaggctgaggcagg

SEQ ID NO: 45020 - DNA, 201 bp, Homo sapiens; identical to SEQ ID NO: 7980

SEQ ID NO: 45021 - DNA, 201 bp, Homo sapiens
taaaggattctaaaggaaattagggcaaatatttatttatttacttattttttgagacagggtctctgttgctcaggctggagtacagtggtgtgacctcrgctcactgcagcctcagcctcctagactcaagtgatcctcctgccctagcctcccaaatacctgggactataggagcatgccaccatacctggctaattt

SEQ ID NO: 45022 - DNA, 201 bp, Homo sapiens
ctgctgcagtactttcctcagttatctaaagttatttgtttcagaatgcaacttgacatgtaaagaacctttttaatgatttatcctttgaatttgtaattccccttctacaaactgcaggaaattatttaaaacatagttaaactttatataccaagctgcttattcactttgtgtttataatagtgcacaatggaacac

SEQ ID NO: 45023 - DNA, 201 bp, Homo sapiens
caacaaaatttaggaactaataaggaggctgagatgtactgacaaggtatataacctggacaatttttttcttccttttctgatataaattctcattgatkggaggtaagtactttgaagtttttctgctgtttgggtatgcttttaataatcctatacaatgtcattcatttccttcagcaaggtatcctgttaaaagtg

SEQ ID NO: 45024 - DNA, 201 bp, Homo sapiens
aaaatttgaaatttgaaatgttccagtgagcatttcctttgactgccatgttggtgctcaaaaagtttcaaattttggagcatttgggatttcatttcaargttttggattagggatactcaatcagtccctagaacacagtccttatccctctcttttcctttaagtttttaactagttttttaaatttatgaagtcatc

SEQ ID NO: 45025 - DNA, 201 bp, Homo sapiens
ccctggcaacccctaatatttggtactgtccagaaaacacctattctttgactgcttacatacagagtattagcagaggaaacccatcattgtgctctccrttgtaaaggcataaacattccatacatttagcagtacaattaaagtaacaatatggggggaaaaagtgcctttctaaagtaaatactatttaaagtgaag

SEQ ID NO: 45026 - DNA, 201 bp, Homo sapiens
aattactttacatcttgttattaaaaatttatcttttacatctgatggctcaataatgtctatctcaacctttactgtttcacatttacagtgaaaataamacccagctatcatactgaaggtagattggactgttgtttcttcttgaagtatcttctgaaaacaccaccaaattttattagtacattaggagcttagcgt

SEQ ID NO: 45027 - DNA, 201 bp, Homo sapiens
ttggctatattgttacagcttcagggacagcatcttttatgttataggattatattttccatgtcgtgccctagcaatttaatcaattaggcttaactagrcaagtttgttaatctgtaattactttacatcttgttattaaaaatttatcttttacatctgatggctcaataatgtctatctcaacctttactgtttcac

SEQ ID NO: 45028 - DNA, 201 bp, Homo sapiens
tttattttttatttttattttttttgagacggaatcttgctctgttgtccaggttgtagtgcagtggcacaatctcggctcactgcaacctccgcctcctrggttcaagagattctcctgcctcagcttcccaagtagccaggattacaggcatgtgccaccatgcccagctaatttttgtatgttagtagagatggggtt

SEQ ID NO: 45029 - DNA, 201 bp, Homo sapiens
tcatatagtaggatcactctagtactaaatttgtttgtttggttttggtttattttttatttttattttttttgagacggaatcttgctctgttgtccagkttgtagtgcagtggcacaatctcggctcactgcaacctccgcctcctgggttcaagagattctcctgcctcagcttcccaagtagccaggattacaggca

SEQ ID NO: 45030 - DNA, 201 bp, Homo sapiens
tggtgtgtaagtctaagatcctttaaaacctatctcagtgtacctttttaacttccttactaatcccttcttctcttgggtcataactgtcctggagtgcrccaccatccccatgacatgtgctttaatggctctttccttcatcctcttcccttgactgaagtgatcttctcttttttttttgagatgcagtttcgctct

SEQ ID NO: 45031 - DNA, 201 bp, Homo sapiens
accccccgacctccctcccggacggggcggctggccgggcagaggggctcctcacttcccagtagggccggccgggcagaggcacccctcacctcccggayggggcggctggccaggcggggggctgacccccacctccctcccggacggggcggctggccgggcggggggctgacccccacctccctcccggacggggtg

SEQ ID NO: 45032 - DNA, 201 bp, Homo sapiens
ccacccacctcggcctcccaaagtgctgggattacaggcgggagccaccgcccccggccttgaatatccttttaatcatgcttcttgtctacaatcatacsctgccagtttagcccctgcactattgccaattatttttctttattgtttcgcttccttgcataaaaatctttggtagctcctcacaccctacaggataat

SEQ ID NO: 45033 - DNA, 201 bp, Homo sapiens
tgagacggagtctcactctgtcgcccaggttggagggcagtgacgcaatattggttcactgcaacctccatctcccaggttcaagcaattctcctgcctcrgcttcccaagtagctgggattacaggcacaggccaccacgcccagccaagttttgtatttttagtagagatggggttttaccttgttggccaggctggtc

SEQ ID NO: 45034 - DNA, 201 bp, Homo sapiens
agtctagtaaacactagagaattttttgactaacacccagaaggtgagagttaggagagttagagctcacatggatcagaaccagttttcctagtcctccrtttataccatttcttccctgtgccccttttaagagtgaatgttcctgggaagtggtttgtatataataggctatttaataagcttggatttgaggttact

SEQ ID NO: 45035 - DNA, 201 bp, Homo sapiens
aaatgaagagttcttgagattggatgtaccatgtgaatgtacttaacacttctgaactatacacttaaaaatgagtaagacggtaaatttatcttacgtgstattttaccacagttggaagaaaacttcatctctcatcaaattaatcttttactttccgtatcttagaaccttgtcagaagctttagggtcatttaaata

SEQ ID NO: 45036 - DNA, 201 bp, Homo sapiens
aagattataaggagagctgagaccaaataatttgagaactactggttaggatatggttttctgagatctattaaataatatacaagttatttgacagtttyggagaaaaagtgatagcaattttattcctaaacattttaaaagaattaatgtaagcataatgaatagaacttgagtgttcacagtgttcatacagtatct

SEQ ID NO: 45037 - DNA, 201 bp, Homo sapiens
atatgttgtttaacattgtaacaggtttattgctattttcaagtaaaataataagttttttttaaattttagttttgagttctaatatgatgtcattagasgtccatgtaaacaaaagctctttggggctctccataatttttaagattataaggagagctgagaccaaataatttgagaactactggttaggatatggtt

SEQ ID NO: 45038 - DNA, 201 bp, Homo sapiens
gctttagaaataatacaaatcagaacatttgagtgctgttggacagtttcaagttgcaagaattttaaacaaatgccaagaaaagcaatgaaaatttaatytgatacttaagtgctgattctggaagtaaccttgagaagaagctttaaactatttcactataaaatttctaatgaaagtttcaacgtggacaaaaacgta

SEQ ID NO: 45039 - DNA, 201 bp, Homo sapiens
atcatccattatcccaccacccaaagatggtaactattaacagtacggtatgtgttcttatagactttatttctatgtaaatgtgtgtttatgtgtgtgtrattttttagcctctatattaagacacaatgtgtgtgtgatattttttaaaacaaaaggtataccacgtagaattttgtatatatttttcacttgacttta

SEQ ID NO: 45040 - DNA, 201 bp, Homo sapiens
aacacaaagtgcacggattggtatttattgtatccttcaatttgtgcataaaagggactgtgtgtttatacagggataaatatgtatgtatgtatttatgyacatgcatgcatatatacctacgtatctccagatacacatttatatttgaatttgctcttatgtatgtatgcataaacaatcttagaaggtactggtaaa

SEQ ID NO: 45041 - DNA, 201 bp, Homo sapiens
ttgataaagatgttaagatttttaatgtgtttattagccaattgtatatccattttgtgaagccacgtcaaatttcttgcatatttttctattgggttgtytctttttcttgctgatttgaaggaattatttacatacactggatacaagtcctttgttagagatgcagttggccctccttagctgagagttccacatctg

SEQ ID NO: 45042 - DNA, 201 bp, Homo sapiens
atcccagcctgggcaacagagtgagagcctgtctcaaataaactaaaataaaataataaatggacagatgggattcttcagataaaatagttactatgaagaaaaaaaaaacgggaataggatagagaatgatcggtggggtgctgctttttattagatggtaagagaaggcctctctgaggagctggcatttaaactgag

SEQ ID NO: 45043 - DNA, 201 bp, Homo sapiens
cattttgtgaagccacgtcaaatttcttgcatatttttctattgggttgtctctttttcttgctgatttgaaggaattatttacatacactggatacaagkcctttgttagagatgcagttggccctccttagctgagagttccacatctgcagattggaccaaccgtggctcacgcctataatcctagcactttggaaag

SEQ ID NO: 45044 - DNA, 201 bp, Homo sapiens
cggatcacgaggtcaggagattgtagctatcctggctaacacggtgaaaccccgtctctactaaaaatacaaaaagaaattagccgggcgtggtggcgggygcctgtagacccagctacccgggaggctgaggcaggagaatggcatgaacccgggaggcagagcttgcagtgagccgagatcgcgctactgcactccagc

SEQ ID NO: 45045 - DNA, 201 bp, Homo sapiens
gtgtacatatgtaaaaatcctgtgcacttgactgcatgtactatgatatacctcacttttaaaaacaattttttaatgatcgcattggatattgacaaagrttacttttgttcattgtaaggaaaacctcttttccttaggtcatattatctattcagtattttttttccgtgtatattgcataacaagttactattcagt

SEQ ID NO: 45046 - DNA, 201 bp, Homo sapiens
ttccctgagtattgcttcagttgtatcacgaaagttttgaaatgtagtttgtctcatggttgtataagttccatttttatttcttatttaatacccaagtrtatagttgagggattgatgttatcattggtgattatttttctccctgtgtccctcagacccataattccaccctgatcattatggactgcatcactgcat

SEQ ID NO: 45047 - DNA, 201 bp, Homo sapiens
aaagggatttataatatctctgaaatagtatttttacttttaaatctataaaatcggattttaaaatctctaatttgctttttaggttaaggattccatayattttttatttttttaaaagtggtttcagaagatgcctattgttatatttattatcatttttattaatgtcataaagagaaatgtagcaatttctttggg

SEQ ID NO: 45048 - DNA, 201 bp, Homo sapiens
tctcaacctttactgtttcacatttacagtgaaaataacacccagctatcatactgaaggtagattggactgttgtttcttcttgaagtatcttctgaaaacaccaccaaattttattagtacattaggagcttagcgtttaatgcaatattatatatgtgttaatacctctcttctggtattttaatggcaaggatattg

SEQ ID NO: 45049 - DNA, 201 bp, Homo sapiens
tctcataaggagctcacaacctagatctctcacatgcacatttcacaatagggttcctgctcctatgagaatctaatgctgccactgatctgacaggaggyggagctctgatagtaacgcttgctcacccactggcccaccatcctgctggcctcgggctgtattcctaacaggccatggaccggtaccagtgctgtgcag

SEQ ID NO: 45050 - DNA, 201 bp, Homo sapiens
aagacagtgacctgtacatgttcaaaaggacacaaaatatatacctatatatacctataattctctctccttttttctttttttttttttttttttgagawggagtcttgctctgtcacccaggctagagtgcagtggctcgatctcggctcaccacaacctccgcctcgctggctcaagcaattttcatatcagcctccc

SEQ ID NO: 45051 - DNA, 201 bp, Homo sapiens
atctcaacctttactgtttcacatttacagtgaaaataacacccagctatcatactgaaggtagattggactgttgtttcttcttgaagtatcttctgaawacaccaccaaattttattagtacattaggagcttagcgtttaatgcaatattatatatgtgttaatacctctcttctggtattttaatggcaaggatatt

SEQ ID NO: 45052 - DNA, 201 bp, Homo sapiens
tgtctctaccacacctgcagctgtgttatcaagaagctggagaatccatattggaatactgctatagaaacattttgcctccacagctttgtttcatagcmaaaaaaaaaaaaaaaaaaaaaaaaaaaaaaagagagagaaggatggagggaagagaaggaatgagagaacagacaaatgaaagaacaaggccagcagtgg

SEQ ID NO: 45053 - DNA, 201 bp, Homo sapiens
tgttaatggccttgtccatcattctctttattttgatcatatagtaggatcactctagtactaaatttgtttgtttggttttggtttattttttatttttwttttttttgagacggaatcttgctctgttgtccaggttgtagtgcagtggcacaatctcggctcactgcaacctccgcctcctgggttcaagagattctc

SEQ ID NO: 45054 - DNA, 201 bp, Homo sapiens
tcttcctggctgagaaagataatttttgcccattttgtcatgatttctttttctcctacttctttcatacttctgtgtaagttattaaatgttaacccttygttggcagtatgttcagctttcgcccttttctcccatagcatttaatcagttaaatgaaaggaaatgactctcacaaaacctttcacatttaaaaggaag

SEQ ID NO: 45055 - DNA, 201 bp, Homo sapiens
agacctaacaggttttactttaattgttaatggccttgtccatcattctctttattttgatcatatagtaggatcactctagtactaaatttgtttgtttggttttggtttattttttatttttattttttttgagacggaatcttgctctgttgtccaggttgtagtgcagtggcacaatctcggctcactgcaacctcc

SEQ ID NO: 45056 - DNA, 201 bp, Homo sapiens
tgaaggggaaagaactatgggaggcagacagaaaataaagctttgtttaccctaatcaggtagaaacaaacaaaataattgtaattgggtgcagacaagcaaaaaaaaaaaaaaaaaaacctcaacaatctcaactcctctgcttctcaggtaacagaggtaaaaccaccaggacatgacaatgtctacgcctctttaaaa

SEQ ID NO: 45057 - DNA, 201 bp, Homo sapiens
tactttactacctgtttcattgctatcgttaaaataagtgaagctaccgaattagatacctgctctcaaaatagaaaagttgttatggtacaaaaggaacyattttgtttacatactttactttctctaaagttagttctatactagaattatttggcgctgattaaaactggtccactcaagttagcattttctatagta

SEQ ID NO: 45058 - DNA, 201 bp, Homo sapiens
tagacctaacaggttttactttaattgttaatggccttgtccatcattctctttattttgatcatatagtaggatcactctagtactaaatttgtttgtttggttttggtttattttttatttttattttttttgagacggaatcttgctctgttgtccaggttgtagtgcagtggcacaatctcggctcactgcaacctc

SEQ ID NO: 45059 - DNA, 201 bp, Homo sapiens
ccgctcggcccctcaatccatcttcccctttcagtccattgttcccacagttcgggtaggagagaaaagcccccgcagcgcccacattccgtcccgccgcyccgcggcgcagcctgagcgccacacaaaggacgcggccgactccagcgaccctgcggcgctcccgggcgcgagccgccggggtcgggcgggcgagcacta

SEQ ID NO: 45060 - DNA, 201 bp, Homo sapiens
ctttctttctctaatctgatgcatatcattttcttcctttcttgttcccagggatctctcaatgctatttgccttcattagcttgctcgttatgcttcccrcttggtggattgtgtcttcctggctggtatggggagtgattctatttgtgtatctggtcataagagctttgagattatggaggacagccaaactacaagt

SEQ ID NO: 45061 - DNA, 201 bp, Homo sapiens
atttttataatcaaagagtaatatctaattttacattttatccttaagaaagaaacttaattcattaatctgattcaatttaaaccgttataataatcagwatatagttcaagtttttcctctacgtgaggcaatctaatcactaagataacattgttttagttatttggagtgtcttggtgcctttcaagtttatttgta

SEQ ID NO: 45062 - DNA, 201 bp, Homo sapiens
ctagacctaacaggttttactttaattgttaatggccttgtccatcattctctttattttgatcatatagtaggatcactctagtactaaatttgtttgtttggttttggtttattttttatttttattttttttgagacggaatcttgctctgttgtccaggttgtagtgcagtggcacaatctcggctcactgcaacct

SEQ ID NO: 45063 - DNA, 201 bp, Homo sapiens
gaatcagaggttcccacacacataatttgaaatcatattcttggctaatcttaaggtagtttaagttcggctatatttattatttaggataaagtgcaaawtttaaaccagaagttaagataaacaaatttatagtttgttttgaacactgaccaatatttgttattgatctagttcttttttcttttttctttaaggttt

SEQ ID NO: 45064 - DNA, 201 bp, Homo sapiens
aagatgacttacttcacaagttggtaagtggtcacttctttttgccacttttcagggttctaggttattagtgaaataattggtgaatcagaatttgtttkgctatcaatttggccagcaattgatttttactagagattctgcagtaactcaggatcttttaatttgggcttactggtattgtttatagcttttaaagag

SEQ ID NO: 45065 - DNA, 201 bp, Homo sapiens
aaactttaatgagagcacaactaataggaatcctctactaactggatttttctctttaaatcttttttttaaaaaacagcatgaatgacaagaacgcaaaytgatatttcttaaacacagtttcaggtgtagataatggagtgagcataacttctggtgacttttttatctatagaattaaatacttttatacattaaata

SEQ ID NO: 45066 - DNA, 201 bp, Homo sapiens
atattataattcatacaatataatcattgtttaattattcttggctttgagtaataacattgtcgtttgagttatctataacattggctattttgaagcartctaagactataaaatttgggacagtgaaattgcttaacaatctatttatattcctaaattcattttttcttgctggtactcactcaaaaaaaaaatctg

SEQ ID NO: 45067 - DNA, 201 bp, Homo sapiens
gtatacatgtgccatgctggtgtgctgcacccattaactcgtcatttagcattaggtatatctcctaatgctatccctcccccctccccccacctaattgyagtctttttggagatttaaatatttcattgaatggaatcaagatttattatttttttttttaattttttaatttttttttttttttgtgagacaaagtct

SEQ ID NO: 45068 - DNA, 201 bp, Homo sapiens
ctgttggatatgatctgtgatatataaagtgaatgattaatgtgctgtcattgtgaaatgtgaaatagcaagtgttccagattatggtgatccgaactgartgtgtatatatgccctcagcttatatacagaacatatttgaagaaaaaagtattcttgtttctcttctggttatcattttttaaaaaacaatctatacta

SEQ ID NO: 45069 - DNA, 201 bp, Homo sapiens
caggcgtgggccactgtgcctggccccctctttcttatatatacacattttcaccaaagcattcattgctttaaagatgtattttagtctgttagacttgyaattgatatgaattttaaaatgtgtacatatttttgtttcaattaaagtagtataaaagtacaaaccttgtccatatcatggtctgtggtaagtatgtat

SEQ ID NO: 45070 - DNA, 201 bp, Homo sapiens
ggatctcttgaggtcaggacgagtatgagaccagcctggccaacatggtgaaacctcgtctctactaataatacaaaacttagctgggcatggtggcgggygcctgtaatcccagctactccggagactgaggcaggagaattgcttgaacccaagagccagaggttgcggtgagccaagatcgcgccaccgcactccagc

SEQ ID NO: 45071 - DNA, 201 bp, Homo sapiens
tctgagctctttagttaggcatgattctctactagagggaatgtcaggagagtgatgctggattgctaaatataaggtcctctgttttcctccctggaggrggagaaaggagcaattctctagacatgccaatataacatttccttttatttttaagtagtgtatttctttttcttttcttttctttcttttttttttttt

SEQ ID NO: 45072 - DNA, 201 bp, Homo sapiens
tgtatttctaatacagaaaatagagggaaatggaaaatacagaaaacggaagaaatagaagtgccccattattgcactgcccagattttaacaaataaaartaatagcaagaaaatccaagccatacagagaatggtaccaaatgaaaaataattgttccttcatttctcccttcccatgcccccagcagggaggagttac

SEQ ID NO: 45073 - DNA, 201 bp, Homo sapiens
tttaaagagaatgaacgcagccgaagttgaatcgaggcagtgatttcactcagtgcgttgggtctttccactcacctggccctccagaaccccagggccttgagtgcatgggctggtacaagagcccagtttttggctggggaggcacttcctatgggagggggacgcctgtctcagtgctgaggcaaccaccaccgagga

SEQ ID NO: 45074 - DNA, 201 bp, Homo sapiens
atagaagtgccccattattgcactgcccagattttaacaaataaaaataatagcaagaaaatccaagccatacagagaatggtaccaaatgaaaaataatkgttccttcatttctcccttcccatgcccccagcagggaggagttactattaagtttcttatgtgcacattttaaatttgtatgtttccccctcttactta

SEQ ID NO: 45075 - DNA, 201 bp, Homo sapiens
gattgattaaaaaaaaaaatttcgcagctgggcgcaggtggctcacgcctgtaatcctagcactttgggaggccgagacaggtggatcacctgaggtcagragttcaacacaagcctggccaacatggagaaaccctgtctaccaaaaatacaaaaattagccggacatgatggtgggtgcctgtaatcccacctacttgg

SEQ ID NO: 45076 - DNA, 201 bp, Homo sapiens
gacatgccaatataacatttccttttatttttaagtagtgtatttctttttcttttcttttctttcttttttttttttttttttgaggaagaatctcactstgtcacccaggctggagtccgttggtgccatctcggctcactgcaacctccacctccccagttcaagtgattcttcttcctcagcctcccgagtagctgg

SEQ ID NO: 45077 - DNA, 201 bp, Homo sapiens
caaggggaggcaccggggagtgaccgttgtccggagccaccacggtgttttggtgagtgcaggagcgagaggagggagggccttagggaggctggtgctasccctcgtggttgaccctggtgttgagaccagttctgactgccatgctgttcccgaggctgagtctagcgtctccctggtgccaaccccagggctgactgt

SEQ ID NO: 45078 - DNA, 201 bp, Homo sapiens
gtgttttggtgagtgcaggagcgagaggagggagggccttagggaggctggtgctagccctcgtggttgaccctggtgttgagaccagttctgactgccaygctgttcccgaggctgagtctagcgtctccctggtgccaaccccagggctgactgtagctctgaccaccctgataccagggctgacctaggtattccctg

SEQ ID NO: 45079 - DNA, 201 bp, Homo sapiens; identical to SEQ ID NO: 8056

SEQ ID NO: 45080 - DNA, 201 bp, Homo sapiens
ccccagggctgactgtagctctgaccaccctgataccagggctgacctaggtattccctgtgacccagcacactcctgcaggtgtcggcctcggccttgaygccaacactgactcctacacccggtgaggggtgggccagctcttcctgtgccccctgcctggttgagccactgagttctggaatgggggtgagaatgtgg

SEQ ID NO: 45081 - DNA, 201 bp, Homo sapiens
cccccttctctgggtctttcgggaggattgtgaaccctcccaattctaatacaggtcagagaataaagtctctcctggagctcggtcatccttctggcaawgctctcttcttcatttactctcccctgcttagagacagcatcttcacctcaagccacggctccaggagaaaggcatccaaggtcatggtggtgctcaccg

SEQ ID NO: 45082 - DNA, 201 bp, Homo sapiens
taggcttgggcgagctcgcagcttccagcgctttggggtcacggtcaggctgggccggtccttgggcactcggccgccgggacacctccgccgccgcctcwccgggctgccggggaagtcggggtcgtcgggatcgtcaggatcgtcggactgcgaggggtcgccgatgctggcgtcgctgctgccgctgctgttgaagaa

SEQ ID NO: 45083 - DNA, 201 bp, Homo sapiens
ggttgcagtgagccaagatcatgccattgcactccagcctgggcgacagagtgagactccatctcaaaaaaaagaaaaaaaaaaaaaagaaagaaagaaakaaaccctgagaacaggacaggttagagctgggtgaaggcaagatgtgagcttcaagtcagtgaccagttaaaaagattgttaaacatttaaatacaaaat

SEQ ID NO: 45084 - DNA, 201 bp, Homo sapiens
tgcacagcctggggtggggagaagccagggttgtcgatgggggcttttctgtaagcagcttatccagaccctgttctatttgcaaatgctcctcttctctycatgctctgtcatcccagagagggctcatttccccatggtggtcacagcttactggccaaatagtggtgggagagccacaggaaacacaccaaggagggt

SEQ ID NO: 45085 - DNA, 201 bp, Homo sapiens
cttttggccctttttaaagcggtgggaatggaggagagaggtttccgttgcctcctgatgtttgctcttccggcttgatctagttctctccagcctgtctrttccccttggcacaatgcggcccttgggaacactggcctcctgatgctctctccggacggcctcttgaagccctctctcttgacaagagtcctggcctgt

SEQ ID NO: 45086 - DNA, 201 bp, Homo sapiens
cccagagagggctcatttccccatggtggtcacagcttactggccaaatagtggtgggagagccacaggaaacacaccaaggagggttcctggaggaccgyggtgccaagctgagtcctgccagacaaatgggagtagctggcctagggcacaggggaggcagagaggggccctgcaggcagagggaacagcatgtgcaga

SEQ ID NO: 45087 - DNA, 201 bp, Homo sapiens
agaagtggcagtggtatagatgctgcagacctctgacacatcagtcacaattttcttcttgtggaaactgaaggaagccctggttttggtccaaaagcagrcattctgtaaaggagtcaggtcctgggtggggaacgaatcttttcccagcttttggccctttttaaagcggtgggaatggaggagagaggtttccgttgc

SEQ ID NO: 45088 - DNA, 201 bp, Homo sapiens
gattcctgtaaaagagcgattttattttaattaattaatttatttatttattttgagacggagtcttgctctgtcgcccagtctggagtgcagcggtgcartctcggctcactgcaacaaaagggtggccatattgatgacaggaggtcgcttttttctgtgtgctcaaacatccagttgttcccctgaatacagaccagg

SEQ ID NO: 45089 - DNA, 201 bp, Homo sapiens
catttcaacaaatatttcagtttccatttggaaacaaaattcttgtttgaaaagctgactggaaacctgtgagaatgggagttccaccctcctgtggggayggaggttgaaacagcaccagaggcttcaagaccagtctcctctcatttcggggcagtaagatacatttagcttacttaaacagactgtgctggcagagca

SEQ ID NO: 45090 - DNA, 201 bp, Homo sapiens
tgtcacccaggctggagtatagtggcgtgatctcagccctctgcaaactccccctaccgggttcaagcaattctctgtctcagcctcccgagtagctgggrttacaggcacctgccaccacacccggctactttttgtatttttagtagagacggggtttcaccatcttggccaggctggtcttgaactcctgacctcagg

SEQ ID NO: 45091 - DNA, 201 bp, Homo sapiens
ggccttgagtgcatgggctggtacaagagcccagtttttggctggggaggcacttcctatgggagggggacgcctgtctcagtgctgaggcaaccaccacygaggaccctgggctggaagctgggctgagatgtctggtggtaggttctgaggcaggacaggggaccgactcaaatggatgatacgaacggcaggctggat

SEQ ID NO: 45092 - DNA, 201 bp, Homo sapiens
agcacacggtgtgttcacagccacaccacccttgccccaggttacgctgtggccgtgctgcacaagacctgcagcctctcctacgtcgcgggggctccacrgtacaaacatcatggggccgtgtttgagctccagaaggagggcagagaggccagcttcctgccagtgctggagggagagcaggtacctgctggggaaagc

SEQ ID NO: 45093 - DNA, 201 bp, Homo sapiens
ggtcttgctatgttgaccaggctagatatgaactcttgggctcaagcgatcctcctgcctcagcctcccgagtagctgggactacaggcgcacgccactgygcccggctagtttacttctttcagaacatttgttatcagcaaatttaaacatttcaacaaatatttcagtttccatttggaaacaaaattcttgtttgaa

SEQ ID NO: 45094 - DNA, 201 bp, Homo sapiens
gcaggcggatcacctgaggtcaggagttcgagaccagcctgaccaacgtggagaaaccccgtccctaataaaaatacaaaattagccaggcatggtggcgygtgcctgtaatcccagctactcaggaggctgagacgggagaattgcttgaacctgggaggtggaggttgcagtgagccgagatcgtgccattgcactcca

SEQ ID NO: 45095 - DNA, 201 bp, Homo sapiens
actcaggtatttaaaggcagttctttatcagtcacacctctttccacagtgactacagagtctcaagtataaaaaccagagttctagaaacagagtgaagrcaagttaaccatgggaaaagattaggagtaaattcccgaagtcctgttcagaaggactctcaatcactcagctcttaaagcaacctgtcagttttcctcc

SEQ ID NO: 45096 - DNA, 201 bp, Homo sapiens
ggtgctcaggctggatggcggctgggcggggcagcggcatcgctctccgcacccactttcttacccaagggtgatcgttgatgataatatctctaatatcyctttttttgtggttgttgtttttgagatggagttttgctctcgttgcccaggctgcaatgcaatggcaggatcttggctcaccgcaacctctgcctccgg

SEQ ID NO: 45097 - DNA, 201 bp, Homo sapiens
ctcagctgactgtgaggtttggggtggagttgatgaggctccgtgtagaagatcgaggtggggggactgcggctggctgcagatggctctgaggcacagtsctcccacgaggccccgctgggtgttctgggcggggtgtcgggacccctgcatctagccccacttcttcagctcctggtatcagtgtgggcaaatcatgcc

SEQ ID NO: 45098 - DNA, 201 bp, Homo sapiens
ccctgcccatggaactagaggggggcgggctctgactcctgaacttccaggtaggaggaccccagctttcccctggtgctcactgtatggccttgggaagktccctggccagtgagcgtgcatcctgggtggcaacggagtgggcacccaccagcccagcgagcgtgcatcctgggtggcaacggagtgggcacccaccgg

SEQ ID NO: 45099 - DNA, 201 bp, Homo sapiens
ggtatcagtgtgggcaaatcatgccccatgggcctcggtttcctaaattgggaatcgtggtacttattgtactgtgagaatgtgagttgaaattgcccggwgtgctgggggagacagagggttgaggggagacagtggtggctgacaggatggagggggatctcggtctgactcagcaggcctccgtggctggggacagct

SEQ ID NO: 45100 - DNA, 201 bp, Homo sapiens
tctactaaaaatacaaaaaaaattagctgggcgcgatggcgggtgcctgtagtcccagctactcgggaggctgaggcaggagaatggcgtgaacccgggargcggagcttgcagtgagccgagattgcgccactacactccagcctgggccacagagcaagagtctgtctcaaaagaaaaaacaagaaagaaaactttgct

SEQ ID NO: 45101 - DNA, 201 bp, Homo sapiens
agtgggtggatcacttgaggtcaggagttcgagaccagcctggctaacatggtgaaaccctgtttctattaaaaatacaaaaaattagccgggcgtggtgktgggcacctataatcccagctacttgggagactgaggcaggagaattgcttgaacccgggaggtggaggttgcagtgagccgagatcgcgccacttcact

SEQ ID NO: 45102 - DNA, 201 bp, Homo sapiens
taacatgttggcagctcgcactttttaattctcctctaggcagtttgctgacgtcctgttttttccccagagtgactgaccaggaggcacagggctcaacrtgacgtgggccccggggccggagcccagactccctgctgggcatcctttatctcagttctggattcgtgggggagcagcgggaacagtacggccttcttc

SEQ ID NO: 45103 - DNA, 201 bp, Homo sapiens
atctgaactccacccttccctggagtcctttaataaccgccttttccattgttcagtgatacacacaatagtgtagtttttggatgggtgcagtggcccawgcctgtaatcccagcactttgggaggccgaggcgggcggatcacctgaggtcaggagttcgagaccagcctggccaacatggcaaaaccccgtctctact

SEQ ID NO: 45104 - DNA, 201 bp, Homo sapiens
cgagattgcgccactacactccagcctgggccacagagcaagagtctgtctcaaaagaaaaaacaagaaagaaaactttgctgtttgaagtagttacgtcrgtaattatgaacccctatccctcttgcctggagagtgtaagtcattttgaccaagagaagagtctgtttccacctgaggtagagagcttcagatacagtg

SEQ ID NO: 45105 - DNA, 201 bp, Homo sapiens
cctaccgagggtgggccaccatgccaggccctgagataatgtggcgatcgaggcagatgcagtgtgtgcccccttggactcactggtggcagggggcagtyactggcaatagggaaacaaggaaggccaagcacagtggctcactcctgtaatcccagcacttagggaggccaagactggaggatcacttgagcccaggaa

SEQ ID NO: 45106 - DNA, 201 bp, Homo sapiens
ctccagcctcctcctggtccaaccaacagatggttaataactagataaatccccgccagtccagctccatgcctcccgaggcaccatattctgctgcagtrccaccctccctatgtgcggccctttcttcaccagggttctgagagagaagtgagtctaatgccctaagacactgagaaagtaaaaattagcttagactgg

SEQ ID NO: 45107 - DNA, 201 bp, Homo sapiens
ggaagtttaacgtcaggtttcagttctgtggcgagcacactctaagcagttgtgaggattttgccccacttcctgcagttatttcacctctttttcttttktgtgtgtgtgtgtgtgtgtttgtttgagacggagtcttgctctatcaccaggctggagtgcagtggtgcgatctcggctcactgcaacctccgcctccca

SEQ ID NO: 45108 - DNA, 201 bp, Homo sapiens
tctgttttttttggagatgaagtcttgctcttgtcgcccaggctggagtgcaatggcgcagtctcggctcactgcaccctccgcctcccaggttcaagcarttctcccaccatagcctcccgaagctgggactacaggcacacgctgccacgcctggctaattttttgtgtttttagtaaagacagggtttcaccatgttg

SEQ ID NO: 45109 - DNA, 201 bp, Homo sapiens
tgagacaggagaatcgcttgaacccgggacacagaagttgtagtgagccaagattgcaccactgcactccagcctgggcgacagagcaagaccccatctcaaaaaaaaaaaagaaattaataaaaataaattgctgacttaagtataattcaactctaaacatttcagcatacatatcaacaaaatgtgtttgtgcttctt

SEQ ID NO: 45110 - DNA, 201 bp, Homo sapiens
caccgtggctcacgcctgtaatctcaacacttagggaggctgaagctggaggatttcttgaggccaggagttcaagaccaccctgggcaacatagtgagacccccccaactcaaaaaaaaccaaaaactgtctgggcatggtggtgcctgcctgtagtctcagctacttgggaggctgaggcaggaggaccacttgggccc

SEQ ID NO: 45111 - DNA, 201 bp, Homo sapiens
ctgaggcgggcggatctcttgaggtcaggacgagtatgagaccagcctggccaacatggtgaaacctcgtctctactaataatacaaaacttagctgggcrtggtggcgggcgcctgtaatcccagctactccggagactgaggcaggagaattgcttgaacccaagagccagaggttgcggtgagccaagatcgcgccac

SEQ ID NO: 45112 - DNA, 201 bp, Homo sapiens
taatacaaaacttagctgggcatggtggcgggcgcctgtaatcccagctactccggagactgaggcaggagaattgcttgaacccaagagccagaggttgmggtgagccaagatcgcgccaccgcactccagcttgggcgacagagtgagactccatctcaaaaaaataaaaataaaaaataaagtcatagcaaaagttac

SEQ ID NO: 45113 - DNA, 201 bp, Homo sapiens
cgtcttggggtcacggttaggcttgggcgagctcgcagcttccagcgctttggggtcacggtcaggctgggccggtccttgggcactcggccgccgggacrcctccgccgccgcctcaccgggctgccggggaagtcggggtcgtcgggatcgtcaggatcgtcggactgcgaggggtcgccgatgctggcgtcgctgctg

SEQ ID NO: 45114 - DNA, 201 bp, Homo sapiens
aaactgttacatagtaagtaaatgggtgagtgtgtcttcccgtgagagtgcgatgtcaaatgtcattccttatatcgtgtttactcagtgtatttagagaygaaaaagtcactaaaccaaaaaaaggagtgttgccaagaagttgtatagcttttcaagagtgtttatggcaaaagtcgttaattgaacagtaattgaaca

SEQ ID NO: 45115 - DNA, 201 bp, Homo sapiens
gatggcgggtgcctgtagtcccagctactcgggaggctgaggcaggagaatggcgtgaacccgggaggcggagcttgcagtgagccgagattgcgccactrcactccagcctgggccacagagcaagagtctgtctcaaaagaaaaaacaagaaagaaaactttgctgtttgaagtagttacgtcagtaattatgaacccc

SEQ ID NO: 45116 - DNA, 201 bp, Homo sapiens
atctcagtcaggataagctcacagatgtggccatcggggcccccctggaaggttttggggcagatgatggtgccagcttcggcagtgtgtatatctacaayggacactgggacggcctctccgccagcccctcgcaggtgacccatggggccctctccttcctctcctctggggctctgacctctctcagatatgatgacc

SEQ ID NO: 45117 - DNA, 201 bp, Homo sapiens
gcaggtctcgggggttgggaatgcccagtgaaagaaagaagtcccccaggctagggggagcttccagaccagggcctcacctcagccccttcaggttgggrggaggttccagaccagggcttcacctcggccccttcaggttcgggggaggttgtggcggtacctgtctccttccctggcctataccccctccttccaccc

SEQ ID NO: 45118 - DNA, 201 bp, Homo sapiens
ccccaggctagggggagcttccagaccagggcctcacctcagccccttcaggttggggggaggttccagaccagggcttcacctcggccccttcaggttcrggggaggttgtggcggtacctgtctccttccctggcctataccccctccttccacccacctgcctcgggtccctgcttcctctctttctgtccctcgctc

SEQ ID NO: 45119 - DNA, 201 bp, Homo sapiens
atttaaaaaaaaattagaggccaggcacggtggctcacgcctgtaattccagcactttaggaggccgaggcgggcggatcacaaggtcaggagttcaagaycagcctgaccaacatggcaaaaccccgtctctactaaaaatacaaaaattagtccggtgtggtggcaggtgcctgtaatcccagctacttgggaggctta

SEQ ID NO: 45120 - DNA, 201 bp, Homo sapiens
agtttgtggtggttcagagtcctgattctggaggaaacaggcctgtttggagtcccagctctgctccttactagctatgtggcctctcagaggcagcatcyttatctgagaaatcgggttgaccttgtaggtggctgagaggctcagatgagggctcgcatgtgaggccttggcactgagcagggcactcctactgagtgt

SEQ ID NO: 45121 - DNA, 201 bp, Homo sapiens
atccccaagccccacatcaagcctccttgtaccccaatcccctgtggtccaccccgtccctggccctggctgcttctcagaaggccctgctctttccccaygcctcactctttcccttactctcccctgtcaagtcccacctgccctacgaggctccatccaaatgccacttcctctgggaaagcttgctccctctttcct

SEQ ID NO: 45122 - DNA, 201 bp, Homo sapiens
gacccctaggcagggaagaaggctgtactgttcctgctgctcccccacgaatccagagctgagataagggatgcccagtagggagtctgggctccggcccyagggcccacgtgagacaggagaatcacttgaactgaggaggtgggggttgcggtgagccaagatcacaccattgcagtccagcctgggtgacagagtgag

SEQ ID NO: 45123 - DNA, 201 bp, Homo sapiens
cgcttggataaatacatactggatggatgcaggatgagtccgcattctagaagtgtgcagaggtacagaagtggccctgctccctgtccagcacccagtcrtcagctttccctggcttcccgaggcaccctgacgttcacactccaaacacaaagtcttctctcaggaatctcgagtgagctgcagtctgggttctagccc

SEQ ID NO: 45124 - DNA, 201 bp, Homo sapiens
tccaccccgtccctggccctggctgcttctcagaaggccctgctctttccccatgcctcactctttcccttactctcccctgtcaagtcccacctgccctwcgaggctccatccaaatgccacttcctctgggaaagcttgctccctctttcctggttctagactcggggctccctggggctggatggtgcctgcgatgct

SEQ ID NO: 45125 - DNA, 201 bp, Homo sapiens
tgtcatttcactcccaaaaaacatggacattttcatttctaaagaacatgaagggccgggcgtggtggctcacacctgtaatcccagcactttgggaggcygaggctggtggatcacctgaggtcaggagtttgaaatcagcctggccaacatggcgaaaccccatctctactaaaagtacaaaaattagccaggcatgtt

SEQ ID NO: 45126 - DNA, 201 bp, Homo sapiens
tactcaggaggctgaggcaggagaatcacttgaatccgggagacagaggttgtagtgagctgagatcgcaccactgcactccagcctgggcaacagagtamgactcagtctcaataataaagaacgtggacattttcttaaatagccacaatgttcttaccacctaactaaattaattctttggtatcatctaataccaaa

SEQ ID NO: 45127 - DNA, 201 bp, Homo sapiens
tagtgagctgagatcgcaccactgcactccagcctgggcaacagagtacgactcagtctcaataataaagaacgtggacattttcttaaatagccacaatrttcttaccacctaactaaattaattctttggtatcatctaataccaaatacttagtccatatacaaatctctctgtctcaaaatgtcttttttttttttt

SEQ ID NO: 45128 - DNA, 201 bp, Homo sapiens
cgcctgaaatcccagcatttgagaggccaagtgggggcagattacttgagatcaggagttcaagaccagcctggccaacagagtgaaactccatctctacmaaaaatacaaaattgatctgggtgtggtggcacatgcctgcaatcccagctacaggggaggttgaggcaggagaatcgcttgaacctgggaggcagaggt

SEQ ID NO: 45129 - DNA, 201 bp, Homo sapiens
ggcatgagccactgcacccggccgtattatgctttttataattccctggatttgatttactggaattttgtgcagcatttttgtatttatgttcgagagaracggttgtttcaattttcctttcatttattgtgcttgctggattttaatatcaatgttatactggcttcataaaatgactgaaaaatgttttctcatttt

SEQ ID NO: 45130 - DNA, 201 bp, Homo sapiens
ttgactaggacgtggagagctctgagaagtaaaccgtgtacctggttgtaatgggagggcttttctggccctcctctgcctgcctcacacctgcctgttaycccagccccggctgctctgcctttgggtagtttctagggcttggttggagcagcccattcacctctcatggagccccgtaccttgccagtgttacatcac

SEQ ID NO: 45131 - DNA, 201 bp, Homo sapiens
gcgatctcggctcactgcaagctccgcctcccgggttcacgccattctcctgcctcagcctcccgagtagctgggactacaggcgcccgccaccacgcccrgctaattttttgtattttcagtagagacggggtttcaccgtgttagccaggacggtctcgatctcctggcctcgtgatccgcccgcctcggcctcccaaa

SEQ ID NO: 45132 - DNA, 201 bp, Homo sapiens
gatctcggctcactgcaagctccgcctcccgggttcacgccattctcctgcctcagcctcccgagtagctgggactacaggcgcccgccaccacgcccggmtaattttttgtattttcagtagagacggggtttcaccgtgttagccaggacggtctcgatctcctggcctcgtgatccgcccgcctcggcctcccaaagt

SEQ ID NO: 45133 - DNA, 201 bp, Homo sapiens
tgttagccaggacggtctcgatctcctggcctcgtgatccgcccgcctcggcctcccaaagttctgggattacaggagtcagccacctcgcctggcccctytattttttaaatgtcttaggatctattatgatgtcccccctttttattttttattcatgttggtaatttgtgtgttctctttttttttttcttgttcagt

SEQ ID NO: 45134 - DNA, 201 bp, Homo sapiens
aactggaatgtggggtggggggaggcacttctgctgcctggggggtcccattttagcctttaactgtcccatggaagcctctgggcaagccaagccatgartcctttcgggggccccctgtgatgagacagcacggtcaggtgagcccctggaggctgctaagattaagccggaggccagggtggtcctgcctagtgatct

SEQ ID NO: 45135 - DNA, 201 bp, Homo sapiens
gcatctgaggtgggctctgaaggacggggaggtccttggcaagtacaggctgggggtgagcagaggggccttctgtgcaggggggataggagggaccaagccctggggtgtgaagagtctggtttgtaggaagatggaggcgaagtgtgagtgggagcaggagattgtctcctctggtgttgctttcccttccagccccgc

SEQ ID NO: 45136 - DNA, 201 bp, Homo sapiens
tctactaaaaatacaaaaatgagccaggcatggtggtgcgcacctgtaattccagctacttgggaggctgaggcaggagaattgcttgaacccaggaggcrgaggttgcagtgagctgagatcacaccactgcactccagcctggaagacagagagagacaccgtctcaaaaaaaaaaaaaaggccaggcgcagtggctca

SEQ ID NO: 45137 - DNA, 201 bp, Homo sapiens
cagtggtgcgatctcggctcactgcaacctccgcctcccaggttcaagcgagtctcctgcctcagcctcccaagcagctaggactacaggcatgcgccacyacgcccagctaatttttgtatttttagtagagatagggtttcactgtgttggctgggctggtcttgaactcctgacctcaggtgatccacccatgtcggc

SEQ ID NO: 45138 - DNA, 201 bp, Homo sapiens
gaggttgcagtgagctgagatcacaccactgcactccagcctggaagacagagagagacaccgtctcaaaaaaaaaaaaaaggccaggcgcagtggctcamgcctgtaatcccagcactttaggaggccaaggtgggcagatcatgaggtcaggagatcgagaccatcctggctaacacagtgaaactccgtctctactaa

SEQ ID NO: 45139 - DNA, 201 bp, Homo sapiens
ggaaactttcattttattaattaattaatttatttatttatttgagatagagtcttgctctttctcccaggctggagtgcagtagcatgatctcggctcaytgcaacctccgcctcccaggttcaatcgattctcatgcctcagcttcctgagtagctgggactgcaggtgcatgccaccacaccaaactaatttttgtat

SEQ ID NO: 45140 - DNA, 201 bp, Homo sapiens
agtcttgctctttctcccaggctggagtgcagtagcatgatctcggctcactgcaacctccgcctcccaggttcaatcgattctcatgcctcagcttcctragtagctgggactgcaggtgcatgccaccacaccaaactaatttttgtatttttagtagagactgggtttcaccatgttgaccaggctggtcttgaactc

SEQ ID NO: 45141 - DNA, 201 bp, Homo sapiens
tcttgctctttctcccaggctggagtgcagtagcatgatctcggctcactgcaacctccgcctcccaggttcaatcgattctcatgcctcagcttcctgaktagctgggactgcaggtgcatgccaccacaccaaactaatttttgtatttttagtagagactgggtttcaccatgttgaccaggctggtcttgaactccc

SEQ ID NO: 45142 - DNA, 201 bp, Homo sapiens
acttttacttttggagactggggtctcaccttgttacccaggctggacttgaactcctgagctcaagtgatctgcagtagctgggactaagggcatgtgcyactgtgcctggcttagggaaacttaatcacttcaggaagcatcgtcgtcctaatagcagagttcaggaggatgcacctaaattgacaattcccaacttcg

SEQ ID NO: 45143 - DNA, 201 bp, Homo sapiens
gcctcggcctcccaaagttctgggattacaggagtcagccacctcgcctggcccctctattttttaaatgtcttaggatctattatgatgtcccccctttytattttttattcatgttggtaatttgtgtgttctctttttttttttcttgttcagtattgctagtgatttatcattttaaaaatctttaaaaaaaacttc

SEQ ID NO: 45144 - DNA, 201 bp, Homo sapiens
atcacactactgcactccagcctggacaacagagcaagacactacctaaaaaacaaacaaaccccacaaaataacaggaggctattaccatcaacaaggcmggacgatgatggaaggagcatctggagaagagttgctttctagaaataatttggagagtcgggcacggtggctcatgcttgtaattccagcactttggga

SEQ ID NO: 45145 - DNA, 201 bp, Homo sapiens
atctttccaaacccatattctgagccgggcactttgggaggccgaggtgggtggatcacctgaggtcaggagttcgagaccagcttgcccaacatggtgamaccctgtctctactaaaaatgcaaaaattagcctggcgttgtggcaggcgcctgtaatcccacctccttgggaggctgaggcaggagaatcgcttgaaca

SEQ ID NO: 45146 - DNA, 201 bp, Homo sapiens
tgttcagtattgctagtgatttatcattttaaaaatctttaaaaaaaacttcagcatcattagttttctctactgtaagttggtttgctgtttcattgatrcgtgttcatatctttattccttcccgtacttcctttaggtctgatttgctattccactgtaattttatctttcaccctgggttatttagaaatgcattgc

SEQ ID NO: 45147 - DNA, 201 bp, Homo sapiens
ttcagtattgctagtgatttatcattttaaaaatctttaaaaaaaacttcagcatcattagttttctctactgtaagttggtttgctgtttcattgatacrtgttcatatctttattccttcccgtacttcctttaggtctgatttgctattccactgtaattttatctttcaccctgggttatttagaaatgcattgctt

SEQ ID NO: 45148 - DNA, 201 bp, Homo sapiens
ctgatttgctattccactgtaattttatctttcaccctgggttatttagaaatgcattgcttaattttcacgaggttcagatttttctagttttccttccktccttccttccttccttccttccttccttccttccttccttccttccttccttcctccttccttccttccttcctttctttcttctttcccaagtctcac

SEQ ID NO: 45149 - DNA, 201 bp, Homo sapiens
gaatataaaaatacagtttccgtataaaatgtattgtcatgaaggtttattggcctcattaaaaggagaagacaagatttgacagtgggggctaggcgcgrtggctcacgcctgtaatcccagcactttgggaggctgaggcgggcggatctcttgaggtcaggacgagtatgagaccagcctggccaacatggtgaaacc

SEQ ID NO: 45150 - DNA, 201 bp, Homo sapiens
ccaggttcaagcgattctcccttgtcagcctcccgagtagctgggattataggcacccgccaccatgcccggctaatttttgtatttttagtagagacagkgtttcaccacattggtcaggctggtctcaaactcctgacctcaggtgatccaccgcctcagcctcccaaaatgttgggattataggcatgagccaccgca

SEQ ID NO: 45151 - DNA, 201 bp, Homo sapiens
tgggaaaaaagtaaagttgtatccctatttcactccaaatgtaaaaataaaatccagatggacaaaaggttcgaacataagaaattaaagaagagaccggrccttggctcacgcctgtaatcccagcactttgggaggctgaggcgggcggatcacctgaggtcaggagttcaagaccatcctggccaacgtggtgaaacc

SEQ ID NO: 45152 - DNA, 201 bp, Homo sapiens
gtctccactaaacaaaatacaaaaaattagccaggtgtggtggcgggcgcctgtagtcccagctacgggggaggctgaggcaggagaatggtgtgaacccrggaggcggagcttgcagtgagccaagatcgcgccgctgcactccagcctgggtgacagcgagactctgtctcaaaggaaaaaaaaaaagaaaaaagaaaa

SEQ ID NO: 45153 - DNA, 201 bp, Homo sapiens
tgtctctccctagctgagctggttctgttctgtacagtaagagaggcggccccgggatctccacggtgcttccagctgtgccgtcctggggtttttctcckcagagtccctctttccctctccattctctttgttgtctctcttcctccttattttcttcttcaatctcgatccccttcccgagccctccttccctaaaga

SEQ ID NO: 45154 - DNA, 201 bp, Homo sapiens
tactaaaatacaatattagccgggcatgatggcgggtgcctgtaatcccagctatttgggaggcttaagaggctcagatgggagaatcccttgaacccggsagatggtggttgcagtgagccgagatagcgccactgcactccagcctgggcggctcagcgagactttatctcaaaaaaaaaagaaagaaagaaaaaagaa

SEQ ID NO: 45155 - DNA, 201 bp, Homo sapiens
tcactctgaggaggtgtttgagactgaaatgctccagatttgattatccagttgctcacgggcatcgcccctagaagagataatagcatctttgcataacrtgtccatgtccaaaatagatcttttggtgcaaaaaaccaaccctctgtcccaacccgttccttagctaccctcaggagggagatatactccagttacagt

SEQ ID NO: 45156 - DNA, 201 bp, Homo sapiens
ctgacgcctataatcccagcacttggggaggctgagatggcaggattacttgagcccaggagttggagaccagcctgggcaacatagtgagacaccatctytacaaaaaattttttaaaaattagccaggcctgctggtgcgcatctgtggtcccagctacttgagaggctgaggcgggaggatggattgagccctggagg

SEQ ID NO: 45157 - DNA, 201 bp, Homo sapiens
gttggcaggtgcagtggctcacctgtaatcctagcactttgggaggtcaaggcgggtggatcacatgagcccaggagttcgagaccagcctgggtaacacrgtgagaccctgtctacaaaaaatataaaaaaatcagccggatatggtggtttaagcctgtagtccgtcccagctattgggaggctgaagtgagagacctg

SEQ ID NO: 45158 - DNA, 201 bp, Homo sapiens
tgaggcaggagaatggcgtgaacccgggaggcggagcttgcagtgagccgagattgcgccactgcactccagcctgggcgacagagcgagactccgtctcaaaaaaaaaaaaaaaatatatatatatatatatatatatttagtttccagcacacagtagtgctcaaggcctgttggcctttcttgttattagggagatga

SEQ ID NO: 45159 - DNA, 201 bp, Homo sapiens
cgtgaacccgggaggcggagcttgcagtgagccgagattgcgccactgcactccagcctgggcgacagagcgagactccgtctcaaaaaaaaaaaaaaaawatatatatatatatatatatatttagtttccagcacacagtagtgctcaaggcctgttggcctttcttgttattagggagatgaagggtgagggagagag

SEQ ID NO: 45160 - DNA, 201 bp, Homo sapiens
tctagctttttgctttactgtcatcagctttgatcaatacacgggttgttgccaagtcctcgtattttgctccttaaaataacatgtaggattttttcctygtttgcttcacctgatttattgggcgatctctttgtcttgtctagatcactgtcgtcttcctgaaagatgagaagtaccattctttgcctatcatcatta

SEQ ID NO: 45161 - DNA, 201 bp, Homo sapiens
aacccgggaggcggagcttgcagtgagccgagattgcgccactgcactccagcctgggcgacagagcgagactccgtctcaaaaaaaaaaaaaaaatatawatatatatatatatatatttagtttccagcacacagtagtgctcaaggcctgttggcctttcttgttattagggagatgaagggtgagggagagagatgg

SEQ ID NO: 45162 - DNA, 201 bp, Homo sapiens
gcgagtccagtctgaggaaacaagctgagccaggcctggcagacctgggcaccagctggctctcagggaaagcccagcaaatacagcgaactaccccaccacacacacacacacacacacacacacacacacacacacggatgcacacacacacacacggatgcacacacatggatgcacacacacacggatgcacacaca

SEQ ID NO: 45163 - DNA, 201 bp, Homo sapiens
ccctattccatgaaagtgtgggtcaaagtgtgggtggtagagtggggctgacagtggcccctaagctcctagggtccagcccacaactgaggaagccacayggctggttgtgtacgagccggagtgtctctgtttggttgaaagtgccggtctgtgggtccttgctggtgtgtgtgcttctgtccccgcctcctggcctcc

SEQ ID NO: 45164 - DNA, 201 bp, Homo sapiens
gtccagtctgaggaaacaagctgagccaggcctggcagacctgggcaccagctggctctcagggaaagcccagcaaatacagcgaactaccccaccacacacacacacacacacacacacacacacacacacacggatgcacacacacacacacggatgcacacacatggatgcacacacacacggatgcacacacacagg

SEQ ID NO: 45165 - DNA, 201 bp, Homo sapiens
aagtttaacgtcaggtttcagttctgtggcgagcacactctaagcagttgtgaggattttgccccacttcctgcagttatttcacctctttttcttttgtktgtgtgtgtgtgtgtgtttgtttgagacggagtcttgctctatcaccaggctggagtgcagtggtgcgatctcggctcactgcaacctccgcctcccagg

SEQ ID NO: 45166 - DNA, 201 bp, Homo sapiens
cgtcctggggtttttctcctcagagtccctctttccctctccattctctttgttgtctctcttcctccttattttcttcttcaatctcgatccccttcccragccctccttccctaaagaaggctgactcagtcctgggaatgtgctgctccgggtttggggcgggagcactcagagaccctggtcaggtgtcagaagacg

SEQ ID NO: 45167 - DNA, 201 bp, Homo sapiens
aatataaaaaaatcagccggatatggtggtttaagcctgtagtccgtcccagctattgggaggctgaagtgagagacctgcctgagcccgggggcgggtgrgtcgaggctgcagtgagccgcgattgtgccactgcacttcagcctgggtgacagaacgagaccctgtctcaaaaaaaaaagaagcaagtaagtaaaatat

SEQ ID NO: 45168 - DNA, 201 bp, Homo sapiens
aggcgcccgccaccacgcccagctaattttttgtatttttagtagaaacagggtttcgccacgttggccaggatggtcttgaactcctgacctcaaatgayctgcccacttcggcctcccaaagtgctgggattacaggcatgagccaccgcacctggccccaaaatgacttctagtgctgtgttgttttaaagccagatc

SEQ ID NO: 45169 - DNA, 201 bp, Homo sapiens
gtctttgtcccccaagctggagttcagtggcacagttaagggctcactgcagcctcctactcctaggctcaggtgatcctcccatcttagtctcctgagtractgggactgttactcaggtgcatgccaccacacccagctaattttttaattttaattttgtggagatgaggtctccctatattgcccaggctggtctca

SEQ ID NO: 45170 - DNA, 201 bp, Homo sapiens
tttataataaaccagtaaatgtcggtaagtgcttctctgagttctctgagccactctagcaaattaagcccaaggaaagggtcccagaaaccctgatatgkttgtttggtcgaaagcacaggtgaaataaccggcggctggtgatgggcctcggaagttaggagcagtcttgtgggactgagacctcgacctgtgagggct

SEQ ID NO: 45171 - DNA, 201 bp, Homo sapiens
gcgtgatctcggctcactgcaacctctgcctcccaagttcaagcaattctcctgcctcagcctcccgagtagctgggattacaggcatgtatcaccatgcycggctaatttttgtacttttagtagagacggggtttcactatgttggccaggctggtcttgaacacctgacctcaggtgatctaccctcctcggcctccc

SEQ ID NO: 45172 - DNA, 201 bp, Homo sapiens
cttggcctcccgaagtggtggggttacaggcataagcacctgaccttgcttttttctcccaacaagtcaaactattccctaaataggttcgtgcctctgcmtacgcgtaggctgcttttcttgtcaggaatgccctccatgactgctcacttcactcactgtcttccctgaaagcggtctagagactcctgagtcctctgt

SEQ ID NO: 45173 - DNA, 201 bp, Homo sapiens
tgggcgtggtggcgcgcacctgtagtcccagctgcttgggaggctgaggcaggagaatggcatgaacgcgggaggcggagcttgcagtgagccgagatcgygccactgcactccagcctgggcgacagtgagactccgtctcaaaaaaaaaaaaaaaagtctgctcaccattagatttaagtggtaaggatggggccaatt

SEQ ID NO: 45174 - DNA, 201 bp, Homo sapiens
ggggacgtccgaggtacgggggggcgcatcgaggcaggtgtgttcatcagcgtctactaggatttgcagggtgactgggaattagcatgagaaggaacggkaaggggatggcaggcacagagaacagcttgatcagaagcctggaggccggctgagtaaggtcaggaaactgagaaaatcacgtgtggctaaagctgacag

SEQ ID NO: 45175 - DNA, 201 bp, Homo sapiens
aagtgctgggattacaggcatgagccaaatccgggcccggccaaactgtttttaaatcactctttagttgattctttgggatttttctaaggagacaattytatttgcaaataatggcaatttggagtctttctgatatttctacttttggctacccttacttctttgactaggacgtggagagctctgagaagtaaaccg

SEQ ID NO: 45176 - DNA, 201 bp, Homo sapiens
gtcttagaatgccccccaggccgggcgcggtggctcatgcctgtaatcccagcactttgggaggcagaggtaggcggatcatgaggtcaggagtttgagasaagcctggtcaacatggtaaaaccccgtctctactaaaaatacaaaaattagctgggcatggtggtgggcgcctgtaatcacagctactgggcaggctga

SEQ ID NO: 45177 - DNA, 201 bp, Homo sapiens
gacgtccgaggtacgggggggcgcatcgaggcaggtgtgttcatcagcgtctactaggatttgcagggtgactgggaattagcatgagaaggaacgggaargggatggcaggcacagagaacagcttgatcagaagcctggaggccggctgagtaaggtcaggaaactgagaaaatcacgtgtggctaaagctgacagtga

SEQ ID NO: 45178 - DNA, 201 bp, Homo sapiens
ggatccttgctctcctttccggggagcatcaggggtgtgggctagatagcaggaaagaagtaggggtttgtaaacaagagatccaagcccctggacccttrgtcccagcacccagtgcagccctcgccctcccagccccttccttagaaaggacaagaaaatccactccttgttctctccctgtcccatcacccccgcagt

SEQ ID NO: 45179 - DNA, 201 bp, Homo sapiens
gcgcggtggctcatgcctgtaatcccagcactttgggaggcagaggtaggcggatcatgaggtcaggagtttgagacaagcctggtcaacatggtaaaacyccgtctctactaaaaatacaaaaattagctgggcatggtggtgggcgcctgtaatcacagctactgggcaggctgaggcaggagaatcgctcaaactcgg

SEQ ID NO: 45180 - DNA, 201 bp, Homo sapiens
gccaacatggtgaaaccccgtctccactaaaaatataaaaattagccgggtgtggtggtgggcgcttgtaatcccagctacttaggagaggcaggagaatygcttgaacccgggaggcggaggttacagtgagccaagaccgcagcattgcactccagcctgggcaacaagaatgaaactctgtctctccaaaaaaaaaaa

SEQ ID NO: 45181 - DNA, 201 bp, Homo sapiens
aatggcgcagtctcggctcactgcaccctccgcctcccaggttcaagcagttctcccaccatagcctcccgaagctgggactacaggcacacgctgccacrcctggctaattttttgtgtttttagtaaagacagggtttcaccatgttgcccaggctggtctcaaactcctgaactcaggcgatccgcctacctcggctt

SEQ ID NO: 45182 - DNA, 201 bp, Homo sapiens
attgtgattctgttggccagctggctggagttgccgtatatggggaagaacgcagttccccaagtcctggtcagccctttcatagacatttgcaggaccarttgaagactttcaaatgctctggaatccaggctaacaagcaggcacagctgtttccagcagggaattaattacagccaagaaccaacctcccagccagct

SEQ ID NO: 45183 - DNA, 201 bp, Homo sapiens
gtaatcccagctacttaggagaggcaggagaatcgcttgaacccgggaggcggaggttacagtgagccaagaccgcagcattgcactccagcctgggcaayaagaatgaaactctgtctctccaaaaaaaaaaaaaaaaagaagagaaaaatgcacacctcataagcatgcagcgcagtgaacatccgcagagtgaagcac

SEQ ID NO: 45184 - DNA, 201 bp, Homo sapiens
atgcatgtcagaagctaaatgctgctgctaaatgctgggggtcaggtgggggaatagagggaagggtatcatcttgggctaacataatctttggggaattmatcacaatttgtaaagaagcccttttagctttttccaagagtggaattaaaaactttttgtaattgctctgcagtgccgaagtgctttccagaaagaccg

SEQ ID NO: 45185 - DNA, 201 bp, Homo sapiens
ttcctatcctctctgaaccatgaaccatttgaggattatttgtatacatcatgctcgtttatccgtaagatgttttagtgaacatttcccaagaacagggrcagcctctcacatgcccatggtacagttctcaaattcaggaaatgtgtaatattctctgatcagcccaggagttgctaatttgtagttcctgtttcaaat

SEQ ID NO: 45186 - DNA, 201 bp, Homo sapiens
ctcgcctggttttgcatttagtatcaacgaggcatacggtgtgtgccccgctacgtcgggctcctctctctccacataaggcctgtgaatttcatccatcstgttgccccaggcggtacttcttctggttgccagggttacattgtgtcgacagtactgatgattggcatttgggctgttttcttgggctgtgatgaatag

SEQ ID NO: 45187 - DNA, 201 bp, Homo sapiens
cacagtgctcccacgaggccccgctgggtgttctgggcggggtgtcgggacccctgcatctagccccacttcttcagctcctggtatcagtgtgggcaaakcatgccccatgggcctcggtttcctaaattgggaatcgtggtacttattgtactgtgagaatgtgagttgaaattgcccggagtgctgggggagacagag

SEQ ID NO: 45188 - DNA, 201 bp, Homo sapiens
aaaatacgaaaattagctggtcatggtggcgggcgcctgtaatcgcagcactttgggaggccaaggcaggagaatcgcctgaacccaggaggtggaggttrcagtgagccgagatcgtgccattgcactccagcctgggcgacaagagtgaaactccatctcaaaaaaagaaaaaaaaaaaaaagaatttggagagagaac

SEQ ID NO: 45189 - DNA, 201 bp, Homo sapiens
taggcagtttgctgacgtcctgttttttccccagagtgactgaccaggaggcacagggctcaacgtgacgtgggccccggggccggagcccagactccctrctgggcatcctttatctcagttctggattcgtgggggagcagcgggaacagtacggccttcttccctgcctaggggtcttgatctggaacctttgagagt

SEQ ID NO: 45190 - DNA, 201 bp, Homo sapiens
tttgctgacgtcctgttttttccccagagtgactgaccaggaggcacagggctcaacgtgacgtgggccccggggccggagcccagactccctgctgggcrtcctttatctcagttctggattcgtgggggagcagcgggaacagtacggccttcttccctgcctaggggtcttgatctggaacctttgagagtctatgta

SEQ ID NO: 45191 - DNA, 201 bp, Homo sapiens
tactaggatttgcagggtgactgggaattagcatgagaaggaacgggaaggggatggcaggcacagagaacagcttgatcagaagcctggaggccggctgwgtaaggtcaggaaactgagaaaatcacgtgtggctaaagctgacagtgatgaaaagtaagctgggagagtgtggtggtgcctcgtcacccaggcactgag

SEQ ID NO: 45192 - DNA, 201 bp, Homo sapiens
tttgttcctgggagtagttagggaaatgctgcttcaaaaagccaattttaagtagttgtgaggcatccgagtggaatttggctgcactatccataaaactwgagagtataggcggtatttcacctaccaaggtcagtaccctgcctcaggattcttactgttcatttgagcaattccggggccctctctggatgaccaggt

SEQ ID NO: 45193 - DNA, 201 bp, Homo sapiens
gggaaggggatggcaggcacagagaacagcttgatcagaagcctggaggccggctgagtaaggtcaggaaactgagaaaatcacgtgtggctaaagctgasagtgatgaaaagtaagctgggagagtgtggtggtgcctcgtcacccaggcactgagggtttggaggaactagagggtctgaagccgggaggggtggtgag

SEQ ID NO: 45194 - DNA, 201 bp, Homo sapiens
taatcccagctactcgggaggctgaggcaggagaatagcatgaacccaggagacggagcttgcagtgagctgagatcgcaccactgcactccacgctgggygacagagcgagactccgtctcagaaaaaaaaaaaagactcagaaaaaggcagccatttctccatgcccacgtgtgtgcgtgtgtgcgggggcttctgaga

SEQ ID NO: 45195 - DNA, 201 bp, Homo sapiens
taggcaggagaatcgcttgaacccaggaggcggaggttgcaatgagccgagatcgtgccattgcactccagcctgggcgacaatagcaagactccatctcaaaaaaaaaaaaaaaaaaaaaggatgaagaggaagccaggagacaggctgaggacagagcacttcaatcaggcaaggggaggattttgtacacatgtgcac

SEQ ID NO: 45196 - DNA, 201 bp, Homo sapiens
gtttaacgtcaggtttcagttctgtggcgagcacactctaagcagttgtgaggattttgccccacttcctgcagttatttcacctctttttcttttgtgtgtgtgtgtgtgtgtgtttgtttgagacggagtcttgctctatcaccaggctggagtgcagtggtgcgatctcggctcactgcaacctccgcctcccaggtt

SEQ ID NO: 45197 - DNA, 201 bp, Homo sapiens
ccctggcctcgtggccacttttttctcctccttcaactgcacacccccatttagacaaatgagtaaaacagtatctgtctgaaaagagaaaactctgagtwataaagagtgattttatatatatttctttggtacctccctattctcaaggcccagaacttaatactgttatgttcggttacctgtgagttcaatagggcc

SEQ ID NO: 45198 - DNA, 201 bp, Homo sapiens
gagaggcccactcctagggatgctaagattgactagtgggctcaggtggtgtcagcctaattgtaaagttagtctatcagactctcatttagaagctttacctgttgatgatcctggcctgaattaattattgtatttcattagggctcacaaaatagtttggttctattattcttcctacatttattagtaataatttat

SEQ ID NO: 45199 - DNA, 201 bp, Homo sapiens
ttttaaagagaatgaacgcagccgaagttgaatcgaggcagtgatttcactcagtgcgttgggtctttccactcacctggccctccagaaccccagggccwtgagtgcatgggctggtacaagagcccagtttttggctggggaggcacttcctatgggagggggacgcctgtctcagtgctgaggcaaccaccaccgagg

SEQ ID NO: 45200 - DNA, 201 bp, Homo sapiens
gaccactgtgactctccccagtgcccttggagcgcagaatgaagtgaggggaggaggagggtcacgagccctggagcgctgggaagacaggctgtaggccrcaggccccgatcctgcctgggacgaggttcaacagaagtaggatggtttcatcatgacctggcaggaaaaccaccagacctggaattttgcttttacaac

SEQ ID NO: 45201 - DNA, 201 bp, Homo sapiens
ttcaacagaagtaggatggtttcatcatgacctggcaggaaaaccaccagacctggaattttgcttttacaactgtttaacttctgtttcatacaggatgraaaccggtgaattgtaatctcacataaccgagcaagatctagtagtcataagcactttgtcagagcaaagcagacaaggcaaagtgttggaaatgtcatc

SEQ ID NO: 45202 - DNA, 201 bp, Homo sapiens
gaatgctgggatgcatcacaggtatgctggaagatgtatagaattttacttctgttattctggtaactcagagtcctgttcagtcagtttccacgtcaggwtgctgtcctggttttaaagagaatgaacgcagccgaagttgaatcgaggcagtgatttcactcagtgcgttgggtctttccactcacctggccctccaga

SEQ ID NO: 45203 - DNA, 201 bp, Homo sapiens
agtagctgggattacaggctttcaccactatgcccagctaatgtttgtatttttagtagagacggggtttcaccctgttggccaggctggtcttgaactcytgacctcaggtgatccgcctgcctcggcctcccaaagtgctgggatgacaggtgtgagacactgagcccagctgcaagtttattatcttgtagttttgga

SEQ ID NO: 45204 - DNA, 201 bp, Homo sapiens
tagatttgtccccggtcatcttaggctatttgggctaggacagtatccattatatgaatgaagcaatctcctaggccgggcaccgtggctcacggctgtamtcccatcactttgggaggctgaagtgggtggatcacttgaggtcaggagttcgagaccagcctggctaacatggtgaaaccctgtttctattaaaaatac

SEQ ID NO: 45205 - DNA, 201 bp, Homo sapiens
cattatagtcccagctacttgggaggctaaggcaggaggattgcttgaacccgggaggcggaggctgcagtaagctgagatcccaccactgccctccagcytgggcaacagagtgaagctctgtctcaaaaaaaaaaaaaaaaaaaaaaaaaaagcttccctcttgggagcttctccaacttcttccctgaactgagctgg

SEQ ID NO: 45206 - DNA, 201 bp, Homo sapiens
gccatgatcacaccactgcactccagcctgggtgacagagtgagacgccgtctctaaaaaagaaagaaaaataatagcacttgcctgatagattttgtgayggttggatggcttaaaatatacagtgtttacaacagtgcctggcacatgataagtgccatgtgagtattatctatcgttttaatatcatgagtcttcctg

SEQ ID NO: 45207 - DNA, 201 bp, Homo sapiens
tgacaggcagaaaaattagtgaatgtttgctgaattgctgtgaggaaaccacgtttttgttttgttttgtttggctctttaagagaatgtcatctgctctkttaacagcctccctctccaaacattcagtgtgatgaccctcagccggttgcttctgtcctgatcatgaactgcaggattggtcaccccgtcctcaagagg

SEQ ID NO: 45208 - DNA, 201 bp, Homo sapiens
ctccctgatgagggcggggcctggaggctccctgggcgagggtggggcctgagggctacgtgggcgagggcggggcctacctgggcgagggtggggcctgrgggctacctgggtgagggcggggcctggaggctacctgggcgagggtggggcctgggggctacctgggtgagggcggggcatggaggccacgtgggcgag

SEQ ID NO: 45209 - DNA, 201 bp, Homo sapiens
attcagtgtgatgaccctcagccggttgcttctgtcctgatcatgaactgcaggattggtcaccccgtcctcaagaggtcatctgtgagtcggtttggacygattcgctcttctcaccaccctgcagttggcgtcttctgcatcttggtctcatctcaatctctcggttccagctttgcgcttcgcttgactgcagtgtgt

SEQ ID NO: 45210 - DNA, 201 bp, Homo sapiens
tgagggcggggcctggaggctccctgggcgagggtggggcctgagggctacgtgggcgagggcggggcctacctgggcgagggtggggcctgggggctacstgggtgagggcggggcctggaggctacctgggcgagggtggggcctgggggctacctgggtgagggcggggcatggaggccacgtgggcgagggtggggc

SEQ ID NO: 45211 - DNA, 201 bp, Homo sapiens
tcacacacaaagtaaaactgtggtacagcctggtggaatgagccctggagttctggttctcgttcactcagctttggaatagcttgggatagctatgttayctgcaagacctctgtgttggggggtaaggtggggaacgctgctgggaagagttctcaaagggaggtgattctgcccaccagaggctgtgcctgttttgat

SEQ ID NO: 45212 - DNA, 201 bp, Homo sapiens
gcggggcctggaggctccctgggcgagggtggggcctgagggctacgtgggcgagggcggggcctacctgggcgagggtggggcctgggggctacctgggygagggcggggcctggaggctacctgggcgagggtggggcctgggggctacctgggtgagggcggggcatggaggccacgtgggcgagggtggggcctggg

SEQ ID NO: 45213 - DNA, 201 bp, Homo sapiens
tgagacggtccctaggcctcagattaggcaacgctgttaatattctgatgacactgaggtctcacgcctgagctctaagatgtgtgtccagctgacatgtyagcatctctgctttgttatcctatatgcacctcttgtcatgtccccgattgaacgcatcttcttccacccttgggtcttcctcccatgttacctccctca

SEQ ID NO: 45214 - DNA, 201 bp, Homo sapiens
tgggcgagggtggggcctgggggctacctgggtgagggcggggcctggaggctacctgggcgagggtggggcctgggggctacctgggtgagggcggggcmtggaggccacgtgggcgagggtggggcctgggggctacctgggagagggcggggcctggaagttacgtgaggagggtggggcctggagaccacctgggtg

SEQ ID NO: 45215 - DNA, 201 bp, Homo sapiens
ttgtttgaaatacttagagtgtttaaggggcttagcaaatacatagaggaggagtgccaagaggacggagcaccacttgttctgttcatgacaggccggtytgaacattctgataggagggatccagagagagaagtggcagtggtatagatgctgcagacctctgacacatcagtcacaattttcttcttgtggaaactg

SEQ ID NO: 45216 - DNA, 201 bp, Homo sapiens
tcccttcccatgcccccagcagggaggagttactattaagtttcttatgtgcacattttaaatttgtatgtttccccctcttacttactgatacttttatytctatagcatggattccccaaaattcctttctttaaatccaatatcctaagcaaagtgttaagtagttcctgacaataagcccctgacttacagtgactc

SEQ ID NO: 45217 - DNA, 201 bp, Homo sapiens
ggtggggcctgggggctacctgggtgagggcggggcctggaggctacctgggcgagggtggggcctgggggctacctgggtgagggcggggcatggaggcyacgtgggcgagggtggggcctgggggctacctgggagagggcggggcctggaagttacgtgaggagggtggggcctggagaccacctgggtgagggcggg

SEQ ID NO: 45218 - DNA, 201 bp, Homo sapiens
acattttaaatttgtatgtttccccctcttacttactgatacttttatttctatagcatggattccccaaaattcctttctttaaatccaatatcctaagyaaagtgttaagtagttcctgacaataagcccctgacttacagtgactctatgagtataaacaaactgtatccaaatgcatttcagccacaagaaagggaa

SEQ ID NO: 45219 - DNA, 201 bp, Homo sapiens
ggggcctgggggctacctgggtgagggcggggcctggaggctacctgggcgagggtggggcctgggggctacctgggtgagggcggggcatggaggccacstgggcgagggtggggcctgggggctacctgggagagggcggggcctggaagttacgtgaggagggtggggcctggagaccacctgggtgagggcggggcc

SEQ ID NO: 45220 - DNA, 201 bp, Homo sapiens
ctggggcgatggcctggcttctttggtccttgtactctgccgtgtgggggacgcattccttcatggccagcacaaagttgccacatctccaaatgctgtaytttcacatggcaggatacaaaacaggaagcaagaagtcagtagcaaaaggatgttggatttttcttcatgtgccttcccttttcagggatgaaacagttt

SEQ ID NO: 45221 - DNA, 201 bp, Homo sapiens
ctggaggctacctgggcgagggtggggcctgggggctacctgggtgagggcggggcatggaggccacgtgggcgagggtggggcctgggggctacctgggwgagggcggggcctggaagttacgtgaggagggtggggcctggagaccacctgggtgagggcggggcctagaggccacctgggcgagggcggggccgagat

SEQ ID NO: 45222 - DNA, 201 bp, Homo sapiens
tttgggaggctgaggtgggcggatcacctgaggtcaggagttcaagaccagcctggccaacatggggaaaccctgtctctaataaaaatacaaaacttagscgggtgtggtggcacatgcctgtaatcccagctacttgggaggctgaggcaggagaatcgcttgaaccagggaggcggaggttgtagtgagccgagatca

SEQ ID NO: 45223 - DNA, 201 bp, Homo sapiens
cgcgatctcggctcactgcaagctccgcctcccgggttcacgccattctcctgcctcagcctcccgagtagctgggactacaggcgcccgccaccacgccyggctaattttttgtattttcagtagagacggggtttcaccgtgttagccaggacggtctcgatctcctggcctcgtgatccgcccgcctcggcctcccaa

SEQ ID NO: 45224 - DNA, 201 bp, Homo sapiens
atggcacgatctcggctcactgcaacctccacctccctggttcaagtgattctcctgtctcagcctcccaagtggttgggattacaggtggctgtcagcaygcctgcctgatttttgtgtttttagtagagatggggcttcaccatgttggccagggtggttttgaactcctgacctcaagtgatccgcctgcctcggcct

SEQ ID NO: 45225 - DNA, 201 bp, Homo sapiens
agattgtctcctctggtgttgctttcccttccagccccgccccaaatcgggacatgctgggccctggaggtgcgggcagaggcgaggccacccctatcccrgcccctgtgtgaagagaaggcaggttgtgcacacagtagcctccccggccccggcagggtgtcacagcacgggggtagggaaggggcactccaggcagag

SEQ ID NO: 45226 - DNA, 201 bp, Homo sapiens
tatttatttattttttgagacgagtctcgctctgtcgcccaggctggagtgctgtggcgtgatctcggctcactgcaacctctgcctccaggttcaagcarttctctgcctcagcctcccgagtagctgggattacaggcgcccgccaccacgcccagctaatttttgtagttttagtagagatggggtttcaccatcttg

SEQ ID NO: 45227 - DNA, 201 bp, Homo sapiens
catggaggccacgtgggcgagggtggggcctgggggctacctgggagagggcggggcctggaagttacgtgaggagggtggggcctggagaccacctgggwgagggcggggcctagaggccacctgggcgagggcggggccgagatggggacaccgaggctgcgcattaggctgcacttgaggtttccggatgggggcggg

SEQ ID NO: 45228 - DNA, 201 bp, Homo sapiens
atcgagaccatcctggctaacatggtgaaacgccgtctccactaaacaaaatacaaaaaattagccaggtgtggtggcgggcgcctgtagtcccagctacrggggaggctgaggcaggagaatggtgtgaacccgggaggcggagcttgcagtgagccaagatcgcgccgctgcactccagcctgggtgacagcgagactc

SEQ ID NO: 45229 - DNA, 201 bp, Homo sapiens
agtcactaaaccaaaaaaaggagtgttgccaagaagttgtatagcttttcaagagtgtttatggcaaaagtcgttaattgaacagtaattgaacaggtaartctgtaaactggacttcaccttgcttttttcccatgtaaatgtagattagagatgggagcagtggctcacacctgtaatcccagcacgttgaacggctga

SEQ ID NO: 45230 - DNA, 201 bp, Homo sapiens
ccaaggcggggggatcacttgaggtcaggagttcgagaccagccgggccaacacggtgaaaccctgtctccactaaaaacacaaaaattagccgggcgtgrtggcgggtgcctgtaatcccagctactcgggaggctgaggcaggagaatcgctggaatccaggggagggaggttgcagtgagccgaaatcatgccactgt

SEQ ID NO: 45231 - DNA, 201 bp, Homo sapiens
tcgcttgaacccgggaggcggaggttgcagtgagccgagatcacgccactgcactccagcctgggcaacagagcaagactccatctcaaaaaaaaaaaaaragaaaaaaagaaaaagaaaaaaaaagcattattgttgtcatcttctcccccacatccaactctaaccctgccttccgtggtgaccccacagctctgtgag

SEQ ID NO: 45232 - DNA, 201 bp, Homo sapiens
gcttgaacccgggaggcggaggttgcagtgagccgagatcacgccactgcactccagcctgggcaacagagcaagactccatctcaaaaaaaaaaaaaaaraaaaaaagaaaaagaaaaaaaaagcattattgttgtcatcttctcccccacatccaactctaaccctgccttccgtggtgaccccacagctctgtgagga

SEQ ID NO: 45233 - DNA, 201 bp, Homo sapiens
aaaaaggagtgttgccaagaagttgtatagcttttcaagagtgtttatggcaaaagtcgttaattgaacagtaattgaacaggtaagtctgtaaactggamttcaccttgcttttttcccatgtaaatgtagattagagatgggagcagtggctcacacctgtaatcccagcacgttgaacggctgaatcacctgaggtca

SEQ ID NO: 45234 - DNA, 201 bp, Homo sapiens
acccgggaggcggaggttgcagtgagccgagatcacgccactgcactccagcctgggcaacagagcaagactccatctcaaaaaaaaaaaaaaagaaaaaragaaaaagaaaaaaaaagcattattgttgtcatcttctcccccacatccaactctaaccctgccttccgtggtgaccccacagctctgtgaggaggactg

SEQ ID NO: 45235 - DNA, 201 bp, Homo sapiens
tgtatagcttttcaagagtgtttatggcaaaagtcgttaattgaacagtaattgaacaggtaagtctgtaaactggacttcaccttgcttttttcccatgyaaatgtagattagagatgggagcagtggctcacacctgtaatcccagcacgttgaacggctgaatcacctgaggtcaggagttcgagaccagcctggcca

SEQ ID NO: 45236 - DNA, 201 bp, Homo sapiens
ggcggaggttgcagtgagccgagatcacgccactgcactccagcctgggcaacagagcaagactccatctcaaaaaaaaaaaaaaagaaaaaaagaaaaaraaaaaaaaagcattattgttgtcatcttctcccccacatccaactctaaccctgccttccgtggtgaccccacagctctgtgaggaggactgcttctcca

SEQ ID NO: 45237 - DNA, 201 bp, Homo sapiens
accatgttggccaggctggtcttgaactcttggcctcaagtgatccacctgcctcacctcccaaagtgctgggattacaggcgtgagccaccgtgtccagscatccactactgtttccttatttcaggcatgtatcatctctcgggtggagacagcaggctctgtctctgcttcctgtctctccctccagtcaatccagcc

SEQ ID NO: 45238 - DNA, 201 bp, Homo sapiens
ttcattgtagtgttttgtatttttccttttaattcagtcaatttttgcttttatattttgaaatgatgttattggataaatacagatttaaaattgtcacrtcttcttagtgaatcaaaaacaacatatttgtgtgcatatatctccttcccttccttatacagaagctagtgtcgtttatacacttgtccttcatgtagt

SEQ ID NO: 45239 - DNA, 201 bp, Homo sapiens
gactacagccttgactgtctgtctctgatggggctcagttagagccagaggttagagagtggcagctcctccaggaaaggagtcttgctcggtgggtcagrgccccaggcttgttgggaagggcggctgaggcttcgtgttgccagttctgtcagccagggcctttggactccagggctctgccattctgttcctcctcca

SEQ ID NO: 45240 - DNA, 201 bp, Homo sapiens
gtagtgttttgtatttttccttttaattcagtcaatttttgcttttatattttgaaatgatgttattggataaatacagatttaaaattgtcacgtcttcytagtgaatcaaaaacaacatatttgtgtgcatatatctccttcccttccttatacagaagctagtgtcgtttatacacttgtccttcatgtagtgatttt

SEQ ID NO: 45241 - DNA, 201 bp, Homo sapiens
ttgcttttttcccatgtaaatgtagattagagatgggagcagtggctcacacctgtaatcccagcacgttgaacggctgaatcacctgaggtcaggagttygagaccagcctggccaacacggtgaaaacctatctctactaaaaatacaaaaattagctgggggtggtggtgtgtacctgtaatcccggctacttgggag

SEQ ID NO: 45242 - DNA, 201 bp, Homo sapiens
caaggttttataattttcttcaaaggggtcttaatttataaagacttacttccagctgcatttttatttgtttatttattttgggggggtctcactgtgtygcccaggctggagggcagtgatgcggtcataggttgctgcagccttgaacttttgggttcaagccgtcctctgcctcagcctcctgtgtagctgggacta

SEQ ID NO: 45243 - DNA, 201 bp, Homo sapiens
cttataataagcagtaaattagaagttaaaccatgtttttcttttacgaactgaaagaagagaatgcttttgatactgagaatcgcacactgtgtccaggmagattgttcttgcataaccagacccacaataaatatctacaacttttcttacatgtttataaaataaatcttagaagaaaaatattgtagcttttttttt

SEQ ID NO: 45244 - DNA, 201 bp, Homo sapiens
aggttttggggcagatgatggtgccagcttcggcagtgtgtatatctacaatggacactgggacggcctctccgccagcccctcgcaggtgacccatgggrccctctccttcctctcctctggggctctgacctctctcagatatgatgacccaagccccaagtcggcttcagtcctaagtgctgggcaggtctcgggggt

SEQ ID NO: 45245 - DNA, 201 bp, Homo sapiens
cttacgatgctctgtgtccgaagtgttaaaaagatttcagactttccgcacggaaaggaattgtgttcactagacctcgcttttccagcatgtggaagaakggcattcagtgagctgtgtcatcgcttcagataaagaaaatgtcaccgtggctgcagagatctcctgggatcactctgaggaggtgtttgagactgaaat

SEQ ID NO: 45246 - DNA, 201 bp, Homo sapiens
cacccccatttagacaaatgagtaaaacagtatctgtctgaaaagagaaaactctgagtaataaagagtgattttatatatatttctttggtacctccctrttctcaaggcccagaacttaatactgttatgttcggttacctgtgagttcaatagggcctggaaggtcaaccctaggccagcatttataacttacttgga

SEQ ID NO: 45247 - DNA, 201 bp, Homo sapiens
ggtcaccagccccagaaccaagaggacaccagggcccctccatcgatgttcccttgtccaggatgaaatcctttgccatcctgtaggtaagtcagccccamctccagggaatgctccccaggaccccctttctagcaaaatccccctcatctaaactcaaaccattccaaccccagccctgcctcatccagcccgttcacc

SEQ ID NO: 45248 - DNA, 201 bp, Homo sapiens
tgaggcaggagtatcgtttgagcccaggaatttgaagcttcagtgagctatgattgagccactccattccggcccgggtaacagagtgagaccttgtctcaaaaaaaaaaaaaaaaaaaaaaaaaaaggaaaaatctcttacgttaaataaaatgaataagctgggtgtggtggctcatgcctgtaatctcagcactgtgg

SEQ ID NO: 45249 - DNA, 201 bp, Homo sapiens
aaaaaaggaaaaatctcttacgttaaataaaatgaataagctgggtgtggtggctcatgcctgtaatctcagcactgtgggaggctaaggtgggtggattrcttgagcccaggagtttgagaccagcctgggcaacatggtaaaaccccatctctacaaaaaatacaaaaattagcccagtgtggtggggtgcacctgtgg

SEQ ID NO: 45250 - DNA, 201 bp, Homo sapiens
tggactgtagatttgtccccggtcatcttaggctatttgggctaggacagtatccattatatgaatgaagcaatctcctaggccgggcaccgtggctcacrgctgtaatcccatcactttgggaggctgaagtgggtggatcacttgaggtcaggagttcgagaccagcctggctaacatggtgaaaccctgtttctatta

SEQ ID NO: 45251 - DNA, 201 bp, Homo sapiens
agaacttaatactgttatgttcggttacctgtgagttcaatagggcctggaaggtcaaccctaggccagcatttataacttacttggaagaggccttaacrgtaaggccttaaaacagatgtgactgttgttcccctgttgaaatcttttccttgccttcccgtcttaatgtgcaaactcttctactgctatttaagatcc

SEQ ID NO: 45252 - DNA, 201 bp, Homo sapiens
ccgcctcccgggttcaagtgattctccttcctcagcctcctgagtagctgggattacaggcgtgcagcactacacccggctaatttttaaaatatttttgrtagagatggggtttcaccatgttggccaggctggtctcaaactcctgtcctcaagtgatccacctgcctcgacctcccaaagtgctgggatgacaggcat

SEQ ID NO: 45253 - DNA, 201 bp, Homo sapiens
aggagaatcgcttgaacctgggaggcagaggttgcggtgagccgagatcgtgccactgcactccagcctgggcaacaagagcgaaactccatcttaaaaaaataataataattttggaacaagatgatgatatactcttaaaacaaggatgaaaatgtcttcacagtcagtccaggcaacactgggggagataaaccttct

SEQ ID NO: 45254 - DNA, 201 bp, Homo sapiens
tctcttcttgttaccagagataatgaaaatgttcttttgttcacacacaaagtaaaactgtggtacagcctggtggaatgagccctggagttctggttctygttcactcagctttggaatagcttgggatagctatgttatctgcaagacctctgtgttggggggtaaggtggggaacgctgctgggaagagttctcaaag

SEQ ID NO: 45255 - DNA, 201 bp, Homo sapiens
ggagaatcgcttgaacctgggaggcagaggttgcggtgagccgagatcgtgccactgcactccagcctgggcaacaagagcgaaactccatcttaaaaaaataataataattttggaacaagatgatgatatactcttaaaacaaggatgaaaatgtcttcacagtcagtccaggcaacactgggggagataaaccttctc

SEQ ID NO: 45256 - DNA, 201 bp, Homo sapiens
atatcaggccgggcgcggtggctcacgcgtgtaatcccagcactttgggaggccaaggcgggcggatcacctgaggagttcaataccagcctgggcaatayggtgaaaccccacctctactaaaaatacaaaaattatccaggtgtggtggtgcgtgcctataatcccagctactcaggaggccgaggcaggagaatcgct

SEQ ID NO: 45257 - DNA, 201 bp, Homo sapiens
tgagccctggagttctggttctcgttcactcagctttggaatagcttgggatagctatgttatctgcaagacctctgtgttggggggtaaggtggggaacrctgctgggaagagttctcaaagggaggtgattctgcccaccagaggctgtgcctgttttgattgccatgacttggggaggggggtgttcagtaggacatc

SEQ ID NO: 45258 - DNA, 201 bp, Homo sapiens
gagaatcgcttgaacctgggaggcagaggttgcggtgagccgagatcgtgccactgcactccagcctgggcaacaagagcgaaactccatcttaaaaaaataataataattttggaacaagatgatgatatactcttaaaacaaggatgaaaatgtcttcacagtcagtccaggcaacactgggggagataaaccttctcc

SEQ ID NO: 45259 - DNA, 201 bp, Homo sapiens
tcttggctcaccataacttctgcctcccaggttcaagcagttctcctgcctcagcctcccgagtagctgggattacaggcgcctgccaccacgcctggctratttttgtatttttagtagagacagggtctcaccatattggtcaggctggtctcctgccctcaggtgatcgacctgcctcggcctcccaaagtgttggga

SEQ ID NO: 45260 - DNA, 201 bp, Homo sapiens
tggactctccaggagagattcagagtaagttaggagaagggagtagtaagtatgagaagcagaggaatataggggctatttaggcaacagccagaatgccrgttttctgaaacagatggctatctttggcctgtaactggacttttccttcctttgtttcagtgtggcttttttaaaagaaaatatcaacaactgaacttg

SEQ ID NO: 45261 - DNA, 201 bp, Homo sapiens
aatgtgtagggtaccagcaaggaacacgtttttggacagattttaatattttatatttcattttattttattttattttttgagacagagtcttgctctgytgcccaggctggagcccaggctggatcttggctcaccataacttctgcctcccaggttcaagcagttctcctgcctcagcctcccgagtagctgggatta

SEQ ID NO: 45262 - DNA, 201 bp, Homo sapiens
gcactccagcctgggcaacagagcaagactccacctcaaaaaaaaaaaaaaaaaaaaagggatgagtgtagtggctcatgcctgtcatcccaacactttcscaggctgaggtggaggatcacttgagcctgggaggttgaggctacactgagccatgattgttccactgtgctctagcctgggcaacagagtgagaccctg

SEQ ID NO: 45263 - DNA, 201 bp, Homo sapiens
atctctgtgctgtgggaaatctctgaagtggcttcttcacctgtaaaaggggaatgaggccgcctgccttgcttactccatatttgtatttgaggcttaamtgaaataacggggccaggcgcggtggctcatgcctgtaatcccagcactttgggagaccgaggtgggtggatcatttgaggtcaggagttcgagaccagc

SEQ ID NO: 45264 - DNA, 201 bp, Homo sapiens
acgcccggctaattttgtatttttagtagagatggggtttcatcgtgttggtcaggctggtcttgaactcctgacctcagatgatctacccacctcagccwcccgaagtgctgggattacaggcatgagccaccacacccggccacacgtgttattttcttagagaggccttccctgatcacttattctaaagtgggaact

SEQ ID NO: 45265 - DNA, 201 bp, Homo sapiens
gaaagtgccggtctgtgggtccttgctggtgtgtgtgcttctgtccccgcctcctggcctcctggctgaggggaagctgagtgggccacggcccatgtgtygcactcgcctcggctcccacacagccgcctctgctccagcaaggatgtggctcttccacactctgctctgcatagccagtaagtcctctcacccgctgct

SEQ ID NO: 45266 - DNA, 201 bp, Homo sapiens
aaaaaaaagaattgtgagtgtggtggctcacatctgtcatcccaacactttgggaggctgaggcgggaggattgcttgaggccaggagttcaagatcagcmtgggcagcatagtgaaaccccatttcttaaaaataaataaatacataaattagccacgcatggtggctcatgcctgtagtcccagctacttgggaggctg

SEQ ID NO: 45267 - DNA, 201 bp, Homo sapiens
gacaggggaccgactcaaatggatgatacgaacggcaggctggattcacgttgctcctgcacctccagcatctgctgaggacacctagaactgtggccctrgccaaacctcagctccctattccatgaaagtgtgggtcaaagtgtgggtggtagagtggggctgacagtggcccctaagctcctagggtccagcccacaa

SEQ ID NO: 45268 - DNA, 201 bp, Homo sapiens
aaaagaattgtgagtgtggtggctcacatctgtcatcccaacactttgggaggctgaggcgggaggattgcttgaggccaggagttcaagatcagcctggrcagcatagtgaaaccccatttcttaaaaataaataaatacataaattagccacgcatggtggctcatgcctgtagtcccagctacttgggaggctgaggc

SEQ ID NO: 45269 - DNA, 201 bp, Homo sapiens
tgaacgcagccgaagttgaatcgaggcagtgatttcactcagtgcgttgggtctttccactcacctggccctccagaaccccagggccttgagtgcatggrctggtacaagagcccagtttttggctggggaggcacttcctatgggagggggacgcctgtctcagtgctgaggcaaccaccaccgaggaccctgggctgg

SEQ ID NO: 45270 - DNA, 201 bp, Homo sapiens
caccttggtaattcaaacacctatcaagatatagaatattttcatcattccagaaagttccttctagtcccttcccagttagtcccatcctctcaagcatttttttttttttactataggttagttttgctggttctagaacctcatataaatggagttatacaatatgatttttattgccttagcttaacaaatctgctg

SEQ ID NO: 45271 - DNA, 201 bp, Homo sapiens
tctgtcatcccaacactttgggaggctgaggcgggaggattgcttgaggccaggagttcaagatcagcctgggcagcatagtgaaaccccatttcttaaarataaataaatacataaattagccacgcatggtggctcatgcctgtagtcccagctacttgggaggctgaggcaggagtatcgtttgagcccaggaatttg

SEQ ID NO: 45272 - DNA, 201 bp, Homo sapiens
acaaaataacatggatttttatctagtaatgaagtcaacaccattgtccaccctgggttaacacattcacatctcaaagcgaatggggctgcagacactcrtgttagagagccttggaatgtcctgcctttttacgtttaattaaaattaaataaaatatacaaaattcagttcatcagttgttctagtggcattttaagg

SEQ ID NO: 45273 - DNA, 201 bp, Homo sapiens
cagcagtgcttacagtggctaagctggctctgaaagtagggggtgatggggacgagagctttccagtacacagccctaggtgaactgcctgctcacctccrtgaagcagagtgaagttgtgggtagtatggagggcgtgtcagacaaaaagtttttttgtttgtttgtttttgagatggagtttcattctgtcacccaggc

SEQ ID NO: 45274 - DNA, 201 bp, Homo sapiens
aggggccacaaggaacctcaggcaggctgggggccttctgtctgcggctggctcatccccacctcatcgggaaggtctggtcttcattcccaggcctccgygaggcacttctcaacttcacgctggatgtggatgtggggaagcagaggagacggctgcagtgttcagacgtaagaagctgtctgggctgcctgagggagt

SEQ ID NO: 45275 - DNA, 201 bp, Homo sapiens
gtttcaccatgtcggccaggctggtcttgaactcccgacttcaagtgatccgctcacctcggcttcccaaagtgctgggattccaggcgtgagttgccacrcccggcctcctgctgtcttaaataatctgcactactgcattattctgtgcacatctctaatacatttacaaggaggggtttttggttaagattttctggg

SEQ ID NO: 45276 - DNA, 201 bp, Homo sapiens
ggacttcaccttgcttttttcccatgtaaatgtagattagagatgggagcagtggctcacacctgtaatcccagcacgttgaacggctgaatcacctgagrtcaggagttcgagaccagcctggccaacacggtgaaaacctatctctactaaaaatacaaaaattagctgggggtggtggtgtgtacctgtaatcccggc

SEQ ID NO: 45277 - DNA, 201 bp, Homo sapiens
gggtcttaatttataaagacttacttccagctgcatttttatttgtttatttattttgggggggtctcactgtgtcgcccaggctggagggcagtgatgcrgtcataggttgctgcagccttgaacttttgggttcaagccgtcctctgcctcagcctcctgtgtagctgggactacaggtgcaagccactatgcccggct

SEQ ID NO: 45278 - DNA, 201 bp, Homo sapiens
cctcaggtgatctgcccgccttgacctcccaaagtgctgggattacaggcatgagccaccatgtccggctaagtagtgtatttctaatacagaaaatagarggaaatggaaaatacagaaaacggaagaaatagaagtgccccattattgcactgcccagattttaacaaataaaaataatagcaagaaaatccaagccat

SEQ ID NO: 45279 - DNA, 201 bp, Homo sapiens
tgcccagctcgtcgccgtccctgggctggccgcacacgctgaggtccgggctgaggcggccggagtcgcggctggggaagggcggaagtcggagcgggccrcagggtgtgctgcacttctgcgggggccgagctcgcagccccaggcgtcttggggtcacggttaggcttgggcgagctcgcagcttccagcgctttgggg

SEQ ID NO: 45280 - DNA, 201 bp, Homo sapiens
ttgtcgcccaggctggagtgcaatggcgcagtctcggctcactgcaccctccgcctcccaggttcaagcagttctcccaccatagcctcccgaagctgggrctacaggcacacgctgccacgcctggctaattttttgtgtttttagtaaagacagggtttcaccatgttgcccaggctggtctcaaactcctgaactcag

SEQ ID NO: 45281 - DNA, 201 bp, Homo sapiens
gcaaggcagctgtaatcgggggactacatcaggaactacttaatgaggaggaagacacttttaagtgcgacatggttagattttacaaattcatatgctayggcttgggccaaggtctgtggcatacacctgtagtcccagctactcaggaggctgaggcatgagaatcgcttgaacccagaaggcagagtttgcagtgag

SEQ ID NO: 45282 - DNA, 201 bp, Homo sapiens
gagactgaaatgctccagatttgattatccagttgctcacgggcatcgcccctagaagagataatagcatctttgcataacatgtccatgtccaaaatagrtcttttggtgcaaaaaaccaaccctctgtcccaacccgttccttagctaccctcaggagggagatatactccagttacagtacaaggaactcgagggatt

SEQ ID NO: 45283 - DNA, 201 bp, Homo sapiens
ggtttggtggaccatcctggtgtccttggctcctcctgtcgcttcctcctgggagcaggggagagatgctcggtccagggagacttctgggaggtggaggycgctcgggacggctgaggctgcaaccagacaggcggaggtgccgatcgagatgacactgtcccttggcgttggggacccggggcagggcgaggccagaga

SEQ ID NO: 45284 - DNA, 201 bp, Homo sapiens
tgaggcaggagaattgcttgaccccgggagacagtggttgcagtgaaccgagatcgtgccactgcactccagcctgagtgacagagaaagactccgtctcaaaaaaaaaaaaaaaaaccacaaaccttcaatatatatttcctaaaaacaaaggcattgtcttaacatagtacaataatcaaaatcaggaaattcacattg

SEQ ID NO: 45285 - DNA, 201 bp, Homo sapiens
ccaattcctaggctggtggcctccaagggtgaggggtgcctcagtctgagagatggggagcagtggctggactttacagacctgacctgtaccagctccayccactctttcttataagtggggaaactgaggctcagagagtggtagtgatgggaatggctcacacagcacacaaagcctgaccaggttctagctctcttt

SEQ ID NO: 45286 - DNA, 201 bp, Homo sapiens
cgggctctggagaaggaggaggaggaagacaaggaggaggaggaagacgaggaggaggaggaagctggtgagaagaggcagatctgggttgctctgagtcyatcagagccaattcctaggctggtggcctccaagggtgaggggtgcctcagtctgagagatggggagcagtggctggactttacagacctgacctgtacc

SEQ ID NO: 45287 - DNA, 201 bp, Homo sapiens
ggcagagcttgcagtgagccaagatcacgccattgcactccagcctgggcaaaagagcaagactgtctcaaaaaaaaaattatcgattgtatcctttcagrtaattcttaagtatcaatttttcagatttccagaagaaactctttggggttttaatttaaacatacaggttaagtttgggagcattgatatctttataga

SEQ ID NO: 45288 - DNA, 201 bp, Homo sapiens
tggctcaggaagcattgatcccccagactttcagagagccaaagacttcatctccaacatgatgaggaacttctatgaaaagtgttttgaggtgggcttcyctaagagctggttaacacttatctattgctgagaatcaccctacctcagaacaacaatcaccacatttgctcacaattctatgggtcacatacttgggct

SEQ ID NO: 45289 - DNA, 201 bp, Homo sapiens
gagcaagactgtctcaaaaaaaaaattatcgattgtatcctttcagataattcttaagtatcaatttttcagatttccagaagaaactctttggggttttaatttaaacatacaggttaagtttgggagcattgatatctttatagatttcctttctactccgcttgctgcgatttattttttattttttattttacttta

SEQ ID NO: 45290 - DNA, 201 bp, Homo sapiens
atacagacacagatactaggaaacagtctgtttcccgaggacaccctgtggctgacaagtatcactgcactgagaaattttattctctaaaatcacagatsagaaaactttgggccgggaacggtggctcacacctgtaatcccagcactttgggaggccgagacgggcggatcacgaggtcaggagatcgagaccatcct

SEQ ID NO: 45291 - DNA, 201 bp, Homo sapiens
tgtagtcccagctacttgggaggctgaggcaggagtatcgtttgagcccaggaatttgaagcttcagtgagctatgattgagccactccattccggcccgrgtaacagagtgagaccttgtctcaaaaaaaaaaaaaaaaaaaaaaaaaaaggaaaaatctcttacgttaaataaaatgaataagctgggtgtggtggctc

SEQ ID NO: 45292 - DNA, 201 bp, Homo sapiens
gagtgttgggtggcagctgatgctgaagttttcaatggggtggtcacggagggtgacactttggcacacactggaggaggtaggggaacgagctatgtggwtgggtgtctaagggaagagcagctgcaggtaccctgggttggaagcctgcctggtgggtggggggcagggtgaggagctagtggctgcagtggagtgggg

SEQ ID NO: 45293 - DNA, 201 bp, Homo sapiens
cctccctggaggaggagaaaggagcaattctctagacatgccaatataacatttccttttatttttaagtagtgtatttctttttcttttcttttctttcytttttttttttttttttgaggaagaatctcactgtgtcacccaggctggagtccgttggtgccatctcggctcactgcaacctccacctccccagttcaa

SEQ ID NO: 45294 - DNA, 201 bp, Homo sapiens
tttcaccatgttggccaggctggtctcgaacttctgacctcaggtgatctgcccgccttgacctcccaaagtgctgggattacaggcatgagccaccatgyccggctaagtagtgtatttctaatacagaaaatagagggaaatggaaaatacagaaaacggaagaaatagaagtgccccattattgcactgcccagattt

SEQ ID NO: 45295 - DNA, 201 bp, Homo sapiens
atactgttatgttcggttacctgtgagttcaatagggcctggaaggtcaaccctaggccagcatttataacttacttggaagaggccttaacggtaaggcsttaaaacagatgtgactgttgttcccctgttgaaatcttttccttgccttcccgtcttaatgtgcaaactcttctactgctatttaagatcctctcctct

SEQ ID NO: 45296 - DNA, 201 bp, Homo sapiens
actggagagaaccaggcacgatcagagggttgggactttcagccccacacccctcttctgggagagaagggctgaaggtttagttgatcaccagcggccartgattcaatgagtcatgcctatgtaatgaggcctccataaaactcaaaaggacagggtttggggagcttctgggtagcagaacatgtggaagtttctgga

SEQ ID NO: 45297 - DNA, 201 bp, Homo sapiens
accaggcacgatcagagggttgggactttcagccccacacccctcttctgggagagaagggctgaaggtttagttgatcaccagcggccagtgattcaatsagtcatgcctatgtaatgaggcctccataaaactcaaaaggacagggtttggggagcttctgggtagcagaacatgtggaagtttctggagggtggcccc

SEQ ID NO: 45298 - DNA, 201 bp, Homo sapiens
gaggctgaggcaggagaatggcgtgaacccgggaggcggagcttgcagtgaaccgagatggcgccactgcactccagcctgggcgacagagcgagactccrtctcaaaaaaaaaaaaaaaagacaattttaaaataaagcatattaaggctcttttgttccttatggaagtaacacatgttcaatatagaacatttggaaa

SEQ ID NO: 45299 - DNA, 201 bp, Homo sapiens
cccttaagtgttgcttttttttctttttttttttgagacggagttccgctctttcgcccaggcttgagtgcggtggtgcgatctcggctcactgcaacctycccgtccccccgccctgaccccgggttcaagagattctcctgcctcagcctcctgagtagctgggattacaggaatgtgccaccatgcctggctaattgt

SEQ ID NO: 45300 - DNA, 201 bp, Homo sapiens
gggcagatcatgaggtcaggagatcgagaccatcctggctaacacagtgaaactccgtctctactaaaaacacaaaaaattagctgggcatggtggcgggygcctgtagtcccagctactcgggaggctgaggcaggagaatggcgtgaacccgggaggcggagcttgcagtgagccgagattgcgccactgcactccagc

SEQ ID NO: 45301 - DNA, 201 bp, Homo sapiens
taagtgttgcttttttttctttttttttttgagacggagttccgctctttcgcccaggcttgagtgcggtggtgcgatctcggctcactgcaacctccccktccccccgccctgaccccgggttcaagagattctcctgcctcagcctcctgagtagctgggattacaggaatgtgccaccatgcctggctaattgttttg

SEQ ID NO: 45302 - DNA, 201 bp, Homo sapiens
cgcccgccaccacacccagctaatttttgagttttttagtagagacgatgtttcaccaagttggccaggctggtctcgaacccctgacctcaggtgatcckcccgcctcggcctcccaagtgctgggattacaggcgtgagccaccgcactcggccaacagtattttaatttttctcatagccttgccaatacatagtatc

SEQ ID NO: 45303 - DNA, 201 bp, Homo sapiens
gcttttttttctttttttttttgagacggagttccgctctttcgcccaggcttgagtgcggtggtgcgatctcggctcactgcaacctccccgtccccccrccctgaccccgggttcaagagattctcctgcctcagcctcctgagtagctgggattacaggaatgtgccaccatgcctggctaattgttttgtattttta

SEQ ID NO: 45304 - DNA, 201 bp, Homo sapiens
tactctgattttaatttgcaggtacatggggagaacctctttggagcagaataccagttgcaaatttgcgtcccaaccaaattacgaggtctccaggttgyagcagtgaagaagctgacgaggactcaggtatttaaaggcagttctttatcagtcacacctctttccacagtgactacagagtctcaagtataaaaacca

SEQ ID NO: 45305 - DNA, 201 bp, Homo sapiens
tgaacctgggaggcagaggttgcagtgagctgagatcacaccattgcactccatcctgggtgacagagcgagactccctctcaaaaaaaaaaaaaaaaaaraaaaaggaagggaaaggaaacatgctgtgttagaaaaatgtgaggaatgtgaaaatctgaggaatcgtctcctaggtctgttccacgagtagctagcggt

SEQ ID NO: 45306 - DNA, 201 bp, Homo sapiens
gcctttaatctggaaatacagtattacttaggatttgcagtacattttgcctgatagggcaagttttcattcttatttttaaaaaatgatagattgtggcygggcatgatggctcacgcctgtaatcccagcactttgagaggctgaggcaggcagatcacgaggtcaagagatcgagaccatcctggccaacatggtgaa

SEQ ID NO: 45307 - DNA, 201 bp, Homo sapiens
aggcagaggttgcagtgagccgagatcacaccactccactccagcctcagtgatagagtgagactcagtctcaaaaaataaataaataaataaaaaatgarttacctaagtgagaaattgttttttgtatccagtaactgtcttagtgtgctgtatcagtgtttagttatagtattaaacagtactcaggaatgcataaat

SEQ ID NO: 45308 - DNA, 201 bp, Homo sapiens
agtacattttgcctgatagggcaagttttcattcttatttttaaaaaatgatagattgtggctgggcatgatggctcacgcctgtaatcccagcactttgrgaggctgaggcaggcagatcacgaggtcaagagatcgagaccatcctggccaacatggtgaaaccccatctctactaaaaatacaaaaattagctgggca

SEQ ID NO: 45309 - DNA, 201 bp, Homo sapiens
aagtgctgggattacaggcatgagccaccatgtccggctaagtagtgtatttctaatacagaaaatagagggaaatggaaaatacagaaaacggaagaaayagaagtgccccattattgcactgcccagattttaacaaataaaaataatagcaagaaaatccaagccatacagagaatggtaccaaatgaaaaataattg

SEQ ID NO: 45310 - DNA, 201 bp, Homo sapiens
tgatagattgtggctgggcatgatggctcacgcctgtaatcccagcactttgagaggctgaggcaggcagatcacgaggtcaagagatcgagaccatcctrgccaacatggtgaaaccccatctctactaaaaatacaaaaattagctgggcatggtggcgggcgcctgtagtcccagctactcaggaggctgaggcagga

SEQ ID NO: 45311 - DNA, 201 bp, Homo sapiens
tttctttacctattatttatttattggagacagagtcttgctctgtcacccaggctggagtgcagtggtgtaatctcagctcactgcaacctccgcctccygggttcaagtgattctcctgcctcagcctcctgagtagctgggattacaggcgcccgccaccacgcccagctaattttttgtatttttagtagaaacagg

SEQ ID NO: 45312 - DNA, 201 bp, Homo sapiens
ttttcctactagatgatgagcttgatgtaggaagctgtacttgatctccttctgtcttcagcatcataggctatactgagtatttttgcataaataagatkagatccagtacagccgaaattatcatgctttgcaaaataagttaaaaaggttcaactgctcgggagagcagggttcagaggaaggtggagtcagttctga

SEQ ID NO: 45313 - DNA, 201 bp, Homo sapiens
ggggtgtcgggacccctgcatctagccccacttcttcagctcctggtatcagtgtgggcaaatcatgccccatgggcctcggtttcctaaattgggaatcrtggtacttattgtactgtgagaatgtgagttgaaattgcccggagtgctgggggagacagagggttgaggggagacagtggtggctgacaggatggaggg

SEQ ID NO: 45314 - DNA, 201 bp, Homo sapiens
caagtgatcaagtttaatgttttacagtgatccaggtgacatttgtgaggtctcaactgaagaagtagcaatgggggtggaaaagaaagggacagatacargaaataatttaaaaaaaaagaattgtgagtgtggtggctcacatctgtcatcccaacactttgggaggctgaggcgggaggattgcttgaggccaggagt

SEQ ID NO: 45315 - DNA, 201 bp, Homo sapiens
tttccctcattcctttccccatcttctagttactaaaagatgtaactgaactgcagatccttggtgaaatatctttcaacaaatctctatatgagggactkaatgcagagaaccacagaactaaggtaattcctggctggcttctgagtagtgcccaaggaaaattgtgcctaacctttgagcacctccacagacattctg

SEQ ID NO: 45316 - DNA, 201 bp, Homo sapiens
tgggcaggcagagaagtcttgttggctctctggccccacctaagtcctgggaacttcctctggccacaacttggaagggccatacctgggtctcaggaagsacatctcctgaactttctagctgagccctgccagaagagagattagactcccgaaattgggagagcctttggaaaacaaaacctgaggatgacttctaat

SEQ ID NO: 45317 - DNA, 201 bp, Homo sapiens
ggtctcactgtgtcgcccaggctggagggcagtgatgcggtcataggttgctgcagccttgaacttttgggttcaagccgtcctctgcctcagcctcctgygtagctgggactacaggtgcaagccactatgcccggctcattttttaatttttcttttgtagagatgggatctagctatgttgaccaagctgatttcaaa

SEQ ID NO: 45318 - DNA, 201 bp, Homo sapiens
gggacgcctgtctcagtgctgaggcaaccaccaccgaggaccctgggctggaagctgggctgagatgtctggtggtaggttctgaggcaggacaggggacygactcaaatggatgatacgaacggcaggctggattcacgttgctcctgcacctccagcatctgctgaggacacctagaactgtggccctggccaaacctc

SEQ ID NO: 45319 - DNA, 201 bp, Homo sapiens
tccttctgtcttcagcatcataggctatactgagtatttttgcataaataagattagatccagtacagccgaaattatcatgctttgcaaaataagttaawaaggttcaactgctcgggagagcagggttcagaggaaggtggagtcagttctgattgagggatgagcaccagaggtcttgaaggattggactctccagga

SEQ ID NO: 45320 - DNA, 201 bp, Homo sapiens
taaagagaatgaacgcagccgaagttgaatcgaggcagtgatttcactcagtgcgttgggtctttccactcacctggccctccagaaccccagggccttgagtgcatgggctggtacaagagcccagtttttggctggggaggcacttcctatgggagggggacgcctgtctcagtgctgaggcaaccaccaccgaggacc

SEQ ID NO: 45321 - DNA, 201 bp, Homo sapiens
cagatggtatcatgagagaaacaggttattcgaatctgcactcactatcctgtaccagggcaaaggagaacagaaagcacatggggtactttcccagccgrtctttcttctacaagctgccttttaggtgctaggcctttctcatttccttttcaccctctgcctgggacaggaaatggtagagcttgcatagatccaaga

SEQ ID NO: 45322 - DNA, 201 bp, Homo sapiens
tccatgacttctactgccctctgcagaaagaccttggacttggttcactgttaaccaccaagcccctcgtcccctccccaccatcccctatgacaaccccyggagctcactgtctgtctcaggacagcccagttctcctgggtaacgtggatggtgagaatgttgaggctgtccctggaatctgccgtctccctggactgg

SEQ ID NO: 45323 - DNA, 201 bp, Homo sapiens
tttgcccagagtatgggtagaacagggagcagggaaaggaggagaaaggaaggaaggagacaggtaatggagggccccagaggccagatggaggggctcasctctctccctgggcctggggaatccacgcagcgctgactcgctgacccaggctgtctgtgcaggtgggagaagaatttaagagtgctaggactgcgaggg

SEQ ID NO: 45324 - DNA, 201 bp, Homo sapiens
gaaaggaggagaaaggaaggaaggagacaggtaatggagggccccagaggccagatggaggggctcagctctctccctgggcctggggaatccacgcagcrctgactcgctgacccaggctgtctgtgcaggtgggagaagaatttaagagtgctaggactgcgagggaactgaacctgatcgcctcagacccggatgaga

SEQ ID NO: 45325 - DNA, 201 bp, Homo sapiens
gggacaccgaggctgcgcattaggctgcacttgaggtttccggatgggggcgggacctggtcagtcacatgggccgaggggcgggtcctggttagggaccstgaggctgagtactacagcctcctgggtaggtacaaggcctgtcaggtacaccaggcacagcagccacccaggggagggcggggcctctccattaataat

SEQ ID NO: 45326 - DNA, 201 bp, Homo sapiens
agagaggccaggtgggagcacacggtgtgttcacagccacaccacccttgccccaggttacgctgtggccgtgctgcacaagacctgcagcctctcctacrtcgcgggggctccacggtacaaacatcatggggccgtgtttgagctccagaaggagggcagagaggccagcttcctgccagtgctggagggagagcaggt

SEQ ID NO: 45327 - DNA, 201 bp, Homo sapiens
agtgagactccatctcaaaaagaaaaaaacaaaataggcggggtgcggtggctcacgcctgtaatcccagcactctgagaggctgaggcaggtggatcacraggtcaggagatggagaccatcctggctaacacggtgaaaccccgtctctactaaaaataaaaaaaattagccgggtgcggtggcaggtgcctgtagtcc

SEQ ID NO: 45328 - DNA, 201 bp, Homo sapiens
ccccgtctctactaaaaataaaaaaaattagccgggtgcggtggcaggtgcctgtagtcccagctactcgggaggctgaggcaggagaatggcgtgaaccygggaggcagagcttgcagtgagccaagatcacgccattgcactccagcctgggcaaaagagcaagactgtctcaaaaaaaaaattatcgattgtatcctt

SEQ ID NO: 45329 - DNA, 201 bp, Homo sapiens
cttgaactcctgagctcaagtgatctgcagtagctgggactaagggcatgtgccactgtgcctggcttagggaaacttaatcacttcaggaagcatcgtcrtcctaatagcagagttcaggaggatgcacctaaattgacaattcccaacttcggttgacttgctttgtttttttattagtgggagcaaattttgtaaagt

SEQ ID NO: 45330 - DNA, 201 bp, Homo sapiens
gatcttggctcaccgcaacctccgcctcccaggttcaagcgattctcctgcctcagcctcctgagtaactgggattacaggcatgcgccaccacgcccagmtaattttgtatttttagtagagatggggtttctccatgttggtcaggctggtctcaaactcttgacttcaggtgatccacctgcctcagcctcccaaagt

SEQ ID NO: 45331 - DNA, 201 bp, Homo sapiens
agtcatgcctatgtaatgaggcctccataaaactcaaaaggacagggtttggggagcttctgggtagcagaacatgtggaagtttctggagggtggccccygagagggcatggaagctttgcccctcacccccactttgcccctcacccccactttgccttatgcatctcctcatctgtatcctttgtaatatcttttttt

SEQ ID NO: 45332 - DNA, 201 bp, Homo sapiens
ccaggctggagtgtggtggcatgctctcggctcactgcaaccactgggttcaagcgattctcctgcctcagcctccctagtagctgagattacaggcgccygccaccacgcccatctgagttttgtatttttagtagagacggggtttcaccaatgttggccaggctggtctcgaactcctgacctcgtgatccgcccgcc

SEQ ID NO: 45333 - DNA, 201 bp, Homo sapiens
gagtaactgggattacaggcatgcgccaccacgcccagataattttgtatttttagtagagatggggtttctccatgttggtcaggctggtctcaaactcytgacttcaggtgatccacctgcctcagcctcccaaagtgctgggattacaggcgtgagccaccgcgcctggcaatgctgagatttttaaaaacactctgt

SEQ ID NO: 45334 - DNA, 201 bp, Homo sapiens
tgcctcagcctccctagtagctgagattacaggcgcctgccaccacgcccatctgagttttgtatttttagtagagacggggtttcaccaatgttggccargctggtctcgaactcctgacctcgtgatccgcccgcctcggcctctcaaagtgctgggattacaggcgtgagccaaggcacctggcctgtaatatccttt

SEQ ID NO: 45335 - DNA, 201 bp, Homo sapiens
agtagagatggggtttctccatgttggtcaggctggtctcaaactcttgacttcaggtgatccacctgcctcagcctcccaaagtgctgggattacaggcrtgagccaccgcgcctggcaatgctgagatttttaaaaacactctgtagcaaggttttataattttcttcaaaggggtcttaatttataaagacttacttc

SEQ ID NO: 45336 - DNA, 201 bp, Homo sapiens
gggtttctccatgttggtcaggctggtctcaaactcttgacttcaggtgatccacctgcctcagcctcccaaagtgctgggattacaggcgtgagccaccrcgcctggcaatgctgagatttttaaaaacactctgtagcaaggttttataattttcttcaaaggggtcttaatttataaagacttacttccagctgcatt

SEQ ID NO: 45337 - DNA, 201 bp, Homo sapiens
ttgacttcaggtgatccacctgcctcagcctcccaaagtgctgggattacaggcgtgagccaccgcgcctggcaatgctgagatttttaaaaacactctgyagcaaggttttataattttcttcaaaggggtcttaatttataaagacttacttccagctgcatttttatttgtttatttattttgggggggtctcactgt

SEQ ID NO: 45338 - DNA, 201 bp, Homo sapiens
ttattatgcttttgttgctactgtgtgaaaataccgttttttccccctgactgtttagagtttgcacttagaacagttggtggttttgaatgtttatcttmtctggccattttactgaactgtggttttgtttttttggagacggagtctcactctgtcgcccacgctggagtgcagtggtgtgatctctgctcactgcaa

SEQ ID NO: 45339 - DNA, 201 bp, Homo sapiens
aaggttttataattttcttcaaaggggtcttaatttataaagacttacttccagctgcatttttatttgtttatttattttgggggggtctcactgtgtcrcccaggctggagggcagtgatgcggtcataggttgctgcagccttgaacttttgggttcaagccgtcctctgcctcagcctcctgtgtagctgggactac

SEQ ID NO: 45340 - DNA, 201 bp, Homo sapiens
ggccgtgctgcacaagacctgcagcctctcctacgtcgcgggggctccacggtacaaacatcatggggccgtgtttgagctccagaaggagggcagagagkccagcttcctgccagtgctggagggagagcaggtacctgctggggaaagcctccaccccttatgaccgatggggaatctggaggcccccaagggaaagga

SEQ ID NO: 45341 - DNA, 201 bp, Homo sapiens
agatttccagaagaaactctttggggttttaatttaaacatacaggttaagtttgggagcattgatatctttatagatttcctttctactccgcttgctgygatttattttttattttttattttactttatttttttttttttgagacagagttttgctcttacttcccagactggtgtgcaatggtgtgatcttggctc

SEQ ID NO: 45342 - DNA, 201 bp, Homo sapiens
ggacccaccaccatgcccagctaatttttgcacttttagtagagatggggtttcaccatgttaggctggtctcgaactcctgacctcaggtgatccacccrcctcaggctcacaaagtgctgggattacaggcatgagccaaatccgggcccggccaaactgtttttaaatcactctttagttgattctttgggatttttc

SEQ ID NO: 45343 - DNA, 201 bp, Homo sapiens
ccgtctccactaaaaatataaaaattagccgggtgtggtggtgggcgcttgtaatcccagctacttaggagaggcaggagaatcgcttgaacccgggaggyggaggttacagtgagccaagaccgcagcattgcactccagcctgggcaacaagaatgaaactctgtctctccaaaaaaaaaaaaaaaaagaagagaaaaa

SEQ ID NO: 45344 - DNA, 201 bp, Homo sapiens
tgggcgtggtggtgggtgcctgtaatcccagctactctggaggctgaggcaggagaatcgcttgaacccgggaggcagagcttgcagtgagccaagatcgygccactgcactccagcctgggtgacagagcgagactccgtctcaaaaaaaaaaaaaaaaaaaaaaaaaaaagaatgagtgctgggctcagccctgtggag

SEQ ID NO: 45345 - DNA, 201 bp, Homo sapiens
ttaaaaaaatagagacaggggtcttgctatgttgaccaggctagatatgaactcttgggctcaagcgatcctcctgcctcagcctcccgagtagctgggaytacaggcgcacgccactgcgcccggctagtttacttctttcagaacatttgttatcagcaaatttaaacatttcaacaaatatttcagtttccatttgga

SEQ ID NO: 45346 - DNA, 201 bp, Homo sapiens
gctgaagtgttttaaagccttggtactcagaatgtggtctgaagacctgcagtgtgggtgtcccttagaatcttgttggaaatgtagtcttgggcccttasatccttcctagagtgtcacaccaagaaggacatgcctgagaggcccactcctagggatgctaagattgactagtgggctcaggtggtgtcagcctaattg

SEQ ID NO: 45347 - DNA, 201 bp, Homo sapiens
ccactcttctgttactctcagtgagcaaattgatatgtaacgacccaaattgggtggtccaggaagcacgcgggcaggggtgtagccttgctgaggggtgsaggagcggggctcctggtgagctgagttcctcccgggctgtagatggggtcctattttggctctgagctgtgccctgtggacattgacatggatggaagc

SEQ ID NO: 45348 - DNA, 201 bp, Homo sapiens
acagctgccctatgagaaggcctgcaagaataagctgttttgtgtcgcagaattacagttggccaccaccgtctctcagtgagttggacatagccgtcagyttcctcgattaaccttctcccgaacgcttgcctgggcaattccttcattaggacaccctgcacatccccttcccctctccccgtggcccacaaatggctt

SEQ ID NO: 45349 - DNA, 201 bp, Homo sapiens
aataaatttgaatttgttggactgtagatttgtccccggtcatcttaggctatttgggctaggacagtatccattatatgaatgaagcaatctcctaggcygggcaccgtggctcacggctgtaatcccatcactttgggaggctgaagtgggtggatcacttgaggtcaggagttcgagaccagcctggctaacatggtg

SEQ ID NO: 45350 - DNA, 201 bp, Homo sapiens
ctgcttttctgtggtgaccccctcactggcacccctgcctccagcctcctcctggtccaaccaacagatggttaataactagataaatccccgccagtccrgctccatgcctcccgaggcaccatattctgctgcagtaccaccctccctatgtgcggccctttcttcaccagggttctgagagagaagtgagtctaatgc

SEQ ID NO: 45351 - DNA, 201 bp, Homo sapiens
aacctgcagttgaagaggatgcaaaaggtgactgtgacggtggctgtggaaacaggtccctcacgcccctccctcgctgcatgcctgcttttctgtggtgrccccctcactggcacccctgcctccagcctcctcctggtccaaccaacagatggttaataactagataaatccccgccagtccagctccatgcctcccga

SEQ ID NO: 45352 - DNA, 201 bp, Homo sapiens
atggtggtaaacacctgtagtcccagctactcgggaggctgaggtgggaggatcacttgaacccaggaagtggaggctgcggtgagccgtgatcattgcaycacagcaccacgctctagcctcggtgaatgtcctattgtattgcgttgaggtttttacagatgaaataaactgtaacatttttatctgtaccctgtgcag

SEQ ID NO: 45353 - DNA, 201 bp, Homo sapiens
ctgtaaaagagcgattttattttaattaattaatttatttatttattttgagacggagtcttgctctgtcgcccagtctggagtgcagcggtgcaatctckgctcactgcaacaaaagggtggccatattgatgacaggaggtcgcttttttctgtgtgctcaaacatccagttgttcccctgaatacagaccaggcaaca

SEQ ID NO: 45354 - DNA, 201 bp, Homo sapiens
agcactttgggaggccatacttcctagatctgcacatctcatctttggacatttcagatggaaaacagttttctcggtattgctaatatgtttttctgtcdatctcagctactgagagtggttctgcactctgggtccctgtgatacctcagcattctggaggaccctttcacacatccccaggaccctcttttccaggac

SEQ ID NO: 45355 - DNA, 201 bp, Homo sapiens
atctgtgtgatggggatgtgtgtgactggcaaagtgagagtgctcgctgatgccgatttttaacatagtgagaaagacagtctctcctattttgccccccwccccaggccactttgaaggcctgactgggaaggtgccggggccaagagagaggccaggtgggagcacacggtgtgttcacagccacaccacccttgcccc

SEQ ID NO: 45356 - DNA, 201 bp, Homo sapiens
catgtctgattgctaggcagtttcctccgctgtggggcctgggctgctcctccactcttctgttactctcagtgagcaaattgatatgtaacgacccaaaytgggtggtccaggaagcacgcgggcaggggtgtagccttgctgaggggtgcaggagcggggctcctggtgagctgagttcctcccgggctgtagatgggg

SEQ ID NO: 45357 - DNA, 201 bp, Homo sapiens
aaatctctgaagtggcttcttcacctgtaaaaggggaatgaggccgcctgccttgcttactccatatttgtatttgaggcttaactgaaataacggggccrggcgcggtggctcatgcctgtaatcccagcactttgggagaccgaggtgggtggatcatttgaggtcaggagttcgagaccagcctggccaacatggtga

SEQ ID NO: 45358 - DNA, 201 bp, Homo sapiens
ggaggctgagaagcccttttaaaatcagtattcttctaagtgtggtcttctagagacaattctgaactccaattgcttatctctgaaagccttttatttatttatttattttttgagacgagtctcgctctgtcgcccaggctggagtgctgtggcgtgatctcggctcactgcaacctctgcctccaggttcaagcagtt

SEQ ID NO: 45359 - DNA, 201 bp, Homo sapiens
gctgagaagcccttttaaaatcagtattcttctaagtgtggtcttctagagacaattctgaactccaattgcttatctctgaaagccttttatttatttatttattttttgagacgagtctcgctctgtcgcccaggctggagtgctgtggcgtgatctcggctcactgcaacctctgcctccaggttcaagcagttctct

SEQ ID NO: 45360 - DNA, 201 bp, Homo sapiens
taaaatcagtattcttctaagtgtggtcttctagagacaattctgaactccaattgcttatctctgaaagccttttatttatttatttattttttgagacgagtctcgctctgtcgcccaggctggagtgctgtggcgtgatctcggctcactgcaacctctgcctccaggttcaagcagttctctgcctcagcctcccga

SEQ ID NO: 45361 - DNA, 201 bp, Homo sapiens
ggaggtaggggaacgagctatgtggatgggtgtctaagggaagagcagctgcaggtaccctgggttggaagcctgcctggtgggtggggggcagggtgagragctagtggctgcagtggagtggggcggggtgtaatgagggaaggggaggaagggggaagaggccatggggcttcttaagccctcagaagggcttttgct

SEQ ID NO: 45362 - DNA, 201 bp, Homo sapiens
ctgcagcaaagcaccatggcacacgttcacctatgtaacaaacctgcacatctgcacatgtaccctggaacttaaaaaaatagccaggcgcagtggctcaygcctgtaatcccagcactttgggaggccaaggcaggcagatcacttgaggtcaggagttcgagaccagcctggccaacatggtgaaaccccatctctact

SEQ ID NO: 45363 - DNA, 201 bp, Homo sapiens
gggggagaagatggtaagtaggtaaattccatgttgatgagatgaacgttgaagacacagggaaggtgggaaggagtgttgggtggcagctgatgctgaagttttcaatggggtggtcacggagggtgacactttggcacacactggaggaggtaggggaacgagctatgtggatgggtgtctaagggaagagcagctgca

SEQ ID NO: 45364 - DNA, 201 bp, Homo sapiens
ggagttcagtggcgtgatctcggctcactgcaacctctgcctcctgggttcacaccattctcctgcctcaggctcccgagtagctgggactacaggcaccygccaccacgcccggctaattttttgtatttttagtagagacggggtttcaccatgttagccaggatggtctcgatctcctgacctcgtgatctgcctgcc

SEQ ID NO: 45365 - DNA, 201 bp, Homo sapiens
actgggtatggtggctcacgcctgtaattccagctactcaggaggctgaggcatgagaattgcttgaacccggggggcggaggttgcagtgagctgagacrgcaacactgcactcctgcctgggcaacagagcgaagccctttttaagaagcacttgctatgtacaaagcaggtgtgctatgaactaacactcttattcct

SEQ ID NO: 45366 - DNA, 201 bp, Homo sapiens
ggctaacacagtgaaaccccgtctctactaaaaatacaaaaaaaaaaaaaaaattagctgggcgtggtggcgggcagctgtagtcccagctactcgggagkctgaggcaggagaatggcgtgaacccgggaggcggagcttgcagtgagcggagattgcgccactgcactccagcctgggcgacagagcgagactccgtct

SEQ ID NO: 45367 - DNA, 201 bp, Homo sapiens
ccacacccagctaatttttgagttttttagtagagacgatgtttcaccaagttggccaggctggtctcgaacccctgacctcaggtgatcctcccgcctcrgcctcccaagtgctgggattacaggcgtgagccaccgcactcggccaacagtattttaatttttctcatagccttgccaatacatagtatctccctgttt

SEQ ID NO: 45368 - DNA, 201 bp, Homo sapiens
gaactccctcagactgtggctccaggcccagcaccctgtaccctgtgccgggttgggcctccttaggctggagagaatccaggactggcctggcctggccstgaccttccactctctccaggccagccactctggtgatgcctacttcttatttgtggcagcagacggaataatagcagttgtctaagggagattttagaa

SEQ ID NO: 45369 - DNA, 201 bp, Homo sapiens
cgggttcaagtgattctccttcctcagcctcctgagtagctgggattacaggcgtgcagcactacacccggctaatttttaaaatatttttggtagagatrgggtttcaccatgttggccaggctggtctcaaactcctgtcctcaagtgatccacctgcctcgacctcccaaagtgctgggatgacaggcatgagccacc

SEQ ID NO: 45370 - DNA, 201 bp, Homo sapiens
gggttcacaccattctcctgcctcaggctcccgagtagctgggactacaggcacccgccaccacgcccggctaattttttgtatttttagtagagacgggstttcaccatgttagccaggatggtctcgatctcctgacctcgtgatctgcctgcctcggcctcccaaagtgctgggattacaggcgtgagccaccgcgcc

SEQ ID NO: 45371 - DNA, 201 bp, Homo sapiens
tatgaggatcatgcaagcgaatatatacaaagtatttagcacagtgctcagcgatggctgtgattgcagagttttttgttttttgttttttttctgaggcrgagtcttcctcttttgcccaggctggagtgcagtggtgtaatcttggttcactgcaacctccgcctcccaggttcaagcaattcttctgcctcagcctcc

SEQ ID NO: 45372 - DNA, 201 bp, Homo sapiens
cgttctggctgggagtttagatggcttaaccccattctctttcactggggctgggtggaagagatcaggctatgtggctatattaaaaatacaacaaaagsccgggcgcgggggctcacgcctgtaatcccagcactttgggaggccgaggctggcggatcatgaggtcaggagatcgagaccatcctggctaacacagtg

SEQ ID NO: 45373 - DNA, 201 bp, Homo sapiens
gtcccagctacttgggaggctgaggcaggagtatcgtttgagcccaggaatttgaagcttcagtgagctatgattgagccactccattccggcccgggtawcagagtgagaccttgtctcaaaaaaaaaaaaaaaaaaaaaaaaaaaggaaaaatctcttacgttaaataaaatgaataagctgggtgtggtggctcatgc

SEQ ID NO: 45374 - DNA, 201 bp, Homo sapiens
acgtaggcgtcatctttgatgcctcttttccttcctctccaccacatcaacaagtcttagttggctctgcctccagaccagtgcaggcactgtcttcactycctggacactgctgccacagcctttcctgcttccagcccctgcgctccattctccacacagcagcagccctatcccttcactctgctgcctgaaactcct

SEQ ID NO: 45375 - DNA, 201 bp, Homo sapiens
tagaatattagtttttaaccatacattgtcccaaaagtgtctgtgcattgtgcaaaaagtaaacttaggaaacatttggtattaaataaatttacactttwctttgcagtagtgcctttaatctggaaatacagtattacttaggatttgcagtacattttgcctgatagggcaagttttcattcttatttttaaaaaatg

SEQ ID NO: 45376 - DNA, 201 bp, Homo sapiens
tctgtgaccacccagtctcagtagccctcggtccttattaccgtatttttgttgttgttgttgagatggagtcttgctctgtcacccaggctggagtgccrtggcaggatgtcggctcactgcaacctccgcctcccaggtttaagcaattctcctgcctcagcctcccaagtaggtgggattacaggcgcccgccaccac

SEQ ID NO: 45377 - DNA, 201 bp, Homo sapiens
catcttattagtgagatctgaatctcatgtcagtcactggcaaaggagaatagctgtgtcatgatcacctgagaccaacgatgattcctgaataaaatccraaaggagagaggggcccctgggcaggccagcatccgtgtttgctgcaaacagtagtacccggtgccttgcttctcccttaacctctacttgggcatcttt

SEQ ID NO: 45378 - DNA, 201 bp, Homo sapiens
gctgagaatcaccctacctcagaacaacaatcaccacatttgctcacaattctatgggtcacatacttgggctgggctcagctggatgattcttctgtccrtcttgcctggagttaccctggagctgcaggcgtctggttgcttgactggggctggatggcctaagatgacctcacttacttgtctggaccatgtgtcttt

SEQ ID NO: 45379 - DNA, 201 bp, Homo sapiens
attagaaaatgaaccagcccaacgatacagaattcaaatattccacctcaccccaactgcgctacgaccactttatattttgacattcagcttttattccttttttttttttttttaaactgagacgaagtctcactctgtcgcccaggctggagtgcagtggtgccatctcggctcactgcaacctctgccgcccaggtt

SEQ ID NO: 45380 - DNA, 201 bp, Homo sapiens
gggctgctgcagggcctggaggggatcaggctgcacttcctttgggaaggcttcctgaggagctggggtttgggatgattgctctgcagcaggagggatckcaggcagaggaaacagtccgggcagaggactgaggaggagagagactggaggcgggtccaggcctgcacctaccccaccaaaacggggtctgcggtggag

SEQ ID NO: 45381 - DNA, 201 bp, Homo sapiens
ttagaaaatgaaccagcccaacgatacagaattcaaatattccacctcaccccaactgcgctacgaccactttatattttgacattcagcttttattccttttttttttttttttaaactgagacgaagtctcactctgtcgcccaggctggagtgcagtggtgccatctcggctcactgcaacctctgccgcccaggttc

SEQ ID NO: 45382 - DNA, 201 bp, Homo sapiens
ttgactgtctgtctctgatggggctcagttagagccagaggttagagagtggcagctcctccaggaaaggagtcttgctcggtgggtcagggccccaggcwtgttgggaagggcggctgaggcttcgtgttgccagttctgtcagccagggcctttggactccagggctctgccattctgttcctcctccagccagcctcc

SEQ ID NO: 45383 - DNA, 201 bp, Homo sapiens
ctggcttatttggaagatgcttaggacttctgactcaccacttttattgtttatttcttcttatgatgacatcaaagtagaaagtattcttgcaaggtgcrgtggctcatatttggaaatcccagcactttgggaggccaaggtgggtgaattgcttgagcccaggtggttgaggctgcagtgagccatcatggtgctgct

SEQ ID NO: 45384 - DNA, 201 bp, Homo sapiens
tagaaaatgaaccagcccaacgatacagaattcaaatattccacctcaccccaactgcgctacgaccactttatattttgacattcagcttttattccttttttttttttttttaaactgagacgaagtctcactctgtcgcccaggctggagtgcagtggtgccatctcggctcactgcaacctctgccgcccaggttca

SEQ ID NO: 45385 - DNA, 201 bp, Homo sapiens
cggctcccacacagccgcctctgctccagcaaggatgtggctcttccacactctgctctgcatagccagtaagtcctctcacccgctgcttcgaggggctsctgtgccctcagctccagccaggtgtctgcagactacagccttgactgtctgtctctgatggggctcagttagagccagaggttagagagtggcagctcc

SEQ ID NO: 45386 - DNA, 201 bp, Homo sapiens
ccagctacttgggagactgaggcaggagaaccttgaacctaagaggcagaggttgcagagagccaagatcgagccactgcactccagcctgggcgacagarcgagactccatctcaaaaaaaaaaaaaaaaaagagagagaaagaacttgataaacccaggtgtggctgtgactcttcccttctgtctgagccagttcttt

SEQ ID NO: 45387 - DNA, 201 bp, Homo sapiens
caggttcaagcgattctcctgcctcagcctcccgagtagttgagactacaggtggacaccaccaggcccagctaatttttaaaaaatttttaatagagacrgggatttcaccatgttggccaggctggtcttgaactcctggcctcaggtgatccgcctgcctcggcctcccaaagtgctgggatgataggcatgaaccac

SEQ ID NO: 45388 - DNA, 201 bp, Homo sapiens
gagcctgggctgatcgggactctctgtctggttacagctgccctatgagaaggcctgcaagaataagctgttttgtgtcgcagaattacagttggccaccrccgtctctcagtgagttggacatagccgtcagtttcctcgattaaccttctcccgaacgcttgcctgggcaattccttcattaggacaccctgcacatcc

SEQ ID NO: 45389 - DNA, 201 bp, Homo sapiens
tcaagaaccacgtaatggcacggaagatggagatgctgtcattgctgacgtttttcttggtaataactcaggaatgccagtgttcttggcatgcgttatcmgacctcacctgataataactaggaccgagggcctgaatgtcagttggcatcaaaaaagtgaacaactaaaaggaagaataaaaagatagaaacgaccatc

SEQ ID NO: 45390 - DNA, 201 bp, Homo sapiens
tgaaccactgcacccggcctcattcctggtaaaggtctggtgccctctgtcctaatgtattcagttgaaagcagtcgagttcattcaaaaagagaaggccrggtgcggtggctcacgcctgtcatcccagcactttgggaggctgaggtgggtggatcacctgaggtcaggagttcaagaccagcctggctaacatggcga

SEQ ID NO: 45391 - DNA, 201 bp, Homo sapiens
cctctgtcctaatgtattcagttgaaagcagtcgagttcattcaaaaagagaaggccgggtgcggtggctcacgcctgtcatcccagcactttgggaggcygaggtgggtggatcacctgaggtcaggagttcaagaccagcctggctaacatggcgaaaccccgtctctactgaaaatatgaaaattagccaggtgtggt

SEQ ID NO: 45392 - DNA, 201 bp, Homo sapiens
ttaggcaggagaatcacttaaacccaggaggcagaggttgcagtgagctgagatcgcaccactgcactccagcctgggcaacagagcaagactccacctcaaaaaaaaaaaaaaaaaaaaagggatgagtgtagtggctcatgcctgtcatcccaacactttcgcaggctgaggtggaggatcacttgagcctgggaggtt

SEQ ID NO: 45393 - DNA, 201 bp, Homo sapiens
taggcaggagaatcacttaaacccaggaggcagaggttgcagtgagctgagatcgcaccactgcactccagcctgggcaacagagcaagactccacctcaaaaaaaaaaaaaaaaaaaaagggatgagtgtagtggctcatgcctgtcatcccaacactttcgcaggctgaggtggaggatcacttgagcctgggaggttg

SEQ ID NO: 45394 - DNA, 201 bp, Homo sapiens
gaggcaggagaatggtgtgaacctgggaggcaaagcttgcagtgagctgagatctcgcctctgcgctccagcctgggtgacagagtgtgactccatttccaaaaaaaaaaaaaaaacaaataaacaaacaaacaaaaaaaccaaaaattagccgggcatggtggcacatgcctgtaatcccagctactcgggaggctgagg

SEQ ID NO: 45395 - DNA, 201 bp, Homo sapiens
ggtggatcacctgaggtcaggagttcgagaccagcttgcccaacatggtgaaaccctgtctctactaaaaatgcaaaaattagcctggcgttgtggcaggmgcctgtaatcccacctccttgggaggctgaggcaggagaatcgcttgaacacgggagggggatgttgcagtgagccaagattgtgccattgcactacagc

SEQ ID NO: 45396 - DNA, 201 bp, Homo sapiens
cccgggaggcggagcttgcagtgagccgagattgcgccactgcactccagcctgggcgacagagcgagactccgtctcaaaaaaaaaaaaaaaatatatawatatatatatatatatttagtttccagcacacagtagtgctcaaggcctgttggcctttcttgttattagggagatgaagggtgagggagagagatgggc

SEQ ID NO: 45397 - DNA, 201 bp, Homo sapiens
acggcagatgcagtgggacgcaggcccacagtggagcaaggcagggttgaggcatcacgtgaaaggaatcagggcagaaccatgtgtgagcgtgctcaggygaggatggagcctttctgactctgagctcttccatgtgtgtttttaaagaaaatctcctggatccagatgcacgtgtggacactggagactgctacagca

SEQ ID NO: 45398 - DNA, 201 bp, Homo sapiens
atccgggaggcagagatggcagtgagccgagatcgcgccattgcactccagcctggatgacagagcgagactccatctgaaaacaaacaaacaaacaaccraaaaaacagatgactagccatgaggaaggaacctccaaggcctggaccttgacgatatttggctaggcatcccccactcctgcccgggctgttctgccta

SEQ ID NO: 45399 - DNA, 201 bp, Homo sapiens
tgtggccatcttctcctcagggcctgtgagaggcaggcagcatctttagctgaggtagaatgcctgttggggaaagtcaaataggatggtggctggggccrgggctctggggactccttctgccccacatactcaattggaaagactgagcaagtcccctcacctccctgggcctcagcttccctgtctgtcaaatggagg

SEQ ID NO: 45400 - DNA, 201 bp, Homo sapiens
aaaaaatgatagattgtggctgggcatgatggctcacgcctgtaatcccagcactttgagaggctgaggcaggcagatcacgaggtcaagagatcgagacyatcctggccaacatggtgaaaccccatctctactaaaaatacaaaaattagctgggcatggtggcgggcgcctgtagtcccagctactcaggaggctgag

SEQ ID NO: 45401 - DNA, 201 bp, Homo sapiens
catttcagggccaaaatatatcctaaacccattcacttctctccatttccactgccgttgtaattcaagctaccctttcttgccagggctgttgcaataascttcggcctgcctttcttgcctctgcttttcccacattctttacaaataattcccacgtaacagctatccgtcttctaagagcagacattagattgtgcc

SEQ ID NO: 45402 - DNA, 201 bp, Homo sapiens
ggtggatcacaaggtcagcagatcgagaccatcctggctaacacggtgaaaccccgtctctactaaaaatacaaaaaattctccgggcgtggtggcgggcrcctgtagtcccagctacttgggaggctgaggcaggagaatggtgtgagcccgggaggcggagcttgcagtgagccgagatcctgccactgcactccagcc

SEQ ID NO: 45403 - DNA, 201 bp, Homo sapiens
gctgaattgctgtgaggaaaccacgtttttgttttgttttgtttggctctttaagagaatgtcatctgctcttttaacagcctccctctccaaacattcastgtgatgaccctcagccggttgcttctgtcctgatcatgaactgcaggattggtcaccccgtcctcaagaggtcatctgtgagtcggtttggaccgattc

SEQ ID NO: 45404 - DNA, 201 bp, Homo sapiens
gaggtgggaagtgcttctttggggagagctaggggcggcttcttggaggaggggggctcgggtactggtacagcttggtttagtaggaggatcagaggctstgggtcagatacacctgcgtctagtctttctctctcacacacacataaagatccctgggcagtctcacttttctcagctgtaaaacggggttcatgacac

SEQ ID NO: 45405 - DNA, 201 bp, Homo sapiens
tgaggcaggagaatggtgtgagcccgggaggcggagcttgcagtgagccgagatcctgccactgcactccagcctgggagacagagtgagactccatctcaaaaaaaaaaaaaagcaaaaattaaaaccttgtcagtagacagagacattttccctttgaaaattgataaattctgcttctctgtgtgagtgatgtaacat

SEQ ID NO: 45406 - DNA, 201 bp, Homo sapiens
gattggtcaccccgtcctcaagaggtcatctgtgagtcggtttggaccgattcgctcttctcaccaccctgcagttggcgtcttctgcatcttggtctcayctcaatctctcggttccagctttgcgcttcgcttgactgcagtgtgtccccagcagtgcttacagtggctaagctggctctgaaagtagggggtgatggg

SEQ ID NO: 45407 - DNA, 201 bp, Homo sapiens
tggtctgtggggtccacggaaccccagcctcacgcctcactgggcctctccctgctccattgcccagggggagggtggacttaaagacaattttagtggcygggcacggtggctcacgcctgtaatcccagcactttgggaggccgaggcgggcggatcacgaggtcaggagattgagaccatcctggctaacacggtgaa

SEQ ID NO: 45408 - DNA, 201 bp, Homo sapiens
caccacgcctggctaatttttttgtagttttagtagagaaggggtttcaccgtgttagccaggacggtctcgatctcctgacctcgtgatctgcctgcctyggcctcccaaagtgctgggattacaggcgtgagccaccatgcccggcctccaaatgtctttttaacagttggtttgttcaaagcaagatccaaacaaggt

SEQ ID NO: 45409 - DNA, 201 bp, Homo sapiens
agaattgcttgaacccgggaggcggaggttgcagtgagctgagatcgcaccactgcactctagcctgggtgacagagcaagactctgtctcaataaaattwaaaaaaaaaaaaagagggtttataaatataaacgtttgttttcacatgtagtttatttatttaaaaaaatagagacaggggtcttgctatgttgaccagg

SEQ ID NO: 45410 - DNA, 201 bp, Homo sapiens
caatctctcggttccagctttgcgcttcgcttgactgcagtgtgtccccagcagtgcttacagtggctaagctggctctgaaagtagggggtgatggggaygagagctttccagtacacagccctaggtgaactgcctgctcacctccgtgaagcagagtgaagttgtgggtagtatggagggcgtgtcagacaaaaagtt

SEQ ID NO: 45411 - DNA, 201 bp, Homo sapiens
cgagcaaagctgcatacgtgacagacagcgtgtgcatcatatctgtgtgatggggatgtgtgtgactggcaaagtgagagtgctcgctgatgccgattttwaacatagtgagaaagacagtctctcctattttgcccccctccccaggccactttgaaggcctgactgggaaggtgccggggccaagagagaggccaggtg

SEQ ID NO: 45412 - DNA, 201 bp, Homo sapiens
agactttgtacttgctgttcctttgcttgacactgctcttcctctaggtcctgacgtaggtggtttcttcttaaatttagctcaggtgttcttttcttttytttttttttttttttagatggagtcttgctctgtcacccgggctggagtgcagtggcacgatctctactcactgcaacctccgcctcccgggttcaagtg

SEQ ID NO: 45413 - DNA, 201 bp, Homo sapiens
gacgcatgtcctgtcaattgcagaccatccataatgtacgtgaacacaggccaggggctttctcaccacaaagaattcctcttccatgtaagtacttattwttgtaaagctgtagatggcaaagcaataccagctttgatttcctactctgattttaatttgcaggtacatggggagaacctctttggagcagaataccag

SEQ ID NO: 45414 - DNA, 201 bp, Homo sapiens
acagtattacttaggatttgcagtacattttgcctgatagggcaagttttcattcttatttttaaaaaatgatagattgtggctgggcatgatggctcacrcctgtaatcccagcactttgagaggctgaggcaggcagatcacgaggtcaagagatcgagaccatcctggccaacatggtgaaaccccatctctactaaa

SEQ ID NO: 45415 - DNA, 201 bp, Homo sapiens
cctctaggtcctgacgtaggtggtttcttcttaaatttagctcaggtgttcttttcttttttttttttttttttttagatggagtcttgctctgtcaccckggctggagtgcagtggcacgatctctactcactgcaacctccgcctcccgggttcaagtgattctcctgcctcagcctcccgagtagctgggattacagg

SEQ ID NO: 45416 - DNA, 201 bp, Homo sapiens
ctgggtgtggtggcaggtgcctgtaatcccagctactcgggaggctgaggcagggagaattgcttgaactcgggaggcagaggttgcagtgagctgagatsgtgctattgcactccagcctgggtgacagagcgagactccatctatctcaataataataataataaaaataaataaataaaatgagaataataatagtac

SEQ ID NO: 45417 - DNA, 201 bp, Homo sapiens
ctctaggtcctgacgtaggtggtttcttcttaaatttagctcaggtgttcttttcttttttttttttttttttttagatggagtcttgctctgtcacccgsgctggagtgcagtggcacgatctctactcactgcaacctccgcctcccgggttcaagtgattctcctgcctcagcctcccgagtagctgggattacaggc

SEQ ID NO: 45418 - DNA, 201 bp, Homo sapiens
ccagggttcagtggcagcttcaccgtggatttgccgcatagcctgagcaaggtgctcgggcctgagcttcagtttcccttctctgcagtcagcgtggggawctacctacttcacaggattgtcgcaaagactatttgagataatgcatgtaaagggcttagcacaggttctgccgggcgcggtggctcacgcctgtaatcc

SEQ ID NO: 45419 - DNA, 201 bp, Homo sapiens
tggagtgcagtggcacgatctctactcactgcaacctccgcctcccgggttcaagtgattctcctgcctcagcctcccgagtagctgggattacaggcgcyggcgaccacgcccagctaatttttgtatttttagtagagagggggtttcaccatgttggccaggctggtctcgaactcctgacctcaggtgatcgcccgc

SEQ ID NO: 45420 - DNA, 201 bp, Homo sapiens
cgagacagaagaatcactcgaacccaggaggcagaggttgcagtgagccaagatcgcgccactgcactccaggatgggtgacagagcgaggctccatctcaaaaaaaaaaaaaaaaaaattagccaggcgtggtggcgcatgacctctattcccagctacttgggaagctaaggcaccaggtcacttgaccttgggaggca

SEQ ID NO: 45421 - DNA, 201 bp, Homo sapiens
caaggtgctcgggcctgagcttcagtttcccttctctgcagtcagcgtggggaactacctacttcacaggattgtcgcaaagactatttgagataatgcaygtaaagggcttagcacaggttctgccgggcgcggtggctcacgcctgtaatcccagcactttgggaggccgaggcgggcggatcatttgaggtcaggagt

SEQ ID NO: 45422 - DNA, 201 bp, Homo sapiens
ctgcctcagcctcccgagtagctgggattacaggcgccggcgaccacgcccagctaatttttgtatttttagtagagagggggtttcaccatgttggccargctggtctcgaactcctgacctcaggtgatcgcccgcctcagcctcccaaagtgctgggattacaggcgtgagccaccgcacccgacctaggtgttcttt

SEQ ID NO: 45423 - DNA, 201 bp, Homo sapiens
gggaggcacaagttgcagtgagctgatattgagccatggcactccagcctgagcaacagagtgagacactgtctcaaaaaaaaaaaaaaaaaaaaaaaaarggcaacaatatccccaggcctccttgcgtcccagaatctccatgaagctctgatgaactgagctggtgctggagaaacaaggatggctggggcatagtcc

SEQ ID NO: 45424 - DNA, 201 bp, Homo sapiens
gtggtcaagggtttccttcacacccagcacacaggagcaagtgagcccagggttcaaacaggcactggggcagagccaggtgaggagccagggttcctggstgggcagggcgggagctttgcttgaataggatgggtgggcagtggtggctcccgaagcagcctcataggccctgggacttgggccttgaccctgacagcc

SEQ ID NO: 45425 - DNA, 201 bp, Homo sapiens
ccgcctcagcctcccaaagtgctgggattacaggcgtgagccaccgcacccgacctaggtgttcttttcttttcttttctttctttcaagacggagtttcrctcttgttgtgcaatggcacgatctcggctcactgcaacctccgcctcccgggttcaagcgattctcctgcctcagcctcccaagtagctgggattacag

SEQ ID NO: 45426 - DNA, 201 bp, Homo sapiens
tatatttgacattccaagactgaatatatattttacaatataacaaataaaaatatatttggtctcaaaataaacatttggtcccattatctggcatacaygcctaaaatctctggaatctccaaagtaataaatgtctttttctttgttaatgagttgacgggggaccggcagcccccagatagcttcaaaatgggggct

SEQ ID NO: 45427 - DNA, 201 bp, Homo sapiens
ggcctggggcgatggcctggcttctttggtccttgtactctgccgtgtgggggacgcattccttcatggccagcacaaagttgccacatctccaaatgctrtattttcacatggcaggatacaaaacaggaagcaagaagtcagtagcaaaaggatgttggatttttcttcatgtgccttcccttttcagggatgaaacag

SEQ ID NO: 45428 - DNA, 201 bp, Homo sapiens
gctcaccgcaacctctgcctccggggttcaagcaattctcctgcctcagcctaccaagtagctgggattacaggcatgggccacacacccggctaattttrtatttttggtagagacagggtttctccatgttggtcaggctggtcttgaactcccgacctcaggtgatccacccacctcggcctcccaaagtgttgggat

SEQ ID NO: 45429 - DNA, 201 bp, Homo sapiens
attgcactccagcctgggcaacaagaatgaaactctgtctctccaaaaaaaaaaaaaaaaagaagagaaaaatgcacacctcataagcatgcagcgcagtraacatccgcagagtgaagcactgtgtaagcagcatgcagatcaagggcacgtgagctgcggcgcctaggccccctctaagccccgcactcccttccagac

SEQ ID NO: 45430 - DNA, 201 bp, Homo sapiens
gaggcacaagttgcagtgagctgatattgagccatggcactccagcctgagcaacagagtgagacactgtctcaaaaaaaaaaaaaaaaaaaaaaaaaagscaacaatatccccaggcctccttgcgtcccagaatctccatgaagctctgatgaactgagctggtgctggagaaacaaggatggctggggcatagtccct

SEQ ID NO: 45431 - DNA, 201 bp, Homo sapiens
tgcctgggcaacagagcgaagccctttttaagaagcacttgctatgtacaaagcaggtgtgctatgaactaacactcttattcctagttccaatgaaagayggtctttggccaacgagacccacacccttcaattcaggcatggcttcgttgcagttctgtccaagtgagtactcccaagaggccagcagcggtgtgactc

SEQ ID NO: 45432 - DNA, 201 bp, Homo sapiens
ctggtggtcaggatgaatgtggacactgtccttctgagaggagcctgcttagaacccaggctctgatattgatctctagggtgctaacatttgggtcacaraaaccccactgtggtcatcaaaggaggtgtattgccaactagtcgtgctacaaaagggaattaatatgacgctgtggagggaagaaggcagctgtgggac

SEQ ID NO: 45433 - DNA, 201 bp, Homo sapiens
agtctcactctgtcgcccaggctggagtgcagtggtgccatctcggctcactgcaacctctgccgcccaggttcaagcgattctcctgcctcagcctcccragtagttgagactacaggtggacaccaccaggcccagctaatttttaaaaaatttttaatagagacagggatttcaccatgttggccaggctggtcttga

SEQ ID NO: 45434 - DNA, 201 bp, Homo sapiens
gcctgtcatcccagcactttgggaggctgaggtgggtggatcacctgaggtcaggagttcaagaccagcctggctaacatggcgaaaccccgtctctactraaaatatgaaaattagccaggtgtggtggcaggcgcctgtaatctcagctacttgggggcttaggcaggagaatcacttaaacccaggaggcagaggttg

SEQ ID NO: 45435 - DNA, 201 bp, Homo sapiens
gggcttaggcaggagaatcacttaaacccaggaggcagaggttgcagtgagctgagatcgcaccactgcactccagcctgggcaacagagcaagactccasctcaaaaaaaaaaaaaaaaaaaaagggatgagtgtagtggctcatgcctgtcatcccaacactttcgcaggctgaggtggaggatcacttgagcctggga

SEQ ID NO: 45436 - DNA, 201 bp, Homo sapiens
ctgagccatgattgttccactgtgctctagcctgggcaacagagtgagaccctgtctccaaaaaagggagaaagactcctcaagggctgacgcatgtcctstcaattgcagaccatccataatgtacgtgaacacaggccaggggctttctcaccacaaagaattcctcttccatgtaagtacttattattgtaaagctgt

SEQ ID NO: 45437 - DNA, 201 bp, Homo sapiens
attatattataatggcaccagaattttaccattacttgaactaggaacagattcagtatatggaatcaagggaaactttcattttattaattaattaattwatttatttatttgagatagagtcttgctctttctcccaggctggagtgcagtagcatgatctcggctcactgcaacctccgcctcccaggttcaatcgat

SEQ ID NO: 45438 - DNA, 201 bp, Homo sapiens
agttagagccagaggttagagagtggcagctcctccaggaaaggagtcttgctcggtgggtcagggccccaggcttgttgggaagggcggctgaggcttcrtgttgccagttctgtcagccagggcctttggactccagggctctgccattctgttcctcctccagccagcctccccccgccaccgaggccctctccccat

SEQ ID NO: 45439 - DNA, 201 bp, Homo sapiens
gcagaataccagttgcaaatttgcgtcccaaccaaattacgaggtctccaggttgtagcagtgaagaagctgacgaggactcaggtatttaaaggcagttmtttatcagtcacacctctttccacagtgactacagagtctcaagtataaaaaccagagttctagaaacagagtgaagacaagttaaccatgggaaaagat

SEQ ID NO: 45440 - DNA, 201 bp, Homo sapiens
ttcaggtaagcgcggccgtcccgagaggccaggggagggcggagggcctgaagcgggtaacgagaggccaggagactgtttttcctgggttacccctgcckgccagtgccgggggctgccaggccctccctagcttcgtccctgggtctcaattgctcccgctggagcttcgcttgggccgaggtgagcgctgaaattgct

SEQ ID NO: 45441 - DNA, 201 bp, Homo sapiens
aaaagaagttgaagaaaaggccaggcgcggcagctcacgcctgtaatcccagcactttgggaggccgaggtgggtagatcatctgaggtcaggagttcgaracaagcctggccaacatggcaaaaccccatctctactaaaaatacaaaaattagcctggcatggtggcacatgcccataattccagctactcgggaggct

SEQ ID NO: 45442 - DNA, 201 bp, Homo sapiens
gccaatataacatttccttttatttttaagtagtgtatttctttttcttttcttttctttcttttttttttttttttttgaggaagaatctcactgtgtcvcccaggctggagtccgttggtgccatctcggctcactgcaacctccacctccccagttcaagtgattcttcttcctcagcctcccgagtagctgggatta

SEQ ID NO: 45443 - DNA, 201 bp, Homo sapiens
gtgtttgagactgaaatgctccagatttgattatccagttgctcacgggcatcgcccctagaagagataatagcatctttgcataacatgtccatgtccawaatagatcttttggtgcaaaaaaccaaccctctgtcccaacccgttccttagctaccctcaggagggagatatactccagttacagtacaaggaactcga

SEQ ID NO: 45444 - DNA, 201 bp, Homo sapiens
tgcttttttttctttttttttttgagacggagttccgctctttcgcccaggcttgagtgcggtggtgcgatctcggctcactgcaacctccccgtcccccbgccctgaccccgggttcaagagattctcctgcctcagcctcctgagtagctgggattacaggaatgtgccaccatgcctggctaattgttttgtattttt

SEQ ID NO: 45445 - DNA, 201 bp, Homo sapiens
gccaggctggtctcaaactcctgaccttgtgatcctcccgcctcggcctcccaaagttctgggattacaggcatgaaccaccactcccagcctcttttttwaaaataaacaccagggtctttgtcccccaagctggagttcagtggcacagttaagggctcactgcagcctcctactcctaggctcaggtgatcctcccat

SEQ ID NO: 45446 - DNA, 201 bp, Homo sapiens
gagaatggtgaacccgggaggcggagcttgcagtgagcggagatcgcgccactgcactccagcctgggcgacagagcgagactccgtctccaaaaaaaaaraaagaaaaacagagcttttatctccccccacccttcattcccccaaatctatcctgccctcaggctttctgtctcagcaaatggcatcatcatccaccca

SEQ ID NO: 45447 - DNA, 201 bp, Homo sapiens
tgctctgtcacccaggctggagtgccgtggcaggatgtcggctcactgcaacctccgcctcccaggtttaagcaattctcctgcctcagcctcccaagtargtgggattacaggcgcccgccaccacacccagctaatttttgagttttttagtagagacgatgtttcaccaagttggccaggctggtctcgaacccctga

SEQ ID NO: 45448 - DNA, 201 bp, Homo sapiens
gtgaaacaccgtctctactaaaaatacaaaaaattagccgggcaggtgcctgtaatcccagctactcgggaggctgaggcaggagaatagcatgaacccaggagacggagcttgcagtgagctgagatcgcaccactgcactccacgctgggcgacagagcgagactccgtctcagaaaaaaaaaaaagactcagaaaaag

SEQ ID NO: 45449 - DNA, 201 bp, Homo sapiens
gaataaaatccgaaaggagagaggggcccctgggcaggccagcatccgtgtttgctgcaaacagtagtacccggtgccttgcttctcccttaacctctacytgggcatctttggggcacttttgggaatctgtgggtttagaagaagataaagggaggtggctttgagaaatagggacatttcttctactcacatctggcc

SEQ ID NO: 45450 - DNA, 201 bp, Homo sapiens
ctttggggcacttttgggaatctgtgggtttagaagaagataaagggaggtggctttgagaaatagggacatttcttctactcacatctggcctgtttccygagtcaccttgggacttcctttcacttcccaaacccagggtcttgagtccccctccttctcctgtagaatattccagccctctttctgttcttcctccct

SEQ ID NO: 45451 - DNA, 201 bp, Homo sapiens
acctctacttgggcatctttggggcacttttgggaatctgtgggtttagaagaagataaagggaggtggctttgagaaatagggacatttcttctactcamatctggcctgtttcccgagtcaccttgggacttcctttcacttcccaaacccagggtcttgagtccccctccttctcctgtagaatattccagccctctt

SEQ ID NO: 45452 - DNA, 201 bp, Homo sapiens
taatcccagcactctgagaggctgaggcaggtggatcacgaggtcaggagatggagaccatcctggctaacacggtgaaaccccgtctctactaaaaatamaaaaaattagccgggtgcggtggcaggtgcctgtagtcccagctactcgggaggctgaggcaggagaatggcgtgaacctgggaggcagagcttgcagtg

SEQ ID NO: 45453 - DNA, 201 bp, Homo sapiens
tttggggcacttttgggaatctgtgggtttagaagaagataaagggaggtggctttgagaaatagggacatttcttctactcacatctggcctgtttcccsagtcaccttgggacttcctttcacttcccaaacccagggtcttgagtccccctccttctcctgtagaatattccagccctctttctgttcttcctccctc

SEQ ID NO: 45454 - DNA, 201 bp, Homo sapiens
tccctaaataggttcgtgcctctgcgtacgcgtaggctgcttttcttgtcaggaatgccctccatgactgctcacttcactcactgtcttccctgaaagcrgtctagagactcctgagtcctctgtgctggcttctgtgtgtttgctgtgagctcccttctagaaacccttccaaatggcagtcatcacactgtattgtaa

SEQ ID NO: 45455 - DNA, 201 bp, Homo sapiens
actgaggcaggagaaccttgaacctaagaggcagaggttgcagagagccaagatcgagccactgcactccagcctgggcgacagaacgagactccatctcaaaaaaaaaaaaaaaaaagagagagaaagaacttgataaacccaggtgtggctgtgactcttcccttctgtctgagccagttctttacccctttgtgactg

SEQ ID NO: 45456 - DNA, 201 bp, Homo sapiens
ctgaggcaggagaaccttgaacctaagaggcagaggttgcagagagccaagatcgagccactgcactccagcctgggcgacagaacgagactccatctcaaaaaaaaaaaaaaaaaagagagagaaagaacttgataaacccaggtgtggctgtgactcttcccttctgtctgagccagttctttacccctttgtgactgg

SEQ ID NO: 45457 - DNA, 201 bp, Homo sapiens
ggagactgtttttcctgggttacccctgccggccagtgccgggggctgccaggccctccctagcttcgtccctgggtctcaattgctcccgctggagcttygcttgggccgaggtgagcgctgaaattgctcacaccctctattctgggaccttacgatgctctgtgtccgaagtgttaaaaagatttcagactttccgca

SEQ ID NO: 45458 - DNA, 201 bp, Homo sapiens
tacttgggaggctgaggcaggagaatggtgtgagcccgggaggcggagcttgcagtgagccgagatcctgccactgcactccagcctgggagacagagtgmgactccatctcaaaaaaaaaaaaaagcaaaaattaaaaccttgtcagtagacagagacattttccctttgaaaattgataaattctgcttctctgtgtga

SEQ ID NO: 45459 - DNA, 201 bp, Homo sapiens
actccatctcaaaaaaaaaaaaaagcaaaaattaaaaccttgtcagtagacagagacattttccctttgaaaattgataaattctgcttctctgtgtgagygatgtaacatgtgacatttcttacactgccccctataagttgcttactagcttcccttcttctcccctgagactcttttttggtctctgctttgcctcag

SEQ ID NO: 45460 - DNA, 201 bp, Homo sapiens
aacctccaaggcctggaccttgacgatatttggctaggcatcccccactcctgcccgggctgttctgcctatatccgaaaggactaaggaagcttctcttygcgtaggtgtctgctccctgaatgctcaaagtcgtgagctgtgtgttgctgctgaattcgcatgatgtaaatgtcatgggcacccctaacattccgtgaa

SEQ ID NO: 45461 - DNA, 201 bp, Homo sapiens
aattgataaattctgcttctctgtgtgagtgatgtaacatgtgacatttcttacactgccccctataagttgcttactagcttcccttcttctcccctgaractcttttttggtctctgctttgcctcagcctctttgctttcagttgtctcatctgtagtctggttcccaaagctagccttgatacctgaagcaacaggc

SEQ ID NO: 45462 - DNA, 201 bp, Homo sapiens
ctctttgctttcagttgtctcatctgtagtctggttcccaaagctagccttgatacctgaagcaacaggctctgctcagtatgaagctgaagcctgggcattttttttttgctcagactacataagtgttaaggctcaaaaaacggaaaggaatttacagaaaggactctgctgacaattagaaagagggcttataggtca

SEQ ID NO: 45463 - DNA, 201 bp, Homo sapiens
ttcggcctgcctttcttgcctctgcttttcccacattctttacaaataattcccacgtaacagctatccgtcttctaagagcagacattagattgtgccaytcccctgcttattaaaaataacaaacaaacaaaactgatgcttgagcacacttagactaaaatccatacttttttcatggccagagcaaggcagtacttg

SEQ ID NO: 45464 - DNA, 201 bp, Homo sapiens
cagaagttcaacacaagcctggccaacatggagaaaccctgtctaccaaaaatacaaaaattagccggacatgatggtgggtgcctgtaatcccacctacytgggaggctgaggcacgagaatcgcttgaatctgggaggcagaggttgcagtgagccgagatcacaccactccactccagcctcagtgatagagtgagac

SEQ ID NO: 45465 - DNA, 201 bp, Homo sapiens
atgaactgcaggattggtcaccccgtcctcaagaggtcatctgtgagtcggtttggaccgattcgctcttctcaccaccctgcagttggcgtcttctgcaycttggtctcatctcaatctctcggttccagctttgcgcttcgcttgactgcagtgtgtccccagcagtgcttacagtggctaagctggctctgaaagtag

SEQ ID NO: 45466 - DNA, 201 bp, Homo sapiens
cagctactcgggaggctaaggcaggagaatcgcttgaacctgacggggtggaggttgcagtgagccgagatcgcaccacttcactccagcctgggcgaaaragcgaaactccatctcaaaaaaaaaaaaaaggaagttgaagaataactgcagatgtcttgtttgggtaactttatgtagtgttgtgtacgttagggccat

SEQ ID NO: 45467 - DNA, 201 bp, Homo sapiens
cgaaactccatctcaaaaaaaaaaaaaaggaagttgaagaataactgcagatgtcttgtttgggtaactttatgtagtgttgtgtacgttagggccattamctaagcccaggaatacctttaaagggaaaggtggtgaaggctgttcaaacacagtgagttcatgtctaaaatatgttttgtttccctcattcctttcccc

SEQ ID NO: 45468 - DNA, 201 bp, Homo sapiens
tctgcctttgggtagtttctagggcttggttggagcagcccattcacctctcatggagccccgtaccttgccagtgttacatcactaggctgttgggcacsatctgcttccctgttgatctgattccatcatcttcatttcgttcagaaatccgtctgtgctatcggtcacttgatgatattgttctctgttttccaatgc

SEQ ID NO: 45469 - DNA, 201 bp, Homo sapiens
tgattccatcatcttcatttcgttcagaaatccgtctgtgctatcggtcacttgatgatattgttctctgttttccaatgctgccacaggcttttcccctyccttgtaactcttgggttgtttcagtggaatttgcctttgagggaaaacacacaggtaagtttgcttacttattttcctgttgtgctcaggagttgtgtc

SEQ ID NO: 45470 - DNA, 201 bp, Homo sapiens
atctggtccttcaatagcaatgatttttatggctacgggtgtgtgatcagcaattgtttgaaacacttcgccaaacaccccttccccaatcttctcacagmgttgcagtttttctgtgggaaggcaatggctaaaggggacaggacccttctgactgcattccccataaaccttttcagcatcagatgcctttttgtttga

SEQ ID NO: 45471 - DNA, 201 bp, Homo sapiens
agagtgtttaaggggcttagcaaatacatagaggaggagtgccaagaggacggagcaccacttgttctgttcatgacaggccggtttgaacattctgatargagggatccagagagagaagtggcagtggtatagatgctgcagacctctgacacatcagtcacaattttcttcttgtggaaactgaaggaagccctggtt

SEQ ID NO: 45472 - DNA, 201 bp, Homo sapiens
aactctttggggttttaatttaaacatacaggttaagtttgggagcattgatatctttatagatttcctttctactccgcttgctgcgatttattttttawtttttattttactttatttttttttttttgagacagagttttgctcttacttcccagactggtgtgcaatggtgtgatcttggctcaccgcaacctccgc

SEQ ID NO: 45473 - DNA, 201 bp, Homo sapiens
atctttatagatttcctttctactccgcttgctgcgatttattttttattttttattttactttatttttttttttttgagacagagttttgctcttactkcccagactggtgtgcaatggtgtgatcttggctcaccgcaacctccgcctcccaggttcaagcgattctcctgcctcagcctcctgagtaactgggatta

SEQ ID NO: 45474 - DNA, 201 bp, Homo sapiens
attttactttatttttttttttttgagacagagttttgctcttacttcccagactggtgtgcaatggtgtgatcttggctcaccgcaacctccgcctcccrggttcaagcgattctcctgcctcagcctcctgagtaactgggattacaggcatgcgccaccacgcccagataattttgtatttttagtagagatggggtt

SEQ ID NO: 45475 - DNA, 201 bp, Homo sapiens
tgaacctaagaggcagaggttgcagagagccaagatcgagccactgcactccagcctgggcgacagaacgagactccatctcaaaaaaaaaaaaaaaaaagagagagaaagaacttgataaacccaggtgtggctgtgactcttcccttctgtctgagccagttctttacccctttgtgactgggataagaaccatagcag

SEQ ID NO: 45476 - DNA, 201 bp, Homo sapiens
gtgtgcaatggtgtgatcttggctcaccgcaacctccgcctcccaggttcaagcgattctcctgcctcagcctcctgagtaactgggattacaggcatgcrccaccacgcccagataattttgtatttttagtagagatggggtttctccatgttggtcaggctggtctcaaactcttgacttcaggtgatccacctgcct

SEQ ID NO: 45477 - DNA, 201 bp, Homo sapiens
aacctaagaggcagaggttgcagagagccaagatcgagccactgcactccagcctgggcgacagaacgagactccatctcaaaaaaaaaaaaaaaaaagagagagaaagaacttgataaacccaggtgtggctgtgactcttcccttctgtctgagccagttctttacccctttgtgactgggataagaaccatagcagct

SEQ ID NO: 45478 - DNA, 201 bp, Homo sapiens
gtttcagtcagcgttttctgtaactgtctcctgcctagttccctcccaccaatacccagcgaccccacgcctcagctccaggtcccaccgacattcacagyccctctctcagaagcctaaaggccagggtgcaggagagagtttggagcccgtgtcgcagagggctctgagtccaccaggggctgggggagggcccagcgg

SEQ ID NO: 45479 - DNA, 201 bp, Homo sapiens
ttattcaaattttgccagttgtcctattaatgtcctttatagcaaaagaaaaaaaaggttctggtccaggatcattcatagcgttctacagttatttatcyttagtctcctttaatctggaagggtttctcactcagtctttccttgtcttttaatgacattaacatttttgaagggtacaggccagtccttttgtagaat

SEQ ID NO: 45480 - DNA, 201 bp, Homo sapiens
cacgccactgcactccagcctgggagacagagtgagactccatctcaaaaagcaaacaaacaacgaaaaacatactaaagcaataaataaaggcaggagayggacaagggttgctgggctgtacccagctcagggtgtaacagggcccctgtggctgcgagctgatggccagtcctctgtcagagctggtgggtcaatggt

SEQ ID NO: 45481 - DNA, 201 bp, Homo sapiens
gcaaaagaaaaaaaaggttctggtccaggatcattcatagcgttctacagttatttatctttagtctcctttaatctggaagggtttctcactcagtcttyccttgtcttttaatgacattaacatttttgaagggtacaggccagtccttttgtagaatgttcctcaatttgtctgatatttcttcataattagattcag

SEQ ID NO: 45482 - DNA, 201 bp, Homo sapiens
tctagaagctgcctgcattccttggctcacggcctcctcctcctcaagcctgcagcatagtaagctttgcatctttctctgacactttggaagaccaaggygggagtgcttgagcccaggatcagcttgggcaacacagtgagacttcatctctatagacaaattaacaaaattagctgggcaaggtaactcgctcctgta

SEQ ID NO: 45483 - DNA, 201 bp, Homo sapiens
ttcctcaatttgtctgatatttcttcataattagattcaggttatacatttttgttttgtttttgagacagagtttcgcccttgttgcccaggctggagtrcaatggcgtgatctcggctcactgcaacctctgcctcccaagttcaagcaattctcctgcctcagcctcccgagtagctgggattacaggcatgtatcac

SEQ ID NO: 45484 - DNA, 201 bp, Homo sapiens
tagtttttaaccatacattgtcccaaaagtgtctgtgcattgtgcaaaaagtaaacttaggaaacatttggtattaaataaatttacacttttctttgcartagtgcctttaatctggaaatacagtattacttaggatttgcagtacattttgcctgatagggcaagttttcattcttatttttaaaaaatgatagattg

SEQ ID NO: 45485 - DNA, 201 bp, Homo sapiens
gaaacatttggtattaaataaatttacacttttctttgcagtagtgcctttaatctggaaatacagtattacttaggatttgcagtacattttgcctgatrgggcaagttttcattcttatttttaaaaaatgatagattgtggctgggcatgatggctcacgcctgtaatcccagcactttgagaggctgaggcaggcag

SEQ ID NO: 45486 - DNA, 201 bp, Homo sapiens
ctgcagatccttggtgaaatatctttcaacaaatctctatatgagggactgaatgcagagaaccacagaactaaggtaattcctggctggcttctgagtastgcccaaggaaaattgtgcctaacctttgagcacctccacagacattctgttgccctcttcctgttttcagccttaacacttctgatcttggctctgcca

SEQ ID NO: 45487 - DNA, 201 bp, Homo sapiens
agcctggccctgaccttggggatgtagtttgggtttgtggggaaagcagctaccgccaggtgggctttacggacccctgtgtgtctcatgactagaggcastgacgcttggataaatacatactggatggatgcaggatgagtccgcattctagaagtgtgcagaggtacagaagtggccctgctccctgtccagcaccca

SEQ ID NO: 45488 - DNA, 201 bp, Homo sapiens
catcagccacgccatctgtgaccacccagtctcagtagccctcggtccttattaccgtatttttgttgttgttgttgagatggagtcttgctctgtcaccsaggctggagtgccgtggcaggatgtcggctcactgcaacctccgcctcccaggtttaagcaattctcctgcctcagcctcccaagtaggtgggattacag

SEQ ID NO: 45489 - DNA, 201 bp, Homo sapiens
cctacttgggaggctgaggcacgagaatcgcttgaatctgggaggcagaggttgcagtgagccgagatcacaccactccactccagcctcagtgatagagygagactcagtctcaaaaaataaataaataaataaaaaatgaattacctaagtgagaaattgttttttgtatccagtaactgtcttagtgtgctgtatcag

SEQ ID NO: 45490 - DNA, 201 bp, Homo sapiens
tgaatctgggaggcagaggttgcagtgagccgagatcacaccactccactccagcctcagtgatagagtgagactcagtctcaaaaaataaataaataaawaaaaaatgaattacctaagtgagaaattgttttttgtatccagtaactgtcttagtgtgctgtatcagtgtttagttatagtattaaacagtactcagga

SEQ ID NO: 45491 - DNA, 201 bp, Homo sapiens
tagactagatactggaactcttggaattctttttgcaaaagtatgactagaagtcagactgatgcctgtgatttgtggactgaatgctttgtgtgttaccstgtgttttcattcttgttgacccttgcctggacatggcttcagaggtgatctatctgtgagctctgagctctttagttaggcatgattctctactagagg

SEQ ID NO: 45492 - DNA, 201 bp, Homo sapiens
ggaggcacaagttgcagtgagctgatattgagccatggcactccagcctgagcaacagagtgagacactgtctcaaaaaaaaaaaaaaaaaaaaaaaaaargcaacaatatccccaggcctccttgcgtcccagaatctccatgaagctctgatgaactgagctggtgctggagaaacaaggatggctggggcatagtccc

SEQ ID NO: 45493 - DNA, 201 bp, Homo sapiens
ctgtggttttgtttttttggagacggagtctcactctgtcgcccacgctggagtgcagtggtgtgatctctgctcactgcaacctccgcctcccgggttcmagcaattctcctgcctcaccctcccgagtagctgggactacagggacccaccaccatgcccagctaatttttgcacttttagtagagatggggtttcacc

SEQ ID NO: 45494 - DNA, 201 bp, Homo sapiens
cttcatctctatagacaaattaacaaaattagctgggcaaggtaactcgctcctgtaggcccagcaacttgtgaggctgaggtaggaggattgctgagccsgggaggtcaaggctgcagtgagctgtgatcacactactgcactccagcctggacaacagagcaagacactacctaaaaaacaaacaaaccccacaaaata

SEQ ID NO: 45495 - DNA, 201 bp, Homo sapiens
gtgatctctgctcactgcaacctccgcctcccgggttccagcaattctcctgcctcaccctcccgagtagctgggactacagggacccaccaccatgcccrgctaatttttgcacttttagtagagatggggtttcaccatgttaggctggtctcgaactcctgacctcaggtgatccacccgcctcaggctcacaaagtg

SEQ ID NO: 45496 - DNA, 201 bp, Homo sapiens
ctcccgggttccagcaattctcctgcctcaccctcccgagtagctgggactacagggacccaccaccatgcccagctaatttttgcacttttagtagagayggggtttcaccatgttaggctggtctcgaactcctgacctcaggtgatccacccgcctcaggctcacaaagtgctgggattacaggcatgagccaaatcc

SEQ ID NO: 45497 - DNA, 201 bp, Homo sapiens
ccccacaaaataacaggaggctattaccatcaacaaggcaggacgatgatggaaggagcatctggagaagagttgctttctagaaataatttggagagtcrggcacggtggctcatgcttgtaattccagcactttgggaggctgaggtgggtggatcacctgaggtcaggatatcaagaccagcctggccaacatggtga

SEQ ID NO: 45498 - DNA, 201 bp, Homo sapiens
catgcccagctaatttttgcacttttagtagagatggggtttcaccatgttaggctggtctcgaactcctgacctcaggtgatccacccgcctcaggctcmcaaagtgctgggattacaggcatgagccaaatccgggcccggccaaactgtttttaaatcactctttagttgattctttgggatttttctaaggagacaa

SEQ ID NO: 45499 - DNA, 201 bp, Homo sapiens
cttcagcatcataggctatactgagtatttttgcataaataagattagatccagtacagccgaaattatcatgctttgcaaaataagttaaaaaggttcarctgctcgggagagcagggttcagaggaaggtggagtcagttctgattgagggatgagcaccagaggtcttgaaggattggactctccaggagagattcag

SEQ ID NO: 45500 - DNA, 201 bp, Homo sapiens
aatcccagcactttgggaggccgaggctggcggatcatgaggtcaggagatcgagaccatcctggctaacacagtgaaaccccgtctctactaaaaatacaaaaaaaaaaaaaaaattagctgggcgtggtggcgggcagctgtagtcccagctactcgggagtctgaggcaggagaatggcgtgaacccgggaggcggag

SEQ ID NO: 45501 - DNA, 201 bp, Homo sapiens
aatctgttttcttgcctttttaggcttctagaagctgcttgcattccttggctgacgggctcctcctcctccttaggcctgcagcatagcaagcttcacawctttctccgactctgattctcctgcctccctcctagaaggacttttgtgattacactggggctttacagcccagccaggacagccctgggggcttctggg

SEQ ID NO: 45502 - DNA, 201 bp, Homo sapiens
ttttagtagagatggggtttcaccatgttaggctggtctcgaactcctgacctcaggtgatccacccgcctcaggctcacaaagtgctgggattacaggcrtgagccaaatccgggcccggccaaactgtttttaaatcactctttagttgattctttgggatttttctaaggagacaattttatttgcaaataatggcaa

SEQ ID NO: 45503 - DNA, 201 bp, Homo sapiens
gaaagcggtctagagactcctgagtcctctgtgctggcttctgtgtgtttgctgtgagctcccttctagaaacccttccaaatggcagtcatcacactgtrttgtaattatctctttttcctactagatgatgagcttgatgtaggaagctgtacttgatctccttctgtcttcagcatcataggctatactgagtatttt

SEQ ID NO: 45504 - DNA, 201 bp, Homo sapiens
ccttttgccataaaaggcaacatattcacaggttctggggattaggacgtggccttctttggggggccattattctgcctacgatagcagatggagaggtrggaatttcagccgttataggtgtattgaagccatgggcttggaagggatcactagggagagtgtgccggcaaggaagacagtgacccagcccccagatcc

SEQ ID NO: 45505 - DNA, 201 bp, Homo sapiens
ggtgcatgccaccacacccagctaattttttaattttaattttgtggagatgaggtctccctatattgcccaggctggtctcaaactccggggctcgagcsatcttctcatcttggcctcccgaagtggtggggttacaggcataagcacctgaccttgcttttttctcccaacaagtcaaactattccctaaataggttc

SEQ ID NO: 45506 - DNA, 201 bp, Homo sapiens
atgaaccaccactcccagcctcttttttaaaaataaacaccagggtctttgtcccccaagctggagttcagtggcacagttaagggctcactgcagcctcstactcctaggctcaggtgatcctcccatcttagtctcctgagtaactgggactgttactcaggtgcatgccaccacacccagctaattttttaattttaa

SEQ ID NO: 45507 - DNA, 201 bp, Homo sapiens
gaccctgtctcaaaaaaataaataaataaataaataatgaggccgggcgcagtggctcacgcctgtaatcccagcacttcgggaggcgccgacgtgggcasatcacctgaggtcgggagcttgagagcagcctgaccaacatggagaaaccccatcttcattaaaaatacaaaattagctgggcgtggtggtgggtgcctg

SEQ ID NO: 45508 - DNA, 201 bp, Homo sapiens
cgcctcggcctcccaaagttctgggattacaggcatgaaccaccactcccagcctcttttttaaaaataaacaccagggtctttgtcccccaagctggagytcagtggcacagttaagggctcactgcagcctcctactcctaggctcaggtgatcctcccatcttagtctcctgagtaactgggactgttactcaggtgc

SEQ ID NO: 45509 - DNA, 201 bp, Homo sapiens
gagagagcgccacgctttgacttctgcaaatggcatcccccttccgcaggaagtagaaagttccctttcaagccctgggctgtcattccccctctaggccrtgggaacagacctgcagacagctgccgaggtggccaccgggagagaagtgcgaagtgcagaggctctccagccgaggagctggctgccttccttcataat

SEQ ID NO: 45510 - DNA, 201 bp, Homo sapiens
ctgacacagtcctagcaacagaaatgatacctacagcgtattgcgtgcccaccctgtgcccggcagtcctctgagtcattctgttttcatcctcaaaaccrcgccatttataagagaggaagctacagttcagagaatgtaggtcttttggttgccagtatgacaaagttcacacttttagtgttggtggctgattcgaaa

SEQ ID NO: 45511 - DNA, 201 bp, Homo sapiens
tagtcataattatattataatggcaccagaattttaccattacttgaactaggaacagattcagtatatggaatcaagggaaactttcattttattaattwattaatttatttatttatttgagatagagtcttgctctttctcccaggctggagtgcagtagcatgatctcggctcactgcaacctccgcctcccaggtt

SEQ ID NO: 45512 - DNA, 201 bp, Homo sapiens
ttttagtagagacggggtttcaccatattggccaggctggtctcaaactcctgaccttgtgatcctcccgcctcggcctcccaaagttctgggattacagkcatgaaccaccactcccagcctcttttttaaaaataaacaccagggtctttgtcccccaagctggagttcagtggcacagttaagggctcactgcagcct

SEQ ID NO: 45513 - DNA, 201 bp, Homo sapiens
cctccatggggccttttgaaatgtggctttcagaattagtcgattatgtgtaggcaagggaaatagttagcttacagagacgactagccaggccgggcgcrgtggctcacacctgtaatcccaacactttggaaggccaaggtgggtggatgacctgaggtcaggagtttgagaccaacctggtcaacatggcgaaaccct

SEQ ID NO: 45514 - DNA, 201 bp, Homo sapiens
tatcctgaggctgacagtggggaggacgaggaaggagctaccatttctgcccctgaggctgggggcagtaagattccccaggatgggtctgtgaggctggsgggttccttggtccacacagccagtcccacggtatcttgcacattccttggcacttacatacccaccaggcagtgcttctccacccacctgcccgaccaa

SEQ ID NO: 45515 - DNA, 201 bp, Homo sapiens
cataattatattataatggcaccagaattttaccattacttgaactaggaacagattcagtatatggaatcaagggaaactttcattttattaattaattwatttatttatttatttgagatagagtcttgctctttctcccaggctggagtgcagtagcatgatctcggctcactgcaacctccgcctcccaggttcaat

SEQ ID NO: 45516 - DNA, 201 bp, Homo sapiens
accatgcctggctaattgttttgtatttttagtagagacggggtttcaccatattggccaggctggtctcaaactcctgaccttgtgatcctcccgcctcrgcctcccaaagttctgggattacaggcatgaaccaccactcccagcctcttttttaaaaataaacaccagggtctttgtcccccaagctggagttcagtg

SEQ ID NO: 45517 - DNA, 201 bp, Homo sapiens
tttgaaatgtggctttcagaattagtcgattatgtgtaggcaagggaaatagttagcttacagagacgactagccaggccgggcgcggtggctcacacctrtaatcccaacactttggaaggccaaggtgggtggatgacctgaggtcaggagtttgagaccaacctggtcaacatggcgaaaccctttctctaataaaaa

SEQ ID NO: 45518 - DNA, 201 bp, Homo sapiens
gctggggggttccttggtccacacagccagtcccacggtatcttgcacattccttggcacttacatacccaccaggcagtgcttctccacccacctgcccraccaaacccactgaggaaaagcagcaggcatccgctgttgctggacgcccatcaccacgctcacaaggctgggcacagagcagacgtcaatgggcacgtg

SEQ ID NO: 45519 - DNA, 201 bp, Homo sapiens
agacgactagccaggccgggcgcggtggctcacacctgtaatcccaacactttggaaggccaaggtgggtggatgacctgaggtcaggagtttgagaccarcctggtcaacatggcgaaaccctttctctaataaaaatacaaagttagccaggcgtggtggcacatgcctgtaatcccagctacttgggaggctgaggca

SEQ ID NO: 45520 - DNA, 201 bp, Homo sapiens
aggcacggggctcagggacatagagcagtgtagcggcgtgacagcctcacagtcctgtgttgagaccggattccgtgggaccctctttcaagctgtcagarcatctttaacagaaggtcataatctcctgacagacctagcccttctagataaggggccagaatagtttcttacgaagtatttgggtgattggatagtttt

SEQ ID NO: 45521 - DNA, 201 bp, Homo sapiens
accctttctctaataaaaatacaaagttagccaggcgtggtggcacatgcctgtaatcccagctacttgggaggctgaggcaggagaatcgcttgaatcckggaggcagagatggcagtgagccgagatcgcgccattgcactccagcctggatgacagagcgagactccatctgaaaacaaacaaacaaacaaccgaaaa

SEQ ID NO: 45522 - DNA, 201 bp, Homo sapiens
tgggtctcaggaaggacatctcctgaactttctagctgagccctgccagaagagagattagactcccgaaattgggagagcctttggaaaacaaaacctgmggatgacttctaatagctgagctctgcaagtagtacacatggatataatttgcatttattatgtcccttaggtaatacacactttttagtctggtgaggg

SEQ ID NO: 45523 - DNA, 201 bp, Homo sapiens
gtggcggatgcctgtagtcccacgtactcggaaggctgaggcacaagaatcgcttgaacccgggagggggaggttgcaatgagccaagactgtgccactgmactccagcgtgggcgacagactgagactctgtctcaaaaataaataaataaataaataaaaataataatagtggtgggcgtcctctcacccctcttctcc

SEQ ID NO: 45524 - DNA, 201 bp, Homo sapiens; identical to SEQ ID NO: 8098

SEQ ID NO: 45525 - DNA, 201 bp, Homo sapiens
agagtgcttctgttgtcaagatgcttctgggacacgttaaaaaaaatttaagatttctcagtttgtgaaaaggaaggagcacgaatgctttcaagttcctrtgacatgctagtcatctttcagtgtgtcccattgttgcacccagtagtctcgatgcccagcgtcacggtgattccaagtttgcctctctgcccactataa

SEQ ID NO: 45526 - DNA, 201 bp, Homo sapiens; identical to SEQ ID NO: 8074

SEQ ID NO: 45527 - DNA, 201 bp, Homo sapiens
tgccgttcctcggcagcccagcctgcgtagacggtcccgcggcgctgactgaccgggctgtgctttctcgtcttcagcaccagcaggcagctggctccggytttggggtatctgggctccaggcagaagcacagcctccccgacctgccctacgactacggcgccctggaacctcacatcaacgcgcagatcatgcagctg

SEQ ID NO: 45528 - DNA, 201 bp, Homo sapiens
ctcctgacctcaagtgatccgtctggctcagcctcccaaagtgctgggattacaggtgtgagccactgcacctggcctatataggcttttttcttaaacctatttagtaatgttttcccaagtttattttttatttttaattttttccccaagtttatttttctatttttttttcatggaaaaatggggtaacttagcagt

SEQ ID NO: 45529 - DNA, 201 bp, Homo sapiens
gaagaaacatttattttccaattgtgtgaagtttttgactgttaataaaagaatctgtcaaccatcaaagaggtctgcattatgcttgcatgtcaaaaacwttaaaaatcctataatcttctgtcattttcactgagtttccatgggaaaggaatagtaaataatgggtagttgaaatattactcttaagaccaagacctg

SEQ ID NO: 45530 - DNA, 201 bp, Homo sapiens
cctgggcgcggggtgtacggcaagcgcgggcgggcgggacaggcacgcagggcacccccggggttgggcgcggcgggcgcggggcggggcccgcggggggrgggggcggggcggcggtgcccttgcggcgcagctggggtcgcggccctgctccccgcgctttcttaaggcccgcgggcggcgcaggagcggcactcgtgg

SEQ ID NO: 45531 - DNA, 201 bp, Homo sapiens
gaggtctgcattatgcttgcatgtcaaaaacattaaaaatcctataatcttctgtcattttcactgagtttccatgggaaaggaatagtaaataatgggtagttgaaatattactcttaagaccaagacctgtatctccagtcatatctgtaataacatcatctgataacctaaaagcatagtattagggatatacgacaa

SEQ ID NO: 45532 - DNA, 201 bp, Homo sapiens
gtaccatgctgttttggttactgcagccttgtagtatagtttgaaatcaggtagcgtgatgcctccagctttgttcttttggcttaggatcgttttggcartgcaggctcttttttggttccacatgaactttaaagtagttttttccaattctatgaagaaagtcatgggtagcttgatggggatggcattgaatctata

SEQ ID NO: 45533 - DNA, 201 bp, Homo sapiens
gaattaaaattgtgaaacttagatccaggtgtcgcattctgatgttgtctaatttcttgggccctatgacaaaaatattttaatacatgtaatataacatkttactgtaattattgaaatctgttcatttgtgggtggttttggattttttttttaataggggagttgctggaagccatcaaacgtgactttggttccttt

SEQ ID NO: 45534 - DNA, 201 bp, Homo sapiens
ttcatggggttatgtcataagattttatgttcacgccaacatagaatatcacatcaactccaccttctggtttctggatggtacttcatattagggaaagrctgagagacttcattttatgaactttttttttttgagacggagtcttacagtcgcccaggctggagcgcagtggtgcaatgtcggctcattgcaacctcc

SEQ ID NO: 45535 - DNA, 201 bp, Homo sapiens
ttttaaaattcagttagaaaagtaggctttaaaaattattagagacaagagtaccaaagcggtgtgtgtatgtgtgtgtgtgtatgcatgcttgtggattrgaaaaactttggagactgattacttttcattatatatgtgtcacagtgaaacagcttttatgtgtcatgtaagattactgcttgcctctctaaggaaggt

SEQ ID NO: 45536 - DNA, 201 bp, Homo sapiens; identical to SEQ ID NO: 8101

SEQ ID NO: 45537 - DNA, 201 bp, Homo sapiens
ttgtttataagtgattgagtacctgcagagctttcttttacttaaacatattttaaaaattattaaaaagattttcatgtttgaaaacttggggaaaaaarataaaacaatgtcataatctcatcacatttaactgactaatatgaatatttttcaacaaaaagcatttgacttttattattatttgaggcaaaaactaaa

SEQ ID NO: 45538 - DNA, 201 bp, Homo sapiens
aaaattcagttactattgatttattaaaaaacaatagaaaagttacatctatttttagagtgactctcaagaaaatttaataagggaaacacagatctataaaaaaactgtttgtaaacctaacaaaggaaaaaaaaagttggtgtctttaaaaaaccctttgagattagctgtgtattcagatatcagttggttctctcc

SEQ ID NO: 45539 - DNA, 201 bp, Homo sapiens
ggcattgcactccagcctgggcaacaagagtgaaactccgtctcaaaaggtaaaaaatgaaaaaaaaaaaaaaaaaaaaaaaaagttgaagttataaaaawcaaaaacgtgaattaaaattgtgaaacttagatccaggtgtcgcattctgatgttgtctaatttcttgggccctatgacaaaaatattttaatacatgta

SEQ ID NO: 45540 - DNA, 201 bp, Homo sapiens
ttttttttttttttttttgacggaatctcagtctgtcccgcaggttggagtgcagtgatgtgatctcggctcactacaacctccgtctcctgggttcaagyaattctcctgcctcagcctcctgagtagctgggattacaggcgtacgccaccacgcctggctactttttgtgggttttttagtagagacagggtttttcc

SEQ ID NO: 45541 - DNA, 201 bp, Homo sapiens
ctcccaaatagctgggattacaggcacataccaccatgcccagctaatttttgtgtttttagtacagacagggtttcaccatgttggccaggctggtcttraactcctgacctcaggtatctgcctgcctcggcctcctgaagtgctgggattacaggcatgagccaccatgcccagccaaatgttttacttattaaccct

SEQ ID NO: 45542 - DNA, 201 bp, Homo sapiens
gcgggtggatcacctgaggttgggagtttgagaccagcctgaccaacatggagaaacccgtctctactaaaaacacaaaattagccgggcgtgatggcacrtgcctgtaatcgcagctgctcgggaggctaaggcaggagaattgcttgaacctgggaggcagaggttgcagtgacccgagatcatggcattgcactccag

SEQ ID NO: 45543 - DNA, 201 bp, Homo sapiens
tttgtgaaaaggaaggagcacgaatgctttcaagttcctatgacatgctagtcatctttcagtgtgtcccattgttgcacccagtagtctcgatgcccagygtcacggtgattccaagtttgcctctctgcccactataatttgtgctccatgaagtcccaggacatgaggttcttgttcatttgtgcgtctgggcccata

SEQ ID NO: 45544 - DNA, 201 bp, Homo sapiens
gctactttttgtgggttttttagtagagacagggtttttccatgtcgtccaggctggtctggaactcctgacctcaagtgatccgcccatctcggcctccyaaagtgctgggattacaggcgtgagccacctcacctggccttgtatgtatgtttttttctttttctttctttttttttttctgtgacggagtattgccct

SEQ ID NO: 45545 - DNA, 201 bp, Homo sapiens
gcctgggcaacatgaagaaactctgtttctacaaaaaataaaaaaaattagccaggcatggtggtatgcacctgtagttccagcttcttgggaggctgagrtggaagaatgacatgagcccagcaagtcgctgcaatcagccgtgatcacgccgctgcactccagcctgggcgacaaaaagaaaaagaaaacggagcctgt

SEQ ID NO: 45546 - DNA, 201 bp, Homo sapiens
caggcgtgagccacctcacctggccttgtatgtatgtttttttctttttctttctttttttttttctgtgacggagtattgccctgtcgcccaggctggastgcagtggcgtgttcttggttcactgcaacctctgcctcctgggttcaagccattctcctgcctcatgctcctgagtagctgggattataggcacgcgcc

SEQ ID NO: 45547 - DNA, 201 bp, Homo sapiens
gcacgcctgtaattccagctactcgggaggctgaggcaggagaatcgcttgaacccgggaggcagaggttccagtgagccgacatcgcgacacagtactcsagcctgagcgacagagcgaggctgtgtctcaaaaataaataaataataaattaaaaaaataagagtatctataacctggtcccagcctgaatttcctttt

SEQ ID NO: 45548 - DNA, 201 bp, Homo sapiens
ttaatgagatcccatttgtcaattttggcttctgttgccattgcttttggtgttttagacatgaagtccttgcccatgcctgtgtcctgaatggtactgcmtaggttttcttctagggtttttatggttttaggtctaacatttaagtctttaatccatcttgaattaatttttgtataaggtgtaaggaagggatccagt

SEQ ID NO: 45549 - DNA, 201 bp, Homo sapiens
acaagaggatttccatttttttctaatattaatagttcatttagtctgtagcttcttgaaggcatagaaaagactattttattttgcctacttatttggcraggtacccatgcagtatgccaggagttacagggcctattgagaaggagtaaagggtctgggaggggtggcagggagttgctaattcatgtatggtggcta

SEQ ID NO: 45550 - DNA, 201 bp, Homo sapiens
atatattggtgcacccttatctacattttgtgcacagtaggaatcgattgttgatttactgaagttaccttatacttgttttttgttttttttgttgttgwttttttgagacaagagttttgctcttgttgcccaggctggagtacagtggcgcagtcttggctcactgcaacctccgcttcctgggttcaagtgattctc

SEQ ID NO: 45551 - DNA, 201 bp, Homo sapiens
actcctgacctcaagtgatccgcccatctcggcctcctaaagtgctgggattacaggcgtgagccacctcacctggccttgtatgtatgtttttttctttytctttctttttttttttctgtgacggagtattgccctgtcgcccaggctggactgcagtggcgtgttcttggttcactgcaacctctgcctcctgggttc

SEQ ID NO: 45552 - DNA, 201 bp, Homo sapiens
aaaagataaaacaatgtcataatctcatcacatttaactgactaatatgaatatttttcaacaaaaagcatttgacttttattattatttgaggcaaaaaytaaactgaaaccaaataaaatgttgaatttcagaaaagtgttcttaaaagcagatattaagccctcaatttttattaattttaaaatgagtaagcaaact

SEQ ID NO: 45553 - DNA, 201 bp, Homo sapiens
tccaggggaagtactgtttgggaaagctattattaggtaaatgttttacaaattactgtttctcactttcagtcataccctaatgatcccagcaagataaygtcctgtcttctaagatgtgcatcaagcctggtacatactgaaaaccctataaggtcctggataatttttgtttgattattcattgaagaaacatttatt

SEQ ID NO: 45554 - DNA, 201 bp, Homo sapiens
cagaggcagcagtgctcagctagccttgaggggaacatccaagttggtcatgtgagtgcaaaaaggccagtgaggctgcagctgcgtgagcacgtgctcartgacggggtcaagtgcagcgcctcttggtagtaagagtagctgagtgtaaacacctagggttcgctccagtgagaaggggagcctttggagggggcaagg

SEQ ID NO: 45555 - DNA, 201 bp, Homo sapiens
gtcataccctaatgatcccagcaagataatgtcctgtcttctaagatgtgcatcaagcctggtacatactgaaaaccctataaggtcctggataatttttktttgattattcattgaagaaacatttattttccaattgtgtgaagtttttgactgttaataaaagaatctgtcaaccatcaaagaggtctgcattatgct

SEQ ID NO: 45556 - DNA, 201 bp, Homo sapiens
ttcttctacccctgacattggaatactcttgatctgtggctcacttcacaggatagacccagattttggcagaatctgaacagctcttttgggacagtgamatggcataacaatttgtaaaagccacaaaaaatttgtaagcaccgatctgtagagtcaggttatttgtagagctgcatgaccagaaaggctgatatttgt

SEQ ID NO: 45557 - DNA, 201 bp, Homo sapiens
tacccctgacattggaatactcttgatctgtggctcacttcacaggatagacccagattttggcagaatctgaacagctcttttgggacagtgacatggcrtaacaatttgtaaaagccacaaaaaatttgtaagcaccgatctgtagagtcaggttatttgtagagctgcatgaccagaaaggctgatatttgtaagtga

SEQ ID NO: 45558 - DNA, 201 bp, Homo sapiens
cctattggaatattttctttatataggcgttttttttttttctttttttttggagacagagtcttgctctgttgcccaggctggagtgcagtggcgcgacyggagctcactgcaacctccacttcccgggttcaagtgattgtcccacctcagcctcctgaatagctgggattacaggtgcatgctaccatgcctggctac

SEQ ID NO: 45559 - DNA, 201 bp, Homo sapiens
ttttgtgactgaatcagcagtgcctgccctagtcatagctgtgcttcaaaaacctcagcatgattagtgttggagcaaaacaaggaagcaaagcaaatacwgtttttgaaattctatctgttgcttgaactattttgtaataattaaactttgatgttgagaaatcacaactttattgtacacttcattgcaacttgaaat

SEQ ID NO: 45560 - DNA, 201 bp, Homo sapiens
caaggtcggcttacttgcaaagcaagggtacggcgcaagagtactgaatacgggttggaagggcgctggctctaccctcagctcataggccggctgggcgscgctgaccagcagctaggccccgtcttccctaggaacggccacgggggccctgggagggtatgaatgtctttttgcagtgaggcctctggaccccgcggc

SEQ ID NO: 45561 - DNA, 201 bp, Homo sapiens
ccccggggttgggcgcggcgggcgcggggcggggcccgcggggggggggggcggggcggcggtgcccttgcggcgcagctggggtcgcggccctgctcccsgcgctttcttaaggcccgcgggcggcgcaggagcggcactcgtggctgtggtggcttcggcagcggcttcagcagatcggcggcatcagcggtagcacca

SEQ ID NO: 45562 - DNA, 201 bp, Homo sapiens
aaggtcggcttacttgcaaagcaagggtacggcgcaagagtactgaatacgggttggaagggcgctggctctaccctcagctcataggccggctgggcggsgctgaccagcagctaggccccgtcttccctaggaacggccacgggggccctgggagggtatgaatgtctttttgcagtgaggcctctggaccccgcggcc

SEQ ID NO: 45563 - DNA, 201 bp, Homo sapiens
ctctgtgatgtacaaactttatgttattgccggtcaacagcaggctattagtggttaagtttttggggagtcaaaagttacagtcagatttcttttcttgtttttttttttttctaaatgttttattggatttttttttttttttgagacaaggtctcactctgttacccaggcaggagtgcagtggcgcgatctcagctc

SEQ ID NO: 45564 - DNA, 201 bp, Homo sapiens
cccaggctggagtgcagtggcgcgaccggagctcactgcaacctccacttcccgggttcaagtgattgtcccacctcagcctcctgaatagctgggattayaggtgcatgctaccatgcctggctactttttgtatttttagcagagacagggtttcaccatgttggccagggtggtctcgaactcctgacctcaagtgat

SEQ ID NO: 45565 - DNA, 201 bp, Homo sapiens; identical to SEQ ID NO: 8080

SEQ ID NO: 45566 - DNA, 201 bp, Homo sapiens
ttatttttaattttttccccaagtttatttttctatttttttttcatggaaaaatggggtaacttagcagtttcaatattgaagactgaagtttaaaaaamatttaaattcaaggtacttttaaaattcagttagaaaagtaggctttaaaaattattagagacaagagtaccaaagcggtgtgtgtatgtgtgtgtgtgt

SEQ ID NO: 45567 - DNA, 201 bp, Homo sapiens
acgcctggctactttttgtgggttttttagtagagacagggtttttccatgtcgtccaggctggtctggaactcctgacctcaagtgatccgcccatctcrgcctcctaaagtgctgggattacaggcgtgagccacctcacctggccttgtatgtatgtttttttctttttctttctttttttttttctgtgacggagta

SEQ ID NO: 45568 - DNA, 201 bp, Homo sapiens
tgtgtcacccaggctggagtgcggtggcacagtctcaactcactgcaacctccacctcctgagttcaagcgattctcatgcctcagcctcccaagtagctkggattacaagtgtgcaccaccatgcccagctaatttttgtatttttagtagagatggggtttcactctgttggccaggctggtctcaaactcctgacctc

SEQ ID NO: 45569 - DNA, 201 bp, Homo sapiens
tctcaaactcctgacctcaagtcatccacccacctcagcctcccaaagtgctgagattacaggtgtgagccattgcctctggcttgtaaaggatatttcaragaatacagatgaacagccagatggaagagatgcacagggcaaggcatgtgggaaggggtatggagctttcatgctctctccacgtcatcagctacccag

SEQ ID NO: 45570 - DNA, 201 bp, Homo sapiens
attgttcaattcccatctatgagtgagaacatgcggtgtttgtttttttgtccttggaatagtttgctgagaaggatggtttccagcttcatccatgtccytataaaggacatgaactcttccttttttatggctgcatagtattccatggtgtatatgtgccacatcttcttaaaccaatctatcattgatggacatttg

SEQ ID NO: 45571 - DNA, 201 bp, Homo sapiens
ctcctgagtaactgggactgcaggtgcttgccaccatgcctggctaattttttgtttgttttgagatggagtctcgctctgttccccagactggagtgcaragtgcagtggcaggatctcagctcactgcagtctccacctcctgggttcaagtgttttttttgttttgttttttgtttgtttgtttgtttgtttgttttt

SEQ ID NO: 45572 - DNA, 201 bp, Homo sapiens
cgctctgttccccagactggagtgcagagtgcagtggcaggatctcagctcactgcagtctccacctcctgggttcaagtgttttttttgttttgtttttkgtttgtttgtttgtttgtttgtttttgacactgagtcccactctgtcgcccaggctggagtgcagtggcgagatctcagctcactgcagcctccgcctcc

SEQ ID NO: 45573 - DNA, 201 bp, Homo sapiens
gaggttgcagtgagccgagatcgcaccactgcactccagcccagcaacaaagcaagactcttgattcggaaagaaaaaataaaaaaaggttgggggagacrgtgggagcccagacttttgtccttccccttgcctagaagggagatgaggttgctggtgctgtggaagctattatggaccatgaggcagctttgaagacag

SEQ ID NO: 45574 - DNA, 201 bp, Homo sapiens; identical to SEQ ID NO: 8077

SEQ ID NO: 45575 - DNA, 201 bp, Homo sapiens
taagagtagctgagtgtaaacacctagggttcgctccagtgagaaggggagcctttggagggggcaaggcccacccccaccccccaaaactgaggggatastggcaccagtgcagtgagaaatactggtcctctgtcccaatgaggtggcagtagagttagggagaagggattaggttctgcttgtgttttatttttttct

SEQ ID NO: 45576 - DNA, 201 bp, Homo sapiens
actcaggggcaggcgccgcagccgcctagtgcagccagatccccgccggcaccctcaggggcggagccggaggcagggccttcgggccgtaccaactccamgggggcaggggccgcctcccttcggccgcgcgccactcaagtacggcagacaggcagcgaggttgccgaggccgaggctagcctgcagcctcctttctcc

SEQ ID NO: 45577 - DNA, 201 bp, Homo sapiens
cagcggcttcagcagatcggcggcatcagcggtagcaccagcactagcagcatgttgagccgggcagtgtgcgggtgagaagaaaggggacccggtcacgsccccaagggcgaaggggctcgcggcgggcagggcctccgcggcaatggcgacagtggccgcaccgggcctggcgggaccggggcacctgcaggcggttct

SEQ ID NO: 45578 - DNA, 201 bp, Homo sapiens
agcggcttcagcagatcggcggcatcagcggtagcaccagcactagcagcatgttgagccgggcagtgtgcgggtgagaagaaaggggacccggtcacggscccaagggcgaaggggctcgcggcgggcagggcctccgcggcaatggcgacagtggccgcaccgggcctggcgggaccggggcacctgcaggcggttctc

SEQ ID NO: 45579 - DNA, 201 bp, Homo sapiens
agagcacctgtgggatattggtcaagatgcctggttttagtcctgctcctttgctgtgaaagaggatcttaaggtgccaactctggcattttattttttayttatttatttttaaattatactttaagttctagggtacatgtgtacaacatgcaggtttgttacatgtatacatgtgccatgttggtgtgctgcacctat

SEQ ID NO: 45580 - DNA, 201 bp, Homo sapiens
tataaattaccttgggcagtatagccattttcacgatattgattcttcctatccatgagcatggaatgttcttccatttgtttgtgtcctcttttatttcmttgagcagtggtttgtagttctccttgaagaggtccttcacatcccttgtaagttggattcctaggtattttattctctttgaggcagttgtgaatggga

SEQ ID NO: 45581 - DNA, 201 bp, Homo sapiens
tttttttttttgagacggagtcttacagtcgcccaggctggagcgcagtggtgcaatgtcggctcattgcaacctccgcctttcaggttcatgcaattctygtgtctcagccacccaagtagctgggattacaggcatgtggcatcactcccggctaatttttatatttttggtagagacagggtttcaccatgttggcgg

SEQ ID NO: 45582 - DNA, 201 bp, Homo sapiens
tgtgtatgcatgcttgtggattggaaaaactttggagactgattacttttcattatatatgtgtcacagtgaaacagcttttatgtgtcatgtaagattaytgcttgcctctctaaggaaggtcgtgactgtttaaatagacgggcaaggtggaaccttttgaaagatgagcttttgaatataagttgtctgctagatcat

SEQ ID NO: 45583 - DNA, 201 bp, Homo sapiens
accatgcccggctaatttttttgtatttttagtagagaggagtttctccatgttggtcaggctggttttgaactcctgacctcaggtgatccacctgtctyggcctcccaaagtactaagattacaggtgtgagccaccgtgcctggccaacttattttttttctgagttcagtcttctagactatcggttaatacttttg

SEQ ID NO: 45584 - DNA, 201 bp, Homo sapiens
gttacattcttctgacgtctgtaaacaagcccagcccttcctgttgtgaagccaagttcaggtggttcctcttcgcctgactgttttcccattccacttaycggaagcctagtcatccttcggagggctgtacgggggttgcaagaagcaacggaaacggttcagcacctgctaccttccatcatattcttttcaataaag

SEQ ID NO: 45585 - DNA, 201 bp, Homo sapiens; identical to SEQ ID NO: 8081

SEQ ID NO: 45586 - DNA, 201 bp, Homo sapiens
tggctgtggtggcttcggcagcggcttcagcagatcggcggcatcagcggtagcaccagcactagcagcatgttgagccgggcagtgtgcgggtgagaagraaggggacccggtcacggccccaagggcgaaggggctcgcggcgggcagggcctccgcggcaatggcgacagtggccgcaccgggcctggcgggaccggg

SEQ ID NO: 45587 - DNA, 201 bp, Homo sapiens
ctcttttatttccttgagcagtggtttgtagttctccttgaagaggtccttcacatcccttgtaagttggattcctaggtattttattctctttgaggcarttgtgaatgggagttcactcatgatttggctctctgtttgtctgttgttggtgtataagaatgcttgtgatttttgcacattgattttgtatcctgagat

SEQ ID NO: 45588 - DNA, 201 bp, Homo sapiens
ggctcaagcgattctcctgcctcagtctcctgagtaactgggactgcaggtgcttgccaccatgcctggctaattttttgtttgttttgagatggagtctygctctgttccccagactggagtgcagagtgcagtggcaggatctcagctcactgcagtctccacctcctgggttcaagtgttttttttgttttgtttttt

SEQ ID NO: 45589 - DNA, 201 bp, Homo sapiens
agtcctgggattataggcgtgagccactgggccctgccaatttttgtatttttagtagagatggggtttcaccatgttggccaggctgatctcgatttccygacctcagatgatccgcccacctcggcctcccaaagtgttgggattacaggcgtgagccatggtgctgggcatatacgcagatttctgactgtgaaggga

SEQ ID NO: 45590 - DNA, 201 bp, Homo sapiens
tggccaggctgatctcgatttcccgacctcagatgatccgcccacctcggcctcccaaagtgttgggattacaggcgtgagccatggtgctgggcatataygcagatttctgactgtgaagggaccagcacccctgacactgcatcattcaggggtcaactgtacattcatatcccccttactacctactagctctatgtg

SEQ ID NO: 45591 - DNA, 201 bp, Homo sapiens
aagaaaaacaagagaatgtagctaaggtaattccattaatgatcagtttatgtcaaagcatgtggaaataatgccttataggaggatatttagcaacaacratttttttaaactcattttctcctgtaggtacagaattgcaagttttttctgacttcaaatgtgtatagctgactgcgtgtgtgtgtgtgtgtgtgtgtg

SEQ ID NO: 45592 - DNA, 201 bp, Homo sapiens
ctcatatttgtaatgcaattaaaatatatgttgttaactttttttttttttctcaagagctcggttgataaaaccaggggtatgtggactttttgagtctktgccttttgggggtgtgtatgggaatgttatgttttaacgttttttacaaaatagtattgtctttttaatttattcgttagtggtttgcacaaggaagat

SEQ ID NO: 45593 - DNA, 201 bp, Homo sapiens
attgcaagttttttctgacttcaaatgtgtatagctgactgcgtgtgtgtgtgtgtgtgtgtgtgtgtgtgtgtgtgtgtgtgtgtgtgtcagggtctccytctcttgcccagactggagtaaggtgacataatcatagctcattgcagccatgaactcttgggctcaagtgatcctcctgccttcagcctcctggcgtag

SEQ ID NO: 45594 - DNA, 201 bp, Homo sapiens
accactgcacctggccccatacctgactacatttctcagcttcctttgtggctaggctgtgctaggtagccttgtacctaaattttgaccagtgagcagcragtggaatttgttggatgaatctaccacaaaggatccttacaatggagatagtggggccaggcatggtggctcatgcctgtaatcccagcactttgggag

SEQ ID NO: 45595 - DNA, 201 bp, Homo sapiens
tctcccgtgccctgggcgcggggtgtacggcaagcgcgggcgggcgggacaggcacgcagggcacccccggggttgggcgcggcgggcgcggggcggggcycgcggggggggggggcggggcggcggtgcccttgcggcgcagctggggtcgcggccctgctccccgcgctttcttaaggcccgcgggcggcgcaggagcg

SEQ ID NO: 45596 - DNA, 201 bp, Homo sapiens
gacccagttgatttagttgatgtgactaatctagaattatattctgtattactacagaataaaaggattacagctcttaaagtatacccttagttcagtcrtagagaaaactgcccatcaagacaggaagagctgggctgccttggagaagaacaatgactttattcccaaatggaggcgtagaagaaggagggtagaagt

SEQ ID NO: 45597 - DNA, 201 bp, Homo sapiens
ttacaaagaaaaaaatataatgtatacagtggttgaaaaagtaggagttacaaaaaaatgtgtttgcattttaacttttcaggagatgttacagcccagayagctcttcagcctgcactgaagttcaatggtggtggtcatatcaatcatagcattttctggacaaacctcagccctaacggtggtggagaacccaaaggt

SEQ ID NO: 45598 - DNA, 201 bp, Homo sapiens
tagccttgaggggaacatccaagttggtcatgtgagtgcaaaaaggccagtgaggctgcagctgcgtgagcacgtgctcaatgacggggtcaagtgcagcrcctcttggtagtaagagtagctgagtgtaaacacctagggttcgctccagtgagaaggggagcctttggagggggcaaggcccacccccaccccccaaaa

SEQ ID NO: 45599 - DNA, 201 bp, Homo sapiens
aagaaaaaaatataatgtatacagtggttgaaaaagtaggagttacaaaaaaatgtgtttgcattttaacttttcaggagatgttacagcccagatagctyttcagcctgcactgaagttcaatggtggtggtcatatcaatcatagcattttctggacaaacctcagccctaacggtggtggagaacccaaaggttggta

SEQ ID NO: 45600 - DNA, 201 bp, Homo sapiens
gtggcgcgaccggagctcactgcaacctccacttcccgggttcaagtgattgtcccacctcagcctcctgaatagctgggattacaggtgcatgctaccaygcctggctactttttgtatttttagcagagacagggtttcaccatgttggccagggtggtctcgaactcctgacctcaagtgatccgtctggctcagcct

SEQ ID NO: 45601 - DNA, 201 bp, Homo sapiens; identical to SEQ ID NO: 8086

SEQ ID NO: 45602 - DNA, 201 bp, Homo sapiens
aaccaggggtatgtggactttttgagtctgtgccttttgggggtgtgtatgggaatgttatgttttaacgttttttacaaaatagtattgtctttttaatytattcgttagtggtttgcacaaggaagataatcgatagtcatgttttttagactctctgtattgcttggtaagctacgtagtaaaaaatgtttacttttc

SEQ ID NO: 45603 - DNA, 201 bp, Homo sapiens
gtcccacctcagcctcctgaatagctgggattacaggtgcatgctaccatgcctggctactttttgtatttttagcagagacagggtttcaccatgttggycagggtggtctcgaactcctgacctcaagtgatccgtctggctcagcctcccaaagtgctgggattacaggtgtgagccactgcacctggcctatatagg

SEQ ID NO: 45604 - DNA, 201 bp, Homo sapiens
aaaaaaaaaaaaatagtggggcgtggaggtgcacgcctgtaattccagctactcgggaggctgaggcaggagaatcgcttgaacccgggaggcagaggttscagtgagccgacatcgcgacacagtactccagcctgagcgacagagcgaggctgtgtctcaaaaataaataaataataaattaaaaaaataagagtatct

SEQ ID NO: 45605 - DNA, 201 bp, Homo sapiens
tctgatgttgtctaatttcttgggccctatgacaaaaatattttaatacatgtaatataacattttactgtaattattgaaatctgttcatttgtgggtgkttttggattttttttttaataggggagttgctggaagccatcaaacgtgactttggttcctttgacaagtttaaggagaagctgacggctgcatctgttg

SEQ ID NO: 45606 - DNA, 201 bp, Homo sapiens
ttcacaaggaaaatagccctttagtgggaaactgaaacaggcttgtttttatttactatttactcatatttgtaatgcaattaaaatatatgttgttaactttttttttttttctcaagagctcggttgataaaaccaggggtatgtggactttttgagtctgtgccttttgggggtgtgtatgggaatgttatgttttaa

SEQ ID NO: 45607 - DNA, 201 bp, Homo sapiens
tcatatttgtaatgcaattaaaatatatgttgttaactttttttttttttctcaagagctcggttgataaaaccaggggtatgtggactttttgagtctgkgccttttgggggtgtgtatgggaatgttatgttttaacgttttttacaaaatagtattgtctttttaatttattcgttagtggtttgcacaaggaagata

SEQ ID NO: 45608 - DNA, 201 bp, Homo sapiens
atgcccggctaatttttttgtatttttagtagagaggagtttctccatgttggtcaggctggttttgaactcctgacctcaggtgatccacctgtcttggsctcccaaagtactaagattacaggtgtgagccaccgtgcctggccaacttattttttttctgagttcagtcttctagactatcggttaatacttttgaag

SEQ ID NO: 45609 - DNA, 201 bp, Homo sapiens
cttctagactatcggttaatacttttgaagttttgtcagttaccagaatatcagatatattcatatgcaaccagtggttttggtatgctgccatttttgtytaatctgtaccacattccatcatttgtgcttataaagatgattacttttaaacccgtagaataagagaagtgagattttgacccagttgatttagttgat

SEQ ID NO: 45610 - DNA, 201 bp, Homo sapiens
aattttaggacaaacggatgttatagataagctggtcccattatctaatagcttacaaagaaaaaaatataatgtatacagtggttgaaaaagtaggagtyacaaaaaaatgtgtttgcattttaacttttcaggagatgttacagcccagatagctcttcagcctgcactgaagttcaatggtggtggtcatatcaatca

SEQ ID NO: 45611 - DNA, 201 bp, Homo sapiens
ggttttctgtacagtctgtatgttgagccatacattttagcattctattattttgattgtcctctttggtgtttcatttcctaaaatctcttctatctaasagatccctgagcctagcagccaggagtgaattttctagcttttccacctctgctaggtccttcatcagttgttcagcatgtctgggacaaataattttgg

SEQ ID NO: 45612 - DNA, 201 bp, Homo sapiens
gtgattctcctgcctcagcctcccaagtagctgggattacaggcgcccgccaccacgcctggctaatttttgcatttttagtagagatgaggtttcattcmccatgttggccaggctggtcttgaactcctgacctcatgatctgcccaccttggcctcccaaagtgctgggattacaggcatgagccaccgtgcctggcc

SEQ ID NO: 45613 - DNA, 201 bp, Homo sapiens
atctcctattggaatattttctttatataggcgttttttttttttctttttttttggagacagagtcttgctctgttgcccaggctggagtgcagtggcgygaccggagctcactgcaacctccacttcccgggttcaagtgattgtcccacctcagcctcctgaatagctgggattacaggtgcatgctaccatgcctgg

SEQ ID NO: 45614 - DNA, 201 bp, Homo sapiens
cttgaacctgggaggcagaggttgcagtgacccgagatcatggcattgcactccagcctgggcaacaagagtgaaactccgtctcaaaaggtaaaaaatgraaaaaaaaaaaaaaaaaaaaaaaagttgaagttataaaaaacaaaaacgtgaattaaaattgtgaaacttagatccaggtgtcgcattctgatgttgtct

SEQ ID NO: 45615 - DNA, 201 bp, Homo sapiens; identical to SEQ ID NO: 8085

SEQ ID NO: 45616 - DNA, 201 bp, Homo sapiens; identical to SEQ ID NO: 8071

SEQ ID NO: 45617 - DNA, 201 bp, Homo sapiens
ttgttttttgtttgtttgtttgtttgtttgtttttgacactgagtcccactctgtcgcccaggctggagtgcagtggcgagatctcagctcactgcagcckccgcctcccgggttcaagcgattcttctgcctcagcctcccaagtagctgggactacaggtgcgtgccaccacgcctagctaatttttgtatttttagta

SEQ ID NO: 45618 - DNA, 201 bp, Homo sapiens
taggaggatatttagcaacaacaatttttttaaactcattttctcctgtaggtacagaattgcaagttttttctgacttcaaatgtgtatagctgactgcgtgtgtgtgtgtgtgtgtgtgtgtgtgtgtgtgtgtgtgtgtgtgtgtcagggtctccttctcttgcccagactggagtaaggtgacataatcatagctca

SEQ ID NO: 45619 - DNA, 201 bp, Homo sapiens
aggaggatatttagcaacaacaatttttttaaactcattttctcctgtaggtacagaattgcaagttttttctgacttcaaatgtgtatagctgactgcgtgtgtgtgtgtgtgtgtgtgtgtgtgtgtgtgtgtgtgtgtgtgtgtcagggtctccttctcttgcccagactggagtaaggtgacataatcatagctcat

SEQ ID NO: 45620 - DNA, 201 bp, Homo sapiens
gcccttcctgttgtgaagccaagttcaggtggttcctcttcgcctgactgttttcccattccacttaccggaagcctagtcatccttcggagggctgtacrggggttgcaagaagcaacggaaacggttcagcacctgctaccttccatcatattcttttcaataaaggggcaactcccgccaatggcagtgtagatttcc

SEQ ID NO: 45621 - DNA, 201 bp, Homo sapiens
tggcatcactcccggctaatttttatatttttggtagagacagggtttcaccatgttggcggggctggtctcgaactcctggcctcaagtgatccacccaycttggcctcccaaagtgctgtggtatggatgtgagccaccgcgccagtctagaaaagatgaactttctgtctactagtttctagggcctggattagatag

SEQ ID NO: 45622 - DNA, 201 bp, Homo sapiens
tttgttttttgtttgtttgtttgtttgtttgtttttgacactgagtcccactctgtcgcccaggctggagtgcagtggcgagatctcagctcactgcagcytccgcctcccgggttcaagcgattcttctgcctcagcctcccaagtagctgggactacaggtgcgtgccaccacgcctagctaatttttgtatttttagt

SEQ ID NO: 45623 - DNA, 201 bp, Homo sapiens
tacacatattgccagcactggtgaattgtagggcctgaaaagaaagctctactgtgtcactcgttttttttgcaaattgaaattgttcttgttgtataatrtgctttggggaaatgtttggtctctcaggtaggtgtgccagccgtttgcaggagggctgagagcgcctgtccactggtggccagacatcatcgggtccgc

SEQ ID NO: 45624 - DNA, 201 bp, Homo sapiens
ggaggatatttagcaacaacaatttttttaaactcattttctcctgtaggtacagaattgcaagttttttctgacttcaaatgtgtatagctgactgcgtgtgtgtgtgtgtgtgtgtgtgtgtgtgtgtgtgtgtgtgtgtgtgtcagggtctccttctcttgcccagactggagtaaggtgacataatcatagctcatt

SEQ ID NO: 45625 - DNA, 201 bp, Homo sapiens
tccagcctaggacttggagactccctgcatccccagctaccctgcaggtgaaacttcactgagcccacttgacttcaggtgggagaggaggaggcacaccrttgtggtgtgcgttaccaaaaaagcagtaacctaactgtggaacagttcaggatctttagacttgatacttttcttgatttcccttaggggtcaaagttc

SEQ ID NO: 45626 - DNA, 201 bp, Homo sapiens
gaggatatttagcaacaacaatttttttaaactcattttctcctgtaggtacagaattgcaagttttttctgacttcaaatgtgtatagctgactgcgtgtgtgtgtgtgtgtgtgtgtgtgtgtgtgtgtgtgtgtgtgtgtgtcagggtctccttctcttgcccagactggagtaaggtgacataatcatagctcattg

SEQ ID NO: 45627 - DNA, 201 bp, Homo sapiens
gtttccagaccttctgcctttctggggctctttggtagagtatatgaaaatattcggcttggaagtgccaggctgggctcaccaaatactttgctgttgakcctaattggatttaaaaaatgtcactgaagagtatgggaaatagagccatgagttgtctggcagagggttgggactttgaacttaaagtgataccttcac

SEQ ID NO: 45628 - DNA, 201 bp, Homo sapiens
tcccagcactttggaaggccgaggcgggcagatcacttgaggtcaggcgttcgagaccatcctgaccaacatagtgaaaccccgtctctaccaaaaatacaaaaaaaaaaaaaaatagtggggcgtggaggtgcacgcctgtaattccagctactcgggaggctgaggcaggagaatcgcttgaacccgggaggcagaggt

SEQ ID NO: 45629 - DNA, 201 bp, Homo sapiens
tttttttttttctcaagagctcggttgataaaaccaggggtatgtggactttttgagtctgtgccttttgggggtgtgtatgggaatgttatgttttaacrttttttacaaaatagtattgtctttttaatttattcgttagtggtttgcacaaggaagataatcgatagtcatgttttttagactctctgtattgcttgg

SEQ ID NO: 45630 - DNA, 201 bp, Homo sapiens
cccagcactttggaaggccgaggcgggcagatcacttgaggtcaggcgttcgagaccatcctgaccaacatagtgaaaccccgtctctaccaaaaatacaaaaaaaaaaaaaaatagtggggcgtggaggtgcacgcctgtaattccagctactcgggaggctgaggcaggagaatcgcttgaacccgggaggcagaggtt

SEQ ID NO: 45631 - DNA, 201 bp, Homo sapiens
ggctattagtggttaagtttttggggagtcaaaagttacagtcagatttcttttcttgtttttttttttttctaaatgttttattggattttttttttttyttgagacaaggtctcactctgttacccaggcaggagtgcagtggcgcgatctcagctcactgcaacctttgcctcccaggctcaagcgattctcctgcct

SEQ ID NO: 45632 - DNA, 201 bp, Homo sapiens
atgttatgttttaacgttttttacaaaatagtattgtctttttaatttattcgttagtggtttgcacaaggaagataatcgatagtcatgttttttagackctctgtattgcttggtaagctacgtagtaaaaaatgtttacttttccttaaatgttttgaatttcggggttatgaaatttgttgagtaatttttagacag

SEQ ID NO: 45633 - DNA, 201 bp, Homo sapiens
agttggttctctcctttctgaatcgctaaacaactggagcttgtttcagaaagcagcattgtctacgtatgttccttttaaaaattttttttttaattctrtctaaaaaaaacagacggggtcacactatgttgcccaggctgctcttgaattcctgggctcccctatccacgcacctcggccttccagagtgctgggatt

SEQ ID NO: 45634 - DNA, 201 bp, Homo sapiens
acacatattgccagcactggtgaattgtagggcctgaaaagaaagctctactgtgtcactcgttttttttgcaaattgaaattgttcttgttgtataataygctttggggaaatgtttggtctctcaggtaggtgtgccagccgtttgcaggagggctgagagcgcctgtccactggtggccagacatcatcgggtccgca

SEQ ID NO: 45635 - DNA, 201 bp, Homo sapiens
taggtctcctccaggagcacctaatccgggggagacagagccggatgagagcttggaaccctactaagttaggactgagcaggggaagggacggcctaggrggagtggagcagccgggcactccggtaacaggaaccgtggtttgcccccacgctccttcctcctcacgcccaccaactcgcagcaggacccttgcccccc

SEQ ID NO: 45636 - DNA, 201 bp, Homo sapiens
atccccagaattgcaagcagtatccatctctctgacattcatgaagacgccctggcgggagggagtgggagagatttgcccagggactgagtgggtgtgtrctcgtgcttctgagtttggcatgagaccaccagtggcgccggtcaggccagggaggcctagtcttgcatcacactctccgcctaggctaggcaagtggtg

SEQ ID NO: 45637 - DNA, 201 bp, Homo sapiens
gccccgccgccaggtgccattggccaggccggtcagctgacacggcctggccccgcccctcccggggagcccgaccacagggccccgcccccactgggcgmgctggccccgcccctccagcagagcgcagaagtaaatattttgcatgaatcctctcagaagtaaggcagcatcgttcagccccattttgcagatgaagaa

SEQ ID NO: 45638 - DNA, 201 bp, Homo sapiens
agcaagactgtgtcaaaaaaaaaaaattcaataatcaagatccataatgcagttttttgttgttgttggtttgttttttttaagagacagagttttgctaygttgcccaggctggacttgaacttctgggctcaagcaatctttctccctcagcctcccaaatagctgggaatataggcatgtgccatcatacctggctat

SEQ ID NO: 45639 - DNA, 201 bp, Homo sapiens
tcaggtctggggccagcagggcagaaccccctagaaccctgacttgctccaaagtcagacttgctccagagtctgtggccgccaccatcaccaccaccacrgagctgacttcctgggtttctctttcactttgacttgccttagggatgggctgtgacactttactttttttcttttttcttttttttcagtcttttctcc

SEQ ID NO: 45640 - DNA, 201 bp, Homo sapiens
tgcgcctacccctcctctgtgccctcccttttaggtcctggtgggttcaaacctgcagggaaggcacacagcgggtgtctaaggcccagagaggtgttgcygcttactcaatgtcatacagaggtagggacagggtgaggttcggagcctctcacccatatgggtctggaacctcttgctggcatcctgagctcagttcca

SEQ ID NO: 45641 - DNA, 201 bp, Homo sapiens
agcttcctctcacactccaggagccttgcccatgcaggcccttccctgcctcctgcctggaatgtttgttttccacacggtccaactcctattcgtccttsaaaactcagctcaaaagttccctcctccagcaagacttctctgcctccttctggccatgcccttgtttacaactgtcccttctccctggtctgacactgc

SEQ ID NO: 45642 - DNA, 201 bp, Homo sapiens
ccaacaggaggttctttctgggcctctgcttacccgtctataaaataggaagggatttggagtccttttctcaatgggcccagcaagtttgcttagctgggccctggcctggtatttattgagcaactgctatgcaactattactccagggctcctcagagcagccattgcctcagcttctcccagcagctccaggagtca

SEQ ID NO: 45643 - DNA, 201 bp, Homo sapiens
taatgaatctcacatcccaaggtgtttgttaaatattcaaccgcgccagggaaggtggcagttcgcgagatgctggtggcaaattaatgagcagtctttarggaaaggggggccgtgaggctcaggtggcctctcactctcccgcttcctgctctgggccttgccagagccccagaaagcctcagcctcagcctgttcctt

SEQ ID NO: 45644 - DNA, 201 bp, Homo sapiens
tgcttattgagtgactgactggactgactgaatgaatgaatgcagtttttctgtggttaacacacacacacacacacacacgcacacacacaagtatatawatatatatatttgtgtttttttgttttttgtttttgagacaaaagtccagctctgttggccaggctgaagtgcagtggagcaatctcggctcactgcaac

SEQ ID NO: 45645 - DNA, 201 bp, Homo sapiens
gcccaccaccatgccgggctaattttttgtatttttagtagagacggggtttcaccgtgttagccaggatggtctcaatctcctgacctcatgatctaccygtctcggcctcccaaagtgctgggattagaggcgtgagcccccgtgcccggcctctcaaattccttttctaaggaaaaattttctgcttgaggtaactgg

SEQ ID NO: 45646 - DNA, 201 bp, Homo sapiens
caggagaatcgcttgaacccagaaggcagagattgcagtgagccgagatcgcaccagtgcactccagcctaggtaatagagtgagacttcgtctcaaaaarcaaacgaacaaacaaacaaacaaaaaaccttaggcaacatgagattacaggtggcagttatccctggggatgcaaattgtgttaatttttcttccttcag

SEQ ID NO: 45647 - DNA, 201 bp, Homo sapiens
cacagagacccaagttaccctcagtggcctgcgggctggtgtagcctacacggtgcaggtgcgagcagacacagcgtggctgaggggtgtctggagccagycccagcgcttcagcatcggtgagtggagggggtaggacccagttatttacccagcatgcactgcactgcgcttcccacaatgatcttagcagccctgccc

SEQ ID NO: 45648 - DNA, 201 bp, Homo sapiens
ggaccagagctgttttttttcttttgagatggggtctcgttctgtcgcccaggctggagtgcagtggcgtgaccacagcgcactgcagcctcgacctctcrggctcaactgttcctccttcctcagcctcctgtgcagctagaaccacaggcacgtgccaccacgctcagcttagtttatttgattatttgtagagacaga

SEQ ID NO: 45649 - DNA, 201 bp, Homo sapiens
tcccactgcagagcatcccgtgcagcccacagagacccaagttaccctcagtggcctgcgggctggtgtagcctacacggtgcaggtgcgagcagacacarcgtggctgaggggtgtctggagccagccccagcgcttcagcatcggtgagtggagggggtaggacccagttatttacccagcatgcactgcactgcgctt

SEQ ID NO: 45650 - DNA, 201 bp, Homo sapiens
cctgggcaacagagtgagactccatctcaaaaaaaaaaaaaatcttgagatgaatgggcgcattaagagaagagattttaggttgggcttggtggctcacrcctgtaatcccagcactttgggaggccgaggtgggcagatcacgaggtcaggagatcgagaccatcctggctaacacagtgaaaccccgtctctactaca

SEQ ID NO: 45651 - DNA, 201 bp, Homo sapiens
agtagctgggactacaggtgtctgcaaccacgcccggttaattttttgtattttttagtagagacggggtttcaccatgttagccaggatggtctcaatckcctgacctcgtgatctgccctcctcggcctcccaaagtgctgggattacaggcgtgagccaccgcgcccggcctactgctattttttgttttgttttgag

SEQ ID NO: 45652 - DNA, 201 bp, Homo sapiens
ctcggccttcccaaagtgctgggatacaggcatgagaccacatttctaccaaaaactgaaaaaaaaaaaaaaaaagctggatggtcgaggggcggtggctyacgccggtaatcccagccctttgggaggccgaggccagcagatcacttaaggtcaggcatttgagaccagcctggacaacatggtgaaaccccatctcta

SEQ ID NO: 45653 - DNA, 201 bp, Homo sapiens
ggagtttcaccatgttgaccaggctggtctcaaactcttgacctcaggtgaatcacccgccttggcctcccaaagggctgggattacaggtgtgagccacygtgtccggcctcgctcaggctggtttcaaacttctggcctcaaactatcctcccaccttggcctcccaaagtgctgggattagtcatgagcacccagctg

SEQ ID NO: 45654 - DNA, 201 bp, Homo sapiens
ctcagaaggctgaggcgggaggatcacttgaggccagtggtttgagaccagcccgggcaacatagtgagaccccatctctaaaaaataaaataaaatgggkctgggcgtggtggctgatgcctgtaatcccagcactttgggaggctgaggcgggcagatcacttgaggtcaggagttcgagaccagcctggccaacatgg

SEQ ID NO: 45655 - DNA, 201 bp, Homo sapiens
gacggggtttcgccatgtgggccaggctggtctcaaactcctcaggtgatccgcccaccttggccttccaaagtgctgggaatacaggcatgaaccaccaygccttgctcccactaaaattttttaaaataaattttttcttttggaataaccttcgattttcagaaaagttactatataaactggtgcagagaacgccca

SEQ ID NO: 45656 - DNA, 201 bp, Homo sapiens
atggtggcacatgcctgtaattctagctacacgggaggctgaggcaggagaatcgcttgaacccaggaggcggagattgcagtgagccgagattgtaccastgcactccagcctgggtgacagagtgagactctgtctcagaaaaaacaaaaacgaaaacaaacaaacaaaaaacaaaaacaagagaattagacttgaggg

SEQ ID NO: 45657 - DNA, 201 bp, Homo sapiens
atgcctggctaatttttatgtagagatgagggggtctcactatgttgcccaggctggtctcgaactcctgggcttaagtgatcttcctgccttggcctccyaaaatactggaattacagggtgagccaccgtatgtggcttgtgtataaatcttgactttttgatcataatataccaggcttagctgggacctgcaagtgt

SEQ ID NO: 45658 - DNA, 201 bp, Homo sapiens
caaaagtgcccgtctcttcacagccttgccagcaatgggtgttaatattttaaagttatcttcactaacaggatcctgtgtataaatctttattaaaaatkatttatttttaaattttaatttaattttaatttgttttgagacagagtcttgctctgtcacccaggccggagggcagtggtgggatcttgtctaactaca

SEQ ID NO: 45659 - DNA, 201 bp, Homo sapiens
atggggttgggggtgttgcatagggaagagatcttggaggaggggatattggtgcaagggctttgaaacatgagtaggagttttctgggggttcctggcaratggcacagccagtgcaaaggtgcagaggtgggaacacaatctactgaatggcctggcctttgcttatccttccagcaacctacagctggagtcgagagt

SEQ ID NO: 45660 - DNA, 201 bp, Homo sapiens
ggaggctgaggtgggtggatcacaaggtcaagagatcgagaccatcctggtcaacatggtgaaaccccatctctattaaaaatacaaaaattagccaggartggccacgcgcgcctgtagtcccagctactggggagactgaggcaggagaatcgcttgaacccgggaggtggaggttacagtgagctgagattgagccac

SEQ ID NO: 45661 - DNA, 201 bp, Homo sapiens
cgcgccagggaaggtggcagttcgcgagatgctggtggcaaattaatgagcagtctttagggaaaggggggccgtgaggctcaggtggcctctcactctcycgcttcctgctctgggccttgccagagccccagaaagcctcagcctcagcctgttccttgaagaatacacagcctgaggagacagaactggacacggaac

SEQ ID NO: 45662 - DNA, 201 bp, Homo sapiens
ctgcacccggcctcagttccctgtttgatgaagccactttgagtccttcttctgtccctagaaaatgaccaacaggaggttctttctgggcctctgcttayccgtctataaaataggaagggatttggagtccttttctcaatgggcccagcaagtttgcttagctgggccctggcctggtatttattgagcaactgctat

SEQ ID NO: 45663 - DNA, 201 bp, Homo sapiens
tttctctctgctagccataatgctgccaagacctggttgggttcttattatctgttctcatgactcgacatcatgtattttgccgggtgcggtggatcacrcctgtaatcccagcactttgggaggctgaggtgggtggatcacaaggtcaagagatcgagaccatcctggtcaacatggtgaaaccccatctctattaaa

SEQ ID NO: 45664 - DNA, 201 bp, Homo sapiens
acgtggctgtcatctcctcgaaccaatttggtcctggcctgaaccagacgtggcacattcctgccgacacccacacaggtgcctcctctgggtggggaggkcggtatgagggcccctcagagctgagcacctactctgagcctcagctagaccagggtgagaggagcgaggcagaaaattttaaaggagtgcctgatttag

SEQ ID NO: 45665 - DNA, 201 bp, Homo sapiens
caggctcgtcttgaactccagacctcaagtgatccacccgcctcggcctcccaaactgctgggattgcaggtgtgagccctggaggcccctggagttggcygcaaacccacccctatgcacagtcccttgggtgcgagaagtaggagacaggcaatgtttactggcagcagctgggacttttgccagagtgcatggggaag

SEQ ID NO: 45666 - DNA, 201 bp, Homo sapiens
aaaaagaattggctggacacagtggctcatgcctataatcccagcactttgggagcccgaggtgggcggatcacccccaagagacaggcacttttgtaaaktgcttaccagaattgattaccctctggcaagcaatttacaaaagtgcccgtctcttcacagccttgccagcaatgggtgttaatattttaaagttatctt

SEQ ID NO: 45667 - DNA, 201 bp, Homo sapiens
tcacaccattctcctgcctcagcctccccagtagctgggactacaggcgcccgccaccgcgcccggctaagtttttgtatttttagtagagacggggtttmaccgtggtctcgatctcctgacctcatgatccacccgcctcagcctcccaaagtgctgggattacaggcgtgagccaccgcgcccatcccacttacatgt

SEQ ID NO: 45668 - DNA, 201 bp, Homo sapiens
cccgcctcagcctcccaaagtgctgggatgacaggtgtgagccactgcacccgtccaggtctcaggatgttagagaatttaaccagcagtgacctggtccrttccatcctgctgtggatgggaagtagagctctgctcacagctgtggccctaccctccctctgcagacttggcagtggatcaacccagtggacttccagg

SEQ ID NO: 45669 - DNA, 201 bp, Homo sapiens
tttcaccatgttggccaggatggtctcgatctcctgacctcgtgatccgcctgccccgtcctcccaaagtgctgggattataggcgtgagccaccgcgccyggcgggctagggttttattcttgggttgtggggtcctggagctggagagtcaggtcctgacgggtgagaggttcagagtttattctggctgcagttcagc

SEQ ID NO: 45670 - DNA, 201 bp, Homo sapiens
gccgctgcccacaccctgtgccagctccgccattgagttccctggagggaaggaggtaaggatgccttttctaattccaagtctttttattgggtgcacaygctggacaagggttacgcattagctcattttattctctcccaattcatcaaggtaaggactccaaaaccagtgctccataccccttcccattttaaagac

SEQ ID NO: 45671 - DNA, 201 bp, Homo sapiens
cattcattcatttaagaaatcagggtccggcgcggtggctcacacctgtaatcccagcactttgggaggccaaggcgggccgatcgcttgagctcaggagytcgaggccagcctggccaacatggtgaaaccccgtctctactaaaaatacaaaaattagccaggtttggtggcacatgcctgtagtctcagctacttggg

SEQ ID NO: 45672 - DNA, 201 bp, Homo sapiens
cacgagccactgagccccagccttattcctctttttttttttttttttagatggaatctcactctgtcgcccaggaggctggagtgcagtggcgtgatctyggctcactgcaaccccacctcctgggttcaagcaattcttctgcctcagcctctggagtagctgggactgcaggcacccaccaccaagcatgcatggcta

SEQ ID NO: 45673 - DNA, 201 bp, Homo sapiens
tacgtgtgggctgcccctcgccaatccctacctctgcttccagttaaatatgagcctcctctgggagacatcaaggtgtccaagttggccgggcagctgcrtatggagtgggagaccccggataaccaggttggtgctgaggtgcagttccggcaccggacacccagcagcccatggaagttggtgagtttgtttcccaag

SEQ ID NO: 45674 - DNA, 201 bp, Homo sapiens
agccactgcgctcagcccactacagggctttatcaagtgagaatcatcaggctgaacctcacggtgtctcaaggacaatgtcacctgcaggtggcagggtktactaaacagctgctgccctgagcctgggcaacaggaaaatgagtgagagggtttcaaaccatgcagaaaggcctggcgctgtggtttatgcctgtaatc

SEQ ID NO: 45675 - DNA, 201 bp, Homo sapiens
agctgggattacaggtgtccgccaccatgcctggctaatttttgtatttttagtagagaaggggttttgccatgttggccaggctggtcttgaactcctgrcctcaaatgacttacccacctcggcctcccaaagtgctgggattacaggtgcgagccactgtgccaggcctcgaccagcattcttggtgttgactatgac

SEQ ID NO: 45676 - DNA, 201 bp, Homo sapiens
gggtgatcctggaggccctaagaggacagggcctggcctgcttctgctgagcccccaggacccagcacgtggctctgtacacagttggagctcaataagcrcatgatggttaagtgactggtgccaagtcctggacaattcttacggcctgatgttcgacctgcctctccccagagtcctgcctctgccccctggagatga

SEQ ID NO: 45677 - DNA, 201 bp, Homo sapiens
aaataattattaatttttaaaatttagttataataattttttactgctttatatgttcctaaagaaggtttgaacctagagaaggttctctagtaattaaygatagaaataatccctggaagtatggtctttaatttaaaaaaatttagcgaggtgcggtggctcacgcctgtaatcccagtgctttgggaggccgagttg

SEQ ID NO: 45678 - DNA, 201 bp, Homo sapiens
ggaatgtcttttttctgctcccagattcaatccaggatcccacattgtgtttagtaaaataattattaatttttaaaatttagttataataattttttacygctttatatgttcctaaagaaggtttgaacctagagaaggttctctagtaattaacgatagaaataatccctggaagtatggtctttaatttaaaaaaat

SEQ ID NO: 45679 - DNA, 201 bp, Homo sapiens
atcatacctcttaaatttatacaatgatataaaaaaagaatcaggccgggtatgaccacggtgcagcaagactattttatgctaatttatgtctctccttrggtcaggttccttgaaatagatctaaaaactaagtacgatttccctgatagttctaaacaaacaaacaaacaaaaaaagaattggctggacacagtggct

SEQ ID NO: 45680 - DNA, 201 bp, Homo sapiens
gctgcctgcagaaccagtgagtgctgttttcaggacccgccatatccggatgcagactcaggttcggggcagttcctcattgttggctgaggattatgtakggctctgcctgaccccatccacagcggcccctcccatggcctccaccaccaggccaaagacccagccctgcctgtggtcttgggagtccccaccccacca

SEQ ID NO: 45681 - DNA, 201 bp, Homo sapiens
gagatggagtttcgctctgtcgcccaggctggagtgcagtggcgcgatctcggctcactgcaagctctgcctcctgggttcacaccattctcctgcctcarcctccccagtagctgggactacaggcgcccgccaccgcgcccggctaagtttttgtatttttagtagagacggggtttcaccgtggtctcgatctcctga

SEQ ID NO: 45682 - DNA, 201 bp, Homo sapiens
tgaggacaagttaggaggctgaggattcggaataggttgaggtgagagacggcaggggatgaggtaggaaggacgcggggagggtttaggctgaggtgacrctgaaagatgtaagcatcacaaagatttgtcttaggcacgaagacccctccagactctggtctgttcccaagcctacaggatctcttccaggctcggcct

SEQ ID NO: 45683 - DNA, 201 bp, Homo sapiens
ggatgggtagatgggtgcatggatggatgaatacatggatggatgaatacatggatggatgggtgaatgggtggatggtgaggtggatggatggatggatrgatgggtggatggatgaatgaatacatggatggttggatagatggatgggtagatgagtggatggatggatgagtacatggatggatggatgggtagatg

SEQ ID NO: 45684 - DNA, 201 bp, Homo sapiens
ggatggatggatggatggatggatgggtagatgggtgcatggatggatgaatacatggatggatgaatacatggatggatgggtgaatgggtggatggtgrggtggatggatggatggatagatgggtggatggatgaatgaatacatggatggttggatagatggatgggtagatgagtggatggatggatgagtacatg

SEQ ID NO: 45685 - DNA, 201 bp, Homo sapiens
gtagcagattattgctttaagtcccaaaacaacccattaagtgcagtctgattagtttacagagagggaaactgaggcatagagggagtatctctgttgaracaaaactgacaaatactccactcgttgactttaccatagtcatcttagtcaggtccctaatgggctgttactataaggctgtagcaaaaatcctttatt

SEQ ID NO: 45686 - DNA, 201 bp, Homo sapiens
ggtggggtggatggatggatggatggatggatggatggatgggtagatgggtgcatggatggatgaatacatggatggatgaatacatggatggatgggtraatgggtggatggtgaggtggatggatggatggatagatgggtggatggatgaatgaatacatggatggttggatagatggatgggtagatgagtggatg

SEQ ID NO: 45687 - DNA, 201 bp, Homo sapiens
caatggttccaggaccctctgcagataccaaaatccaaagatgctcaagttcctgatataaaatggtaaagtatttgcatataacctatgcacatccttcyggatactttacttatttatttatttatttatttatttatttatttatttatttatttactgaggtagggtctcactctgtgtcccaggctggagtgcagt

SEQ ID NO: 45688 - DNA, 201 bp, Homo sapiens
tgcctcctgcctggaatgtttgttttccacacggtccaactcctattcgtccttcaaaactcagctcaaaagttccctcctccagcaagacttctctgccyccttctggccatgcccttgtttacaactgtcccttctccctggtctgacactgcggggttggggtagatgtgtcaaggtatctgggggctcttggggagg

SEQ ID NO: 45689 - DNA, 201 bp, Homo sapiens
ctggatggtcgaggggcggtggcttacgccggtaatcccagccctttgggaggccgaggccagcagatcacttaaggtcaggcatttgagaccagcctggmcaacatggtgaaaccccatctctactacaaatacaaaaattagctgggtgtggtggtgcatgtctgtaatcccagctactcaggaggctgaggcaggaga

SEQ ID NO: 45690 - DNA, 201 bp, Homo sapiens
gagaattcctacactgaactgcctcctgaacaacccctcagtgggcaagaaggagtgcttattgagtgactgactggactgactgaatgaatgaatgcagwttttctgtggttaacacacacacacacacacacacgcacacacacaagtatatatatatatatatttgtgtttttttgttttttgtttttgagacaaaag

SEQ ID NO: 45691 - DNA, 201 bp, Homo sapiens
ggctcatgtctgtaatcccagcactttgggaggctgaggtgggtggatcatctgaggtcaggagtttgagaccagcctgggcaacatggtgaaaccgcgtytctactaaaactacaaaaattaagggggcgtaatggggcacgcctgtaatccccgctactcggggggctgaggcaggagaatcacttgaacctgggaggc

SEQ ID NO: 45692 - DNA, 201 bp, Homo sapiens
tttccctgatagttctaaacaaacaaacaaacaaaaaaagaattggctggacacagtggctcatgcctataatcccagcactttgggagcccgaggtgggyggatcacccccaagagacaggcacttttgtaaattgcttaccagaattgattaccctctggcaagcaatttacaaaagtgcccgtctcttcacagccttg

SEQ ID NO: 45693 - DNA, 201 bp, Homo sapiens
acgatttccctgatagttctaaacaaacaaacaaacaaaaaaagaattggctggacacagtggctcatgcctataatcccagcactttgggagcccgaggygggcggatcacccccaagagacaggcacttttgtaaattgcttaccagaattgattaccctctggcaagcaatttacaaaagtgcccgtctcttcacagc

SEQ ID NO: 45694 - DNA, 201 bp, Homo sapiens
accatgtcgcccaggctggtcttgaactcctgagctcaggtgatggtgagccacctgcctcagcctcccaaagtgctgggattccaggaatgagccaccgygcccggccatattgtcggaacatttatgctcctaatgcaccctgaaaagggtctgaacactaagcagacacgctgtccattcttttgtttgataacgatt

SEQ ID NO: 45695 - DNA, 201 bp, Homo sapiens
aatttatgtctctccttgggtcaggttccttgaaatagatctaaaaactaagtacgatttccctgatagttctaaacaaacaaacaaacaaaaaaagaatkggctggacacagtggctcatgcctataatcccagcactttgggagcccgaggtgggcggatcacccccaagagacaggcacttttgtaaattgcttacca

SEQ ID NO: 45696 - DNA, 201 bp, Homo sapiens
tggatggatgggtagatgggtggatggtggggtggatggatgatggatgaatacatggatggatggatggatggatggatggatggatgggtgaatggatraattcatgggtggatggatgggtagatggtggacggatgaataaatacatggatggatgggtagatgggcagataaatacatgggcagatggatggatgg

SEQ ID NO: 45697 - DNA, 201 bp, Homo sapiens
tgtcacactctgggtggaatcctgggccaggaaccagacagagaagtctcctgaggtgaccctgcagctctacaactcaggttagcaccttgttctccccmcgtccgttttttacccagagaggccatcaggctgcaaggctggagctagagaggattcctggcccttggcaagggacttgatactactagccattgtcac

SEQ ID NO: 45698 - DNA, 201 bp, Homo sapiens
ggtagatgcgtggatggatggatgaatacatggatggataaatacatggatggatgggtaaatgggtggatggtggggtggatggatggatggatggatgsatggatggatgggtagatgggtgcatggatggatgaatacatggatggatgaatacatggatggatgggtgaatgggtggatggtgaggtggatggatgg

SEQ ID NO: 45699 - DNA, 201 bp, Homo sapiens
gcctgatcacagctcactgccacctccaccttccaggttcaagctattctccagcctcagccttccaagtagctgggattacaggtgttagccaccacacscggctaatttttgtatttttagtagagaccaggtttcaccatgtcgcccaggctggtcttgaactcctgagctcaggtgatggtgagccacctgcctcag

SEQ ID NO: 45700 - DNA, 201 bp, Homo sapiens
tgcatggattaatacatggattgatggatggatggatggatggatggatggatggatagatggatggggggtggatggatggatggatgaatacgtggatrgatggacggatggtggggtggatggatggatgtatgaatacgtggatggatggatggtggggcagatggatggatgagtagatggatgaatgaacacatg

SEQ ID NO: 45701 - DNA, 201 bp, Homo sapiens
gcgatctgcccaccttggcctcccaaagtgatgggattacaggcgtgagtcactgcgcccggccattcctccttttttaagatacattcacacaccatacrattcaccctcttaaagtgtacagttgacactgagcgtggtggctcatgcctgcaatcccagcattttgagaagccgaggcaggaggatcacttgagccca

SEQ ID NO: 45702 - DNA, 201 bp, Homo sapiens
tatatatatttttaagagatggggtcttgctgtgttggccagggtggtcttgaactcctgggctcaaatgatcctcctgtcttggcctcccaaagtgcttygagtacaggcgtgggcccctgtgcctggccatggatatgttaaattccttactgtagtaatcatttcactatggatatgtatatcaaaccatcatacctc

SEQ ID NO: 45703 - DNA, 201 bp, Homo sapiens
tggagtgcagtggcgtgatctcggctcactgcaaccccacctcctgggttcaagcaattcttctgcctcagcctctggagtagctgggactgcaggcaccyaccaccaagcatgcatggctaatttttgtatttttgctagggacggagtttcaccatgttggccaggctggtctcaaactcctgacctcaggcgatctgc

SEQ ID NO: 45704 - DNA, 201 bp, Homo sapiens
ctcccgaatagctggaattacaggcacatgtcaccaggcctggcaaatttttgtatttttagtagagacagggtttcgccttgttggccaggctggtctcraactcctgacctcaggtgatccgcccacctcggcctcccaaagtgttggaattacagatgtgaaccactgcacccagcccagcattatgtttttgagggt

SEQ ID NO: 45705 - DNA, 201 bp, Homo sapiens
tctcagctcactgcaacctctacctcccaggttcaagtaattctctctgcctcagcctcccgaatagctggaattacaggcacatgtcaccaggcctggcraatttttgtatttttagtagagacagggtttcgccttgttggccaggctggtctcaaactcctgacctcaggtgatccgcccacctcggcctcccaaagt

SEQ ID NO: 45706 - DNA, 201 bp, Homo sapiens
ctctgcccctcccccaggcctcacacatccatcccccagctgaccctggcctgggccccggggccagagaaggctgtcctgtatggggtcacagggcccccgtccccactgtgccaggcccaggacactgagtctttgtccctaactcactgacctcatagcctgctgggcgcctgaccctggccagctcagctgcccctc

SEQ ID NO: 45707 - DNA, 201 bp, Homo sapiens
ggtttcaccatgtttgccaggctggtctcaaactcctgacctcaggcgatccacccacctcagcctcccaaagtgctaggattacaggcatgagccactgygcccggcctaacatctatatattcttcaaaatccacttcaaattctctttgagaagtatcagaggaccttgtattgaatgaacaaatacattttattctt

SEQ ID NO: 45708 - DNA, 201 bp, Homo sapiens
agtggctctgaatatcagcgtcggaaccaacgggaccaccatgtattggccagcccgggctcagagcatgacgtattgcattgaatggcagcctgtgggcyaggacgggggccttgccacctgcagcctgactgcgccgcaagacccggatccggctggaatgggtaatggcctggaatggcctgcgcctacccctcctct

SEQ ID NO: 45709 - DNA, 201 bp, Homo sapiens
aacccaggaggcagaggttgcagtgagccgagattgcagcactgcattccagcctgtgtggcagagcaagactctatctcaataataataataataaataractttccttctctgtacactggggatcagcggggtgctgactttttcaatggctcttgagatgcactgagtgcctgtagaatgcccacagcagtgctggc

SEQ ID NO: 45710 - DNA, 201 bp, Homo sapiens
tccttgctcagcttcaatgtgttccggagtggggacggggtggctgaacctcgcaggtggcagagaggctcccctggggctgtggggctctacgtggatcygatggagccgctggtgacctgggtggtccccctcctcttcctcttcctgctgtccaggcagggcggtgagtcccctgaccctggcatggcggctcctctt

SEQ ID NO: 45711 - DNA, 201 bp, Homo sapiens
accaccaccacggagctgacttcctgggtttctctttcactttgacttgccttagggatgggctgtgacactttactttttttcttttttcttttttttcwgtcttttctccttgctcagcttcaatgtgttccggagtggggacggggtggctgaacctcgcaggtggcagagaggctcccctggggctgtggggctcta

SEQ ID NO: 45712 - DNA, 201 bp, Homo sapiens
tcttttttctgagacggagtttggctcttgttgctggagtgcaatggcgcgatcttggctcacggcaacctcccgggttcaagcgattctcctgcctcagyctcccaagtagctgggattacaggcgcccgccaccctgaccagctaaaatgtgtttgtatttttagtagaaacagggtttcaccatgttggccaggctcg

SEQ ID NO: 45713 - DNA, 201 bp, Homo sapiens
cccctctgtgcctcagttttctcatttggaaaatggcccagtgacatagggtccctggaggaatcaatgagtagcaagctcagagcctggtgctgggggaracttggatggatgggagtcaagacaatgatcaagacgtgaataataaccaccagttgaaagttgcttccaaaagacaaaaagatgtgaatattttgtttg

SEQ ID NO: 45714 - DNA, 201 bp, Homo sapiens
gcctctccagggcaccttcacccccaaatcagtctcaccatctctgcatctgtccccgctcccaaccagcccccactctagcccctgaggtggtttttttytttttctttttttttttctgagacggagccttgctctgtcgcccaggctggagtgcagtggcatgatctcagctcactgcaacctctgcctcccgggttc

SEQ ID NO: 45715 - DNA, 201 bp, Homo sapiens
cagggcaccttcacccccaaatcagtctcaccatctctgcatctgtccccgctcccaaccagcccccactctagcccctgaggtggtttttttctttttcyttttttttttctgagacggagccttgctctgtcgcccaggctggagtgcagtggcatgatctcagctcactgcaacctctgcctcccgggttcaagcgat

SEQ ID NO: 45716 - DNA, 201 bp, Homo sapiens
gcgggactgcccccccaccaacaccacgctgctcgccaatcccgccccgccccctcctttccgcccaagtcccccactcttgcctctggcctcagcgcctycagttctgccccacccccgcgcggccagagaccgggtgtctctgatctgcagctcagcccgtgccttccctgaccactcccgacctggcttcccatcacc

SEQ ID NO: 45717 - DNA, 201 bp, Homo sapiens
gtggaggttgcagtgagccgagattgcgccactggactccagcctgggtaacagagcatgattctttctcaaaaaaaaaaaaaagagagagagagagagawccttctgcctcagcctccttgagtagctgggactacagtcatgagccaccacacctggtacacttagactttcattccatgctccttcctggcttcctgc

SEQ ID NO: 45718 - DNA, 201 bp, Homo sapiens
ctcaaactcctgggctcaagagatccttcttggctgggcgcggtggctcacgcctgtaattctagcactttgggaggccgaggtgggcggatcacctgagrtcaggagtttgataccagcctggccaacatggcgaaaccccgtctctactaaaaatacaaaaattagccgggcgtggtgacatgtgcctgtaatcccagc

SEQ ID NO: 45719 - DNA, 201 bp, Homo sapiens
tatttttatttttgagatagggtctcgtgatcatggctcactatagcctcaaactcctgggctcaagagatccttcttggctgggcgcggtggctcacgcytgtaattctagcactttgggaggccgaggtgggcggatcacctgagatcaggagtttgataccagcctggccaacatggcgaaaccccgtctctactaaa

SEQ ID NO: 45720 - DNA, 201 bp, Homo sapiens
ctgattggctggggtgctcctggaccattaacaaggtttccagtcaaaagagaccccaaactggggctgatgaagacaacaccttcacgtgccagattggytagaatttctctggcttcctggtgggtacttccctctttgggcctcagtttcttcctttgaaaagtggaactaataatagcactgaccactcgggctgtt

SEQ ID NO: 45721 - DNA, 201 bp, Homo sapiens
ggagtgcagtggcctgatcacagctcactgccacctccaccttccaggttcaagctattctccagcctcagccttccaagtagctgggattacaggtgttmgccaccacacgcggctaatttttgtatttttagtagagaccaggtttcaccatgtcgcccaggctggtcttgaactcctgagctcaggtgatggtgagcc

SEQ ID NO: 45722 - DNA, 201 bp, Homo sapiens
gcctgggcaagaagagcgaaagagtgaaactccgtttcaaaaaaaaaaggccaggcgcagtggctaacacctgtaatctcagcactttgagaggccgaggygggaggatcacgaagtcagcagatggagaccatcctggctaacacggtgaaagcccgtctctgctaaaaatacaaaaaattagccgggtgtggtggcagg

SEQ ID NO: 45723 - DNA, 201 bp, Homo sapiens
tggagtgcagtggcctgatcacagctcactgccacctccaccttccaggttcaagctattctccagcctcagccttccaagtagctgggattacaggtgtyagccaccacacgcggctaatttttgtatttttagtagagaccaggtttcaccatgtcgcccaggctggtcttgaactcctgagctcaggtgatggtgagc

SEQ ID NO: 45724 - DNA, 201 bp, Homo sapiens
gtcctaggttcccagtctggctcccccactcctgcactgtgtgacccgacaagtgacttaacccctctgtgcctcagttttctcatttggaaaatggcccrgtgacatagggtccctggaggaatcaatgagtagcaagctcagagcctggtgctgggggagacttggatggatgggagtcaagacaatgatcaagacgtg

SEQ ID NO: 45725 - DNA, 201 bp, Homo sapiens
ttggagtgcagtggcctgatcacagctcactgccacctccaccttccaggttcaagctattctccagcctcagccttccaagtagctgggattacaggtgytagccaccacacgcggctaatttttgtatttttagtagagaccaggtttcaccatgtcgcccaggctggtcttgaactcctgagctcaggtgatggtgag

SEQ ID NO: 45726 - DNA, 201 bp, Homo sapiens
ctcacggcgtttagttcaagcagtcatggtgatggaaccatcaccaccatcaccgtggccattagggtctccttcttccccttccaatagttgtgggaatwttttttttttttttttttttttttttttttttgagacagcgtctggctatgtcgcccagactggaatgcagtggtgcaatcttggctcactgcaacctcc

SEQ ID NO: 45727 - DNA, 201 bp, Homo sapiens
cctgtaattccagctactcgggaggctgaggcaggagaattgcttgaacccgggaggcagaagttgcagtgagtggagatcatgccaccacactccagccygggcgacagagcagggctccatctcaaaaaaaaaaaaaaaaattggctagagagggccagagacctggccaagtgcatggaaccacaggtggcccatggg

SEQ ID NO: 45728 - DNA, 201 bp, Homo sapiens
acacacacacacacacacacacgcacacacacaagtatatatatatatatatttgtgtttttttgttttttgtttttgagacaaaagtccagctctgttgsccaggctgaagtgcagtggagcaatctcggctcactgcaacctccgcctcctggattcaagcaattctcctgcgctcagcctcccgagtagctggaatta

SEQ ID NO: 45729 - DNA, 201 bp, Homo sapiens
agcctgctgggcgcctgaccctggccagctcagctgcccctcggagccaggcttcttgaaggagggacctcctcccaggaagctgaaccgcattgcacaamcctggccacttgggcctcagtttccacagatgctcatccccaggagagaccctctccttctccctcctcagtgcccctggactctaagaatatttctttt

SEQ ID NO: 45730 - DNA, 201 bp, Homo sapiens
tgaatacatggatggatgggtgaatgggtggatggtgggatggatggatggatggatggatggattaatacatggatggatggatgaatggacgaatggayggataaatgggtggatggtggggtggatgcatggattaatacatggattgatggatggatggatggatggatggatggatggatagatggatggggggtg

SEQ ID NO: 45731 - DNA, 201 bp, Homo sapiens
tcctgagtagctgggattacagacacccgccaccactcccagctaatttttgcatttttagtagagacgggggtttcaccatgttggccaggctggtctcraactcctgacctttaagtgatccatccaccttggcctcccgaaaggctgggattgcaggtgtgagctaccgccccctgcctttgtggatatattttggtt

SEQ ID NO: 45732 - DNA, 201 bp, Homo sapiens
tcctgtatggggtcacagggcccccgtccccactgtgccaggcccaggacactgagtctttgtccctaactcactgacctcatagcctgctgggcgcctgrccctggccagctcagctgcccctcggagccaggcttcttgaaggagggacctcctcccaggaagctgaaccgcattgcacaaacctggccacttgggcct

SEQ ID NO: 45733 - DNA, 201 bp, Homo sapiens
ccccagcccatcaccccacagaaacccagacccactgtgtccatcttggtggtccccaaagcacctcctctggacttttgcctctgctgtggcctctgccrgagatgccctgtaattctatacattctagctcaagtgtccctcctccaggcagtcctccctgctccacttcagggcacccggcctccatctgttcctgat

SEQ ID NO: 45734 - DNA, 201 bp, Homo sapiens
ggaacatgggggaaagactaagttgcatctcttaaatttttttttttttttttttaagagacaggatcttgctctgttacccagactggagtgcagtggcrcaatcacgattcactgcagcctcaacctcctgggttcaagccattctcccacctcagcctcctgagtagctgagaatacagatgtgtgccaccacgactg

SEQ ID NO: 45735 - DNA, 201 bp, Homo sapiens
ctccctagtagctgggactacaggtgcccaccaccacaccaggctgattttttgtatttttggtagagatgaggtctcaccatgttggccaggcttgtctygaactcctggcctcaggtgattcacccaccttagcctcccaaagttctgggattgcaggccaaagagttttggtgttttgcctggccaaaacactaaaac

SEQ ID NO: 45736 - DNA, 201 bp, Homo sapiens
ccaggctgatctcaaaatcttgggctcaagcgatcctcctgccttggcttcccaacgtgctgggattacaggcatgagccactgcgcccagcaactctatrttttaaatttgtaaaagacaaccaggctgttttccaaagcaaacacccagttaaatttaaatttccataaacaatgaatgttttttcagtgtaagtatgc

SEQ ID NO: 45737 - DNA, 201 bp, Homo sapiens
aacataaaattaatgaaaacatttatgatgaacaaaacatcaaaacttttattttttattttatttttagagacggggatctcactatgttgcccaggctsgtcttgaactcctggcctcaaaagatccttctgcctaggcctcccaaagtgttgggattacaggtgtcagccaccgcatatggccaaaacaccaaaactt

SEQ ID NO: 45738 - DNA, 201 bp, Homo sapiens
gggttcaaacctgcagggaaggcacacagcgggtgtctaaggcccagagaggtgttgctgcttactcaatgtcatacagaggtagggacagggtgaggttyggagcctctcacccatatgggtctggaacctcttgctggcatcctgagctcagttccaggcagatcacacacatacaggtaatgaatctcacatcccaag

SEQ ID NO: 45739 - DNA, 201 bp, Homo sapiens
cttcattccgtttcatgaccaaataatattccattgtatatatgtacatgtacattttgttgatccactcatttgttggtggtcacttggattttttcacrttttggtagctattctgaatagagctgctataaacattggcatacaactttttgcatagatttatttctttatttatttattttgagatgaagtgttgct

SEQ ID NO: 45740 - DNA, 201 bp, Homo sapiens
actcagctactgtctgcctctgtacatttgcctattttggatattttatataagtggaatcatacagtgtgtgcctttcctgtccatcttcgtccacccakcatgatgggtttttttttttgtgtatgtgtgtttttttttttttgagatggagtctcactctgtcacccaggctggagtgcagtggcacgatctcagctc

SEQ ID NO: 45741 - DNA, 201 bp, Homo sapiens
ccccgtctctacttaaaatacaaaaattagctggatgtggtggcaggcgcctgtagtcccagctactcggtaggccgaggcaggagaatcccttgaacccsggaggcggaggttgcagtgagccaagaccacaccattgtactccagcctgggtgacagaatgagactccgtctcaaaaaaaaaaaaaaaaaaggtggccg

SEQ ID NO: 45742 - DNA, 201 bp, Homo sapiens
ccacaaggggtggtttgaatccatctcttcatctccagctggggcctcaggtggtctgagtgcccctggactcagtttcccaatctgtgaaataaggcaartgagggactctccaggaattggtggagttgggagggtctcaggatggtcaggagggggccatgactttcctctgatctctacctatttcctccacctttc

SEQ ID NO: 45743 - DNA, 201 bp, Homo sapiens
tctcagacgagcttctggggcagctgggtggggccataaggggcccacagggcctcttggcaggcctagagacggagggaaggaggtgggcttgccaagaygtggcaaggggaaggtgggatgtggggaacttcagagggagtgtcaggttgtgacttcaataaggggagaaataccacttcacctttgtctggggtaccc

SEQ ID NO: 45744 - DNA, 201 bp, Homo sapiens
ccctcgtgactcgatccttcctgcttcacccgcccccgagtctgtggggcacctgaaagtggggcagccctgggaacttatctcagacgagcttctggggmagctgggtggggccataaggggcccacagggcctcttggcaggcctagagacggagggaaggaggtgggcttgccaagatgtggcaaggggaaggtggga

SEQ ID NO: 45745 - DNA, 201 bp, Homo sapiens
cctacactgaactgcctcctgaacaacccctcagtgggcaagaaggagtgcttattgagtgactgactggactgactgaatgaatgaatgcagtttttctrtggttaacacacacacacacacacacacgcacacacacaagtatatatatatatatatttgtgtttttttgttttttgtttttgagacaaaagtccagct

SEQ ID NO: 45746 - DNA, 201 bp, Homo sapiens
ataatattccattgtatatatgtacatgtacattttgttgatccactcatttgttggtggtcacttggattttttcacgttttggtagctattctgaatasagctgctataaacattggcatacaactttttgcatagatttatttctttatttatttattttgagatgaagtgttgctctgatgcccaggctggagtgca

SEQ ID NO: 45747 - DNA, 201 bp, Homo sapiens
gactacaggcatgagccactgtgcctggcttagcacctgcattttttctttccctgggactcgcactttctctgcagccgcagttgtcttcggctgccccrctgtacagtgtggacactggagtatgctttcaggctcgaggggaccctaggaagggtcactgggcctgactgtccatgaggtactgtagaattgcatcaa

SEQ ID NO: 45748 - DNA, 201 bp, Homo sapiens
gacgccatcggcccctacagccaattggagggggccggaagctgctgggctgccggatgacccagctgggagggcaaggtctcccgggagaggcggggaarggtcgcgggggtgtggcgttaccccaggcctgacttcagctgctctgcgctcagaaaaccaagctgtcacgatgggaggagaataatctacccctcgaag

SEQ ID NO: 45749 - DNA, 201 bp, Homo sapiens
ggctgcagttctccgaccaggctggggtgtctgtgctgtacactgtcacactctgggtggaatcctgggccaggaaccagacagagaagtctcctgaggtvaccctgcagctctacaactcaggttagcaccttgttctccccccgtccgttttttacccagagaggccatcaggctgcaaggctggagctagagaggatt

SEQ ID NO: 45750 - DNA, 201 bp, Homo sapiens
aagcagtcctcccatctcggcctcccaaaacgctggattacaggcatgagccactgtgcctggcctgaagatgtttttttaaagtggcagagagaggtgargcaaaatcggcagctccctgcaaaggctcccggggaagctggaccacacagaactctcctggcaccactcccggacccttcggtccccgcaccatctgct

SEQ ID NO: 45751 - DNA, 201 bp, Homo sapiens
tctgcctcagcctcccaagtaagctgggattacaggcgcccaccaccacgcttggctgattttgtatttttagtagagataggatttcaccatgttggtcwggctggtcttgacctcctgacctcaagcagtcctcccatctcggcctcccaaaacgctggattacaggcatgagccactgtgcctggcctgaagatgttt

SEQ ID NO: 45752 - DNA, 201 bp, Homo sapiens
aacttcccaagaccacagcctagtggaagagatagacaacaggcaaacaaatgtctatcacaaatgtgatgatgtgttttgaagaaccagaggaggaaagytggggccctggggaccccccaaaaaaaaacaccagaggagggtgagggatagagagagaggtggcaggacatctggcctctgtgaggacaagttaggagg

SEQ ID NO: 45753 - DNA, 201 bp, Homo sapiens
aattagctggatgtggtggcaggcgcctgtagtcccagctactcggtaggccgaggcaggagaatcccttgaaccccggaggcggaggttgcagtgagccragaccacaccattgtactccagcctgggtgacagaatgagactccgtctcaaaaaaaaaaaaaaaaaaggtggccgggcgcagtggctcatgcctgtaat

SEQ ID NO: 45754 - DNA, 201 bp, Homo sapiens
ccaattggagggggccggaagctgctgggctgccggatgacccagctgggagggcaaggtctcccgggagaggcggggaagggtcgcgggggtgtggcgtyaccccaggcctgacttcagctgctctgcgctcagaaaaccaagctgtcacgatgggaggagaataatctacccctcgaaggtctctctgactgcttgaat

SEQ ID NO: 45755 - DNA, 201 bp, Homo sapiens
gtgatcctccagcctcagcctcaggctcaagccttgttgccaaggttttgccatgttgcccaggctggtctcgaactgctgagctcaaatgatccacctgmcttggcctcccaaagtgctgggattacaggcatgagccactgcacccggcctcagttccctgtttgatgaagccactttgagtccttcttctgtccctag

SEQ ID NO: 45756 - DNA, 201 bp, Homo sapiens
tttttttttttaatttatgagacgagtctctctgttgcccagactagaatgcagtggcatgatctcggcaacccctgcctcctgggttcaagctattctcrtgcctcagcctccctagtagctgggactacaggtgcccaccaccacaccaggctgattttttgtatttttggtagagatgaggtctcaccatgttggcca

SEQ ID NO: 45757 - DNA, 201 bp, Homo sapiens
ttgagctcaggagttcgaggccagcctggccaacatggtgaaaccccgtctctactaaaaatacaaaaattagccaggtttggtggcacatgcctgtagtytcagctacttgggaggctgagggctgaggtgggagaatcacctgagcctggggaggtcaaggttgcagtgagctgagatcgcgccactgcactccagcct

SEQ ID NO: 45758 - DNA, 201 bp, Homo sapiens
acaccaaaactttttttttttttttttaatttatgagacgagtctctctgttgcccagactagaatgcagtggcatgatctcggcaacccctgcctcctgrgttcaagctattctcatgcctcagcctccctagtagctgggactacaggtgcccaccaccacaccaggctgattttttgtatttttggtagagatgaggt

SEQ ID NO: 45759 - DNA, 201 bp, Homo sapiens
tgaatcctccctctttctgcccacactgccccacctccctcgcgttctgcagccgcctccccctgatccccactgcggtctgagccgaggtgtgggggggsgctcctgaaatcccaccccagccctggcgattagcgggtagtccagattctccccatggccaccaggtggcaacagcggcgcgcgtttccccggccgggc

SEQ ID NO: 45760 - DNA, 201 bp, Homo sapiens; identical to SEQ ID NO: 8106

SEQ ID NO: 45761 - DNA, 201 bp, Homo sapiens
ctgggcgcggtggctcacgcctgtaattctagcactttgggaggccgaggtgggcggatcacctgagatcaggagtttgataccagcctggccaacatggygaaaccccgtctctactaaaaatacaaaaattagccgggcgtggtgacatgtgcctgtaatcccagctactcgggaggctgaggcagggagaattacttg

SEQ ID NO: 45762 - DNA, 201 bp, Homo sapiens
ctggacaattcttacggcctgatgttcgacctgcctctccccagagtcctgcctctgccccctggagatgaatgtggcccaggaattccagctccgacgayggcagctggggagccaaggaagttcctggagcaagtggagcagccccgtgtgcgttccccctggtaagatcactctgagtacaggaacaggggcaagcat

SEQ ID NO: 45763 - DNA, 201 bp, Homo sapiens
ttttttttttgagacagcgtctggctatgtcgcccagactggaatgcagtggtgcaatcttggctcactgcaacctccgcctccagagtagctgggattgkgggcatgtgccaccacacccggctaatttttgtattttttatagagatgaggtttcaccatgttgcccaggctggtcttgaactcctggtctcaagtgat

SEQ ID NO: 45764 - DNA, 201 bp, Homo sapiens
gtggcctttctgtctgttcttttgtgaaagaaactcagatgtttttgaaacgcatcctcattatagtgtgtgtcagggtttcgttctttttgatggctgartagcattccattgtgtggatgtgtcactatttatttatccactcagccatcaatggacatttcggtggtttccattttctggctattgtggatagcgcag

SEQ ID NO: 45765 - DNA, 201 bp, Homo sapiens
cctctccttctccctcctcagtgcccctggactctaagaatatttcttttttctgtagatgcatctcacgtaacctaaaattcatctttttttttttttttgagacatagtctcactctctcacccaggtgggagtgcagtggtgtgatctcggctcactgcaacctctgcctcccgggttcaagcgattctcctgcctca

SEQ ID NO: 45766 - DNA, 201 bp, Homo sapiens
caccactcagccttgtttgcctccctttaatcctggccctggtgccaataaaactttacttacaaaagcaggtagccgctgcagttgtcagtttcttttttgaggatgattgcctttttgccctaagtgtctcataaacaccatctctcacagatatttgaagataattgttctactccattttgcaggaggggaaactga

SEQ ID NO: 45767 - DNA, 201 bp, Homo sapiens
ctggaacccagagaacaaaagagtcagggttggtggggggcaggcaggcctgggtccaggggcagccacatgtgccctatgtgcaggctcctggaattacrgagtctttttttatctttttgagacagattttccctcttattgccgaggctggaatgcaatgatgcgatctcggctcactgcaacctccgcctcccgagt

SEQ ID NO: 45768 - DNA, 201 bp, Homo sapiens
acagagtgagactctgtctcagaaaaaacaaaaacgaaaacaaacaaacaaaaaacaaaaacaagagaattagacttgagggtcttttttttttttttttwaattttatagacagggactcactctgtgcccaggctggagtgcagtggtgccatcatagctcacagcagcctcaacctcctgggctcaagcgatcctccc

SEQ ID NO: 45769 - DNA, 201 bp, Homo sapiens
cactgacctcatagcctgctgggcgcctgaccctggccagctcagctgcccctcggagccaggcttcttgaaggagggacctcctcccaggaagctgaacmgcattgcacaaacctggccacttgggcctcagtttccacagatgctcatccccaggagagaccctctccttctccctcctcagtgcccctggactctaag

SEQ ID NO: 45770 - DNA, 201 bp, Homo sapiens
tgtttttagtagagacggtgtttcaccatgttggccaggatggtctcgatctcctgacctcgtgatccgcctgccccgtcctcccaaagtgctgggattayaggcgtgagccaccgcgcctggcgggctagggttttattcttgggttgtggggtcctggagctggagagtcaggtcctgacgggtgagaggttcagagtt

SEQ ID NO: 45771 - DNA, 201 bp, Homo sapiens
gacagagtgagaccctgtctcaaaaaaaaaaaaaaaaaaagtacaattcagtggtttttgtacaatcacaaggttgtgcagccatcactcatacctaattstagaacattttcatctccccaaaaagaaaaccttgtgccatcagtagccactccccgttcccctcccccagcccctggcagccactaatctgcttcctgt

SEQ ID NO: 45772 - DNA, 201 bp, Homo sapiens
cccaagaggttgaggctgcagtgaaccgtaattgcaccactgcactccagcctgagtgacagagtgagaccctgtctcaaaaaaaaaaaaaaaaaaagtayaattcagtggtttttgtacaatcacaaggttgtgcagccatcactcatacctaattctagaacattttcatctccccaaaaagaaaaccttgtgccatca

SEQ ID NO: 45773 - DNA, 201 bp, Homo sapiens
ccatgcccggctaatctttttctgtttttagtagagacggtgtttcaccatgttggccaggatggtctcgatctcctgacctcgtgatccgcctgccccgkcctcccaaagtgctgggattataggcgtgagccaccgcgcctggcgggctagggttttattcttgggttgtggggtcctggagctggagagtcaggtcct

SEQ ID NO: 45774 - DNA, 201 bp, Homo sapiens
ccaccatgcccggctaatctttttctgtttttagtagagacggtgtttcaccatgttggccaggatggtctcgatctcctgacctcgtgatccgcctgccycgtcctcccaaagtgctgggattataggcgtgagccaccgcgcctggcgggctagggttttattcttgggttgtggggtcctggagctggagagtcaggt

SEQ ID NO: 45775 - DNA, 201 bp, Homo sapiens
agaggggccagaagagggagtgcaaaggccctgaggttgctggtggggaatggacgggggatgggggaagaggttgtagcccacgtgaggctgggggcatrtggaccagagctgttttttttcttttgagatggggtctcgttctgtcgcccaggctggagtgcagtggcgtgaccacagcgcactgcagcctcgacctct

SEQ ID NO: 45776 - DNA, 201 bp, Homo sapiens
ggcgcccgccaccatgcccggctaatctttttctgtttttagtagagacggtgtttcaccatgttggccaggatggtctcgatctcctgacctcgtgatcygcctgccccgtcctcccaaagtgctgggattataggcgtgagccaccgcgcctggcgggctagggttttattcttgggttgtggggtcctggagctggag

SEQ ID NO: 45777 - DNA, 201 bp, Homo sapiens
tggagtgcagtggcgcgatctaggctcactgcaagctctgccttccgggttcacgccattctcctgcctcagcctcccgagtagctaggactacaggcgcycgccaccatgcccggctaatctttttctgtttttagtagagacggtgtttcaccatgttggccaggatggtctcgatctcctgacctcgtgatccgcctg

SEQ ID NO: 45778 - DNA, 201 bp, Homo sapiens
caccatgcctggctaatttttgtatttttagtagagaaggggttttgccatgttggccaggctggtcttgaactcctggcctcaaatgacttacccacctyggcctcccaaagtgctgggattacaggtgcgagccactgtgccaggcctcgaccagcattcttggtgttgactatgacaatggtactggttgcagcctca

SEQ ID NO: 45779 - DNA, 201 bp, Homo sapiens
gatccttccacctcagcctctggagtagctgggactacagacatgcaccaccacacctggttaattttttatttttattttttgtagagacaggtgtctcyctacgttgcccaggctggtctcgaactcctgggctcaagtgatccacccatctccacctcccaaagtgctaggattacaggcgtgagccaccgtacccag

SEQ ID NO: 45780 - DNA, 201 bp, Homo sapiens
cgtctctactaaaaatacaaaaattagccaggtttggtggcacatgcctgtagtctcagctacttgggaggctgagggctgaggtgggagaatcacctgarcctggggaggtcaaggttgcagtgagctgagatcgcgccactgcactccagcctgggtgacaaggtgagaccctgtctcaaaaaaaaaaaaaaaaaagcc

SEQ ID NO: 45781 - DNA, 201 bp, Homo sapiens
agaattggctgggcgcagtggctcacgcctgtaatcccagcactttgggaggccaaggcgggcggatcacctgaggtcaggagttcaagaccagcctgacmaacttggagaaaccccgtctctcctaaaaatacaaaattagccgggcatggtggcacatgcctgtaattctagctacacgggaggctgaggcaggagaat

SEQ ID NO: 45782 - DNA, 201 bp, Homo sapiens
gcgcccaccatcatgcctggctaatttttgtagttttagtagaaacagggtttccccatgttcctcaggctagtctcgaactcctgaccttaagtgatctrcccaccttggcctcccaatatgctgggattgcaggcatgagccatcgtggctgggctttttttttttttaaagacagggtcttgctctgttgcccaggct

SEQ ID NO: 45783 - DNA, 201 bp, Homo sapiens
tcaagggctggcgcctggcacggaggtcacttaccgactacagctccacatgctgtcctgcccgtgtaaggccaaggccaccaggaccctgcacctggggwagatgccctatctctcgggtgctgcctacaacgtggctgtcatctcctcgaaccaatttggtcctggcctgaaccagacgtggcacattcctgccgacac

SEQ ID NO: 45784 - DNA, 201 bp, Homo sapiens
tcctggtcataaggggctcttagctgggtggggaaggcagacactaatctaattatcactcagagagttatgagaaaccgtaagagtgatgagtggggatrtgaggagtagccagtgagggagggcttcctggaggaggcaatgctaggaccaaggtggtaaagaggggccagaagagggagtgcaaaggccctgaggttg

SEQ ID NO: 45785 - DNA, 201 bp, Homo sapiens
gatactactagccattgtcacttcacgtagtgtcacgcaaacactattgtgacaaagcagtctttcatggtccccttaccaatcccctattcgtgggcacktagattgcttctggtttctctctgctagccataatgctgccaagacctggttgggttcttattatctgttctcatgactcgacatcatgtattttgccgg

SEQ ID NO: 45786 - DNA, 201 bp, Homo sapiens
tagccagtgagggagggcttcctggaggaggcaatgctaggaccaaggtggtaaagaggggccagaagagggagtgcaaaggccctgaggttgctggtggrgaatggacgggggatgggggaagaggttgtagcccacgtgaggctgggggcatatggaccagagctgttttttttcttttgagatggggtctcgttctgt

SEQ ID NO: 45787 - DNA, 201 bp, Homo sapiens
gcagacactaatctaattatcactcagagagttatgagaaaccgtaagagtgatgagtggggatgtgaggagtagccagtgagggagggcttcctggaggrggcaatgctaggaccaaggtggtaaagaggggccagaagagggagtgcaaaggccctgaggttgctggtggggaatggacgggggatgggggaagaggtt

SEQ ID NO: 45788 - DNA, 201 bp, Homo sapiens
ttagctgggtggggaaggcagacactaatctaattatcactcagagagttatgagaaaccgtaagagtgatgagtggggatgtgaggagtagccagtgagrgagggcttcctggaggaggcaatgctaggaccaaggtggtaaagaggggccagaagagggagtgcaaaggccctgaggttgctggtggggaatggacggg

SEQ ID NO: 45789 - DNA, 201 bp, Homo sapiens
attagcgggtagtccagattctccccatggccaccaggtggcaacagcggcgcgcgtttccccggccgggcccgccctgcctcctcccaccgcgtttgctmaacagacttttccggtttcagacagaggaggggagttaaaaagcccagaactactgaattttgtggcaaaaaaaggatgagacctctcggggagagaccc

SEQ ID NO: 45790 - DNA, 201 bp, Homo sapiens; identical to SEQ ID NO: 8119

SEQ ID NO: 45791 - DNA, 201 bp, Homo sapiens; identical to SEQ ID NO: 8121

SEQ ID NO: 45792 - DNA, 201 bp, Homo sapiens
gtcacatgaccattgctagagctgaggtggggtcactgcactgtcaaccacaccatctgtgaaaagagggagggaaatttcccaaagacagatgggagtgytcttcctaagaggggctgaatgggagtcagtgcggcagactccatcctcaaatcggtctcaggatatatggagtctcgctctgtcacccagcctggagtg

SEQ ID NO: 45793 - DNA, 201 bp, Homo sapiens
gtgtattggattcatccatgggaagctgcccctcacatgtagcagcagctgaactctcatcaagcagggatgactgtctccattccacagatgaggaaacyaaggcctggaggggggatctgatgagggacaggaaagcccacaaaacagggtttagccaggagggtttttggctttccccaggaaagagttcaagtgcat

SEQ ID NO: 45794 - DNA, 201 bp, Homo sapiens
gtgaccctgggcaccttgccgtccttctctgggccttggttatcaaacccttaaaacaagagaattggctgggcgcagtggctcacgcctgtaatcccagyactttgggaggccaaggcgggcggatcacctgaggtcaggagttcaagaccagcctgaccaacttggagaaaccccgtctctcctaaaaatacaaaatta

SEQ ID NO: 45795 - DNA, 201 bp, Homo sapiens; identical to SEQ ID NO: 8104

SEQ ID NO: 45796 - DNA, 201 bp, Homo sapiens
gctggaatgggtaatggcctggaatggcctgcgcctacccctcctctgtgccctcccttttaggtcctggtgggttcaaacctgcagggaaggcacacagygggtgtctaaggcccagagaggtgttgctgcttactcaatgtcatacagaggtagggacagggtgaggttcggagcctctcacccatatgggtctggaac

SEQ ID NO: 45797 - DNA, 201 bp, Homo sapiens
gtgggaacacaatctactgaatggcctggcctttgcttatccttccagcaacctacagctggagtcgagagtctggggcaatggggcaggaaaagtgttaytacattaccatctttgcctctgcgcaccccgagaagctcaccttgtggtctacggtcctgtccacctaccactttgggggcaatggtaagtgacccaaac

SEQ ID NO: 45798 - DNA, 201 bp, Homo sapiens
tgggcaacatagcaagaccccgtctctacagaaagaaaaaagtttgccagccatggtggcatgtgcctgtagtcccaactactcaggaggctgaggtggtmagatcacttgatcccaggagtttgaggctgcagtgagctatgattgcaccactgcaatcatacaacctctgcctcccgggttcaagccattctccttcct

SEQ ID NO: 45799 - DNA, 201 bp, Homo sapiens
cctcagcctcccaaatagctgggaatataggcatgtgccatcatacctggctattatgcattattaaagaacaacaacaaaaactagctgagccactgcgytccaccctggttgatagagctacactctttttcaaaaaagaaaaaagagagaaagaaagaaaaaaggctagagttgaccctgtgtttatttaagatctaa

SEQ ID NO: 45800 - DNA, 201 bp, Homo sapiens
ctgggcaacatagcaagaccccgtctctacagaaagaaaaaagtttgccagccatggtggcatgtgcctgtagtcccaactactcaggaggctgaggtggkaagatcacttgatcccaggagtttgaggctgcagtgagctatgattgcaccactgcaatcatacaacctctgcctcccgggttcaagccattctccttcc

SEQ ID NO: 45801 - DNA, 201 bp, Homo sapiens
ccactttgggggcaatggtaagtgacccaaacctgcaggtttacattattttttctttttaaataatttaaaaaaatagaggctgggcacagtgactcacrcatgtaatcccagcactttgggaggccaaggtgggtggatcacctgaggtcaggagtttgaaaccagcctggccaatgtggcgaaaccctgtctctacta

SEQ ID NO: 45802 - DNA, 201 bp, Homo sapiens
cgtgagccactgtacccgtgggctaggtttttttttttttttgagatggagtctcgctctgttgcccaggctggagtgcagtggcgcgatctaggctcacygcaagctctgccttccgggttcacgccattctcctgcctcagcctcccgagtagctaggactacaggcgcccgccaccatgcccggctaatctttttctg

SEQ ID NO: 45803 - DNA, 201 bp, Homo sapiens
attccctaccaaatccctacaaccaccccctgaaaggaaccatgactgttgtactttacagatgtgatcgttgaggctcagagagggtgagtgactcgccygaggctacgtagcacacacaggagtcacatttggacccaaataacccagagctcctccaggctccagtgcacctgcctcctctctgccccgtgcctgttg

SEQ ID NO: 45804 - DNA, 201 bp, Homo sapiens
ggaggtcaggagttcgagaccagcctgggcaacacggtgaaaccccatctccaccaaaaaataataataaattagccaggaaatggtggcgcatgcctgtrgtcccagctactcaggaggctgaggcaggagactcatttgaacccgggaggctgaggttgcagggagccgagatcatgccactgcactccagcctgggcg

SEQ ID NO: 45805 - DNA, 201 bp, Homo sapiens
gagattgtgccactacactccagcctgggcgacagagcgagactccgtctcaaaaaataaataaataaataaataaataaataaatatttttttttatttwttgtttcttttttgagacagggtctcactctgttgcccaggctggagtgcagtagcaccatcttggctcactgcaacctccacttcctaggatcgagtga

SEQ ID NO: 45806 - DNA, 201 bp, Homo sapiens
gaagctctcatggtgaatatcctggcaaggagacagcagttaggctggaggaggactcagctcattcaaacaccacctgctgactggatgcggcggattaygcctgtaatcccagcactttgggaagccaaggcaggtggatcactggaggtcaggagttcgagaccagcctgggcaacacggtgaaaccccatctccacc

SEQ ID NO: 45807 - DNA, 201 bp, Homo sapiens
gtgagccgagattgtgccactacactccagcctgggcgacagagcgagactccgtctcaaaaaataaataaataaataaataaataaataaatattttttwttattttttgtttcttttttgagacagggtctcactctgttgcccaggctggagtgcagtagcaccatcttggctcactgcaacctccacttcctaggat

SEQ ID NO: 45808 - DNA, 201 bp, Homo sapiens
agatggagtttcaccatgttgcccaggctggtctcaaactcctgccctcaggtgatccacccacctcagcctctcaaagtgctgggattacaggtgtgagycactgtggccgacctactatttttattatttttgagctaggttctcagtctgttggcagactggagtgcaatcatggctcactgcagccttgaactccca

SEQ ID NO: 45809 - DNA, 201 bp, Homo sapiens
tttgagacaagcccggccaacatggtgaaaccccgtctctactaaaaatacaaaaattagctgggcgtggtggcaagcgcctataatcccagctacttggkaggctgaggcgggagaatcgcttgaacctggaagggggtggttgcagtgagccgagattgtgccactacactccagcctgggcgacagagcgagactccg

SEQ ID NO: 45810 - DNA, 201 bp, Homo sapiens
gccaccatacccggctaattttgtatttttagtagagacggggtttcaccacgttggccaggctggtctcgaactcctgacctcaagtgatccacctgccwtggcctcccaaagtgttgggattataggcgtgagccaccatgcccagcctaatttttgtatttttagtagagatggagtttcaccatgttgcccaggctg

SEQ ID NO: 45811 - DNA, 201 bp, Homo sapiens
tctgagagaggagcctgcagggaggacagcagcaccgagatgaagcattagttcctggatccagccatacctgaaacccaatattttccatctggttcctstttttaaaaaatattttaggccgggcatggtggctcacgcctgtaatcccagcactttgggaggcagaggcgggctgatcacctgaggtcaggagtttga

SEQ ID NO: 45812 - DNA, 201 bp, Homo sapiens
acttgggaggctgaggcaggagaatcgcttgaacccaggagccagaggttgcagtgagccaaaattgtgccattgcactccagcctgggcaacaaagagcragactgtgtcaaaaaaaaaaaattcaataatcaagatccataatgcagttttttgttgttgttggtttgttttttttaagagacagagttttgctatgtt

SEQ ID NO: 45813 - DNA, 201 bp, Homo sapiens
tcctcctttcttttttctgagacggagtttggctcttgttgctggagtgcaatggcgcgatcttggctcacggcaacctcccgggttcaagcgattctccygcctcagcctcccaagtagctgggattacaggcgcccgccaccctgaccagctaaaatgtgtttgtatttttagtagaaacagggtttcaccatgttggc

SEQ ID NO: 45814 - DNA, 201 bp, Homo sapiens
acctactctgagcctcagctagaccagggtgagaggagcgaggcagaaaattttaaaggagtgcctgatttaggggtgtatcaaaaattcagtaatcagcyaggcacggtggctcacacctgtaatcccagcactttgggaggctaagacaggtgaatcacctgaggtcagcagttcgagaccagtctggccaacgtggtg

SEQ ID NO: 45815 - DNA, 201 bp, Homo sapiens
agagacggggtttcaccgtgttagccaggatggtctcaatctcctgacctcatgatctacccgtctcggcctcccaaagtgctgggattagaggcgtgagmccccgtgcccggcctctcaaattccttttctaaggaaaaattttctgcttgaggtaactgggttaaaagatggaaacatttttgttttcctgaatgtcag

SEQ ID NO: 45816 - DNA, 201 bp, Homo sapiens
aaatcatacaatatgtggcctttctgtctgttcttttgtgaaagaaactcagatgtttttgaaacgcatcctcattatagtgtgtgtcagggtttcgttcyttttgatggctgaatagcattccattgtgtggatgtgtcactatttatttatccactcagccatcaatggacatttcggtggtttccattttctggctat

SEQ ID NO: 45817 - DNA, 201 bp, Homo sapiens; identical to SEQ ID NO: 8141

SEQ ID NO: 45818 - DNA, 201 bp, Homo sapiens
gggcctcacctggagcccgcggcgccgcaggaggctcgactcgtccatggcccgggagtccgcgccgccaggcccgcccccggccccgccccggcctgccmggccccgccgccaggtgccattggccaggccggtcagctgacacggcctggccccgcccctcccggggagcccgaccacagggccccgcccccactgggc

SEQ ID NO: 45819 - DNA, 201 bp, Homo sapiens
cacctgtaatcccagcactttgggaggccgaggtgggcagatcacgaggtcaggagatcgagaccatcctggctaacacagtgaaaccccgtctctactamaaatacaaaaaattagctgggcgtggtggcgggcgcctgtagtctcagctactcgggaggctgaggcaggagaatggtgtgaacccaggaggcagagctt

SEQ ID NO: 45820 - DNA, 201 bp, Homo sapiens
atttattgagcaactgctatgcaactattactccagggctcctcagagcagccattgcctcagcttctcccagcagctccaggagtcaggatggtgttagyccccatttcacagctcagtttcattcattcatttaagaaatcagggtccggcgcggtggctcacacctgtaatcccagcactttgggaggccaaggcggg

SEQ ID NO: 45821 - DNA, 201 bp, Homo sapiens
ttttttgagacaggatctcactctgtcacccaggctgcagtgcagtggcgtgatctcggatcactgcaacctctgcctcccgggttcaagcgatcatcctygtgcttcagcttcccaagtagctgggattacaggctcttgccaccatgcccggctaatttttgtatgtttactagagacagagtttcaccatgttggcca

SEQ ID NO: 45822 - DNA, 201 bp, Homo sapiens
cactgcagcctcgacctctcgggctcaactgttcctccttcctcagcctcctgtgcagctagaaccacaggcacgtgccaccacgctcagcttagtttatytgattatttgtagagacagagtctcaccatattgcctgggctgatctcaaactcctaggctcaagtgatcctcctgtcttggcctctcaatgtgctggga

SEQ ID NO: 45823 - DNA, 201 bp, Homo sapiens
ctgggggcatatggaccagagctgttttttttcttttgagatggggtctcgttctgtcgcccaggctggagtgcagtggcgtgaccacagcgcactgcagsctcgacctctcgggctcaactgttcctccttcctcagcctcctgtgcagctagaaccacaggcacgtgccaccacgctcagcttagtttatttgattatt

SEQ ID NO: 45824 - DNA, 201 bp, Homo sapiens
ttgcctcagcttctcccagcagctccaggagtcaggatggtgttagcccccatttcacagctcagtttcattcattcatttaagaaatcagggtccggcgyggtggctcacacctgtaatcccagcactttgggaggccaaggcgggccgatcgcttgagctcaggagttcgaggccagcctggccaacatggtgaaaccc

SEQ ID NO: 45825 - DNA, 201 bp, Homo sapiens
agccattgcctcagcttctcccagcagctccaggagtcaggatggtgttagcccccatttcacagctcagtttcattcattcatttaagaaatcagggtcyggcgcggtggctcacacctgtaatcccagcactttgggaggccaaggcgggccgatcgcttgagctcaggagttcgaggccagcctggccaacatggtga

SEQ ID NO: 45826 - DNA, 201 bp, Homo sapiens
gtttgatgaagccactttgagtccttcttctgtccctagaaaatgaccaacaggaggttctttctgggcctctgcttacccgtctataaaataggaagggrtttggagtccttttctcaatgggcccagcaagtttgcttagctgggccctggcctggtatttattgagcaactgctatgcaactattactccagggctcc

SEQ ID NO: 45827 - DNA, 201 bp, Homo sapiens
gaggtggcaggacatctggcctctgtgaggacaagttaggaggctgaggattcggaataggttgaggtgagagacggcaggggatgaggtaggaaggacgyggggagggtttaggctgaggtgacgctgaaagatgtaagcatcacaaagatttgtcttaggcacgaagacccctccagactctggtctgttcccaagcct

SEQ ID NO: 45828 - DNA, 201 bp, Homo sapiens
  misc_feature (101)..(101): n is a, c, g, or t
tctggaacctcttgctggcatcctgagctcagttccaggcagatcacacacatacaggtaatgaatctcacatcccaaggtgtttgttaaatattcaaccncgccagggaaggtggcagttcgcgagatgctggtggcaaattaatgagcagtctttagggaaaggggggccgtgaggctcaggtggcctctcactctccc

SEQ ID NO: 45829 - DNA, 201 bp, Homo sapiens
tctgaatatcagcgtcggaaccaacgggaccaccatgtattggccagcccgggctcagagcatgacgtattgcattgaatggcagcctgtgggccaggacsggggccttgccacctgcagcctgactgcgccgcaagacccggatccggctggaatgggtaatggcctggaatggcctgcgcctacccctcctctgtgccc

SEQ ID NO: 45830 - DNA, 201 bp, Homo sapiens
gccagagaaggggactggggagagagatggcaactgtctcgatgcgtctctcccctctccttccagaaccagtggctctgaatatcagcgtcggaaccaaygggaccaccatgtattggccagcccgggctcagagcatgacgtattgcattgaatggcagcctgtgggccaggacgggggccttgccacctgcagcctga

SEQ ID NO: 45831 - DNA, 201 bp, Homo sapiens
tacttgaacccgggaggtggaggttgcagtgagccgagattgcgccactggactccagcctgggtaacagagcatgattctttctcaaaaaaaaaaaaaaragagagagagagagatccttctgcctcagcctccttgagtagctgggactacagtcatgagccaccacacctggtacacttagactttcattccatgctc

SEQ ID NO: 45832 - DNA, 201 bp, Homo sapiens
tgcgtctctcccctctccttccagaaccagtggctctgaatatcagcgtcggaaccaacgggaccaccatgtattggccagcccgggctcagagcatgacrtattgcattgaatggcagcctgtgggccaggacgggggccttgccacctgcagcctgactgcgccgcaagacccggatccggctggaatgggtaatggcc

SEQ ID NO: 45833 - DNA, 201 bp, Homo sapiens
tcgatgcgtctctcccctctccttccagaaccagtggctctgaatatcagcgtcggaaccaacgggaccaccatgtattggccagcccgggctcagagcaygacgtattgcattgaatggcagcctgtgggccaggacgggggccttgccacctgcagcctgactgcgccgcaagacccggatccggctggaatgggtaat

SEQ ID NO: 45834 - DNA, 201 bp, Homo sapiens
acaattcttacggcctgatgttcgacctgcctctccccagagtcctgcctctgccccctggagatgaatgtggcccaggaattccagctccgacgacggcrgctggggagccaaggaagttcctggagcaagtggagcagccccgtgtgcgttccccctggtaagatcactctgagtacaggaacaggggcaagcattaga

SEQ ID NO: 45835 - DNA, 201 bp, Homo sapiens
ctccaaagaaaaaacaaaaaaaaacaaacgccatctgctacccactttgtgcctggccccaaggcagcctccagtgcagggaaacagccaaacacagacayccctggccctgtagggtcaggggtatagacgagagggtgggagagaggctgcaggagccagagaaggggactggggagagagatggcaactgtctcgatg

SEQ ID NO: 45836 - DNA, 201 bp, Homo sapiens
aatggcctggaatggcctgcgcctacccctcctctgtgccctcccttttaggtcctggtgggttcaaacctgcagggaaggcacacagcgggtgtctaagkcccagagaggtgttgctgcttactcaatgtcatacagaggtagggacagggtgaggttcggagcctctcacccatatgggtctggaacctcttgctggca

SEQ ID NO: 45837 - DNA, 201 bp, Homo sapiens; identical to SEQ ID NO: 8120

SEQ ID NO: 45838 - DNA, 201 bp, Homo sapiens
cttttctttttttttttttttttttgagacaggatctcactctgtcacccaggctgcagtgcagtggcgtgatctcggatcactgcaacctctgcctcccrggttcaagcgatcatcctcgtgcttcagcttcccaagtagctgggattacaggctcttgccaccatgcccggctaatttttgtatgtttactagagacag

SEQ ID NO: 45839 - DNA, 201 bp, Homo sapiens
tagatgcccacccagtgggagtagcacgcagtgagctttatttaggtgctgctttgaatggcaggcttgcatacaagggaagtccctcatagcataagccytttggaggctgaggttccaggagtcaccatcaagagggagaggccggcaagggaactccccgggcagagggggatcagagagggggcttacatgtctagg

SEQ ID NO: 45840 - DNA, 201 bp, Homo sapiens
ccctcgtaaggctctgggctttctctaggcggtgtggtcccagatggcagcagagagaagggcagaatctttggaacctgggcagcctgggtgcttttttwtttttttgagattagatctcactctgtcactcaggctggagtggagttgcacaatcttggctcactgcaacctccgcctcccaggctcaagcgatcctcc

SEQ ID NO: 45841 - DNA, 201 bp, Homo sapiens
agtttcacgagtctgcaaagcagacaggctctcagtggctaaaattttgcttacttggtctgtgtgtaaaacaaacggatgtgtaaaactttgagtttggygctagcggtcttttaaaagagctagaccaggtgcggaggcactttgggaggccaaggtaggaggatcgcttgaggccaggagttcgagaccagcctgggc

SEQ ID NO: 45842 - DNA, 201 bp, Homo sapiens
tggcagcagagagaagggcagaatctttggaacctgggcagcctgggtgcttttttatttttttgagattagatctcactctgtcactcaggctggagtgsagttgcacaatcttggctcactgcaacctccgcctcccaggctcaagcgatcctcccacctcagcctcccgagtagccggaaccacaggcatgtgccatc

SEQ ID NO: 45843 - DNA, 201 bp, Homo sapiens
agcagagagaagggcagaatctttggaacctgggcagcctgggtgcttttttatttttttgagattagatctcactctgtcactcaggctggagtggagtwgcacaatcttggctcactgcaacctccgcctcccaggctcaagcgatcctcccacctcagcctcccgagtagccggaaccacaggcatgtgccatcatgc

SEQ ID NO: 45844 - DNA, 201 bp, Homo sapiens
ttcttcatctgcaaaatggggctgaacgatgctgccttacttctgagaggattcatgcaaaatatttacttctgcgctctgctggaggggcggggccagckcgcccagtgggggcggggccctgtggtcgggctccccgggaggggcggggccaggccgtgtcagctgaccggcctggccaatggcacctggcggcggggc

SEQ ID NO: 45845 - DNA, 201 bp, Homo sapiens
gccttgtatttttttattttgttttgttgttttaatttgcttttgttttagccattttgttttttcttttttttttttttgagacagagtctcgctctttygcccaggctggagtgcagtggcgcgatctctgctcactgcaagctccgcctcccgggttcacgccattctcctgcctcagcctcccaagtagctgggatt

SEQ ID NO: 45846 - DNA, 201 bp, Homo sapiens
ctttggaacctgggcagcctgggtgcttttttatttttttgagattagatctcactctgtcactcaggctggagtggagttgcacaatcttggctcactgmaacctccgcctcccaggctcaagcgatcctcccacctcagcctcccgagtagccggaaccacaggcatgtgccatcatgcccggctaatttttatacttt

SEQ ID NO: 45847 - DNA, 201 bp, Homo sapiens
gcagaagaacagttattaggcaatgactgtgtacctggcccagaacactttatctttatttatttatttattttttgagacagggacagtctttgtctccygggctggagtacagtggcgcagtcttggctcactgcaacctccgcctaccgggttcaagcaatattcctgcctcagcttcccgagtagctgggattacag

SEQ ID NO: 45848 - DNA, 201 bp, Homo sapiens
ggggtttcaccgtgttagccaggatggtctcgatctcctgacctcgtgatccacctgcctcggcctcccaaagtgctgggattacaggcgtgagccaccgygcccggcctgttttagccattttaaggcaatttccgaggcaggcggatcacttgaggtcaggagttcaagaccagcctgactaacatggtgaagccctgt

SEQ ID NO: 45849 - DNA, 201 bp, Homo sapiens
gttgcagtgagccgagattgctccactgcacttcagcctggccaacagagctggacttttgtctcaaaaacaaaaaacaaaaaaacacaaatatatatatwtatatacttgtgtgtgtgcgtgtgtgtgtgtgtgtgtgtgttaaccacagaaaaactgcattcattcattcagtcagtccagtcagtcactcaataagca

SEQ ID NO: 45850 - DNA, 201 bp, Homo sapiens
acagtgggatatgaggaccccacatccctcttcaaagacccttggccatcaccacttgccaggggtgtgccaggtgtagagaatcgggggcaccgagcccmctcagtgactgctgtttgatgggcagggagtgtgggctctggccggggaaactgtggcccaggttgcaaggaggaggctaagaggtgctgcatgctcggc

SEQ ID NO: 45851 - DNA, 201 bp, Homo sapiens
tagagatggggtttcaccatgttgtccaggctggtctcaaatgcctgaccttaagtgatctgctggcctcggcctcccaaagggctgggattaccggcgtragccaccgcccctcgaccatccagctttttttttttttttttcagtttttggtagaaatgtggtctcatgcctgtatcccagcactttgggaaggccgag

SEQ ID NO: 45852 - DNA, 201 bp, Homo sapiens
ttgtagagacggggtttcactctgttgcccaggctagtttcaaactcctgaactcaagtgatccatccgccttggcctcccaaagtgccagaattacaggygtgagccaccgcacccggcctactctggctaatttttttaaaaagttttgtagagatgtagtcttgctatgttgcccaatctggcttaaacttctgggct

SEQ ID NO: 45853 - DNA, 201 bp, Homo sapiens; identical to SEQ ID NO: 8182

SEQ ID NO: 45854 - DNA, 201 bp, Homo sapiens
ccacatcccacgcatggacaggtaatttcaaccagcccagggggtggggggtcatggggggatatagccctaagaatcattaactcactaaagaaatcatkcattcattcacttaacaagagctgattgagcacctgtcatgtgccagacgcttgcatttcatttatttattcatacaacaacattcattaagcacccact

SEQ ID NO: 45855 - DNA, 201 bp, Homo sapiens
gtgaaactccgtctctactaaaaatacaaaaaaattagctgggcgtggtggtgcaacacctgtaatcccagcttctcgggaggctgagacaggagaatcgyttgaacccaggaggcggaggctgcagtaagctgagactgcgccattgcattccagcctgggcaacgagagcgaaactctgtctcaaaaaaaaaaaatttg

SEQ ID NO: 45856 - DNA, 201 bp, Homo sapiens
acctgggcagcctgggtgcttttttatttttttgagattagatctcactctgtcactcaggctggagtggagttgcacaatcttggctcactgcaacctcygcctcccaggctcaagcgatcctcccacctcagcctcccgagtagccggaaccacaggcatgtgccatcatgcccggctaatttttatacttttggtaga

SEQ ID NO: 45857 - DNA, 201 bp, Homo sapiens
cgtcctctatgagtttctggtgggctgcgtgcctttctttggagatacccccgaggaactcttcggtcaggtggtcagcggtgcgtttcctccatgggccygggtttgagctgcagccccaccagagctctgggcagcggtcctccacccgcatgtcagggagagaagcaggaagaggggagggagttggatgccaggtgg

SEQ ID NO: 45858 - DNA, 201 bp, Homo sapiens
atggtggtacatgcctgtaatcccagctatttgggaggctgaggcacgagaattgcttgaacccaggaggtggaggttgcagtgagctgagatggcactaytgcactccagcttgcgcaacaagagcaaaactgcctgaaaaaaaaaaaaagatgcgcaattttacctaattctgtgtgacccatttcaaggaatcactga

SEQ ID NO: 45859 - DNA, 201 bp, Homo sapiens
aagtgacatgtgagcagagacctgcaagaacctgagaatgagagaaagccatagagacagaaaagagaaaggtggctctgagcatagggcacagctgtggsaaaggctgtcagtgggtaccaagcctgccacgttgcaggggcagaggaggccagtggcttggagtacagtgaagtgaggggaaatggtggatggtactag

SEQ ID NO: 45860 - DNA, 201 bp, Homo sapiens
gtctccaactcctgaactcaagtgatcctcccacctcagcctcccaaagtgctaggaattgtattggttttttgttttgttttgtttgagatggagtctcrctctgttgcccaggctggagtgcaatggcgcagtctcggctcaccgcaacctctgccttccaggttcaagcgattctcctgcctcagcctgccgagtagc

SEQ ID NO: 45861 - DNA, 201 bp, Homo sapiens
agtgaccccctccctaaccccctgcagatgatggcagcggcggccccctcatgagccccctttccccgcgctctctgtcctcgaacccgtcgtcccgtgaytcttcgccgagccgagacccgtcccccgtgtgtggcagcctgcggccccccatcgttatccacagctctggcaagaagtacggcttcagcctgcgggcga

SEQ ID NO: 45862 - DNA, 201 bp, Homo sapiens
agcgctgggattacagacatgagccatcgcacccggccttgtatttttttattttgttttgttgttttaatttgcttttgttttagccattttgttttttyttttttttttttttgagacagagtctcgctctttcgcccaggctggagtgcagtggcgcgatctctgctcactgcaagctccgcctcccgggttcacgcc

SEQ ID NO: 45863 - DNA, 201 bp, Homo sapiens
ggccgcatggcacgcaggagcaagaggagccgtcggcgggagacccaggatcggtgcgcggcagtgaccaccagggagcggtacacagggggcggggccayggggactggggttctttttttcttttctttttcctttttttttttttttttttgagacagagtcttgctctgttgcccaggctggagtgcagtggctcaa

SEQ ID NO: 45864 - DNA, 201 bp, Homo sapiens
tgatgcacatttgggtctattccaccttgtgaatacaggtaccattttagtttatttacttatttatttatttattgagatggagtcttgctctgttgccsaggctggagtgcaatagtgcaatctcagctcactgcaacctccaccttctgggttcaagcgattctcctgcctcagcctcccgagtagctgggattacag

SEQ ID NO: 45865 - DNA, 201 bp, Homo sapiens
gtctaaactcccaaggcctccattgggcactgagcacattcggttatttccagaaacgctccgcggtcttggggatcagcctcagttgtgccagtgcggcsgtagagagtgttcggccatttccgaaagcgctcgggcgtctctaagcccagccgagcccagtctcggatccctcgccgacccgattgcactcggctacct

SEQ ID NO: 45866 - DNA, 201 bp, Homo sapiens
cgtctctactaaaaatacaaaaaaattagctgggcgtggtggtgcaacacctgtaatcccagcttctcgggaggctgagacaggagaatcgtttgaacccrggaggcggaggctgcagtaagctgagactgcgccattgcattccagcctgggcaacgagagcgaaactctgtctcaaaaaaaaaaaatttgtctctttag

SEQ ID NO: 45867 - DNA, 201 bp, Homo sapiens
gtctattccaccttgtgaatacaggtaccattttagtttatttacttatttatttatttattgagatggagtcttgctctgttgcccaggctggagtgcartagtgcaatctcagctcactgcaacctccaccttctgggttcaagcgattctcctgcctcagcctcccgagtagctgggattacaggtgcgcgccaccac

SEQ ID NO: 45868 - DNA, 201 bp, Homo sapiens
ggagtgcaatagtgcaatctcagctcactgcaacctccaccttctgggttcaagcgattctcctgcctcagcctcccgagtagctgggattacaggtgcgygccaccacacccggctaatttttgtatttttagtagcgaccaggtttcaccatgttgcccaggctggtctcaaactcctgtcctcaagcgatccgcctgc

SEQ ID NO: 45869 - DNA, 201 bp, Homo sapiens
tttttttttgaaacagagtctcgctctgtctcctaggctggagtgcagtggcacaatctcggctcactgcaacctccgccttctgggttcaagccattctyctgcctcagccttccaagtagctgggactacaggcatgtgccaccacacccagctaatttttgtatttttagtagagacgggttttcaccatgttgacca

SEQ ID NO: 45870 - DNA, 201 bp, Homo sapiens
gtgagctgagatcgcgccactgcgctccaacctgggcgacagagcgagaccctgtctcaaaaaaacaaaaaaagaaagggcagatgaagccaggattcaarcccaggcccatccgattccagaaccaccgcactgttctttgtctctctgtggccttgctcttaggtcacctgtgggaattatgctgagaccctctgatct

SEQ ID NO: 45871 - DNA, 201 bp, Homo sapiens
cccggctcgcccacccacagcctctcccccagccccaccactccctgccgaagcccagcccctgatgtcccagcaggtgggtgcaccccgaccccccaccrccccggctaccctgggagcaagggctggtgggccccaggagggaggaaggagctcaggggatggaatgacacgatgtagggaaaaagatgaccgggatcc

SEQ ID NO: 45872 - DNA, 201 bp, Homo sapiens
cccagcccctgatgtcccagcaggtgggtgcaccccgaccccccaccgccccggctaccctgggagcaagggctggtgggccccaggagggaggaaggagytcaggggatggaatgacacgatgtagggaaaaagatgaccgggatcctggtgtctagcagggaacctgggagtacttagagacgaatgcaggtgccaggg

SEQ ID NO: 45873 - DNA, 201 bp, Homo sapiens
tctcctgcctcagcctcctgagtagctgggattacagacatgcaccaccacacccagctaatttttgtatttgtagtagagatggggtttcaccatgttgkccaggctggtctcaaatgcctgaccttaagtgatctgctggcctcggcctcccaaagggctgggattaccggcgtaagccaccgcccctcgaccatccag

SEQ ID NO: 45874 - DNA, 201 bp, Homo sapiens
cttttgtctcaaaaacaaaaaacaaaaaaacacaaatatatatatatatatacttgtgtgtgtgcgtgtgtgtgtgtgtgtgtgtgttaaccacagaaaawctgcattcattcattcagtcagtccagtcagtcactcaataagcactccttcttgcccactgaggggttgttcaggaggcagttcagtgtaggaattctc

SEQ ID NO: 45875 - DNA, 201 bp, Homo sapiens
gcctcccaggttcaagtgattctcctgcctcagccccccgagtagcggggattacaggcgtgccccattacgcccccttaatttttgtagttttagtagaracgcggtttcaccatgttgcccaggctggtctcaaactcctgacctcagatgatccacccacctcagcctcccaaagtgctgggattacagacatgagcc

SEQ ID NO: 45876 - DNA, 201 bp, Homo sapiens
ccaaatgaagggaggccctgcctggaatggggcttcgaatagtaccgaggggcgcccaggcattgtgcggggcagaatggggtgcgggagggccgggggtygaacccacttccggtcccctagccgggtggccgggtccacgcagacccaagtgcgcgtctgtgtgagcgctcaggccctgccttcacccgcggagccccc

SEQ ID NO: 45877 - DNA, 201 bp, Homo sapiens
tttcagtagagatggtgtttcaccatgttggccaggctggtctcaaactcttgacctcatgatctgcccgcctcggcctcctaaagcgctgggattacagrcatgagccatcgcacccggccttgtatttttttattttgttttgttgttttaatttgcttttgttttagccattttgttttttcttttttttttttttga

SEQ ID NO: 45878 - DNA, 201 bp, Homo sapiens
ggcctcttggtggatagcacctatccttatagccaccctgaatccttgacaagcaacttaacccactgccaaggctttgcatgtgccgttccgtctgcctrtcgcgccttcctatccgctgtgatgatccattctctagaacagcacgtccatcccccgaccctagccctgtccatcacagggcgtctgaacccgcagggc

SEQ ID NO: 45879 - DNA, 201 bp, Homo sapiens
cctcagtttccccatctgtaacaggggtgatgaaaagcctgtttactggccgggcgcggtggctcacacctgtaatcccaacactttggaaggcagaggcrggaggactgcttcagcccaggagtttgggaccaacctgggcaacatagcaagaccccacctctattggaaaaaaaaaaaaaaaggctgggcaaggtggct

SEQ ID NO: 45880 - DNA, 201 bp, Homo sapiens
gatgaaaagcctgtttactggccgggcgcggtggctcacacctgtaatcccaacactttggaaggcagaggcgggaggactgcttcagcccaggagtttgsgaccaacctgggcaacatagcaagaccccacctctattggaaaaaaaaaaaaaaaggctgggcaaggtggctcatgcctgtaatcccagcactttgggag

SEQ ID NO: 45881 - DNA, 201 bp, Homo sapiens
aagaataaaatgtatttgttcattcaatacaaggtcctctgatacttctcaaagagaatttgaagtggattttgaagaatatatagatgttaggccgggcrcagtggctcatgcctgtaatcctagcactttgggaggctgaggtgggtggatcgcctgaggtcaggagtttgagaccagcctggcaaacatggtgaaacc

SEQ ID NO: 45882 - DNA, 201 bp, Homo sapiens
caaacaaaatattcacatctttttgtcttttggaagcaactttcaactggtggttattattcacgtcttgatcattgtcttgactcccatccatccaagtytcccccagcaccaggctctgagcttgctactcattgattcctccagggaccctatgtcactgggccattttccaaatgagaaaactgaggcacagagggg

SEQ ID NO: 45883 - DNA, 201 bp, Homo sapiens
ttcctccctgcaggctgaggtcctggacatcctctggatcctcctgtcagtcatcttcgtcccagcccgagcggggtcccagcccatctctcctgaatacyatcagcctggacacaatgcccaagtttgccttctcatcagaggatgagggggtaggcccaggccctgcaggccccaagaggcccgtcttcattctagggg

SEQ ID NO: 45884 - DNA, 201 bp, Homo sapiens
cctcccgagtagctgggaatacaggcaccagccaccacacccggctaatttttgtgtttttagaagagatggggttttgccatgctggccagactggtctygaactcctgacctcaggtgatcctcccttcttggcctcccaaagtgctgggattacaggtgtgagccactgcgcccggcccatttttctggttctgtgtt

SEQ ID NO: 45885 - DNA, 201 bp, Homo sapiens
tgttcatccttcaaagctcagacccaacagaaacagtcaatgtctgctagaggatgggtgttggaagctggccttttttttttttttttttttttgagacrgagtctcgctctgtcgcacaggctggagtgcagtggcgcaatctcggctcactgcaagctccgcctcccgggttcacgccattctcctgcctcagcctcc

SEQ ID NO: 45886 - DNA, 201 bp, Homo sapiens
ccaagaatctagggcgtgtgtcggccgccccctggctggatttcctgtgtgtctgggctcaggaggccacagcatccctcaggcttcagaaggagaaaccraggcaccaagtgtggcagacccttgtctggggttccccagcaagttgggcctcctgggtgtccgtccctgaccaggcatggggccccatctgttacccag

SEQ ID NO: 45887 - DNA, 201 bp, Homo sapiens; identical to SEQ ID NO: 8179

SEQ ID NO: 45888 - DNA, 201 bp, Homo sapiens
tctactaaaactccaaaaatttagccgggcatagtggtgcacgcctgtaatcccagctacttgggaggcttaggcacgagaattgcttgaccctgggaggyggaggttacagtgagccaagatcgtgccactgcactccggccggggtgacagagcgagactctgtctcaaaaaaaaaaacaaaacaaaaaacaaaaaatt

SEQ ID NO: 45889 - DNA, 201 bp, Homo sapiens
actgcactccggccggggtgacagagcgagactctgtctcaaaaaaaaaaacaaaacaaaaaacaaaaaattgcagagatggggtctccttatgttgcccrccctggtctcgaactcctggcctcaaacaatcctcctgtctcagcctcccaaagtgctggaattataggtgtcagccactgcacccagcctggaagctgg

SEQ ID NO: 45890 - DNA, 201 bp, Homo sapiens
catcacggcaggtaatgcccaaggcccctctcacctttgtctgtctgcacccattttcaccaacagggtgggggcccttcctgagttggggaggctggggrtgagccccagaagaggggaggaggagtaggacacatggagagctggggagatggtgttcccagtagagggcactgcacgtgcaaaggcctggtggggtga

SEQ ID NO: 45891 - DNA, 201 bp, Homo sapiens
ggttctttttttcttttctttttcctttttttttttttttttttgagacagagtcttgctctgttgcccaggctggagtgcagtggctcaatctcggctcmctgcaacctccacctcccgggttcaagcgactgtcctgcctcagccccctaagtaactgggactacggcgtgcaccatcatgcccagctaatttttatat

SEQ ID NO: 45892 - DNA, 201 bp, Homo sapiens
ggtgatgggaagccaggtcgggagtggtcagggaaggcacgggctgagctgcagatcagagacacccggtctctggccgcgcgggggtggggcagaactgraggcgctgaggccagaggcaagagtgggggacttgggcggaaaggagggggcggggcgggattggcgagcagcgtggtgttggtgggggggcagtcccgc

SEQ ID NO: 45893 - DNA, 201 bp, Homo sapiens
caggtgccagggaaggatgcacccagcagaggaaacatcatggacaaatggggctagacaggagggtgggaaaactgagaagaggccaggcgcggaggctyacgcctgtaatcccaacactttgggagcccgaggcaggaggatcactgagcccaggagtttgagaccagcctgggcaacacagggagaccccatctgtac

SEQ ID NO: 45894 - DNA, 201 bp, Homo sapiens
gcaggaagccaggaaggagcatggaatgaaagtctaagtgtaccaggtgtggtggctcatgactgtagtcccagctactcaaggaggctgaggcagaaggwtctctctctctctctcttttttttttttttgagaaagaatcatgctctgttacccaggctggagtccagtggcgcaatctcggctcactgcaacctccac

SEQ ID NO: 45895 - DNA, 201 bp, Homo sapiens; identical to SEQ ID NO: 8175

SEQ ID NO: 45896 - DNA, 201 bp, Homo sapiens
tcagaggctcagcctagcttcatcctgccttttgcagacagggtcccttgaagaacccctttggagaccctgatttccaaaatgaagccacaaggagggtrggatgtgggctgctcagctgaggccacacagcacagtgggatatgaggaccccacatccctcttcaaagacccttggccatcaccacttgccaggggtgt

SEQ ID NO: 45897 - DNA, 201 bp, Homo sapiens
atccctcgccgacccgattgcactcggctacctctggaaacgctcggctgtctcgggggcaccctctagtccaccagtcccgcgggattacgttcggctayttccggaaacactcgggtgcccccttacctcaggctccgcctcggcctcggttcatccgcccggctcgaatgcgctcgggcatttccgccgggggcgggc

SEQ ID NO: 45898 - DNA, 201 bp, Homo sapiens
gctgggattacaggcacatgtcaccacgcccggctaatttttgtatttttagtagagacggggtttcgccatgttggccaggctggtatcaaactcctgayctcaggtgatccgcccacctcggcctcccaaagtgctagaattacaggcgtgagccaccgcgcccagccaagaaggatctcttgagcccaggagtttgag

SEQ ID NO: 45899 - DNA, 201 bp, Homo sapiens
ctcacacctgtaatcccaacactttggaaggcagaggcgggaggactgcttcagcccaggagtttgggaccaacctgggcaacatagcaagaccccacctytattggaaaaaaaaaaaaaaaggctgggcaaggtggctcatgcctgtaatcccagcactttgggaggccaaggcgagcagatcacttgaggtcaggagtt

SEQ ID NO: 45900 - DNA, 201 bp, Homo sapiens
tttagtagagacggggtttcgccatgttggccaggctggtatcaaactcctgatctcaggtgatccgcccacctcggcctcccaaagtgctagaattacargcgtgagccaccgcgcccagccaagaaggatctcttgagcccaggagtttgaggctatagtgagccatgatcacgagaccctatctcaaaaataaaaata

SEQ ID NO: 45901 - DNA, 201 bp, Homo sapiens
ctcctaaagcgctgggattacagacatgagccatcgcacccggccttgtatttttttattttgttttgttgttttaatttgcttttgttttagccattttkttttttcttttttttttttttgagacagagtctcgctctttcgcccaggctggagtgcagtggcgcgatctctgctcactgcaagctccgcctcccgggt

SEQ ID NO: 45902 - DNA, 201 bp, Homo sapiens
aacagcccgagtggtcagtgctattattagttccacttttcaaaggaagaaactgaggcccaaagagggaagtacccaccaggaagccagagaaattctarccaatctggcacgtgaaggtgttgtcttcatcagccccagtttggggtctcttttgactggaaaccttgttaatggtccaggagcaccccagccaatcag

SEQ ID NO: 45903 - DNA, 201 bp, Homo sapiens
cctgccaccacacccggctaattttttgtatttttagcagagacgggctttcaccgtgttagccaggatggtctccatctgctgacttcgtgatcctcccrcctcggcctctcaaagtgctgagattacaggtgttagccactgcgcctggccttttttttttgaaacggagtttcactctttcgctcttcttgcccaggc

SEQ ID NO: 45904 - DNA, 201 bp, Homo sapiens
cacgtcttgatcattgtcttgactcccatccatccaagtctcccccagcaccaggctctgagcttgctactcattgattcctccagggaccctatgtcacygggccattttccaaatgagaaaactgaggcacagaggggttaagtcacttgtcgggtcacacagtgcaggagtgggggagccagactgggaacctaggac

SEQ ID NO: 45905 - DNA, 201 bp, Homo sapiens
ggaggttgcagtgagccaagattgcaccactgcattccagtctgggcgacatagccagacgctgtctcaaaaaaaaaaaaaaaaaaaaaaaaaaaaaaaawattcccacaactattggaaggggaagaaggagaccctaatggccacggtgatggtggtgatggttccatcaccatgactgcttgaactaaacgccgtgag

SEQ ID NO: 45906 - DNA, 201 bp, Homo sapiens
taattccagctactcgggaggctgagcgcaggagaattgcttgaatccaggaggcggaggttgcagtgagccgagattgctccactgcacttcagcctggscaacagagctggacttttgtctcaaaaacaaaaaacaaaaaaacacaaatatatatatatatatacttgtgtgtgtgcgtgtgtgtgtgtgtgtgtgtgt

SEQ ID NO: 45907 - DNA, 201 bp, Homo sapiens
aaccaaaatatatccacaaaggcagggggcggtagctcacacctgcaatcccagcctttcgggaggccaaggtggatggatcacttaaaggtcaggagttygagaccagcctggccaacatggtgaaacccccgtctctactaaaaatgcaaaaattagctgggagtggtggcgggtgtctgtaatcccagctactcagga

SEQ ID NO: 45908 - DNA, 201 bp, Homo sapiens
gttttagtgttttggccaggcaaaacaccaaaactctttggcctgcaatcccagaactttgggaggctaaggtgggtgaatcacctgaggccaggagttcragacaagcctggccaacatggtgagacctcatctctaccaaaaatacaaaaaatcagcctggtgtggtggtgggcacctgtagtcccagctactagggag

SEQ ID NO: 45909 - DNA, 201 bp, Homo sapiens
gcatacttacactgaaaaaacattcattgtttatggaaatttaaatttaactgggtgtttgctttggaaaacagcctggttgtcttttacaaatttaaaayatagagttgctgggcgcagtggctcatgcctgtaatcccagcacgttgggaagccaaggcaggaggatcgcttgagcccaagattttgagatcagcctgg

SEQ ID NO: 45910 - DNA, 201 bp, Homo sapiens
aagttttggtgttttggccatatgcggtggctgacacctgtaatcccaacactttgggaggcctaggcagaaggatcttttgaggccaggagttcaagacsagcctgggcaacatagtgagatccccgtctctaaaaataaaataaaaaataaaagttttgatgttttgttcatcataaatgttttcattaattttatgtt

SEQ ID NO: 45911 - DNA, 201 bp, Homo sapiens
agcaacacttcatctcaaaataaataaataaagaaataaatctatgcaaaaagttgtatgccaatgtttatagcagctctattcagaatagctaccaaaaygtgaaaaaatccaagtgaccaccaacaaatgagtggatcaacaaaatgtacatgtacatatatacaatggaatattatttggtcatgaaacggaatgaag

SEQ ID NO: 45912 - DNA, 201 bp, Homo sapiens
cggccaccttttttttttttttttttgagacggagtctcattctgtcacccaggctggagtacaatggtgtggtcttggctcactgcaacctccgcctccsgggttcaagggattctcctgcctcggcctaccgagtagctgggactacaggcgcctgccaccacatccagctaatttttgtattttaagtagagacgggg

SEQ ID NO: 45913 - DNA, 201 bp, Homo sapiens
ttttgtaatcccggcattttgggaggccaaagtgggtggatcatctgaggtcaggagttcaagactagcctgggtaacatggcaaaaccctgtctcttctaaaaaaaaaaaaaaaagtcccagctactctggaggttgaggcaggagaatcgcttgaacctgggagacagaggttgcagcgagccgagattgtgtcattgc

SEQ ID NO: 45914 - DNA, 201 bp, Homo sapiens
aacaccacacctggctaatttttttttcttttttgagacggaatctctcattgttgccaggctagagtgcaatggcaccatctcagctcactgcaagctcygcctcccaggttcaagcgatcctcccgagtagctggggctacaggtgtgcaataccacgcccagctaatttttgtatttttagtagagacagggtttcac

SEQ ID NO: 45915 - DNA, 201 bp, Homo sapiens
ttctcctgcctcagcctcccaagtagctgggattacaggcacacaccaacactcccggctaatttttgtattttcagtaaagatggggtttcaccatgttrgctaggctggtctcgagctcccgacctcaagtgattctcccgccttggcctctcaaagtgctgggattacaggcatgaaccaccaagcctggcctaatgt

SEQ ID NO: 45916 - DNA, 201 bp, Homo sapiens
caggagaaaggatgttaccttctgatggccagcaggcagcctgggccttgaggggtggtgctgggttcctggccacagcactgacggtgaactcatggctytgatccccaccactctctaccagtcaagctcatcctcccgggaacgtctccaccagcttcccttccagccgacgccggacgagctgcacttcctgtccaa

SEQ ID NO: 45917 - DNA, 201 bp, Homo sapiens
agctggacttttgtctcaaaaacaaaaaacaaaaaaacacaaatatatatatatatatacttgtgtgtgtgcgtgtgtgtgtgtgtgtgtgtgttaaccayagaaaaactgcattcattcattcagtcagtccagtcagtcactcaataagcactccttcttgcccactgaggggttgttcaggaggcagttcagtgtagg

SEQ ID NO: 45918 - DNA, 201 bp, Homo sapiens
tgcactccagcctgggcatcagagcaacacttcatctcaaaataaataaataaagaaataaatctatgcaaaaagttgtatgccaatgtttatagcagctstattcagaatagctaccaaaacgtgaaaaaatccaagtgaccaccaacaaatgagtggatcaacaaaatgtacatgtacatatatacaatggaatattat

SEQ ID NO: 45919 - DNA, 201 bp, Homo sapiens
ccgacctcaggtgatctgccggcttcggcctcccaaagtgctgggattacagttgtgagccactgcgcccggcaaatgaactcatttttaaaactctcacrcaagtacagtatatactgctgtttaggttttcctatggacttaaatatataaatgttttgctacatcatagtgtcttatgcaccagctgtatgaagtcgc

SEQ ID NO: 45920 - DNA, 201 bp, Homo sapiens
ttgatgcaattctacagtacctcatggacagtcaggcccagtgacccttcctagggtcccctcgagcctgaaagcatactccagtgtccacactgtacagyggggcagccgaagacaactgcggctgcagagaaagtgcgagtcccagggaaagaaaaaatgcaggtgctaagccaggcacagtggctcatgcctgtagtc

SEQ ID NO: 45921 - DNA, 201 bp, Homo sapiens
accctccccgctgagatagaacaaactggggaccttttgcaggaggtaaagcgaggaggatgcataggcattgggcataacctaaggggcgggcggggggygggggtgccccgggcctcatgactacatccgcccttctcccaggcggcgactgcgccacgctcctgaagaacatgggcccgctgcccgtggacatggccc

SEQ ID NO: 45922 - DNA, 201 bp, Homo sapiens
caggtggcacccacgaagtgaagcagcacccctttttcctggccctggactgggcagggcttctccgacacaaagccgagttcgtgccccagctcgaagcygaggatgataccagctactttgacagtaaggagggatccccctggagggggggcggggggtgctctgccatccctcagtccctgggggcagagggctgtg

SEQ ID NO: 45923 - DNA, 201 bp, Homo sapiens
gcactttgggaagctaaggcgggcagatcacttgaggccaggagttcgagaccagtctggccaacatggtggaaacccccccccctactaaaaatacaaarattagctaagtgtggtggcgcatgcctgtaatcccagctactcaggaggctgaggcacaagaattgcttgaactcaggagatggaggttgcagtgagctg

SEQ ID NO: 45924 - DNA, 201 bp, Homo sapiens
ggctggagtgcagtggtgcgatttcgactcaccacaacctctgcctcccgggttcaagcgattctcctgcctcagcctcccaagtagctgggattacaggygcttaccactactgcccagctaatatttgtatttgtagtagagatggggtttcaccatgttggccaggctggtctcaaactcctgacctcaagtgagcca

SEQ ID NO: 45925 - DNA, 201 bp, Homo sapiens
gcttccagtaccgcgctctgtacccgttccgccgggagcggccggaggacctggagctgctgcccggcgacgtgctggtagtgagccgggcggccttgcakgcgctgggcgtggccgagggtggcgagcgctgcccacagagcgtgggctggatgcccggcctcaacgagcgcacacggcagcgaggtgacttccctggca

SEQ ID NO: 45926 - DNA, 201 bp, Homo sapiens
ttggcctctcaaagtgctgggattacaggcgtgagccaccgcacccggccccacaactttttagggacacagctggtgttgatccccagatatctgctctrccgcccaagcctcccgtggtccttaaacacaccaggcactgtcccacctcagagcctttgccctggcagtgaccctatcctgagatgccctccccgtatt

SEQ ID NO: 45927 - DNA, 201 bp, Homo sapiens
cacctgaacccaggaggcagaggttgcagtgagccgagatcaccccactgcactccagcctgggtgacacagtgagaccatctcaaaaaaaaaaaaaaaargaaagaaagaaagaaagaaatacacaagcagccaggtgcagtggctctcgcctataatcccagcactttgggagcccgaagtgggagggtcacttgaggc

SEQ ID NO: 45928 - DNA, 201 bp, Homo sapiens
cttcgaggggtagattattctcctcccatcgtgacagcttggttttctgagcgcagagcagctgaagtcaggcctggggtaacgccacacccccgcgaccyttccccgcctctcccgggagaccttgccctcccagctgggtcatccggcagcccagcagcttccggccccctccaattggctgtaggggccgatggcgtc

SEQ ID NO: 45929 - DNA, 201 bp, Homo sapiens
aaccctgtctcttctaaaaaaaaaaaaaaaagtcccagctactctggaggttgaggcaggagaatcgcttgaacctgggagacagaggttgcagcgagccragattgtgtcattgcactccagcctgggcaacaagagcaaaagtctgtctcaaaaaaacaaaaacaacaacaaaaaaaaaccctcttgggcagcccatgt

SEQ ID NO: 45930 - DNA, 201 bp, Homo sapiens
aagtctgtctcaaaaaaacaaaaacaacaacaaaaaaaaaccctcttgggcagcccatgtctgaggatggactgtgaggtcacagtggaacacaagctcasggctttctatccttcatgcggtgagggcacccagagttggtgcaggtcagtttgctgagctctaaaagggtcttcaaaagggagtcacccgtcagccgtc

SEQ ID NO: 45931 - DNA, 201 bp, Homo sapiens
agctgacgaatggtggacccagtgacgagtggcccttgtaagggtcatggaataatttgaagcgaggcatgagcggcccctgtggtcgcctgtgactgctrgagatagaggtcccagcaccccaagccaacccagcggaccctcccagccctgcttcaaccaatggggccagtggggctccaagcagccacctaaccatcc

SEQ ID NO: 45932 - DNA, 201 bp, Homo sapiens
gatgtggagacagccaggtgagcgtgcattgaggggttggcaggaagttttgcagaaacctgtgggtttcacttttgcttctgcagctcaggctgggagamaatcactgtgactgttgacatctgtggcttcagtttcccagtctggaaaatgggctcagctggtcattcccaactctggggcttgttggaattggcagat

SEQ ID NO: 45933 - DNA, 201 bp, Homo sapiens
cccagcctaaaatattttttaatgcaggtatggtaggagccgggtggggaattagactgtgaatctggagggcctccaggaagaaaggatgttgagttcaratctggagtatgagctgcagttaattagggccagaagggagggaaggctgttctgagagagcgcacagatagcgcaaaggccttgaggcagggctgagcc

SEQ ID NO: 45934 - DNA, 201 bp, Homo sapiens
agcagatggtgcggggaccgaagggtccgggagtggtgccaggagagttctgtgtggtccagcttccccgggagcctttgcagggagctgccgattttgcytcacctctctctgccactttaaaaaaacatcttcaggccaggcacagtggctcatgcctgtaatccagcgttttgggaggccgagatgggaggactgctt

SEQ ID NO: 45935 - DNA, 201 bp, Homo sapiens
gaaaatcatctctcagctaggcacggtggctcccgcctgtaatcccagcactttggaaggctgaggcaggcagatcacttgaggccagaagttcaagatcmgcctggccaacatggtgaaaccccgtctctactaaaaatacaaaaaaattaaccaggcgtggtggtgctcgcttgtaatcccaggtactcaggaggctga

SEQ ID NO: 45936 - DNA, 201 bp, Homo sapiens
aaacatcttcaggccaggcacagtggctcatgcctgtaatccagcgttttgggaggccgagatgggaggactgcttgaggtcaggaggtcaagaccagccwgaccaacatggtgaaatcctatctctactaaaaatacaaaatcagccaagcgtggtggtgggcgcctgtaatcccagcttacttgggaggctgaggcaga

SEQ ID NO: 45937 - DNA, 201 bp, Homo sapiens
gctgtacactgggccctgctgaagccagaggggatacagacaattcaatctcagagcaatggttgaagttttgtactcaggagagagctcaaccagagaawgagacagaggtgctgggggtggctttatcctgaagatctggggcctcttggaggaagtgacctttgagcttagatctggaagaagaggaggagctggcag

SEQ ID NO: 45938 - DNA, 201 bp, Homo sapiens
ttcgccaagacaggtgccggattcccaagcggctcagggcactccctgctgaattggcctggactcctgggtggtgacctcagggagaaagctcctccctytaaaacacacgcacacccaaggctgagaggccaccaacgagagccctgtgaattgagattaaccaaagtggcgccgggagaaaagaaccagggtgactga

SEQ ID NO: 45939 - DNA, 201 bp, Homo sapiens
ttttttgtatttttagtagagatggggtttcaccatgttggccaggctggtctcaaactcctgacttcaggtgatccacccgccatggcctcccacaatgmtggaattacaagcgtgagccactgcgcctggcctgatctttatatttttagtagagacagggtttcaccatgttgaccaggctggtcttgaactcctgac

SEQ ID NO: 45940 - DNA, 201 bp, Homo sapiens
attacaggcatgagccactgcgcccggccaccttttttttttttttttttgagacggagtctcattctgtcacccaggctggagtacaatggtgtggtctyggctcactgcaacctccgcctccggggttcaagggattctcctgcctcggcctaccgagtagctgggactacaggcgcctgccaccacatccagctaatt

SEQ ID NO: 45941 - DNA, 201 bp, Homo sapiens
gtgagaggcacagaggcaacccctcaccatccctcccgcagagcggcaacaagatatccctgcggaccacagccctggagaacacctccatcaaggtgggycccgcccggaagaatgtggccaagggccgcatggcacgcaggagcaagaggagccgtcggcgggagacccaggatcggtgcgcggcagtgaccaccaggg

SEQ ID NO: 45942 - DNA, 201 bp, Homo sapiens
ccccttgcagtgttctctcctttctcttcccttctcagccttggtatttgaaattatcttttttttttttttttttttttttgagacggagtctcgctctrtcacccaggctggagtgcattggtgtgatctcggcccactgcaacctccacctcccgggtacaagtgattctaccacctcagcctccagagcagctggga

SEQ ID NO: 45943 - DNA, 201 bp, Homo sapiens
attcaagcagtcagagagaccttcgaggggtagattattctcctcccatcgtgacagcttggttttctgagcgcagagcagctgaagtcaggcctggggtracgccacacccccgcgacccttccccgcctctcccgggagaccttgccctcccagctgggtcatccggcagcccagcagcttccggccccctccaattgg

SEQ ID NO: 45944 - DNA, 201 bp, Homo sapiens
ctggccaacatggtgaaactccgtctctactaaaaatacaaaaaaattagctgggcgtggtggtgcaacacctgtaatcccagcttctcgggaggctgagrcaggagaatcgtttgaacccaggaggcggaggctgcagtaagctgagactgcgccattgcattccagcctgggcaacgagagcgaaactctgtctcaaaa

SEQ ID NO: 45945 - DNA, 201 bp, Homo sapiens
tagtacagaaagggttcctccctgttggtcaggctggtctcaaactcctgatctcaggtgatctacccacctcggcctcccaaagtactgggattacaggygtgagtcaccatgcccgacctaatttttgtgtttttagtagagacgggtttcaccatgtttaccaggatggtctcaaactcctgacctcaggtgatccgc

SEQ ID NO: 45946 - DNA, 201 bp, Homo sapiens
tggccaaggaccccctggagggtaagccgggatgggaagaggaaaccaaggctgggaaaggccggatggaggccaggcacggtggctcacacctttaatascagcactttgggaagctaaggcgggcagatcacttgaggccaggagttcgagaccagtctggccaacatggtggaaacccccccccctactaaaaataca

SEQ ID NO: 45947 - DNA, 201 bp, Homo sapiens
tggccaacatggtgagacctcatctctaccaaaaatacaaaaaatcagcctggtgtggtggtgggcacctgtagtcccagctactagggaggctgaggcaygagaatagcttgaacccaggaggcaggggttgccgagatcatgccactgcattctagtctgggcaacagagagactcgtctcataaattaaaaaaaaaaa

SEQ ID NO: 45948 - DNA, 201 bp, Homo sapiens
ctgggcgacatagcaagactccatctctacaaaaagtaatttttttttttcttttttgagacagagtctcgctctctcgcccaggctggagtgcagtggcrcgatcttggctcactgcaagctccgcctcctgggttcacgccattctcctgcctcagcctcccgagtagctgggactacaggcgcccgccaccacgcccg

SEQ ID NO: 45949 - DNA, 201 bp, Homo sapiens
acctcatctctaccaaaaatacaaaaaatcagcctggtgtggtggtgggcacctgtagtcccagctactagggaggctgaggcatgagaatagcttgaacycaggaggcaggggttgccgagatcatgccactgcattctagtctgggcaacagagagactcgtctcataaattaaaaaaaaaaaaaaaaagttttggtgt

SEQ ID NO: 45950 - DNA, 201 bp, Homo sapiens
gggtttcactgtgttagccaggatggtctcgatctcctgacctcatgatccgcccgcctctgcctcccaaagtgctgggattacaggcgtgagccaccgcrcctggcctacaaaaagtatttttaaaaattagccaggcgtggcggtgaatgcctgtagtcccacctacttgagaggctgaggtgggaggattgcttgagt

SEQ ID NO: 45951 - DNA, 201 bp, Homo sapiens
tgtaatcccagctacttgggaggctgaggcaagagaatcacttgaacccaggaggcagaggttgcagtgagctgagattgtgccactgcactccagcctgrgtgacagagcgagactccatctcaaaaaataaaaaaaagaagtgacatgtgagcagagacctgcaagaacctgagaatgagagaaagccatagagacaga

SEQ ID NO: 45952 - DNA, 201 bp, Homo sapiens
cacacctttaataccagcactttgggaagctaaggcgggcagatcacttgaggccaggagttcgagaccagtctggccaacatggtggaaacccccccccytactaaaaatacaaaaattagctaagtgtggtggcgcatgcctgtaatcccagctactcaggaggctgaggcacaagaattgcttgaactcaggagatgg

SEQ ID NO: 45953 - DNA, 201 bp, Homo sapiens
ggaggccaaagcaggcggatcacttgaggtcaggagtttgagaccagcctggccaacatggtgaaaccccaactctactaaaaatacaaaaattagccagrtgtggtggcacatgcctgtagtcccagttacttagggggccgaggcacgagaatcatttcaacctgggaggtgaaggttgcagtgagccaagatcatgcc

SEQ ID NO: 45954 - DNA, 201 bp, Homo sapiens
acggccctagatacctccctgctctgagcctcagtttccccatctgtaacaggggtgatgaaaagcctgtttactggccgggcgcggtggctcacacctgtaatcccaacactttggaaggcagaggcgggaggactgcttcagcccaggagtttgggaccaacctgggcaacatagcaagaccccacctctattggaaaa

SEQ ID NO: 45955 - DNA, 201 bp, Homo sapiens
cctcaaaccagacaagtgagctgagctagcatgagcggggcctcgcggagggcggggccagagaggatcaggggcggggccaaagaggatcagggcagagyctctgaggtgcatcccgggacccttcaggagccccatctgtctgagctctgttggtacctcctgacaggaaggcagggaatgagcgcatggtgaacatct

SEQ ID NO: 45956 - DNA, 201 bp, Homo sapiens
ctgtaatcccaacactttggaaggcagaggcgggaggactgcttcagcccaggagtttgggaccaacctgggcaacatagcaagaccccacctctattggaaaaaaaaaaaaaaaggctgggcaaggtggctcatgcctgtaatcccagcactttgggaggccaaggcgagcagatcacttgaggtcaggagttcaagacc

SEQ ID NO: 45957 - DNA, 201 bp, Homo sapiens
caagtaattctccctgcctcagcctcccgagtagctgggattacaggcacatgtcaccacgcccggctaatttttgtatttttagtagagacggggtttcrccatgttggccaggctggtatcaaactcctgatctcaggtgatccgcccacctcggcctcccaaagtgctagaattacaggcgtgagccaccgcgcccag

SEQ ID NO: 45958 - DNA, 201 bp, Homo sapiens
tagtcctagctacttgcggggctgaagtgggaagactgcttgagcccaggggtttgaggctgcagtgagctatggtcgcacaactgcactccagcctgggygacatagcaagactccatctctacaaaaagtaatttttttttttcttttttgagacagagtctcgctctctcgcccaggctggagtgcagtggcgcgatc

SEQ ID NO: 45959 - DNA, 201 bp, Homo sapiens
ctcctaccttcgctgaaaggagcttcagtgaagaccgggaggaggggtgggagcgcagcgaagtggactatggccgccggctgagtgctgacatccggtargtggcctggggaagtgtaggcagatccagcttccaagcctgctgggaggtagagacacaaaatctgatgcaaagggagcttcctagtggccaagtagaaa

SEQ ID NO: 45960 - DNA, 201 bp, Homo sapiens
cagcggccaccccagtgatgcccaagccctcgagcctttctggtaagtggggccctgagtaagagggatgatgtcatggaagtttcccagaggaggggctrtttgagatgggttttcaaggatgagtaggagttctccagagccaacaaaggctttaagagaggagaagccagggtcccagagagacccccagcccccaag

SEQ ID NO: 45961 - DNA, 201 bp, Homo sapiens
atcacttgagaccaggagttcaagaccagcctgggcaacatggtgaaacctcatctctataaaaaatacaaaaattagccgggtgtggtggcacatgcccmcaatcccagctactctggaggcggaggttgcagtgagccaagattgcaccactgcattccagtctgggcgacatagccagacgctgtctcaaaaaaaaaa

SEQ ID NO: 45962 - DNA, 201 bp, Homo sapiens
ggagtttgggaccaacctgggcaacatagcaagaccccacctctattggaaaaaaaaaaaaaaaggctgggcaaggtggctcatgcctgtaatcccagcaytttgggaggccaaggcgagcagatcacttgaggtcaggagttcaagaccagcctggccaacatggtgaaacctcgtctctactaaaaatacaaaaattag

SEQ ID NO: 45963 - DNA, 201 bp, Homo sapiens
acatcaagctcacggacttcggcctgtccaagatcggcctcatgagcatggccaccaacctctatgagggccacatcgagaaggacgcccgagagttcatygacaagcaggtgggcgggcaggtgggtgggcagccccgggatgcctcctcctctctcctgggacctctcttgggctgggggctggcctcagtttccccgt

SEQ ID NO: 45964 - DNA, 201 bp, Homo sapiens
ccagcagaaaatcatctctcagctaggcacggtggctcccgcctgtaatcccagcactttggaaggctgaggcaggcagatcacttgaggccagaagttcragatcagcctggccaacatggtgaaaccccgtctctactaaaaatacaaaaaaattaaccaggcgtggtggtgctcgcttgtaatcccaggtactcagga

SEQ ID NO: 45965 - DNA, 201 bp, Homo sapiens
aagctgtgggcagagtgttggaccgtgaatcaatgaggactgccgagggcaaagtcctggaccttggggcaggacagagccaaagactccacaagggatgwccactccctgccaccttccctgtgccccactgggtccaccggggcctcaagagggccagagtgagacacagacacccccagaccgtggggtttgcgctga

SEQ ID NO: 45966 - DNA, 201 bp, Homo sapiens
agctatgaagcctgggccccagcattgggcctggactgggtcccaaagtgtcctgtggcccaggaaggggcatccctcatgatgacactgcccctgacttrcctgggctgtcatgacaggaggaagcattaattcagtccttacggtgggagacacttctgcttccatagtgaacacatattgtaccctcagccctgttcc

SEQ ID NO: 45967 - DNA, 201 bp, Homo sapiens
tggaggtaagtgacagcgcgtgtgggcggggcgcagacatcgccctggcaccccagagccttggaaaccctccagactcatcggtctcctcaagatactgyaggttggtgacatcacctctctgggcctcagtttacccctccacataatggcactgcgatacgttctaggggcttaatgggaaaattccatttttagcca

SEQ ID NO: 45968 - DNA, 201 bp, Homo sapiens
gctatgaagcctgggccccagcattgggcctggactgggtcccaaagtgtcctgtggcccaggaaggggcatccctcatgatgacactgcccctgacttgmctgggctgtcatgacaggaggaagcattaattcagtccttacggtgggagacacttctgcttccatagtgaacacatattgtaccctcagccctgttcca

SEQ ID NO: 45969 - DNA, 201 bp, Homo sapiens
ctggactcctgggtggtgacctcagggagaaagctcctccctctaaaacacacgcacacccaaggctgagaggccaccaacgagagccctgtgaattgagmttaaccaaagtggcgccgggagaaaagaaccagggtgactgagcgctccctaaccctttcctgatccctacttcccagttaagaaaactgaggctcagag

SEQ ID NO: 45970 - DNA, 201 bp, Homo sapiens
ccgcccccccatccccgcagccccgtgcgcccccctccctgtccggctccgcggggctcctggggccgatcccaccgccgaggcctcccttcccggcctcrggcggctgcggcggcacaaagggaagcagcatgtccgaccccagctactggacggcggtggcggctcccggccatcggagccgcctggcaaaaggcgcgc

SEQ ID NO: 45971 - DNA, 201 bp, Homo sapiens
tgaggtgcaggaggctggcttcaggcccctgctttctgccacattctctctgttgtgtcctgggtaccaagagaggatcgttctcaaatggcaacttctcsaggtcctggatctcctccaggaagagttgaacaaacagtcggccctgcatagatgcttgggaagtgaacagatgatgcttagttctcctttgaggcctca

SEQ ID NO: 45972 - DNA, 201 bp, Homo sapiens
cctgggtggtgacctcagggagaaagctcctccctctaaaacacacgcacacccaaggctgagaggccaccaacgagagccctgtgaattgagattaaccraagtggcgccgggagaaaagaaccagggtgactgagcgctccctaaccctttcctgatccctacttcccagttaagaaaactgaggctcagagaggagat

SEQ ID NO: 45973 - DNA, 201 bp, Homo sapiens
ggagcagagctgttgctgggcaactgctctggtggggcgggggacggtgtcgctcccaacttccttctgtcaaggtgtgggctgaggccagggcccaggtrggagaagaagccaggcagggtgtgagagacctgggccagggatctggtggccagaagggaactgggatggaaagaggaaaacgtgggcaaaagttcagca

SEQ ID NO: 45974 - DNA, 201 bp, Homo sapiens
caaacccctctgcctcagcctccccaagtgctgggattacaggcataagccacacgctgggccatccacagacctttaacggggagaagagagaacaatayagagcccacatttgggtgctgggcaacagggaggtaccttccttcagacgccaagcacttatgaggcacctactgagatccaggtgctaaaggcattgct

SEQ ID NO: 45975 - DNA, 201 bp, Homo sapiens
tcagtttcccctcctgcaaaatggagtagaacaattatcttcaaatatctgtgagagatggtgtttatgagacacttagggcaaaaaggcaatcatcctcaaaaaagaaactgacaactgcagcggctacctgcttttgtaagtaaagttttattggcaccagggccaggattaaagggaggcaaacaaggctgagtggtg

SEQ ID NO: 45976 - DNA, 201 bp, Homo sapiens
tccatcaggctagaagcacttcatgccattgctgttaataacaacactgccaatagtttgtgtttgtttttgttattgtttttcagatgaagtttcactcrtgtcgcccaggctggaatgcaatggcactatctcagcccactgcaacctccgcctcctgggttcaagtgattctctgccccagcctcctgagtagctggg

SEQ ID NO: 45977 - DNA, 201 bp, Homo sapiens
gcatcaccacgcccagctaattttgtatttttagtacagaaagggttcctccctgttggtcaggctggtctcaaactcctgatctcaggtgatctacccayctcggcctcccaaagtactgggattacaggcgtgagtcaccatgcccgacctaatttttgtgtttttagtagagacgggtttcaccatgtttaccaggat

SEQ ID NO: 45978 - DNA, 201 bp, Homo sapiens
catgatgaagggagggacccgtgtgttggaggccgctgagcagatttgaccagttttaactgggaggggagggaggaagtatctgggactgagaaaggccrtaaggctgcctcactcaccaccggggggcagcagagccacattgccttgggcctggcgggggaatgggtccctgcctgccatgttccaagcatcctagga

SEQ ID NO: 45979 - DNA, 201 bp, Homo sapiens
cctcagcaggcagcagccccttggatagtcctcggaatttctcggctgcctctgccctaaatttcccctttgcccggaggtgagtgattgccggctttggkagacagtgcgggcaccacgggcaggggttgggcaggggcacgtgctcggtggctagacctggctcctcattcatttcattcaccttttcccctcccctgg

SEQ ID NO: 45980 - DNA, 201 bp, Homo sapiens
aactcctgacctcaggtgatccacccgccttggcctcccacggtactggaattactggcatgagccattgtgcctggccttgcaacttccctgcttccatyctatccatctccccgtcgctcacttggctccagccacatggctgatcctccagaatgcaggctggtccagcctcagggcctttgcacttgctgtccccac

SEQ ID NO: 45981 - DNA, 201 bp, Homo sapiens
ccgagtgtgtgcaaaggtgtgtccccgtgcatatggggtggctcagcacgtagtgacagcaagtggagactgtggccccatccccacttgggtccccagaytcaagagaatctgcaccccgcatgaggcttgggctgcatacctgggggtcataggtgaccactcccatactcatcaccatctctggtggtctcaaaacca

SEQ ID NO: 45982 - DNA, 201 bp, Homo sapiens
acaacattcattaagcacccactgtgtgtatgctctgtgctgcgggctgagggcatggtcgcaaatgggcagctggccctgagcccctggggagtcctccrtttggtggggggtggtcaatgtgtgccccagaagctacagctcagaggttgaagctttgacaggggacacagtggcagctggagtcacggggggggcttc

SEQ ID NO: 45983 - DNA, 201 bp, Homo sapiens
cctcccagacaccgtcccagacccttactggcctcctgctaccttcattcctgtcccccagcagtctgctccccatagcagacacaagggggtttacaaaygtagtccacatcataccctttctctgctcaagcaccctccatggctccccattgctcctacaatacaattgcactcctccctgcagcccacaaggcttat

SEQ ID NO: 45984 - DNA, 201 bp, Homo sapiens
taggcagaagaacagttattaggcaatgactgtgtacctggcccagaacactttatctttatttatttatttattttttgagacagggacagtctttgtckcccgggctggagtacagtggcgcagtcttggctcactgcaacctccgcctaccgggttcaagcaatattcctgcctcagcttcccgagtagctgggatta

SEQ ID NO: 45985 - DNA, 201 bp, Homo sapiens
gccccagcctcacctgctgatggaggactcaatggcccagtgacctgacaccacaccaccaactccctcccaccagctgacgaatggtggacccagtgacragtggcccttgtaagggtcatggaataatttgaagcgaggcatgagcggcccctgtggtcgcctgtgactgctggagatagaggtcccagcaccccaagc

SEQ ID NO: 45986 - DNA, 201 bp, Homo sapiens
aggaggcagtgttcaaactgaggcctggagggcaggaggtgaccaggttgcagatccaaaggaaagagtgaaacaggcagcataggcatagaccctaaggwtggaccatacctggagtgggactgacctgccactgtccccattgaaagctggggaggcccggcatggtagctcacacttgtaatcccagcactgtgggag

SEQ ID NO: 45987 - DNA, 201 bp, Homo sapiens
aatcccagccactcgggaggctgaggcaggagaatctcttcaactcaggtggtggaggttgcagtgagccaagatctcgccactgcactccagcctgggcracagagtgagactgcgtctcaaaaaataaaaatacaaatacaaaaattagctgggcatggtggcacacgcctgtaatcccgtctacttgggaggctgaga

SEQ ID NO: 45988 - DNA, 201 bp, Homo sapiens
tcccttcccggcctcaggcggctgcggcggcacaaagggaagcagcatgtccgaccccagctactggacggcggtggcggctcccggccatcggagccgcytggcaaaaggcgcgctgctgcagcgctccaagaggtagggggcacggcgccggcgaaggctcggcggccagccgagcaaacaggagttgccagaagtgtg

SEQ ID NO: 45989 - DNA, 201 bp, Homo sapiens
agggggtgctgaggtggtgcgacgctggccccagcctccaggcatctggtatctccagggcccaggcctgcgtcctgcctcggcctgaaggagcaggaggyggccccgtctgggctcccagccagaatctgcctctccccctggtaacagccacctccctcctctgcctggcctctgtccagccaccatacacggccccac

SEQ ID NO: 45990 - DNA, 201 bp, Homo sapiens
cctccatgaggtctcaccctgctttggggaaccctcaggaaccccagtctggggtagggagcccagccatgggggtttagggctggaggagcccagacagragtgtgtgaggatgggaccctggaggcaagaggagggtggccatcctaggtggggggaactgatgggcagaggcctggagaccagaagtgaaggcaggga

SEQ ID NO: 45991 - DNA, 201 bp, Homo sapiens
gagggagcgattagatttacattttagcagaaaggagccaaaatgcctgcccctagctcgaggttaaggtgctgccaacgccccgcccccgccgcccgcgrtcgtagcaacgcccggcctcagccgcccgcggccctagcaacgctccgcctctccgcccgcggccatggcagcgccccgcccactcgccggcacgcgggt

SEQ ID NO: 45992 - DNA, 201 bp, Homo sapiens
ggagaaaggatgttaccttctgatggccagcaggcagcctgggccttgaggggtggtgctgggttcctggccacagcactgacggtgaactcatggctctratccccaccactctctaccagtcaagctcatcctcccgggaacgtctccaccagcttcccttccagccgacgccggacgagctgcacttcctgtccaagc

SEQ ID NO: 45993 - DNA, 201 bp, Homo sapiens
tggggttggtctcaggtcccatatcacaagccagctgtcttcctttcagcccgggccgtgcaacggggaccttcgacaatgagattgtcatgatgaatcaygtgtaccgggagaggttccccaaggtgggcagcgcctggcggctggaccagcccctgcacttctttccacattgctgtccctccatggaactctgtcttc

SEQ ID NO: 45994 - DNA, 201 bp, Homo sapiens
accagcccctgcacttctttccacattgctgtccctccatggaactctgtcttcctggctatgtcccctttgccagtctgttcatttctgtctttccttcyccttccgttgaaagatgtcgttcctcctgcgccagccctcccacccgatcgccccattgccccatctcctctctccccaaccatgcctctcctgccccat

SEQ ID NO: 45995 - DNA, 201 bp, Homo sapiens
aaaaaaaacaaacaactcccacagccagccaggtgcagtggctcacgcctgtaatcccataatcccagcactttgtgagactgaggcgggtggatcacttraggtcaggaattcaagactagcctggccaatatgcagaaactccatctctactaaaaacaaatattagccgggtgtggtggcatgtgcctgtagatccca

SEQ ID NO: 45996 - DNA, 201 bp, Homo sapiens
gaaatagacccatggctcaaagtcattgcaagtgggttttgaggactgcatagcagttcgctgttgagattcttcctgatgccatcgctggtaccagcctsctgctaccctctccctgcgagtactccatcatagccctgcctttaaaagcttcctccagacatctgggccctgagctatgttttttatttttatgttttt

SEQ ID NO: 45997 - DNA, 201 bp, Homo sapiens
aggccggatggaggccaggcacggtggctcacacctttaataccagcactttgggaagctaaggcgggcagatcacttgaggccaggagttcgagaccagyctggccaacatggtggaaacccccccccctactaaaaatacaaaaattagctaagtgtggtggcgcatgcctgtaatcccagctactcaggaggctgagg

SEQ ID NO: 45998 - DNA, 201 bp, Homo sapiens
cacacagacagagcatgtcagacgccccgactcaatttgccaaacacaccctctatgccagtccggtgctgggagctgctgggaccctaaggagcccccarcctggggaagacatagccggacagacaggaaagcgggtttttcagaggagaggacgcagttttgccaggctagattccaagcagtggggccagggtgggc

SEQ ID NO: 45999 - DNA, 201 bp, Homo sapiens
acttttgggaggccgaggtgggtggatcacaaggtcaggagttcaagaccagccaggacaacatggtgaaaccccatctctactaaagatacaaaaattarccgggtgtggtggcgtgtgcctgtaatcccagctactcgggaggctgaggcaggagaatcatttgaaccctggaggcggaggttgcagtgagccgagatc

SEQ ID NO: 46000 - DNA, 201 bp, Homo sapiens
gaggttgcagtgagccgagatcacgccactgtgctctagcctgggtgaaagagtgagcctacatttcaaaaaaaaaaagatgtagctgggtgtagtagtgygcgcctgtagtcccagctactcaggaggctaaggtgggaagatcgcttgagcttggcaggttgagactgcagtgagctatgatcacaccactgtcctcca

SEQ ID NO: 46001 - DNA, 201 bp, Homo sapiens
ggacggcggtggcggctcccggccatcggagccgcctggcaaaaggcgcgctgctgcagcgctccaagaggtagggggcacggcgccggcgaaggctcggsggccagccgagcaaacaggagttgccagaagtgtgtcctggccgcgtggcgcggaccacggcgagcgtctgtctgtggcagcagtgggaaggggggagga

SEQ ID NO: 46002 - DNA, 201 bp, Homo sapiens
tgcggggctgaagtgggaagactgcttgagcccaggggtttgaggctgcagtgagctatggtcgcacaactgcactccagcctgggcgacatagcaagacyccatctctacaaaaagtaatttttttttttcttttttgagacagagtctcgctctctcgcccaggctggagtgcagtggcgcgatcttggctcactgcaa

SEQ ID NO: 46003 - DNA, 201 bp, Homo sapiens
tggcgcatgcctgtaatcccagctactcaggaggctgaggcacaagaattgcttgaactcaggagatggaggttgcagtgagctgagatcgcgccactgcrctccaacctgggcgacagagcgagaccctgtctcaaaaaaacaaaaaaagaaagggcagatgaagccaggattcaagcccaggcccatccgattccagaa

SEQ ID NO: 46004 - DNA, 201 bp, Homo sapiens
gatttgctggtgctgctggcagtagccatggtacagggaaaagtgtgggggtgggactgtgacacagaaccctgaaaagctggtccaggggctcctggccrtatgtagtgtcctccatcaggctagaagcacttcatgccattgctgttaataacaacactgccaatagtttgtgtttgtttttgttattgtttttcagat

SEQ ID NO: 46005 - DNA, 201 bp, Homo sapiens
agctggtccaggggctcctggccatatgtagtgtcctccatcaggctagaagcacttcatgccattgctgttaataacaacactgccaatagtttgtgttkgtttttgttattgtttttcagatgaagtttcactcgtgtcgcccaggctggaatgcaatggcactatctcagcccactgcaacctccgcctcctgggttc

SEQ ID NO: 46006 - DNA, 201 bp, Homo sapiens
ctctacaaaaagtaatttttttttttcttttttgagacagagtctcgctctctcgcccaggctggagtgcagtggcgcgatcttggctcactgcaagctcygcctcctgggttcacgccattctcctgcctcagcctcccgagtagctgggactacaggcgcccgccaccacgcccggctaattttttgtatttttagtag

SEQ ID NO: 46007 - DNA, 201 bp, Homo sapiens
ggctggagtgcagtggcgcgatcttggctcactgcaagctccgcctcctgggttcacgccattctcctgcctcagcctcccgagtagctgggactacaggygcccgccaccacgcccggctaattttttgtatttttagtagaggcggggtttcactgtgttagccaggatggtctcgatctcctgacctcatgatccgcc

SEQ ID NO: 46008 - DNA, 201 bp, Homo sapiens
acccagctaatttttaaattttgtatagagacggggtcttgctatgttgcccaggctggtcttgaactcctggcttcagaggatcctcccaccttggcctyccaaagcactggggttactggcgtgagccaccatgcctggccagcagtagtgtcaataataaggaatgttagttgaggggtgattccctcctgggccttg

SEQ ID NO: 46009 - DNA, 201 bp, Homo sapiens
cacgcctgtaatcccagcactttgggaggccaaggcgggcagatcacctgaggtcaggagtttgagacgagcctggccaacatggtgaaaccctgtctctrctaaaaatacaaaaattaggctgggcgtagtggcttatacctgtaatcccagcactttgggaggccgaggcaggcggattacctgaggtcaggagttcaa

SEQ ID NO: 46010 - DNA, 201 bp, Homo sapiens
tcccatccttctccagaacgggctgcgagtgtgatttaggctgggcaggtggcttagcgcggggccctgggcagccacctaccctgtccccttttcccccsacagctgccgcagcgggaaccgcaagagcttggtggtaggaacgccctccccgaccctctcccggcccctgtcgccattgtcggtcccaacgggtgagtg

SEQ ID NO: 46011 - DNA, 201 bp, Homo sapiens
aaaataaagctgaggaaactgaggctccaggcagataaggctgagcagggaatcaaacccaggtgtacctaaggccagatcacatgtggtctgtggctggmccatgtttgccaggcattcgctaggggctgcccctctgccaaggcctggggcaagaacatattggaccctccacctgggctgcaccctgagctgaggaag

SEQ ID NO: 46012 - DNA, 201 bp, Homo sapiens
atagtcctcggaatttctcggctgcctctgccctaaatttcccctttgcccggaggtgagtgattgccggctttgggagacagtgcgggcaccacgggcargggttgggcaggggcacgtgctcggtggctagacctggctcctcattcatttcattcaccttttcccctcccctggcccgtctggtggtggtctccccct

SEQ ID NO: 46013 - DNA, 201 bp, Homo sapiens
tggcacaatctcggctcactgcaacctccgccttctgggttcaagccattctcctgcctcagccttccaagtagctgggactacaggcatgtgccaccacrcccagctaatttttgtatttttagtagagacgggttttcaccatgttgaccaggctggtcttgaacgcctgacctcaagtgatccgcccacctcagcctc

SEQ ID NO: 46014 - DNA, 201 bp, Homo sapiens
gagggaggaaggagctcaggggatggaatgacacgatgtagggaaaaagatgaccgggatcctggtgtctagcagggaacctgggagtacttagagacgartgcaggtgccagggaaggatgcacccagcagaggaaacatcatggacaaatggggctagacaggagggtgggaaaactgagaagaggccaggcgcggagg

SEQ ID NO: 46015 - DNA, 201 bp, Homo sapiens
tcgcttgaactcgggaggtggaggttgcggcgagccgagatagcgccattgcactccagcctgggcaacaagagcgaaactccgtctcaaaaaataataayaaaataagcaatcgtcgcgtcctttctatcctggtcttagcttgcgctctgccataaaactccctctagccgaacccggcccagccctagagcaatccgt

SEQ ID NO: 46016 - DNA, 201 bp, Homo sapiens
ggtggggggaactgatgggcagaggcctggagaccagaagtgaaggcagggagatgtatggttcaggcaggtaaagtactattaccaaagtactgccaggygagagagcgaacatgcacttaggagacaccagctgtatacagcactaattgctgccctgtcggggagaatcagaaggcagggtctcagcttggcgcgctg

SEQ ID NO: 46017 - DNA, 201 bp, Homo sapiens
gtataaccatcatttaatgaactatgtagtcagtacctcctgtttgctccagctctgtaaagaaacaattctgtgccggcactttgggaggccgaggcagrtgaactacctgagatcaggagttcaagaccagcctgaccaacacggcaaaaccccgtctctactaaaagtacactaaaaaaatatatatatatatacaca

SEQ ID NO: 46018 - DNA, 201 bp, Homo sapiens
gggatcagagagggggcttacatgtctaggtgatgttgttcaacagcatgggcactcaatctctgggtcagagactccctgcagggtggtagcagcttagrgtcttgaaatccacaaagttcatcttatccatggctcagagatggtgcagtttcacgagtctgcaaagcagacaggctctcagtggctaaaattttgctt

SEQ ID NO: 46019 - DNA, 201 bp, Homo sapiens
cattcattcattcacttaacaagagctgattgagcacctgtcatgtgccagacgcttgcatttcatttatttattcatacaacaacattcattaagcaccyactgtgtgtatgctctgtgctgcgggctgagggcatggtcgcaaatgggcagctggccctgagcccctggggagtcctccgtttggtggggggtggtcaa

SEQ ID NO: 46020 - DNA, 201 bp, Homo sapiens
tcacctgaacccaggaggcagaggttgcagtgagccgagatcaccccactgcactccagcctgggtgacacagtgagaccatctcaaaaaaaaaaaaaaaragaaagaaagaaagaaagaaatacacaagcagccaggtgcagtggctctcgcctataatcccagcactttgggagcccgaagtgggagggtcacttgagg

SEQ ID NO: 46021 - DNA, 201 bp, Homo sapiens
tgggcagctggccctgagcccctggggagtcctccgtttggtggggggtggtcaatgtgtgccccagaagctacagctcagaggttgaagctttgacaggrgacacagtggcagctggagtcacggggggggcttcctggaagaggtacctaaagagagagagcatgcagtggacttggtcagcctgtgtctctgttcttg

SEQ ID NO: 46022 - DNA, 201 bp, Homo sapiens
ccctggggagtcctccgtttggtggggggtggtcaatgtgtgccccagaagctacagctcagaggttgaagctttgacaggggacacagtggcagctggastcacggggggggcttcctggaagaggtacctaaagagagagagcatgcagtggacttggtcagcctgtgtctctgttcttggttattttcaggagatcct

SEQ ID NO: 46023 - DNA, 201 bp, Homo sapiens
gaaggcagggagatgtatggttcaggcaggtaaagtactattaccaaagtactgccaggcgagagagcgaacatgcacttaggagacaccagctgtatacrgcactaattgctgccctgtcggggagaatcagaaggcagggtctcagcttggcgcgctggctcacgcctgtagtcccagcactttgggaggccgaagtgg

SEQ ID NO: 46024 - DNA, 201 bp, Homo sapiens
cgtctctcccatcttccggctatggaaccaacacacccagctccaccctctcggtacccatagccccaccttggcaggtggacaggcagatgccgggttgkggggggacacatctttgtgtgtttttttcaaggtgttggatagttgtgcagtcagcaaacatactagttacttcctccatgcacgccccattctgggaaa

SEQ ID NO: 46025 - DNA, 201 bp, Homo sapiens
ctctagaggcggagcttgcagtgagccgagactgcgccactgcactctagcctgggcaacagagcgggcaacagagtgagactctgtctcaaaaaaataawtaaaaatttaaaaaataggccaggcgcggtggccaacgcctgtaatctcagcactttgggaggccaaggctggtggatcacgaggtcaagagatcgagac

SEQ ID NO: 46026 - DNA, 201 bp, Homo sapiens
tcggtacccatagccccaccttggcaggtggacaggcagatgccgggttgtggggggacacatctttgtgtgtttttttcaaggtgttggatagttgtgcrgtcagcaaacatactagttacttcctccatgcacgccccattctgggaaatgcagggtcccctgagaagacccagccttggccccaaaatagtccctggt

SEQ ID NO: 46027 - DNA, 201 bp, Homo sapiens
agatcgagaccatcctgaccaacatagtgaagccccatctctactaagaatacaaaaattagctgggtgtggtggtgtgcgcctgtaatcccagctactckggaggctggggcaggagactcgcttgaacccgggaggcggaggttgcagtgagccgagatcgcgccactgcactccagcctggcgacagagcgagactct

SEQ ID NO: 46028 - DNA, 201 bp, Homo sapiens
tgggcagcgcctggcggctggaccagcccctgcacttctttccacattgctgtccctccatggaactctgtcttcctggctatgtcccctttgccagtctkttcatttctgtctttccttccccttccgttgaaagatgtcgttcctcctgcgccagccctcccacccgatcgccccattgccccatctcctctctcccca

SEQ ID NO: 46029 - DNA, 201 bp, Homo sapiens
ccatcctgaccaacatagtgaagccccatctctactaagaatacaaaaattagctgggtgtggtggtgtgcgcctgtaatcccagctactctggaggctgrggcaggagactcgcttgaacccgggaggcggaggttgcagtgagccgagatcgcgccactgcactccagcctggcgacagagcgagactctctctcaaaa

SEQ ID NO: 46030 - DNA, 201 bp, Homo sapiens
tccctccatggaactctgtcttcctggctatgtcccctttgccagtctgttcatttctgtctttccttccccttccgttgaaagatgtcgttcctcctgcrccagccctcccacccgatcgccccattgccccatctcctctctccccaaccatgcctctcctgccccattctgcgtgtgtcactccagccccgccctctg

SEQ ID NO: 46031 - DNA, 201 bp, Homo sapiens
catcctgaccaacatagtgaagccccatctctactaagaatacaaaaattagctgggtgtggtggtgtgcgcctgtaatcccagctactctggaggctggrgcaggagactcgcttgaacccgggaggcggaggttgcagtgagccgagatcgcgccactgcactccagcctggcgacagagcgagactctctctcaaaaa

SEQ ID NO: 46032 - DNA, 201 bp, Homo sapiens
ttcctggctatgtcccctttgccagtctgttcatttctgtctttccttccccttccgttgaaagatgtcgttcctcctgcgccagccctcccacccgatcrccccattgccccatctcctctctccccaaccatgcctctcctgccccattctgcgtgtgtcactccagccccgccctctgaccaggtcgccccgtctcgc

SEQ ID NO: 46033 - DNA, 201 bp, Homo sapiens
caacatagtgaagccccatctctactaagaatacaaaaattagctgggtgtggtggtgtgcgcctgtaatcccagctactctggaggctggggcaggagaytcgcttgaacccgggaggcggaggttgcagtgagccgagatcgcgccactgcactccagcctggcgacagagcgagactctctctcaaaaagaagaaaaa

SEQ ID NO: 46034 - DNA, 201 bp, Homo sapiens
acaggtgacagttcccatcgtgtagggctttgagaggaacacagggtgctattgggctagcgtgggcttccctaaggaggcagcgggagtggagacccagkgggtgagctgggaagggtgctccaggcagagggaacagcatgtgcagaggcctgcaggtggaaccaagccccgggtgaccagccctcctgtgcccctagg

SEQ ID NO: 46035 - DNA, 201 bp, Homo sapiens
ctaagaatacaaaaattagctgggtgtggtggtgtgcgcctgtaatcccagctactctggaggctggggcaggagactcgcttgaacccgggaggcggagsttgcagtgagccgagatcgcgccactgcactccagcctggcgacagagcgagactctctctcaaaaagaagaaaaaattaaaaaattaaaaataaatgaa

SEQ ID NO: 46036 - DNA, 201 bp, Homo sapiens
ctcccggcgtgagccaggccctgtgagcattgtctaggcaaagacaacagtgtatgtacccgagtccgacccaaagctgagcactggatgtggtaggtttyatccttcaaggtagagatgaggaaacaggctcaaggggcagccacatgtggagacgtagacaggctgggcctcttctccctgcccaccttgtcacctgtg

SEQ ID NO: 46037 - DNA, 201 bp, Homo sapiens
taaggaggcagcgggagtggagacccagggggtgagctgggaagggtgctccaggcagagggaacagcatgtgcagaggcctgcaggtggaaccaagcccygggtgaccagccctcctgtgcccctaggagtttgaccctgaggaattttaccacctgctggaggcggctgagggccatgcgcgggagggccaaggcatta

SEQ ID NO: 46038 - DNA, 201 bp, Homo sapiens
ccctgctgaccctctagccgacacagctgctctcagccacgcccgcctacggagcaatagcatcggcgcccgacactccacaccaaggcctctggatgccrgccggggccgccgccttgggggcccaagagacccagcccctgagaagtccagagcctcctccagcggtggcagtggtggcggcagtgggggccgcgtgcc

SEQ ID NO: 46039 - DNA, 201 bp, Homo sapiens
agacgaatgcaggtgccagggaaggatgcacccagcagaggaaacatcatggacaaatggggctagacaggagggtgggaaaactgagaagaggccaggcrcggaggctcacgcctgtaatcccaacactttgggagcccgaggcaggaggatcactgagcccaggagtttgagaccagcctgggcaacacagggagaccc

SEQ ID NO: 46040 - DNA, 201 bp, Homo sapiens
aaggatgcacaggagttctccaggaactatcacaagaccttggaaagaatagaaagtagctgggtctggtgcccatatggagcactgagcctgaataagtrtgtgaggctgtaaagtcaccaggacctgtgtcaaaggcccagcccagaagatcccactgtcccagttttcccagccacctggttaatcattaagggaccg

SEQ ID NO: 46041 - DNA, 201 bp, Homo sapiens
ggcgtcctcagctggccgagcatggtggcagcctgcacccttggctcccttgtctggtgcagccagcagagccgccagccttgggcgcccatggccctccrtgtgagggcgtgagcggcctgccccagcctcacctgctgatggaggactcaatggcccagtgacctgacaccacaccaccaactccctcccaccagctga

SEQ ID NO: 46042 - DNA, 201 bp, Homo sapiens
gcccagtgggggcggggccctgtggtcgggctccccgggaggggcggggccaggccgtgtcagctgaccggcctggccaatggcacctggcggcggggcckggcaggccggggcggggccgggggcgggcctggcggcgcggactcccgggccatggacgagtcgagcctcctgcggcgccgcgggctccaggtgaggccc

SEQ ID NO: 46043 - DNA, 201 bp, Homo sapiens
tgttgttttaatttgcttttgttttagccattttgttttttcttttttttttttttgagacagagtctcgctctttcgcccaggctggagtgcagtggcgygatctctgctcactgcaagctccgcctcccgggttcacgccattctcctgcctcagcctcccaagtagctgggattacaggtgcccgccaccacgcccgg

SEQ ID NO: 46044 - DNA, 201 bp, Homo sapiens
ctgtagtcccacctacttgagaggctgaggtgggaggattgcttgagtttaggagactgaagctgcagtgagccatgatggcaccactgcactccagcctrggtgacagagcaagagcctgtctctgaaataatcatacttggccgggtgcggtggctcacgcctgtaatcccagcactttgggaggccaaggcgggcaga

SEQ ID NO: 46045 - DNA, 201 bp, Homo sapiens
agctgggtgtggtggtgtgcgcctgtaatcccagctactctggaggctggggcaggagactcgcttgaacccgggaggcggaggttgcagtgagccgagaycgcgccactgcactccagcctggcgacagagcgagactctctctcaaaaagaagaaaaaattaaaaaattaaaaataaatgaaggtagggtccgcccctt

SEQ ID NO: 46046 - DNA, 201 bp, Homo sapiens
gctgggtgtggtggtgtgcgcctgtaatcccagctactctggaggctggggcaggagactcgcttgaacccgggaggcggaggttgcagtgagccgagatygcgccactgcactccagcctggcgacagagcgagactctctctcaaaaagaagaaaaaattaaaaaattaaaaataaatgaaggtagggtccgccccttc

SEQ ID NO: 46047 - DNA, 201 bp, Homo sapiens
gagcatggaatgaaagtctaagtgtaccaggtgtggtggctcatgactgtagtcccagctactcaaggaggctgaggcagaaggatctctctctctctctyttttttttttttttgagaaagaatcatgctctgttacccaggctggagtccagtggcgcaatctcggctcactgcaacctccacctcccgggttcaagta

SEQ ID NO: 46048 - DNA, 201 bp, Homo sapiens
gccaaggcaggaggatcacttgaagccaggagtttgagaccagcttgggcaacatactgagatctcgtctctattaaaaaaacaattagccaggcatgatsgcacatgcctatagtcctagctacttgcggggctgaagtgggaagactgcttgagcccaggggtttgaggctgcagtgagctatggtcgcacaactgcac

SEQ ID NO: 46049 - DNA, 201 bp, Homo sapiens
gtgcgcctgtaatcccagctactctggaggctggggcaggagactcgcttgaacccgggaggcggaggttgcagtgagccgagatcgcgccactgcactcyagcctggcgacagagcgagactctctctcaaaaagaagaaaaaattaaaaaattaaaaataaatgaaggtagggtccgccccttccctctcccccgaccc

SEQ ID NO: 46050 - DNA, 201 bp, Homo sapiens
cccccgaccctccccgctgagatagaacaaactggggaccttttgcaggaggtaaagcgaggaggatgcataggcattgggcataacctaaggggcgggcsgggggtgggggtgccccgggcctcatgactacatccgcccttctcccaggcggcgactgcgccacgctcctgaagaacatgggcccgctgcccgtggaca

SEQ ID NO: 46051 - DNA, 201 bp, Homo sapiens
gggcgtcgtcctctatgagtttctggtgggctgcgtgcctttctttggagatacccccgaggaactcttcggtcaggtggtcagcggtgcgtttcctccaygggcccgggtttgagctgcagccccaccagagctctgggcagcggtcctccacccgcatgtcagggagagaagcaggaagaggggagggagttggatgcc

SEQ ID NO: 46052 - DNA, 201 bp, Homo sapiens; identical to SEQ ID NO: 20639

SEQ ID NO: 46053 - DNA, 201 bp, Homo sapiens; identical to SEQ ID NO: 20640

SEQ ID NO: 46054 - DNA, 201 bp, Homo sapiens; identical to SEQ ID NO: 8184

SEQ ID NO: 46055 - DNA, 201 bp, Homo sapiens
agaaatgccaggcataattgagggtaggagcaccataaataaaacagaggaattaagtggaagtttacatactgaacagtgggtccttctgccttctcccmaaaattggcttccaaaacactggctgatggatcaggctttgaaaaaaaaaaagagagagagaatctgatctagcctgaggtcatagaagcctgcctgcag

SEQ ID NO: 46056 - DNA, 201 bp, Homo sapiens; identical to SEQ ID NO: 20649

SEQ ID NO: 46057 - DNA, 201 bp, Homo sapiens
taggtagaacgggcgtggcagacctccctgcaggcttgttgctgggcgaacgagaaggatgccatgctgacacactgacgtgctctgtctccttgcagacrgaggcccgggagccatgggtgactggggcttcctggagaagttgctggaccaggtccaggagcactcgaccgtggtgggtaagatctggctgacggtgct

SEQ ID NO: 46058 - DNA, 201 bp, Homo sapiens
ttccatccctgcactgagcagctaggtgaccacatcttcccaactctgtgaagaggtggaggtttattctctggagaggataaaacagagaaatgcagccrggtgcagtggctcacgcctgtaatcccaggcgggaggcggaggcgggcggatgtcttgaggtcaggagttcgagaccagcctggccaacatggcgaaacc

SEQ ID NO: 46059 - DNA, 201 bp, Homo sapiens; identical to SEQ ID NO: 20650

SEQ ID NO: 46060 - DNA, 201 bp, Homo sapiens; identical to SEQ ID NO: 8186

SEQ ID NO: 46061 - DNA, 201 bp, Homo sapiens
gtcctagactggcggccacacaaacacaagcacatatgggctgggggtttaagagtgaggacagtgtcatggggctgggatcacaccatttgggttgggggtatggtgaagactttatggagagaagagtggctgtaagccccatcccacctgtattcccttgccaaggctactgtaccaaagtaccacagactgcacggc

SEQ ID NO: 46062 - DNA, 201 bp, Homo sapiens; identical to SEQ ID NO: 8187

SEQ ID NO: 46063 - DNA, 201 bp, Homo sapiens; identical to SEQ ID NO: 8188

SEQ ID NO: 46064 - DNA, 201 bp, Homo sapiens
tgggtcctagactggcggccacacaaacacaagcacatatgggctgggggtttaagagtgaggacagtgtcatggggctgggatcacaccatttgggttgrgggtatggtgaagactttatggagagaagagtggctgtaagccccatcccacctgtattcccttgccaaggctactgtaccaaagtaccacagactgcac

SEQ ID NO: 46065 - DNA, 201 bp, Homo sapiens
cccacctcacctccaagcactggtcaggcacggggctctggagaatgctaggtttgttggacgcaggcatctccttggtgatgtcactaggatgaaacacrgcaggttcacacctttcttttcctttgtttccttcttcctctcaccagcctatcccttgctgccaccaaccaaaatctaagttgacagctagtggctctc

SEQ ID NO: 46066 - DNA, 201 bp, Homo sapiens; identical to SEQ ID NO: 8190

SEQ ID NO: 46067 - DNA, 201 bp, Homo sapiens
atatctgctctccatgcacccagacctcagtgaggacaatggcaatgtacagaagtggaagagactgaatcttgccaatgagccacaaaggctgcagaaasaaaatgaacaattgaactgggtcttgactaggagttcactggggagggaaagagaacactgagcattcaagcggagaaaactgtttgtgcaaagtcagag

SEQ ID NO: 46068 - DNA, 201 bp, Homo sapiens; identical to SEQ ID NO: 8193

SEQ ID NO: 46069 - DNA, 201 bp, Homo sapiens; identical to SEQ ID NO: 20652

SEQ ID NO: 46070 - DNA, 201 bp, Homo sapiens; identical to SEQ ID NO: 8195

SEQ ID NO: 46071 - DNA, 201 bp, Homo sapiens
aaaaaatggtatcacgtttcatgagggaggcctgattactagtgagtgtagacttctatgtgtgtgtgtgtgtgtggcaggtcttactctgtttcccagaytggagtgcagtggtacaatctcaactcactacaacctccatctcccaggcttaagcaattcttgtgcctcagcatccctagtagctgggattacaggtgc

SEQ ID NO: 46072 - DNA, 201 bp, Homo sapiens
aattgctttgcctattattaattattaaacagggaaaaaatggtatcacgtttcatgagggaggcctgattactagtgagtgtagacttctatgtgtgtgwgtgtgtgtggcaggtcttactctgtttcccagactggagtgcagtggtacaatctcaactcactacaacctccatctcccaggcttaagcaattcttgtg

SEQ ID NO: 46073 - DNA, 201 bp, Homo sapiens
acctgcctcggcctcccaaagtgctgggattacaggcgtgagccaccatgcctggcctaatttcctcttaacatatgccaccctccctgtatgctggataygacactccagttggtccgaatccagattattgcctctcttgccccaaaacttctacctctcttaatgcaacctaagattataattttttttattttctcc

SEQ ID NO: 46074 - DNA, 201 bp, Homo sapiens; identical to SEQ ID NO: 20659

SEQ ID NO: 46075 - DNA, 201 bp, Homo sapiens; identical to SEQ ID NO: 8183

SEQ ID NO: 46076 - DNA, 201 bp, Homo sapiens; identical to SEQ ID NO: 20667

SEQ ID NO: 46077 - DNA, 201 bp, Homo sapiens
aataaaacagaggaattaagtggaagtttacatactgaacagtgggtccttctgccttctccccaaaattggcttccaaaacactggctgatggatcaggytttgaaaaaaaaaaagagagagagaatctgatctagcctgaggtcatagaagcctgcctgcaggaggtgggcttcagaaagcctaaaacgtgagaaggaa

SEQ ID NO: 46078 - DNA, 201 bp, Homo sapiens; identical to SEQ ID NO: 20668

SEQ ID NO: 46079 - DNA, 201 bp, Homo sapiens
ttgggaactttgtggcctgtgcctcaccctgcaatgacaattcctttcaagagtctagaatttgccagcatcagctttggaggtggaagggggtgggagtrgaggtggaggaagaagacaggaccaaatgtccctcctcaagtggcaggtggtcattattgctgaccggtggagctaaaggatgatgctgccttcagctcc

SEQ ID NO: 46080 - DNA, 201 bp, Homo sapiens
tcccctccctcaaagctcacccactctgagcttggtgtcagagccggggtcaggctggggctcaggaacttggacctttggcaagacaagttgggtcctaractggcggccacacaaacacaagcacatatgggctgggggtttaagagtgaggacagtgtcatggggctgggatcacaccatttgggttgggggtatggt

SEQ ID NO: 46081 - DNA, 201 bp, Homo sapiens
ggagaagaaaggtttcagtgagcagaaatggcatccttcccctccctcaaagctcacccactctgagcttggtgtcagagccggggtcaggctggggctcwggaacttggacctttggcaagacaagttgggtcctagactggcggccacacaaacacaagcacatatgggctgggggtttaagagtgaggacagtgtcat

SEQ ID NO: 46082 - DNA, 201 bp, Homo sapiens; identical to SEQ ID NO: 8191

SEQ ID NO: 46083 - DNA, 201 bp, Homo sapiens
gttgaggtccctgtctaagagattctcctccagccagggtgagaggccagaggctgcaggttagaagccagcgttagagccagcattacctgaggggcttsagagccctggtttggtgtttctgttatccccaacctttcctactttggaaaggtaggagaagaaaggtttcagtgagcagaaatggcatccttcccctcc

SEQ ID NO: 46084 - DNA, 201 bp, Homo sapiens; identical to SEQ ID NO: 20671

SEQ ID NO: 46085 - DNA, 201 bp, Homo sapiens
tcacagcaggttggcaagttggcccctctcccatcaggatgggtgttgaaaacaccagctctgtacccctcatccagagctcattcgctcactcgctgctyacccagcgagtctgaatgctcagcctaataaattacgaccctcttccttttccagctgtggttcccattgttccctctgaatcgctgaaatcgatcaggc

SEQ ID NO: 46086 - DNA, 201 bp, Homo sapiens
ctgaatcttgccaatgagccacaaaggctgcagaaacaaaatgaacaattgaactgggtcttgactaggagttcactggggagggaaagagaacactgagmattcaagcggagaaaactgtttgtgcaaagtcagaggagggattgacaggctgagggggcatttaggtcctgatgagccacctagatacaggaggcgtgg

SEQ ID NO: 46087 - DNA, 201 bp, Homo sapiens; identical to SEQ ID NO: 20675

SEQ ID NO: 46088 - DNA, 201 bp, Homo sapiens; identical to SEQ ID NO: 2700

SEQ ID NO: 46089 - DNA, 201 bp, Homo sapiens
acccagcccctgcaggctcaaagattagagtgaagccagctgggtaagatatgaggcggggagcagggacctgaggctttgagccccctaagaagcagaakataacacctctaccatcatcactagctcccactgtctgggggtagccagccttgggcaaaagggaggaagggcttagcccagctgcacaactttggataa

SEQ ID NO: 46090 - DNA, 201 bp, Homo sapiens
tgatgcagatgtctgtacctaaatgttttccaaatttctatttccttaaaagaaaaagatattccaagaagtaaaattactgggtcacaaagtaggaaatyttaaataaagaaaatttaggggcttttatctgattgtgaaagtgattcattgtgggtgactcagaaacacagaaaagcacaaattacaagaaatgaaagc

SEQ ID NO: 46091 - DNA, 201 bp, Homo sapiens
ttggaaataccacttaaaggctttatcagtgcctacttaaaccatgaccctgatattggatttttaggatgtttgcaactaatcatcctctactataaatkgtactgtgatgcagatgtctgtacctaaatgttttccaaatttctatttccttaaaagaaaaagatattccaagaagtaaaattactgggtcacaaagta

SEQ ID NO: 46092 - DNA, 201 bp, Homo sapiens
agccaccaggttcagcctgagcctgctctcctcctattcctccagataatcctgatttccagaagtctctggccaacctgcaatttgtttactttcctctytttttttttttttttttttttttttgagacgaagtctccctctgttgcccaggctggagtgcagtggcaggatcttggctcactgtaatctctgcctcct

SEQ ID NO: 46093 - DNA, 201 bp, Homo sapiens
tgaactgggtcttgactaggagttcactggggagggaaagagaacactgagcattcaagcggagaaaactgtttgtgcaaagtcagaggagggattgacargctgagggggcatttaggtcctgatgagccacctagatacaggaggcgtggctgaggatgggcccactgctggcagaattgacctatgtggaggcgaccc

SEQ ID NO: 46094 - DNA, 201 bp, Homo sapiens
tatcacgtttcatgagggaggcctgattactagtgagtgtagacttctatgtgtgtgtgtgtgtgtggcaggtcttactctgtttcccagactggagtgcmgtggtacaatctcaactcactacaacctccatctcccaggcttaagcaattcttgtgcctcagcatccctagtagctgggattacaggtgcgtgccacca

SEQ ID NO: 46095 - DNA, 201 bp, Homo sapiens; identical to SEQ ID NO: 8194

SEQ ID NO: 46096 - DNA, 201 bp, Homo sapiens; identical to SEQ ID NO: 20689

SEQ ID NO: 46097 - DNA, 201 bp, Homo sapiens
aagtaggaaagacagggatggggttatgtggagtgcactgggaattttgcataacccaaggtcatcttatctatgacggatgggagcatgagaacatcacrggctgcacataaacaaggctgtcaagctgggtgatgtcaaaacttcttcccagtctaacatgctggctcactggccactggcttgccagcctcatggttc

SEQ ID NO: 46098 - DNA, 201 bp, Homo sapiens
attgctttgcctattattaattattaaacagggaaaaaatggtatcacgtttcatgagggaggcctgattactagtgagtgtagacttctatgtgtgtgtrtgtgtgtggcaggtcttactctgtttcccagactggagtgcagtggtacaatctcaactcactacaacctccatctcccaggcttaagcaattcttgtgc

SEQ ID NO: 46099 - DNA, 201 bp, Homo sapiens
cttgactatggctctttcccttctctaggcctcaatttccccattgtgaaatgaaagggttggatgagaaacacgtatgtgacaattaggtatgaggagcrttgcgtgtggtaacctgtcactgatcattgatctgaaactcatgagtgatgtgctatttcgcatgaatcagaaaaaagtcaaggttgtttctacaataag

SEQ ID NO: 46100 - DNA, 201 bp, Homo sapiens; identical to SEQ ID NO: 20694

SEQ ID NO: 46101 - DNA, 201 bp, Homo sapiens
ggacatcactcatattggattaggacccaccctaatgactttgatctaacttgattacctctgaaaagaccttatttccacataaggttacattctgaggyattaggggttaaaacttcaatatatctggcaggaggcaccattcaacccataccaccaccctcgtggccccacctcacctccaagcactggtcaggcacg

SEQ ID NO: 46102 - DNA, 201 bp, Homo sapiens; identical to SEQ ID NO: 20697

SEQ ID NO: 46103 - DNA, 201 bp, Homo sapiens
ctcaaactcctgacctcaggtgatccacctgcctcggcctcccaaagtgctgggattacaggcgtgagccaccatgcctggcctaatttcctcttaacatrtgccaccctccctgtatgctggatatgacactccagttggtccgaatccagattattgcctctcttgccccaaaacttctacctctcttaatgcaaccta

SEQ ID NO: 46104 - DNA, 201 bp, Homo sapiens; identical to SEQ ID NO: 20699

SEQ ID NO: 46105 - DNA, 201 bp, Homo sapiens
atcagctttggaggtggaagggggtgggagtggaggtggaggaagaagacaggaccaaatgtccctcctcaagtggcaggtggtcattattgctgaccggwggagctaaaggatgatgctgccttcagctcctaaaaccccttccactacccagcccctgcaggctcaaagattagagtgaagccagctgggtaagatatg

SEQ ID NO: 46106 - DNA, 201 bp, Homo sapiens
aagacaggaccaaatgtccctcctcaagtggcaggtggtcattattgctgaccggtggagctaaaggatgatgctgccttcagctcctaaaaccccttccrctacccagcccctgcaggctcaaagattagagtgaagccagctgggtaagatatgaggcggggagcagggacctgaggctttgagccccctaagaagcag

SEQ ID NO: 46107 - DNA, 201 bp, Homo sapiens; identical to SEQ ID NO: 8189

SEQ ID NO: 46108 - DNA, 201 bp, Homo sapiens; identical to SEQ ID NO: 8192

SEQ ID NO: 46109 - DNA, 201 bp, Homo sapiens
cctgcaatgacaattcctttcaagagtctagaatttgccagcatcagctttggaggtggaagggggtgggagtggaggtggaggaagaagacaggaccaartgtccctcctcaagtggcaggtggtcattattgctgaccggtggagctaaaggatgatgctgccttcagctcctaaaaccccttccactacccagcccct

SEQ ID NO: 46110 - DNA, 201 bp, Homo sapiens; identical to SEQ ID NO: 20701

SEQ ID NO: 46111 - DNA, 201 bp, Homo sapiens
ccccgggctctgctagaaagtgccggggtccagattcctttcaggtgactgggttgggaggagaagtcgctcagcgtaattgtcggagccgaaataaacaragactccgcggccgggcgggaccttacccggaagtcccccagaacagcactacccttcgctgaaacctcgcccgccccctccaacccagagacgaaaagg

SEQ ID NO: 46112 - DNA, 201 bp, Homo sapiens
ttgaagatgaactaaatcgtgaaagtgacagtgatgtcttcaccgttgtaattagctatgccatcatgtttctatatatttccctagccttggggcacatsaaaagctgtcgcaggcttctggtaagccggggggggggtggtgtatgttctagaggttaacagcagtgcacagtgtaacgtcatatttttgcctctttat

SEQ ID NO: 46113 - DNA, 201 bp, Homo sapiens
tgtgaagggcatcagctctccagtcaaattgaactgcttgctagcaaaatcctgcccatcttccagggccccatttcacatgctacattatctacgacatycttgtcctgttcccctaactagaatgccttccctctgaagttctgaatctttatttaaactgctgcaacagcatttgctgcctcattaaaagaccttggt

SEQ ID NO: 46114 - DNA, 201 bp, Homo sapiens
ttcgtttcctcagtggggttgcagcagtgggtgaggtggtgtgccagtgccgaggacacggctgcgaccaaggcagacatggtccttgcctttgtggcccyaccatctagtcagggtggcacagcagaaccaagtaattaatcatagctggggaggcgcgaaagcagcaggacaagagtgggaatagcagggcagggttga

SEQ ID NO: 46115 - DNA, 201 bp, Homo sapiens
actagaggctccccaaggactggctattctaaccaacacagtaaaagtctgtcattacaagaagtggtttcgtcatgcaggtaaagaccccaacttgaccktacacttcccattccaactaataatgtcaggagtcactcagcattctgagtcagggaggcagacctgtcttagcatatgagtcatcttctaagacagtga

SEQ ID NO: 46116 - DNA, 201 bp, Homo sapiens
tggtgtgcgtctgcagtcccacctacttgttaggctgaggcaggaagcttgcttgagcccagaagggtgggcttaggatgcagtgagtcgtgttcataccrctgcactgcagcctgaggaagaaagcaaagagcccatctccaaaagagagggagagagatgtggtctcactctgttgtccaggctggtctcaagcaattc

SEQ ID NO: 46117 - DNA, 201 bp, Homo sapiens
agccaggtgaagtggtgtgcgtctgcagtcccacctacttgttaggctgaggcaggaagcttgcttgagcccagaagggtgggcttaggatgcagtgagtsgtgttcataccactgcactgcagcctgaggaagaaagcaaagagcccatctccaaaagagagggagagagatgtggtctcactctgttgtccaggctggt

SEQ ID NO: 46118 - DNA, 201 bp, Homo sapiens
caactttttggtttatcttaaagtttatttcacataatccagttttttcttatttgtccagtccatcacctaagaatgcaaactcataacatgtgttgccsgagcagacctagaaatgtttacaagtcctctctgaaacacagaattgtacattcaactctaggtttaatacagccctgtaaagtaaaaaggaggaccttt

SEQ ID NO: 46119 - DNA, 201 bp, Homo sapiens
aagaagccagacagcctgggaaggagattcttaaagctgttaaaatgtatctaaaaaaaaagcaaaagcaaatgtggaacagtagataaaatgtttttccygtgagcttttatcagtccatataaacaagagttttaagttttttattttgaaatagtttcagattcacagaaagttgcaaagaaacttttatttttcctc

SEQ ID NO: 46120 - DNA, 201 bp, Homo sapiens
ctgttaaaatgtatctaaaaaaaaagcaaaagcaaatgtggaacagtagataaaatgtttttcccgtgagcttttatcagtccatataaacaagagttttmagttttttattttgaaatagtttcagattcacagaaagttgcaaagaaacttttatttttcctcttaataatgaggaaatagaagccaagagaggtgaag

SEQ ID NO: 46121 - DNA, 201 bp, Homo sapiens
ggacaggaagttcattcttgctctttacattggggtgttgatgtttgtggttttgttgttttgttcttcatgttactcatgatgtattgatattaattaamctaaatacatatggaaatattctttcattacttagagcttatatagttcctggtgcagatgtgcaaaaatagtgctttagtaattgctaagtcactatct

SEQ ID NO: 46122 - DNA, 201 bp, Homo sapiens
cacacttaaggaaacaccatctggggacacagggagaaggtgctgtctacaagccaggaagagagccctcaccaggaaccaaataagctccccatgctgawcttgaactctctaacctctagaactgtaacagataaattcctattgtttaagtcacaccagtctttggtattttgtgcaatggcctcagacgtcactaaa

SEQ ID NO: 46123 - DNA, 201 bp, Homo sapiens
tgcatagagtatctgagaaaatgaggcatgcagtcgatgtttggtatttttgtttcatttatttattttactgccatgcctcgagaacaatagatgttcaktaagtatttgaatatgttagttaatgctttaggatttcctaaaggcagtggaatagaattctcactgagttcagagcttttctgataataatgtgtgctt

SEQ ID NO: 46124 - DNA, 201 bp, Homo sapiens
cctgctccaggtgtgatcccaggtgcaatccagctcaacaagcacactgagcctcaggagctcttgggatcagaacccaggactcgatcccactccgtgcygccttctcacccacccctcttccaccaagtgggtggaaatagcacttgctttgaaataagtaacgaatgatctttgtgaaaaggaacctaaacagcagtg

SEQ ID NO: 46125 - DNA, 201 bp, Homo sapiens
acaaaataaataaaatcacagattgcatttaggtacttccatacattgctggctgcaatttctttggagggcaatttgacaacaatcaaaacttaaatacscatttcctttgatccaacaatataaaagtatttccaacagttctatttgcgcatgattgcaaagatttacatccaagaatgggccaggagtggtggctca

SEQ ID NO: 46126 - DNA, 201 bp, Homo sapiens
tctgggtggtcagtggccatgagaggtcaagtgagttgctttcggtgagtcttgtagacagccagcaaggttttctgcaagggatgtttcccaaaggagtytgaccacttggcagtggtgacaggatgaacacgcagtgttcgggagtgagagcgagctttaatgaggcctcccctctcccctccagtgtgttttatgtct

SEQ ID NO: 46127 - DNA, 201 bp, Homo sapiens
ctaacctttaaaaatagaaactctttagctgtgtaactactaaattctgggtagaagccaaaacaatcagcacttctcatttctgaacttagataatccarttgtactccctcagctcattgtgagttttgacaagttctgcatccatgaacaccagatgtaatacaatagggaatttcaaaggaaggattacacacctag

SEQ ID NO: 46128 - DNA, 201 bp, Homo sapiens
tccttttacttctatggccacttcaccttgcacaaaaatgacccacggttgaaagaacaatactgatttgcttcatttatagctttgtcactaaattgaascactgaagtagaagattaagaaaatgaggggctttttatcatctccgggggatagaaagtagttctattacaatctaatatactagttccttttaagaaa

SEQ ID NO: 46129 - DNA, 201 bp, Homo sapiens
ctcacgcctgtaatcccagcactttcggaggccgaggcgggtggatcacaaggtcaggagatcgagaccatcctggctaacacagtgaaaccctatctctrctaaaaatattctttaaaaaattagctgggtgtggtggcaggtgcctgtggtcccagctactcgggaggctgaggcaggagagtggtgtgaacccgggag

SEQ ID NO: 46130 - DNA, 201 bp, Homo sapiens
gggcacgactacacttcttccaaggggcagaacatggtgtgcggcggcatgggctgcaacaatgattccctggtgcagcagatatttaacgcggcgcagcyggacaactagtcagtaccaccttgtcttgtacttcagaagcagcggaggaggctctcagccaggcagtcagctcaggcctgaaatgtctcactgaaaata

SEQ ID NO: 46131 - DNA, 201 bp, Homo sapiens
atgttgatagttgaaaatggcatccttgagtagccactgaatccttctccacatgacactctaagcagcagctcccaaatccacaggcactcgcttacaaratgtttgccgttgttttcaaaggcagtctttctcttctgtgcacacaactcattggggaagcagccttgttaatgaccagaagctcttgactcaccacat

SEQ ID NO: 46132 - DNA, 201 bp, Homo sapiens
tttagtaacattatcccacattaaggttgcgattcttttagcctcgtcatgctccttgccagcccatccatgtatagggttatgggctatctcactccccsatccagccaggcagccagttacccacggaagccagatatatggcccaaaaatagtgatgatgaccggaagtctctggccttgatttggaagctttgggag

SEQ ID NO: 46133 - DNA, 201 bp, Homo sapiens
gtcttcaccgttgtaattagctatgccatcatgtttctatatatttccctagccttggggcacatcaaaagctgtcgcaggcttctggtaagccggggggkgggtggtgtatgttctagaggttaacagcagtgcacagtgtaacgtcatatttttgcctctttattcttattccattatgtttaaaactgccataaattc

SEQ ID NO: 46134 - DNA, 201 bp, Homo sapiens
aaagaccccatctctacaaaaaatttttaaaattagccaggcatggggatacgtctctgtagtaccagctactcaagaggctaaggcaggaggatcccttmagctgaggagttcgaggctgcagtgagctgtaatagtgccactgtactccagccgaggcaacagagagagactctatttcaaaacaggaacaaaagcaaa

SEQ ID NO: 46135 - DNA, 201 bp, Homo sapiens
ctttggagccggggatgtggaggttgcagtgagctgagatcatgtcactgcactccagcctgggagacagagcaagactctgtctcaaaaaaaaaaaaaaraaaaaaggaaaaggaaagataaatttataatgtattgccaggaccacacaaacccttcatatgtaccaggaatgcaagtagaggaattgagttattttga

SEQ ID NO: 46136 - DNA, 201 bp, Homo sapiens
caggggagaagttgcaatctgtatttaaaatttactgtgcatcagagaggaaaatgccatttctaattgttggagaagggatggtgtcagcaactgactarccataggggaaacaattgactttgatctctgacttgttcatttcaccaaaataaattccagatggataaaagattgaaatgtaagaactgggccaggcgt

SEQ ID NO: 46137 - DNA, 201 bp, Homo sapiens
acttactgttccacctgcttcctgtttctttgccgtttccagaccttccactttgccacgcaagctatctttgtaaaacagctcatgacatttctttcccrgaaatctctaattgttccccagtgcctccagaataaaaatccaaactacttaactggcactgagtccttttattttgcatttgtctgtccattactcttc

SEQ ID NO: 46138 - DNA, 201 bp, Homo sapiens
aactgcaccattttgagtgtgttaaattacttccagaacagccattccgtgctggaccacaagaaaggggacgacttctttgtgtatgccgattaccacaygcactttctgtactgcgtacggtaagtggcaagagacaatcattggtagacaccattcttgggtctgacttagggtacatgggcaaaagcttgttttatg

SEQ ID NO: 46139 - DNA, 201 bp, Homo sapiens
tgtcatggtatatcttgaaaatcttagcgtataatggcaaagctgcctttaagttaggtttcaagaaagtgaatgatgttgaacttaatggaatatttatkgttgctcacttttgtatttacttcagatagtagaccttgcctttttcttgaaattgagatgagcagagaaagaagacttcagtggcgtttctctattgag

SEQ ID NO: 46140 - DNA, 201 bp, Homo sapiens
gataaatacatatatcaaacgcatggctcaaaaatgacaacgcgtcttctttatctgccttcacgtagaacttaaaacagaccctggtccccacctcgggrtttcctcgcgcccacgggctgcgctgcgcagctgggccagcaggtggcgaggctcccgcactttttttcccgggcctggccgcaccgccaccgcccaccc

SEQ ID NO: 46141 - DNA, 201 bp, Homo sapiens
cacacctgtaatcccagcactttaggaggccaaggcaggagaatcatgaggtcaggagtccattgcaaacagccctggcgacagtgcgagactgtgtctcmccaaaaaaaaaaaaaaaaaaaaaaaagtcagagtcaaatgagcgaaatcagattcaaatctaattaaatggagtactatagtccttttagatatttgcat

SEQ ID NO: 46142 - DNA, 201 bp, Homo sapiens
ctgaccacttggcagtggtgacaggatgaacacgcagtgttcgggagtgagagcgagctttaatgaggcctcccctctcccctccagtgtgttttatgtcytctacgaacagtacctgaccatcattgacgacactatcttcaacctcggtgtgtccctgggcgcgatatttctggtgaccatggtcctcctgggctgtga

SEQ ID NO: 46143 - DNA, 201 bp, Homo sapiens
cattattcagcgaaattaacgaggatctaaataaatggaaagacattccatgtttatcaatcaaaagacttaatattgtttagatatcagtattctccaarttgttttatagattcagggcaatctctgttataatcccaactgacttctttgtggaaattgacaagctgattctgaaattcacatagaagtttgagggac

SEQ ID NO: 46144 - DNA, 201 bp, Homo sapiens
attggtgattgtgtctgtcgcctctctcaggtggattcgaaggtctcactaggcatcgcgggcatcttgatcgtgctgagctcggtggcttgctccttggktgtcttcagctacattgggttgcccttgaccctcattgtgattgaagtcatcccgttcctggtgctggctgttggagtggacaacatcttcattctggtg

SEQ ID NO: 46145 - DNA, 201 bp, Homo sapiens
tttactaagcagtctctgtcttatgattcatttgttgttccagatagcaatatttgtgggtgttctgtcattcagcatcgcagtcctgaacaaagtagatrttggattggatcagtctctttcgatgccagatgtaagatgacttccttttttttttttttttaacttctttagctgatgatgaatacatttttcaaaaca

SEQ ID NO: 46146 - DNA, 201 bp, Homo sapiens
actacacttcttccaaggggcagaacatggtgtgcggcggcatgggctgcaacaatgattccctggtgcagcagatatttaacgcggcgcagctggacaaytagtcagtaccaccttgtcttgtacttcagaagcagcggaggaggctctcagccaggcagtcagctcaggcctgaaatgtctcactgaaaatagactttc

SEQ ID NO: 46147 - DNA, 201 bp, Homo sapiens
gatcacgccactgcactccagcctgggctacagagcaagactctgtctcaaaataaaaaaaaaaagaagccagtctgggagagaacaagctaaacctttgstgttcccttatctgggggccttcttcatccctgaaatgtacagctgggtctgacctctgagtccagggtcaggtgattttgcttagcctcaagtgctcag

SEQ ID NO: 46148 - DNA, 201 bp, Homo sapiens
gctacagataatttagtcttgggtcaactttctcctctccctctacaagggaaatgttcaaaagtgtttagactttggtgatgcagcatgattgggaaagyagagggcacagaaagatgccaggctttgtggtctccaggcaagctcaggaatgtgacaaagcataccgaaaagaaaagcgggctgggagcagtggctcac

SEQ ID NO: 46149 - DNA, 201 bp, Homo sapiens
ccacttgtttaaaacgtttgtatattatattcacatatgtatgctttccactacatagaagttttctggaaggtatttctgcacatttataaagatgcacrtctaataatttcatttccccccattttctacttattgctctgaggtcaacactgaatagtccttatgaagatggtattgaatattctttcaacaaaaaag

SEQ ID NO: 46150 - DNA, 201 bp, Homo sapiens
tctcatctataacagtagaccaaggatctacaggcaagatcaaacacagatgggaaaaacaaaaacagtgaaggtatgaagtgagatgcagccgccagctmgtgggatgcagggaccctgaatttactactcctccactatcccccactactgccaccttgccctatggcaggcggcaaatctcagcgaccttattctaat

SEQ ID NO: 46151 - DNA, 201 bp, Homo sapiens
gttcaattacaggttggtaaaagtggtttctaacacagtatctcttcttttaggtgttcagtggaatcacacttacaaaatttggagggattgtggtgttsgcttttgccaaatctcaaattttccagatattctacttcaggatgtatttggccatggtcttactgggagccactcacggattaatatttctccctgtct

SEQ ID NO: 46152 - DNA, 201 bp, Homo sapiens
ccagctttatcttacatattccctgtccctgccctgcaaggagctctggttccttttattggagaatggtatgtagaaacgaagatctgggcactaggtaygctcattgctgctggaaagagtagcatgtttttgtttgtttgtttgtttttttgagatggagtcttgctctgtcaccaggctggaatgcagtggcgcgat

SEQ ID NO: 46153 - DNA, 201 bp, Homo sapiens
atattttgttcctcctgaaactcaaccactgattttagcattcattgttgggtcttgtctgcaacagttataactaaggtgtttgcctgatagtgattttyttctctttccctctcttcctctgcatttactaactggacttctgtacagaaagctatcccttctccctcatttatttactcagttatttacatcatggac

SEQ ID NO: 46154 - DNA, 201 bp, Homo sapiens
aatatcttgggggaagatgctttgagactatactaatattttgttcctcctgaaactcaaccactgattttagcattcattgttgggtcttgtctgcaacmgttataactaaggtgtttgcctgatagtgatttttttctctttccctctcttcctctgcatttactaactggacttctgtacagaaagctatcccttctc

SEQ ID NO: 46155 - DNA, 201 bp, Homo sapiens
gcaaaatatcgcaaggacaaaaaaccaaacaccgcatgttctcactcataggtgggaattgaacaatgagaacacatggacacaggaaggggaacgtcacrcaccggggactgttgtggggtgggggcctgggggagggatagcattaggagatatacctaatgctaaatgacgagttaatgggtacaacacatcaacatg

SEQ ID NO: 46156 - DNA, 201 bp, Homo sapiens
gcccctcactgtcagtattttaaaatgttttacaaaaaatctggagacctattcttctaacagtcctccctgcatgtctccgccagtggttgaccctgccygcgttcgctgcaggcctctgactccggaaggcaaacagaggcctcaggggggagacttcatgagattcctgcccatgttcctttcggataaccctaaccc

SEQ ID NO: 46157 - DNA, 201 bp, Homo sapiens
tacttagaaaattgcaccccgccccaggagctctccgaccagtgccttttgcctcctatgtggttatcaggtacttttaatcattaaagatgagagcactygagaaggtattcatggaaaatagaacagtgtatccgtactctcagatatgagccctgcttcagataggggagcactgaggtccaagaaaagaagttgtga

SEQ ID NO: 46158 - DNA, 201 bp, Homo sapiens
accatgcctgcatgcctgactaatttttgtatttttagtagagacggggtttcaccgtgttggccaggctgatctccaactcctgacctcaggtgatctgmccgccttggcctcccagagtgctgggattacaggagtaagccaccgtgcccagccggccactcattctttagaaagtcagagtcaaggccaggctcagtg

SEQ ID NO: 46159 - DNA, 201 bp, Homo sapiens
tggtgttggcttttgccaaatctcaaattttccagatattctacttcaggatgtatttggccatggtcttactgggagccactcacggattaatatttctycctgtcttactcagttacataggtaagagttctcatcttaaaagggtggcacaatagaaggacattactgaaagggaattctatcctgaggcattctttt

SEQ ID NO: 46160 - DNA, 201 bp, Homo sapiens
ggctcaaggaatcctccctcggcagcctctggagtagctggggccacaggtgtataccaccaaactcagctaattttttttttttttttttttttttttgkagagacagggttttgccatgttgtcgtccaggctggtctcgaactcctaggctcaggcaatcctcctgcttcagcctcccagagtgctgggattataagc

SEQ ID NO: 46161 - DNA, 201 bp, Homo sapiens
agctgccaagactgctctattgtctgtggccccaagccccagcccccacctcctcctgctccctggacgatccttggcttggacgccatgtatgtcatcakgtggatcacctacatggcgtttttgcttgtgttttttggagcattttttgcagtgtggtgctacaggtaagcagttttgtttgtcatccagggcaaaaag

SEQ ID NO: 46162 - DNA, 201 bp, Homo sapiens
ccagccaactagctccctttctcctgcagaaataagaaaaagtctctctctctcatagggccatcagtaaataaagccaaaagttgtgccactgaagagcratacaaaggaacagagcgcgaacggcttctaaatttctagccctctcgcagggcatcctgactgaactgtgtctaagggtcggtcggtttaccactggac

SEQ ID NO: 46163 - DNA, 201 bp, Homo sapiens
acaactgtagcctcctgggctcaagcaatcctcctgcctcagcctccttagtagctgagactacaggtgtgtgccactatgcccagctaacttaaaaaaawttttttttttgtatagagggagtcttgctacattgccctggctgagaatttacatttctaacaagttccaaggagatgctcctgctgctggtctggggat

SEQ ID NO: 46164 - DNA, 201 bp, Homo sapiens
tctgcagtcatcatgtgtgccaccatcgccatggtcttggtcaacatgtttggagttatgtggctctggggcatcagtctgaacgctgtatccttggtcarcctggtgatggtgagtcctcatacagtctcagtttgtccctagctcctgtttcacttgggggaattggctgtcttagattccatgtaaaccctaaagatg

SEQ ID NO: 46165 - DNA, 201 bp, Homo sapiens
agtgattgttctaccttagcctcctgagtagctaggactacaggcatgcactaccatgtctagctaattttatttatgtttttctttatttttttttttttgagacagactcttgctctgtcaccgaggctggagtacagtggcatgatctcagcttactgcaacctcctcccgggttcaagcgattctcctgcctcagcc

SEQ ID NO: 46166 - DNA, 201 bp, Homo sapiens
ttctgtagattttccagtccatgggatggagcccatgaacaatgccaccaaaggctgtgacgagtctgtggatgaggtcacagcaccatgtagctgccaasactgctctattgtctgtggccccaagccccagcccccacctcctcctgctccctggacgatccttggcttggacgccatgtatgtcatcatgtggatcac

SEQ ID NO: 46167 - DNA, 201 bp, Homo sapiens
agtgggggcaccaggagctggagcctggggagtgggaagcgagagcacagagctgactgaggaccacgaggtcgtcgtggaggacctaggctgaaggtccygaagaaatccccatagtttcactgccaggccagccaggtggacatctcagggctgaggaggtgagaaggcaagacagaaagtgaaacagcactttatagg

SEQ ID NO: 46168 - DNA, 201 bp, Homo sapiens
acctgccttggcttcccaaagtgctgggattataggcgtgagccaccacttccagccaggatgacttttttttttttttttttttttttttggtcttctcwgctgtgtctctagaagatgaccttttgagaagcaaacctgaatgttgattcaagcccaaatttcctgggctcaggtgttaattttttaagtctttggaac

SEQ ID NO: 46169 - DNA, 201 bp, Homo sapiens
ccacttggcagtggtgacaggatgaacacgcagtgttcgggagtgagagcgagctttaatgaggcctcccctctcccctccagtgtgttttatgtcttctrcgaacagtacctgaccatcattgacgacactatcttcaacctcggtgtgtccctgggcgcgatatttctggtgaccatggtcctcctgggctgtgagctc

SEQ ID NO: 46170 - DNA, 201 bp, Homo sapiens
cgacctcctgagctcaagcaatctctcaactcagcgtcccaagtagctgggactacaggcacatgccacaacccctggctaattttttaaaaatttgtttggggagatggggcttcaccatgttgcctagcctggtctcaaactcctaggctcaagcaatccaccctcctcagccttcctaagtactgggagtacaggcat

SEQ ID NO: 46171 - DNA, 201 bp, Homo sapiens
ttgtctcctttttcctttgggtttcctcttctagcaatgtacaatgcctgccgggatgtggaggccccctcaagtaatgacaaggccctgggactcctgtrtgggaaggacgctgacgcctgtaatgccaccaactggattgaatacatgttcaataaggacaatggacaggcaccttttaccatcactcctgtgttttca

SEQ ID NO: 46172 - DNA, 201 bp, Homo sapiens
ggtgagaaggcaagacagaaagtgaaacagcactttataggatagggatgggaaggtcatctgcatcatgggactccttggggaggggttcggtcattgcbccagatgaaggtttagtcttttcatcgtaaatttgctttcactgttgggaaagagatcttcacctccattttcttaacttcaaaatggaaatgacagatg

SEQ ID NO: 46173 - DNA, 201 bp, Homo sapiens
accacttacaaccataatttggtacaatcgtttcaaaactacttgaaaaacaactttgcagtacgtagtaagttgaagctaaccctcctcccagaaatttsacttatagatgcctgccttagagaaactctaaatgcatataaacctggagacccatataagaacacccactgtaacactattgtgattgtgaaaaattga

SEQ ID NO: 46174 - DNA, 201 bp, Homo sapiens
ggccatggcaccagggtcggagccacgtacttcatgacctaccacaccgtgctgcagacctctgctgactttattgacgctctgaagaaagcccgacttayagccagtaatgtcaccgaaaccatgggcattaacggcagtgcctaccgagtatttccttacaggtaaagcctgccctttttcaatggggtttacccagca

SEQ ID NO: 46175 - DNA, 201 bp, Homo sapiens
tcgacctcctgagctcaagcaatctctcaactcagcgtcccaagtagctgggactacaggcacatgccacaacccctggctaattttttaaaaatttgtttggggagatggggcttcaccatgttgcctagcctggtctcaaactcctaggctcaagcaatccaccctcctcagccttcctaagtactgggagtacaggca

SEQ ID NO: 46176 - DNA, 201 bp, Homo sapiens
tgctcaatactatgagtcatcagggaaatacaaatcaaaaccacaatgagataccacttcacacccaccaggatggctagaatcaaagtcacataacaagmagtgttgacaaggctgtggaaaataggaacctttattaaaaagaaatccaaaaaccaaaaacagctgggcacagtggctcatgcctataatccagcactt

SEQ ID NO: 46177 - DNA, 201 bp, Homo sapiens
tgtgtgtgtgtaagtatttttttattttttggaagagacgggcctcactgtgttggtgaggctggtcttgaactcctggccttaagtgatcctcctgcctyggcctgccaaagtgttgggactgtaggtgtgagccaccacacctggcctatagtgcattattatttttatttagtttttaaattatgccatagccagttg

SEQ ID NO: 46178 - DNA, 201 bp, Homo sapiens
ctggactctcttgacacccaggattctttcctcaggggacatgctgcctatagttctgcagttaacatcctccttggccatggcaccagggtcggagccaygtacttcatgacctaccacaccgtgctgcagacctctgctgactttattgacgctctgaagaaagcccgacttatagccagtaatgtcaccgaaaccatg

SEQ ID NO: 46179 - DNA, 201 bp, Homo sapiens
ctcgacctcctgagctcaagcaatctctcaactcagcgtcccaagtagctgggactacaggcacatgccacaacccctggctaattttttaaaaatttgtttggggagatggggcttcaccatgttgcctagcctggtctcaaactcctaggctcaagcaatccaccctcctcagccttcctaagtactgggagtacaggc

SEQ ID NO: 46180 - DNA, 201 bp, Homo sapiens
tcagcctgggaagtggaggttgcagtgagctgagatcacaccattggactccagcctgagggacagagactccatctccaaaaaaaaaaaaaaaaaaaaaactcttactactcaatgataaataaataacccaatttaaaatggcaaaagatctgaatagagtagacatttctctaaggaagatatacaaatgaccaacaa

SEQ ID NO: 46181 - DNA, 201 bp, Homo sapiens
cctcgacctcctgagctcaagcaatctctcaactcagcgtcccaagtagctgggactacaggcacatgccacaacccctggctaattttttaaaaatttgtttggggagatggggcttcaccatgttgcctagcctggtctcaaactcctaggctcaagcaatccaccctcctcagccttcctaagtactgggagtacagg

SEQ ID NO: 46182 - DNA, 201 bp, Homo sapiens
ctattcttctaacagtcctccctgcatgtctccgccagtggttgaccctgcctgcgttcgctgcaggcctctgactccggaaggcaaacagaggcctcagkggggagacttcatgagattcctgcccatgttcctttcggataaccctaaccccaagtgtggcaaagggtaagtgctgctgccattgcagataagcatcca

SEQ ID NO: 46183 - DNA, 201 bp, Homo sapiens
accgcgaaggtctgcagcttcactcctgagccagcgagatcacgaacccaccagaaggaagaaactccgaaaacatctgaacatcagaagggacagattcyagacgcgccaccttaagagctgtaacgctcaccgccagggtccgcggcttcattcttgaagtcagtgagaccaagaacccaccaattccggacacaatgt

SEQ ID NO: 46184 - DNA, 201 bp, Homo sapiens
aggtcagtaaccctgtctgtcctctctagtacccgaataggcttcgccccctcgtcctggatcgacgattatttcgactgggtgaagccacagtcgtcttrctgtcgagtggacaatatcactgaccagttctgcaatgcttcaggtaccttctcctttaccaaatctttcctgttttgctgaaaaattttcaaattatca

SEQ ID NO: 46185 - DNA, 201 bp, Homo sapiens
ctgcttttatgagctgtaacactcaccgcgaagatctgcagcttcactcctgagcccagcgagaccacgagcccactgggaggaacgaacaactccagacrcgctgccttaagagctgtaacactcaccgcgaaggtctgcagcttcactcctgagccagcgagatcacgaacccaccagaaggaagaaactccgaaaaca

SEQ ID NO: 46186 - DNA, 201 bp, Homo sapiens
aggattgtaaatacaccaatcggcactctgtatctagctcaaggtttgtaaacacaccaatcagcaccctgtgtttagctcaaggtttgtgagtgcaccartcgacactctgtatctagctgctctggtggggccttggagaacctgtgtgtggaaactctgtatctaactaatctgatggggacgtggagaacctttgta

SEQ ID NO: 46187 - DNA, 201 bp, Homo sapiens
tgatggcagtgatcagctgcggccagccaggtttttcttcatctggactgtgcctctcactttcaaatttttggaacatttgctttggcaacaaaactttyaaaaaaccaactctctctggtgcaggtgttctgttggaggatttgagagaagctttaaaattttatcttattactgtcccttgcttaggtcacaagagga

SEQ ID NO: 46188 - DNA, 201 bp, Homo sapiens
actaaagacttcctccctgtggagcaggtcagtaaccctgtctgtcctctctagtacccgaataggcttcgccccctcgtcctggatcgacgattatttcractgggtgaagccacagtcgtcttgctgtcgagtggacaatatcactgaccagttctgcaatgcttcaggtaccttctcctttaccaaatctttcctgtt

SEQ ID NO: 46189 - DNA, 201 bp, Homo sapiens
aaatacaccaatcggcagtctatctagctcaaggtttgtaaacacaccaatcagcaccctgtgtttagctcaaggtttgtgagtgctccaatcgacactctgtatctagctgctctggtgaggacgtggagaacctttatgtctagctcaaggtttgtaaacacaccaatcagcaccctgtgtttagctcaaggtttgtga

SEQ ID NO: 46190 - DNA, 201 bp, Homo sapiens
actcgttaaaccaaatcaggatgagagtgcctccggggaattgtgtccttgtgcacattaacgcccctcacataggtgtggcgtcaataggaagtggtgartcaggggagagggggttccgtggactagaaaaaactctccttcgacttctatttagttctcagaaggggataggtgatgttgatccaataatggactaag

SEQ ID NO: 46191 - DNA, 201 bp, Homo sapiens
cctgccaaagtgttgggactgtaggtgtgagccaccacacctggcctatagtgcattattatttttatttagtttttaaattatgccatagccagttgttytgaatagtgcagtactacaaaacagagtcaaggtctcatgctgtcacccaggctggaatacagtgatgcaatcatggctcactgcagcctcaacctccta

SEQ ID NO: 46192 - DNA, 201 bp, Homo sapiens
taaatacaccaatcggcagtctatctagctcaaggtttgtaaacacaccaatcagcaccctgtgtttagctcaaggtttgtgagtgctccaatcgacactctgtatctagctgctctggtgaggacgtggagaacctttatgtctagctcaaggtttgtaaacacaccaatcagcaccctgtgtttagctcaaggtttgtg

SEQ ID NO: 46193 - DNA, 201 bp, Homo sapiens
aattagcacccatcctcagaacggggtggctgcctagggtcttcaacaggaagagagccatcctaaaggaagtgctttatttcagagctgtggcatctccrtggagttctgcagccacataaccagagcgttcacggtgagcatgaaaggcagccgcgtggagcgcgcggaagaggcacttgcccacatgggcagctccgt

SEQ ID NO: 46194 - DNA, 201 bp, Homo sapiens
gaaatccttgtaaggaagtgtttttgttcaattacaggttggtaaaagtggtttctaacacagtatctcttcttttaggtgttcagtggaatcacacttavaaaatttggagggattgtggtgttggcttttgccaaatctcaaattttccagatattctacttcaggatgtatttggccatggtcttactgggagccact

SEQ ID NO: 46195 - DNA, 201 bp, Homo sapiens
acataaggtttctcatcctgttctaactccagcgattgcctctcaggattggtatctggccttagcttctcagaggagggcttttctttatcactttaccytgtggttttgtaggagcgtcgaggttgccctggaattttcttaataaaaacatagaagccccgggctctgaccagtcaaggccatacttgaaggaggaga

SEQ ID NO: 46196 - DNA, 201 bp, Homo sapiens
acacttacaaaatttggagggattgtggtgttggcttttgccaaatctcaaattttccagatattctacttcaggatgtatttggccatggtcttactggragccactcacggattaatatttctccctgtcttactcagttacataggtaagagttctcatcttaaaagggtggcacaatagaaggacattactgaaagg

SEQ ID NO: 46197 - DNA, 201 bp, Homo sapiens
attgtgtttaccttagggaaggggctactgtcagggaggggtaattggggagcttcaactgaatctatagagtgtgtgtgtgtgtgtaagtatttttttawtttttggaagagacgggcctcactgtgttggtgaggctggtcttgaactcctggccttaagtgatcctcctgcctcggcctgccaaagtgttgggactgt

SEQ ID NO: 46198 - DNA, 201 bp, Homo sapiens
cagcagaccgtgtgggacggcacagaaactgccatttgggatcagacctactgattcccacagcccagaacacccacagcaatagagtccaaaaggactcrgccatccctcacgtctggcagcgtaggaatggacactgtcccagcaactggccctcttcagtgcctgtctcagacctcttacccttccatgaacagctaa

SEQ ID NO: 46199 - DNA, 201 bp, Homo sapiens
ggattgtgtttaccttagggaaggggctactgtcagggaggggtaattggggagcttcaactgaatctatagagtgtgtgtgtgtgtgtaagtatttttttattttttggaagagacgggcctcactgtgttggtgaggctggtcttgaactcctggccttaagtgatcctcctgcctcggcctgccaaagtgttgggact

SEQ ID NO: 46200 - DNA, 201 bp, Homo sapiens
tgcgggtggggtgaccttaacgggttccagcaatttctcctggtcaacacaaacgtgccacagaaaaccaggcttttggctgtgtgtagagagggccccaraaagttcctggtacagtaagattggtgtgatggaggccttgtaagtccaatgggatgcttggcctcctctagcacccagggtgccctgggtaattagcac

SEQ ID NO: 46201 - DNA, 201 bp, Homo sapiens
aggattgtgtttaccttagggaaggggctactgtcagggaggggtaattggggagcttcaactgaatctatagagtgtgtgtgtgtgtgtaagtatttttttattttttggaagagacgggcctcactgtgttggtgaggctggtcttgaactcctggccttaagtgatcctcctgcctcggcctgccaaagtgttgggac

SEQ ID NO: 46202 - DNA, 201 bp, Homo sapiens
tggtgaaatccccctcatcctcggagctctgggtctgtacagtctcttcctcttggctataattttgccttttagtgtttgctccctcctctgtgcctgcrtagcgccatgcaccatgtgccattgatggcactgggctgtatttgcctgcctcttgcccagtgattctgagctcccaaaggtgagtgctgagctgtatta

SEQ ID NO: 46203 - DNA, 201 bp, Homo sapiens
caggattgtgtttaccttagggaaggggctactgtcagggaggggtaattggggagcttcaactgaatctatagagtgtgtgtgtgtgtgtaagtatttttttattttttggaagagacgggcctcactgtgttggtgaggctggtcttgaactcctggccttaagtgatcctcctgcctcggcctgccaaagtgttggga

SEQ ID NO: 46204 - DNA, 201 bp, Homo sapiens
tcaggattgtgtttaccttagggaaggggctactgtcagggaggggtaattggggagcttcaactgaatctatagagtgtgtgtgtgtgtgtaagtatttttttattttttggaagagacgggcctcactgtgttggtgaggctggtcttgaactcctggccttaagtgatcctcctgcctcggcctgccaaagtgttggg

SEQ ID NO: 46205 - DNA, 201 bp, Homo sapiens
ttttttagagatgggatcttgctatgttgtccaggctggactcaaactcctgggttatagccatccttctgcctcagcttcctgagtacttgagattaggygtgccaccatacccggcatacaggacttgccaaaccaccatcttgctctcattccctctcactgttctctctccctccctttttcctcccacagttgtaa

SEQ ID NO: 46206 - DNA, 201 bp, Homo sapiens
tcaagaccagccggggcaacatggtgaaacaccgtcttaaaaacattttgtttttcttttcattgttgaggttgaggctgctgtgagctgtgatcacgccrgtgtactccagcctgggcaacagagcaagaccctgtgtcaaaacaaaaaagagagagaaataaataatagcaattatgtgccgtagagaaaatgtggcta

SEQ ID NO: 46207 - DNA, 201 bp, Homo sapiens
aaaaatgatgggggacagaggtgcgtgagccttgtgtttcctcaaagcggacgtggttcccaccagtgtggaagcggtacagggagtggcaggctcctggyggcagggacctgaattggtttgtagttatgcttgtgcgcgtcctcataaccccagtctcgccctagcgctgtcccctttcctctccctccagcttttcct

SEQ ID NO: 46208 - DNA, 201 bp, Homo sapiens
tgagctgtgatcacgccagtgtactccagcctgggcaacagagcaagaccctgtgtcaaaacaaaaaagagagagaaataaataatagcaattatgtgccktagagaaaatgtggctattctgtttccctagagttttttaaaatttatttttaaaatttatttattttagagacaggttcttgctctgttgcccaggcgt

SEQ ID NO: 46209 - DNA, 201 bp, Homo sapiens
attctaatcacttcaagtgactctaatcacatgaagtctcctcgttttcagcaacttccttgttttgagcattctcagtccagaagaggcggaaagctgcrgcccaccttcttttccacgaaggctgacaggacatgggtgtacacatctgactggtccagcaccgcctgggtccgcaccggcctcttgaggagcgggctg

SEQ ID NO: 46210 - DNA, 201 bp, Homo sapiens
aacgtagaaaaggaagttaggttttaagaaaaagtactgaaactaaagacttcctccctgtggagcaggtcagtaaccctgtctgtcctctctagtacccraataggcttcgccccctcgtcctggatcgacgattatttcgactgggtgaagccacagtcgtcttgctgtcgagtggacaatatcactgaccagttctgc

SEQ ID NO: 46211 - DNA, 201 bp, Homo sapiens
cagctctccagtcaaattgaactgcttgctagcaaaatcctgcccatcttccagggccccatttcacatgctacattatctacgacattcttgtcctgttsccctaactagaatgccttccctctgaagttctgaatctttatttaaactgctgcaacagcatttgctgcctcattaaaagaccttggtgtgggtcttgac

SEQ ID NO: 46212 - DNA, 201 bp, Homo sapiens
actctaatcacatgaagtctcctcgttttcagcaacttccttgttttgagcattctcagtccagaagaggcggaaagctgcggcccaccttcttttccacraaggctgacaggacatgggtgtacacatctgactggtccagcaccgcctgggtccgcaccggcctcttgaggagcgggctgcttcggctctgccctgctt

SEQ ID NO: 46213 - DNA, 201 bp, Homo sapiens
ctgtcccccaggctgaagtgtagtggtttgattgtggctcactgaagtgttgaccctgggctcaagctatccttccacctcagcctcccacgtagctgggrctgcaggtgcatgccaccatgcccaactaatttttaaattttttgtagacacaaggtcttgctgtgttgcccaaggtggtcttgaattcctgggctggag

SEQ ID NO: 46214 - DNA, 201 bp, Homo sapiens
gaagggcacgactacacttcttccaaggggcagaacatggtgtgcggcggcatgggctgcaacaatgattccctggtgcagcagatatttaacgcggcgcmgctggacaactagtcagtaccaccttgtcttgtacttcagaagcagcggaggaggctctcagccaggcagtcagctcaggcctgaaatgtctcactgaaa

SEQ ID NO: 46215 - DNA, 201 bp, Homo sapiens
atgttggccaggctggtctcgaactcctgacctcaggtgatccacctgccccggcttcccaaactgctgaaataataggcgtgagccaccgtgcccagccycaatattttttaaaataagaaacaaaataaataaaatcacagattgcatttaggtacttccatacattgctggctgcaatttctttggagggcaatttga

SEQ ID NO: 46216 - DNA, 201 bp, Homo sapiens
tgtggaactgtacctgttggtacggctcctttttaggtggcagtgtgctgaagcaggaaaataacagacaagttaaacatgagacagctggcagtctttcycatttaaaatgcaggggagcccgggccagaacccagcgtgtgatgtgcggttggtgcctggagagtcgtcttggttcaactctacaccctggcttagcct

SEQ ID NO: 46217 - DNA, 201 bp, Homo sapiens
agtgttcacactctctcctattcttttatctttctttcaggactcctacatggtggattatttcaaatccatcagtcagtacctgcatgcgggtccgcctrtgtactttgtcctggaggaagggcacgactacacttcttccaaggggcagaacatggtgtgcggcggcatgggctgcaacaatgattccctggtgcagca

SEQ ID NO: 46218 - DNA, 201 bp, Homo sapiens
atgagaatctttggagccggggatgtggaggttgcagtgagctgagatcatgtcactgcactccagcctgggagacagagcaagactctgtctcaaaaaaraaaaaaagaaaaaaggaaaaggaaagataaatttataatgtattgccaggaccacacaaacccttcatatgtaccaggaatgcaagtagaggaattgagt

SEQ ID NO: 46219 - DNA, 201 bp, Homo sapiens
ggtggaccagtgttcccgtggcttgtgttgggaggctatgatggtaagtaagagaagctttgacttttccttttagataaagtcatctcggttttgtcatyagcatcaagtggtaattatgaagatttcataaattgggcagttttgttaatttcttacctcttgaatcccagaatagtatctcctttggctttgggtttg

SEQ ID NO: 46220 - DNA, 201 bp, Homo sapiens
taaatacccatttcctttgatccaacaatataaaagtatttccaacagttctatttgcgcatgattgcaaagatttacatccaagaatgggccaggagtgstggctcacgcctgtaatcccagcactttaggaggctgaggcaggcagattgcttgagcccagcagttcaagaccaatctgggcaacatggtgaaaccccg

SEQ ID NO: 46221 - DNA, 201 bp, Homo sapiens
cttctttcaggttcttgacttacaaatagccatcgaaaacattactgcctcttatgacaatgagactgtgacacttcaagacatctgcttggcccctcttycaccgtataacacgaactgcaccattttgagtgtgttaaattacttccagaacagccattccgtgctggaccacaagaaaggggacgacttctttgtgta

SEQ ID NO: 46222 - DNA, 201 bp, Homo sapiens
aggcaagcttgcaatttgttaggtaggtaggcattctttttttctctgcctatttgaaggactacctactttgaaggttgcagatcagcagcagaaaaaawttttttaaaaagctttttaaaaaaattttagaagaaatcaaaggtttttttggtaataaaattttattggcttggcatggtggttcatacctattatcca

SEQ ID NO: 46223 - DNA, 201 bp, Homo sapiens
ctcaacacaattcctttctgtagattttccagtccatgggatggagcccatgaacaatgccaccaaaggctgtgacgagtctgtggatgaggtcacagcaycatgtagctgccaagactgctctattgtctgtggccccaagccccagcccccacctcctcctgctccctggacgatccttggcttggacgccatgtatgt

SEQ ID NO: 46224 - DNA, 201 bp, Homo sapiens
ctattaccccaaaaccctagttctatcttcattttctgttattgaactttaggcttcaggttaggaactaggcaagcttgcaatttgttaggtaggtaggmattctttttttctctgcctatttgaaggactacctactttgaaggttgcagatcagcagcagaaaaaaattttttaaaaagctttttaaaaaaattttag

SEQ ID NO: 46225 - DNA, 201 bp, Homo sapiens
tctagcctgggtgacacagtgagactcagtctcaaaaaaaaaaagtagaaaactcatcaagctgtacagctaagttctgtatacctcatatatgaatattrtatcttaattaaaaggaaaagtctattaacaaaaagagttctcaaaaatgctcaacctgaacctccttagggggttggcagaagcattaactaaagctct

SEQ ID NO: 46226 - DNA, 201 bp, Homo sapiens
ggatcacctacatggcgtttttgcttgtgttttttggagcattttttgcagtgtggtgctacaggtaagcagttttgtttgtcatccagggcaaaaagagsaaaattgcccactggcactttgagctttcatttgtcagagcttggttacttaggacaagaaacaaatacctccatgaataccattgcatggattattgtg

SEQ ID NO: 46227 - DNA, 201 bp, Homo sapiens
cttgtctcctttttcctttgggtttcctcttctagcaatgtacaatgcctgccgggatgtggaggccccctcaagtaatgacaaggccctgggactcctgkgtgggaaggacgctgacgcctgtaatgccaccaactggattgaatacatgttcaataaggacaatggacaggcaccttttaccatcactcctgtgttttc

SEQ ID NO: 46228 - DNA, 201 bp, Homo sapiens
gatacagagaagctccagagggcccaggcctgggaaaaagagtgagtcactcatgggtgtgagcagactgtccttgcattgtgggaagctagacacttgcrgcaagcacttaaacttcattttctaaattaaccaatggcagatctgagttacgtagttttgttcacttggtactaatgatgctaagaagaaactgtaaac

SEQ ID NO: 46229 - DNA, 201 bp, Homo sapiens
cgggctttcaccatgttggccaggctagtctcgaactcttgacctcaggtgatctgccagcctcagcctcccaaagtgctggaattacaggcataagccaytgagcccagccctaaacttactttaattcagcatgtatggaaccttagctgtaatctgatagtctccagtgtggaagaccctaatgcagtggctgggcat

SEQ ID NO: 46230 - DNA, 201 bp, Homo sapiens
agtatgcctaagatgaaaatggtatttcagattcattaaactgtgaaagtgacatgtggctgaagcttttagataaggggaaagattatccctcactagtraggaaagtaatcgatagagaagaaagtaatgcccctcactgtcagtattttaaaatgttttacaaaaaatctggagacctattcttctaacagtcctccc

SEQ ID NO: 46231 - DNA, 201 bp, Homo sapiens
ggctcgcctggaaaaagagtactttgaccagcactttgggcctttcttccggacggagcagctcatcatccgggcccctctcactgacaaacacatttacyagccatacccttcgggagctgatgtaccctttggacctccgcttgacatacagatactgcaccaggtaacctgctgtttgaagaaataagtcactctaga

SEQ ID NO: 46232 - DNA, 201 bp, Homo sapiens
tggccctattatgtgtgagatcatgcagaatataatttacttttcctttagatgtccatcctgtttttataacctactgaacctgttttgtgagctgacaygtagccctcgacagagtcagtttttgaatgttacagctactgaagattatgttgatcctgttacaaaccagacgaaaacaaatgtgaaagagttacaata

SEQ ID NO: 46233 - DNA, 201 bp, Homo sapiens
cttcttttccacgaaggctgacaggacatgggtgtacacatctgactggtccagcaccgcctgggtccgcaccggcctcttgaggagcgggctgcttcggytctgccctgcttccaccgcctgaaagaaaaaaaccacaaactatgatcttcggcatcttagaggaagggtgctgtttacagttcatccacaaggactgaa

SEQ ID NO: 46234 - DNA, 201 bp, Homo sapiens
ggtttctaggtgatggcagtgatcagctgcggccagccaggtttttcttcatctggactgtgcctctcactttcaaatttttggaacatttgctttggcarcaaaacttttaaaaaaccaactctctctggtgcaggtgttctgttggaggatttgagagaagctttaaaattttatcttattactgtcccttgcttaggt

SEQ ID NO: 46235 - DNA, 201 bp, Homo sapiens
acacagatgggaaaaacaaaaacagtgaaggtatgaagtgagatgcagccgccagctcgtgggatgcagggaccctgaatttactactcctccactatccmccactactgccaccttgccctatggcaggcggcaaatctcagcgaccttattctaatatataggaaacaattttgcatcataattacttagaaaataccc

SEQ ID NO: 46236 - DNA, 201 bp, Homo sapiens
tccgccccgccccgccccgccgcactcgcggatcgtcacacggtcaggccaccgcgcgtcaccgccccgggctctgctagaaagtgccggggtccagattyctttcaggtgactgggttgggaggagaagtcgctcagcgtaattgtcggagccgaaataaacagagactccgcggccgggcgggaccttacccggaagtc

SEQ ID NO: 46237 - DNA, 201 bp, Homo sapiens; identical to SEQ ID NO: 8249

SEQ ID NO: 46238 - DNA, 201 bp, Homo sapiens
cagccctgtaaagtaaaaaggaggaccttttagtaacaagtgggacagacaaccctgtaactaattggtgattgtgtctgtcgcctctctcaggtggattsgaaggtctcactaggcatcgcgggcatcttgatcgtgctgagctcggtggcttgctccttgggtgtcttcagctacattgggttgcccttgaccctcatt

SEQ ID NO: 46239 - DNA, 201 bp, Homo sapiens
ggggcttcaccatgttgcctagcctggtctcaaactcctaggctcaagcaatccaccctcctcagccttcctaagtactgggagtacaggcatgagccacrgtacctgtcctcacttgctgctttcatcataattattaaaggtttcaactttccctggaattactaatagaaatagtaagtagcactctggttgaattga

SEQ ID NO: 46240 - DNA, 201 bp, Homo sapiens
ccagcagaccgtgtgggacggcacagaaactgccatttgggatcagacctactgattcccacagcccagaacacccacagcaatagagtccaaaaggactyagccatccctcacgtctggcagcgtaggaatggacactgtcccagcaactggccctcttcagtgcctgtctcagacctcttacccttccatgaacagcta

SEQ ID NO: 46241 - DNA, 201 bp, Homo sapiens
caacgaggtgcaaaagaggctgcatataactctctatccaacccccaccttgtttccatcttaaaatggcccagtgttcatctttcactggttttgcacamatcgctccagaaccacccgtcaacaattatgctttaggcctcagcattagaagccaaactaccagctctagggcctcacccaaggaaactccagtgattc

SEQ ID NO: 46242 - DNA, 201 bp, Homo sapiens
aagcatctcgtaggtgtgtctactgggttttaacttatttttctttaataaaatacattgttttcctaagttttggggttaccctatctgctttgagagacaaatacaaaagctaaatggaagagattctatctaacctgtccttatggtaactaaatgccgtcttacattgagctagaaatagacctagaagtttcatta

SEQ ID NO: 46243 - DNA, 201 bp, Homo sapiens
agatcctctgtaattattccttaaatgttattgcagggtggaggtggagatgagactaacaggcttaagtcttatcccggactctcaaactctaacctgtrgcatacagtgcagagaaagaacaccgtaactccaaaggcttaatttttcaggggctgactttatacctctcataaagtttcccaatagcaggttgctatt

SEQ ID NO: 46244 - DNA, 201 bp, Homo sapiens
ttggccatggtcttactgggagccactcacggattaatatttctccctgtcttactcagttacataggtaagagttctcatcttaaaagggtggcacaatrgaaggacattactgaaagggaattctatcctgaggcattcttttcaagtatttgaactcatactaatggtcatttgataatgataaatgatactgagtaa

SEQ ID NO: 46245 - DNA, 201 bp, Homo sapiens
aaaacacaaaaattagccaggcatggtggcgtgcacctgtttaatcccagctactcaggaggctggggcaggagaatcacttgaacctgggagaaatcctygtaaggaagtgtttttgttcaattacaggttggtaaaagtggtttctaacacagtatctcttcttttaggtgttcagtggaatcacacttacaaaatttg

SEQ ID NO: 46246 - DNA, 201 bp, Homo sapiens
gaggagaagggcaacacggggaccttgaagcggggtcgcggcggcgccccagcccgggccagggagtcccggcagcggcacctcccagaaagggcggagcygacgacgccttcttccttcctgaccggcgcgcgcagcctgctgccgcggtcagcgcctgctcctgctcctccgctcctcctgcgcggggtgctgaaacag

SEQ ID NO: 46247 - DNA, 201 bp, Homo sapiens
tgggctagtctgcctgtaatttgttattctttagagattgcacaagcctgtagcctgatgacagcaggatgttcactttttacttagaaaattgcaccccrccccaggagctctccgaccagtgccttttgcctcctatgtggttatcaggtacttttaatcattaaagatgagagcactcgagaaggtattcatggaaaa

SEQ ID NO: 46248 - DNA, 201 bp, Homo sapiens
tcccgggccgagccagactccataagtcccgcgcctggcccccggggattgcaggggctgaggagaagggcaacacggggaccttgaagcggggtcgcggsggcgccccagcccgggccagggagtcccggcagcggcacctcccagaaagggcggagccgacgacgccttcttccttcctgaccggcgcgcgcagcctgc

SEQ ID NO: 46249 - DNA, 201 bp, Homo sapiens
ctccttggccatggcaccagggtcggagccacgtacttcatgacctaccacaccgtgctgcagacctctgctgactttattgacgctctgaagaaagcccracttatagccagtaatgtcaccgaaaccatgggcattaacggcagtgcctaccgagtatttccttacaggtaaagcctgccctttttcaatggggtttac

SEQ ID NO: 46250 - DNA, 201 bp, Homo sapiens
cccggctgtaaacagaagtgacgcagagcccttctctccccgacaggagcattgtccgtgatgccagccgtgcacaccttctctctctttgcgggattggyagtcttcattgactttcttctgcagattacctgtttcgtgagtctcttggggttagacattaaacgtcaagaggtaagttggtgccaggattatagtcta

SEQ ID NO: 46251 - DNA, 201 bp, Homo sapiens
taacattttgcttaccttttaggtttattaattttgtgaaaaactacaagaatcccaatctgaccatttccttcactgctgaacgaagtattgaagatgamctaaatcgtgaaagtgacagtgatgtcttcaccgttgtaattagctatgccatcatgtttctatatatttccctagccttggggcacatcaaaagctgtc

SEQ ID NO: 46252 - DNA, 201 bp, Homo sapiens
ttacatacacctcccatccccagctttatcttacatattccctgtccctgccctgcaaggagctctggttccttttattggagaatggtatgtagaaacgragatctgggcactaggtatgctcattgctgctggaaagagtagcatgtttttgtttgtttgtttgtttttttgagatggagtcttgctctgtcaccaggc

SEQ ID NO: 46253 - DNA, 201 bp, Homo sapiens
cggctatactagtatacctgatggtgcctctgaccatggaaatgtgatttcctggcctagttctgggctagtctgcctgtaatttgttattctttagagaytgcacaagcctgtagcctgatgacagcaggatgttcactttttacttagaaaattgcaccccgccccaggagctctccgaccagtgccttttgcctccta

SEQ ID NO: 46254 - DNA, 201 bp, Homo sapiens
atcacgccactgcactccagcctgggctacagagcaagactctgtctcaaaataaaaaaaaaaagaagccagtctgggagagaacaagctaaacctttggygttcccttatctgggggccttcttcatccctgaaatgtacagctgggtctgacctctgagtccagggtcaggtgattttgcttagcctcaagtgctcaga

SEQ ID NO: 46255 - DNA, 201 bp, Homo sapiens
cggggttacatgaccagtaagtggcagggctgaggttgttcccagggcccttgccctttcctgcttcctattacacaacaggactgagtaaaccctgtacmtttgattatacatgaaaccaggtggagaaacagcagctatgtaccaaagaacccagagcaatcgagaaaagcccatctggccaggcgaagtggctcacac

SEQ ID NO: 46256 - DNA, 201 bp, Homo sapiens
gtagccaccgttcctggggagcctccagggtgccagcgtcatgccaggcactccctgacattattccatttctcatcacgcagcctatgagtaggtggtgktatacccatttacagaagaggagactggggctcagaggtggtcattttgctcggggttacatgaccagtaagtggcagggctgaggttgttcccagggcc

SEQ ID NO: 46257 - DNA, 201 bp, Homo sapiens
ccctgggcatgagaatgaacgcagattcctgtgcacattccaagcggggctgagggagaggacggcctgctggtaatccaggcctgaaggaacttggcctrttcacttgtactgatggcagctggggcgtgatcttagctttagtaacattatcccacattaaggttgcgattcttttagcctcgtcatgctccttgccag

SEQ ID NO: 46258 - DNA, 201 bp, Homo sapiens
ttcgactgggtgaagccacagtcgtcttgctgtcgagtggacaatatcactgaccagttctgcaatgcttcaggtaccttctcctttaccaaatctttccygttttgctgaaaaattttcaaattatcatttaaaaatcatttgcatcgtgcctcagtttatacctatttgtatatcaaagctgggtctccctgtgtcatc

SEQ ID NO: 46259 - DNA, 201 bp, Homo sapiens
gagtgcagtggcatgatctcagctcgctgcagcctctgccttccaggttcaagtgattctcgtgcctcagcctcccaagtagctgggattacaggcacctkccaccacgcctggctaatttttgtatttttagtagagacgggctttcaccatgttggccaggctagtctcgaactcttgacctcaggtgatctgccagcc

SEQ ID NO: 46260 - DNA, 201 bp, Homo sapiens
cccagcactttgggaggcccagacgagaggctcacttgaggccgggagttcaagaccagcctaggcaatgtttgcatgtctctaaaaaaaagaaaaaagaraatttaaaaagaaaaaaaagcgtacaattcagtagctttactatattcacgtgtatgtgcagccatcaccacagtcaattttaggaacattttcattact

SEQ ID NO: 46261 - DNA, 201 bp, Homo sapiens
gtgtccctgggcgcgatatttctggtgaccatggtcctcctgggctgtgagctctggtctgcagtcatcatgtgtgccaccatcgccatggtcttggtcawcatgtttggagttatgtggctctggggcatcagtctgaacgctgtatccttggtcaacctggtgatggtgagtcctcatacagtctcagtttgtccctag

SEQ ID NO: 46262 - DNA, 201 bp, Homo sapiens
gatcttgctatgttgtccaggctggactcaaactcctgggttatagccatccttctgcctcagcttcctgagtacttgagattaggcgtgccaccataccyggcatacaggacttgccaaaccaccatcttgctctcattccctctcactgttctctctccctccctttttcctcccacagttgtaattgtgtgagacacc

SEQ ID NO: 46263 - DNA, 201 bp, Homo sapiens
tcacttgaacctgggagaaatccttgtaaggaagtgtttttgttcaattacaggttggtaaaagtggtttctaacacagtatctcttcttttaggtgttcrgtggaatcacacttacaaaatttggagggattgtggtgttggcttttgccaaatctcaaattttccagatattctacttcaggatgtatttggccatggt

SEQ ID NO: 46264 - DNA, 201 bp, Homo sapiens
aatttggagggattgtggtgttggcttttgccaaatctcaaattttccagatattctacttcaggatgtatttggccatggtcttactgggagccactcayggattaatatttctccctgtcttactcagttacataggtaagagttctcatcttaaaagggtggcacaatagaaggacattactgaaagggaattctatc

SEQ ID NO: 46265 - DNA, 201 bp, Homo sapiens
tcaacaggaagagagccatcctaaaggaagtgctttatttcagagctgtggcatctccgtggagttctgcagccacataaccagagcgttcacggtgagcrtgaaaggcagccgcgtggagcgcgcggaagaggcacttgcccacatgggcagctccgtgagtaccctgagcagggccacgccggcagagtcgcaccacaa

SEQ ID NO: 46266 - DNA, 201 bp, Homo sapiens
gcagaaaaaaattttttaaaaagctttttaaaaaaattttagaagaaatcaaaggtttttttggtaataaaattttattggcttggcatggtggttcatamctattatccagcactttggaggctgaggcaggaggatcactttagccagggaggtcaaggctgcagtgagctgtgatcatgccactagactacaacctgg

SEQ ID NO: 46267 - DNA, 201 bp, Homo sapiens
acctggccaagttgtagctgatggtctgtccgaaaatgctggttcactctccactggccaactgtctgtctgcactgcactgccagttgcctcttgcctgsgccattgcgctaacatctccacttactgttccacctgcttcctgtttctttgccgtttccagaccttccactttgccacgcaagctatctttgtaaaaca

SEQ ID NO: 46268 - DNA, 201 bp, Homo sapiens
tttctggtgaccatggtcctcctgggctgtgagctctggtctgcagtcatcatgtgtgccaccatcgccatggtcttggtcaacatgtttggagttatgtrgctctggggcatcagtctgaacgctgtatccttggtcaacctggtgatggtgagtcctcatacagtctcagtttgtccctagctcctgtttcacttgggg

SEQ ID NO: 46269 - DNA, 201 bp, Homo sapiens
agtgcagctgcctctcaccctttacctcgtgcctgggtcgctaacacagtgtcatgtatcacaccccccacaagatttaaagatagaagagcctttggtgycttttgttctgtctcagatatatagcccagtcccctgtagtgccccagctatttgggaggcagcctccctctgaggagttgaggcagtataggtctgcag

SEQ ID NO: 46270 - DNA, 201 bp, Homo sapiens
atatttctggtgaccatggtcctcctgggctgtgagctctggtctgcagtcatcatgtgtgccaccatcgccatggtcttggtcaacatgtttggagttaygtggctctggggcatcagtctgaacgctgtatccttggtcaacctggtgatggtgagtcctcatacagtctcagtttgtccctagctcctgtttcacttg

SEQ ID NO: 46271 - DNA, 201 bp, Homo sapiens
ttctgcagttaacatcctccttggccatggcaccagggtcggagccacgtacttcatgacctaccacaccgtgctgcagacctctgctgactttattgacrctctgaagaaagcccgacttatagccagtaatgtcaccgaaaccatgggcattaacggcagtgcctaccgagtatttccttacaggtaaagcctgccctt

SEQ ID NO: 46272 - DNA, 201 bp, Homo sapiens
ccagccatcccattactgggtatatacccaaaggattataaatcatgctgctataaagacacatgcacacgtatgtttatagcggcactattcacaatagyaaagacttggaaccaacctaaatgtccaacaacgatagactggattaagaaaatgtggcacatacacaccatggaatactctgcagccataaaaaatgat

SEQ ID NO: 46273 - DNA, 201 bp, Homo sapiens
aacatgacaaaatcccatctctacataaatacaaaaattagccagcaatggtggtgcacacctttagtcccagctactgggaggctgaggcaggaggattrattgagttcgggtggtcaaggccacaaaaagccgcgattgcaccactgtacttcagcctgggcaacagaacaagacactgtccccctgtcaggcccccac

SEQ ID NO: 46274 - DNA, 201 bp, Homo sapiens
caaaatggtagaatttatgtgtatccttaacccagtttccccgatgatacaacttacataactcatagtacatctagaactagaaataccatttgacccakccatcccattactgggtatatacccaaaggattataaatcatgctgctataaagacacatgcacacgtatgtttatagcggcactattcacaatagcaaa

SEQ ID NO: 46275 - DNA, 201 bp, Homo sapiens
tcaggtaactagttcatagtttctcccagtaagagaggtaactggtacatttatcctgctgtggctaatttagggggtgctgggagtgggaatggaggagsaaatgaattgccttcaggcattgctgtcataattgaaagaataagcagttaaaaagggggtgggaggcagcttttctagagctctgctatagtattagct

SEQ ID NO: 46276 - DNA, 201 bp, Homo sapiens
attactgataatagccaaactgtggaaacaactcagatatttatcacctgatatatggataaacaaaacatatgtccttgcaatgaaatgttgttcggccrtaaaaagaaatgaagtattgatacatgccacaatatgcatgaaccttgagaacattatgctaaatgaaagaagccggtcatgaaagaccacatattatat

SEQ ID NO: 46277 - DNA, 201 bp, Homo sapiens
tgcagtgagctgagatcacaccattggactccagcctgagggacagagactccatctccaaaaaaaaaaaaaaaaaaaaaactcttactactcaatgatarataaataacccaatttaaaatggcaaaagatctgaatagagtagacatttctctaaggaagatatacaaatgaccaacaagcacatgagagatgctcaat

SEQ ID NO: 46278 - DNA, 201 bp, Homo sapiens
aagaacacccactgtaacactattgtgattgtgaaaaattgaagacctcaagaacgagaagacaagacacagactgggagaaagtatttgcaaaagacatrttagtaaggactgttattcaaaatatacaaataactcctaaaactcaataagaaagcaaacagcccaattgaaaaatggacaaaacaacctgaacagata

SEQ ID NO: 46279 - DNA, 201 bp, Homo sapiens
aggcacctgccaccatgcccggctaattttttgtatttttagtagagacggggtttcactgtgttaggcaggatggtctcgatctcctgacctcgtgatcygcccacctcggcctcccaaagtgctgggattacaggcatgagccactgcacctggcctagaaggggcttttttttaacctttcctgaactgttcctatcg

SEQ ID NO: 46280 - DNA, 201 bp, Homo sapiens
ttgcttaccttttaggtttattaattttgtgaaaaactacaagaatcccaatctgaccatttccttcactgctgaacgaagtattgaagatgaactaaatygtgaaagtgacagtgatgtcttcaccgttgtaattagctatgccatcatgtttctatatatttccctagccttggggcacatcaaaagctgtcgcaggct

SEQ ID NO: 46281 - DNA, 201 bp, Homo sapiens
tgggctgtgagctctggtctgcagtcatcatgtgtgccaccatcgccatggtcttggtcaacatgtttggagttatgtggctctggggcatcagtctgaaygctgtatccttggtcaacctggtgatggtgagtcctcatacagtctcagtttgtccctagctcctgtttcacttgggggaattggctgtcttagattcca

SEQ ID NO: 46282 - DNA, 201 bp, Homo sapiens; identical to SEQ ID NO: 8215

SEQ ID NO: 46283 - DNA, 201 bp, Homo sapiens
tcggtgagtcttgtagacagccagcaaggttttctgcaagggatgtttcccaaaggagtctgaccacttggcagtggtgacaggatgaacacgcagtgttygggagtgagagcgagctttaatgaggcctcccctctcccctccagtgtgttttatgtcttctacgaacagtacctgaccatcattgacgacactatcttc

SEQ ID NO: 46284 - DNA, 201 bp, Homo sapiens
catcagcacggctatcacaaatttatgaggcatctcctagggagaaaaaaatgtggtcttacaaataccaacgaggtgcaaaagaggctgcatataactcyctatccaacccccaccttgtttccatcttaaaatggcccagtgttcatctttcactggttttgcacacatcgctccagaaccacccgtcaacaattatgc

SEQ ID NO: 46285 - DNA, 201 bp, Homo sapiens
cagagtgttcacactctctcctattcttttatctttctttcaggactcctacatggtggattatttcaaatccatcagtcagtacctgcatgcgggtccgyctgtgtactttgtcctggaggaagggcacgactacacttcttccaaggggcagaacatggtgtgcggcggcatgggctgcaacaatgattccctggtgca

SEQ ID NO: 46286 - DNA, 201 bp, Homo sapiens
gacctggactctcttgacacccaggattctttcctcaggggacatgctgcctatagttctgcagttaacatcctccttggccatggcaccagggtcggagycacgtacttcatgacctaccacaccgtgctgcagacctctgctgactttattgacgctctgaagaaagcccgacttatagccagtaatgtcaccgaaacc

SEQ ID NO: 46287 - DNA, 201 bp, Homo sapiens
gggatggtgtcagcaactgactagccataggggaaacaattgactttgatctctgacttgttcatttcaccaaaataaattccagatggataaaagattgraatgtaagaactgggccaggcgtggtggctcacgcctgtaatcccagcactttcggaggccgaggcgggtggatcacaaggtcaggagatcgagaccatc

SEQ ID NO: 46288 - DNA, 201 bp, Homo sapiens
tacaaaaaatctggagacctattcttctaacagtcctccctgcatgtctccgccagtggttgaccctgcctgcgttcgctgcaggcctctgactccggaargcaaacagaggcctcaggggggagacttcatgagattcctgcccatgttcctttcggataaccctaaccccaagtgtggcaaagggtaagtgctgctgcc

SEQ ID NO: 46289 - DNA, 201 bp, Homo sapiens
gacttcctccctgtggagcaggtcagtaaccctgtctgtcctctctagtacccgaataggcttcgccccctcgtcctggatcgacgattatttcgactggrtgaagccacagtcgtcttgctgtcgagtggacaatatcactgaccagttctgcaatgcttcaggtaccttctcctttaccaaatctttcctgttttgctg

SEQ ID NO: 46290 - DNA, 201 bp, Homo sapiens
agagcccttctctccccgacaggagcattgtccgtgatgccagccgtgcacaccttctctctctttgcgggattggcagtcttcattgactttcttctgcmgattacctgtttcgtgagtctcttggggttagacattaaacgtcaagaggtaagttggtgccaggattatagtctatttaatttgagtctagaatctaga

SEQ ID NO: 46291 - DNA, 201 bp, Homo sapiens
ggcgcgatatttctggtgaccatggtcctcctgggctgtgagctctggtctgcagtcatcatgtgtgccaccatcgccatggtcttggtcaacatgtttgkagttatgtggctctggggcatcagtctgaacgctgtatccttggtcaacctggtgatggtgagtcctcatacagtctcagtttgtccctagctcctgttt

SEQ ID NO: 46292 - DNA, 201 bp, Homo sapiens
acaagtgggacagacaaccctgtaactaattggtgattgtgtctgtcgcctctctcaggtggattcgaaggtctcactaggcatcgcgggcatcttgatcrtgctgagctcggtggcttgctccttgggtgtcttcagctacattgggttgcccttgaccctcattgtgattgaagtcatcccgttcctggtgctggctgt

SEQ ID NO: 46293 - DNA, 201 bp, Homo sapiens
gatgtccatcctgtttttataacctactgaacctgttttgtgagctgacatgtagccctcgacagagtcagtttttgaatgttacagctactgaagattaygttgatcctgttacaaaccagacgaaaacaaatgtgaaagagttacaatactacgtcggacagagttttgccaatggtaagtaaacttttaattattcct

SEQ ID NO: 46294 - DNA, 201 bp, Homo sapiens
tgtaactaattggtgattgtgtctgtcgcctctctcaggtggattcgaaggtctcactaggcatcgcgggcatcttgatcgtgctgagctcggtggcttgstccttgggtgtcttcagctacattgggttgcccttgaccctcattgtgattgaagtcatcccgttcctggtgctggctgttggagtggacaacatcttca

SEQ ID NO: 46295 - DNA, 201 bp, Homo sapiens; identical to SEQ ID NO: 8236

SEQ ID NO: 46296 - DNA, 201 bp, Homo sapiens
atcatgcagtccttcctctccccccatgctttgctttgcacatcattcttgtccctccctctggtgaagggttgtgatagagtcaggtcctcagtagagcyggcctcggggagctgttaaaaattttgttctgctgtagctggctggttttgtcaaacttagttttttatctgttctgttggctatgaccctgagcagtga

SEQ ID NO: 46297 - DNA, 201 bp, Homo sapiens
ctcaaaaatgctcaacctgaacctccttagggggttggcagaagcattaactaaagctctcctatatttcaccaaaatgtgttggcaattcgtagcctgcyggaggaagggaggtgtgagctgttccctgtgttcagctggacagcctcccactctctataggcgcttcttttagagccagctccactgctggtcctggag

SEQ ID NO: 46298 - DNA, 201 bp, Homo sapiens
taagtaagtagtaaaaaaaagaaaaaaagtccgtctatacactgtaaagtgctgtgtaaatgttcataattactatcactgtcttcttcatagttgatggrgggaaggctggatacataaaaaaatggtaatacagtaagaagtgctcagataagaataaagataaaatgttatggagagtccatttttgagctgagctat

SEQ ID NO: 46299 - DNA, 201 bp, Homo sapiens
aatctgaccatttccttcactgctgaacgaagtattgaagatgaactaaatcgtgaaagtgacagtgatgtcttcaccgttgtaattagctatgccatcakgtttctatatatttccctagccttggggcacatcaaaagctgtcgcaggcttctggtaagccggggggggggtggtgtatgttctagaggttaacagcag

SEQ ID NO: 46300 - DNA, 201 bp, Homo sapiens
atcgcgggcatcttgatcgtgctgagctcggtggcttgctccttgggtgtcttcagctacattgggttgcccttgaccctcattgtgattgaagtcatccygttcctggtgctggctgttggagtggacaacatcttcattctggtgcaggcctaccaggtatacttccatattctcacagggctcagcatctgttcaagt

SEQ ID NO: 46301 - DNA, 201 bp, Homo sapiens; identical to SEQ ID NO: 8238

SEQ ID NO: 46302 - DNA, 201 bp, Homo sapiens
agacagactcttgctctgtcaccgaggctggagtacagtggcatgatctcagcttactgcaacctcctcccgggttcaagcgattctcctgcctcagcctscccagtagctgggactgcaggcacatgccaccacacctagctaagttttatatttttagtagaggtggggtttcaccatgttggccaggctggtctcaaa

SEQ ID NO: 46303 - DNA, 201 bp, Homo sapiens
tagtttaactaaaaatataacattttgcttaccttttaggtttattaattttgtgaaaaactacaagaatcccaatctgaccatttccttcactgctgaaygaagtattgaagatgaactaaatcgtgaaagtgacagtgatgtcttcaccgttgtaattagctatgccatcatgtttctatatatttccctagccttggg

SEQ ID NO: 46304 - DNA, 201 bp, Homo sapiens
ggattcgaaggtctcactaggcatcgcgggcatcttgatcgtgctgagctcggtggcttgctccttgggtgtcttcagctacattgggttgcccttgaccytcattgtgattgaagtcatcccgttcctggtgctggctgttggagtggacaacatcttcattctggtgcaggcctaccaggtatacttccatattctcac

SEQ ID NO: 46305 - DNA, 201 bp, Homo sapiens
atccgcccacctcggcctcccaaagtgctgggattacaggcatgagccactgcacctggcctagaaggggcttttttttaacctttcctgaactgttcctrtcgttgaaagaagcttccctatccagtcattttcttagtaattaaactctagagcatgttgtgaaatatccatatgatctaacctttaaaaatagaaact

SEQ ID NO: 46306 - DNA, 201 bp, Homo sapiens
aggttttaaaattttcttttgagattgcctcggtgtttttccttaaagttagcacattctttgctttctacttcagcctcaaggacaggaagttcattctygctctttacattggggtgttgatgtttgtggttttgttgttttgttcttcatgttactcatgatgtattgatattaattaacctaaatacatatggaaat

SEQ ID NO: 46307 - DNA, 201 bp, Homo sapiens
catctgcaccagagacactgccgggtccgagtgagggcaggaggctgcacgagggagcctccctgggagtgagcgataggttcgctatgggaggtgggttygaaaggtgcctgagattttcatttgaaactctgttgaagaggaattggcaatagaggaggaaatacaaatagaggaaagattggtttcgtcttaagcact

SEQ ID NO: 46308 - DNA, 201 bp, Homo sapiens
taatagatcaggaatgggtttagcctgctggcctgacccctgattcagtcaccacactgtgaacattccatagggaaaaaactgcagacagtgtatactgrcacccactttcatagttttgttttagttttgtggctcctaaatgtctaagactaactagtaatatgaccttgggtgagtcacataaaaaaccagaagcta

SEQ ID NO: 46309 - DNA, 201 bp, Homo sapiens
agcaattatgtgccgtagagaaaatgtggctattctgtttccctagagttttttaaaatttatttttaaaatttatttattttagagacaggttcttgctstgttgcccaggcgtgggggcagtgtcgccatcatagctcactgcagcctggaactcctggcctcaagcagtccttccaccttggcctcccaaagcactgg

SEQ ID NO: 46310 - DNA, 201 bp, Homo sapiens
atgttctagaggttaacagcagtgcacagtgtaacgtcatatttttgcctctttattcttattccattatgtttaaaactgccataaattcccccatgttktaattgtatgtaacgtttctgttgcctacatctattttcttcattccaactttttggtttatcttaaagtttatttcacataatccagttttttcttatt

SEQ ID NO: 46311 - DNA, 201 bp, Homo sapiens
cttattccattatgtttaaaactgccataaattcccccatgttttaattgtatgtaacgtttctgttgcctacatctattttcttcattccaactttttgktttatcttaaagtttatttcacataatccagttttttcttatttgtccagtccatcacctaagaatgcaaactcataacatgtgttgcccgagcagacct

SEQ ID NO: 46312 - DNA, 201 bp, Homo sapiens
ttcattaaactgtgaaagtgacatgtggctgaagcttttagataaggggaaagattatccctcactagtaaggaaagtaatcgatagagaagaaagtaatrcccctcactgtcagtattttaaaatgttttacaaaaaatctggagacctattcttctaacagtcctccctgcatgtctccgccagtggttgaccctgcct

SEQ ID NO: 46313 - DNA, 201 bp, Homo sapiens
tctgtcctctctagtacccgaataggcttcgccccctcgtcctggatcgacgattatttcgactgggtgaagccacagtcgtcttgctgtcgagtggacartatcactgaccagttctgcaatgcttcaggtaccttctcctttaccaaatctttcctgttttgctgaaaaattttcaaattatcatttaaaaatcatttg

SEQ ID NO: 46314 - DNA, 201 bp, Homo sapiens
tgctccttgggtgtcttcagctacattgggttgcccttgaccctcattgtgattgaagtcatcccgttcctggtgctggctgttggagtggacaacatctycattctggtgcaggcctaccaggtatacttccatattctcacagggctcagcatctgttcaagtttcagggactgtgaatggctcctgggctccgcattc

SEQ ID NO: 46315 - DNA, 201 bp, Homo sapiens
ctgtcccctttcctctccctccagcttttcctggactttttcacctgagggtcctgcagtaatggcaggtggcctgcccagaaccatgcccttacctgctkcttctccccattttgtttaaaggcagtgacagctaccagttactcaggcttgaggctttatccctgaattctgcctcgccctcgccttcctcatggggtt

SEQ ID NO: 46316 - DNA, 201 bp, Homo sapiens
tcagttagtttaactaaaaatataacattttgcttaccttttaggtttattaattttgtgaaaaactacaagaatcccaatctgaccatttccttcactgytgaacgaagtattgaagatgaactaaatcgtgaaagtgacagtgatgtcttcaccgttgtaattagctatgccatcatgtttctatatatttccctagcc

SEQ ID NO: 46317 - DNA, 201 bp, Homo sapiens
agcgggtataacctttgtttccctctgtcccctcagaaaaatcggctagacatcttttgctgtgtcagaggtgctgaagatggaacaagcgtccaggcctsagagagctgtttgtttcgcttcttcaaaaactcctattctccacttctgctaaaggactggatgagaccaattgtggtatgcgcttatctgtggtttttc

SEQ ID NO: 46318 - DNA, 201 bp, Homo sapiens
tcatttgtggagaacaaacatacagttaaaaaaacaaaactgggccgagagttattcatgcctgtaatcccagcaatttgggaggcagaggcgagcacatyacttgagctaggagtttgagaccagcctgagcaacatggagaaaccccgtctctgcaaaaaatacaaaaattagctgggcatggtggtgcatgcttgtag

SEQ ID NO: 46319 - DNA, 201 bp, Homo sapiens; identical to SEQ ID NO: 8255

SEQ ID NO: 46320 - DNA, 201 bp, Homo sapiens; identical to SEQ ID NO: 8256

SEQ ID NO: 46321 - DNA, 201 bp, Homo sapiens
agtcctccctgcatgtctccgccagtggttgaccctgcctgcgttcgctgcaggcctctgactccggaaggcaaacagaggcctcaggggggagacttcakgagattcctgcccatgttcctttcggataaccctaaccccaagtgtggcaaagggtaagtgctgctgccattgcagataagcatccactgcaactttaat

SEQ ID NO: 46322 - DNA, 201 bp, Homo sapiens; identical to SEQ ID NO: 8257

SEQ ID NO: 46323 - DNA, 201 bp, Homo sapiens
ttcaccatgttggccaggttggtctcgatctcttgacctcgtgatcccgcccaccttggcctcccaaagtgctgggtttacaggcgtgagccaccgcgccyagcccagtagtgtgtttttaaaggacctaaaagttttaaataaaatgagggccacaaggtgaaattatcctttattaattgttctcttaacatcttctta

SEQ ID NO: 46324 - DNA, 201 bp, Homo sapiens
tacattctattaccccaaaaccctagttctatcttcattttctgttattgaactttaggcttcaggttaggaactaggcaagcttgcaatttgttaggtargtaggcattctttttttctctgcctatttgaaggactacctactttgaaggttgcagatcagcagcagaaaaaaattttttaaaaagctttttaaaaaaa

SEQ ID NO: 46325 - DNA, 201 bp, Homo sapiens
ttccttttattggagaatggtatgtagaaacgaagatctgggcactaggtatgctcattgctgctggaaagagtagcatgtttttgtttgtttgtttgtttttttgagatggagtcttgctctgtcaccaggctggaatgcagtggcgcgatctcagctcactgcaaccaccgcctccctggttcaagcagttctcctgcc

SEQ ID NO: 46326 - DNA, 201 bp, Homo sapiens
ccatgctgatcttgaactctctaacctctagaactgtaacagataaattcctattgtttaagtcacaccagtctttggtattttgtgcaatggcctcagaygtcactaaatgacattgattacattctattaccccaaaaccctagttctatcttcattttctgttattgaactttaggcttcaggttaggaactaggcaa

SEQ ID NO: 46327 - DNA, 201 bp, Homo sapiens
gttccttttattggagaatggtatgtagaaacgaagatctgggcactaggtatgctcattgctgctggaaagagtagcatgtttttgtttgtttgtttgtttttttgagatggagtcttgctctgtcaccaggctggaatgcagtggcgcgatctcagctcactgcaaccaccgcctccctggttcaagcagttctcctgc

SEQ ID NO: 46328 - DNA, 201 bp, Homo sapiens
ggttccttttattggagaatggtatgtagaaacgaagatctgggcactaggtatgctcattgctgctggaaagagtagcatgtttttgtttgtttgtttgtttttttgagatggagtcttgctctgtcaccaggctggaatgcagtggcgcgatctcagctcactgcaaccaccgcctccctggttcaagcagttctcctg

SEQ ID NO: 46329 - DNA, 201 bp, Homo sapiens
tggttccttttattggagaatggtatgtagaaacgaagatctgggcactaggtatgctcattgctgctggaaagagtagcatgtttttgtttgtttgtttgtttttttgagatggagtcttgctctgtcaccaggctggaatgcagtggcgcgatctcagctcactgcaaccaccgcctccctggttcaagcagttctcct

SEQ ID NO: 46330 - DNA, 201 bp, Homo sapiens
atattagtatgcatggcagtcagcattttcttaataaataaagatctcatctcagcctggccaaaatgtgaaaccctgtctctactgaaaatacaaaaaawattagccacacgtggtggtgtgtgcctgtagtcccagctactcgggagactgaggcaggagaatcacttgaatcctggaggtggagtttgcagtgagcca

SEQ ID NO: 46331 - DNA, 201 bp, Homo sapiens
tggacctccgcttgacatacagatactgcaccaggtaacctgctgtttgaagaaataagtcactctagatgaccttgtggtttgctggcttttacatgttkactactgctagatggggatttggggctgaatgtcatggtatatcttgaaaatcttagcgtataatggcaaagctgcctttaagttaggtttcaagaaagt

SEQ ID NO: 46332 - DNA, 201 bp, Homo sapiens
gcctttcttccggacggagcagctcatcatccgggcccctctcactgacaaacacatttaccagccatacccttcgggagctgatgtaccctttggacctycgcttgacatacagatactgcaccaggtaacctgctgtttgaagaaataagtcactctagatgaccttgtggtttgctggcttttacatgttgactactg

SEQ ID NO: 46333 - DNA, 201 bp, Homo sapiens
taatcccagctactcgggaagctgaggcatgagaatctttggagccggggatgtggaggttgcagtgagctgagatcatgtcactgcactccagcctgggmgacagagcaagactctgtctcaaaaaaaaaaaaaagaaaaaaggaaaaggaaagataaatttataatgtattgccaggaccacacaaacccttcatatgt

SEQ ID NO: 46334 - DNA, 201 bp, Homo sapiens
cttgatcgtgctgagctcggtggcttgctccttgggtgtcttcagctacattgggttgcccttgaccctcattgtgattgaagtcatcccgttcctggtgstggctgttggagtggacaacatcttcattctggtgcaggcctaccaggtatacttccatattctcacagggctcagcatctgttcaagtttcagggactg

SEQ ID NO: 46335 - DNA, 201 bp, Homo sapiens
cagtgggcttttctttgagtttaagtataatacaaaattttggatgtttttaattgagatttgtactcaacacaattcctttctgtagattttccagtccrtgggatggagcccatgaacaatgccaccaaaggctgtgacgagtctgtggatgaggtcacagcaccatgtagctgccaagactgctctattgtctgtggc

SEQ ID NO: 46336 - DNA, 201 bp, Homo sapiens
tatgtgtgagatcatgcagaatataatttacttttcctttagatgtccatcctgtttttataacctactgaacctgttttgtgagctgacatgtagccctygacagagtcagtttttgaatgttacagctactgaagattatgttgatcctgttacaaaccagacgaaaacaaatgtgaaagagttacaatactacgtcgg

SEQ ID NO: 46337 - DNA, 201 bp, Homo sapiens
tttaattgagatttgtactcaacacaattcctttctgtagattttccagtccatgggatggagcccatgaacaatgccaccaaaggctgtgacgagtctgkggatgaggtcacagcaccatgtagctgccaagactgctctattgtctgtggccccaagccccagcccccacctcctcctgctccctggacgatccttggc

SEQ ID NO: 46338 - DNA, 201 bp, Homo sapiens
atccatcagtcagtacctgcatgcgggtccgcctgtgtactttgtcctggaggaagggcacgactacacttcttccaaggggcagaacatggtgtgcggcrgcatgggctgcaacaatgattccctggtgcagcagatatttaacgcggcgcagctggacaactagtcagtaccaccttgtcttgtacttcagaagcagcg

SEQ ID NO: 46339 - DNA, 201 bp, Homo sapiens
tcagagtgttcacactctctcctattcttttatctttctttcaggactcctacatggtggattatttcaaatccatcagtcagtacctgcatgcgggtccrcctgtgtactttgtcctggaggaagggcacgactacacttcttccaaggggcagaacatggtgtgcggcggcatgggctgcaacaatgattccctggtgc

SEQ ID NO: 46340 - DNA, 201 bp, Homo sapiens
agcaccctggggccctggggggaagactggtggtgttaggaatcatgagtccagctggaggcatctcagccaggaacctcctggcaccctcttattctccrtgatcctcgccttgcttagttactatcagagtgttcacactctctcctattcttttatctttctttcaggactcctacatggtggattatttcaaatcca

SEQ ID NO: 46341 - DNA, 201 bp, Homo sapiens
gactcaccacattacaaggagccagaataagctggaacaaagtcagcacttctgtgtttctttcacatagagaatcatcaaatagacccactagtggggckgtctgccccatgtctgaagtgtagtaagagcaaagtgactctgtccactataggggaggctggactggaatcactcagtccaaagaagaccatccacggg

SEQ ID NO: 46342 - DNA, 201 bp, Homo sapiens
agcaaagtgcttgctgcctttcttcatctcgagactgtccttgatccttttacttctatggccacttcaccttgcacaaaaatgacccacggttgaaagarcaatactgatttgcttcatttatagctttgtcactaaattgaagcactgaagtagaagattaagaaaatgaggggctttttatcatctccgggggataga

SEQ ID NO: 46343 - DNA, 201 bp, Homo sapiens
ctggtcaggtattttgtagcatgtccttccatttggctttatctggtattttctcatgatgagattgaaataaggtgttttgacaagtacatcacagaagycatgttatgtctttctcggtgcatcatgtcagggatccctgatgttgatgcgtctctttcctggtgatgttaaccttgatcacttgctcaaggtgatgtc

SEQ ID NO: 46344 - DNA, 201 bp, Homo sapiens
gagcgcgcggaagaggcacttgcccacatgggcagctccgtgagtaccctgagcagggccacgccggcagagtcgcaccacaaagtaatcctcctcagtgrctgaagagtctggatcctgtacttacaaagcagcttctaaggattgcaagctttcaggcaattcatgaattagctgccacatcgtggacagaacggacgt

SEQ ID NO: 46345 - DNA, 201 bp, Homo sapiens; identical to SEQ ID NO: 8305

SEQ ID NO: 46346 - DNA, 201 bp, Homo sapiens
tgagatagcaactaatgctttccctgttccgactttcaggaacggcttggctcttaacctccaccttcccttcctctcccgttcttccaggagaggcgtcytgctgtgaccctgtcagcgcagcatttgagggctgcttgaggcggctgttcacacgctgggggtctttctgcgtccgaaaccctggctgtgtcattttct

SEQ ID NO: 46347 - DNA, 201 bp, Homo sapiens
ctttgctgagcagataggtagctgagggcaggggtctcatatgtgtccccaggtgggcttgattcctgccatgagatagcaactaatgctttccctgttcygactttcaggaacggcttggctcttaacctccaccttcccttcctctcccgttcttccaggagaggcgtcctgctgtgaccctgtcagcgcagcatttga

SEQ ID NO: 46348 - DNA, 201 bp, Homo sapiens
cttgtgaataaatagtaaatgtgtagccttttaaaataattctataataactttgcaaatacaggatgtgtcttacccttttgtacttcaaaaggattacrtgaatgaatgtgtcttagttcactgaggaatgttgaccttactctaactgttgcctactcccgtgtctgtgctctttcacctgaaaggaactctgtccag

SEQ ID NO: 46349 - DNA, 201 bp, Homo sapiens; identical to SEQ ID NO: 8310

SEQ ID NO: 46350 - DNA, 201 bp, Homo sapiens
atgccaccacacctagctaagttttatatttttagtagaggtggggtttcaccatgttggccaggctggtctcaaactcctgacctcaagtcatctacccrcctcagcctggttattacaggctgggattacaggcatgagccactgcacctagcctaatttttatttttttctagagatgagggtctcactatgttggcc

SEQ ID NO: 46351 - DNA, 201 bp, Homo sapiens
ttacaggcatgcaccccccacacctggctaattttgtattttcagtagagacagggtttctccatgtcggtcaggctggtctcgaactcctgacctcaggygattcacctgcctcagcctcccaaagtgctgggattacaggtgtgagccaccgtgcccggcctgttgttgttgttgtttttaagagacagggtttcactg

SEQ ID NO: 46352 - DNA, 201 bp, Homo sapiens
tgtttagctcaaggtttgtgagtgctccaatcgacactctgtatctagctgctctggtgaggacgtggagaacctttatgtctagctcaaggtttgtaaayacaccaatcagcaccctgtgtttagctcaaggtttgtgagtgcaccaatcgacactctagctgctctggtgaggacgtggagaacctttatgtctagctc

SEQ ID NO: 46353 - DNA, 201 bp, Homo sapiens
aaacaattttgcatcataattacttagaaaatacccgggagggggtgggggaggaggaccctttgtcatactccatgtaactcaccatcgcataactctgstcggcatccaggtactttttatactcatggttgagtttatcaaaaacagtggctatcacgggcagcgatgctctgtctgactcacttaacactggaaagg

SEQ ID NO: 46354 - DNA, 201 bp, Homo sapiens
atcaaaccaacttcatgtcagcttcagaatttccacacgttgctatgataaaaactaatctcaaaaggttaccaatgcaaaagtacctttaaaggacactytaagaaatacaatactttaaagacctgacagctagatgtcattcgcaacccctttctggttacggttaaaaaaaaaaaaaaaaaaaaaagctatagcagg

SEQ ID NO: 46355 - DNA, 201 bp, Homo sapiens
ggctgtctggcattctgactgagcccctctgggcacagctgcagaacacgaataactagtcttatgaggttactttatgagatgctctcctgattgtgggkctagcaggaggagcaccctggggccctggggggaagactggtggtgttaggaatcatgagtccagctggaggcatctcagccaggaacctcctggcaccc

SEQ ID NO: 46356 - DNA, 201 bp, Homo sapiens
tcactgttgggaaagagatcttcacctccattttcttaacttcaaaatggaaatgacagatgcttttgagtggtctgaatacttgaaatttgagggaaaaygttaccagaaacacatacaactagagttaaagataaatacatatatcaaacgcatggctcaaaaatgacaacgcgtcttctttatctgccttcacgtaga

SEQ ID NO: 46357 - DNA, 201 bp, Homo sapiens
tggtgtgggctgtctggcattctgactgagcccctctgggcacagctgcagaacacgaataactagtcttatgaggttactttatgagatgctctcctgaytgtggggctagcaggaggagcaccctggggccctggggggaagactggtggtgttaggaatcatgagtccagctggaggcatctcagccaggaacctcct

SEQ ID NO: 46358 - DNA, 201 bp, Homo sapiens
agaacatggtgtgcggcggcatgggctgcaacaatgattccctggtgcagcagatatttaacgcggcgcagctggacaactagtcagtaccaccttgtctygtacttcagaagcagcggaggaggctctcagccaggcagtcagctcaggcctgaaatgtctcactgaaaatagactttcttggaaaagttgtttttatgc

SEQ ID NO: 46359 - DNA, 201 bp, Homo sapiens
gattacatgaatgaatgtgtcttagttcactgaggaatgttgaccttactctaactgttgcctactcccgtgtctgtgctctttcacctgaaaggaactcygtccaggattcttctttggcaatgtcagtctctgttgtgatgttcggcagcttcagacactaaaagacaacctgcagctgcctctacagtttctgtccag

SEQ ID NO: 46360 - DNA, 201 bp, Homo sapiens
ttgcttgagcccagcagttcaagaccaatctgggcaacatggtgaaaccccgtctctacaaaaaatacaaaaattagccaggagtggtggtgcacaggtgrgaggatcgcttgagcccaggaggtagaggctgcagcgagccatgatcatgccactgcacgccagacttggcaacagagtgagactctgtcccagaaaaaa

SEQ ID NO: 46361 - DNA, 201 bp, Homo sapiens
agaggaattgagttattttgaaatacttgttggctggtgatttatatttcattgatttagacactgctctgagtatggcttcagaagtgttacatacgcakaataaaatcctttacagctattaaaaggagtgaggtaggaaagcatactgctaaaagcaaagaagccagatgagaactgtgtactgtacatccccacttg

SEQ ID NO: 46362 - DNA, 201 bp, Homo sapiens
ctgctcctgctcctccgctcctcctgcgcggggtgctgaaacagcccggggaagtagagccgcctccggggagcccaaccagccgaacgccgccggcgtcmgcagccttgcgcggccacagcatgaccgctcgcggcctggcccttggcctcctcctgctgctactgtgtccagcgcaggtgagcggtcgccggccaccgg

SEQ ID NO: 46363 - DNA, 201 bp, Homo sapiens
acttggcagtggtgacaggatgaacacgcagtgttcgggagtgagagcgagctttaatgaggcctcccctctcccctccagtgtgttttatgtcttctacraacagtacctgaccatcattgacgacactatcttcaacctcggtgtgtccctgggcgcgatatttctggtgaccatggtcctcctgggctgtgagctctg

SEQ ID NO: 46364 - DNA, 201 bp, Homo sapiens
gcaccctgtgtttagctcaaggtttgtgagtgctccaatcgacactctgtatctagctgctctggtgaggacgtggagaacctttatgtctagctcaaggwttgtaaacacaccaatcagcaccctgtgtttagctcaaggtttgtgagtgcaccaatcgacactctagctgctctggtgaggacgtggagaacctttatg

SEQ ID NO: 46365 - DNA, 201 bp, Homo sapiens
ggattgtaaatacaccaatcggcagtctatctagctcaaggtttgtaaacacaccaatcagcaccctgtgtttagctcaaggtttgtgagtgctccaatcracactctgtatctagctgctctggtgaggacgtggagaacctttatgtctagctcaaggtttgtaaacacaccaatcagcaccctgtgtttagctcaagg

SEQ ID NO: 46366 - DNA, 201 bp, Homo sapiens
agctcaaggattgtaaatacaccaatcggcagtctatctagctcaaggtttgtaaacacaccaatcagcaccctgtgtttagctcaaggtttgtgagtgcwccaatcgacactctgtatctagctgctctggtgaggacgtggagaacctttatgtctagctcaaggtttgtaaacacaccaatcagcaccctgtgtttag

SEQ ID NO: 46367 - DNA, 201 bp, Homo sapiens
ctactgaacctgttttgtgagctgacatgtagccctcgacagagtcagtttttgaatgttacagctactgaagattatgttgatcctgttacaaaccagaygaaaacaaatgtgaaagagttacaatactacgtcggacagagttttgccaatggtaagtaaacttttaattattcctcttttacagctggcatcaggaca

SEQ ID NO: 46368 - DNA, 201 bp, Homo sapiens
tgtatctagctgctctggtgaggacgtggagaacctttatgtctagctcaaggattgtaaatacaccaatcggcagtctatctagctcaaggtttgtaaayacaccaatcagcaccctgtgtttagctcaaggtttgtgagtgctccaatcgacactctgtatctagctgctctggtgaggacgtggagaacctttatgtc

SEQ ID NO: 46369 - DNA, 201 bp, Homo sapiens
caacactctgtatctagctgctctggtgaggacgtggagaacctttatgtctagctcaaggattgtaaatacaccaatcggcagtctatctagctcaaggwttgtaaacacaccaatcagcaccctgtgtttagctcaaggtttgtgagtgctccaatcgacactctgtatctagctgctctggtgaggacgtggagaacc

SEQ ID NO: 46370 - DNA, 201 bp, Homo sapiens
aaaagtatttccaacagttctatttgcgcatgattgcaaagatttacatccaagaatgggccaggagtggtggctcacgcctgtaatcccagcactttagsaggctgaggcaggcagattgcttgagcccagcagttcaagaccaatctgggcaacatggtgaaaccccgtctctacaaaaaatacaaaaattagccagga

SEQ ID NO: 46371 - DNA, 201 bp, Homo sapiens
tccagcactttggaggctgaggcaggaggatcactttagccagggaggtcaaggctgcagtgagctgtgatcatgccactagactacaacctgggtgacasagtgagactctgtctcaaaagaaaaaagaaaaaagcacagaaaaataaataaaattacttataaatgtgtgaaaagatttttaatctcacttataattaa

SEQ ID NO: 46372 - DNA, 201 bp, Homo sapiens
cttaattaaaaggaaaagtctattaacaaaaagagttctcaaaaatgctcaacctgaacctccttagggggttggcagaagcattaactaaagctctcctrtatttcaccaaaatgtgttggcaattcgtagcctgctggaggaagggaggtgtgagctgttccctgtgttcagctggacagcctcccactctctataggc

SEQ ID NO: 46373 - DNA, 201 bp, Homo sapiens
tttaccttagggaaggggctactgtcagggaggggtaattggggagcttcaactgaatctatagagtgtgtgtgtgtgtgtaagtatttttttattttttkgaagagacgggcctcactgtgttggtgaggctggtcttgaactcctggccttaagtgatcctcctgcctcggcctgccaaagtgttgggactgtaggtgt

SEQ ID NO: 46374 - DNA, 201 bp, Homo sapiens
tgtgtcagaggtgctgaagatggaacaagcgtccaggcctcagagagctgtttgtttcgcttcttcaaaaactcctattctccacttctgctaaaggactrgatgagaccaattgtggtatgcgcttatctgtggtttttctctttcctctcactgaaacagattatcacatgccttctaagaagccagacagcctgggaa

SEQ ID NO: 46375 - DNA, 201 bp, Homo sapiens
tgaggctggtcttgaactcctggccttaagtgatcctcctgcctcggcctgccaaagtgttgggactgtaggtgtgagccaccacacctggcctatagtgsattattatttttatttagtttttaaattatgccatagccagttgttctgaatagtgcagtactacaaaacagagtcaaggtctcatgctgtcacccaggc

SEQ ID NO: 46376 - DNA, 201 bp, Homo sapiens
accacgaccatgccattattattacattattattagctaaaccagagatcttaatcagatttcaccagctttttctctaatgcccttccctgtttcaaggycccatattacatttttgtgttttatgagtcccctctaatctgtgacagaaagttcctcagtctttccttttctggccttaacactcttgatgatactggt

SEQ ID NO: 46377 - DNA, 201 bp, Homo sapiens
ccaaaggtttggagtcgctgaggacgtggtactgcaggaactgatgcagcatataaaagaggttgtgctggacaagggttttgataacaagttcatgtagrtaatgctgaggacaaaagtaaaaagtgaaagaacacttccaaatcattcagctacaacagactagaggctccccaaggactggctattctaaccaacaca

SEQ ID NO: 46378 - DNA, 201 bp, Homo sapiens
tagcattcattgttgggtcttgtctgcaacagttataactaaggtgtttgcctgatagtgatttttttctctttccctctcttcctctgcatttactaacyggacttctgtacagaaagctatcccttctccctcatttatttactcagttatttacatcatggacttttaattctgtgggttgtatccaacactgtcatt

SEQ ID NO: 46379 - DNA, 201 bp, Homo sapiens
cagggcagggttgaacctcacccttcagaggctcctgtgtcggcatctcctctgtggggtgggaatagcgctcattgagggcagccaacaaaggtggcttygctgagcagataggtagctgagggcaggggtctcatatgtgtccccaggtgggcttgattcctgccatgagatagcaactaatgctttccctgttccgac

SEQ ID NO: 46380 - DNA, 201 bp, Homo sapiens
ttgatgaacacataacatgtgctatcgtgccagctagagattagtgctatgaggagaaaaataaggctggacagagtggggggtgcattgcttaagcgtgragatgtgcacaaagggagaggaaaggacagctgggcacatcacagggatgagagttcccggcagaaccagcagcaagtgcagagccctggcaggaagctc

SEQ ID NO: 46381 - DNA, 201 bp, Homo sapiens; identical to SEQ ID NO: 8243

SEQ ID NO: 46382 - DNA, 201 bp, Homo sapiens
tgcaggcctctgactccggaaggcaaacagaggcctcaggggggagacttcatgagattcctgcccatgttcctttcggataaccctaaccccaagtgtgrcaaagggtaagtgctgctgccattgcagataagcatccactgcaactttaatttgcagtagaaaactaggagaggactgggctaagacagttgcatggga

SEQ ID NO: 46383 - DNA, 201 bp, Homo sapiens
gaggaagggcacgactacacttcttccaaggggcagaacatggtgtgcggcggcatgggctgcaacaatgattccctggtgcagcagatatttaacgcggygcagctggacaactagtcagtaccaccttgtcttgtacttcagaagcagcggaggaggctctcagccaggcagtcagctcaggcctgaaatgtctcactg

SEQ ID NO: 46384 - DNA, 201 bp, Homo sapiens
caaatccatcagtcagtacctgcatgcgggtccgcctgtgtactttgtcctggaggaagggcacgactacacttcttccaaggggcagaacatggtgtgcrgcggcatgggctgcaacaatgattccctggtgcagcagatatttaacgcggcgcagctggacaactagtcagtaccaccttgtcttgtacttcagaagca

SEQ ID NO: 46385 - DNA, 201 bp, Homo sapiens
tttctttcaggactcctacatggtggattatttcaaatccatcagtcagtacctgcatgcgggtccgcctgtgtactttgtcctggaggaagggcacgackacacttcttccaaggggcagaacatggtgtgcggcggcatgggctgcaacaatgattccctggtgcagcagatatttaacgcggcgcagctggacaacta

SEQ ID NO: 46386 - DNA, 201 bp, Homo sapiens
ttcacactctctcctattcttttatctttctttcaggactcctacatggtggattatttcaaatccatcagtcagtacctgcatgcgggtccgcctgtgtrctttgtcctggaggaagggcacgactacacttcttccaaggggcagaacatggtgtgcggcggcatgggctgcaacaatgattccctggtgcagcagata

SEQ ID NO: 46387 - DNA, 201 bp, Homo sapiens
agtttgagactagcctggccaacatggtgaaaccctgtctctactaaaaataccaaaattagccgggcctggtggcgcacgcctggagtcccagctactcrggaggctggggcaggagaagcactcaaacccgggaggtggagcttggagtgagctgagattgcgccattgcacttcagcctgggcgacagagcgagaatc

SEQ ID NO: 46388 - DNA, 201 bp, Homo sapiens
tttcaggttcttgacttacaaatagccatcgaaaacattactgcctcttatgacaatgagactgtgacacttcaagacatctgcttggcccctctttcacygtataacacgaactgcaccattttgagtgtgttaaattacttccagaacagccattccgtgctggaccacaagaaaggggacgacttctttgtgtatgcc

SEQ ID NO: 46389 - DNA, 201 bp, Homo sapiens
ctcactgcaacctccacctcccaggtttaagcaattcccctgcatcagcctcctgagtagctgggattacaggcatccgccaccatgcctgcatgcctgamtaatttttgtatttttagtagagacggggtttcaccgtgttggccaggctgatctccaactcctgacctcaggtgatctgcccgccttggcctcccagag

SEQ ID NO: 46390 - DNA, 201 bp, Homo sapiens
gttggaggatttgagagaagctttaaaattttatcttattactgtcccttgcttaggtcacaagaggagctcaaaataatttcataaacatgaattggctkccctagacacaacaaaggataagatcaaaagaattaacccatttaaaaaaatcagtctaggctggtcctaaggtagtgtgttatcaattgatcaaagtca

SEQ ID NO: 46391 - DNA, 201 bp, Homo sapiens
gatgaacgtcttcaaggggaaaccctggatcagcagctgggcagggtcctaggagaagtggctcccagtatgttcctgtcatccttttctgagactgtagmatttttcttaggtaattatgctttcaatcctaccagtcctgtagtctgctgagcctggagaaagaaggagctggctacctgaacatgtccctttgtgttg

SEQ ID NO: 46392 - DNA, 201 bp, Homo sapiens
aacttgatctctgcgccactgcacagctgcaagagacacacactggaaaatggcttaaggcagggggcgcttggagagcaggcggctcagagcagggcccrgcccacattcttggccaacaatgaaccagaatccctaactgctggttatttgggatgctgcctgtatgtagactttttatattgttaggggttttttttc

SEQ ID NO: 46393 - DNA, 201 bp, Homo sapiens
ctgacaggacatgggtgtacacatctgactggtccagcaccgcctgggtccgcaccggcctcttgaggagcgggctgcttcggctctgccctgcttccacygcctgaaagaaaaaaaccacaaactatgatcttcggcatcttagaggaagggtgctgtttacagttcatccacaaggactgaattcttcgatgtggaccc

SEQ ID NO: 46394 - DNA, 201 bp, Homo sapiens
tcacactctctcctattcttttatctttctttcaggactcctacatggtggattatttcaaatccatcagtcagtacctgcatgcgggtccgcctgtgtastttgtcctggaggaagggcacgactacacttcttccaaggggcagaacatggtgtgcggcggcatgggctgcaacaatgattccctggtgcagcagatat

SEQ ID NO: 46395 - DNA, 201 bp, Homo sapiens; identical to SEQ ID NO: 8261

SEQ ID NO: 46396 - DNA, 201 bp, Homo sapiens
agcaccgcctgggtccgcaccggcctcttgaggagcgggctgcttcggctctgccctgcttccaccgcctgaaagaaaaaaaccacaaactatgatcttcrgcatcttagaggaagggtgctgtttacagttcatccacaaggactgaattcttcgatgtggacccaggatatgagcggaaaacactttctctacttagat

SEQ ID NO: 46397 - DNA, 201 bp, Homo sapiens
aggttttctgcaagggatgtttcccaaaggagtctgaccacttggcagtggtgacaggatgaacacgcagtgttcgggagtgagagcgagctttaatgagrcctcccctctcccctccagtgtgttttatgtcttctacgaacagtacctgaccatcattgacgacactatcttcaacctcggtgtgtccctgggcgcgat

SEQ ID NO: 46398 - DNA, 201 bp, Homo sapiens
gaatgctagggacctggcctagggacatttgttcagccagttgagcaaccacagtggctatttcttcagcatgggaacagagaaattattcctttttgccyttaaggacactgctcagccgactacttctcaagagctaaggactctcacttctggttctaaagaactttgaccttgagttctgtttgtttgttactggag

SEQ ID NO: 46399 - DNA, 201 bp, Homo sapiens
ttattttgcatttgtctgtccattactcttcccagactggccccctccttcaggagcccccttggtgggcaccccatgctctaggacaggacatcttttcyttgaattattattattttttttttagagatgggatcttgctatgttgtccaggctggactcaaactcctgggttatagccatccttctgcctcagcttcc

SEQ ID NO: 46400 - DNA, 201 bp, Homo sapiens
aaccctccactcctaaaagggatgcagtattctaagcatggcagattacctacagcggaagcctggatcagtcatctctgatctcgggtgcccctttctgscctttgacctccagctctgtgaagggcatcagctctccagtcaaattgaactgcttgctagcaaaatcctgcccatcttccagggccccatttcacatgc

SEQ ID NO: 46401 - DNA, 201 bp, Homo sapiens
tgccaaatctcaaattttccagatattctacttcaggatgtatttggccatggtcttactgggagccactcacggattaatatttctccctgtcttactcrgttacataggtaagagttctcatcttaaaagggtggcacaatagaaggacattactgaaagggaattctatcctgaggcattcttttcaagtatttgaac

SEQ ID NO: 46402 - DNA, 201 bp, Homo sapiens
tttgacctccagctctgtgaagggcatcagctctccagtcaaattgaactgcttgctagcaaaatcctgcccatcttccagggccccatttcacatgctamattatctacgacattcttgtcctgttcccctaactagaatgccttccctctgaagttctgaatctttatttaaactgctgcaacagcatttgctgcctca

SEQ ID NO: 46403 - DNA, 201 bp, Homo sapiens
ggagatgactgtcaccctagttaacctgtctttccagaacaagggtaaaacaaaatgaatgtgtaagcatctccttgaagattagggaaagaagatcctgsgaagtttctagcaagcagagactggtaaatgagaatcgacagtacaggacccattccagctattttcttaggtgtaatacactgatactatccttatgta

SEQ ID NO: 46404 - DNA, 201 bp, Homo sapiens
tgtcgcataatttttttttttttttttaagagagatgaacgtcttcaaggggaaaccctggatcagcagctgggcagggtcctaggagaagtggctcccaktatgttcctgtcatccttttctgagactgtagcatttttcttaggtaattatgctttcaatcctaccagtcctgtagtctgctgagcctggagaaagaag

SEQ ID NO: 46405 - DNA, 201 bp, Homo sapiens
aagatacaaaattttaaaatgtaatgtgcagaatagtattttactgtttgtgtggttaagagggaaaggggaagaatctgtgtgtttgcttgtgtgtgtgyggagtggctctggaaagattcgcagatggtcacagtatggggaggagaactaagacaatgaaacagatgttggagaaggagagaattttcgataaacact

SEQ ID NO: 46406 - DNA, 201 bp, Homo sapiens
gattcattttgcccaaaggtgccactaaaaaggcaaaaggtcaacacgtgtcccgctgctgtagaaggtggtctcagtcgtcctgtagacccgacgtgggyggagactcagtgcacgtgagagtgatgttcactggtccagtcccctgccgcctgtgttccgagtgttttcctgataatgtggctggctcagctttccctt

SEQ ID NO: 46407 - DNA, 201 bp, Homo sapiens
cagatcagcagcagaaaaaaattttttaaaaagctttttaaaaaaattttagaagaaatcaaaggtttttttggtaataaaattttattggcttggcatgrtggttcatacctattatccagcactttggaggctgaggcaggaggatcactttagccagggaggtcaaggctgcagtgagctgtgatcatgccactagac

SEQ ID NO: 46408 - DNA, 201 bp, Homo sapiens
atagggtcttgcttttttgcccaggctggcctcaaactcctggcctcaggagatcttcccacagtgctgggattacaggtgtgagtcactgcacctggccragtccattatttttttaatgttgaggcaaatgttgtgaaatggtatgactgatagttaactgggtaatgaggaaatgagaattgtattattctccatgtg

SEQ ID NO: 46409 - DNA, 201 bp, Homo sapiens
tgaaaggaactctgtccaggattcttctttggcaatgtcagtctctgttgtgatgttcggcagcttcagacactaaaagacaacctgcagctgcctctacrgtttctgtccaggtaggttctgctggggaaacagaacaactgggctgtagatacttgtgaactggtaatgctcagctttccatttattctttgtttacat

SEQ ID NO: 46410 - DNA, 201 bp, Homo sapiens
tgtgggaaggacgctgacgcctgtaatgccaccaactggattgaatacatgttcaataaggacaatggacaggcaccttttaccatcactcctgtgttttmaggtaggtataaagattccaagtttggtgtgtttatgatattgttttaaagccaaggaactggctgggcacagtggctcaccagtgcttggggagactga

SEQ ID NO: 46411 - DNA, 201 bp, Homo sapiens
caggcttctggtaagccggggggggggtggtgtatgttctagaggttaacagcagtgcacagtgtaacgtcatatttttgcctctttattcttattccatyatgtttaaaactgccataaattcccccatgttttaattgtatgtaacgtttctgttgcctacatctattttcttcattccaactttttggtttatcttaa

SEQ ID NO: 46412 - DNA, 201 bp, Homo sapiens
tgggattacaagcatgagccaccgtgctggccctggaatcttttttttttttttcaagaccaggtcttactttggttgcccaggctggagcgcagtggcaygatcttggctcactacagcctcgacctcccgggctcaggtgattctcccacatcaagcctcccgagtagctgggactataggtgtgcaccatcatgccct

SEQ ID NO: 46413 - DNA, 201 bp, Homo sapiens
tgcaccattttgagtgtgttaaattacttccagaacagccattccgtgctggaccacaagaaaggggacgacttctttgtgtatgccgattaccacacgcrctttctgtactgcgtacggtaagtggcaagagacaatcattggtagacaccattcttgggtctgacttagggtacatgggcaaaagcttgttttatgagc

SEQ ID NO: 46414 - DNA, 201 bp, Homo sapiens
gttaaattacttccagaacagccattccgtgctggaccacaagaaaggggacgacttctttgtgtatgccgattaccacacgcactttctgtactgcgtayggtaagtggcaagagacaatcattggtagacaccattcttgggtctgacttagggtacatgggcaaaagcttgttttatgagcataacccagaggtgagc

SEQ ID NO: 46415 - DNA, 201 bp, Homo sapiens; identical to SEQ ID NO: 8277

SEQ ID NO: 46416 - DNA, 201 bp, Homo sapiens
ccctcttattctccatgatcctcgccttgcttagttactatcagagtgttcacactctctcctattcttttatctttctttcaggactcctacatggtggwttatttcaaatccatcagtcagtacctgcatgcgggtccgcctgtgtactttgtcctggaggaagggcacgactacacttcttccaaggggcagaacatg

SEQ ID NO: 46417 - DNA, 201 bp, Homo sapiens
cccccatccagccaggcagccagttacccacggaagccagatatatggcccaaaaatagtgatgatgaccggaagtctctggccttgatttggaagctttkggaggtggaagatgagtatccccatgtatgttaggtaaaccctgaacttaggtttttcataagaacatacatctgaccagagtcatatcagtgaatcatt

SEQ ID NO: 46418 - DNA, 201 bp, Homo sapiens
tagtacccgaataggcttcgccccctcgtcctggatcgacgattatttcgactgggtgaagccacagtcgtcttgctgtcgagtggacaatatcactgacyagttctgcaatgcttcaggtaccttctcctttaccaaatctttcctgttttgctgaaaaattttcaaattatcatttaaaaatcatttgcatcgtgcctc

SEQ ID NO: 46419 - DNA, 201 bp, Homo sapiens
tggcttgctccttgggtgtcttcagctacattgggttgcccttgaccctcattgtgattgaagtcatcccgttcctggtgctggctgttggagtggacaayatcttcattctggtgcaggcctaccaggtatacttccatattctcacagggctcagcatctgttcaagtttcagggactgtgaatggctcctgggctccg

SEQ ID NO: 46420 - DNA, 201 bp, Homo sapiens
ttgggtttgggtttcattccagatttaaaagaagtggattgggttagccatttttaggtcacacatgcctttgagaagctgtcgaaggctaagtacctttycccagaataatgcaattgcaaacctctgcattgttgttcagcttgaaggtcatgggcctccgaagttcatttatagaccctctagggagctcatggacct

SEQ ID NO: 46421 - DNA, 201 bp, Homo sapiens
catattatatgattggatttatgtgaactgtctgaaatagtcagataaatagagacagttcagtggttgcttagggcttagggaagtagggaggtagttgwgcatagctagaatacaggatttcttttgaggtgatgaaaatgttataaaattgactatggtgatagttgcatatatctatgaatatgctaaactccatta

SEQ ID NO: 46422 - DNA, 201 bp, Homo sapiens
atagcgccaccacacctggctaatttttttttatttttttattttttgtagagacggggttttgccatattgcccaggctggtctggacctcctgagctcwggcagtccacccaccagggcctcccaaattactgggattaaaggtgtgcataaccacccctggcccaaagacaaatatcttaaaagcaaatagagacaag

SEQ ID NO: 46423 - DNA, 201 bp, Homo sapiens
tggagcaggtcagtaaccctgtctgtcctctctagtacccgaataggcttcgccccctcgtcctggatcgacgattatttcgactgggtgaagccacagtygtcttgctgtcgagtggacaatatcactgaccagttctgcaatgcttcaggtaccttctcctttaccaaatctttcctgttttgctgaaaaattttcaaa

SEQ ID NO: 46424 - DNA, 201 bp, Homo sapiens
ttgttcaattacaggttggtaaaagtggtttctaacacagtatctcttcttttaggtgttcagtggaatcacacttacaaaatttggagggattgtggtgktggcttttgccaaatctcaaattttccagatattctacttcaggatgtatttggccatggtcttactgggagccactcacggattaatatttctccctgt

SEQ ID NO: 46425 - DNA, 201 bp, Homo sapiens
gtcttcaaggggaaaccctggatcagcagctgggcagggtcctaggagaagtggctcccagtatgttcctgtcatccttttctgagactgtagcatttttyttaggtaattatgctttcaatcctaccagtcctgtagtctgctgagcctggagaaagaaggagctggctacctgaacatgtccctttgtgttgcttcctt

SEQ ID NO: 46426 - DNA, 201 bp, Homo sapiens
tgggaagtttctagcaagcagagactggtaaatgagaatcgacagtacaggacccattccagctattttcttaggtgtaatacactgatactatccttatrtaatgtgttgtgtgtatgtgtaagaaaataaaatccaaaaagataacagtattaggggttttttttgttttttttttttgtttttttgtgatggagtctt

SEQ ID NO: 46427 - DNA, 201 bp, Homo sapiens
cctcggcctcccaaagtgctgggattacaggcgtgagcttccatgcccagctggaagcttacatcttaatggagggagacggttgatgaacacataacatrtgctatcgtgccagctagagattagtgctatgaggagaaaaataaggctggacagagtggggggtgcattgcttaagcgtggagatgtgcacaaagggag

SEQ ID NO: 46428 - DNA, 201 bp, Homo sapiens
cagggtcaggtgattttgcttagcctcaagtgctcagattctgctgatattttgcaagacctggactctcttgacacccaggattctttcctcaggggacrtgctgcctatagttctgcagttaacatcctccttggccatggcaccagggtcggagccacgtacttcatgacctaccacaccgtgctgcagacctctgct

SEQ ID NO: 46429 - DNA, 201 bp, Homo sapiens
agccgtgcacaccttctctctctttgcgggattggcagtcttcattgactttcttctgcagattacctgtttcgtgagtctcttggggttagacattaaasgtcaagaggtaagttggtgccaggattatagtctatttaatttgagtctagaatctagaggaagcagctagcgggtataacctttgtttccctctgtccc

SEQ ID NO: 46430 - DNA, 201 bp, Homo sapiens
ccagcctcatcaaatgttcactgtgtaaatgtttaggtccctgatgtcttgaggcccttctaactgggaggtgttttctaaactttttggcagggctcctkcctctctgaatgatacaagtttgctccatgacccttgtctgggtacgtttggtggaccagtgttcccgtggcttgtgttgggaggctatgatggtaagta

SEQ ID NO: 46431 - DNA, 201 bp, Homo sapiens
cactgtcagtattttaaaatgttttacaaaaaatctggagacctattcttctaacagtcctccctgcatgtctccgccagtggttgaccctgcctgcgttygctgcaggcctctgactccggaaggcaaacagaggcctcaggggggagacttcatgagattcctgcccatgttcctttcggataaccctaaccccaagtg

SEQ ID NO: 46432 - DNA, 201 bp, Homo sapiens
ttttaagagagatgaacgtcttcaaggggaaaccctggatcagcagctgggcagggtcctaggagaagtggctcccagtatgttcctgtcatccttttctragactgtagcatttttcttaggtaattatgctttcaatcctaccagtcctgtagtctgctgagcctggagaaagaaggagctggctacctgaacatgtcc

SEQ ID NO: 46433 - DNA, 201 bp, Homo sapiens
ctgtattttcacgtttggctccatctaataaagcgtttattcacttaagatccagtgagaataagatggatagcagcaatcttgcagtaatatttgcaccraatcttcttcagacaagtgaaggacatgaaaagatgtcttctaacgcagaaaagaaggtacgattacaggctgcagtagtacagactcttatcgattatg

SEQ ID NO: 46434 - DNA, 201 bp, Homo sapiens
tttcaactaacgttttatgcttgtagatatgtacaatttcatttggaatggaaatttttctttaaaaattccatatttcattactatgaggagtatactcyaatttaagaaacagcataccaaatgatttaatatttccttatcttaaagtcatcatcatgaatgccttaatggttcatcattggtgtttataagattcat

SEQ ID NO: 46435 - DNA, 201 bp, Homo sapiens; identical to SEQ ID NO: 25089

SEQ ID NO: 46436 - DNA, 201 bp, Homo sapiens
tgtatggtatcttaaagttgaactgtttttaaagaattattaatccatccaattattatcaatatgatttgctgtggactttatttcaaatttcgtatttyaagtatttctctggtgtttatactataaactgacatttttaattccacttcttctagagtggaatcaggaaaagcaggctgcttttctcctaaaatcagc

SEQ ID NO: 46437 - DNA, 201 bp, Homo sapiens; identical to SEQ ID NO: 25091

SEQ ID NO: 46438 - DNA, 201 bp, Homo sapiens
tgagcccagggatgtcaaggctacagtgagctgtgattatgccattatactccagcctgggccgcagagtgagaccctgtctcaaaaaataaaaaacaaaraaaaaaattcctgttaggttaaaaagctagcctattctaacaattctgagttataactgactgactaacttttaagattagcagatcattttttatgcaa

SEQ ID NO: 46439 - DNA, 201 bp, Homo sapiens; identical to SEQ ID NO: 25092

SEQ ID NO: 46440 - DNA, 201 bp, Homo sapiens; identical to SEQ ID NO: 25093

SEQ ID NO: 46441 - DNA, 201 bp, Homo sapiens; identical to SEQ ID NO: 25063

SEQ ID NO: 46442 - DNA, 201 bp, Homo sapiens; identical to SEQ ID NO: 25180

SEQ ID NO: 46443 - DNA, 201 bp, Homo sapiens
atcaggaaaagcaggctgcttttctcctaaaatcagccataaagaaaaggttcgaagatctctgcgtttgaaattcaatctagggaaaaatggcagagaartagtaagtttcttaccattttattgatctttatattagcataacgctataaacttgatactaaaaaacactcatagccctaccttccttccagtgactgt

SEQ ID NO: 46444 - DNA, 201 bp, Homo sapiens; identical to SEQ ID NO: 25183

SEQ ID NO: 46445 - DNA, 201 bp, Homo sapiens; identical to SEQ ID NO: 8315

SEQ ID NO: 46446 - DNA, 201 bp, Homo sapiens; identical to SEQ ID NO: 8316

SEQ ID NO: 46447 - DNA, 201 bp, Homo sapiens
aattagccaggcatggtgccacatgcctgtagtcccagctacctgggaggctgaggtgagaggatcatctgagcccagggatgtcaaggctacagtgagcwgtgattatgccattatactccagcctgggccgcagagtgagaccctgtctcaaaaaataaaaaacaaaaaaaaaaattcctgttaggttaaaaagctagc

SEQ ID NO: 46448 - DNA, 201 bp, Homo sapiens
ccaactttttatgtgtaggtctgaaaatcagataaagatgttcaatttgtgtggaaaagcaaagtatgaactctaagattagcatggtttttagaatacayatttaaatatagagaggctatatatttctggttctttcttgtgttcaagccaatcatgtagatgaagggtaactattttgacttgtgtatgactgataat

SEQ ID NO: 46449 - DNA, 201 bp, Homo sapiens; identical to SEQ ID NO: 8320

SEQ ID NO: 46450 - DNA, 201 bp, Homo sapiens
catgatatgatttaaaaattttagaaaattacctgatttgaagaattgagacttggaagtagggagaatggtcagcaatgtgtgtcagtagtccaggcatsagattattgtttgaacttgttagtgacatggattagttagttaggagtacgaactaaataatgaaggaaatattatcaaggaagaatcagaaagaccaaa

SEQ ID NO: 46451 - DNA, 201 bp, Homo sapiens; identical to SEQ ID NO: 25099

SEQ ID NO: 46452 - DNA, 201 bp, Homo sapiens; identical to SEQ ID NO: 25146

SEQ ID NO: 46453 - DNA, 201 bp, Homo sapiens
gtcaaggctacagtgagctgtgattatgccattatactccagcctgggccgcagagtgagaccctgtctcaaaaaataaaaaacaaaaaaaaaaattcctkttaggttaaaaagctagcctattctaacaattctgagttataactgactgactaacttttaagattagcagatcattttttatgcaaatgcagtgtgttc

SEQ ID NO: 46454 - DNA, 201 bp, Homo sapiens; identical to SEQ ID NO: 25101

SEQ ID NO: 46455 - DNA, 201 bp, Homo sapiens
cagtgtgttcatgtatggtatcttaaagttgaactgtttttaaagaattattaatccatccaattattatcaatatgatttgctgtggactttatttcaamtttcgtattttaagtatttctctggtgtttatactataaactgacatttttaattccacttcttctagagtggaatcaggaaaagcaggctgcttttctc

SEQ ID NO: 46456 - DNA, 201 bp, Homo sapiens; identical to SEQ ID NO: 25076

SEQ ID NO: 46457 - DNA, 201 bp, Homo sapiens; identical to SEQ ID NO: 8318

SEQ ID NO: 46458 - DNA, 201 bp, Homo sapiens
gtctcagagactgcactggcattctgctctttctgtagtgttcttcccccttaaatcttcatggctctcacctttgttttgttttactcacaaattatctyctcatcaccctattttaaactaaacctccattcttcaccactccatatcctttttactctgttttacttttctccgtagcacttttcaccttgtatattg

SEQ ID NO: 46459 - DNA, 201 bp, Homo sapiens
gctatatatttctggttctttcttgtgttcaagccaatcatgtagatgaagggtaactattttgacttgtgtatgactgataataaagtcttcaaaatgtmctacatacgttattttaactcttctgtattttcacgtttggctccatctaataaagcgtttattcacttaagatccagtgagaataagatggatagcagc

SEQ ID NO: 46460 - DNA, 201 bp, Homo sapiens; identical to SEQ ID NO: 8322

SEQ ID NO: 46461 - DNA, 201 bp, Homo sapiens; identical to SEQ ID NO: 25122

SEQ ID NO: 46462 - DNA, 201 bp, Homo sapiens; identical to SEQ ID NO: 25123

SEQ ID NO: 46463 - DNA, 201 bp, Homo sapiens
ggtaatagggatatttatagcttggcattaaaggtctttcataggattgctctagcatacctgtctactatttcctgtctttgagcaactttagtcaaackatgttatttattttccagacacttttattcatttgcttacactatttattgatataatgtttttacttccatctctactgatcttttaaatacttttatt

SEQ ID NO: 46464 - DNA, 201 bp, Homo sapiens; identical to SEQ ID NO: 25079

SEQ ID NO: 46465 - DNA, 201 bp, Homo sapiens
ttgtagttcacatcgatacaagctcagaagggtcatctcagagttcactctctcctgtactcattggtggaaaccatttgatcactgcaggtgtgccaagrcgaagtaaaagaattgcaggcaaaaaagtttgcaggtactttatccaggacattttgttttcatcggataaatatttggtgtacacataattaataaaat

SEQ ID NO: 46466 - DNA, 201 bp, Homo sapiens
agggtcatctcagagttcactctctcctgtactcattggtggaaaccatttgatcactgcaggtgtgccaaggcgaagtaaaagaattgcaggcaaaaaartttgcaggtactttatccaggacattttgttttcatcggataaatatttggtgtacacataattaataaaatgttttgtctttctgtcaagcatcatatt

SEQ ID NO: 46467 - DNA, 201 bp, Homo sapiens; identical to SEQ ID NO: 8321

SEQ ID NO: 46468 - DNA, 201 bp, Homo sapiens
gagttcactctctcctgtactcattggtggaaaccatttgatcactgcaggtgtgccaaggcgaagtaaaagaattgcaggcaaaaaagtttgcaggtackttatccaggacattttgttttcatcggataaatatttggtgtacacataattaataaaatgttttgtctttctgtcaagcatcatatttgagtcataatt

SEQ ID NO: 46469 - DNA, 201 bp, Homo sapiens; identical to SEQ ID NO: 25170

SEQ ID NO: 46470 - DNA, 201 bp, Homo sapiens; identical to SEQ ID NO: 8324

SEQ ID NO: 46471 - DNA, 201 bp, Homo sapiens
aagatccagtgagaataagatggatagcagcaatcttgcagtaatatttgcaccaaatcttcttcagacaagtgaaggacatgaaaagatgtcttctaacrcagaaaagaaggtacgattacaggctgcagtagtacagactcttatcgattatgcatcagatattggtaagatgtagttgcattattaacagaatttgtt

SEQ ID NO: 46472 - DNA, 201 bp, Homo sapiens
ctgggaaggacgagatgcctggtgtcataaaaagaccatagtcttttttaagtgtgatgcatgcgcacacaggcacgcatacacacacgcgcacacacgcrcacacactgcactgctgccctgtccttggcagacattcctgtggggtcatgttcgaaatatgcacttctgtggagtagcttgggttttcttggaagtctc

SEQ ID NO: 46473 - DNA, 201 bp, Homo sapiens
ggaaaagggaaagaagtcatttatttgcttcgttttgcctttttccagtgtaattgattttaagatagaactgaaagaatattcaacacacactctctctyttttttttttttccttaaacagaactttattttctcacagttctggaggctagaagttcaagatcaagatgtctgcaggtttgctttcttctgaggcctc

SEQ ID NO: 46474 - DNA, 201 bp, Homo sapiens
gggcctacaggcgcacatcaccacgcccagttaatttattataataataataataattattttgagacggaatctcgctttgtcaccaggctggagtgcartggtgccatctcggctcactgcaacctccaactcctgggtttaagcgattctcctgcctcagcctccccagtagctgggattacaggcatgcgccaccac

SEQ ID NO: 46475 - DNA, 201 bp, Homo sapiens
ccccaagtgaaacaggagctagggacaaactgagactgtatgaggactcaccatcaccaggttgaccaaggatacagcgttcagactgatgccccagagcyacataactccaaacatgttgaccaagaccatggcgatggtggcacacatgatgactgcagaccagagctcacagcccaggaggaccatggtcaccagaaa

SEQ ID NO: 46476 - DNA, 201 bp, Homo sapiens
caagtgaaacaggagctagggacaaactgagactgtatgaggactcaccatcaccaggttgaccaaggatacagcgttcagactgatgccccagagccacrtaactccaaacatgttgaccaagaccatggcgatggtggcacacatgatgactgcagaccagagctcacagcccaggaggaccatggtcaccagaaatat

SEQ ID NO: 46477 - DNA, 201 bp, Homo sapiens
aagggcaggctttacctgtaaggaaatactcggtaggcactgccgttaatgcccatggtttcggtgacattactggctataagtcgggctttcttcagagygtcaataaagtcagcagaggtctgcagcacggtgtggtaggtcatgaagtacgtggctccgaccctggtgccatggccaaggaggatgttaactgcagaa

SEQ ID NO: 46478 - DNA, 201 bp, Homo sapiens
ggacgtgtgtttagggaagtcctctgtgttttcagttctgtttttgttttgtttttatgatgggagagatgagcaaatataaaggctgcttctaggagcabgagtgaggagaggttgcctatatgagagaaacgggatggtcaatactgtaggtttttttgagaaggtgaaatatggaattcattttttaaattttttaaa

SEQ ID NO: 46479 - DNA, 201 bp, Homo sapiens
tctgtcacccaggctggagtgcagtgatgtgatctctgctcattgcaacttctgcctcctgtttatataaacaggccaaaccctgtatgtatgtatgtatktatttatttttgagatggagtttcgctcttgttccacttgttgcccaggctggagtgcaatggcacgatcttggctcactgcaacctgcaactcccgggt

SEQ ID NO: 46480 - DNA, 201 bp, Homo sapiens
tcacccaggctggagtgcagtgatgtgatctctgctcattgcaacttctgcctcctgtttatataaacaggccaaaccctgtatgtatgtatgtatttatktatttttgagatggagtttcgctcttgttccacttgttgcccaggctggagtgcaatggcacgatcttggctcactgcaacctgcaactcccgggttcaa

SEQ ID NO: 46481 - DNA, 201 bp, Homo sapiens
ggcaacaagaggaacaagagcaaaactccatcaaataaataaataaataaataaataaaaacagggtttggccttgggcaggatggaccgttttctagaargacagccgtggtgcgctgcacaactggtatgaagcccagtttccatctgaagtcctcgatgttcatggaaataggggcgagacagtctgaggagtgtgaa

SEQ ID NO: 46482 - DNA, 201 bp, Homo sapiens
gacttgggtagagaggacagaacaatgacagggcaaactggtgatgttgaggaagagtcacagggagcagctaaacaagccagctgcagggatggcactgwgtggctggagagcagggttctggagttatcggtttttccatgtgtgacatgggcctgggtgggtgaggctgagtgtagaagtcttacatttccagtcttg

SEQ ID NO: 46483 - DNA, 201 bp, Homo sapiens
cgtggtcccagctacttgtgaggctgagatgggaggttgagactgcagtgagccgtgttcgcatcactgctctccagcctgggcacagagacactctgtcyctgaaacaaacaaaaaaagaggggctaacatggtaaatttcatgtttcttatcaagtaaaaaggcttgctgacccacaatctatattaggtttccctgtt

SEQ ID NO: 46484 - DNA, 201 bp, Homo sapiens
caaactggtgatgttgaggaagagtcacagggagcagctaaacaagccagctgcagggatggcactgtgtggctggagagcagggttctggagttatcggkttttccatgtgtgacatgggcctgggtgggtgaggctgagtgtagaagtcttacatttccagtcttgtcactcctctgatgagtttcagaccaatatatc

SEQ ID NO: 46485 - DNA, 201 bp, Homo sapiens
taggtcactttgagtgagctcatcaaaggaagcatgtcataaatgcaggaaatacttgtgagaggagataaaaatattaaaagagagttgtgatgttaatsacaaattccttctcaagtaagagctagcctgtagggaggaaatgcaaacacaggcttttaaactgatttaaacagcaagatgggatggaatgaaagcaac

SEQ ID NO: 46486 - DNA, 201 bp, Homo sapiens
tggaatctaagacagccaattcccccaagtgaaacaggagctagggacaaactgagactgtatgaggactcaccatcaccaggttgaccaaggatacagcrttcagactgatgccccagagccacataactccaaacatgttgaccaagaccatggcgatggtggcacacatgatgactgcagaccagagctcacagccca

SEQ ID NO: 46487 - DNA, 201 bp, Homo sapiens
ctgatgccccagagccacataactccaaacatgttgaccaagaccatggcgatggtggcacacatgatgactgcagaccagagctcacagcccaggaggamcatggtcaccagaaatatcgcgcccagggacacaccgaggttgaagatagtgtcgtcaatgatggtcaggtactgttcgtagaagacataaaacacactg

SEQ ID NO: 46488 - DNA, 201 bp, Homo sapiens
gaagatagtgtcgtcaatgatggtcaggtactgttcgtagaagacataaaacacactggaggggagaggggaggcctcattaaagctcgctctcactcccraacactgcgtgttcatcctgtcaccactgccaagtggtcagactcctttgggaaacatcccttgcagaaaaccttgctggctgtctacaagactcaccga

SEQ ID NO: 46489 - DNA, 201 bp, Homo sapiens
ctctgggaaggacgagatgcctggtgtcataaaaagaccatagtcttttttaagtgtgatgcatgcgcacacaggcacgcatacacacacgcgcacacacrcgcacacactgcactgctgccctgtccttggcagacattcctgtggggtcatgttcgaaatatgcacttctgtggagtagcttgggttttcttggaagtc

SEQ ID NO: 46490 - DNA, 201 bp, Homo sapiens
gagtcaaccaaactgaattctctgggaaggacgagatgcctggtgtcataaaaagaccatagtcttttttaagtgtgatgcatgcgcacacaggcacgcayacacacacgcgcacacacgcgcacacactgcactgctgccctgtccttggcagacattcctgtggggtcatgttcgaaatatgcacttctgtggagtagc

SEQ ID NO: 46491 - DNA, 201 bp, Homo sapiens
gcataattgttgacgggtggttctggagcgatgtgtgcaaaaccagtgaaagatgaacactgggccattttaagatggaaacaaggtgggggttggatagrgagttatatgcagcctcttttgcacctcgttggtatttgtaagaccacatttttttctccctaggagatgcctcataaatttgtgatagccgtgctgatg

SEQ ID NO: 46492 - DNA, 201 bp, Homo sapiens
ggtttcggtgacattactggctataagtcgggctttcttcagagcgtcaataaagtcagcagaggtctgcagcacggtgtggtaggtcatgaagtacgtgrctccgaccctggtgccatggccaaggaggatgttaactgcagaactataggcagcatgtcccctgaggaaagaatcctgggtgtcaagagagtccaggtc

SEQ ID NO: 46493 - DNA, 201 bp, Homo sapiens
atggatgacagtgctgggggataatggttttgaggccgtgtggaccaggacaactagaatgggtcctgtgggctgggcctctgatataaagaagctgcttmcctcctctaccctcccagagggtggtgacgctaactctgtgacacgtgaggatgtttccagttgaaatgacagagatctgcttaggtcactttgagtgag

SEQ ID NO: 46494 - DNA, 201 bp, Homo sapiens
ttgattaaagataattcaaaactatttcagaaactaacgcttgagatttgaccttggaagaaggtgggaatccgctccattccacgagtacttgaactctstgttgcaattgtgagcatggatgacagtgctgggggataatggttttgaggccgtgtggaccaggacaactagaatgggtcctgtgggctgggcctctga

SEQ ID NO: 46495 - DNA, 201 bp, Homo sapiens
aaacaggagctagggacaaactgagactgtatgaggactcaccatcaccaggttgaccaaggatacagcgttcagactgatgccccagagccacataactmcaaacatgttgaccaagaccatggcgatggtggcacacatgatgactgcagaccagagctcacagcccaggaggaccatggtcaccagaaatatcgcgcc

SEQ ID NO: 46496 - DNA, 201 bp, Homo sapiens
ctggctaatttttaaacttttttgtagagacgaagtcttgctatgttgcccaggctggtgtcaaactcctaacctcaactcctgccttggccactcagctytagtctcttgctggggattttattctttttttttttttttataattgcaagtaataaattaaaaaaaaaaaaaagaaaagaaaaagggcttggtggcccg

SEQ ID NO: 46497 - DNA, 201 bp, Homo sapiens
ctaatttttaaacttttttgtagagacgaagtcttgctatgttgcccaggctggtgtcaaactcctaacctcaactcctgccttggccactcagctttagyctcttgctggggattttattctttttttttttttttataattgcaagtaataaattaaaaaaaaaaaaaagaaaagaaaaagggcttggtggcccgtgcc

SEQ ID NO: 46498 - DNA, 201 bp, Homo sapiens
aaaaatgaacaagatcatgtcttttgtgggaacatggatggagctggaggccatcatccttagcaaactaacacaggaacagaaaaccaaataccacatgwtctcacttctaagtgggagctaaatgtaagttatgaatgcaaagaaggaaacaacagacacggggggctacttgagcaggggagggtgggaggagggaga

SEQ ID NO: 46499 - DNA, 201 bp, Homo sapiens
agaagaggtggggtttcaccatgttggccaggctggtcttgaacccctggcctcaaataatccacctatctcggccccctaaagtgctgggattacaggcrtgagccaccatgcctggccgaaagacattttaatttgcattttacattactagggaagtaagcatcttttcatttgtatattgtccatttgtattttgtt

SEQ ID NO: 46500 - DNA, 201 bp, Homo sapiens
tgggttcaggcgattctcctgtctcagcttcctgaatagctgggattacaggtgtgcgccaccacgcctggctaatttttgtatttttggtagagatgggrtttcaccatgttggccaagctggtcttgaactcctgacttcaggtgatccactcacctcagcctcccaaagtgctgggattacaggcgtgagccactgtg

SEQ ID NO: 46501 - DNA, 201 bp, Homo sapiens
gcctcaagtgatctgcccaccttggcctctcaaagtggtgggattacaggcatgagccaccacgcctggcccaaatttttatatttttggtagagatgggrtttcaccatgttggccagactggtcttgaactcctgacctcaggtgatccgcctgcctcgctctcccaaagtgctaggattacaagtgtgagccaccatg

SEQ ID NO: 46502 - DNA, 201 bp, Homo sapiens
ctttcttctgtgcctgtccctcgcagcagtctctcccggctctcttttgaaggagattggagtgcagaattggctagtctgaggtttcagtgtgcaagacrtagtcagatggctcacatttggaaccctggtagtaatgttttattctttgtccgatggcattgggcgggttgacccagcctgcagtcaggatttccttgt

SEQ ID NO: 46503 - DNA, 201 bp, Homo sapiens
tcactgtcttagaagatgactcatatgctaagacaggtctgcctccctgactcagaatgctgagtgactcctgacattattagttggaatgggaagtgtamggtcaagttggggtctttacctgcatgacgaaaccacttcttgtaatgacagacttttactgtgttggttagaatagccagtccttggggagcctctagt

SEQ ID NO: 46504 - DNA, 201 bp, Homo sapiens
gaattgcttgagaccagcctggacaacagagtgagaccacatctctctccctctcttttggagatgggctctttgctttcttcctcaggctgcagtgcagyggtatgaacacgactcactgcatcctaagcccacccttctgggctcaagcaagcttcctgcctcagcctaacaagtaggtgggactgcagacgcacacca

SEQ ID NO: 46505 - DNA, 201 bp, Homo sapiens
gtctgaggagtgtgaagaaggcctgaaaatatccttgcagagaacaggagagacaatgactgggacagccaggcagggctgagggcccatttgaatttccmgcagtgccctctgtcctgttgtgtgacccctccagcagtaggtactgggaaagcaggtggctgagttcatccaggactgaggctctgccagacaagaaca

SEQ ID NO: 46506 - DNA, 201 bp, Homo sapiens
accagcctggacaacagagtgagaccacatctctctccctctcttttggagatgggctctttgctttcttcctcaggctgcagtgcagtggtatgaacacsactcactgcatcctaagcccacccttctgggctcaagcaagcttcctgcctcagcctaacaagtaggtgggactgcagacgcacaccacttcacctggct

SEQ ID NO: 46507 - DNA, 201 bp, Homo sapiens
agacataaaacacactggaggggagaggggaggcctcattaaagctcgctctcactcccgaacactgcgtgttcatcctgtcaccactgccaagtggtcaractcctttgggaaacatcccttgcagaaaaccttgctggctgtctacaagactcaccgaaagcaactcacttgacctctcatggccactgaccacccaga

SEQ ID NO: 46508 - DNA, 201 bp, Homo sapiens
tttcttaaaaggaactagtatattagattgtaatagaactactttctatcccccggagatgataaaaagcccctcattttcttaatcttctacttcagtgsttcaatttagtgacaaagctataaatgaagcaaatcagtattgttctttcaaccgtgggtcatttttgtgcaaggtgaagtggccatagaagtaaaagga

SEQ ID NO: 46509 - DNA, 201 bp, Homo sapiens
gaaaaaaaaaaaaaattggcaaaatgtctgaataagactagaaagtgcatttttatgctaagagttttggtcttccagatggaaatgggtttggtagtctyaagtagtttagaaaaaagtgattgtgtcagttgattaaagataattcaaaactatttcagaaactaacgcttgagatttgaccttggaagaaggtgggaa

SEQ ID NO: 46510 - DNA, 201 bp, Homo sapiens
tcacagcccaggaggaccatggtcaccagaaatatcgcgcccagggacacaccgaggttgaagatagtgtcgtcaatgatggtcaggtactgttcgtagargacataaaacacactggaggggagaggggaggcctcattaaagctcgctctcactcccgaacactgcgtgttcatcctgtcaccactgccaagtggtcag

SEQ ID NO: 46511 - DNA, 201 bp, Homo sapiens
acttctgattcttctgtggcctaaaacagtggcccaaactttcaaactttatggtagttagtataatgttctttcatttcttcttcctttttttttaaacrtactcttctgtggcattcctgtttatttttaaattttttttggagagtgtcgctctgttgcccaggctggagtgcagtgttacaatctcagctcaccaca

SEQ ID NO: 46512 - DNA, 201 bp, Homo sapiens
cctcagcctcccaaagtgttgggattacaggcgtgagccaccacgcctggcagtacggaggtatattttcatttgaaaaagtggatatctcagtttttaartttgtaatgaaaattttaaacacacaatagagactaataaaaaagaacccctgtatgcctgtatctgattcgacaatagtcaaaattttgcttctaagtt

SEQ ID NO: 46513 - DNA, 201 bp, Homo sapiens
ctgagcacttgaggctaagcaaaatcacctgaccctggactcagaggtcagacccagctgtacatttcagggatgaagaaggcccccagataagggaacascaaaggtttagcttgttctctcccagactggcttctttttttttttattttgagacagagtcttgctctgtagcccaggctggagtgcagtggcgtgatc

SEQ ID NO: 46514 - DNA, 201 bp, Homo sapiens
ccccgaaaagtttccttgggcccttctgtaatccatcccttgagttttttttttttaaatgaatttttaatttaaaaaatgtatgtattggaatagagacrgggtctcactgtgttgctgaggctggtctcgaattcctgtgatcctcctgcttcatcctctcacagtgctgggattacaggtgtaggccgctgtgcccag

SEQ ID NO: 46515 - DNA, 201 bp, Homo sapiens
actctgtatcctttactaaggtgtggcaccgtgcacaacagggcaagtggtcaccctcagagagtggtcctgaagtcctcctccgggcagctgtgaataamactccgagagccaccccgcaggcagcttccctgactgtccaggggcctcgcgtttagcgtggactcagtacatggtgggcaggggcgagtgctagcggaa

SEQ ID NO: 46516 - DNA, 201 bp, Homo sapiens
aggcgaaccctgtcaactgcgtcttcttcgatgaggccaacaagcaggtccggcgcgcccgcgcttcctcccccgcgcggccctgccggggtcgtgggcgygccaaggccggtcccgcgcgaccaggcccgagcgtcccctcctgtcctgtcccgtcccgtcccagcgcgggaggcggcgcgcgctccttccttgttgggt

SEQ ID NO: 46517 - DNA, 201 bp, Homo sapiens
tcaagggtttagacgtcgagattttcattttccttgaaattttgtaaagggggaaaagactgtacttcaggcgtatcagcggcgccgatgcgcgaaccggygttagaacttggagcctcgggaacccgacccggtgtcacggtggcatccttttcgctctctgctcttggtttttaaaattcacctgagcagccaaacatc

SEQ ID NO: 46518 - DNA, 201 bp, Homo sapiens
gcatagtcccagttcgcactgttgaacaggtttaatgatcaacagcagggcctttcactttcagaagtgtctcgatttggatgataagctatctggccacygtaacactggtgcttacagaaggtgaaagtataatgtaggccctcaattcagtagtgacttaaaaaattttactgttggtctgtgttaatgagaaactgt

SEQ ID NO: 46519 - DNA, 201 bp, Homo sapiens
attagaataaggtcgctgagatttgccgcctgccatagggcaaggtggcagtagtgggggatagtggaggagtagtaaattcagggtccctgcatcccackagctggcggctgcatctcacttcataccttcactgtttttgtttttcccatctgtgtttgatcttgcctgtagatccttggtctactgttatagatgaga

SEQ ID NO: 46520 - DNA, 201 bp, Homo sapiens
agacagggagaaatattaatccgtgagtggctcccagtaagaccatggccaaatacatcctgaagtagaatatctggaaaatttgagatttggcaaaagcsaacaccacaatccctccaaattttgtaagtgtgattccactgaacacctaaaagaagagatactgtgttagaaaccacttttaccaacctgtaattgaac

SEQ ID NO: 46521 - DNA, 201 bp, Homo sapiens
agtgattctcctgcttcagcttcccaagtagctgggattagaggcgcccaccaccacgcccggctaattttttttgtatttttagtagagatggggtttcrccgtgttggccaggctggtttcgaactcctgacctcaaaacgatccgcccgcctcagactcccacagtgctaggattacaggcatgagccgctgcacccg

SEQ ID NO: 46522 - DNA, 201 bp, Homo sapiens
cagagaacgctgtctctacaaagcataataataaaaaaatgagccaggtgtggtggcatgcacccgtggtcccagctacttgtgaggctgagatgggaggytgagactgcagtgagccgtgttcgcatcactgctctccagcctgggcacagagacactctgtctctgaaacaaacaaaaaaagaggggctaacatggtaa

SEQ ID NO: 46523 - DNA, 201 bp, Homo sapiens
actgaattctctgggaaggacgagatgcctggtgtcataaaaagaccatagtcttttttaagtgtgatgcatgcgcacacaggcacgcatacacacacgcrcacacacgcgcacacactgcactgctgccctgtccttggcagacattcctgtggggtcatgttcgaaatatgcacttctgtggagtagcttgggttttct

SEQ ID NO: 46524 - DNA, 201 bp, Homo sapiens
ggcagcttccctgactgtccaggggcctcgcgtttagcgtggactcagtacatggtgggcaggggcgagtgctagcggaaactgggtttgctttttgtttycatcttttcctggtttagaatttcctataacatgtggattcttcatcttggattgtctttcaacctgacatcattatcagcgcaagccaaggtaggtcag

SEQ ID NO: 46525 - DNA, 201 bp, Homo sapiens
agcccaacacaaattcttaaactttcttaaaacattatgagatttttttaatgatattttttaagctcatcagctattgttagtgttagtgtattttatgygtggcccaagaccattcttcttcttcctcttaaggcccagggaagccaaaacattggacacccctggcttagaaccttcagctctgttccggtggtacag

SEQ ID NO: 46526 - DNA, 201 bp, Homo sapiens
tcacaacttcttttcttggacctcagtgctcccctatctgaagcagggctcatatctgagagtacggatacactgttctattttccatgaataccttctcragtgctctcatctttaatgattaaaagtacctgataaccacataggaggcaaaaggcactggtcggagagctcctggggcggggtgcaattttctaagta

SEQ ID NO: 46527 - DNA, 201 bp, Homo sapiens
aaaagaatgcctcaggatagaattccctttcagtaatgtccttctattgtgccacccttttaagatgagaactcttacctatgtaactgagtaagacaggragaaatattaatccgtgagtggctcccagtaagaccatggccaaatacatcctgaagtagaatatctggaaaatttgagatttggcaaaagccaacacca

SEQ ID NO: 46528 - DNA, 201 bp, Homo sapiens
gcttataatcccagcactctgggaggctgaagcaggaggattgcctgagcctaggagttcgagaccagcctggacgacaacatggcaaaaccctgtctctmcaaaaaaaaaaaaaaaaaaaaaaaaaattagctgagtttggtggtatacacctgtggccccagctactccagaggctgccgagggaggattccttgagcc

SEQ ID NO: 46529 - DNA, 201 bp, Homo sapiens
gtccagtggtaaaccgaccgacccttagacacagttcagtcaggatgccctgcgagagggctagaaatttagaagccgttcgcgctctgttcctttgtatygctcttcagtggcacaacttttggctttatttactgatggccctatgagagagagagactttttcttatttctgcaggagaaagggagctagttggctgg

SEQ ID NO: 46530 - DNA, 201 bp, Homo sapiens
catctttagggtttacatggaatctaagacagccaattcccccaagtgaaacaggagctagggacaaactgagactgtatgaggactcaccatcaccaggytgaccaaggatacagcgttcagactgatgccccagagccacataactccaaacatgttgaccaagaccatggcgatggtggcacacatgatgactgcaga

SEQ ID NO: 46531 - DNA, 201 bp, Homo sapiens
tctatcccccggagatgataaaaagcccctcattttcttaatcttctacttcagtgcttcaatttagtgacaaagctataaatgaagcaaatcagtattgytctttcaaccgtgggtcatttttgtgcaaggtgaagtggccatagaagtaaaaggatcaaggacagtctcgagatgaagaaaggcagcaagcactttgct

SEQ ID NO: 46532 - DNA, 201 bp, Homo sapiens
gagctcacagcccaggaggaccatggtcaccagaaatatcgcgcccagggacacaccgaggttgaagatagtgtcgtcaatgatggtcaggtactgttcgyagaagacataaaacacactggaggggagaggggaggcctcattaaagctcgctctcactcccgaacactgcgtgttcatcctgtcaccactgccaagtgg

SEQ ID NO: 46533 - DNA, 201 bp, Homo sapiens
tgctgggtaaaccccattgaaaaagggcaggctttacctgtaaggaaatactcggtaggcactgccgttaatgcccatggtttcggtgacattactggctrtaagtcgggctttcttcagagcgtcaataaagtcagcagaggtctgcagcacggtgtggtaggtcatgaagtacgtggctccgaccctggtgccatggcc

SEQ ID NO: 46534 - DNA, 201 bp, Homo sapiens
acgtccgttctgtccacgatgtggcagctaattcatgaattgcctgaaagcttgcaatccttagaagctgctttgtaagtacaggatccagactcttcagycactgaggaggattactttgtggtgcgactctgccggcgtggccctgctcagggtactcacggagctgcccatgtgggcaagtgcctcttccgcgcgctc

SEQ ID NO: 46535 - DNA, 201 bp, Homo sapiens
catggtttcggtgacattactggctataagtcgggctttcttcagagcgtcaataaagtcagcagaggtctgcagcacggtgtggtaggtcatgaagtacrtggctccgaccctggtgccatggccaaggaggatgttaactgcagaactataggcagcatgtcccctgaggaaagaatcctgggtgtcaagagagtccag

SEQ ID NO: 46536 - DNA, 201 bp, Homo sapiens
acgcgggggtacaggttggggcaggggcgaccgagccgggcacaggaactcgcagcagggtagggttggcggctacgccgccctcggtccgcggggaaccrcgcgggcttccgggtcacgccgccgcgttccgaccgccctcggggagaggggaggagcctccagcgccgggcggggcgtggttaaggccggtgggcccca

SEQ ID NO: 46537 - DNA, 201 bp, Homo sapiens
acggagctgcccatgtgggcaagtgcctcttccgcgcgctccacgcggctgcctttcatgctcaccgtgaacgctctggttatgtggctgcagaactccayggagatgccacagctctgaaataaagcacttcctttaggatggctctcttcctgttgaagaccctaggcagccaccccgttctgaggatgggtgctaatt

SEQ ID NO: 46538 - DNA, 201 bp, Homo sapiens
cctttccagtgttaagtgagtcagacagagcatcgctgcccgtgatagccactgtttttgataaactcaaccatgagtataaaaagtacctggatgccgascagagttatgcgatggtgagttacatggagtatgacaaagggtcctcctcccccaccccctcccgggtattttctaagtaattatgatgcaaaattgttt

SEQ ID NO: 46539 - DNA, 201 bp, Homo sapiens
cctgctatagcttttttttttttttttttttttaaccgtaaccagaaaggggttgcgaatgacatctagctgtcaggtctttaaagtattgtatttcttaragtgtcctttaaaggtacttttgcattggtaaccttttgagattagtttttatcatagcaacgtgtggaaattctgaagctgacatgaagttggtttgat

SEQ ID NO: 46540 - DNA, 201 bp, Homo sapiens
cagggaataagcagtaaagattcctctgggagtggcaccctctctgtacccgggtcagaaaatagcccttatcaccagagactgggagttggggctgcaayggacctgaataaatgaacttcccaagtaacacttaccttccactaattttacaccctccccaatatttctcctagtgactctcttagaaatgtatcgccc

SEQ ID NO: 46541 - DNA, 201 bp, Homo sapiens
cctcaaaacgatccgcccgcctcagactcccacagtgctaggattacaggcatgagccgctgcacccggcctgagcaaggttttaaagtatggatggggtkcgagcatggtgttttggggaactctgggtctgtgtaactgaaggttacatagggtgtctccacagggaaggggaaatggtggtggtgtggccactggcag

SEQ ID NO: 46542 - DNA, 201 bp, Homo sapiens
agtggctcccagtaagaccatggccaaatacatcctgaagtagaatatctggaaaatttgagatttggcaaaagccaacaccacaatccctccaaattttbtaagtgtgattccactgaacacctaaaagaagagatactgtgttagaaaccacttttaccaacctgtaattgaacaaaaacacttccttacaaggatttc

SEQ ID NO: 46543 - DNA, 201 bp, Homo sapiens
aaacgagtgagcccgtgataatctagattgggggctctaagaagtttgtgggtggggggaaggtactgaatttaacttaaaaagagtttttagactgggcrcggtggctcatgcctgtaatcccagcactttgggaggccgaggcgggtggatcacttgagatcaggagttcgagaccagcctggccagcatggtgaaacc

SEQ ID NO: 46544 - DNA, 201 bp, Homo sapiens
cctttcagtaatgtccttctattgtgccacccttttaagatgagaactcttacctatgtaactgagtaagacagggagaaatattaatccgtgagtggctyccagtaagaccatggccaaatacatcctgaagtagaatatctggaaaatttgagatttggcaaaagccaacaccacaatccctccaaattttgtaagtgt

SEQ ID NO: 46545 - DNA, 201 bp, Homo sapiens
ttagctgttcatggaagggtaagaggtctgagacaggcactgaagagggccagttgctgggacagtgtccattcctacgctgccagacgtgagggatggcygagtccttttggactctattgctgtgggtgttctgggctgtgggaatcagtaggtctgatcccaaatggcagtttctgtgccgtcccacacggtctgctg

SEQ ID NO: 46546 - DNA, 201 bp, Homo sapiens
gtgctaattacccagggcaccctgggtgctagaggaggccaagcatcccattggacttacaaggcctccatcacaccaatcttactgtaccaggaactttytggggccctctctacacacagccaaaagcctggttttctgtggcacgtttgtgttgaccaggagaaattgctggaacccgttaaggtcaccccacccgca

SEQ ID NO: 46547 - DNA, 201 bp, Homo sapiens
cagcccgctcctcaagaggccggtgcggacccaggcggtgctggaccagtcagatgtgtacacccatgtcctgtcagccttcgtggaaaagaaggtgggcygcagctttccgcctcttctggactgagaatgctcaaaacaaggaagttgctgaaaacgaggagacttcatgtgattagagtcacttgaagtgattagaat

SEQ ID NO: 46548 - DNA, 201 bp, Homo sapiens
gggcaaataatcaaactgttttaatgcagaaaaaaatgtgcaacagaaagagatagctcatggagggataaagactttattctggaccctctagattctgkggggcctgcagtagcttcaagatgccccagcatgtcctgcgcccacacccctgtcaagatcactgtggtcagggcgtcttgcccatggccagtgtattag

SEQ ID NO: 46549 - DNA, 201 bp, Homo sapiens
aagcagggcagagccgaagcagcccgctcctcaagaggccggtgcggacccaggcggtgctggaccagtcagatgtgtacacccatgtcctgtcagccttygtggaaaagaaggtgggccgcagctttccgcctcttctggactgagaatgctcaaaacaaggaagttgctgaaaacgaggagacttcatgtgattagagt

SEQ ID NO: 46550 - DNA, 201 bp, Homo sapiens
aggctaagccagggtgtagagttgaaccaagacgactctccaggcaccaaccgcacatcacacgctgggttctggcccgggctcccctgcattttaaatgrgaaagactgccagctgtctcatgtttaacttgtctgttattttcctgcttcagcacactgccacctaaaaaggagccgtaccaacaggtacagttccaca

SEQ ID NO: 46551 - DNA, 201 bp, Homo sapiens
cagagctcacagcccaggaggaccatggtcaccagaaatatcgcgcccagggacacaccgaggttgaagatagtgtcgtcaatgatggtcaggtactgttygtagaagacataaaacacactggaggggagaggggaggcctcattaaagctcgctctcactcccgaacactgcgtgttcatcctgtcaccactgccaagt

SEQ ID NO: 46552 - DNA, 201 bp, Homo sapiens
cataaatgcaggaaatacttgtgagaggagataaaaatattaaaagagagttgtgatgttaatgacaaattccttctcaagtaagagctagcctgtagggwggaaatgcaaacacaggcttttaaactgatttaaacagcaagatgggatggaatgaaagcaactgggcaaaccatgattgattttggcctcagtcttgtc

SEQ ID NO: 46553 - DNA, 201 bp, Homo sapiens
gtcaccctcagagagtggtcctgaagtcctcctccgggcagctgtgaataacactccgagagccaccccgcaggcagcttccctgactgtccaggggcctygcgtttagcgtggactcagtacatggtgggcaggggcgagtgctagcggaaactgggtttgctttttgttttcatcttttcctggtttagaatttcctat

SEQ ID NO: 46554 - DNA, 201 bp, Homo sapiens
gcaagactccgtctcaaaaaaaaaaaaaaaaagatttttaaaagcagctttattgaggcatagttgacacataataaactgtacacacttaatattatgcmatatgtgagttttgacatgtatacacccatgaaaccatcaccacaatcaaggcaatgaacatgttcagaccccgaaaagtttccttgggcccttctgtaa

SEQ ID NO: 46555 - DNA, 201 bp, Homo sapiens
aatttagaatgtatggttagagaaaatacacctgtgtgttaatgccatggtgctttgctgtaaggccatcatcgaaatcttagtaatgactggctgggcayggtggctcatgcctgtaatcctagcactttgggaggccgaggtgggcgatcatctgaggtcaggagttcgagaccagcctggccgccatggcgaaacccc

SEQ ID NO: 46556 - DNA, 201 bp, Homo sapiens
ctcagtcttgtctttttcccccccagacatcggtaatattcgatatcaagttacggggagagtttgacggctccgttaccttccaccaccccgtgcttccygctcgatcgatccagccctatcagatccccatcacaggtaacacgggttctgtagaggagtctgtgctgccctttcaccatgtggctgtgttctcaccat

SEQ ID NO: 46557 - DNA, 201 bp, Homo sapiens
tggctgtaggtttgttactgtaacctgggatcacttttctctttctcacattccgtgtgacagtgatgatgaatattgcattctttgggactgacagtcamagtaagtgcttcggctgtggctcttaggcttacccaaatcagtcctccttctgtctggagaggtggggttgggaagtcagaagagtggaggtcaggaatt

SEQ ID NO: 46558 - DNA, 201 bp, Homo sapiens
tgtgttggttagaatagccagtccttggggagcctctagtctgttgtagctgaatgatttggaagtgttctttcactttttacttttgtcctcagcattayctacatgaacttgttatcaaaacccttgtccagcacaacctcttttatatgctgcatcagttcctgcagtaccacgtcctcagcgactccaaacctttgg

SEQ ID NO: 46559 - DNA, 201 bp, Homo sapiens
tcatctttggagaaatgactaattcgggtcattgtgcctatttttaaaatcaaattactattatttgttgaattgtagttctttatatattctgatattarcaccttcttagagatacaatttgcaagtattttctccgaatccggaggttgcctttccactctgtggattgtgtcctttgatgtacctgcctgtttcttt

SEQ ID NO: 46560 - DNA, 201 bp, Homo sapiens
cattttcagaggttagtgactctccttttgtttcctgctgggctgtgagccctggcggcttgatgcatccgtgtgtcttgcccactgtgctgccactgggtgggcgtgctcaggaattgaatgggcctgttgagaaagatataaccagcacttttgggaagagtcagccaccctttttctttttgttttgggcctgttaga

SEQ ID NO: 46561 - DNA, 201 bp, Homo sapiens
ttcagtccttgtggatgaactgtaaacagcacccttcctctaagatgccgaagatcatagtttgtggtttttttctttcaggcggtggaagcagggcagarccgaagcagcccgctcctcaagaggccggtgcggacccaggcggtgctggaccagtcagatgtgtacacccatgtcctgtcagccttcgtggaaaagaag

SEQ ID NO: 46562 - DNA, 201 bp, Homo sapiens
gtgcccttttctgttctgcatgagcccgggaggtgtgctcctctttctggccttgctgaggaagcctcctcagtctgttaattgtctcttcctgggtaatytctttattagagaaatcttttttttttttttttttttttttgagacggagttttgctcgttgcccaggctggagtgcaatggcgtgatcttggctcactg

SEQ ID NO: 46563 - DNA, 201 bp, Homo sapiens
gggtattttctaagtaattatgatgcaaaattgtttcctatatattagaataaggtcgctgagatttgccgcctgccatagggcaaggtggcagtagtggkggatagtggaggagtagtaaattcagggtccctgcatcccacgagctggcggctgcatctcacttcataccttcactgtttttgtttttcccatctgtgt

SEQ ID NO: 46564 - DNA, 201 bp, Homo sapiens
cattctcctgcttaagcccattctggaaaagccagactccaccccagggtggatggaaagccggactccaccccagggtgtctccctcatttctcccatcraccttcccaccggtgtccgtgcccttttctgttctgcatgagcccgggaggtgtgctcctctttctggccttgctgaggaagcctcctcagtctgttaat

SEQ ID NO: 46565 - DNA, 201 bp, Homo sapiens
aacgatcatgagtcatctttggttattaaaaataacccaaaccacagtgattgaagccttgacatgctttctttttcttggtgagattttcctggattgtyagctccttcccccttcctccccgtacgtgctttcagtgagacggaacagttcatttcttccttgactacaattgaataaacatttcgtaatgacattaaa

SEQ ID NO: 46566 - DNA, 201 bp, Homo sapiens
catgctttctttttcttggtgagattttcctggattgtcagctccttcccccttcctccccgtacgtgctttcagtgagacggaacagttcatttcttccktgactacaattgaataaacatttcgtaatgacattaaaaagtattgacttttgtgtcataagtaccagcatttgcagcattttctgactgcatcgttgca

SEQ ID NO: 46567 - DNA, 201 bp, Homo sapiens
tagctgttcatggaagggtaagaggtctgagacaggcactgaagagggccagttgctgggacagtgtccattcctacgctgccagacgtgagggatggctragtccttttggactctattgctgtgggtgttctgggctgtgggaatcagtaggtctgatcccaaatggcagtttctgtgccgtcccacacggtctgctgg

SEQ ID NO: 46568 - DNA, 201 bp, Homo sapiens
gaatcactggagtttccttgggtgaggccctagagctggtagtttggcttctaatgctgaggcctaaagcataattgttgacgggtggttctggagcgatktgtgcaaaaccagtgaaagatgaacactgggccattttaagatggaaacaaggtgggggttggatagagagttatatgcagcctcttttgcacctcgttg

SEQ ID NO: 46569 - DNA, 201 bp, Homo sapiens
agtgcagcaacacatttctctgacatcagctgcttgaggaatgaatttttgaaaggagttactaaactgtaactgaatatttgtattaacttaaaaaaaawtgaatcgtaagcctgctgctgttgagacagatgatccgaattggtctttttatctttcctgtgttttggttgtcttcagttattttctggtcacttttta

SEQ ID NO: 46570 - DNA, 201 bp, Homo sapiens
taatgaaacttctaggtctatttctagctcaatgtaagacggcatttagttaccataaggacaggttagatagaatctcttccatttagcttttgtatttgtctctcaaagcagatagggtaaccccaaaacttaggaaaacaatgtattttattaaagaaaaataagttaaaacccagtagacacacctacgagatgctt

SEQ ID NO: 46571 - DNA, 201 bp, Homo sapiens
ttactcagtatcatttatcattatcaaatgaccattagtatgagttcaaatacttgaaaagaatgcctcaggatagaattccctttcagtaatgtccttcyattgtgccacccttttaagatgagaactcttacctatgtaactgagtaagacagggagaaatattaatccgtgagtggctcccagtaagaccatggccaa

SEQ ID NO: 46572 - DNA, 201 bp, Homo sapiens
agtgacttaaaaaattttactgttggtctgtgttaatgagaaactgtccttttttgagagggagcctccctctgttccccagggtggagtgcagtggtgcratcttggctgactgcaacctccgcctcccaggttcaagtgattctcctgcttcagcttcccaagtagctgggattagaggcgcccaccaccacgcccggc

SEQ ID NO: 46573 - DNA, 201 bp, Homo sapiens
caaattttgtaagtgtgattccactgaacacctaaaagaagagatactgtgttagaaaccacttttaccaacctgtaattgaacaaaaacacttccttacraggatttctcccaggttcaagtgattctcctgccccagcctcctgagtagctgggattaaacaggtgcacgccaccatgcctggctaatttttgtgtttt

SEQ ID NO: 46574 - DNA, 201 bp, Homo sapiens
tgatgtgatctcggctcactgcagcctcgatctctcaggctcaagtgattctctcgcctcagtctcccttaaaaattgttaaaaaataatttggaacttcrtgtgtcttttgtattgcttgatagcagcatagaatatgtgaggtatttttggctactttgtgaattagccttttcatctctcatttctgagtgctagatc

SEQ ID NO: 46575 - DNA, 201 bp, Homo sapiens
ttttccatgaataccttctcgagtgctctcatctttaatgattaaaagtacctgataaccacataggaggcaaaaggcactggtcggagagctcctggggyggggtgcaattttctaagtaaaaagtgaacatcctgctgtcatcaggctacaggcttgtgcaatctctaaagaataacaaattacaggcagactagccca

SEQ ID NO: 46576 - DNA, 201 bp, Homo sapiens
gaaaaaaaacccctaacaatataaaaagtctacatacaggcagcatcccaaataaccagcagttagggattctggttcattgttggccaagaatgtgggcygggccctgctctgagccgcctgctctccaagcgccccctgccttaagccattttccagtgtgtgtctcttgcagctgtgcagtggcgcagagatcaagtt

SEQ ID NO: 46577 - DNA, 201 bp, Homo sapiens
taccagagaaacggagtctgaaactcttgaagagccacaatctcaatgtgaattggtacatgtactgccccgagagcgccgtgatcttgctgtctaccacrgtcctggagaatgtcctgcagccttttcactttagggtaagaggaagcctcccctgaaaaaaacacctttccccagttgtcccctgttcctgtagcatcc

SEQ ID NO: 46578 - DNA, 201 bp, Homo sapiens
ggtcctgaagtcctcctccgggcagctgtgaataacactccgagagccaccccgcaggcagcttccctgactgtccaggggcctcgcgtttagcgtggacycagtacatggtgggcaggggcgagtgctagcggaaactgggtttgctttttgttttcatcttttcctggtttagaatttcctataacatgtggattcttc

SEQ ID NO: 46579 - DNA, 201 bp, Homo sapiens
gggtccacatcgaagaattcagtccttgtggatgaactgtaaacagcacccttcctctaagatgccgaagatcatagtttgtggtttttttctttcaggcrgtggaagcagggcagagccgaagcagcccgctcctcaagaggccggtgcggacccaggcggtgctggaccagtcagatgtgtacacccatgtcctgtcag

SEQ ID NO: 46580 - DNA, 201 bp, Homo sapiens
atctaagtagagaaagtgttttccgctcatatcctgggtccacatcgaagaattcagtccttgtggatgaactgtaaacagcacccttcctctaagatgcygaagatcatagtttgtggtttttttctttcaggcggtggaagcagggcagagccgaagcagcccgctcctcaagaggccggtgcggacccaggcggtgct

SEQ ID NO: 46581 - DNA, 201 bp, Homo sapiens
tcctgcttgccaaagaatgaggtttctttcctgaagaggctgggagaagtttagtgtcctgtggttgcctccagatctagtaatactgcttcccaagtcarctgtgcattcctgagttcacaggcgctacgttcaaagctgctgccaaacaaccgatggttggcaccatccggtgttcaacttggccttgccgatgcagca

SEQ ID NO: 46582 - DNA, 201 bp, Homo sapiens
aaaaaattgaatcgtaagcctgctgctgttgagacagatgatccgaattggtctttttatctttcctgtgttttggttgtcttcagttattttctggtcaytttttaagttaatatttatttttcttgtcttgtagtatgccaacgtaggttggcagtatgctgcctaatccaaatttgtgtgtgtctgtgtgtttttcct

SEQ ID NO: 46583 - DNA, 201 bp, Homo sapiens
atcgcgcccagggacacaccgaggttgaagatagtgtcgtcaatgatggtcaggtactgttcgtagaagacataaaacacactggaggggagaggggaggyctcattaaagctcgctctcactcccgaacactgcgtgttcatcctgtcaccactgccaagtggtcagactcctttgggaaacatcccttgcagaaaacct

SEQ ID NO: 46584 - DNA, 201 bp, Homo sapiens
tctctgctcattgcaacttctgcctcctgtttatataaacaggccaaaccctgtatgtatgtatgtatttatttatttttgagatggagtttcgctcttgktccacttgttgcccaggctggagtgcaatggcacgatcttggctcactgcaacctgcaactcccgggttcaagcgattctcctgcctcagcctcccaagt

SEQ ID NO: 46585 - DNA, 201 bp, Homo sapiens
aggggcgaccgagccgggcacaggaactcgcagcagggtagggttggcggctacgccgccctcggtccgcggggaaccacgcgggcttccgggtcacgccrccgcgttccgaccgccctcggggagaggggaggagcctccagcgccgggcggggcgtggttaaggccggtgggccccaccgcagccagacgctgcccgtt

SEQ ID NO: 46586 - DNA, 201 bp, Homo sapiens
gttcaaatacttgaaaagaatgcctcaggatagaattccctttcagtaatgtccttctattgtgccacccttttaagatgagaactcttacctatgtaacygagtaagacagggagaaatattaatccgtgagtggctcccagtaagaccatggccaaatacatcctgaagtagaatatctggaaaatttgagatttggca

SEQ ID NO: 46587 - DNA, 201 bp, Homo sapiens
aagagttatgggcaaaaatcagggaacattgtatttaaaagaaaatttgttttgttaattagtaaacattccggggaacgttcattaaagaatgacaaacygcagagtttgtgaagcttttgaagagagttatatgtgttttttcttattaattaaaaatatttttaaaaaatttttcttagactaagaatgccaacattc

SEQ ID NO: 46588 - DNA, 201 bp, Homo sapiens
gtaaaccccattgaaaaagggcaggctttacctgtaaggaaatactcggtaggcactgccgttaatgcccatggtttcggtgacattactggctataagtygggctttcttcagagcgtcaataaagtcagcagaggtctgcagcacggtgtggtaggtcatgaagtacgtggctccgaccctggtgccatggccaaggag

SEQ ID NO: 46589 - DNA, 201 bp, Homo sapiens
aggggaatgttgtatataaacttttgcagctagctttttttttttttgtccaaagtgtatcttggacatctttctatattttattctgactgggtagtatyccactgtatggatggactgcagtttaaaaattttcttgttattggacattggctggttttccatttttttgtgattacaaataacccttcagtaacatgc

SEQ ID NO: 46590 - DNA, 201 bp, Homo sapiens
ttggatcccagttgtagccagggacgttttcaaggtgaatctcttagaaatgacccctcctttcaagcgtgggaatgggatttttttttttcactttatamgttttttactatatgtgcattttatcaagaacatatactacttttaataattaaagcaacaactaagaatgccattctcctgcttaagcccattctggaa

SEQ ID NO: 46591 - DNA, 201 bp, Homo sapiens
gctggaatacacacaggagtgcaaggtatgaccccaggccctttctcagctgctggtgtcagtggtgttgagctgggttatgtagtggagagcggggcatyggggtcgcagggagcacagacttgaagtcagactgtccctcatgttgattcccaaactggagtcaggcggggtgtttgctttgtgacactgaacagtttt

SEQ ID NO: 46592 - DNA, 201 bp, Homo sapiens
aggagttcaagaccagcctggccaacatggcgaaaccccatctgtactaaaaatacaaaaaattagctgggcgtggtggcacttgcctgtaaacccaggtwctcgggagattgaggctggagactcacttgaacccaggaggcggaggttgcagtgagctgagattgtgccactgcactccagcctgggcaacagagtgag

SEQ ID NO: 46593 - DNA, 201 bp, Homo sapiens
ttttctgactgcatcgttgcacttatgttttctcaatttgtaggtcctgctgccgtgaccagccagtctcctgttccatgtaaactctgtatcctttactraggtgtggcaccgtgcacaacagggcaagtggtcaccctcagagagtggtcctgaagtcctcctccgggcagctgtgaataacactccgagagccacccc

SEQ ID NO: 46594 - DNA, 201 bp, Homo sapiens
aggttgcagtgagctgagattgtgccactgcactccagcctgggcaacagagtgagactccatcacaaacaaacaaacaaacataatttggcaggtagggkctcaggaagcagagtgctgattggtcaaggttggagatggaatcctaggggggtcgaactgaggttttcttgctgttttctactcctagatgggatggca

SEQ ID NO: 46595 - DNA, 201 bp, Homo sapiens
taggaggcaaaaggcactggtcggagagctcctggggcggggtgcaattttctaagtaaaaagtgaacatcctgctgtcatcaggctacaggcttgtgcartctctaaagaataacaaattacaggcagactagcccagaactaggccaggaaatcacatttccatggtcagaggcaccatcaggtatactagtatagccg

SEQ ID NO: 46596 - DNA, 201 bp, Homo sapiens
tctgagcacttgaggctaagcaaaatcacctgaccctggactcagaggtcagacccagctgtacatttcagggatgaagaaggcccccagataagggaacrccaaaggtttagcttgttctctcccagactggcttctttttttttttattttgagacagagtcttgctctgtagcccaggctggagtgcagtggcgtgat

SEQ ID NO: 46597 - DNA, 201 bp, Homo sapiens
caaagacatggaatcatcctaaatgcccatcagtgacagattggataaagaaaatgtggtacatatataccatggaatactatgcagccataaaaatgaayaagatcatgtcttttgtgggaacatggatggagctggaggccatcatccttagcaaactaacacaggaacagaaaaccaaataccacatgttctcacttc

SEQ ID NO: 46598 - DNA, 201 bp, Homo sapiens
gtgtgagccacttcgcctggccagatgggcttttctcgattgctctgggttctttggtacatagctgctgtttctccacctggtttcatgtataatcaaakgtacagggtttactcagtcctgttgtgtaataggaagcaggaaagggcaagggccctgggaacaacctcagccctgccacttactggtcatgtaaccccg

SEQ ID NO: 46599 - DNA, 201 bp, Homo sapiens
ggccctgggaacaacctcagccctgccacttactggtcatgtaaccccgagcaaaatgaccacctctgagccccagtctcctcttctgtaaatgggtatamcaccacctactcataggctgcgtgatgagaaatggaataatgtcagggagtgcctggcatgacgctggcaccctggaggctccccaggaacggtggctac

SEQ ID NO: 46600 - DNA, 201 bp, Homo sapiens
ccaaactgaattctctgggaaggacgagatgcctggtgtcataaaaagaccatagtcttttttaagtgtgatgcatgcgcacacaggcacgcatacacacrcgcgcacacacgcgcacacactgcactgctgccctgtccttggcagacattcctgtggggtcatgttcgaaatatgcacttctgtggagtagcttgggtt

SEQ ID NO: 46601 - DNA, 201 bp, Homo sapiens
ctagggacaaactgagactgtatgaggactcaccatcaccaggttgaccaaggatacagcgttcagactgatgccccagagccacataactccaaacatgwtgaccaagaccatggcgatggtggcacacatgatgactgcagaccagagctcacagcccaggaggaccatggtcaccagaaatatcgcgcccagggacac

SEQ ID NO: 46602 - DNA, 201 bp, Homo sapiens
acagggagaaatattaatccgtgagtggctcccagtaagaccatggccaaatacatcctgaagtagaatatctggaaaatttgagatttggcaaaagccamcaccacaatccctccaaattttgtaagtgtgattccactgaacacctaaaagaagagatactgtgttagaaaccacttttaccaacctgtaattgaacaa

SEQ ID NO: 46603 - DNA, 201 bp, Homo sapiens
accatggccaaatacatcctgaagtagaatatctggaaaatttgagatttggcaaaagccaacaccacaatccctccaaattttgtaagtgtgattccacygaacacctaaaagaagagatactgtgttagaaaccacttttaccaacctgtaattgaacaaaaacacttccttacaaggatttctcccaggttcaagtga

SEQ ID NO: 46604 - DNA, 201 bp, Homo sapiens
gatagaattccctttcagtaatgtccttctattgtgccacccttttaagatgagaactcttacctatgtaactgagtaagacagggagaaatattaatccrtgagtggctcccagtaagaccatggccaaatacatcctgaagtagaatatctggaaaatttgagatttggcaaaagccaacaccacaatccctccaaatt

SEQ ID NO: 46605 - DNA, 201 bp, Homo sapiens
gacctccaacagcacaggagcggaggtggtcctctatcatctaccacggtagatttcatgctttgttttccctctctctctgattttaaaatgtgaactgyagcttgttgatctgttttttgctttctatcctacagagaaggtgcctgtaaaaagatgcacatattgaagttaaataggacgggaaagtttgccctgaac

SEQ ID NO: 46606 - DNA, 201 bp, Homo sapiens
ttgtggtgcgactctgccggcgtggccctgctcagggtactcacggagctgcccatgtgggcaagtgcctcttccgcgcgctccacgcggctgcctttcaygctcaccgtgaacgctctggttatgtggctgcagaactccacggagatgccacagctctgaaataaagcacttcctttaggatggctctcttcctgttga

SEQ ID NO: 46607 - DNA, 201 bp, Homo sapiens
tgggtctcaatctgactacatattaggatcatctggggggccttaaaaatgaaagctctcacctgacagtgtgtaggtcagccacccaaaggtgagggctrtgcactcggcgcagaccttgacacttaggtccaaagcgcgagtgctcttcgccaaagcttgtctgcctgggctctttcctacctttgggtggtctgttca

SEQ ID NO: 46608 - DNA, 201 bp, Homo sapiens
agcagaggtctgcagcacggtgtggtaggtcatgaagtacgtggctccgaccctggtgccatggccaaggaggatgttaactgcagaactataggcagcaygtcccctgaggaaagaatcctgggtgtcaagagagtccaggtcttgcaaaatatcagcagaatctgagcacttgaggctaagcaaaatcacctgaccctg

SEQ ID NO: 46609 - DNA, 201 bp, Homo sapiens
gtcaagactgactcctgttcactgtgaagtagaggaaggcagtgatagccagacagggacgtgtgtttagggaagtcctctgtgttttcagttctgttttygttttgtttttatgatgggagagatgagcaaatataaaggctgcttctaggagcaggagtgaggagaggttgcctatatgagagaaacgggatggtcaat

SEQ ID NO: 46610 - DNA, 201 bp, Homo sapiens
ctggtaacacatggaacctcaaagtagaaatgtctgttgttcatttttaaaagactatttgcagagttttgatgtttatcaatgaaaagagtttttttttwaaatttatgaagaatagggaatcctatatgggcatggggcaaataatcaaactgttttaatgcagaaaaaaatgtgcaacagaaagagatagctcatgga

SEQ ID NO: 46611 - DNA, 201 bp, Homo sapiens
tgggtcaagactgactcctgttcactgtgaagtagaggaaggcagtgatagccagacagggacgtgtgtttagggaagtcctctgtgttttcagttctgtktttgttttgtttttatgatgggagagatgagcaaatataaaggctgcttctaggagcaggagtgaggagaggttgcctatatgagagaaacgggatggtc

SEQ ID NO: 46612 - DNA, 201 bp, Homo sapiens
gaacgctgaggcaggagaatcacgtgaacccgagaggcagaggttgcagtgagccgagatcatgccactgcactgtagcctgggcaacagagcaagactcygtctcaaaaaaaaaaaaaaaaagatttttaaaagcagctttattgaggcatagttgacacataataaactgtacacacttaatattatgcaatatgtgag

SEQ ID NO: 46613 - DNA, 201 bp, Homo sapiens
ttctctgggaaggacgagatgcctggtgtcataaaaagaccatagtcttttttaagtgtgatgcatgcgcacacaggcacgcatacacacacgcgcacacrcgcgcacacactgcactgctgccctgtccttggcagacattcctgtggggtcatgttcgaaatatgcacttctgtggagtagcttgggttttcttggaag

SEQ ID NO: 46614 - DNA, 201 bp, Homo sapiens
tggctactttgtgaattagccttttcatctctcatttctgagtgctagatctgataggagcagatattccaagttgaagcagcctacaggcactttagccygtgtaaatgttcaccattgccgtttgtagagtagagggaaggctgttagaaacaggcagaatcctctgttagtttcttccatcagttttaagtgttaaag

SEQ ID NO: 46615 - DNA, 201 bp, Homo sapiens
ttagtctcttgctggggattttattctttttttttttttttataattgcaagtaataaattaaaaaaaaaaaaaagaaaagaaaaagggcttggtggcccrtgcctgtaattccagctctttggaaggccaaggtgggtggatggcttgagtccaggagtctgagaccagccaggccaacatgatgaaatcccatctctat

SEQ ID NO: 46616 - DNA, 201 bp, Homo sapiens
ctgactgccctgtcttgctggaccagccaaaagcttagttactttctggcacagttggaggaaggagctggttcttaacagacgttcaattaggtcttttkgctttctgtgttctttcaagcttcttccttttcctttgtaaataatgttagtattgaaagaatagattttgccaagtgattgtcttgtgtctgctgccca

SEQ ID NO: 46617 - DNA, 201 bp, Homo sapiens
ttttgtccaaagtgtatcttggacatctttctatattttattctgactgggtagtattccactgtatggatggactgcagtttaaaaattttcttgttatkggacattggctggttttccatttttttgtgattacaaataacccttcagtaacatgcttgtacacacttctttatattagagggagagttgcagtatagg

SEQ ID NO: 46618 - DNA, 201 bp, Homo sapiens
tctctcccggctctcttttgaaggagattggagtgcagaattggctagtctgaggtttcagtgtgcaagacgtagtcagatggctcacatttggaaccctrgtagtaatgttttattctttgtccgatggcattgggcgggttgacccagcctgcagtcaggatttccttgtaccgttcacccgggagttcagaatcgcac

SEQ ID NO: 46619 - DNA, 201 bp, Homo sapiens
ccccacctatataaaaaatacaaaaattagccgggcgtggtagtgcacgcctatagtcccagctacttgtggggctaaggctggaggatggcttgagcccwggaggtcggggcttcagtgagtggagatcgcgccactgcactccagcctgggtgatggagcaagatcctgtctccgaaaaaaaaaaaaaattggcaaaat

SEQ ID NO: 46620 - DNA, 201 bp, Homo sapiens
ttttgccaggggccatttgttccagttttgttgttgttttgagacagtctcactgagtcacccaggctggtaggtagtgtcgtgatcttggctcactacartctccacctcctgggttcaagtgattatcctgcctcagcctcccaagtagtggggattacaggtgtgtgccaccgtgcccagctaatttttatatttttt

SEQ ID NO: 46621 - DNA, 201 bp, Homo sapiens
ctgagctttagaatggatagttttgattagccgttgatggtgaaatatgttttaatattgaatacacccgtaacgttttctgtttgccttagctctgtaaygctgaaattaactttggctgtaggtttgttactgtaacctgggatcacttttctctttctcacattccgtgtgacagtgatgatgaatattgcattcttt

SEQ ID NO: 46622 - DNA, 201 bp, Homo sapiens
aggagggcgaggatcaaaaaatttcctatcaggtactatggttattacctgggtgatgaaataatctgcacaccaaaccctgtgtcatgcaattaacctayataacaaacctgcatatctaccccctgagcctaaaataaaagttaaacaaaaagaaaacattttatcatgaagtatgagtttattcatttatttatttat

SEQ ID NO: 46623 - DNA, 201 bp, Homo sapiens
ctattggggccatacaggcgtatgccaaatccaaatttagctcttgggactatagtttgccaatcagtgctccactccaaaatgtgttcccaaacctaacygttgctgtcctcaactactaaattacttagaaggatctctgtctccttcctcctctaccatgttagtctactctttggttttcctgctcttgcccctacc

SEQ ID NO: 46624 - DNA, 201 bp, Homo sapiens
aaaatcttaatgatgtgtattttgtataatcacactgtgagtactacatagagtgcaatgttaactctgccagtaggtgccactaagagcacctggaaaargattctaaggaataatcataggaaaagaaaatgaagagtgcaaaggcttgtaactttgacttgaatctatttctctttaacaattacaggatggttcagc

SEQ ID NO: 46625 - DNA, 201 bp, Homo sapiens
ccaggcttctgaagagcttggagataattgtctatttgtgtgaactggtgccccaatatattcatggtcttcttcttagtccaatttcaactgctgccccrtagtgcttcagtgtcttagtaattagcagcctcctgtgttctccatgataatgatgttaaacttttagcactctcttcaagcgacctgactcatcacttt

SEQ ID NO: 46626 - DNA, 201 bp, Homo sapiens
cttaaagaaaagaattttcaacccagaatttcatatccagccaaactaagcttcataagtgaaggagaaataaaatcctttacagacaagcaaatgctgaragattttgtcaccaccagacctgccttataagagcttctgaaggaagcactaaacttggaaaggaacaactggtaccagacattgcaaaaacatgccaaa

SEQ ID NO: 46627 - DNA, 201 bp, Homo sapiens
ataagcaacttcagcaaagtctcaggatacaaaatcaatgtgcaaaaatcacaagcattcttatacaccagtaacagagaaacagccaaatcatgagtgawctcccattcaaaattgctgcaaagagaataaaatacctaggaatccagcttacaaggcatgtgaagcacctcttcaaggagaactacaaaccactgctca

SEQ ID NO: 46628 - DNA, 201 bp, Homo sapiens
tggtagctagaaattagtcatggttggagtatttacacttcagaaattggcaaatactacaaatcaaaactttttttttttttttttttttttttttgccyctagggagccagttgttaagcatttaccaggacaccactaattcctcctttctcaatacctgatcttactgtttactggttaagccatgtgtcaaactga

SEQ ID NO: 46629 - DNA, 201 bp, Homo sapiens
acaagggatgccaggaggattgcttgagcctgggaggcccaggctacagtgttcgtcccaccgcactccagcctgtgtgaaagagtgataccctgtctcaraaacaaaaacaaaaactttcaatgaatctcttatgagggaaaaactgtcctagaaaatcaaagttatccatctcccagtaaactggctggatttttatgt

SEQ ID NO: 46630 - DNA, 201 bp, Homo sapiens
ctagggagccagttgttaagcatttaccaggacaccactaattcctcctttctcaatacctgatcttactgtttactggttaagccatgtgtcaaactgaraaagcaaatgtgcctgagggtaatttgatgaactcctgagcacatttaacgtattacagtgttgctaatttaagaaacaatccatttggaatttgatatg

SEQ ID NO: 46631 - DNA, 201 bp, Homo sapiens
actggttaagccatgtgtcaaactgagaaagcaaatgtgcctgagggtaatttgatgaactcctgagcacatttaacgtattacagtgttgctaatttaaraaacaatccatttggaatttgatatgccccctgaagaaggtgttttttttttttaagacaccagaatacaagtcactctttgcattaaaagttactgtag

SEQ ID NO: 46632 - DNA, 201 bp, Homo sapiens
tagcaaggcaggccaacgttcagattcaggaaatacagagaacgccacaaagatactcctcgagaagagcaactccgagacacataattgtcagattcacmaaagttgaaatgaaggaaaaagtgttaagggcagccagagagaaaggtcgggttacccacaaagggaagcccatcagactaacggcggatctctcggcag

SEQ ID NO: 46633 - DNA, 201 bp, Homo sapiens
tagggagctagcttgcctgaaggctctaaatgggagtgtattgggtgggtttgaaaaagagcagatgccagtgtggctggaactcttcagggaacaaggtraagggtaggaggagatgagtcaaagaggcagtagtgggggttgcttgagtagggccttgtagacccttgtatggactttggtttttaccattaaatggaa

SEQ ID NO: 46634 - DNA, 201 bp, Homo sapiens
cttttaatacacagattcttatagtaaaagcatattcatttgaaatacacaaactttagaaaactatttaattgagtagatttggatagtggactattgtrccccaaaaagggtctcttatgtctatacatttgcacagaatactagtgtatgggtgtttgcacttgaataattcccaaattggcacaaattaattagcaa

SEQ ID NO: 46635 - DNA, 201 bp, Homo sapiens
tcaagcaatcctcctgcctcaggctcccgagtagctgggactacaggctcaagccaccatgcccagctaatttttacattttttgtagagaagggagtctygtcatgttgctcaggctggtctggaactcctaggctcaagtgatcctcctgccttggcctcccaaagtattaaaattacagatgtaagccactgtgcatg

SEQ ID NO: 46636 - DNA, 201 bp, Homo sapiens
tttcatatccagccaaactaagcttcataagtgaaggagaaataaaatacttcacagacaagcaaatgctgagagattttgtcaccaccaggcctgccctraaagagctcctgaaggaagcactaaacatggaaaggaaaaaccggtaccagccactgcaaaatcatgccaaaatgtaaagaccatcgagactaggaagga

SEQ ID NO: 46637 - DNA, 201 bp, Homo sapiens
agctaacatcatattgacaggatcaaattcacacataacaatattaactttaaatgtaaaaggactaaatatcccaattaaaagacacagactggcaaatkggataaagaatcaagacccatcagtgtgctgtattcaggaaacccatctcacgtgcagagacacacataggctcaaaataaaaggattgaggaagatcta

SEQ ID NO: 46638 - DNA, 201 bp, Homo sapiens
gggattatgaactagaatatattattttccagaatcaaatccaataatgtatacatgatacaatatattttaaaggatcttcagtagttcttcctacttascagaaataaaccataatgacttgaaattttctttatgaatctgagcatatgatgttgattggggtttatatgaaaacagttttgcctattaagaggctca

SEQ ID NO: 46639 - DNA, 201 bp, Homo sapiens
atattgacaggatcaaattcacacataacaatattaactttaaatgtaaaaggactaaatatcccaattaaaagacacagactggcaaatgggataaagartcaagacccatcagtgtgctgtattcaggaaacccatctcacgtgcagagacacacataggctcaaaataaaaggattgaggaagatctaccaagcaaat

SEQ ID NO: 46640 - DNA, 201 bp, Homo sapiens
taagaaattataaaagtattaatttggggaactaataaatgaccatgaaatcttcacaatttatgttcttctgccatggcttcagctggtccctccgttcrgggtccctgactttccgcaacaagtggtagaacaaaagctaaagggagagaatgtttcaaggagggaatagtcaatagttagatgtttctaagagctcaa

SEQ ID NO: 46641 - DNA, 201 bp, Homo sapiens
ctgggggattggacagaatctataggacaaaaaaaaatttttaataacaaattgcaagagcaagaaatagagagatggagaagtctgaagattaaaatagmcataagagaaatatctaccaatcacagtgacatggtttggatctgtatccccaccaaatctcatgtcaattgtaatccccaatgtaggaggtggggcctg

SEQ ID NO: 46642 - DNA, 201 bp, Homo sapiens
ctgcgtgggaaatagaaaaatatactctgagcttgtgcccaggaaaaaaaaaaagacaaaaaaagatgatgttgactgaaaattgaaaggaaatgggcaarccagggaactggaggttttactaaaatcagaaaaagtttgtgctaggattaaggaaaagaaattatgaggtgggaggttaaagtcagtgagtggcatgtt

SEQ ID NO: 46643 - DNA, 201 bp, Homo sapiens
ggaaagaggaaaatgtcattgggatattgagatttacttggtaccttgacagtgaaatctgaataaatggttgttagtgtccttcttagcaatccatttaycatccttttttttctctctgtaatgccagaatataagcttcatgagaatagcaaccttatctctgttcatcgctatgtacccctaagggcctagcacaat

SEQ ID NO: 46644 - DNA, 201 bp, Homo sapiens
aatgaacacttcagggatagaatcgagcactatttaatccacagctcaaatagtgtcaccatgaactagttttttttccttccatatttttgttctgctcytttgctgtggttctgttcttgccccaacggactgcaagatgactgtcatcagtctccagggaattgtcttcttactttgaatccagcagaaataagagtc

SEQ ID NO: 46645 - DNA, 201 bp, Homo sapiens
cagtgaaatctgaataaatggttgttagtgtccttcttagcaatccatttaccatccttttttttctctctgtaatgccagaatataagcttcatgagaayagcaaccttatctctgttcatcgctatgtacccctaagggcctagcacaatgcctggcacatagcttctcaagacatgtttatcaaacaaataaatcaag

SEQ ID NO: 46646 - DNA, 201 bp, Homo sapiens
ggcacagtggactgcgtgccaggggcattgcttccattattactcctaggaagctaggaactaaaaaagcctgcatgtcaactgctggtttcaaatcacascaccctagccacaaccaggagtcacgaagcaactgttgtcttctgggatattctactttagctgtgattcagggatcagactgctaccagcattgttagc

SEQ ID NO: 46647 - DNA, 201 bp, Homo sapiens
caaggcaggcagaccatttgaggtcaggagtttgagaccagcctgaccaacatggcaaaaccccgtctctactaaaaatacaaaaattggccatatgtggkggcatgcacctgtaatcccacttactcaggaggctgaggcaggagaattgcttgaacccagaagaaggaagttgctgtgagccgacatcgtgccactgta

SEQ ID NO: 46648 - DNA, 201 bp, Homo sapiens
ataagcttcatgagaatagcaaccttatctctgttcatcgctatgtacccctaagggcctagcacaatgcctggcacatagcttctcaagacatgtttatmaaacaaataaatcaagaaatgaataccataggaacattatacagaatgacttttcatgtaatcagttacataattcatttgtccttccattttcttctac

SEQ ID NO: 46649 - DNA, 201 bp, Homo sapiens
gcatttaattgggattattttttggcacagcgatcattaattagagcaaatggagcataagcaacgttagttgaataaataatgaatttaaagagtctatraaggttaaatagcatactctggaatgttctatgaagtaatttttcctttccatgctacatactgtcaagataactagtctaacccaaggttagatagaaa

SEQ ID NO: 46650 - DNA, 201 bp, Homo sapiens
aatctcggctcactgcaagctccgcttcccgggttcacgccattctcctgcctcagcctcccgagtagctgggactacaggcacccgccaccgcgcccggstaattttttgtatttttagtagagacggggtttcaccttgttagccaggatggtctcgatctcctgacctcatgatccacccgcctcggcctcccaaagt

SEQ ID NO: 46651 - DNA, 201 bp, Homo sapiens
agagtgtttcctgcaatattttcatgaaaaatatatgtgtaaaaatgtctaggatggtctaagagaaaatatttatattgattactgtgaattagaatagwttttttggtttgtttatattaaaaacatttaatcccatgagcacatcatcttatcagaaaatgattccaaaaagttcttctgtgagttttatcaaccagg

SEQ ID NO: 46652 - DNA, 201 bp, Homo sapiens
actgttaaagttggataggagggtgctcaaattagatgcagggaaattagttgtgagattagtgtagcagtttatatgatagttggtggaagctggagtgrtgatccaaatagacaagagagggtgaatttaagagatattaagatagaatcaacaggacatggtgaccaacttggagcatgaggatagaggtagaaggag

SEQ ID NO: 46653 - DNA, 201 bp, Homo sapiens
taagttgtattcacattatattgatctatttactttttcagttaattccgtatgaaacatttgtttactaagatatcaaatcaaccacaaattaccattcrtagataaaatggaattaattcttaatgatgtggcctttttaggacatagttaaaattctttaattttgtgattatgttatttagtatacattaagtataa

SEQ ID NO: 46654 - DNA, 201 bp, Homo sapiens
tctctgaagagggatggtataaggtgagttctgcatgacaagtcgtggctaaccatgcaaaggtcagaaggtagagtcttgccagaaggtacagcaaggastagaaagaacttgcatgttgtagaaaccaaaagatagccagtgcggctgaaacatgtggcaaagagtggaaagagattaggctgggtgttctaagacact

SEQ ID NO: 46655 - DNA, 201 bp, Homo sapiens
tatttttcttattacaaaaacactgtgactgcatgcagtggctcacctgtataatccctgatagtcaggaggctgaggtggaaggatcatttaatgctagrggtttgagattagcctggacaacagagtgagactccatctctaaaaaaacaaaaaaggaccacacacacacacacacacacacacacacacacacacaca

SEQ ID NO: 46656 - DNA, 201 bp, Homo sapiens
tcccatctcaccctattgttcttaactctcctactgagacctctaacttttacccactgcaggactccctgaggttaattgttttcttctttagatttcctttttttttttttttgattgctagactttccctgtttattttagcaatacagttgagttctgttttatatctgggtcctatgtaattaatatataactaaa

SEQ ID NO: 46657 - DNA, 201 bp, Homo sapiens
ggctggttcaatatatgtaaatcaataaatgtaatccagcatataaacagaaccaaagacaaaagcacatgattatttcaatagatgcagaaaaggccctkgaaaaaattcaacagcccttcaggctataaactctcaataaattaggtattgatgggacgtatctcaaaataataagagctatctatgacaaacccacag

SEQ ID NO: 46658 - DNA, 201 bp, Homo sapiens
gctggttcaatatatgtaaatcaataaatgtaatccagcatataaacagaaccaaagacaaaagcacatgattatttcaatagatgcagaaaaggcccttraaaaaattcaacagcccttcaggctataaactctcaataaattaggtattgatgggacgtatctcaaaataataagagctatctatgacaaacccacagc

SEQ ID NO: 46659 - DNA, 201 bp, Homo sapiens
ctaatagattacattagccctgagaggtggtacagatacttcccaaacaatttatataaaattatgactgcataaaaaattagtctgttcctaaaggaaakcatctctgaaagcatctctcagctcagagattcattgcaaggaaaacctctctgcctttcctgatgttttctgttatataaatacagttgaagtgaacac

SEQ ID NO: 46660 - DNA, 201 bp, Homo sapiens
atatgtaaatcaataaatgtaatccagcatataaacagaaccaaagacaaaagcacatgattatttcaatagatgcagaaaaggcccttgaaaaaattcarcagcccttcaggctataaactctcaataaattaggtattgatgggacgtatctcaaaataataagagctatctatgacaaacccacagccaatatcatac

SEQ ID NO: 46661 - DNA, 201 bp, Homo sapiens
acttcagcaaagtctcaggatatacaatcaatgtacaaaaatcacaagcattcttatacaccaataacagacaaacagagagccaaatcatgagtgaactmccattcacaattgcttcaaagagaataaaatacctaggaatccagcttacaagggacgtgaaggacctcttcaaggagaactacaaaccactgctcaatg

SEQ ID NO: 46662 - DNA, 201 bp, Homo sapiens
catcgccaagtcaatcctaagccaaaagaacaaagctggaggcatcacgctacctgacttcaaactatactacaaggctacagtaaccaaaacagcatggyactggtaccaaaacagagatatagaccaatggaacagaacagagccctcagaaataacgccgcatatctacaactatctgatctttgacaaacctgagaa

SEQ ID NO: 46663 - DNA, 201 bp, Homo sapiens
atggattaaagacttaaatgttagacctaaaaccataaaaaccctagaagaaaacctaggcattaccattcaggacataggcatgggcaaggacttcatgwctaaaacaccaaaagcaatggcaacaaaagccaaaattgacaaatgagatctaattaaactaaagagtttctgcacagcaaaagaaactaccatcagagt

SEQ ID NO: 46664 - DNA, 201 bp, Homo sapiens
attaagaaaatgtggcacatatacaccatggaatactacgcagccataaaaaatgatgagttcatgtcctttgtagggacatggatgaaattggaaatcaycattctcagtaaactatcgcaaggacaaaaaccgaaacaccacatgttctcactcatagatgggaattgaacaatgagaacacatggacacaggaagggg

SEQ ID NO: 46665 - DNA, 201 bp, Homo sapiens
aggcatgcaccaccacacccagttaattttgtatttttagtagagatggggtttatccatattggtgaggctggtctcgaactcctgacttcaggtggtcygcccgcctcagtctcccaaagtgctaggattacaggtgtgagccaccacacctggccagttgttaaatatttttaatattctctcttcagtaaccttaaa

SEQ ID NO: 46666 - DNA, 201 bp, Homo sapiens
gcagcaaccagagtggtattttttaaaaaatagatcagatcctatcagacccctctgcttaaagtccgtgtatttttccatcaagctgacaaaaaaattcraatttatcatggcctatgagcccctccattgtctggcttctggctccttctctgaactcatttctgagtctccgcattgttcaccctgctccagtgatac

SEQ ID NO: 46667 - DNA, 201 bp, Homo sapiens
tcattctcagcaaactaacacaacaacagaaaaccaaacactgtatgttcttactcataagagggagttgaacaataatatttttattatttaaaatcatwgtgtccatgaagctgtaattcccaattaagtattacttcccttctcttaggaaactatcagtgggatttgggtgtgtgaaggagaatttcccatctattg

SEQ ID NO: 46668 - DNA, 201 bp, Homo sapiens
agatttgggtggggacatagctaaactatatcactatactatactatcactatactttgagtattagtctgttctttgtgaagtagagagttaaaaagccrtggagaaaagtgcattagcccagactggagagggatgctaaatgggggttataaaagcaacagcacactgaaatggaaattgggcaccaaggcaatgctg

SEQ ID NO: 46669 - DNA, 201 bp, Homo sapiens
actttctccaggaacatttccattttaataataatcactaccagtcaccatgctaaatgctttgcatgcattatttcaaattcttaaaacaaccctcttartactatccccatttaacaacaaagaaattgagtccccgagaacttaagtaacttggttcaaagtcacagactagcacacataattaacaagtatcagggt

SEQ ID NO: 46670 - DNA, 201 bp, Homo sapiens
gcatttcttttgatccatacaacttgggccatagttagcattatctcagtttagaagtaaaagaaataggttcggagagaattttgcccattcagtggtaragctaatattcaaaggaaggttctgtgtttctcattcgaggactcatctcctgagctcacacagcaagagtgtgctgggcatatggttttcattttgctg

SEQ ID NO: 46671 - DNA, 201 bp, Homo sapiens
tggaagcagaagggtgtggggaatgcagggggtggccaaaatgtgtatgatagctttgtgaaaccaggcaacacacaggaatggtggaaattattttaatrttgttgttataatagatcaatgagcaatttaatagttcatggggttgctagtttgtttaaattttaattcaacttttccaaaagattagaactatttctc

SEQ ID NO: 46672 - DNA, 201 bp, Homo sapiens
ccagtgaagagcccctgaaagaaaatactctggagaaaggtcagtgagaatgggccaaagctgaattcttcagatctattcagagaatgtggaaagtctgygccctctgctttctgtgccttccagctggccacgcgctcccatgacatttgtccagttctaccttccccatacctttacatagtaaaggaattcatactg

SEQ ID NO: 46673 - DNA, 201 bp, Homo sapiens
ggaggtgctaactctcagaccactcaagaagcatttaggatttgtctctttcactagtggattcaccgatgagttaagaacatttgtaaaattcactcccyacacacacaccaagaagaaacccacttctccttaccagaagccatccatttgttgtgtcatatttgattaagttcttctggatccaaaaaatattcagtt

SEQ ID NO: 46674 - DNA, 201 bp, Homo sapiens
atgcttgtggatgagtgaattttttcacattaccaagttgtactttttatatcttataacagcttaagacttcaaccaaaaaagtggggagaattctttcrttaggatttttatgcctaaactgtttcccacagagtgaaatacatgggtggtctgtaggcgagaggtgggggtagatagtatattttggtcttttacaaa

SEQ ID NO: 46675 - DNA, 201 bp, Homo sapiens
tttacaagtgaaaaaatacattccaaaatagatccaatggaaattagtatttaacttacagactatttggaatataataatagtgaaaacactatacaggmtacaaccaatactatacaaagagaaaaattaatttgaaaatgaattatttgtttaatggaagtcaataaaattaggagattggaaagagagcaactgcaa

SEQ ID NO: 46676 - DNA, 201 bp, Homo sapiens
taaatctgttgaaatttgccaagtaccgcttgaccaaaggttataagatatcagcccactggcatctacttttctttccctgttgtggctgttttcaattwtatatactcttgaatattctgaatatgtagttctctcactttccctccataggattctgatcaaagctagagtcgcctcaaacaagagcttgattaattg

SEQ ID NO: 46677 - DNA, 201 bp, Homo sapiens
atttaagtagactgaacaagtgagtataaggcacttgtaggaagctagaagaccaggtgagcatatgcctagacccagttagtaatgagtataattgcatmgaagccgtacacctgcatattaaaattaagcaatctgaatagatggagcaggcagacaaatatcccagaacaaaacccaaaataagtcacttatttagga

SEQ ID NO: 46678 - DNA, 201 bp, Homo sapiens
tttccctgttgtggctgttttcaattatatatactcttgaatattctgaatatgtagttctctcactttccctccataggattctgatcaaagctagagtygcctcaaacaagagcttgattaattgcccttctgaagatcaaaatgtgagaaaatttctaggtagcttccaaatttaatttgaccaaccagactaagaaa

SEQ ID NO: 46679 - DNA, 201 bp, Homo sapiens
cttgatgtcagggttacatctcaaccatcttttcatctctagatcctatcatgttgcttggcacaaggtagttgcttggggaatggtgaattgatctatayagttatctagtccgtttagcatcccctcaaacttgggtaaactccagggcacaaggagggcattaggcaatgttcttagatgctgagctttaagggagtt

SEQ ID NO: 46680 - DNA, 201 bp, Homo sapiens
tcttggcacatttttatgactttggaaattctcaaattgaaaccaggactgaggcttctttctgtgtacctctaaaggggcagggttactagtgtttacarttattttgtgatatccagatatgcgtacttcagctaatattttatagccttaagttttttttgttacaagattagtgcacaagttcaaacaatagagagg

SEQ ID NO: 46681 - DNA, 201 bp, Homo sapiens
ctatggagagaaaatgggtatggcacttggtaaaaaaaaatcgggagattgttttacggaaaaataaaatttcttacctcctaagcaaaacatcaaaacaycaaaattttattttttacggaaaagtaaaattttttacctcctaagcaaaacatcaaaacatacatacttatgttgtacttttatttttctttcaaagaa

SEQ ID NO: 46682 - DNA, 201 bp, Homo sapiens
ccccattttattgatgataaaattaaagctcagagagcttaaacattatttcatcagagtccacaaatggaaaaactcagtttttttctgtgctcagaagratattgtcaacctacagaaacaacttgttcccctaccgaattcttatagtgcttatatttcctgttgttaaaatgccaattaattatctgctgcgctttc

SEQ ID NO: 46683 - DNA, 201 bp, Homo sapiens
tgtcaagattgggggtggcctgattagggatctcataaggctgttgacaggagtggaatcttccatgggagcaatagtcagatttgtctcaacttaaattytgggaattttgctaaaataagaatggcttctgagatataatgagctaaacctgaaatgttggttcttgtaaatacatggtaaaggcgtgagattagaatt

SEQ ID NO: 46684 - DNA, 201 bp, Homo sapiens
cagcatctccctagcacttcttaatttctcagtgaattttttttgatgaataaataatggtatttcagtcgcattttcaaaagcacatacaaatttgtaayttcactattttctattgtagtcatatacgttgacattctaaatgaactttggtccttgaagtcaatgagaaaagtcattaacttaaggttgttcagtact

SEQ ID NO: 46685 - DNA, 201 bp, Homo sapiens
gatttgtctcaacttaaattctgggaattttgctaaaataagaatggcttctgagatataatgagctaaacctgaaatgttggttcttgtaaatacatggyaaaggcgtgagattagaatttctcttttaggaaacctgtcaaattgttaagctccttttcctcttttatttgtgatctaagtgatttgtctatacagcct

SEQ ID NO: 46686 - DNA, 201 bp, Homo sapiens
tgatttgataataacgtaaaatcgtcaaatacaagggcaggagaaggtagatttattaggtaattgaattactagagatgctattgctgtgagagaaaacycaattacctgtgggctgtggacaaagagcttcctatttcctgatggggatctaaaattgattagcttcaggcttgtagaagtcttctgctattattaata

SEQ ID NO: 46687 - DNA, 201 bp, Homo sapiens
tttcctctgtcagaacacacagtagcacttgccaaataaattagttgtagtaggagaaatttggcttgattttatctttttgactctccattccaaactakcagtgcagctaaacacttgggttttggagcattctcactgtcctttgcctattttataagctgctgttcattgaaatcccatctgtgttgaagctctgtt

SEQ ID NO: 46688 - DNA, 201 bp, Homo sapiens
gaacacaaatatgtccagccctgaactcttcatttttcctcttgatgaatcctttcttatgctttaaaacacttgagtttacacacacacacacacacacrcacacacacacacacatatttctggtaggcgtggagatatatatctatatatatcttgctattagggcaattccctgaaagattacactaccttctttat

SEQ ID NO: 46689 - DNA, 201 bp, Homo sapiens
tatattttgagggcagggtctttcttaaaaaatgtcttctgtatactatttaaaagattttccatagttttcatggatgcataaactataaagccaaattmttggcctgtttataagttctttggtttgactttgttattgccagggtatctcagtgtagcaaaataactccattctttatggatctttttctgatgattt

SEQ ID NO: 46690 - DNA, 201 bp, Homo sapiens
taaactataaagccaaattcttggcctgtttataagttctttggtttgactttgttattgccagggtatctcagtgtagcaaaataactccattctttatrgatctttttctgatgatttatgggaaacttaagataaacctttaattaatttatttttttttgtttactttgttgactggataaaattctttcacgtggt

SEQ ID NO: 46691 - DNA, 201 bp, Homo sapiens
acattagtatggtatgtttgttgcaattaatgaaccactacttttacaatattattaattaaaatccatattttattcagatttttgttgtttttagcctrcttgcctttttctatccaggatcatatccaggataccacattacatttcatcatcatgtctctaggctcttcttagatgtgacaatttctcagactttat

SEQ ID NO: 46692 - DNA, 201 bp, Homo sapiens
tctctgatgtttttctcacggagttatgtgtttttgggagaaagatcacagagggaaattaccatcttatcacatcatatcaaaggagcatactgttagtkacttagcactgttgatgttgtccatcatcacctggctctggttatggttgtcaggctttccctttctatcctgtattctttgtaaggaagtcactgtgca

SEQ ID NO: 46693 - DNA, 201 bp, Homo sapiens
cacctggctctggttatggttgtcaggctttccctttctatcctgtattctttgtaaggaagtcactgtgcataacccacacttaaggagtggggagttaygctccatctccagagagtgtattgtattatctacataaattatttggaactcatctgcgtgggagttttgtctattattctccatttgtttatttattca

SEQ ID NO: 46694 - DNA, 201 bp, Homo sapiens
gtcagaggcttctttgcattatcagaaaattatccttcatatccttgtgccacattgtcagtttcttctcatttttttcctcaatggcaatggctaaaacrccaggggctccatattgcttcagacagtacttcatctgctgctgtcatcttgcagatatcttcccttggccttttagcctcatctctcttctctttagtc

SEQ ID NO: 46695 - DNA, 201 bp, Homo sapiens
tatgtattagtctgttctcacactgctaataaagatatacctgagacttggtaaattacaaagaaaaagaggtttaatggactcatgttctacgtggctgrggaggccttcacaatcatgatagaaggcaaatgaggttcaaagtcacatggtggcaggcaagagagagcatgtgtaggggacctcccctttataaaacca

SEQ ID NO: 46696 - DNA, 201 bp, Homo sapiens
tgttttacatttaagtgtctgaatttaattaaaattgatattttagaataagataatctgcttttgcaaaggatttatgtttttttttttccattgtaacwaattaacctcatggtaataaatgtacttctgaaaacatttcttcttaaactacagctttgaccttgttctgcttcactgctggttccctattgctgctaa

SEQ ID NO: 46697 - DNA, 201 bp, Homo sapiens
atcccactaccatctgacctccatggtcaaaattcagctgtcaatctcattgaggatcctttgaacatgattttcttctctcctgctgctttcaagattcttttttttttttttttgtcttttggcagtttgattatgatatctgtaggtacagatcttgttgagtttatcctacttggagtttgttgaccttcttggatg

SEQ ID NO: 46698 - DNA, 201 bp, Homo sapiens
ttaaaggatatatgaatattgaatgtctggtaaaatacagaaaactagagctgtatagaaaaatttaaatgtaaaaacctatctatttacaagtgaaaaamtacattccaaaatagatccaatggaaattagtatttaacttacagactatttggaatataataatagtgaaaacactatacaggatacaaccaatactat

SEQ ID NO: 46699 - DNA, 201 bp, Homo sapiens
tgaattatttgtttaatggaagtcaataaaattaggagattggaaagagagcaactgcaacctgatgaaagaaagaaattcattaagtaaaaattaatgarttagaaaatagcaaaagaaaaacaagaaagcttaaactacatacaaatttaaagctttcgtatgagacagtagagttaaaaggcaaaagacaaacaagta

SEQ ID NO: 46700 - DNA, 201 bp, Homo sapiens
acatcatgattgggctttcagattaggagatatgagaaagaaggtcgtgtgataggtggtaacgaggaagccgtcctccttgtgtaccacacatgttgccractctgcatgtagcctccctggaggccagcttgagactctgcattaaatgccttggttaggcgcaaaccttatggctcagcaattccactcttcaaagtt

SEQ ID NO: 46701 - DNA, 201 bp, Homo sapiens
agacacggtctcactctgtcactcaggctggagtggagtggtgccatcatggctcactgcaaccttgatctcccaggctcaacctattatcctacctcagrctccagagtagctgggaccacaggggtgtgccaccacatttagctaatttttctattttttgtacagagatgggtttcagcatgttgcccaggctgctct

SEQ ID NO: 46702 - DNA, 201 bp, Homo sapiens
aactaagcatctgagaccctacaagcttgacataattatgtaatcatgtttattatgattatttttgttgtgattatacagattttgttacctcttttccrtttactctgcctgtgcaaatatgttattttcctcactgaattgcatattgttgaaggactatattaggagtctccaaatgctcacattccctcattcatt

SEQ ID NO: 46703 - DNA, 201 bp, Homo sapiens
tgaaaaagcatgatgacaattgaaataccaagatcagaattagagtcccactaagaaatgctccctttaggaaaaacaattatttcttttgatttcagccmtgagcagcacttaatatacgtttgctaggcaccccaccagacacctccagtgaaacaagagcagaaaggcttagaggtataaagtgtctggttcctatgt

SEQ ID NO: 46704 - DNA, 201 bp, Homo sapiens
aggagtttgcttgggatgactaaggggcaaaaacaattgttaagaagaaagatagtgattttagtatttcagataaatataaatctacacataagtttagrtttatctaaaaatattatatggtctgtttagccaatgctaaaccattggttgttgttaggcagtagagtgcagtgactgagggagagactaaggagctag

SEQ ID NO: 46705 - DNA, 201 bp, Homo sapiens
ttgaaataccaagatcagaattagagtcccactaagaaatgctccctttaggaaaaacaattatttcttttgatttcagccatgagcagcacttaatataygtttgctaggcaccccaccagacacctccagtgaaacaagagcagaaaggcttagaggtataaagtgtctggttcctatgtagtatatttaagcacaaac

SEQ ID NO: 46706 - DNA, 201 bp, Homo sapiens
taaattcatttaatttattgtatttatgaagcacttaggatatacagttgaccctctgaattccatgggtttcacatctgtggattcaaccaattgcagaytgaaaatatttgaaaaaaattgggtctgtactgaacatgtacaggctttcttcttgtcattattccctaaacaatatgatataacaactatttacacagc

SEQ ID NO: 46707 - DNA, 201 bp, Homo sapiens
gatctaatatatgtttaatcatcattctagaggagaataggagaatgactaaaatgtttccagaactgatgaaagtcatgaattctaagatctaggaagamcacagataacatccagacatacattataatgaaattgcagagcaccaaagccaaagagataaccataaaagcatccagagaaaaaatatatcaactacta

SEQ ID NO: 46708 - DNA, 201 bp, Homo sapiens
caaaatatctatcctttaaaaatatattagaagaggagaaaccagcaaaatagactgaagaagaacaggagagtgtgtgtatgtgtggtgtgtacaagtgyttctgtatttatatgagcatataaacaagcataaaaatgggtttgaagaattagggattcttgtgaattttttagacattcatttgttaatgcgttcatg

SEQ ID NO: 46709 - DNA, 201 bp, Homo sapiens
cagcaggtatttagagtacttactatgtgccatacagtattctaggcactggggatacagcagtaaatttaacagacaaaaatcctgcctgcatgataatmaagtgcaaacaatatagtaaggaaagagaatagaaaatctgggaatggggttgcaatgttaagtagcatggttaagaaaggtggtatttgagattatatt

SEQ ID NO: 46710 - DNA, 201 bp, Homo sapiens
ccctttaatcctatccacaaacccccatccccacagaaaagctctgttaaagattcttccatcattcagacaaagccattgccagccctcattctatttarcctcttagcaatatctggcactgttaatgactgcctttttcttgaaagcttttttatctaaagtagcctgggatgatgcatgatctttgaaccctcctca

SEQ ID NO: 46711 - DNA, 201 bp, Homo sapiens
ttaacttaaaactgtagttgtttctaaagcattttcattttgtttatcatgcctcaacttgatgcatattatcttaatccagaggtaaaaaggaatttttyaaattattggaatatgcagaatctagtaaacaaagttgtaaaaagaaaacaataatatttaaataagggttcagaaaatatattcagttgcatcccaact

SEQ ID NO: 46712 - DNA, 201 bp, Homo sapiens
tgattgtctttttaaaatgagatttatccgttggggttgggtaatttggctgtctcgttttctaaaagtgtgattctctaaggcaatattttggataaagwgtatttgccaaggaattaaaagagctttgtctgacatttggttaaatttgttatttgcatactttaaagcattcattcaacaaatatatattagacatgg

SEQ ID NO: 46713 - DNA, 201 bp, Homo sapiens
atgtgtaatttcttgcctaacctctgcttttgattatttatacagttttttctaatgagataatttaaacttagtataatatattgacgtatctgttgctyttgcttgattatcagctttgagattttccttagagaatgcatgatttataagttcaaaaaaacatcattttgggtcaaatcatacacataagggctgctt

SEQ ID NO: 46714 - DNA, 201 bp, Homo sapiens
tagaccagcattacaaaaattattaaagaagtcctacacatggaagcaaaaggatgataattctaccgtcctaaaaacatgcaaaagtgtgaaactcactyatagagcagatacacaaatgattaagggaaaggaatttaatcttatcatgtcagaacaccaccaaactgcaaagataaataatgagagaggaaaaacaga

SEQ ID NO: 46715 - DNA, 201 bp, Homo sapiens
aatttacttcaatctattttaatctatactgagatcattatgtgagagtattactcttttctttgttttcagggctttgcataaggtgacttgaataatayatgcaaaagatattttgtgaatgaatacttgtgaaatcttttaaatattcctttaatacagaagcatatattcttttcaagacacttacataagccagtt

SEQ ID NO: 46716 - DNA, 201 bp, Homo sapiens
aagtcactgtgcataacccacacttaaggagtggggagttatgctccatctccagagagtgtattgtattatctacataaattatttggaactcatctgcrtgggagttttgtctattattctccatttgtttatttattcaataatttatatcagtatggactcatgaatagtttatactttaggttataatccaatgct

SEQ ID NO: 46717 - DNA, 201 bp, Homo sapiens
caattaaataggtgattagctttcaaacaaaatacattcttgtgatttcttttctttctcctcttccaattaatgtatatttttaatcatcatcactaaaktacctcacgacataagttttatatatgctgtaatatgaatacatttgccatcatagtgatcacatcatatataggtactacagatatatacaagtttttt

SEQ ID NO: 46718 - DNA, 201 bp, Homo sapiens
gtcttgcagactccactcatttccaaagttacttaggtcaactaccctctccccttaccccttcagtgaggttgtttcatacatttgcaatagagttagaytgtctgttttgtcacattctgcattctattctgggatcctttgatgtccttaattatttttgtttaaattgcatggactaaggtttactttttgtgctgt

SEQ ID NO: 46719 - DNA, 201 bp, Homo sapiens
atattccagtgaagtcattatgataatgtacatggatttctgtgcaatataaggccctcctcctccttttttttaaatttgaaaatgcttcttttattaaratgggcctatcattgtttggataagcgatacattgaaaggttgggaattaggagaattgctgtggaacttggtttatgaatgtacaggtgataagaattc

SEQ ID NO: 46720 - DNA, 201 bp, Homo sapiens
cctcttcaaggagaactacaaaccactgctcaacgaaataaaagaggacacaaacaaatggaagaacattccatgttcatggataggaagaatcaatattktgaaaatggccatactgcccaaggtaatttataggttcaatgccatccccatcaagctaacaatgactttcttcacagaattggaaaaaaaccactttaa

SEQ ID NO: 46721 - DNA, 201 bp, Homo sapiens
tatttgccaatacatactaagatagtttgagctatttaattttatattattatattgtattattttatgttatttactagtacaatgcattgtcaaaaccyataaagtaaggttttgaaatagtccaaactattttcaattatttaatatttgactttttttttttgtcttttgagacagggtctcactctttcacccagg

SEQ ID NO: 46722 - DNA, 201 bp, Homo sapiens
ttgtggcaataatcaatagcttaccaaccaaaaagagtccaggaccagatggattcacagccgaattctaccagaggtacaaggaggaactggtagcattycttctgaaactattccaatcaatagaaaaagagggaatcctccctaactcattttgaggccagcatcatcctgatatcaaagcctggcagagacacaacc

SEQ ID NO: 46723 - DNA, 201 bp, Homo sapiens
cctttgtttctctccacccacatgctggtgactttttaccactaggagagttatgtactcactgtgactcacagaaaaagataaggttactttatactatmtctcaataaatggagccaaggatccttggagaaattccaggactggggcagagaaagtacaagatgagcctggaatgtctcatgatgctagaaagtaagg

SEQ ID NO: 46724 - DNA, 201 bp, Homo sapiens
aatattcccatttagtagataaggaaacaggcttgggatgtcagatatcttgcctcatgtctcatggctaataaatggagaagctgctatgtgaacacagwtgtgctagacttaagcatttaacaacaaagcaggagggtaaagatgcacggggcccactctggagtcaggtcaccacttactagctgtgaaacttgggtt

SEQ ID NO: 46725 - DNA, 201 bp, Homo sapiens
tactagtacaatgcattgtcaaaacccataaagtaaggttttgaaatagtccaaactattttcaattatttaatatttgactttttttttttgtcttttgrgacagggtctcactctttcacccaggctggagtgcagtggcttgatcacagttcactgcagccttgatttcctgagctcaagcaatccttccacctcagc

SEQ ID NO: 46726 - DNA, 201 bp, Homo sapiens
aggcttaagttaattgctgcactactgtaaaataatgatacttaaacaaaaatttacttttttaagcactcaatcacagtgagataatggggtaagggaawgggcaccggacttcaagtcagaagattatggattcaactgaatgctgtgtgacctagcacaagatacttaaattcttggaacttgtttctgtatctataa

SEQ ID NO: 46727 - DNA, 201 bp, Homo sapiens
agaatgatgggaaacaaccctctgggatgtaacagggaaagggtagagagccccctaaagaactgaaactccatcttctcagtaagtagttaacaacttgrgtgctgctgcctagtgaggaagcccaagttcttcataggtgtgtctccaggccttcacttattcatttttgttacatctgcaaatacagtagtcccccct

SEQ ID NO: 46728 - DNA, 201 bp, Homo sapiens
cttgaacccaggaggcggaggttgcagtgagctgagattgtgccattgcactccagcctggacgacaaagcgagactgcatctcaaaaaaaaaaaaaaaawtttttttggaggctctgagggagaatgtgtttcctgccttttccactttctagaggctgcctgcatttcttggctcatggtcccctttctccatgcatct

SEQ ID NO: 46729 - DNA, 201 bp, Homo sapiens
ttcatgcaacaatgaattggtagaacttgaaatcacaaaaatatttttgctgaattaacattatataatatacttttaggttatcacaaattcacagttgkgtacttaattactaccatcaaatgaattccttttttattaataatgtctgagagcaatatatctaagataactagactggataggatatctctgttttgg

SEQ ID NO: 46730 - DNA, 201 bp, Homo sapiens
tatttttgctgaattaacattatataatatacttttaggttatcacaaattcacagttgggtacttaattactaccatcaaatgaattccttttttattartaatgtctgagagcaatatatctaagataactagactggataggatatctctgttttggaatttacttatgattaacagttatccaaaaatgcacttgat

SEQ ID NO: 46731 - DNA, 201 bp, Homo sapiens
atataatatacttttaggttatcacaaattcacagttgggtacttaattactaccatcaaatgaattccttttttattaataatgtctgagagcaatatawctaagataactagactggataggatatctctgttttggaatttacttatgattaacagttatccaaaaatgcacttgatttaacttctttaagaatgaag

SEQ ID NO: 46732 - DNA, 201 bp, Homo sapiens
attattattactggggatggaagtttagacagaatttgggtgcctttagaggtgcagtgttctggatgatcaaaggaaaagagcaatttttcctttttttytgagacaaagtctcgctcttgtcgcccaggctggagtgcagtggcgggatctcagctcaatctatcaaattcttactatttaatgcccatttaaaatcct

SEQ ID NO: 46733 - DNA, 201 bp, Homo sapiens
tcagaggaaggaatattccagttgaggctgtaagggtgagtagaaatttaccaggtggtgaagcagtcaggggaatagaggcaacaatgcatgaaaagtcytaaagggatgaagggcatgccatacagtccctcacctcaggaccatcaccagcactgtcatcatctgtctgctgaaatatcactcatgcaaaacacaggc

SEQ ID NO: 46734 - DNA, 201 bp, Homo sapiens
tctatatattgtttccacatagaccagtgattctcaaccaggggtgatttttctctccagggaacttttggtaatgtctgaagacatttttgattgtcagmatgggaagttacaactggcatttagtgggttgaagccagaggtgccgctgaacatcctatgatgcacaggacatcctctacaacaaagaattatcccatc

SEQ ID NO: 46735 - DNA, 201 bp, Homo sapiens
agcaaagttagcaaactggccaaaggtcacacatctaataagtgaacgcatcaggatttgattaaacccagggttaagtctagcgttaatgcactttctawtgtttatactcaatttcaacctaatttattattgtatacaaatttagaataaacatctttatgcataatttctcatctacatttctgattatttccttag

SEQ ID NO: 46736 - DNA, 201 bp, Homo sapiens
tttatagaagagaaaagtgtcacaggaaatacacaattaaaggttttctataattataatttatatatataaattttataatttatatattacatttttawaaattattactacaaattataaagttttgattcatgtcatcagtttactttccttaaatctagagctggttcacattcctgatatcttacctaatcacag

SEQ ID NO: 46737 - DNA, 201 bp, Homo sapiens
atatatataaattttataatttatatattacatttttaaaaattattactacaaattataaagttttgattcatgtcatcagtttactttccttaaatctrgagctggttcacattcctgatatcttacctaatcacagcctacaatgttttcttttaccttcttatttaatccttggcagtttgatcgtgtctttacctt

SEQ ID NO: 46738 - DNA, 201 bp, Homo sapiens
taaattttataatttatatattacatttttaaaaattattactacaaattataaagttttgattcatgtcatcagtttactttccttaaatctagagctgrttcacattcctgatatcttacctaatcacagcctacaatgttttcttttaccttcttatttaatccttggcagtttgatcgtgtctttacctttaaaaaa

SEQ ID NO: 46739 - DNA, 201 bp, Homo sapiens
aatgcaaactcctgggctaatcccaagtcttctgaattggaatatctgggaatatggcttgggagtattcattttattttattttattttattttattttwattttattttattttattttattttattttattttattttattttattttattttattattttgagacagagtctggcttttgtcccctaggctggagtg

SEQ ID NO: 46740 - DNA, 201 bp, Homo sapiens
aacaacttgggtgctgctgcctagtgaggaagcccaagttcttcataggtgtgtctccaggccttcacttattcatttttgttacatctgcaaatacagtwgtcccccctaattcacagggactacattccaagactccgcatagatgcctaaaaccacagatagtactgaatcctatgcatactatgctttttttccatc

SEQ ID NO: 46741 - DNA, 201 bp, Homo sapiens
gagaatttttaaacccatagcctttgattttactgtgaagcacattgatgtaatagtgagaatcatgccctaagtctgggtttaccagaaattcagctttygaatcacatccttcccaagtccctgtcagctgtgagcaatagcaaatcatttttccagtagcttaggagcctgtgaatggattctgttcacagctttaac

SEQ ID NO: 46742 - DNA, 201 bp, Homo sapiens
acctcactaaagtcacaaagcttattagtgacagagccaagatataatacaggtcatctaattccgtagttcatactgttaatcactattccacatttccstcaaaccaaagtggattgagcattcagggtattctgtctaagtcaggcagatatttttatttttatttttatttttatttatttttatttttatttttta

SEQ ID NO: 46743 - DNA, 201 bp, Homo sapiens
ctcatttccagtttttccaaacttggcatttttaaccattgttggccttttaacctcttttagtaattctatctatcatttgtgctatgcacataaaaagwtagtaagctaccattacaggtggtgaatagctctggaaggggtttgagcaaggaaacaattttatgaggcttgtattttagagagattattctggtagag

SEQ ID NO: 46744 - DNA, 201 bp, Homo sapiens
agattttgtcatgctatgcttacgggccaaagcacccagaggtgtaacaaacacttggtgtttagctatattttagggcaacagattccgaatcttccccsagcttggggattcagtgtgtctgcctagatcttcctgagtcacctcccagttgatatgtgaaagaagcctacaagcccaccgtctttcatatatcctccc

SEQ ID NO: 46745 - DNA, 201 bp, Homo sapiens
agcacagtacctggaatacaatatttgctcaataaatgttcctgggaagtggtagtaggtttatgctgaaatgccattacctggtactgctaaacacaacrgcaaaatctaaaatccaagaatgttttagatcagagagacaaatggaattgtgttgtattcctaatggaggcttatatttctttatatagaagatgtttt

SEQ ID NO: 46746 - DNA, 201 bp, Homo sapiens
ctcaaactcctgacatcaagcaatcctcccactataacctcccaaagcactgggattataggctcaaaagagagcttgaagtccccaaatgaatcagggaraagtctaatttcaaggaatgatttcagggtaaatttaaaaaggaaagaaaattatggttagatttacttctcattaaaagtattgaagtttagggttaat

SEQ ID NO: 46747 - DNA, 201 bp, Homo sapiens
accattcttaggagcttttcctgatgggtcactgacaaacatggtgcattcactatgaactttacgatcttcatgacacaaagtgaagaataaattagaakaaattgtgttaagcacatttcattgattcatggagtagaatttcccttcactaaatcaatgcaatgagacatttcagttggggaagggggaagcagagac

SEQ ID NO: 46748 - DNA, 201 bp, Homo sapiens
tatattttaatgataggtagaaattggacaggtccagctaaaaggatgaaagtttgctcaagagtgggaaaagttagaaggtagattttgtggtagacatkctccagtggtctctatacacattctttataatcccctctcatgttgtttcaggattggtctgtgtaactgtggtaggctaagtaatccctccaaccctcc

SEQ ID NO: 46749 - DNA, 201 bp, Homo sapiens
gttggggaagggggaagcagagactatggtgttttctagatagactatggggttttcagaattatgtcatctgcaaacagggacagtatgacttcctcttyctatttggatatcttttatttctttctcttgcctgatagctctggccaagacttccaatactgtgttgaataggagttgggagagagggcattcttgtct

SEQ ID NO: 46750 - DNA, 201 bp, Homo sapiens
atattttaatgataggtagaaattggacaggtccagctaaaaggatgaaagtttgctcaagagtgggaaaagttagaaggtagattttgtggtagacatgytccagtggtctctatacacattctttataatcccctctcatgttgtttcaggattggtctgtgtaactgtggtaggctaagtaatccctccaaccctccc

SEQ ID NO: 46751 - DNA, 201 bp, Homo sapiens
aaaaagacatggtatatttagggtttgttacaattcaaggttttggacatccactgtggatcttggaatgtatcccctacacataaggggaagtgggggcrctactgtactttctaaaaccaagttggataattgaaaatgttgagaaagaagtttaggataaaggacttcattacctgccttgtgggggcttagaaatgt

SEQ ID NO: 46752 - DNA, 201 bp, Homo sapiens
tcatctatcataaattgcaaatatttttaatagcttgttaaagatacagtttacataccatacaacttgaccaatagaagttaacagttgaatagattttrgtcttttcacagatatgtgcaaccatctccacaatcagctttagaactgtttgatcactcccaaaagaaagcctgtatgtttctgctgtcacctcttttc

SEQ ID NO: 46753 - DNA, 201 bp, Homo sapiens
tcttcatctttctaatttgcaacatttgtttccttaccatttaactttggtatgccagcttttcattatgtcagctctcttcttcacagtaccattgtttytgctaataacaccacaataagtagactcaaacatgtaatggtgcaaacaatagtcctaggtgaatgttcagggtgctgtggtatttcttctccatgatgt

SEQ ID NO: 46754 - DNA, 201 bp, Homo sapiens
gatataataattatattgaccttttatcatatttattaacaattttttaactttttcttatatagaatttaattttatttataaggttcttgaggtaaagytttaaaaaatgtttgatagtaatgtttattgttctttattctctcatttcttctactgtatttacatttagaaaggtggtacctaccttaagagcagtta

SEQ ID NO: 46755 - DNA, 201 bp, Homo sapiens
tgtaaaataatgatacttaaacaaaaatttacttttttaagcactcaatcacagtgagataatggggtaagggaatgggcaccggacttcaagtcagaagrttatggattcaactgaatgctgtgtgacctagcacaagatacttaaattcttggaacttgtttctgtatctataaaactggaatactaatacatgtttct

SEQ ID NO: 46756 - DNA, 201 bp, Homo sapiens
ctctgttatgtatatgtatgaaaatttgccctacctattaccttactttggcatgtggcatttacttgtgaaaaatgtcacaatatctaatagtttatttyctactcatggatataaggcaaaataacattaaacaagaataaatatctgtttaccaacatttaaatgatagttcttttgttgtcaactggcaagtacgga

SEQ ID NO: 46757 - DNA, 201 bp, Homo sapiens
aatggaatgaattgtttagaatgggaggagggtaaaggagttgacactaaatgatttgcatttcatgaattaaaaatcatttccaacaaattagagggttmattaataccatattaattactctctctctctctctctgtgtgtgtgtgtgtgtgtgtgtgtgtgtgtgtgtgatcataggtagcttagcttttcttcctt

SEQ ID NO: 46758 - DNA, 201 bp, Homo sapiens
tggcttactgcagcctccacctcctgggcccaagcaatgctcccacctcagcctcctgagtagctaggactacagggttgcaccaccatgcccagctaatwtttttttttttttttttttttttttttttgtagaaacagggtttcaccaggctgattttgaactcctgggctcaagtgttccttctgccttagcctccca

SEQ ID NO: 46759 - DNA, 201 bp, Homo sapiens
atcataaataaaaaacatagtgtgcttttaatatttatatatgtgtctgcagctacgcaccagattgaactattctttttgaaataaatgtaaacattgarccaaccatatttccttgcttatttttggccttctaatgttctggaagcatcctgtgcagctaccagtgatataatcttgtgtgaaaagcaggatctaacc

SEQ ID NO: 46760 - DNA, 201 bp, Homo sapiens
ttggtcactgtgatagtatgagggttagcagtggtttctttcctgtgctggctgcttagctatctctgtcattctgtgggaagctctagttttaacatagyttgaggagctcagagacacttccctagatgtaaaaatcactaaatagatgatcttctttgctgttcagttgtaataaggtatttctattagatatatttt

SEQ ID NO: 46761 - DNA, 201 bp, Homo sapiens
gtttccagctttatccatgtccctgcaaaggacataaactcatccttttttatggctgaacagtattccatggtgccctccagctctttactctggagttytgcttttttccctccctgcattcattttgattctcaaattaacctgttcctttttggttaaaaataaaacaaacaaaacaaagtagatgctttgtttatt

SEQ ID NO: 46762 - DNA, 201 bp, Homo sapiens
ttctgggatgtgtaagcccaggaatgggaaaggaggaaaaatcatcttagagtttattaagtacggaatctgacccatggacttgatatgtgcattctcaytgcagacttgggtttggggttttacaaatgtagaatccaaatattagagaagttcatcgctttcctgtcaccctcttaagggaatgaactgtgtagctga

SEQ ID NO: 46763 - DNA, 201 bp, Homo sapiens
tgcaaatgagtattaatcacatatctttataaacacttattttagtattaatcaactaaaaatgatttccatttgccacacagaatcagattcagtgccayttcactgccactcaggaggagactacaaaagctatagagacaataacatatactgttttctgaatttagaggtttgttttgtttagttagttagtatttt

SEQ ID NO: 46764 - DNA, 201 bp, Homo sapiens
cgagtagctgggattgcaggtacccaccaccacacctggctaatttttttttgtatttttagtagagatggggtttcatcatgttagccaggatggtctcratctcctgacctcgtgatctgcctgccttggcctcccaaagtgctgggattacaggtgtgagccaccgtgcctggcctttgcccactttttaatggggtt

SEQ ID NO: 46765 - DNA, 201 bp, Homo sapiens
aactgtgtaagataacttgcttaccaatgtacaatgtgattgtgaaataaaagctttgaattaacattcacagtgaaaacactaaagccaagtgtttcggygcccagagcagaaactgtttggtgatttagtgtttgtacagatttaattagttatatttactttcaaaatttcatctttctttaacaaattctacttctt

SEQ ID NO: 46766 - DNA, 201 bp, Homo sapiens
caattgtgattttcctttaataaacatgaccaaatcatacatacctatgtttaggagtaataaacatgcatttctcaacttggtaggccttgtgctttgcaaaaaaaaaaaaacctgtaatatttttataagatcaggaagatcataacattaaattgttcatttacttaagtaaattaaaactttcattccatggcttaa

SEQ ID NO: 46767 - DNA, 201 bp, Homo sapiens
ttgggagtaatagaacctttctcatagagcaggagacccccaacctttttggcaccggggactggtttcatggaagacaatttttccacagatcaggatgrggtggatggttttgggatgattcaagtgcattaaatttattgtgcactttatttctattattattccattgtaatatataatgaaatatgtatacaactt

SEQ ID NO: 46768 - DNA, 201 bp, Homo sapiens
tcatctagcattaggtatatctcccaatgctatcccttccccctcccctcaccccacaacagtccccagagtgtgatattccccttcctgtgtccgtgtgwtctcattgttcaattcccacctatgagtgagaatatgcggtgtttggttttttgttcttgtgatagtttactgagaatgatgatttccaatttcatccat

SEQ ID NO: 46769 - DNA, 201 bp, Homo sapiens
tttattaaaaacttattttgatcagctgttctaagtgtggtgttgatttctaacttgttactgcagcacaacatcccatcactttaaacagttgactgagrgctttagtctcccttttctctattttagaccatttcattgatctccaaaacagcttccataaactattaaacaatctgtaagaatactgagtattgctga

SEQ ID NO: 46770 - DNA, 201 bp, Homo sapiens
ttactatttaatgcccatttaaaatcctactggtttacatgaaatctttcttggactctcccaaagaaaaattgaaagacctctgcctcccagattcaagygattctcctgcctcagcctcctgaagagctgggattacaggcccccaccagcatgccaggctaatttttttttttttgtggagacggggtttcaccaggc

SEQ ID NO: 46771 - DNA, 201 bp, Homo sapiens
gacttcttataatttataggttgcagttcaaatttgttagtcttggaatgtaaaggtctcttaaattgagccccagcctaccttcccagcattataggttrctattatcctgctccagatccctagccaaactgggctcctccctgacctccagcagggatttccccttctacctcatgaaatctacagcaaccaacgctg

SEQ ID NO: 46772 - DNA, 201 bp, Homo sapiens
taatgtttccttagatgagcaggacagattcatctttccacatacattaagagtagtgcacacacatgtgcacatatacatataacctggggtatatggarcaatcctgctatttgttttctcaaagacagccaaattgatctgcttcatccatctttagactatatttaaagtttgggagctaatcctctaaactccaag

SEQ ID NO: 46773 - DNA, 201 bp, Homo sapiens
cgcatagatgcctaaaaccacagatagtactgaatcctatgcatactatgctttttttccatctgataaccgagacagctactaaataactaacaggtggwtagcaaagacagcatggatacgtcggacagagggatgattcatatcccaggtgggatgatgggagatttcatcatgctactcagattggtgcacagttta

SEQ ID NO: 46774 - DNA, 201 bp, Homo sapiens
gtaaaacaactatttttcactttatagatagtatcctactatttttatatagaataactttctcttgtataccctgagacatccaaatttgtttacttttwcctccaggttttacttccagtattttaatccgttttcttaatatctgctaaatattcaagctctccctttcatttgagcagtagagcctcaggcaaaatg

SEQ ID NO: 46775 - DNA, 201 bp, Homo sapiens
tctgatactctcccttctcccacccttcaccctcaaggaggccccagtgtctattgtttcctttgtgtttatgaattctcatcatttagctcccactaatsagtgagaacaggcaacatttggttgtctgttcctgtgttagtttgctaaacttaatggtctccagctccgtccgtgttcctgcaaagaacatgatctcat

SEQ ID NO: 46776 - DNA, 201 bp, Homo sapiens
agtgggggatgtgtgggacccatgggagatggattggcctcctctccttgggttgactacagcttgttgtagtgtgaataaggcacttagggtttttactycttcattagtgcaagggtagcaagggcagttccactgcaaaggcaatggcagagaggctttcagttgcccctgggggcctggtccaaggaatttccgaat

SEQ ID NO: 46777 - DNA, 201 bp, Homo sapiens
gtgtccttatggtagaatgagttatgtttctctgggtatatacccagtaatgggattgttggattgaatggtacttctgcttttagttctttgaggaatcrccatactcctttccgcaatggttgaactaatttacactctcaccaacagtgtataagtgttaccatttctccatatctttgtcagcatctgttgtttttt

SEQ ID NO: 46778 - DNA, 201 bp, Homo sapiens
atcagctggatgacactatggggttttctagatatcaaatcatgtcatctctgcaaacagggatagtttgacttcatttctttctatttggatgccatttmtttctttctcttgcctgaagaagcagtctttcaatttttctttggagagtccaagaaagatttcatgtaaactagtagaatttgaaatgggcattaaata

SEQ ID NO: 46779 - DNA, 201 bp, Homo sapiens
ccccacagtatcttgaatgatagtgttttaggtaccattatggactgaacgtttgtatctcctccacaaattcatgttgaagcccaaaccccaaatataaygatatttggagatagggccaattaggaggtaattaagattaaagaggtcataagggtgaggccctgatcaaataggattagtgtccttataaaaagaggc

SEQ ID NO: 46780 - DNA, 201 bp, Homo sapiens
agtggcagtggaaatggaaagaagtataaagagtctacaaatattttggaagtagagtcataatgacttgctgatggactagatggggaagggaagaatgaaaaacgactctcaagtttttgacttgtgactggattgcagtgttgccatttcctgtagtgggaagactgagaaaaaagttgggagttgaacatctaaggt

SEQ ID NO: 46781 - DNA, 201 bp, Homo sapiens
gggatagggaccttgtttcctattctgttgtatctctccatggcagttaataaggtactttgtacaaattgaagagacagaaaatattaaaattcctttctttttttttttttagaaatttggaaaacctcaaatctgttgagaaattggatttttggaaatttattcataaaaaattattgtagctgaaacttacctctc

SEQ ID NO: 46782 - DNA, 201 bp, Homo sapiens
aagattatgtcctttgcagcaacatggatgaagctagagaccattatcgttagcaaatgaacacaggaacagaaaaccaaatattacatgttttcatttayaagtgagagtcaaataatgagaacaagtgacccaaggagagaaacaacagacactggggcctatttgagggtggagagtgggaggagagaaaggatcaga

SEQ ID NO: 46783 - DNA, 201 bp, Homo sapiens
ggatcagaaaaatacctattgttggtacaccaaacccccatgacatgagcttacctatgtaacaaacttgcatgtgtacccctgaacctaaaataaaagtwaaagggaaaaaaaagtaaacatgttgtagaagtcacaatctatgacagtcttgttctttgccttctccattgcttcttagtaatctgtaaagctattgtt

SEQ ID NO: 46784 - DNA, 201 bp, Homo sapiens
gaaaaatacctattgttggtacaccaaacccccatgacatgagcttacctatgtaacaaacttgcatgtgtacccctgaacctaaaataaaagttaaaggraaaaaaaagtaaacatgttgtagaagtcacaatctatgacagtcttgttctttgccttctccattgcttcttagtaatctgtaaagctattgtttctgat

SEQ ID NO: 46785 - DNA, 201 bp, Homo sapiens
tccttactgacaacaccccaaaacttatttttaacccactttcttttgttactttttttccttggcttaagcattgattacacatttattaatagacaaartttctagtagtcaattatgtaccttccaatattgagatcaatttttgctcaattctcaaaattttgagaaaagcaactgatccaaattttatttcttcac

SEQ ID NO: 46786 - DNA, 201 bp, Homo sapiens
ttaattttcctgggttagtaccaccctcagaggaactagcagaagccccccccgccaaaaaaaattatttcctctctgtaaaaatgcaaattcgacccagsccttaactccccaagatagagttctaaggaaaatgaatagcttacaaagaacaaaggaaggaaggacataggaaataaaccactactgagaataggagaa

SEQ ID NO: 46787 - DNA, 201 bp, Homo sapiens
atatcctttttatgcaaataactacccttttaagcagatatcttctctaaaaatgtcagtctttgtatatctttttgaaggctttcttttaatttgggtcyacctaactacttatgctggacttcaatcctaccctctccaaagattagaatttggaatgcacagagatgcttacctatttattttcataagcaaatacaa

SEQ ID NO: 46788 - DNA, 201 bp, Homo sapiens
gtagtgatatgaatacactgaccagaataaagtccaagccagaataaaatccgaaagaaaaggattgagatcacagattgtgttagatgagttctaacatrttctaatcaaagttctagaaggaaatagtagaatggggaaacacagtattcaaagacgactaacagaacgttcataacagcactgtttgtaatagtgaaa

SEQ ID NO: 46789 - DNA, 201 bp, Homo sapiens
gtgccatgaaccaaggattatagttaatccaattccgtatactaaaagtacattgaggaggtaggaggagagagagaggttgagaattttctaaaattgtygaagtctaacaattcttagaatcaggaaataaaacaattctcaaataggatttttaagaaatgatacataataagtaacaacaagacacatcatagtgaa

SEQ ID NO: 46790 - DNA, 201 bp, Homo sapiens
tgtatgctgtgctatgtgtgcccacataatacataggaaatgctaaattggtatcgatttctgaaaataaaaatgcctgttcttttttcaaattatgcaawcctgataagcctactaggcatatacatatatatccttttaactaatcacgttatcatttttttccaacaaagaatataataaatgaaagtcaccttctgg

SEQ ID NO: 46791 - DNA, 201 bp, Homo sapiens
tttcactagcaaactggtttcataagcataatcttgccagactgtatgtcatttttctccctttattgtaggaaatgattgagtgtgtgtgttgaggaaasgattgatgctttgccacctttggagggagcaattattttgtgagaaagcttgagaataattaatttatgttggattgaaaaataattggaagcatttttc

SEQ ID NO: 46792 - DNA, 201 bp, Homo sapiens
gattagtggcagttgacttggagtttcagcccttcctcaggactttttggcatagtaataacattgcaaagttgctcacatttttcatacccttccatttkatctgtgtgtgtgtgtgtgtgtgtgtgtgtttgtgtgtcttgtatgtggaatattcttacagctagtgacttaatatgctgatgaacacagagagctgga

SEQ ID NO: 46793 - DNA, 201 bp, Homo sapiens
taaaatggacagaaaatatctaaacaattgttgtgaagttttcttcacactgtattgctaaacaggatgtctttattggagctatgtgactacattcttcrtagaatggcatatggaactctgcccagctttaatgccagaggtcagaatgtgcccacctcctggcagctgaggatgaatggcttaagtgacaaattccga

SEQ ID NO: 46794 - DNA, 201 bp, Homo sapiens
ttagatgtttctaagagctcaaggaacttggaggaagttgtcagatagttggactgtggaaggtcctgtgcaggttagggactatctgagggtccagtgayagcacgaattctcttggccttgtaaattgctcttctgctctacagttggaaggtggcataaagctgaggacacagacaaatgaattgatattctgagctg

SEQ ID NO: 46795 - DNA, 201 bp, Homo sapiens
gaagacaacagagcactcgaatgttatcatgggccgtttctcagcctaacttcagcattatgagacacttattaagaattttttaaaagtttatcacagtrttagagtgaaataatagggatatgagataaatcaacagagtgttgctggaatgggataaagagaagataaaaatcaatcaagaaaaatgcttcccctttg

SEQ ID NO: 46796 - DNA, 201 bp, Homo sapiens
ctccatcatttgttttttcatatttagatctggtcttcctaaagagtttatgaggatagaaactgtgccatatactttactggatctcctgtagtgctagrcatattggaccttagatattttcaaaataatgtacgtaggaatgaataagctattcttaggcgcaaattgtttgtttattctttttgtattagcatttcc

SEQ ID NO: 46797 - DNA, 201 bp, Homo sapiens
tttctatgacattaaagaggtctggtgtgaaaattgccactaccctacttccttgctattcctttctgtcagcttcttgaggatatctggatgtgaagcarcttttcttacccttggaacctttgtctacagttctcccttcctcttcctcttcctctatctcactcattctctcctgttttattaagggccgaacattat

SEQ ID NO: 46798 - DNA, 201 bp, Homo sapiens
ctacatttcaagtgctcagtaactgcctgtggctagtggctaccatattgggcagcacattattaggcagtcatagaactgacaaaaaagatttagcacayttcttgattaagatgatgctaagactgtattttggaaattataattctgtatattatttctccttctctatttcttttgtttattttagctattttagat

SEQ ID NO: 46799 - DNA, 201 bp, Homo sapiens
gacttagcgcggtaactggacatttcaaccaatgttgactgaaatgaactgaatttctccagattgtcaactgggcgtgagaactatgtctgagaacaccrcagatataagaagaagaacataagactattatttatattatagattttacatttgataaaggtttaatctaccaagttcttttaactggtttgtttctgt

SEQ ID NO: 46800 - DNA, 201 bp, Homo sapiens
tccccaaaggctgagccacaagctgctctttccagacgctgtgtttagattccttgtgagccctcaagtgctgcatccgctgagaattggtgttgcatttmattgatgtgttccgcctcttttggtcagataaaccgaagcataaacattgtgctgacaaacccgggtcgcagagtggtttttggtcgctgaactgcccaa

SEQ ID NO: 46801 - DNA, 201 bp, Homo sapiens
ggtaagtatactattgttattttacaaaggaaagtacaggtaaaagagagttcagtaacttgtttaaggtcctgtagctagtgtcaagactaaactctttyttacttgtacttcattgtcttttaatcatagcacattattaatgtggaaattgataaagacatttttgttggaagtttaattgaactttgaacttgaaaa

SEQ ID NO: 46802 - DNA, 201 bp, Homo sapiens
gtaaatgtccttctcctcctgtgtttaaaacagtgttgagtttgtttttggaaatctgagtttcagagtaaggcttctagaatttaaaaaatcaccttaayatattatttacaaaaatatatcatagtatctcagcattgatttttcaactttatattagcttcatgctttttagagaatacaaagaaagtgtgtacttct

SEQ ID NO: 46803 - DNA, 201 bp, Homo sapiens
caggcacaagccaccatggcctgtgatgagaatttttaagaaaagccattttatcaaatatttcatttaactaaaacacctttaattcagaaagcattatrtctattctaaaagtgtttatatggattaaatagacataaacaattggcagaggaaaaaacatagtactcactaacaatagtatttgtagaaattttgaag

SEQ ID NO: 46804 - DNA, 201 bp, Homo sapiens
ttaaattagtccttctttccttttacagctgccagtggagggcatattgatcagagaaaggaccaaatagacaaaaatgcagaaaacagatctatggtgtraagtgccgaagtaattgatccttacctagtaaatattcacatatgttaacgtaagttaatactgttaggaaactgagaccaatttcataaacaatatgca

SEQ ID NO: 46805 - DNA, 201 bp, Homo sapiens
aggcagttaattttatcagagaaaaaaattggaagataaaagctttggaagatatcagagcaaaaattggaagataaaaaaatgagaggaatagcaaaaamaaatttttaaggtaaaactataaattttcttttgaaattgtacatattcgttggactcaatagtcatcttctcttactggaactaactaagagttagtcc

SEQ ID NO: 46806 - DNA, 201 bp, Homo sapiens
tgcgtcagaaacctagctgttgaaccactgtgtgaatctttaggccatgaggcttaattctaattttaagcagatttggctcttataaatcctaaagagtkataaagccttgagttattttcttgaaaatatctgataattcaatttataatttattcttaacactctctttaaaaaaaaaagaaagaaaacttaaagtat

SEQ ID NO: 46807 - DNA, 201 bp, Homo sapiens
gagattagcctggacaacagagtgagactccatctctaaaaaaacaaaaaaggaccacacacacacacacacacacacacacacacacacacacacacacmccgtcagaatgaataccatcaatctataaactgcatttgattcctctttttcttttttctttctttttttttttgagatggagtctcactctgttgctaa

SEQ ID NO: 46808 - DNA, 201 bp, Homo sapiens
aaacgtgggggtttgtggtatatgatatatacaaaatattacctttataaattctaaaaaaaatctgaattctgaaatatatgtggctccaaggacttcarataaggaattgtggacttgcatatctattgactgttgggaggaaaactttaagaggtattatgagtgagctataacctcctctttaataagaagagtcag

SEQ ID NO: 46809 - DNA, 201 bp, Homo sapiens
gattagcctggacaacagagtgagactccatctctaaaaaaacaaaaaaggaccacacacacacacacacacacacacacacacacacacacacacacacygtcagaatgaataccatcaatctataaactgcatttgattcctctttttcttttttctttctttttttttttgagatggagtctcactctgttgctaagg

SEQ ID NO: 46810 - DNA, 201 bp, Homo sapiens
gggtttgtggtatatgatatatacaaaatattacctttataaattctaaaaaaaatctgaattctgaaatatatgtggctccaaggacttcagataaggarttgtggacttgcatatctattgactgttgggaggaaaactttaagaggtattatgagtgagctataacctcctctttaataagaagagtcagtaactgtt

SEQ ID NO: 46811 - DNA, 201 bp, Homo sapiens
gattgtgactcatgaggatggtacataagaagaaaatgaaattctgattatttacttacgaatgattttttggtttctttttgagacagggcctctctctstctctcactcaggctggattgcagtggtgcaatcacggcacactgtagcctcaacctgcctggctcaagtgatcctctcacctcagcctcctgagtagct

SEQ ID NO: 46812 - DNA, 201 bp, Homo sapiens
taaattgcatggactaaggtttactttttgtgctgtaaagtttcataggttttgacaatgccttgtgccatgtatttgccaatacatactaagatagtttgagctatttaattttatattattatattgtattattttatgttatttactagtacaatgcattgtcaaaacccataaagtaaggttttgaaatagtccaaa

SEQ ID NO: 46813 - DNA, 201 bp, Homo sapiens
aggagaatcgctggaacccgggaggcagaggtggcagtgagctgagattgtgccactgcactacagcctgggtgacagagcaagactctgtctcaagaaamacacacacacacacacacacacacacacacagagagagagaaattggatacagagtcaggacccatccatgtgctgtattcaggagatccatcgtatgtg

SEQ ID NO: 46814 - DNA, 201 bp, Homo sapiens
agtttgagctatttaattttatattattatattgtattattttatgttatttactagtacaatgcattgtcaaaacccataaagtaaggttttgaaatagwccaaactattttcaattatttaatatttgactttttttttttgtcttttgagacagggtctcactctttcacccaggctggagtgcagtggcttgatcac

SEQ ID NO: 46815 - DNA, 201 bp, Homo sapiens
tgtattattttatgttatttactagtacaatgcattgtcaaaacccataaagtaaggttttgaaatagtccaaactattttcaattatttaatatttgactttttttttttgtcttttgagacagggtctcactctttcacccaggctggagtgcagtggcttgatcacagttcactgcagccttgatttcctgagctcaa

SEQ ID NO: 46816 - DNA, 201 bp, Homo sapiens
cttccagaacttgcctttttccccaagtactttccttgacctcttctgcacaatccactgtgagtgcaaggggaagaaataagtaccccctctcagcctgyagtcacatcttccctctctctatatggctatggacgcagtcccagaattctggatttcttgcatgtctgcctttaataagaaagcagagtttaaataggc

SEQ ID NO: 46817 - DNA, 201 bp, Homo sapiens
acctagagctgtcactacaaatctcactgtgagtgttaagaattcatgaagaaattccaatttattgatttgcaaggatttgcctatgaaggtagagagaytgtatcttaaaattgccattccattaaaggctaaaaaagtcatttcaatgactaaagttcttatatcttttagttgactatttgtaaagtgaactttttt

SEQ ID NO: 46818 - DNA, 201 bp, Homo sapiens
caaggaatgagcaggactttaacattctagtcctctgtgtcagctgtctgtgttacagaatttatttgaactatagagtccctaaatcactacagcataascctcagggaaaataaaaactcaaaaatgtataaacaaactatactaaaattgagctactgagcaccttagtatacttgcttccctttagttaacgtattt

SEQ ID NO: 46819 - DNA, 201 bp, Homo sapiens
gattactcttctttttcaaatccccacctcaaggtattctcctcacacttccgccacccacatacacccctgatgctccatccaccaagcagccatatccrcaggccacaggtgcaccatcctctgccctgtttctgcacctttgcatgtgtagttcctcctgcctgcaagatgctgtcatttattctataccggatgaac

SEQ ID NO: 46820 - DNA, 201 bp, Homo sapiens
aacagaactttcttcctcacagatataagaaaatgtcccacttttcctgattgatttgtgcttattgattactgaacttagagctcggaaacttgaatttycattttatgaacgctctcaatttattgtatggccttggaaaaattatgaaacctttttgactcttagcttttgaaaaagcaaataataagtctacttata

SEQ ID NO: 46821 - DNA, 201 bp, Homo sapiens
tcagtaacttctccgaaataggtaataatagtgctaactgggaggtatttaggacataaaggtgttggggtgtgtgtgtgtgtgtgtgtgtgtgtgagagwgagagagagagagagagagagagagagaaataagacatttttgctaaagaatatctgaagaaaaaaaaggccaaggacaaaatgttgtagaaaaaaccgg

SEQ ID NO: 46822 - DNA, 201 bp, Homo sapiens
gacaatgtgacaattgctcttttaaattcctgactgagcacacaggaggatgagaaattcctgggtaagaaaataaaaagggagctggaaagcagagggcytatggtgaagccacagctgtccttggggcatttgctatcactgcacacaagagctttggatgtacttagacatatggagataggagaaaatacttcagcc

SEQ ID NO: 46823 - DNA, 201 bp, Homo sapiens
aggaaagattttggactatatttaaaaaatttaaagaaataaaagagcaaatgacaaatttgagaaaggaacactttctaaagacaagtcatatttttaaratagccaaatagaacttgaaaaatgaagtgcagttattgaaattaaaattttatgaatagattaaacagctggagagagactacataaaataggttctac

SEQ ID NO: 46824 - DNA, 201 bp, Homo sapiens
tataaaccagctcctatacacgattggatatataactgaataaattacctagaatgtaacacagaaagatggaaagataggaatgtatataggacacgaasgacaggctgtgaagatctaatatatgtttaatcatcattctagaggagaataggagaatgactaaaatgtttccagaactgatgaaagtcatgaattcta

SEQ ID NO: 46825 - DNA, 201 bp, Homo sapiens
gacactggtaataatctagtaaataaatacataatcacaagtagggttacgtgctacgagagacacaaacatgaagtcataggggaaggcagaggaagtcrggaaaactatgggatggtccagaaggactgaggaataacagttaagccaagaacaaaaggatcaagagaagtcagtttcattcctttctctcttggctac

SEQ ID NO: 46826 - DNA, 201 bp, Homo sapiens
gaaaaagaagtttttctgtttttgtttttgttttttttttatagacttcattgctccactcacaagcaagaataagatgtgtaacaagaataagatggaartgagcgttgttgaacacctggataagaagtcaaagagagtagggtcttgagataatctcaccattctacagcttcctataatgttgagttcattaatggt

SEQ ID NO: 46827 - DNA, 201 bp, Homo sapiens
atacacgattggatatataactgaataaattacctagaatgtaacacagaaagatggaaagataggaatgtatataggacacgaaggacaggctgtgaagrtctaatatatgtttaatcatcattctagaggagaataggagaatgactaaaatgtttccagaactgatgaaagtcatgaattctaagatctaggaagaac

SEQ ID NO: 46828 - DNA, 201 bp, Homo sapiens
agccacttttaacattcggtacagatttatcttatgctatattgtattatactgttatatgatttaaaagtgtgtgtgtatatacatatatatatatatakagagagagagagaaatcatattgtacatttgggcttgttagctttctttttcacttaatagtagagagtgaattttttttttcatatttactattctgtt

SEQ ID NO: 46829 - DNA, 201 bp, Homo sapiens
tggcagtgagctgagattgtgccactgcactacagcctgggtgacagagcaagactctgtctcaagaaacacacacacacacacacacacacacacacacrgagagagagaaattggatacagagtcaggacccatccatgtgctgtattcaggagatccatcgtatgtgcaaagacacacatagactcaaaataaaggga

SEQ ID NO: 46830 - DNA, 201 bp, Homo sapiens
gcacccaatacaggagcatccagaattcataaagcaagttcctagagacctacaaagagacttggacttccacataataatagtgggatactttaacaccytactgccaatattaggtcaacgagacagaaaattaacaaggatattcaagacttgaattcagctctggaccaagaggacctaagacatctacagaactct

SEQ ID NO: 46831 - DNA, 201 bp, Homo sapiens
tagttgtaataattatctgtgcttcaataaactggtttagaccaagatagactctacaagtacaacagaaacttatgtttacactgtgtataagggggtcrttttctgctgtacaacattagtatctagtctgcatgtcagttttgaagtagatgcctttttctaactcaaaaagaggcagttaaggagtaattattgagc

SEQ ID NO: 46832 - DNA, 201 bp, Homo sapiens
gtccccagttgtgaccactaaaaatatctgtagacactcccaatgtcccttaggggagtaaaattcctctccacgtgagaaccactgcactgtagtattcraaagaattcccttccatgtaaaaccatgaatttcagcattgagccttgctacaagcaagatccaatttattattttagaaaacctcaaattgactaggaa

SEQ ID NO: 46833 - DNA, 201 bp, Homo sapiens
tttacctgtgggtttcagatgagctagcttgccagtacccttcagaaaaatcaacttttgaatgctaagctgacttgttaagcagggtggagttgccgttrgtattttccagctcgcacgaacaaggcagccggatgagaatgagtagcccgagctggatggccggcacatgggcagcagggcttaatgagactacattag

SEQ ID NO: 46834 - DNA, 201 bp, Homo sapiens
agaggaagtgaaattatccctgtttgcagatgacatgattatatatttagaaaaccccatcgtctcagcctgaaatctccttaagctgataagcaacttcygcaaagtctcaggatacaaaatcaatgtgcaaaaatcacaagcattcctatacaccaataagagacaaacagagaaccaaatcatgcatgaactcccatt

SEQ ID NO: 46835 - DNA, 201 bp, Homo sapiens
gaggaagtgaaattatccctgtttgcagatgacatgattatatatttagaaaaccccatcgtctcagcctgaaatctccttaagctgataagcaacttcarcaaagtctcaggatacaaaatcaatgtgcaaaaatcacaagcattcctatacaccaataagagacaaacagagaaccaaatcatgcatgaactcccattc

SEQ ID NO: 46836 - DNA, 201 bp, Homo sapiens
tgggtccctgccatgacatgtggcaattgtgggagttacaattcaagatgagatttgggtggggatgcagccaaaccatatcacaggttatgatgtgtgtrtatgtgtttgtacttgtatttttatgtgtatgtgtatgtatgtggaggcatctgtgtgtttgggagaacaaggaaaagggctgtgatgttcctgaaagtg

SEQ ID NO: 46837 - DNA, 201 bp, Homo sapiens
gagttggaacagaagcttggaagtgagaaacactgtgaggttgctggagtatatagtgtgtctgtgtgagtttaggttggagtgggatacacaaggagctygtggacaaagggaatccatcaaaggtgttggagcaaggggatggtatagtcagctttacatgctgagtggattgctgtgattacaatgggcaggatagat

SEQ ID NO: 46838 - DNA, 201 bp, Homo sapiens
tgttagacttaaaaaatataaagaagccaaaatatgaaattttacaatactaaatatggtgaaacactgttaaagttacactgtggtttgctctaaacttytagatcaaatattgtgaatgcaggaaaaacaattggtttaggagttcacacttatgttactaaatgaatgcttcttgattacatccacaaagcactcagt

SEQ ID NO: 46839 - DNA, 201 bp, Homo sapiens
attgctttaattaattttaaaagattattctagttgcttgttcatttatttaacaaataatgaatgctcacttactatgtgtcaagtaccattcttatcawcaggaatacagtggtgaagaagacaaaattcttggccttctagagcttgtattctaatgggggaaacagccagataacagaaaacccattagtataatgt

SEQ ID NO: 46840 - DNA, 201 bp, Homo sapiens
ttgctttaattaattttaaaagattattctagttgcttgttcatttatttaacaaataatgaatgctcacttactatgtgtcaagtaccattcttatcatmaggaatacagtggtgaagaagacaaaattcttggccttctagagcttgtattctaatgggggaaacagccagataacagaaaacccattagtataatgtc

SEQ ID NO: 46841 - DNA, 201 bp, Homo sapiens
ttcactttatagatagtatcctactatttttatatagaataactttctcttgtataccctgagacatccaaatttgtttactttttcctccaggttttacytccagtattttaatccgttttcttaatatctgctaaatattcaagctctccctttcatttgagcagtagagcctcaggcaaaatgcagagcccctgcaag

SEQ ID NO: 46842 - DNA, 201 bp, Homo sapiens
tgaagaagacaaaattcttggccttctagagcttgtattctaatgggggaaacagccagataacagaaaacccattagtataatgtcaggtgttatgaagraaaataagtgctgcaaagaaaaatgaaacagaatacgggaagagagattgattgggaatgctgtcttagacagacggcctaaggaggcagcatttaagca

SEQ ID NO: 46843 - DNA, 201 bp, Homo sapiens
ggcctaaaagaaacatctttgacccaaccctggtatcttgataaacaccgtgccattcccttcatttttctgccaaactttcacagtatgacttatacttyctttcagccccctttccacattctgcacctcaccctcctaatccagcttctggcccccctttaatcctatccacaaacccccatccccacagaaaagctc

SEQ ID NO: 46844 - DNA, 201 bp, Homo sapiens
gtgctattgagatcattaaacttgagtattcattaaaaaaactcatgaagaacacatacttaacaaatgtttattgattacctttcctcatgtgaaagctkcatttttttaggtttctgaaggataaacaaagctacacatatgacaaagtgcttacactaagcgggttatactatagtgtccaacaggtatggtgagcat

SEQ ID NO: 46845 - DNA, 201 bp, Homo sapiens
gcaggagctggcatcgattacatggtgccgaaatagggctgtggtgattgtgtggtaggttaggaagccaggtggctgactgggctcccctcttcgatttyacacataccctctgtattagtccattttcatactgctgatagggacataccagagactgggtaatttataaagaaaaagaggtttaatgaactcacagtt

SEQ ID NO: 46846 - DNA, 201 bp, Homo sapiens
cacatacttaacaaatgtttattgattacctttcctcatgtgaaagctgcatttttttaggtttctgaaggataaacaaagctacacatatgacaaagtgsttacactaagcgggttatactatagtgtccaacaggtatggtgagcatatgttcaaattgaggatggctaggaaaaaaatttacaagacaaatacatggt

SEQ ID NO: 46847 - DNA, 201 bp, Homo sapiens
tatacagttgtctttcaaaccaaaaaatggataaaattgccccggaagaattaaaaacaacaacaacaaaagtgaaaagaaagtaatcctgggaagcaccrgcattgaagtgtcaggagacagagaagtccataaagagaaggaaggggtcaaaagataggaggaaaagtgagtggcatcagggaggaagccaaggaggta

SEQ ID NO: 46848 - DNA, 201 bp, Homo sapiens
gagactggatccagttcaagagcagagtttcaagctggagttatgaatcattgagttatcagtctatagtggtatacaggtttaaactgtgctcctcaccyctccaagaaagatatatgtaaagcccaacagtctactctcccccatcccatacctgtgaatatttggaaataaggtctttgcagatgtttttaagttaag

SEQ ID NO: 46849 - DNA, 201 bp, Homo sapiens
gatttagcaaaggtggcttgggtatttattctcacctgttgggcactacagtataacccttttaatgcttagccaaatccttaaatacttcctggatactmtaatagcagagttacccacaggagtgatatgaagaaataatatgactgaggaaggtatacatactgcaactgtagagtgaggaagaatagtggaggtgaa

SEQ ID NO: 46850 - DNA, 201 bp, Homo sapiens
tcacaatcatggcagaaggcaaaagccatgtcttacatggcagccaacaagagagaaatgagaaccaaatgaaagaggtttccccttataaaaccatcatrtcttgtgagtcttattcactaccacgagagcagtatgggggaaaccatccccatgattcaattatctcccactgtgtctctcccacaacatacgggaatt

SEQ ID NO: 46851 - DNA, 201 bp, Homo sapiens
tatcccttctcctatgaaatgtctgatgtgtcttttgcccattttagggaaccattgtattattttcttattgatttttaggattttaaaaatagtctggrtattagttttgtttgtattatatatagtacaaatattttctgcttatctatctcttgactttcagtttttttactggatattataaaacaaaaagttata

SEQ ID NO: 46852 - DNA, 201 bp, Homo sapiens
cttataattcccatatgtcttgggagggacctggtagaatgtaattgaatcatgggggtggtttcccccatgctattctcatgagaatgagtaaattcttrcaagatctgatggttttataaggggcatccccctttgcttggctctcattcttcttgctgctgccatgtgaggagggacatatttgcgtcctacaatacc

SEQ ID NO: 46853 - DNA, 201 bp, Homo sapiens
cttacactttttagtctcaggatctgtttaaactcttaaaaatattgaataccccttaggagctttgtttaagtggactataaactacatttatcaacacraaacataccataaattaaaatggagaattttaagaaacatgtattaatattaaaaataataatgaatcccttatatgttatcctaagtgatacatttttg

SEQ ID NO: 46854 - DNA, 201 bp, Homo sapiens
caacatgctccaaaacaaccaaagggtaaattaagaaattaagaagtacattaaaaaatttcttgaaacaaatgaaaatataaacataatatatcaaatcstacgcaatacagcaaaagcagtagtaagaagaaagtttatagcaataaacaccaacatcaaaaaagtagaaagatttcaaataaacaacttaatgatgca

SEQ ID NO: 46855 - DNA, 201 bp, Homo sapiens
caccatgttggccaggctggtcttgaactcctgacctcaggtgattcacccacctcggtctcccaaagtgttgggattacaggcatgagccaccatgcccrgccctttgcccactttttttaaattctttttattttatttttatttttgagacagagtcttgctctgtcacccaggctggagtgcagtggtgcgatctca

SEQ ID NO: 46856 - DNA, 201 bp, Homo sapiens
aaaccattagctaaactaagacaaaaagacccaaataaataaaatccataatgaaaaaatgaaacattacaactgataccacaaaaaagaaatattacaamtgatacttcagaaatacaaaggattattggagacttttatgaagaattatataccaaaaaatggaaaacctagaagaaatggatacattcctgggcacat

SEQ ID NO: 46857 - DNA, 201 bp, Homo sapiens
tgcatctcaaaaaaaaaaaaaaaattttttttggaggctctgagggagaatgtgtttcctgccttttccactttctagaggctgcctgcatttcttggctyatggtcccctttctccatgcatctcggggacccttccccagttatatctccctctgatgcagattggaaatgttctctgctcttaagaattcatgtgagt

SEQ ID NO: 46858 - DNA, 201 bp, Homo sapiens
tttttatttaatccaatgataaattatgagcattacttgtaagaaattaaaattagatggcaaagtactaaaaagagccccaaagtagaatttaggagaamtctgggttctaaatctggttctgctacagactctgttgacctaaggtgagtctctttcatgtgtctgtttcctccatatgtaaaatactaattgtagtaa

SEQ ID NO: 46859 - DNA, 201 bp, Homo sapiens
aaaaaaaaaaaaaaaattttttttggaggctctgagggagaatgtgtttcctgccttttccactttctagaggctgcctgcatttcttggctcatggtccyctttctccatgcatctcggggacccttccccagttatatctccctctgatgcagattggaaatgttctctgctcttaagaattcatgtgagtagagtgca

SEQ ID NO: 46860 - DNA, 201 bp, Homo sapiens
cttatatgacaaaaccacagctaacatcatactaaacaaggaaaatctggaagctccttctctaagaactagaacaagacaatgatgtccactttctctaytcttatttaacatagtactggaagttctagccagtactatttggcaagagaaagaaatgtggctagttccagttgtgatgtgctgtaagtgtaacatata

SEQ ID NO: 46861 - DNA, 201 bp, Homo sapiens
ttttaaaaacacggattcctaaattcacatatttgattatgggctcttcttagagattttaaatatttttccagaggtatttttactactcaaaaactttytaaggctgggtgtggtggctcacacctgtaattccagcactttgggaggctgaggcaggcagatcaggagttagaggccaggagttagagatcagcctgg

SEQ ID NO: 46862 - DNA, 201 bp, Homo sapiens
aaaaaaaaaaattttttttggaggctctgagggagaatgtgtttcctgccttttccactttctagaggctgcctgcatttcttggctcatggtcccctttmtccatgcatctcggggacccttccccagttatatctccctctgatgcagattggaaatgttctctgctcttaagaattcatgtgagtagagtgcatccac

SEQ ID NO: 46863 - DNA, 201 bp, Homo sapiens
agagagagagagagaaatcatattgtacatttgggcttgttagctttctttttcacttaatagtagagagtgaattttttttttcatatttactattctgktacctcattcttaatgattacttagtctacagtgggtgataaatcctctctttttggatgtttatattatttctgataacaatttcattttaactgttgt

SEQ ID NO: 46864 - DNA, 201 bp, Homo sapiens
tgatggaggaatctgctgagcaggctcagcgccgggatgagatgcttcgaatgtatcaagcactgaaagaagcccttgggataattggggacatcagcacrgccaccgtgtccactccggcaccccctccagtggatgactcctggatacagcactctcgcaggtaagaagatggccccggccgggtgcggtggctcgctc

SEQ ID NO: 46865 - DNA, 201 bp, Homo sapiens
tagaggccaggagttagagatcagcctggccaacacggtgaaacaccatctctattaaaaatacaaaaattagccgggtgtggtggtgcgcacctataatytcagctacttgggagactgagacatgagaattgcttgaacccagcaggcagaggctgcagtgagctaagatcatgccactgcactccagcctgggcgaaa

SEQ ID NO: 46866 - DNA, 201 bp, Homo sapiens
catgcatctcggggacccttccccagttatatctccctctgatgcagattggaaatgttctctgctcttaagaattcatgtgagtagagtgcatccacttrgataatctagaataatcttcccatcccaaggtccttaattatatctacaaaggcccatttgccacttcaggaaacattcacaggttccagggattaaaat

SEQ ID NO: 46867 - DNA, 201 bp, Homo sapiens
taatagagatttgttgagatgctatacaaacaactgtatcaggagaggggaaggcaggtcagggaaggcttcactgaagtaagtcttaaatgattagttartagtctcagaagatgaccaaaatgacattgagaatgtaattgcatgtaacaccatgctaaacactgtatgaaacaagttaagtgggtgtgacctgcgccc

SEQ ID NO: 46868 - DNA, 201 bp, Homo sapiens
actgagacatgagaattgcttgaacccagcaggcagaggctgcagtgagctaagatcatgccactgcactccagcctgggcgaaagagtgagactctgtcmcaaaaaaaaaaaaaaaaaaaaaaaaaaaaattctaactcctctcttagagcttgccttcaacctgcagtgtatttaaaaatttatgtatataatatgtat

SEQ ID NO: 46869 - DNA, 201 bp, Homo sapiens
aaagtaatttatagattcagtgctacctctatcaagctaccactgactttcttcaaagaattagaaaaaactactttaaatttcatatggaaaccaaaaasagcccatgtagccaagacaatcctaagcaaaaagaacaaagctggaggcctcatactacctgacttcaaattatactacaaggctacagtaaccaaaaca

SEQ ID NO: 46870 - DNA, 201 bp, Homo sapiens
ctggctagccatatgcagaaaactgaaactggaccccttccttacaccttatacaaaaattaacccaagatggattaaagacttaaatgtaagacccaaarccataaaaaccataaaagaaaacccaggcaataccattcaggacatgggcaaaaacttcatgactaaaacaccaaagcaatggcaataaaagccaaaatt

SEQ ID NO: 46871 - DNA, 201 bp, Homo sapiens
tgttgtggctttgtatttattcctgagtgtcttttccttcttccaggctaacctccaagtggattaggatcatgttagtgacttccagggcagataccttkctcacagtaggtgcccatcaaacctttgttgaaaaaatgacatttattgactataatctagaaagagcaaaagcaattattttgtgtgtcacaattacta

SEQ ID NO: 46872 - DNA, 201 bp, Homo sapiens
gaaatataaattattctactataaagacacatgcatacatatgtttattgatgcactatttatagtagcaaagaattggaaccaacccaaatggccatcartgatagactgctaaagaaaatatggtacatacacaccatggaatactatgtagccataaaaaggaatgagttcgtgtcctttgcagggacatgaatgaag

SEQ ID NO: 46873 - DNA, 201 bp, Homo sapiens
tctcagcactttgggaggctgtggtgggtggatctcttgagcccaggagtttaagaccatcctgggcaacatggtgaaaccccgtctcctcaaaaaatagaaaaaaaaaaaaagccagcgtggtgtcacgcacctgtagtcccagctactcgggaggctgaggtggatcacctgagcccaggagatagaggttgcagtgag

SEQ ID NO: 46874 - DNA, 201 bp, Homo sapiens
aacaaatataatgaatgataactagtgtgtgattaggtaaagagagggctccactttttataggatggatgagacttagtacatttgcagaacaagagaargtggcagtgttgaaaggtgcggactttaagaggtgattggatcttgaaggctctgccatcatgaatggattaataccttcgtgggttagtggattaatgg

SEQ ID NO: 46875 - DNA, 201 bp, Homo sapiens
acatttgcagaacaagagaaagtggcagtgttgaaaggtgcggactttaagaggtgattggatcttgaaggctctgccatcatgaatggattaataccttygtgggttagtggattaatgggttaattaatgggttattatgagggtggaactgatgatttcataagaagaggaagagaaacctgagcagatacattagga

SEQ ID NO: 46876 - DNA, 201 bp, Homo sapiens
taaagctctcctcagcaaatgtaaaagaacagaaattataacaaactatctctcagaccacagtgcaatcaaattagaactcaggattaagaatctcactsaaaacccctcaactacatggaaactgaacaacctgctcttgaatgactactgggtacataacgaaatgaaggcagaaataaagatgttctttgaaaccaa

SEQ ID NO: 46877 - DNA, 201 bp, Homo sapiens
gtaagtgtaacatatacattagatttccaatactttctacaataaaagaatgcaaaatatcttattaatacattttattttcattaattgattacatattstattagtttgctagagatgccataacaaattatcatagactaggtgggttaagcaagataaatgtatttttcacaattctagaaggtagaagtctgagat

SEQ ID NO: 46878 - DNA, 201 bp, Homo sapiens
gataatctagaataatcttcccatcccaaggtccttaattatatctacaaaggcccatttgccacttcaggaaacattcacaggttccagggattaaaatrtggacatctttgggaagggcattatagtgaaagagagggacatgtaaattagtgacttaatgcaatatgccaagggcaagaatgaaaatctattcagggt

SEQ ID NO: 46879 - DNA, 201 bp, Homo sapiens
tttgcttctcaagggcagagaccagtgtgtaaagcttaatatccttgttcatagtatccctactttatgggttcattgttttccccacatattaattaggraagaaagtgaatttattgaatgaacccctaaccaaaccacacatatttcccatttctgtgtcagtgctatcattttctaattatgcccaacagcagtaac

SEQ ID NO: 46880 - DNA, 201 bp, Homo sapiens
aaaacggttgtttgagaaatgatggttgtaactgaggcactggcagcaaggatggacagaaaatggcttctaggaaggtagaatgggtattatttgggtamcaatttggtgtaggggatgaaggagagagagggaaaaatgaagtgagaatgacttccagattctggattgggattgggcaggcttgtccctgagataggg

SEQ ID NO: 46881 - DNA, 201 bp, Homo sapiens
atttgaaaactgatgactgttaattattttctttgtctgccttcctaggaacatttcagagaaagctattatttttgtcttttgaccagcaaatctatatrtctttctttacagcctggtaatttcagaacgaatagaagtgtttgtatctgtgggtttgacacactactgaatcacaaagtctttggaataattctcaaa

SEQ ID NO: 46882 - DNA, 201 bp, Homo sapiens
gtatttaaaaatttatgtatataatatgtatctatgtgtgtgtgtgtatatatatatgtaatatagatttaagttttgtaactagtaggtgttatttagtsttagtcttatgaatgaggtgggaaatcaagatgagtaatactctatctaaaatgaagtatgactgtagattactgagtctgatttttttcagacttggta

SEQ ID NO: 46883 - DNA, 201 bp, Homo sapiens
tagaagtgtttgtatctgtgggtttgacacactactgaatcacaaagtctttggaataattctcaaaagccatcacttttagcccactttctcattcattratgctctattctttttctagcatgtctagcagaattctcttgaattcttgcagtgaattggtgctccttaaatacctgctattttggaatagttttgact

SEQ ID NO: 46884 - DNA, 201 bp, Homo sapiens
agaatgacttccagattctggattgggattgggcaggcttgtccctgagatagggagcacactatctctagtgtgagaatgtatttataggattctttgaytgcaagtaaaagaaatatgagttgaattaggttaggcaaagaggagaatttattataagtttattggcggggaggttgtacaaggaactgaggacaggat

SEQ ID NO: 46885 - DNA, 201 bp, Homo sapiens
atttatttctcatagttctggaagctgagatgtttaagatcaaggtactcattgattctgttcctgatgaggactctcctgccttgtagatggccaccttyctgctgtgtcctcacatgatgaggagggcagtggagggggaagagagagacagagagatgggaggggtggggggagccagccagcatgagagctctctga

SEQ ID NO: 46886 - DNA, 201 bp, Homo sapiens
caagctcgtatatataaatattgtaaactgagatgtcgcttatgtcatttacatcatttatctcaaataataaaaatggttcactttttttgagcactacwatatgtctgacactgtggtaagtgccttttctgcattattctcacttggtgatatcacacctgccctgtcctataaaatgtataatgtgcatatattacc

SEQ ID NO: 46887 - DNA, 201 bp, Homo sapiens
caagtaaaagaaatatgagttgaattaggttaggcaaagaggagaatttattataagtttattggcggggaggttgtacaaggaactgaggacaggattayagttggacatcagacatgaacaagattgaggatacaggtactatccggatcttccctcttctttccctgtgctcctctccttgtgtctttttacttttct

SEQ ID NO: 46888 - DNA, 201 bp, Homo sapiens
ctttcaccatgattgtaagcttcctgaggaatgtggaactgtgagtctattaaacttctttcctttataaattacgcggtctcaggtatttcttcatagcrttgtgagaacggactaatacaattactttctccaaatatagccacactggggttcagggtatcaacatatgaatttgggggaggcacagttcagcctatt

SEQ ID NO: 46889 - DNA, 201 bp, Homo sapiens
atgtgcacattgtgcaggttagttacatacgtatacatgtgccatgctggtgtgctgcacccactaactcgtcatctagcattaggtatatctcccaatgmtatccctcccccctccccccaccccacaacagtccccagagtgtgatgttccccttcctgtgtccatgtgatctcattgttcaattcccacctaggagtg

SEQ ID NO: 46890 - DNA, 201 bp, Homo sapiens
ttgtaggacactcaggtagtattctgggctcctcttggagtacagtctaagttgcagaagagagacagggtctagcaatgtaaatttctgtagtcgccagycttgattcagagttaaagctatgggaaagtcctcaggcagaggacaaacattagacaagaaaatgcccatatatgaaaccctgcgaagcatcagtatttg

SEQ ID NO: 46891 - DNA, 201 bp, Homo sapiens
attgtaagcttcctgaggaatgtggaactgtgagtctattaaacttctttcctttataaattacgcggtctcaggtatttcttcatagcattgtgagaacrgactaatacaattactttctccaaatatagccacactggggttcagggtatcaacatatgaatttgggggaggcacagttcagcctattgtaccctggaa

SEQ ID NO: 46892 - DNA, 201 bp, Homo sapiens
tgtgcacattgtgcaggttagttacatacgtatacatgtgccatgctggtgtgctgcacccactaactcgtcatctagcattaggtatatctcccaatgcwatccctcccccctccccccaccccacaacagtccccagagtgtgatgttccccttcctgtgtccatgtgatctcattgttcaattcccacctaggagtga

SEQ ID NO: 46893 - DNA, 201 bp, Homo sapiens
tctttgtgtcccgatcatcaggcacaggaccccacacacagtcacttctcaatgtgctaaatttcacagaatgcgtccagggtacctggttctggatagayccggtagaaggagatagaccgggagggcaaatggcatgaggagtctcacaggccagagtgattaaaggggtgtatcggggcggtaaaccctacagactct

SEQ ID NO: 46894 - DNA, 201 bp, Homo sapiens
ttctttcctttataaattacgcggtctcaggtatttcttcatagcattgtgagaacggactaatacaattactttctccaaatatagccacactggggttyagggtatcaacatatgaatttgggggaggcacagttcagcctattgtaccctggaacatattatgtgtgttgtaacaatttgtttatgtctgctgccagt

SEQ ID NO: 46895 - DNA, 201 bp, Homo sapiens
taaattgtagctgtggttttcctcatgactcttaatacagaaacagctaaggaattaattttcgaattaggaatcagcatttcttccactgagcaattcaygagggattaagttaccttaatggccttgcctgaagagtgcagacatttgctaagaaaagcccatttaaaagcattatgaaaactgaaatctgtttcctag

SEQ ID NO: 46896 - DNA, 201 bp, Homo sapiens
caaaatttaaaataatacagaattgtttcaaataataattgcatccttctataaaatttgccttagaatagttttaatttttattataaatgcagccatarttgttgatctttaagcaatcttgactctctttgtttttgccactttataaaatgtagacaaatctgatagccaaggtaaataccagaattagggtaaagc

SEQ ID NO: 46897 - DNA, 201 bp, Homo sapiens
gatgtggtggtgcacgcctgtagtcccagctacttgggagtcggaggtgagagaattgcttgaacccaggaggcggaggttgcagtgagctgagattgtgycattgcactccagcctggacgacaaagcgagactgcatctcaaaaaaaaaaaaaaaattttttttggaggctctgagggagaatgtgtttcctgcctttt

SEQ ID NO: 46898 - DNA, 201 bp, Homo sapiens
gggattaagttaccttaatggccttgcctgaagagtgcagacatttgctaagaaaagcccatttaaaagcattatgaaaactgaaatctgtttcctagtartagaaaaccaggtagaaatgtacagtatccaagaaaaaatgctggcgagattgtactttattctttttatttggctcattcgtgacttgggatgcagaag

SEQ ID NO: 46899 - DNA, 201 bp, Homo sapiens
ctctcagtatatttttatcatcttcacaaagttatttttctgtaaactaaaggtttgcctaaattgagataagctcctttaaattttaatttattttttasttgggtatgagcatttacagtgacagaagaagttctggttttggcaactttggaagtagctccccaactttgggacatgtacgtgttgtctgtatgatga

SEQ ID NO: 46900 - DNA, 201 bp, Homo sapiens
gcttgaacccaggaggcggaggttgcagtgagctgagattgtgccattgcactccagcctggacgacaaagcgagactgcatctcaaaaaaaaaaaaaaawttttttttggaggctctgagggagaatgtgtttcctgccttttccactttctagaggctgcctgcatttcttggctcatggtcccctttctccatgcatc

SEQ ID NO: 46901 - DNA, 201 bp, Homo sapiens
ttagtgcttggtgatgtgtagaatttagagctgaatattcccacatttcctttggaaatgttagtgttcataaagtacatattcctttctctcaaatgatrttccatctctcagatgatattttttttcctgtatgaactagaaagataagaagcctaacaaagtaaaattgctgacaattggcttgtatccttgagtaat

SEQ ID NO: 46902 - DNA, 201 bp, Homo sapiens
tggacttagcaaaggtggcttgggtatttattgagcaagctgttggggaaagatatttgatgtcttagatccagaatgtttttaaatgctgctcacttgawttttttttttttttttttttttatggaataagggatctgatactctttttctgcttggagtctggacctcagttactgctctctgagatactggcacaga

SEQ ID NO: 46903 - DNA, 201 bp, Homo sapiens
gcgctgggacagagctgcctgctggagctgccgcagatcgccgtggtgggcggccagagcgccggcaagagctcggtgctcgagaacttcgtgggcaggtragcgcgcagggcgcggagtaaggatgcggcagtggggcgaccccgctgcgggccgttggaacgtggacgggcagcgggagccagagggtggatggaccag

SEQ ID NO: 46904 - DNA, 201 bp, Homo sapiens
ttctattccttacctgtttccatatccccatgtcaataggggagaaaattcagggttggagagacaagtcattcacccaggatcgtatagctagcaagcarccaagctgggattcagtatgactcctcctggaactcttgagaaatatggacacataaaaccaatgaacatgtatttattgagttctaagtttactgggta

SEQ ID NO: 46905 - DNA, 201 bp, Homo sapiens
cacgtgtgcacgcctgttttcagatggctgcttttaaggcatgctagtatacaatatgaatgatccaagcagttgaaaggaagaaactgtataaaaggaaygaacacagggtggaagttcatgcggaccttaggagagacaggaccccatgtctcagttgaaggtttggccttccattatacaagataaaggcagaatctg

SEQ ID NO: 46906 - DNA, 201 bp, Homo sapiens
aacattcactatttaggctcagatgtttgaacagctgacataggtaagggaattaaactttggatttttaacacccaaaggtattcttatgaaatgttaaygaaagttacacatacagtcaaaacatggtctcatcatgaggtcctgttctctttagtgtaacgcttaaaagccttttacctaaggcataaaatttctcat

SEQ ID NO: 46907 - DNA, 201 bp, Homo sapiens
aaactttggatttttaacacccaaaggtattcttatgaaatgttaatgaaagttacacatacagtcaaaacatggtctcatcatgaggtcctgttctcttyagtgtaacgcttaaaagccttttacctaaggcataaaatttctcatacttcttttttagcattgaagtgacttatttctttaaactaaaacacatagttc

SEQ ID NO: 46908 - DNA, 201 bp, Homo sapiens
atgtggtattgacaagaagaccaagagtagaccagttagaagtaaaaatgagaaattatgggaatttggttgtggtaagggccagtggagagtaaaaaaakgggcgggtttgagaaatgttcaggaaaattgaggactaggtggtagattagagctgttgggtaatgggagaggtagagtcaaggttacgtctcaggtttc

SEQ ID NO: 46909 - DNA, 201 bp, Homo sapiens
gtccttttatatttttccacttctattagatcttcaaagctgctaattctagtctcaacaatgatcagcctttcttgctatttatctacttaatttttttwatttaaaaatctgactttttagttctaggaagtcttttttaatgctgttcgtgtgcctcttcaagtccttattttcttctgtcttctgctttccccaaag

SEQ ID NO: 46910 - DNA, 201 bp, Homo sapiens
agtaagttatggtaatttttataaatgacttcacatttacaatgctggtgtttttattggttaaattagatttctcaatagctatttttaaaaactgcaakaggaaggactgtctattgtattttttagaaacaagctggtttctacaatattattcacgttttttaaacagcatcattgaacctgcacataaaaggttaa

SEQ ID NO: 46911 - DNA, 201 bp, Homo sapiens
gaaatgaaagttgtagagatatacagcaaacttttatgtaaggaaataagcatatgcaaaactaatacatgtatttaaactaacacaacctcaaaggaatraaagaacgtaagtggtacaccagtgcaaagggaaataataggtgaatattagatgttaattgaaaatttcattcattcattcatttcacaaatatttatt

SEQ ID NO: 46912 - DNA, 201 bp, Homo sapiens
tacagttctgaaattgaactgaatataagtggaaagtagacaatatatgcatttccagtgtcatctggcagcccatatcattttagctcaagcctgcatgwactgaagtatctatgtcaaagcaggaaggtggtgatctgtgtctcagtttctgagttgacaacaaggcattgaatttagactgtgactttatcacaaaga

SEQ ID NO: 46913 - DNA, 201 bp, Homo sapiens
caaagtatgtacatttccaaagaaaagcacttcgtgtctacatggaagcaataaattatttccccattttacattcataattaaatctttccaaatgctasaaagtagccagaccactaacaataatacctgtgtcatgttctggggcttagatggttcaagctgacttgaaatggagaccatttgttctaaattgatttc

SEQ ID NO: 46914 - DNA, 201 bp, Homo sapiens
ggagttgacactaaatgatttgcatttcatgaattaaaaatcatttccaacaaattagagggttcattaataccatattaattactctctctctctctctstgtgtgtgtgtgtgtgtgtgtgtgtgtgtgtgtgtgatcataggtagcttagcttttcttcctttaatagtagcaagactggcatttgatgacattatta

SEQ ID NO: 46915 - DNA, 201 bp, Homo sapiens
gcacacacatatataaaatatgttaatatgattattttcagcttctaaaatctatggaatgctattttaacctgggaaagggcttcttgctttattccctyggattaaaaactcagtgaattttatttttctaaggtaaggatgctataacctcaaatctgaaaatcctgcttgactagccatcaatgggtctaaataacc

SEQ ID NO: 46916 - DNA, 201 bp, Homo sapiens
cttcctaatgttataataaaattgtacacatctccccacactagctatgttcttttggaataatttgaaaaaagaaatgtagaagagtaaaatatttaagyttgaatatttttcaagatggaataaaaaatagggacaagtataaaaatcagagcacgtaccagaatgcattagtaatttgttgtactttaaaaagtttta

SEQ ID NO: 46917 - DNA, 201 bp, Homo sapiens
aaatagggattgcagacttcaccttttaatctgtgtgtgagttctgagtaagatggtatcaagtgcctggtccatagtatgcattcaataactgattgctsttaatttaaatcttttatttagactggacattttttgagtgttttaaaaacaaaagtaagttgaggcagatggtaatgcgtatttgcaaattctttttgt

SEQ ID NO: 46918 - DNA, 201 bp, Homo sapiens
ttctaaggtaaggatgctataacctcaaatctgaaaatcctgcttgactagccatcaatgggtctaaataaccttttcaaggttatttatagtagtcagartatgatacttaaattatgtttgatttagttcttttggtagttaactttttacagtacaaataataccacaagttatttgagaaatagtcttttagataag

SEQ ID NO: 46919 - DNA, 201 bp, Homo sapiens
tttgataagttattcagcctaggtggaaaaaattgtatccattttctactgtaacatcttagcattttcttgtcattatccaggaattttgcaataaaaayagtttctttcctaaggatgcaactttcctcttttacacgaaacagttttcattttaagactcgatctaatgtgcagttattgaatgcagccataaaaacc

SEQ ID NO: 46920 - DNA, 201 bp, Homo sapiens
aaaagctgtcttttaattgaaaaagtgatatgtacatgtaatacaaattcagacattccaaaatacattatatttataccacataaatccctttcccctaytgaggtttcttagtaagatgtttcatttacctgcctatcttccagattacttctgaatttatattttctttatatgaaatttatttgagttttgaggaca

SEQ ID NO: 46921 - DNA, 201 bp, Homo sapiens
gagccccaaagtagaatttaggagaactctgggttctaaatctggttctgctacagactctgttgacctaaggtgagtctctttcatgtgtctgtttcctycatatgtaaaatactaattgtagtaagtgtatctgacttagggatttgttccagaagatggtacaaatgaaagtactgtgaaaaatataattgtaagaaa

SEQ ID NO: 46922 - DNA, 201 bp, Homo sapiens
aaaaaccaaaaaataattagccaggtatggtggagcatgcctgtagtgccaactacttgggaggctgaggtaggaggatcacttgagtccaggaggtcaargctgtaagtgagccatgattgtgccactgcactccggcatggctgatagagcaagactctgtctcaaataataataataaacaagaagctactatgttaa

SEQ ID NO: 46923 - DNA, 201 bp, Homo sapiens
tgggattacaggcccccaccagcatgccaggctaatttttttttttttgtggagacggggtttcaccaggctggtctcaaactcctgacctcaggtgattygccagcctccacctcccaaagtgctgggattacaggtgtgagccactgtgcctggcccaatttttccttttttaaaaattattattttaggttcaggggc

SEQ ID NO: 46924 - DNA, 201 bp, Homo sapiens
gttttaaaatgtaattggattgtttatttaagtatgtttttagagtgcatataactcatttatagaggtgttaagtgaaaactgtactagttgctaatacrcagatgttttaaaatgacacgcttgttagaaatattagtttttcaatgctaattatataggcagaagagtccacattattttattctagtctgagtggta

SEQ ID NO: 46925 - DNA, 201 bp, Homo sapiens
attatgtagtattttagataatgttaaatgctatggaaggcaaaaagtttagggtaagggaactgggagtactggattgcagttttatggagtttttgtaygtcactaagtcttcctggagctgaaagggtgatccaagtggctatcttgaggaagagtattccaggcagaagcaggagccagtgcaaggctgggtgcagt

SEQ ID NO: 46926 - DNA, 201 bp, Homo sapiens
atttatagaggtgttaagtgaaaactgtactagttgctaatacgcagatgttttaaaatgacacgcttgttagaaatattagtttttcaatgctaattatrtaggcagaagagtccacattattttattctagtctgagtggtaaatagactctcaattctgcacaaatagaaaaagttttttgattaatggggacgaaat

SEQ ID NO: 46927 - DNA, 201 bp, Homo sapiens
ttattttaggttcaggggcacatgtgcaggtttgttttataggtaaacttgtgtcatgggggcttgttgtacagattatttcttcacccaggtactaaatygagtacctaatagttattttttctgatactctcccttctcccacccttcaccctcaaggaggccccagtgtctattgtttcctttgtgtttatgaattct

SEQ ID NO: 46928 - DNA, 201 bp, Homo sapiens
tctgtataccactggcatacagacttcccagaaagtccctgaagtgtctggaaactcccggaagtccccctaccttcattccaaactccaattttagtgtyacaaagctaggttagcagaaggagagaagagtatctctaaaattttgcttaaatgcaaaataaaaaatgttaacctctatgccctatttaactatgtcgc

SEQ ID NO: 46929 - DNA, 201 bp, Homo sapiens
tctagaaagaaatagattatttttttcctctgctaccagagccaagtcaagagagtcccaagctcatatgctatatagaatgatccaatttaattttctgyatggccaaagttttgcaatttatcctagtccaagtttgcattgcagtttctcacactctctgcattgatttaaaaattcttatggattatgttatactaa

SEQ ID NO: 46930 - DNA, 201 bp, Homo sapiens
aaaatagtttttttctaggtctgtgaggaatgacattggtagtttgataggaataatattgaatctataaattgctttgggcaatatggccattttaatgwtattgattcttcctatccataagcatgggatgtttttccatttgtttgtgtcatctctgatttctttgagcagtattttgtagttctcattgtagagatc

SEQ ID NO: 46931 - DNA, 201 bp, Homo sapiens
ataaaaaatgttaacctctatgccctatttaactatgtcgcttgatacctgtactgttgcaacagctgtctattgttctcctgtctcgatgtacctaatgycaatgtagcctatagacagtaaaaatcacagcattttttggaaggggcactaactgtgtgctgggcatcatgctagacaacttgtattcattccttcctt

SEQ ID NO: 46932 - DNA, 201 bp, Homo sapiens
ttctgctttccccaaaggttctccttcattgatggactgctgtgattgctttcctcattctttccctctctgactgttagcttctttaggtatcctttcaytttcatttgttcttcatggcacaagtccaactgctggacgctttaagtgggctggtcccacaagtgtgggaaggcacagatgtctcagttgtcatgggcc

SEQ ID NO: 46933 - DNA, 201 bp, Homo sapiens
ttttctgtatggccaaagttttgcaatttatcctagtccaagtttgcattgcagtttctcacactctctgcattgatttaaaaattcttatggattatgtyatactaaatacattctataaagtagacggaaaaaaggggccaacatttgcttagccattatggggtagcagacatggattctgctagatacttttcatac

SEQ ID NO: 46934 - DNA, 201 bp, Homo sapiens
tcaaactttgagtagatccctggaggaaggatagtaaaattcatagaagtaaataagtttagagagggaaggaatgcattctctctctacttgcaactggycagatcttccattctaccatcaagctcagggttatccatggaacatcccatttgaacactctgtctatgctgattttgaccttctcagatgtcctgatga

SEQ ID NO: 46935 - DNA, 201 bp, Homo sapiens
cttacttgcttaaacgctttcgctggcccctcattgccaagcaaataaagttcaaacacttttccttggcattcaaggccttcgcatctgcctcaggattyctggccaaacttaccttccacaactatcgtgcataaacctctactccacagagggtttcctaaatacatcttgtgtattagattactttcacctttgaat

SEQ ID NO: 46936 - DNA, 201 bp, Homo sapiens
ctggattgaaaatctatcagtgaccagtgaatgctttgccctgattaagaaaaatgaggccaaacaagaagacaacccaaagaagcctctatgtttcttcwctacatcaacttgagaaacgtgggcactgtgacaaccagaaatccagagaggcaactttgaactataaggccaactcaaaaaacgaatccaagtaagaat

SEQ ID NO: 46937 - DNA, 201 bp, Homo sapiens
aagttttgcaatttatcctagtccaagtttgcattgcagtttctcacactctctgcattgatttaaaaattcttatggattatgttatactaaatacattytataaagtagacggaaaaaaggggccaacatttgcttagccattatggggtagcagacatggattctgctagatacttttcataccttctattccttacc

SEQ ID NO: 46938 - DNA, 201 bp, Homo sapiens
gcttccagaactttaataaataaatctcttttatttaagtgacccagcatgtggtattttgttatggtagcctgagcagactaataaaagtacttaacttktattgagtttttgctaattaaattgttgatctgacttagatgggttggtactgagagtgaggatcatgtgtttaagtaagagatttatttttacatttat

SEQ ID NO: 46939 - DNA, 201 bp, Homo sapiens
tgtaaagtttctaaagagcttaacccaaccaatggtcaatgccaggaaaattgtctggttttgagttttgaattgcaccatgcatccaactgcatatacayacccaacagtgggagatttgtgcaaatatccatgattccctgcatacctgcaagtacatttagaagtgaatgcgtctgtaaggaagggaatgaaatattc

SEQ ID NO: 46940 - DNA, 201 bp, Homo sapiens
cctagtccctatctgtaggtaagagaaaatgtggaaagtcgatgtttgctctggaagttatagaaatttccactcagaaggtccttctttctgaagaaatktttgtttttttttaattcaggtccaatttggacaagatactcttgctttttcgagtcagttgaagagcaagataacaggtgaaaagtatttcaagagttt

SEQ ID NO: 46941 - DNA, 201 bp, Homo sapiens
catgttagagcctgtaaggtatgcaggtggttggatataagagcctggggcacagaggagagtttaactgaagatattaatcagtacttgtcaatatatcrttgatatttaaaaccttaagactgcacaccaaaaactatacaacatcattgaaagaaattaaagaagaccaactaaaatggaaagatatcctatgttcat

SEQ ID NO: 46942 - DNA, 201 bp, Homo sapiens
caccagggcctgtcatagggtgggggctgggggagggatagcatgaggagaaatacctaatgtaaatgatgagttaatgggtgcagcaaaccaacatggcrtgtgtatacctatgtaacaaacctgcacgctgtgcacatgtaccctagaacttaaagtataataataataaaaatcttaaataaaaaaaagaaaagaagg

SEQ ID NO: 46943 - DNA, 201 bp, Homo sapiens
ggtctgctcaggccaagaggcagaaactgaactgccctcaaatacttggtacccagccaagtgatttttcctgttttcaaccttgacactgcaatctgcgsattgcgtgaataagtggaaattttcgagcaagaaatagcttcatgccagttctatttgaaatgttcaaaccacctatttaatggcatcttcacagccatg

SEQ ID NO: 46944 - DNA, 201 bp, Homo sapiens
gtgtcttagaggagcagcaaggccagtgtgtctggaacactgtgagggaagacaaaggtggtagttggttaacaaggaaagaggtcagggaccaggtgatrtaggccttgaaggatggggcgagccttttgaattttattctaagtgagatggaagccactactaggtttcaagtcacttagtgacgatttatatatttaa

SEQ ID NO: 46945 - DNA, 201 bp, Homo sapiens
taacctcagataaacataaagatgacttaaaatagtttcttcagtcaatctggatatgttaattctccttactttttttttctttttttattttattttaktattattatactttaagttttagggtacatgtgcacaatgtgcaggttagttacatatgtatacatgtgccatgctggtgtgctgcacccattaactcgt

SEQ ID NO: 46946 - DNA, 201 bp, Homo sapiens
ttaacatgcaactataatgtttgtgaaaatgttttgttaagtcatgattttgtaaattaaacctatttcaaatgcactagacaagtttgccatttaaacamaaataatgcttagccaggcacggtggcacacacctgtgatcccagctacaagggatgccaggaggattgcttgagcctgggaggcccaggctacagtgtt

SEQ ID NO: 46947 - DNA, 201 bp, Homo sapiens
ataattgcttgactttcagatatttaaatggcagctaactgatgaaattaactagaatgcttatctaaagtttctattttgtgaacactcacttatatttsggggaaggaaattatttttaggtagttattcctaatttagaaagacttgatgaagtcagaataacctaataacagatgcctccgtctgtgtaaattttta

SEQ ID NO: 46948 - DNA, 201 bp, Homo sapiens
tcagtcaatctggatatgttaattctccttactttttttttctttttttattttattttagtattattatactttaagttttagggtacatgtgcacaatstgcaggttagttacatatgtatacatgtgccatgctggtgtgctgcacccattaactcgtcatttagcattaggtatatctcctaaagctatccctcccc

SEQ ID NO: 46949 - DNA, 201 bp, Homo sapiens
gaatgtctaagtagtgtgattttgctttcatgtcaataaaccattgagtctacaaatcagtcaattgctaccctaataatgaaacatttatgtgtcatgcwtggacatgagtctaaacttacaaagttctgctttctgcacaagatacctctattttgactggaaagaaatctctatatagatcatttttaaaaattgtgt

SEQ ID NO: 46950 - DNA, 201 bp, Homo sapiens
cctcccccctccccccaccccacaacagtccccagagtgtgatattccaattcctgtgtccatgtgttctcattgttcaattcccacctatgagtgagaayatgcggtgtttggttttttgttcttgcgatagtttactgagaatgatgatttccaatttcatccatgtccctacaaaggacatgaactcatcatttttta

SEQ ID NO: 46951 - DNA, 201 bp, Homo sapiens
aagacagttcagcggtttcttaggaaactaaacatatccttaacatattatccagcatccttaccttgccatttactcaagtgcgatgaaaatttgtgtcyctacagaaactggcacataaaggtttatcacagctgtattcataattgcccaaacttggaagcaaccaagatgtccttcagtatttactttatagtaaat

SEQ ID NO: 46952 - DNA, 201 bp, Homo sapiens
atcatcaatgtaaaaggcctcaacgtggatttctaatgcgttcattccttttttgccactgggggtcactgtaaagacgctgcttgaagaagttaaaaatktccctgatgctctttgtggagtttgaatgtagaaatttaatgtagaaaagaaacactgttcatgaaaaagacttaaaaaagtaagaagataataaatata

SEQ ID NO: 46953 - DNA, 201 bp, Homo sapiens
gaagttaccttcaacagaaccacggggtttagacaatgaatttctccagggggattgcgctggacaagtgactacaggccttgcctaattttccttcattrcatcatctttgaggtccttacaccactcaaggggtgagagaagagctcttaggcatatctgatatttagatttcttactgatgtggctgactcttagctt

SEQ ID NO: 46954 - DNA, 201 bp, Homo sapiens
atctcagaggatttttagggcaatgaaaatactctgtatgatactatatggtggatacaacatttgtcaaaacccatagaatatacaacaccaagagggamccctactgtaaactatggactttgggtgataatgatgtatcaatataagttcatctattgtaacaaatgtcccactctggtgatgcatgttgatattggg

SEQ ID NO: 46955 - DNA, 201 bp, Homo sapiens
acaattaaatatatacttgcgtttggcctttcttaaagatattcatgagtctagataagagttagctttctcatgtaacagagaaactgaaaaattcaaayggcttatttttactaggcttaagttaattgctgcactactgtaaaataatgatacttaaacaaaaatttacttttttaagcactcaatcacagtgagata

SEQ ID NO: 46956 - DNA, 201 bp, Homo sapiens
agccctaaggtggacacatgcctggcttactgaggaaaagcagtgagactagtgtggcctgtagcataggaaattcttgtttttgtcaaccaaaaataaarttctaagcccaccaaccatttgaatagacccctcttcttggccaagggcattccaaagttaacctgagaaactagttcaggacatgatggggaggggtag

SEQ ID NO: 46957 - DNA, 201 bp, Homo sapiens
gagattgttttcaaagctgtttaccatgtaaaccaaaaataaaattccaagccccccatccacctgaatggatgactctcttgtcaaaggcattcaaaaawcctgaaatactagttcaggccatgataggaatgggtggtcagaggtgtctcattatatattcctccccttgaaactcaggcacagctgaccagcattaac

SEQ ID NO: 46958 - DNA, 201 bp, Homo sapiens
ttatggagttgcataggattcagaatggccaaaacaatgttgaaagcaaaacaaaacaagttgaaggactcacacttcccagttctaaaacttactacaartcagtgtaatactggtgtaaatatacacatactaaatgaatggaatagacttgagagtccagaaataaactgttacattcgtggtcaattgatttttaac

SEQ ID NO: 46959 - DNA, 201 bp, Homo sapiens
cactgcactccagcctgggtgacagagcgagactccgcctcaaagaaaaaaaaaaggaggttgtagaagactgtgttctatggtatacagaaaagcaattyatatatatagagagaaaatatatacttatacaaatgtagaatacagttaaaaaggatgcacaagaaacttctatagttgtttcaacagagtgaaggggta

SEQ ID NO: 46960 - DNA, 201 bp, Homo sapiens
acctggtaactggttaaaagaagctaacagagctcatgataaggcttgccagcctagaggacaaactgccagttgtctatagaacagacaggacttgtggragcatagtgtgttaagtggaggcccctgagcttagaaaaaggggctttcctattaggcaggaaccaagagaagcacaaagagatcatagtttataaatat

SEQ ID NO: 46961 - DNA, 201 bp, Homo sapiens
tccagcctgggtgacagagcgagactccgcctcaaagaaaaaaaaaaggaggttgtagaagactgtgttctatggtatacagaaaagcaattcatatatakagagagaaaatatatacttatacaaatgtagaatacagttaaaaaggatgcacaagaaacttctatagttgtttcaacagagtgaaggggtagggagagg

SEQ ID NO: 46962 - DNA, 201 bp, Homo sapiens
tttcctattaggcaggaaccaagagaagcacaaagagatcatagtttataaatatgcaacagacacctctgtttggaaggaggcacaacacttattgtggrattgtcattgtgtggcttgcttttttcaataaattccctccttaaaaatttttatatagattgaatatttgtaaatagtgttttattattgatttacatt

SEQ ID NO: 46963 - DNA, 201 bp, Homo sapiens
taatataggcatgattgttgtatacagtcactaatcatatataagatagatcattgtacatctgaataatacgtgttgacaattataagtggattttcagkcttaattgtgaaacaatatagctaataaataatggacctagaaacacacatagttggagctgtagtctcaccttcctatacttacagtcaaaatatacac

SEQ ID NO: 46964 - DNA, 201 bp, Homo sapiens
aaaaccaagaaatggagaatgaaaaattcccaaacctaaatattgacctaataatgggattaaacacatgtaaacaccccattaggggaaaaagtgaaatrtgatcacttagacagttttgttatcttcgaggattaagaaacatttttattcatacatattcctctagaggtgagtaaaaaacaatttctcatattttat

SEQ ID NO: 46965 - DNA, 201 bp, Homo sapiens
cccagaaacagaaagcaagtcttgtgaaagtcagaatctgggagctttgcagatgcgtcaaggtagccttcagattgcctctctgttttcaatgtgtcccytatctcactcttccaaacatcctatgctgtaagagggtaaaaggaaaaggaaaataagaaaggatctacataaggcaaagtacaagtaacataaatgcag

SEQ ID NO: 46966 - DNA, 201 bp, Homo sapiens
ggcataactttaaaagcttttaatgatctggctaccaactacttcccagcataattttccatttcttttgtacatcataggtagccattctctgaaaccgkccttgtactttctctcctttgtgtcatcactcataccattccctccatctagaatgcttttgctccttctattcctcccatttcagttgaatccagcaaa

SEQ ID NO: 46967 - DNA, 201 bp, Homo sapiens
tgcttccacatcccatgacaaataatagcaaatagctctgtcattgttctctttggggctctaaattgttgaagcttcagccattgcagggaaagccttcytgagtttcaggggacccagccctgccctgagtttcacctgactgatagaggaaaacagccaagacaggagtctggcagagaagccactggccagtgaaaa

SEQ ID NO: 46968 - DNA, 201 bp, Homo sapiens
ctcttctaagttagtaccttctggcaactctggcttgttttatcaagcaaggatgagcctctctctatttaaaaacttaatttttgtgtaccctcttacaytgattgagcagttgtggtgtgagaaggaacaaagatgcttctggtgtcctttgtacaatttcttttttttttttgagacggagtctcgctttgtcaccca

SEQ ID NO: 46969 - DNA, 201 bp, Homo sapiens
gatatcagattgggttggatttagctcagaggccatattttgccaacttttaaacaatgtatttatttatttatttatttatttatttatttatttatttrtttgtttatttatagatggggtctcactctgtcacccaggctggagtatagtggcgggatctcagctcactgcaacctctgcttcccaggctcaagctat

SEQ ID NO: 46970 - DNA, 201 bp, Homo sapiens
tctcctactggctccttttgtgtagcggtaagtgaagattcaatgggacaaggctctaaatggactggaggcctcttttccattagagatgtgtttcctcatagacttttgtcttcacactttattttcttgtgcccactgcctcttattcgatcatttgttgtttctattctcaaactctctttcttcttctcctaattt

SEQ ID NO: 46971 - DNA, 201 bp, Homo sapiens
ttcttttttttttttgagacggagtctcgctttgtcacccaggctggagtgcagtggcgcaatcttggctcactgcaacatctgcctcccgggttcaagcrattctcctgcctcagcctcccaagtagctgggattacaggcatgcgccaccacacccggctaattttgtacttttagtagagacagggtttctccatgtt

SEQ ID NO: 46972 - DNA, 201 bp, Homo sapiens
gttacttatatcaaacacttgcctgctagctgtgtttggcaggccagcaggatgaggtaataatcagaagaaaatgttctggtttattggcctcatccacrtacaacattattcaaaatagttctctgtgggtgagaacagagttgctttgagatcccctggtctaatgttctgtagtagtgaggaggaacaaaactgtaa

SEQ ID NO: 46973 - DNA, 201 bp, Homo sapiens
ctcctactggctccttttgtgtagcggtaagtgaagattcaatgggacaaggctctaaatggactggaggcctcttttccattagagatgtgtttcctcatagacttttgtcttcacactttattttcttgtgcccactgcctcttattcgatcatttgttgtttctattctcaaactctctttcttcttctcctaatttt

SEQ ID NO: 46974 - DNA, 201 bp, Homo sapiens
cattccctaatgtgcaaaaatacttggttgaactcctgaaacttatttggtagatcaaaagctgcactgctgtggaatgcaataaactccatctgtttgargtattttcagcaatattgcactacttgggagaaccagggtcccattattctctaaaataagacttttattcccggtaaaattcccagtggggatctttat

SEQ ID NO: 46975 - DNA, 201 bp, Homo sapiens
caggctggagtgcagtggcgcaatcttggctcactgcaacatctgcctcccgggttcaagcgattctcctgcctcagcctcccaagtagctgggattacargcatgcgccaccacacccggctaattttgtacttttagtagagacagggtttctccatgttggtcaggctggtctcgacctcctgacctcaggtgatccg

SEQ ID NO: 46976 - DNA, 201 bp, Homo sapiens
acagagttgctttgagatcccctggtctaatgttctgtagtagtgaggaggaacaaaactgtaaacttttttgatctcttctagaataatggtaaggtaartgatatctgcttggcccatcctttcagtaatgtttacaggcagttagatgtatgtgaaaatgagagcctttcatttataaacattttggctttactcttt

SEQ ID NO: 46977 - DNA, 201 bp, Homo sapiens
tttgggaggctgaggtaggagaattgcttgagcccaggaattcaagaccagcctgggcaacatagaaagatctcatctctacaaaaaataaaaaataaaasaaaactagctgggcatggtggcatgcacccctggtcccagctgttcaggaagctgatgtgagaagatcgcttgaaccccgaaggtcaaggctgcagtgag

SEQ ID NO: 46978 - DNA, 201 bp, Homo sapiens
tttcacgctaacagttcacttattactgattcaaaccaattctttctggccacgttcccataccccaggtattccaaatagaaagaaagggggcaactgtyctaagtttctgctgttataaatgtatgatttcatgtaacctatgtggattctttgacttgtccatgagctctggatgctgtatgtgtatgtatgagatgt

SEQ ID NO: 46979 - DNA, 201 bp, Homo sapiens
ctctcactctgttctcattaagaaggcattactgaagataaattttaggtgggaccaattacagactaatgcagttatatagtcattgtgatctagctgargaccaggagtcttttaatcagttaaaaacctctgcagcctgggcgacagagtaagactccctccatctcaaaaacaaaaaaacaaacaaaacaaaacaaa

SEQ ID NO: 46980 - DNA, 201 bp, Homo sapiens
tcagtcgacttatagtatgatttttaaaaacagcaggtaacttttgaaattgattaaagatttcttccacaaagtaatggctaatatttataactaattcyaccactctttgaaaagacatttggaaaaaatataaaaaccaatatttttagttcttataccataaaatatacttcaattattgaatagtacgtatgtcga

SEQ ID NO: 46981 - DNA, 201 bp, Homo sapiens
ttcctcctgtctaactgtaactttgtatctgttgatctcttcccatcctgcccctaaccccacctctccagtctctggtatcagtttcttttttcttttcttttttttttttttttactatcaacagaacctcatcaaattatctcatttaatggtaccacctctccaggcatatcggcaggcaccaattggcaggcacca

SEQ ID NO: 46982 - DNA, 201 bp, Homo sapiens
gaggtgctaactctcagaccactcaagaagcatttaggatttgtctctttcactagtggattcaccgatgagttaagaacatttgtaaaattcactccccrcacacacaccaagaagaaacccacttctccttaccagaagccatccatttgttgtgtcatatttgattaagttcttctggatccaaaaaatattcagttt

SEQ ID NO: 46983 - DNA, 201 bp, Homo sapiens
gcatccaataatcacctcaggataaattcatagaaaagaaaatgctgggtcaacagatatcttcattttaaattaaaatatctctaatatttattgtaaayaaaacctttaaacaaaacaagacagaacacagacaagtatcaaagtctcctccaaccccctagctgttatgccagtctccaaaagaaacctggtatagac

SEQ ID NO: 46984 - DNA, 201 bp, Homo sapiens
gaaatagattaaactttacaagaaaatagattaacttttatatgaatgtcaaagatacatgtggaaattaactttaaagtggaaactaagcatctgagacyctacaagcttgacataattatgtaatcatgtttattatgattatttttgttgtgattatacagattttgttacctcttttccgtttactctgcctgtgca

SEQ ID NO: 46985 - DNA, 201 bp, Homo sapiens
catttgctgttctgcagcctctgctgctgatacccaggcaaacagggtctggagtggacctccagcaaactccaacagaccttcagctgagggtcctgacycttagaaggaaaactaacaaacagaaaggacatccacaccaaaaacccatctgtacatcaccatcatcaaagaccaaaggtagataaaaccataaagatg

SEQ ID NO: 46986 - DNA, 201 bp, Homo sapiens
ctaagcatctgagaccctacaagcttgacataattatgtaatcatgtttattatgattatttttgttgtgattatacagattttgttacctcttttccgtktactctgcctgtgcaaatatgttattttcctcactgaattgcatattgttgaaggactatattaggagtctccaaatgctcacattccctcattcattgc

SEQ ID NO: 46987 - DNA, 201 bp, Homo sapiens
aaggacatccacaccaaaaacccatctgtacatcaccatcatcaaagaccaaaggtagataaaaccataaagatggggaaaaaacagagcagaaaaactgmaaattctaaaaatcagagcacctctcctcctccaaaggaacacagctcctcaccagcaatggaacaaagctggatggagaatgactttgacaagttggga

SEQ ID NO: 46988 - DNA, 201 bp, Homo sapiens
tttgtttcaaatgctcaaattccatgagatgaagcctccccatcttcctggaccaatcgttcttccttaaattccagtttcctacctgtcagcgctgttgmctactatgactgtgttgtgtgtaatatacaaataatgtatactgtctaaggattatcagtgagccatttcatgacctaatttctggctcttgatttttct

SEQ ID NO: 46989 - DNA, 201 bp, Homo sapiens
tctgcgagctaaaggaggaagttcgaacccatggcaaagaaattaaaaaccttaaaaaagattaggcaaatggataactagaataaccaatgcagagaagyccttaaaagacttgatggagctgaaaaccatggcacgagaactatgtgatgaatgcacaagcttcagtagccaattcgatcaaatggaagaaagggtatc

SEQ ID NO: 46990 - DNA, 201 bp, Homo sapiens
atgctaaagtttgagatgcctagtacacatgagtttctagtcaggatagagtaagttacaatgctgtaacaaacaactcctcaaatctcagtagcttcaarctacaagatttatttcttgctcaagctgcatattcatctgaacattcatcatcaagttggctggggctcctctttttttacttttttctggagatggagt

SEQ ID NO: 46991 - DNA, 201 bp, Homo sapiens
attgtctcagcccaaaatctccttaagctgataagcaacttcagcaaagtctcaggatataaaatcaatgtgcaaaaatcacaagcattcttacacaccartaacagacagagagccaaatcacgagtgaactcccattcacaattgcttcaaagagaataaaatacctaggaatccaacttacaaaagatgtgaaggacg

SEQ ID NO: 46992 - DNA, 201 bp, Homo sapiens
agcataaaaatgggtttgaagaattagggattcttgtgaattttttagacattcatttgttaatgcgttcatgtattattaacttgaaatctaataagttragacaaaactgttacactaaaagtgtttgtgggaaggtggtggcggggagcagtaacatttaagtagactgaacaagtgagtataaggcacttgtaggaa

SEQ ID NO: 46993 - DNA, 201 bp, Homo sapiens
ataacagacagagagccaaatcacgagtgaactcccattcacaattgcttcaaagagaataaaatacctaggaatccaacttacaaaagatgtgaaggacstcttcaaggagaactacaaaccactgctcaacgaaataaaagaggatacaaatggaagaacattccatgctcatggataggaagaatcaatatcatgaaa

SEQ ID NO: 46994 - DNA, 201 bp, Homo sapiens
ccctttaaaaaacaaatacataaatttatcattgggcattgtgatttttcatggaacagtttttatttttagcaactggctttcaaagcaaggaaagattkttttttaagcataattactaagaatagaaacaactttgaggtgttctttttgattcttaatatttaaggtgtctcatgacatttgaagtctctaaatgtc

SEQ ID NO: 46995 - DNA, 201 bp, Homo sapiens
gtttcgccattttggccaagctggtctcgaactcccaacctcaggtgatccgcccgcctcggcctcccgaagtgctgggattacaggtgtgagccactgtrcctggcctctagcatcttaaaatagtgaaaacaaaagagtacactattggctggagaagctcacttctaccctatccacgctcttcttttccagcctcct

SEQ ID NO: 46996 - DNA, 201 bp, Homo sapiens
caaaggtattatatttctctttgaagtaaatgaagaaataatatatttcagtagaattaccactcatgattgtgaggttaaagtgatttttgaattggtgwttatttgttctattttaggtttatttgtctcttgtctatttttggaggagatatggaggtttgtagctgccttgagtttccaaaccaacgattatacttc

SEQ ID NO: 46997 - DNA, 201 bp, Homo sapiens
ggtgagtactagaaattaatgaacaaaatagacttaataacagataatagaattaaaatgaatttttctgacattatttttagttttctcctagagaatakattttaaggaagatatttgatgctgtgatataaagtaaaccattcttagcatattccttttcttttggaaatgttagatgaaattgcaggcaaagatggt

SEQ ID NO: 46998 - DNA, 201 bp, Homo sapiens
taagctagtgtccttagcccatgtgcctcagtttttgaggtatccattctttcacctgtacttctctcttcattttcttaatgatgtaaactacttgtgaktctcccatctcaacctttgccctcttcagctgctgacttagctttcctacccgataaccatcacacaactctcactgtctaaatgcaggaaccaaatgga

SEQ ID NO: 46999 - DNA, 201 bp, Homo sapiens
cccggtagtgaacatagtacccatagtatccagtaggtagtttttcagcccttctcccttcctttacttccccatctagtagcccccagtggctattgtcmtctttatgttcatgagtacccaatgtttagctcccacttataagtgggaacgtgcagtatttggtttgctgttcctgtgttaattcacttaggataatgg

SEQ ID NO: 47000 - DNA, 201 bp, Homo sapiens
tgacaaaacagaccatttttgcaataagataccaacatgacagttagcaggccctaaaataaatcaaagtattttaccccaaaatatatttctttgacatrttttgaaatggccctgcaaagctgtctcctgtggggaaaatctacattctgtaaagaatgctgttccctttccaggtctttttcctgatccaggagagaa

SEQ ID NO: 47001 - DNA, 201 bp, Homo sapiens
caaatcacgagtgaactcccattcacaattgcttcaaagagaataaaatacctaggaatccaacttacaaaagatgtgaaggacgtcttcaaggagaactrcaaaccactgctcaacgaaataaaagaggatacaaatggaagaacattccatgctcatggataggaagaatcaatatcatgaaaatggccatactgccca

SEQ ID NO: 47002 - DNA, 201 bp, Homo sapiens
ctataagccatttagaaaaatataaagtactaaacaaatagtctgtgtatttttaaaattaccttcttcatttacttaaatgaattcaggttgttttgctrtggtatatccaggcacttgcttatttaaacattttcctgattaaggatcatttatcttttcactgtttcaccgagagtcattagtgctgccatcagttca

SEQ ID NO: 47003 - DNA, 201 bp, Homo sapiens
tcccattcacaattgcttcaaagagaataaaatacctaggaatccaacttacaaaagatgtgaaggacgtcttcaaggagaactacaaaccactgctcaaygaaataaaagaggatacaaatggaagaacattccatgctcatggataggaagaatcaatatcatgaaaatggccatactgcccaaggtaatttacagatt

SEQ ID NO: 47004 - DNA, 201 bp, Homo sapiens
aatcaatatcatgaaaatggccatactgcccaaggtaatttacagattcaatgccatccccatcaagctaccaatgactttcttcacagaattggaaaaarctactttaaagttcatatgcaaccaaaaaagagcccacattgccaagtcaatcctaagccaaaagaacaaagctggaggcatcacgctacctgacttcaa

SEQ ID NO: 47005 - DNA, 201 bp, Homo sapiens
acagaattggaaaaagctactttaaagttcatatgcaaccaaaaaagagcccacattgccaagtcaatcctaagccaaaagaacaaagctggaggcatcasgctacctgacttcaaactatattacaaggctacagtaaccaaaacagcatggtactggtaccaaaacagagatatagaccaatggaacagaacagagccc

SEQ ID NO: 47006 - DNA, 201 bp, Homo sapiens
caaaacagcatggtactggtaccaaaacagagatatagaccaatggaacagaacagagccctcagaaataatgccacagatctacaccgatctgatcttcracacctatttaataaatggtgctgggaaaactggctagccatatgtagaaagctgaaactggatcccttccttacaccttatacaaaaattaattcaaga

SEQ ID NO: 47007 - DNA, 201 bp, Homo sapiens
accaaaatgtccaacgatgatagactggattaagaaaatgtggcacatatacaccatggaatactatgaacccataaaaaatgatgagttcatgtcctttstagggacatggatgaagctggaaaccatcattctcagcaaactatcgcaaggacaaaaaaccaaacaccgcatgttctcactcataggtgggaattgaac

SEQ ID NO: 47008 - DNA, 201 bp, Homo sapiens
attaagggaacagcattttagcagcaacagcaagttgtttatatgatatctgatcccagacattttgcatatctttaacatgatatgaatctatttttgasgtttgtaatgattatggtaaacaaccagatttccttgtgaagtagactcatgttatttctcagaatttatcacattatttatctgtatttcttccctgta

SEQ ID NO: 47009 - DNA, 201 bp, Homo sapiens
tactatgaacccataaaaaatgatgagttcatgtcctttgtagggacatggatgaagctggaaaccatcattctcagcaaactatcgcaaggacaaaaaamcaaacaccgcatgttctcactcataggtgggaattgaacaatgagaacacttggatacaggaaggggaacataacacaccggggcctgttttggggtggg

SEQ ID NO: 47010 - DNA, 201 bp, Homo sapiens
tccttgacctcttctgcacaatccactgtgagtgcaaggggaagaaataagtaccccctctcagcctgtagtcacatcttccctctctctatatggctatggacgcagtcccagaattctggatttcttgcatgtctgcctttaataagaaagcagagtttaaataggctctcactattgtttcgctgcttcacaccctcc

SEQ ID NO: 47011 - DNA, 201 bp, Homo sapiens
taatttctctctaatgataccttctcagttcattctctgggttcttggttatctctctcccctccgcttcttcttttctccagccctgtccttttttttcyttttttttttttttttttttttttgtagtgggcaggctaggaggcatgattaggattgatggaggaggggaactattccagttcatttattttttccctg

SEQ ID NO: 47012 - DNA, 201 bp, Homo sapiens
gatgcacgtatttcccatgggcattaatagtcgtttattaaaagttatgactaagtctccattctctccagctctggactttagccctgctctctttcackggtaacaccagagatgtaacctgggaccatacagaggaccatggttaacaagggcagcgcttgttatacccctggtaataggtatttactaggtttctta

SEQ ID NO: 47013 - DNA, 201 bp, Homo sapiens
ggtgggtggatcacctgaggtcaggagttcaagaccagcctggccaacatggtgaaatcccatctctacaaaagtacaaaaattaactgggcatgatggcrggtgcctgtaatcccagctacttgggaggctgaggcgggagaattgtttgaacccaggaggcggaggttgcagtgagctgagattgcaccattgcactcc

SEQ ID NO: 47014 - DNA, 201 bp, Homo sapiens
gccctggtgtgtgatgttcccctccctgtgttcatgtgttctcattgttcaactcccacttatgagtgagaacatgcggtgtttggttttctgttcttgtrttagtttcctgagaatgatggtttccagctttatccatgtccctgcaaaggacataaactcatccttttttatggctgaacagtattccatggtgccctc

SEQ ID NO: 47015 - DNA, 201 bp, Homo sapiens
gtctttgttctcattggtttcaaagaacatctttaattctgccttcatttcattatgtacctggtagtcattcaggagcaggttgttcagtttccatgtarttgagcggttttgagtgagtttcttaatcctgagttctagtttgactgcactgtggtctgagagacagtttgttataaagtctgttgttttacatttgct

SEQ ID NO: 47016 - DNA, 201 bp, Homo sapiens
gtgatgaacatcgatgcaaaaatcctcaataaaatactggcaaaccgaatccagcagaacatcaaaaagcttattcaccacgatcaagttggcttcaccakgggatgcaaggctggttcaacatacacaaatcaataaacataattcatcacataaacagaaccgaagagaaaaaccacatgattatctcaatagatgcag

SEQ ID NO: 47017 - DNA, 201 bp, Homo sapiens
ttgctctaaacttctagatcaaatattgtgaatgcaggaaaaacaattggtttaggagttcacacttatgttactaaatgaatgcttcttgattacatccmcaaagcactcagtgagcattgtcttcaattggtttaatgtaattttcacttttccatatcagtttttaatgtggctacattgctttaattaattttaaaa

SEQ ID NO: 47018 - DNA, 201 bp, Homo sapiens
ttttccttccgttaccattgaggagaatttttaaacccatagcctttgattttactgtgaagcacattgatgtaatagtgagaatcatgccctaagtctgrgtttaccagaaattcagctttcgaatcacatccttcccaagtccctgtcagctgtgagcaatagcaaatcatttttccagtagcttaggagcctgtgaat

SEQ ID NO: 47019 - DNA, 201 bp, Homo sapiens
ctttgggagtctgaggtgggtggattgcttgaggccaagagtttgagaccagcccatgcaacatggcaagaccctgtgtctacaaaaaaaaaaaaaatacmcaaaaattagctgggcatggtgacatgtgtctgtagtcccagctacttgaaaggctgaggtaggaggattacctgagcctgaagaggttgaggctatagt

SEQ ID NO: 47020 - DNA, 201 bp, Homo sapiens
ggtaggaggattacctgagcctgaagaggttgaggctatagtgagccatgattgttccactgtaaagcctggacaacagagctagaccctgtctcaaaaawaaaaaaaagggttgttgcgggggatggatattataaaggatacagatgaatagccagaagaagtacatggggcgaggtccagaagggtctgaagcatgag

SEQ ID NO: 47021 - DNA, 201 bp, Homo sapiens
tcagtgagagtttttatggaggttcattatatagatgtgattgattaaatcattggccattggtgatctatattcagctcctctcccctccctggagattwgggggtaggagtgagaattccaactttctagtcatgtagttggattctctggcaacaggggtcaatgaagaatccccccattagcgtaaacttaggtatg

SEQ ID NO: 47022 - DNA, 201 bp, Homo sapiens
atgcacgtatttcccatgggcattaatagtcgtttattaaaagttatgactaagtctccattctctccagctctggactttagccctgctctctttcacgsgtaacaccagagatgtaacctgggaccatacagaggaccatggttaacaagggcagcgcttgttatacccctggtaataggtatttactaggtttcttaa

SEQ ID NO: 47023 - DNA, 201 bp, Homo sapiens
aaataatattgcccgtgggccagtccctaaaagtaaatgtttccaataattttttggcatccaatgttttactaacactaatttggtcgcatttgcagacmttacctcttcaatgttcatattcttcctaaacaattgtttattttgaaagagagtttgttctagtcaatatcagtccacttctaatgaatttttccccaa

SEQ ID NO: 47024 - DNA, 201 bp, Homo sapiens
ttatgtgccagatactgttctatgcttaaaatacacctgtgaatcaaatagacaaagacaattaaacattttagatactatctagaaaggggaacaggcgrggagacaaataaaaactcacaaagaatcttattttatcacatgagcattaaaaaggtcgctttgtgattgtgagcttgaataagcctgccaatttttgct

SEQ ID NO: 47025 - DNA, 201 bp, Homo sapiens
atggtggcaggcaagagagtatgtgcaggggaacttccctttataaaatcatcagatcttgtgagacttattcactatcatgagaacagcatgggaaaaaycagcctccatgattaaattacctcccactaggtccctcccatgacatgtgggatttatgggagctacaattcaagatgagatttgggtggggacacagcc

SEQ ID NO: 47026 - DNA, 201 bp, Homo sapiens
tattcaaaaatgctttgtagatagctacactaagcattctaaatctttatttcttggttctagcaaagtattgacaaatttcaggttttcttttttttttwtttttagagatggagtctcactctgtcacccaggctggagtgcagtggcaagatctctgctcactgcaagctccgcctcccgggttcacaccattctcct

SEQ ID NO: 47027 - DNA, 201 bp, Homo sapiens
gatgagggtaatgtttatttgtcattataaatctggaaagataaaccctgtgctttccctgttaaggggctggataggaatacgtgttcagcaagtcagtaaaaaaaaaaaaaaaaaattgtatattttgaaagttgattccaagtccaaatcttggaaacagagatctctgtttttgcgtttgttcttttcctttgttct

SEQ ID NO: 47028 - DNA, 201 bp, Homo sapiens
atgagggtaatgtttatttgtcattataaatctggaaagataaaccctgtgctttccctgttaaggggctggataggaatacgtgttcagcaagtcagtaaaaaaaaaaaaaaaaaattgtatattttgaaagttgattccaagtccaaatcttggaaacagagatctctgtttttgcgtttgttcttttcctttgttcta

SEQ ID NO: 47029 - DNA, 201 bp, Homo sapiens
taaatggatcttttacttatgaatgattttgtaacatcatacatttgtcatttggaaaacattggttcactgatttacacagatcttccaaatgtttatacatttcattctacaatgcttaaaaatcacattcattaatatccaccaatcttatcagaaaaagggaaggtgtcaatgacgcccatggtgatagatatgagt

SEQ ID NO: 47030 - DNA, 201 bp, Homo sapiens
ccttcatcttggatcaaaatggtgagaaatttaaaaccgagaatttccctgaaacactggtttttaaaccttctctagtgaaggttttttttttttttttwaattttcaattacttgcagatcaatgcaaggtcctattgcacgcctgagcagtttgcaacttgcatggcatgagactcaccttatgagttcagcagcact

SEQ ID NO: 47031 - DNA, 201 bp, Homo sapiens
agatcaagaccatcctggccaagatgctgaaacgccgtctctactaaaaatgcaaaaattaggcaggcgtggtggcaggcacttgtagtcccagctacccrggaggctgaggcaggaaaatcgcttgaaaccaggaggcggaggttgcagtgagctgagatcatgccactgcactccagcctgggtgatagagtgagactc

SEQ ID NO: 47032 - DNA, 201 bp, Homo sapiens
ttcttctttcaggatgttaacaaagaagaatcaagtagctattatcagaattcagttttgttttctgtggaaatctctttccctaacaggttataacaatycagtggtgtgcttgtcaaatttcagcattacctttatgttgaacatttaaaaaaataataacagtagcctacattttaaatatacttagtatgaaatggg

SEQ ID NO: 47033 - DNA, 201 bp, Homo sapiens
ctctgataaaacagactttaaaccaacaaagatcaaaagagacaaagaaggccattacataatggtaaagggatcaactcaacaagaagagctaactatcytaaatatatatgcacccaatacaggagcacccagattcataaagcaagtcctgagtgacctgcaaggagacttagactcccacacgttaataatgggaga

SEQ ID NO: 47034 - DNA, 201 bp, Homo sapiens
tggatatacagaagacaacagtagacactggggactactggataggggagggaaagaggggacgtggactgaaaaattactttttgggtactatgctcagyacctgggtgacaggatcatttggaccccaaacctcagcatcacataatatactcatgtaacaaacctgcacgtttaccccctgaatccaaaataaaagtt

SEQ ID NO: 47035 - DNA, 201 bp, Homo sapiens
ctgaaggatgagagagaacagaatttattgggagaaaaggaaaaaattctcagcaaagtgagaggggttcctgttaacaggcccccatttcacagattgartcctggtttatcacacagaaataggagaggccaggctcctccccactgcaaatagcaccaacttcccaaggctgcaccctgtcctctcagtgctcaggct

SEQ ID NO: 47036 - DNA, 201 bp, Homo sapiens
ttcaaacatcttgagcaacaggatctttgtttctgacgaaaactcatgtagaagccacatgtgaagagttaagtgcagacttggtctaagtgaaacaggtraaagaaacatggccacttgctttagctagaatcactacctaaactatggtattcacatcatcaagaatgtacacgatggatatatgatccaagctcttgc

SEQ ID NO: 47037 - DNA, 201 bp, Homo sapiens
gaagagttaagtgcagacttggtctaagtgaaacaggtgaaagaaacatggccacttgctttagctagaatcactacctaaactatggtattcacatcatmaagaatgtacacgatggatatatgatccaagctcttgcttttctcctgcctcctcaaggtggtccctgaagaaattctgaacagattttctcaaagttgc

SEQ ID NO: 47038 - DNA, 201 bp, Homo sapiens
aaaccaggaggcggaggttgcagtgagctgagatcatgccactgcactccagcctgggtgatagagtgagactccatctcaaaaaaaaaaaaaaaaaaaaraaagaaagaaagaaagaaaaccaagtcaatgttgattttattgagatgtaagagggttatattctaaatttagcagggaagaggcagatttccctaggaa

SEQ ID NO: 47039 - DNA, 201 bp, Homo sapiens
tttcaaagtgatccaggtccttttaccaccagagaggaagaaagaggattaagctgaaattaatgttttgatgaagatgaggtggatggtaaattgacccragggaagcaaaaaaaaatcaacttgccacatgttagcaaccgagacctcatgattgatgttcagtgacttggaaattctctccagggcaaactgcatttt

SEQ ID NO: 47040 - DNA, 201 bp, Homo sapiens
ctaattcaaccattggcgaacactttattctgtcatgcattcattgcaaattattaccaaacaccagcgctgtgcttaggttctaagaggaacatgtcccmtattctcatggaattcacagtatagtgagagaggctgataacaaacagtaattacttaatcacaactgctaattacaactactgtgagaatttataatac

SEQ ID NO: 47041 - DNA, 201 bp, Homo sapiens
aatgaaatataataatgctaaacaaaatttacttttatattttaaaaagactatatgcattcagtataggagaggcctggttttataggaggtcacgtgcrcaggacctaaaggcagtggaaataataaatgataaaagtgtttgaattttgtatatttttcttatatatttaccttatctttggcattgtgttaagcaag

SEQ ID NO: 47042 - DNA, 201 bp, Homo sapiens
cattaattagaaacctattcatatgggaaacacttgaaaatattggctgaagggttggcttagagaatagaagacttcacacacacacacacacacacacrcacgcgcgtgcgtatattccttacacgcaactattaagttggtgcaaaagtattgcggtttttgcaaaaactgccattacttttgcattaacctaatatg

SEQ ID NO: 47043 - DNA, 201 bp, Homo sapiens
taaagcattttgcctacgtcatcttagacttttggtgaagtgatggatttcaaacatataacagttactttctttgatttgttgccaatgaaatttacgaratataaagtggcatccaaagagtgagttttggtaacatatttttggctttccaaagccagggcatttttgtcatgacaccttaagagttatttaactatt

SEQ ID NO: 47044 - DNA, 201 bp, Homo sapiens
ggcggactgatcacctgaggtcaggagttcgagactagcctggccaacaatgtgaaatcccatctagactaaagatgcaaaactcagctgggccttgtggyatgttcctgtaatcacagctacttgggaggctgaggcaggagaatcgcttgaacctgggaggcggaggctccagtgagccaagatcatgccactgcactc

SEQ ID NO: 47045 - DNA, 201 bp, Homo sapiens
ccttgagtaattcacttaatcactacacctcatttttatattttttttgattaatgaacaaagtgaaggtaaagcattttgcctacgtcatcttagacttytggtgaagtgatggatttcaaacatataacagttactttctttgatttgttgccaatgaaatttacgagatataaagtggcatccaaagagtgagttttg

SEQ ID NO: 47046 - DNA, 201 bp, Homo sapiens
tgccagttaatattccagccaatggtgtataaaaatatccatttcctcacatctggtcatagtggatattattagtctaatatacaagttcacacacatgwgtaattttaatgtgcatttctttggttattactgaagtttagtaacatgttttatttagcatttgtctttcattatctgagaactactaatactctcctt

SEQ ID NO: 47047 - DNA, 201 bp, Homo sapiens
gcggactgatcacctgaggtcaggagttcgagactagcctggccaacaatgtgaaatcccatctagactaaagatgcaaaactcagctgggccttgtggcrtgttcctgtaatcacagctacttgggaggctgaggcaggagaatcgcttgaacctgggaggcggaggctccagtgagccaagatcatgccactgcactcc

SEQ ID NO: 47048 - DNA, 201 bp, Homo sapiens
gacaattggcttgtatccttgagtaattcacttaatcactacacctcatttttatattttttttgattaatgaacaaagtgaaggtaaagcattttgcctrcgtcatcttagacttttggtgaagtgatggatttcaaacatataacagttactttctttgatttgttgccaatgaaatttacgagatataaagtggcatc

SEQ ID NO: 47049 - DNA, 201 bp, Homo sapiens
ttatatcactgtataatttaaggagaatttagaactttaaatattgagatttctatccaagatctgtttctctatttcagctttgttatatatccctcagmataattttataaatgtattcatataagactgcacattttctggtaggtttatgaccagatgttttttagtagataccctacgttcatttaatggttgatt

SEQ ID NO: 47050 - DNA, 201 bp, Homo sapiens
atgggctagttgagaaggtagacattaatgaaaatacataactaaatataaaagcaagagagaaagaaaaaaaggaaggacagaaagaagaaagaaagaaagagagagagagagagaaagacagagaaagaaagaaaggaaaagaaagaaggataaaaagaaaaacagatgcataattctgaaatcacaactgtgatgagt

SEQ ID NO: 47051 - DNA, 201 bp, Homo sapiens
tcctttgggtatgtacccagtaatgggactgctgcgtcaaatggtattgctggttctaggtcattgaggaattgccacactgtcttccacaatggttgaamtaatttacactcccaacaacagtgtaaaagcattcctatttctccacatcctctccagcatctgttgtttcctgactttttaatgatttctattctaact

SEQ ID NO: 47052 - DNA, 201 bp, Homo sapiens
acacgcacgccacacacacacacacatacatacatgtgtgcttcttggggtcctagaatttctagcttctcctcactgagaaactggtgaggagaatgctscttctgtcactgtccaaattgtgctgattcttctttgtgtatgccaccctgttctcttcttctgctggtctttgctaggacagtgtattgacatagaagt

SEQ ID NO: 47053 - DNA, 201 bp, Homo sapiens
tgggctagttgagaaggtagacattaatgaaaatacataactaaatataaaagcaagagagaaagaaaaaaaggaaggacagaaagaagaaagaaagaaagagagagagagagagaaagacagagaaagaaagaaaggaaaagaaagaaggataaaaagaaaaacagatgcataattctgaaatcacaactgtgatgagtg

SEQ ID NO: 47054 - DNA, 201 bp, Homo sapiens
tatattctttgcctattttagatacttaggaaactctcatttcctagaaggttaaaaccaggaagtaacatccaaatgtaaaaaagtcacttagccaattyattcgtattagtaacaattgattttgtagagtcttgtagagtcttgaaaacaaagaaaaacaatctttcatcaaatatttgattattttgtgtctcaatt

SEQ ID NO: 47055 - DNA, 201 bp, Homo sapiens
attaatgaaaatacataactaaatataaaagcaagagagaaagaaaaaaaggaaggacagaaagaagaaagaaagaaagagagagagagagagaaagacagagaaagaaagaaaggaaaagaaagaaggataaaaagaaaaacagatgcataattctgaaatcacaactgtgatgagtgctacaaaggaaaggtaaatata

SEQ ID NO: 47056 - DNA, 201 bp, Homo sapiens
gggttcttgagttcttgtctcttgaccaggaagagttagtcacgcagacactctgaaggatgagagagaacagaatttattgggagaaaaggaaaaaattmtcagcaaagtgagaggggttcctgttaacaggcccccatttcacagattgaatcctggtttatcacacagaaataggagaggccaggctcctccccactg

SEQ ID NO: 47057 - DNA, 201 bp, Homo sapiens
aatgaaaatacataactaaatataaaagcaagagagaaagaaaaaaaggaaggacagaaagaagaaagaaagaaagagagagagagagagaaagacagagaaagaaagaaaggaaaagaaagaaggataaaaagaaaaacagatgcataattctgaaatcacaactgtgatgagtgctacaaaggaaaggtaaatataata

SEQ ID NO: 47058 - DNA, 201 bp, Homo sapiens
ccatcaatgggtctaaataaccttttcaaggttatttatagtagtcagagtatgatacttaaattatgtttgatttagttcttttggtagttaactttttrcagtacaaataataccacaagttatttgagaaatagtcttttagataagataggttataatgaggtgttttatagggggcttttctgaatcttgacaagt

SEQ ID NO: 47059 - DNA, 201 bp, Homo sapiens
tggagtgcagtggtgtgatcttggctcactgcaacctccatctcctgggttcaagccatttttctgccttagcctcctgagtagctgggactacaggtgcrtgccaccatgcccagttaattttttgtatttttggtagatacgaggtttcgccatgttagccaggatggtctcaatctcttgacctcgtgatctgccccc

SEQ ID NO: 47060 - DNA, 201 bp, Homo sapiens
cccctccttttcctgtcgccctccgtgaggctccctgtgaggctgtggggctttatcccccgagccccctcccttaggtggagatgctttccttctcgccwgggttctcgttcctctcagctgtctactgttgcctgcctctagctggggaggcggggtgcgaggagaaagacgtcgtttgttgtggtgaagctttatcca

SEQ ID NO: 47061 - DNA, 201 bp, Homo sapiens
aaggaaaatactcatttagatatgtgttctgatgtgtttattaaaagttctaactctgtgtatagagccacacctagaaaaggctatgaactttttgcttsctaggaaagtggtgtggaaacaaacatgagagcctgagagcaggagctggcatcgattacatggtgccgaaatagggctgtggtgattgtgtggtaggtt

SEQ ID NO: 47062 - DNA, 201 bp, Homo sapiens
ggctcacgcctgtaatcccagcactttgggaggctgaggcgggcatatcactaggtcaggagatggagactatactggctaacatggtgaaaccccatctytactaaaaatacaaaaaaaaattagccgggcatggtggcgggcgcctgtagttcccagctactcgggaggctgaggcaggagaatggtgtgaacccggga

SEQ ID NO: 47063 - DNA, 201 bp, Homo sapiens
tttcaatatggagatacatgttcttcagttctaggaatttttcttttttgataattaattgtcccaatttctttgttctttttatctgtagttcttattarcatgttagaactcctaaatgaatcctttatttcaatctttctcttctataatcatttctttgtctttttgttctactttctgcaagattttatcaacttt

SEQ ID NO: 47064 - DNA, 201 bp, Homo sapiens
atctctactaaaaatacaaaaaaaaattagccgggcatggtggcgggcgcctgtagttcccagctactcgggaggctgaggcaggagaatggtgtgaaccygggaggtggagcttgcagtgggccgagatcgcgccactgcactccagcctgggcgacagcgtgagactccgtcaaaaaaaaaaaaaaaaaaaaaaagaac

SEQ ID NO: 47065 - DNA, 201 bp, Homo sapiens
cgggcatggtggcgggcgcctgtagttcccagctactcgggaggctgaggcaggagaatggtgtgaacccgggaggtggagcttgcagtgggccgagatcrcgccactgcactccagcctgggcgacagcgtgagactccgtcaaaaaaaaaaaaaaaaaaaaaaagaacagaatgttgtgggatatttccagttgatcac

SEQ ID NO: 47066 - DNA, 201 bp, Homo sapiens
gagagttcagtaacttgtttaaggtcctgtagctagtgtcaagactaaactctttcttacttgtacttcattgtcttttaatcatagcacattattaatgkggaaattgataaagacatttttgttggaagtttaattgaactttgaacttgaaaatttaacttgtagacattttactcctgaaaaagggggcttaagtaa

SEQ ID NO: 47067 - DNA, 201 bp, Homo sapiens
actggatcaatagtaatccttggtttatgacgcactctcatcattggtccatgcataacctatttatttgtttatttgcttttaataatgtaatacataaraatttcaaatattcatattaggtggagaacttaggagcaaaatgaaaatgtataatttccatatatgcgtggtacaaaaataaactcttatatttcaaaa

SEQ ID NO: 47068 - DNA, 201 bp, Homo sapiens
gggcatggtggcgggcgcctgtagttcccagctactcgggaggctgaggcaggagaatggtgtgaacccgggaggtggagcttgcagtgggccgagatcgygccactgcactccagcctgggcgacagcgtgagactccgtcaaaaaaaaaaaaaaaaaaaaaaagaacagaatgttgtgggatatttccagttgatcact

SEQ ID NO: 47069 - DNA, 201 bp, Homo sapiens
cttttctgggtctccggcttttcatccttttgtgcagattttggacttcccagcctccataaccatgagagcaaattcattaaaataagctatttctacayaccctatttgctttctagaaagctccaatagggtacaggaagcttgcccatgtatttggtcttacgttagcccaaggaacaagatgctgccttcctctcc

SEQ ID NO: 47070 - DNA, 201 bp, Homo sapiens
cagctactcgggaggctgaggcaggagaatggtgtgaacccgggaggtggagcttgcagtgggccgagatcgcgccactgcactccagcctgggcgacagygtgagactccgtcaaaaaaaaaaaaaaaaaaaaaaagaacagaatgttgtgggatatttccagttgatcactttcctcctttccctaccagaagcataag

SEQ ID NO: 47071 - DNA, 201 bp, Homo sapiens
cttttttcccccctaatttccaaatttcagtattttaatttttgatggattggtgcttattttcctatctttattgatattagatactgacagtgaagaawaatattcaataataaaaatttgtgcttcattttaaagtattttaaatgaataataataataaacatataaccctacatagcttattgtacatttgtttat

SEQ ID NO: 47072 - DNA, 201 bp, Homo sapiens
ttgacttccttattagtgactttatctgaggcatggtctaccatagtagtgattacactgcccattaaccagtgagtattgatctatttattcctgaaaawtttccctccccatttaaaaataagcagaaataaaaacctggcttcgtcatttgtgatggatgctaaagtcatgactagataaaagacttcaatttatcag

SEQ ID NO: 47073 - DNA, 201 bp, Homo sapiens
agtaagaaaaattctttaatctctactcttttcctctaaccctgggctctgtggagcatgggagaatatacagtctctacctgaaaggcataaaaaagagractcagtttaaataaaggcaaggaagtgagagctattgtttagacaagagtgtgagtgtgttggagtaatttggtgacaataaagatggttccagatggc

SEQ ID NO: 47074 - DNA, 201 bp, Homo sapiens
tgtttttttttgttgcttgtatgtcttcttttgataagtgtctgttcatgtcctttgcctactttttaatggggttatttgtttttcacttactgaattayttaagttccctataaattctggatattagacctttgtttgatgcataatttgtaaatattttctcccgttctgtaggttgtctgtttaccctattgatag

SEQ ID NO: 47075 - DNA, 201 bp, Homo sapiens
ctctgaaggcaaaactcaggtccctgaagctcatccactctgagccttcaagcgattcatggattacagtttaagttttcctgccccagcattgttttccrtggaggtttctgctcttgggtgtctgctctgttgagttgtgattctctatattcacctgtctctccaaattttgggaacagctaattgtctgtgatttca

SEQ ID NO: 47076 - DNA, 201 bp, Homo sapiens
tatggtcagctcaattattttatttcaataatgtgtgtgctttccctgattttcttagaaaacttaagccaatacatgccctggggtctaaggaacaccgycccccaccacctggttgactaaatttatgcataacccaataaggacatcattagagttaaaagaaaggatgaaaattccctagcctcaaagtgttatttt

SEQ ID NO: 47077 - DNA, 201 bp, Homo sapiens
aaaacaactatttttcactttatagatagtatcctactatttttatatagaataactttctcttgtataccctgagacatccaaatttgtttactttttcytccaggttttacttccagtattttaatccgttttcttaatatctgctaaatattcaagctctccctttcatttgagcagtagagcctcaggcaaaatgca

SEQ ID NO: 47078 - DNA, 201 bp, Homo sapiens
cacacacacacacacatacatacatgtgtgcttcttggggtcctagaatttctagcttctcctcactgagaaactggtgaggagaatgctccttctgtcaytgtccaaattgtgctgattcttctttgtgtatgccaccctgttctcttcttctgctggtctttgctaggacagtgtattgacatagaagttcattatttc

SEQ ID NO: 47079 - DNA, 201 bp, Homo sapiens
gtgttactgaagggttttattttttaattctttcactaggggagtcaaaactattacttcctgcttaacctataactctgatgatggctttgccatgttgwcatggttttttgtttgtttgtttggcctatattctgagaattctgtgtatcttggctctgccccatgtgagaatgagcgagatttattatttcatgggga

SEQ ID NO: 47080 - DNA, 201 bp, Homo sapiens
atgaaaatacataactaaatataaaagcaagagagaaagaaaaaaaggaaggacagaaagaagaaagaaagaaagagagagagagagagaaagacagagaaagaaagaaaggaaaagaaagaaggataaaaagaaaaacagatgcataattctgaaatcacaactgtgatgagtgctacaaaggaaaggtaaatataatag

SEQ ID NO: 47081 - DNA, 201 bp, Homo sapiens
cttcctccctttttccttccccatctagtaatccccagtgtctattgttcccaactttgtctatatgtgcccaatgtttagctcccacttataagtgagarcatgcagtatttggttttctgtttgtgcattaatattattaggataatggcttccagctccatccatgttgttgcaaaggacataactttgttcttttta

SEQ ID NO: 47082 - DNA, 201 bp, Homo sapiens
tggagtgcagtggcatgatcacagctcactgcagcctcgacctcacaggctcttatctggcatttgggtccaagatgcttaggcatagtctaagtttagtkgtacaattcttcattgagatattagataaactaaaatctttgtggagatttgtttctttgttagatttatactcatttaaaaaatctaatagtactgtac

SEQ ID NO: 47083 - DNA, 201 bp, Homo sapiens
gagtgcagcccacagaggacgagccaaagcagggtagggcatcacctcacctggggttggggaatttccctttcctagccaagggaagccgtgacagactrtacctggaaaaatgggacattcccgactaaatactgtgcttttccaatggtcttagcaaatggcacaccaggagattatatcccacgcctggctcagcag

SEQ ID NO: 47084 - DNA, 201 bp, Homo sapiens
atcaccagcaatggaataaagctggatggagaatgactttgatgagttgacagaagtaggcctcagaaggtcagtaataacaaacttctccaagcaaaagragcatgttctaacccattgcaaggaagctaaaaaccttgaaacaaggttagacaaatggataactagaataaagagtgtagagaagaccttaaatgacct

SEQ ID NO: 47085 - DNA, 201 bp, Homo sapiens
ccaggagaacttccaacctagcaagggaggccaactttcaaattcaggaaatacagagaacaccacaaagatactccttgagaagagcaaccccaagacayataactgtcagattcaccaaagttcaaataaaggaaaaaatgttaagggcagccagagagaaaggtcgggttacccacaaagggaagcacatcagactaa

SEQ ID NO: 47086 - DNA, 201 bp, Homo sapiens
ctaactatcctaaatatatatgcacccaatacaggagcacccagattcataaagcaagtccttagagacctacaaagagacttagactcccatacaataakgggagattttaacacccactgtcaatattagacagatcaacgagacagaaggttaacaaggatatcaaggaattgaactcagctctgcaccaagaagacc

SEQ ID NO: 47087 - DNA, 201 bp, Homo sapiens
gattaagaaactcactcaaaaccgctcaactacatgaaactgaacaacctgctcctgaaggactaagggtttaataatgaaatgaaggcagaaataaagaygttctttgaaaccaatgagaacaaagacacaacataccagaatctctgggacgcatttaaagcagtgtgtagagggaaatttatagcactaaatgcccac

SEQ ID NO: 47088 - DNA, 201 bp, Homo sapiens
ttttttgaaaagatcaacaaaagtgatagaccactagcaagactaataaagaagaaaagagagaagaatcaaatagatgcaataaaaaatgataaaggggrtatcatcaccgatcccacagaaatacaaactaccaccagagaatactacaaacacatctacacaaataaactagaaaatctagaagaaatggataaattc

SEQ ID NO: 47089 - DNA, 201 bp, Homo sapiens
caataacaggctctgaaattgaggcaataatcaatagcctaccaaccaaaaaagtccaaaaccagacggattcacagccgaattctaccagaggtacaagraggaactggtagcattccttctgaaactattccaatcaatagaaaaagagggaatcctccctaactcatttcatgagtccagcatcatcctgataccaaa

SEQ ID NO: 47090 - DNA, 201 bp, Homo sapiens
gatctaattaaactaaagagcttctgcacagcaaaagaaactaccatcagagtgaacaggcaacctacagagtgggagaaaaattttgcattctacccatmtgacaaagggctaatatccagaatctacaaagaacttaaacaaattttaccagaaaaaataaacaaacaaccccatcaaaaagtgggcaaagcatatgaa

SEQ ID NO: 47091 - DNA, 201 bp, Homo sapiens
ttgttttaagaattaagtgagttgctatttgtaaagcacttagtacagtgtttattaaatagatataaataaataccccagcaagtctaaaaaaagagttrtctctcttttttttttttttttgagatggagtatcgttctgtcgccaggctggagtgcagtggtgcgatctgggctcactgcagcctccgcctcctgggt

SEQ ID NO: 47092 - DNA, 201 bp, Homo sapiens
ctcccttttccctgcacccccaccggcaggccccagtgtgtgatgttccccaccctgtgtccatgtgttctcattgttcaattcccacctatgattgagarcatgcggtgtttggttttctgtccttgcgatagtttgctcagaatgatggtatccagctccatccatgtccctataaaggacatgaactcatcctttttt

SEQ ID NO: 47093 - DNA, 201 bp, Homo sapiens
tagaaagcttatagtagattataatacagggatttcttaagggtcattagggcttgtttatatatttttattttctctgttgggtcgaaaatgaagtgacstctctagttaataggaaataatgtttaggacttcatagctgtttcaacatatttgctctcacatattgtaatgtacacatcccaatattgtagacatctc

SEQ ID NO: 47094 - DNA, 201 bp, Homo sapiens
gaggactgcaaatgataccattcagtccctgatttctctttcgtcctaccttggttcagcctctttgaaattgtttcttttttaagataaattcttttcamgggtgacaagatggctatagatatcctgtctcacatcctcacaacttccaatctagtagaagaaaagccattggagaatattttatttgtgtgtattatg

SEQ ID NO: 47095 - DNA, 201 bp, Homo sapiens
ttcagcctctttgaaattgtttcttttttaagataaattcttttcaagggtgacaagatggctatagatatcctgtctcacatcctcacaacttccaatcyagtagaagaaaagccattggagaatattttatttgtgtgtattatgaattttataataaatgtaaactaaaaaaattggccaactaataaatcttgtaaa

SEQ ID NO: 47096 - DNA, 201 bp, Homo sapiens
acaaataatagcaaatagctctgtcattgttctctttggggctctaaattgttgaagcttcagccattgcagggaaagccttcctgagtttcaggggaccmagccctgccctgagtttcacctgactgatagaggaaaacagccaagacaggagtctggcagagaagccactggccagtgaaaaatgcacagtagaggatt

SEQ ID NO: 47097 - DNA, 201 bp, Homo sapiens
ataaactgtaatgtatgattactgtattgatgcagttgcctactgatgaggaaactaatatttcagagctaataagaggtataggtgggatttgaacccakgcagtctgatccctgagtcagtgcacttatctctatattatgtcacactcacacttttggggtaccttgtgtagcttttcaaagtcttcactaggaccta

SEQ ID NO: 47098 - DNA, 201 bp, Homo sapiens
tcagcctctttgaaattgtttcttttttaagataaattcttttcaagggtgacaagatggctatagatatcctgtctcacatcctcacaacttccaatctwgtagaagaaaagccattggagaatattttatttgtgtgtattatgaattttataataaatgtaaactaaaaaaattggccaactaataaatcttgtaaag

SEQ ID NO: 47099 - DNA, 201 bp, Homo sapiens
aattcttttcaagggtgacaagatggctatagatatcctgtctcacatcctcacaacttccaatctagtagaagaaaagccattggagaatattttatttrtgtgtattatgaattttataataaatgtaaactaaaaaaattggccaactaataaatcttgtaaagtgatttcttaaaattggtttaacatattcatgct

SEQ ID NO: 47100 - DNA, 201 bp, Homo sapiens
agaaagaagaatgcccatggagttgaaaaaaatcaatctttctaccatctcaccagttggaaacttcaagtcagttgctaacactcctcatccctgctgcyctcacctactcttcagaatgcaacctatcgtgtcccttgtacatttaaagctctcttaattgatctctctactgactttcaagattaactgatactgagt

SEQ ID NO: 47101 - DNA, 201 bp, Homo sapiens
gaagaaaagccattggagaatattttatttgtgtgtattatgaattttataataaatgtaaactaaaaaaattggccaactaataaatcttgtaaagtgayttcttaaaattggtttaacatattcatgctatattttacccctgttgtgcacatagggaatattaatgggcagtaactacatctcatttctcaggctttt

SEQ ID NO: 47102 - DNA, 201 bp, Homo sapiens
atgggtgcagcaaaccaacatggcatgtgtatacctatgtaacaaacctgcacgctgtgcacatgtaccctagaacttaaagtataataataataaaaatsttaaataaaaaaaagaaaagaaggttatctctaggctgtggaaactggatgattgttaccactttaattcttttctctactttccaaatatttaaaaatg

SEQ ID NO: 47103 - DNA, 201 bp, Homo sapiens
tgcacacgtatgtttattgcagcactgttcacaatagcaaagacttaggacccaaatgcccatcaacgatagactggataaagaaaatgtggcacaggggraggagccaagatggccgaataggaacagctccggtctacagctcccagcgtgagcaacgcagaagacgggtgatttctgcatttccatctgaggtagcag

SEQ ID NO: 47104 - DNA, 201 bp, Homo sapiens
gttcacaatagcaaagacttaggacccaaatgcccatcaacgatagactggataaagaaaatgtggcacagggggaggagccaagatggccgaataggaasagctccggtctacagctcccagcgtgagcaacgcagaagacgggtgatttctgcatttccatctgaggtagcaggttcatctcactagggagtgccagac

SEQ ID NO: 47105 - DNA, 201 bp, Homo sapiens
atagcaaagacttaggacccaaatgcccatcaacgatagactggataaagaaaatgtggcacagggggaggagccaagatggccgaataggaacagctccrgtctacagctcccagcgtgagcaacgcagaagacgggtgatttctgcatttccatctgaggtagcaggttcatctcactagggagtgccagacagtgggt

SEQ ID NO: 47106 - DNA, 201 bp, Homo sapiens
tacgcccacggagtctcgctgattgctagcacagcagtctgagatcaaactgcaaggtggcagcgaggctgagggaggggcgcccgccattgcccaggctygcttaggtaaacaaagcagccgggaagctccaactggctggagcccaccacagctcaaggaggcctgcctgcctctgtaggctccacctctgggggcagg

SEQ ID NO: 47107 - DNA, 201 bp, Homo sapiens
gcggatctctcggcagaaactctacaagccagaagagagtgggagccaatattcaacattcttaaagaaaagaattttcaacccagaatttcatatccagycaaactaagcttcataagtgaaggagaaataaaatacttcacagacaagcaaatgctgagagattttgtcaccaccaggcctgccctgaaagagctcctg

SEQ ID NO: 47108 - DNA, 201 bp, Homo sapiens
aggaagcactaaacatggaaaggaaaaaccggtaccagccactgcaaaatcatgccaaaatgtaaagaccatcgagactaggaaggaactgcatgaactamtgagcaaaataaccagctaacatcatattgacaggatcaaattcacacataacaatattaactttaaatgtaaaaggactaaatatcccaattaaaagac

SEQ ID NO: 47109 - DNA, 201 bp, Homo sapiens
gaaacccatctcacgtgcagagacacacataggctcaaaataaaaggattgaggaagatctaccaagcaaatggaaaacaaaaaaaggcaggggttgcaaycctagtctctgataaaacagactttaaaccaacaaagatcaaaagagacaaagaaggctattacataatggtaaatggatcaattcaacaagaagagcta

SEQ ID NO: 47110 - DNA, 201 bp, Homo sapiens
ccactagcaagactaataaagaaaaaaagagagaagaatcaaatagacgcaataaaaaatgataaaggggatatcaccactgatcccacagaaatacaaaytaccatcagagaatactaccaacacctctatgcaaataaactagaaaatctagaagaaatggataaatttctcgacacatacactctcccaagactaaac

SEQ ID NO: 47111 - DNA, 201 bp, Homo sapiens
cccagatactttctcactgttgtctctggggcactggaggataagacaggaacattagagctttatgagctatttggcttcatgccagggacatctcaackttgaaattattttggtgggcatctcttttcagctgcttttctttacctcctcttcaccagtgcatcatcacagggtgctgaaggtcttttcagaaagcac

SEQ ID NO: 47112 - DNA, 201 bp, Homo sapiens
cagaagctctttagtttaattagatcccatttgtcaattttggcttttgttgccattgcttttggtgttttagtcatgaagtccttgcccatgcctatgtyctgaatggtattgcctaggttttcttctagggtttttatggttttaggtctaacatttaagtctttaatccatcttgaattaatttttgtataagatgta

SEQ ID NO: 47113 - DNA, 201 bp, Homo sapiens
attatagagtagctgacagcatcaaaatatgattctttgtaaatctgtaagtactaatattcttaatatatgccaataatttagagaaaaaaagtaaactkcagtagaaaatttccaattaaatctgtagattttggtaaaattacttcctctagcgattaaaattgcattgtaatggttggcaaagttcccggatttggg

SEQ ID NO: 47114 - DNA, 201 bp, Homo sapiens
tatgacaagaaagcaggtttcataccaaacataaatattttccaatcagagctttttccaatgagatcaaagtttctgttacccaatagtggatgggtccragcagagactggatgacaacctgccagatttgttgaacctatgaaggttctctgattctctggaagacctctttctccctgcacatgtaaaaatcctccc

SEQ ID NO: 47115 - DNA, 201 bp, Homo sapiens
aaacttttcaagtaagtgatactatttttattttatagatgtggatcatgagatttagagagacgatgtaaaatatagccaagataatacagtctcagtcmgaggtggagctgagatttgaacccaagtctttttggaaacaaaatttgattctcaccacatttcattccagggaaaaaataattccatcctggctctgtt

SEQ ID NO: 47116 - DNA, 201 bp, Homo sapiens
ctttggtgttgtgtctagaaagttattgctgtaccagggtgatgtaggtttttatcctatgttaacttttaggagtcttttcagctttgtgggtctattayccaccttgagttaatttttattaggagtgtgaggtttgtgtctatattcatcttttagcatgtaggtgtccagttttttcagcaaaatttttttgaaaaa

SEQ ID NO: 47117 - DNA, 201 bp, Homo sapiens
cagacagaaaaatcaaacagggtaaaggggatgatagtcttggaggaagggagggatgcggttataaatagggtggtcagagtagtcctaactgaaaagawggatttgaatgaagacttgaaagagatgttgggaaccatgcagatgaaagcgggaagtacatcctagggagctagcttgcctgaaggctctaaatgggag

SEQ ID NO: 47118 - DNA, 201 bp, Homo sapiens
ctgccatgtcccctagttcttcaacctctgtatgtacatgctttgagtccaatgttaaaaaggtgacagtttaatcagttctttaacagatggataacaargattgccaacatcctagcctaagagagatccttccagtcctctcgcctttctccgctcagctaattccaccttttagggtctgtcactcttaactccaag

SEQ ID NO: 47119 - DNA, 201 bp, Homo sapiens
accctgcctcctccttttcccatccctttgcattgggccagcctttttctcttccgtgatactctctttcattactcttcttgatagttgaccagcagtgrcattgcattttattaccttttttttcccatacagaatagtggagacagggagcagaatttttctcagacttaggcaagttaatttgactgaaatagtata

SEQ ID NO: 47120 - DNA, 201 bp, Homo sapiens
tataccatcctgaaaacttccttcttttcttggttgtattcctgcttcctggatctcatgtcttcctctttattagtttgctcccttgttttgtagaacaygttctttaacagcgttcttaaaaaggtgaaagggaggtaaaatattttgagatttgcaagtctggaaatatcttttcctactgtcacgtttattgaaaat

SEQ ID NO: 47121 - DNA, 201 bp, Homo sapiens
aaagttatggttggagaaaaaagccgtctatggaaaagaacaagcattacctgtgtgtgagtcctactagattcatcagacttttgtcttctttgcctcayactttttaaatgtattatcttcagaaaaagcatttttacttgaaaataagtttgtgtttctgctacagcaagttcatctcacattgagttattgtccaag

SEQ ID NO: 47122 - DNA, 201 bp, Homo sapiens
tggaaaagaacaagcattacctgtgtgtgagtcctactagattcatcagacttttgtcttctttgcctcacactttttaaatgtattatcttcagaaaaarcatttttacttgaaaataagtttgtgtttctgctacagcaagttcatctcacattgagttattgtccaagactgccgtggtaaatatagtctgctccacc

SEQ ID NO: 47123 - DNA, 201 bp, Homo sapiens
cattgtgaatctccaagagatgagtaatgtctacatatttctcagacttatttgaccatagaacatctcacagatctagtgtcctgaggcacatgccttargaaactgcttcagtggctttaagccaaaggaaaagacattgagtgtgatttcctcagtacagactctcactaacaaaaagttggatgataaaatcaaatg

SEQ ID NO: 47124 - DNA, 201 bp, Homo sapiens
aagcttggtgtgtagtacagcagattctcagtcatttttaatttactctaagggtcaagagttagtaaatatagaagtccatgtgactttggggctttcaytgggcaaaaccacaagttttggcggaaacagataaagataagcacttattcttatttggcatagatagttccttccttctgcatcctactgctattttca

SEQ ID NO: 47125 - DNA, 201 bp, Homo sapiens
aaaagcatttttacttgaaaataagtttgtgtttctgctacagcaagttcatctcacattgagttattgtccaagactgccgtggtaaatatagtctgctycacctagaactgaacttattttcatatggattggtcctcctcagaaatttagcatgtgtataaacatgtttctttagctttcaaatgtgaatgagatcca

SEQ ID NO: 47126 - DNA, 201 bp, Homo sapiens
tctaccatgttagtctactctttggttttcctgctcttgcccctacctccaacccatagctccacagagcagctaagtgttcttttaaataagacgtgccwtgtctcatgtcaaggaaaacttcctagaagaacctataaaaaataatgtagtacgatgtttttgttatacttcaagaattgagactttttcatggagaga

SEQ ID NO: 47127 - DNA, 201 bp, Homo sapiens
gtcccaagaggagacttttgaaagttttggtaggagtcattactgatgagatagaatttatgtgtgctattttgccattctttttgtgtatgtcctatgtmtttttgtttctctatttctctgctactatctccttttgtgttaaatatttattttctagtatataattttaattccttggtcatttattttacttttttg

SEQ ID NO: 47128 - DNA, 201 bp, Homo sapiens
atttagaattctaggttagaaatgatttttccctcagaatttcaaaaacattgctctattgttttttagtttccagtttgctgctaggaagactgatgctrtagtgattcccaatcctttctttgtgtcttttctttaacttctctggaaactttttagtatcttttatcagttcccagtattttgaaatattttactgat

SEQ ID NO: 47129 - DNA, 201 bp, Homo sapiens
ttggacactaggaaacatcactatgattgtatcatttaaaaatatgaatatatttttgagaaggagcattgttatgcaagaatgctaacactctaccaatrtattttgcactgtcaaaactctctttagaatactgctttaacagctgtatttgcctacaaaaaatacaaataaactgaaaaaatctcagaggaaactcac

SEQ ID NO: 47130 - DNA, 201 bp, Homo sapiens
cttctttaagtgtaatatttcttttttaaaaaactgcctttacttccattttgagttatacagtaacaatgctaagtttgtatagctttatgtagaaagtraaaaaaaaaatccttgcttgtccaaagagtttactattttttgaatgagacagaacaagcacaaagatgtttatataaacccaagtgagaattttgactg

SEQ ID NO: 47131 - DNA, 201 bp, Homo sapiens
gcaggaatatggagggagctggctatattgtccgttattgtaattcttagtttccttggattgggttttgccatcctcctgaatctcaatgatctttgttygtgtccatattctgaattctatttctgtcatttcaaccagcctagcctggttaagaactcatgttggagaactggtgtgattgtttagaggacatataat

SEQ ID NO: 47132 - DNA, 201 bp, Homo sapiens
ttttccttgtttacttcttttttttttctttcattttctggaacaattccttgagtttttcttccaaccattttactaacattttaatttctgctctcctrttttcagttattgagattttttgcctggtgtttctgtttatggccttctaattttgttccatgaatgcaataagttctcctttctctcagaatattagta

SEQ ID NO: 47133 - DNA, 201 bp, Homo sapiens
gtccccagagtgtgatattccccttcctgtgtccgtgtgatctcattgttcaattcccacctatgagtgagaatatgcggtgtttggttttttgttcttgygatagtttactgagaatgatgatttccaatttcatccatgtccctacaaaggacatgaactcatcattttttatggctgcatagtattccatggtgtata

SEQ ID NO: 47134 - DNA, 201 bp, Homo sapiens
ccgctctccagaaaatatctgtatatattatttcccccttcacatcctcaacttaaaactaaatgccaaatctacagccagacctgtgactccgccctgtkctaggtctccacagatgcacacactttactcacagctctcttccaccctgtgtctcagcgagaaattccttctgggccccttgtgagaagagttcagatc

SEQ ID NO: 47135 - DNA, 201 bp, Homo sapiens
ttttggaaacaaaatttgattctcaccacatttcattccagggaaaaaataattccatcctggctctgtttttatttatagccagaaatggaccacctctractgtctccactgctgccattctggtctaggcttccctgatgttttgcctctattactgtaacatctcctaattgttttccctgcttctctctttgatcc

SEQ ID NO: 47136 - DNA, 201 bp, Homo sapiens
gtttattttctcatattctttaactgtatcttttgaagagcaaattttacttttgattatgcccaatttatcaagtttttatatggctcttttgattatgyccataatcacattagactttgcctaacccaagtttgcagagattttttcttttatgcttttatctagaaattttgtagttttaggttttaaaaaagttta

SEQ ID NO: 47137 - DNA, 201 bp, Homo sapiens
ttgtctcagcccaaaatctccttaagctgataagcaacttcagcaaagtctcaggatatacaatcaatgtacaaaaatcacaagcattcttatacaccaayaacagacaaacagagagccaaatcatgagtgaactaccattcacaattgcttcaaagagaataaaatacctaggaatccagcttacaagggacgtgaagg

SEQ ID NO: 47138 - DNA, 201 bp, Homo sapiens
ggtgcagcacaccagcatggcacatgtatacatatgtaactaacctgaacattgtgcacaggtaccctaaatcttaaagtataataataataaaaaaaagaaaaaaaaaaaagaaaatgtggcacatatacaccatggaatactttgcagccataaaaaaggatgagttcatgtcgtttgcagggacatggatgaagctgg

SEQ ID NO: 47139 - DNA, 201 bp, Homo sapiens
ttaaaaaagctaaaacaaaaaaagcaaaacaaagcaaagaacactacctactaggaaaaaaggaagggggccaaatcaatagagcatttagaagccctccyagcccctgcaaaaggactaattaatatatgacaaaaagtttcaatttcactaggaaccaagaagtgtaaattaaaacagccagccagacatcatgattgg

SEQ ID NO: 47140 - DNA, 201 bp, Homo sapiens
cccctaggctggagtgcaatggtgcaatcttggctcactgcaacctccacctcccaggttcaagcgattctcatgcctcagcctcccaagtagctgggacyacaggcgcccgccaccaagcccggctgatttttgtatttttagtagagacggggtttcatcatgttggccaggctggtctcgaactcctgacctggtgat

SEQ ID NO: 47141 - DNA, 201 bp, Homo sapiens
ggcagttgacttggagtttcagcccttcctcaggactttttggcatagtaataacattgcaaagttgctcacatttttcatacccttccattttatctgtgtgtgtgtgtgtgtgtgtgtgtgtttgtgtgtcttgtatgtggaatattcttacagctagtgacttaatatgctgatgaacacagagagctggattttttt

SEQ ID NO: 47142 - DNA, 201 bp, Homo sapiens
taaggatcagtaacttctccgaaataggtaataatagtgctaactgggaggtatttaggacataaaggtgttggggtgtgtgtgtgtgtgtgtgtgtgtgwgagagagagagagagagagagagagagagagagaaataagacatttttgctaaagaatatctgaagaaaaaaaaggccaaggacaaaatgttgtagaaaa

SEQ ID NO: 47143 - DNA, 201 bp, Homo sapiens
agggagtaataaccaaactgttcttctcatgttgttttaaaagcttctggtgtatatgcctttttattttttactcatcatacagtctattcagaaaaataaaaaaaaaaaaaccttaagtagctcttggcagaaggtcaaaaccagcatttcagggaaggtatttaaaagtcttttaagtgtgggctatttgtataagca

SEQ ID NO: 47144 - DNA, 201 bp, Homo sapiens
tgcccaatacctttatctttacctcagctgagcattcttccaccattctcttcttattcttcctttaaattgttaaaaagaaaaattccactttcacttattaaatatgattgagtaccaactgtgtgtaatacattaaaatacaggggagaagacctattagaaagcaattaacaataatacatgaaaagaatataaagc

SEQ ID NO: 47145 - DNA, 201 bp, Homo sapiens
catctttaaatgagtttggatcaaaaagctaattgttcctccagaatcaataaatgcctaaaacacggtcctctatttcttcctggtctatcaaaagcggygttctggcctttcctctttgaaatgggaatgaaaaagaatatgtttcggccttctgaaaaagaatatgtttcagccaacattcataaagttcagaatttg

SEQ ID NO: 47146 - DNA, 201 bp, Homo sapiens
ctgatcagacaggaagcggagctcaggtggtaatgctgttgcccacgggtcacctcctgctgtgcggcccagttcctaacaggccatggataggtgttggyctgtggcgcaagagttggggacccctgaactagagtacagtggttatgtgtggttccttttccctttagtcttgcagactccactcatttccaaagttac

SEQ ID NO: 47147 - DNA, 201 bp, Homo sapiens
cacggttcggatgactggcagtctgtttaggcgaggcccagaaacagaaagcaagtcttgtgaaagtcagaatctgggagctttgcagatgcgtcaaggtrgccttcagattgcctctctgttttcaatgtgtcccttatctcactcttccaaacatcctatgctgtaagagggtaaaaggaaaaggaaaataagaaagga

SEQ ID NO: 47148 - DNA, 201 bp, Homo sapiens
agtagagacggggtttcaccacgttagccaggatggtctcgatctcctgacctcgtgattcacccaccttggtctcccaaagtgctgggattacaggtatragccacggcacctggccaggttttctattagttttaaaagttaagcaggaggagagccagaagacaatttcaattctctgttcataagttttcacttctt

SEQ ID NO: 47149 - DNA, 201 bp, Homo sapiens
agcaggttataaacttgtggaactcattagtcccaaaaggtgggactggcaggaaatgtaaatgaattcagaaatcttttagccagatttatgaatgagarccacaaatggctactaagaaaactggggctatacctgacttttacaacagaagtcagagaacagctttgagctcccgcacaggatgactcttgagactta

SEQ ID NO: 47150 - DNA, 201 bp, Homo sapiens
acaaaacaattgacagattttgctttacaatatctgtgatttttgtttcatacctttgtccatctttcaatctttgtaaacagacctagttctttattgcrtagaccttataatcccttaataccctgattctaaactgaatgagctttaaaagtgcctgttaaacaaatagtataaaggatacaataatttaaaatttct

SEQ ID NO: 47151 - DNA, 201 bp, Homo sapiens
agtagaaacactttatcattctcaattgacctagagttcattgtactgtttctgtaactttacgtgtgatataaaaatttggttttccccatgctttatcyttagtcagaaaaaaaatcccactagatatgagaccaattgacacctgatatattgttgtccagaggcaaacacaagtgaactggtggcactcaggcatga

SEQ ID NO: 47152 - DNA, 201 bp, Homo sapiens
cagcagaccacagtgattgacttaatttggaggttaaaatgttctttctctggtagtttctattatcactgcgacttttcccgggacacaagatcagtctscccatgcttaacccagaggagttaggccagttttctgttgctgaaattcactttgcttattttcactagcaaactggtttcataagcataatcttgccag

SEQ ID NO: 47153 - DNA, 201 bp, Homo sapiens
tctctgcatgtgggtgttcctttaactacagtgtagattgaatacagttgatagacttcttttctggatgttttcagcaagccaaggctttgtgcagggtygttctttgaagctgacttcttatctctggcttcagggtggggtatgttagtgaggtatttttggtgttgaagctttggggtgtgatccagtaggtggcac

SEQ ID NO: 47154 - DNA, 201 bp, Homo sapiens
ctggggctcctccagtcccattccgtccaggcccattacctcctttccccagcagcagtgactccttcggagcccctccacaagttccatctaggcctacragggccccgcccagtgtcccaaggtaaggcatggagcagaaattgggggggtagtgcgccttggttctcttctcatagaatgacagacaaaatttatttg

SEQ ID NO: 47155 - DNA, 201 bp, Homo sapiens
agaagcaaaatttaaataacgtttactagagttgctttagccaataagagccaggaaattaaaaatgaaaatgtaaatgcttcatctttcactcagaaacrtgccttaaatgcctacctccagcaatgtaagaaaaacattgaggatttagctgagagtttgatggcttttgcttgcctgtcataacttcattgctgctca

SEQ ID NO: 47156 - DNA, 201 bp, Homo sapiens
ttttcacaatgaacagagactataggaaaattgccaaccctgttatgccatttaaaaatcacttgtgatcattgaaatttctcatttatcaattggcacaractaaataggactaaagaacactccgtcccaatgaatgacattttggcagctattgggagaatttgagggctttgaaacaaaagagctatggaggattgt

SEQ ID NO: 47157 - DNA, 201 bp, Homo sapiens
tctttagtgtgtttatcattattacattaccaatctcatatgtacaaatatgtaggactatttctctaaatttaagaatatagagattaaatataaatatwtgagaacaaaatccttaatgttctcactttcaaattataaagtactttttttagtgggaggaaaggggaatgtgcatttcaaggatattagctgtatctg

SEQ ID NO: 47158 - DNA, 201 bp, Homo sapiens
ttcattttaatatttcaaacactctaaattactccatcactatcttaataattaatgcatgaaaactcatacttacattgaaaattcattttaaagcacartatctttgaataaacccattgaaatagtgtttctggtgtttgcttaaaactttggtgtataactgattacatcttatagatttcatttttttttcctggt

SEQ ID NO: 47159 - DNA, 201 bp, Homo sapiens
acattaccaatctcatatgtacaaatatgtaggactatttctctaaatttaagaatatagagattaaatataaatatatgagaacaaaatccttaatgttytcactttcaaattataaagtactttttttagtgggaggaaaggggaatgtgcatttcaaggatattagctgtatctgagaatacagggcaatatatgcta

SEQ ID NO: 47160 - DNA, 201 bp, Homo sapiens
aagaaaaaggtctatgatgtgctataatcaggaggtggccttgaaataaatttcaaggccacaagaacctgccttctttcagagaaggcgttcctggcaawtagaagacaacacaaaggcagagatagaaataaacatggcaatcagtctagactttgtaaagatttagtagtcaaaagcagtgtctgtcagttaagcatt

SEQ ID NO: 47161 - DNA, 201 bp, Homo sapiens
taccaatatctctttggccgtcttagaggcctcccaagaacaaaaataaaggaaactaagggcatgttttattgactattggaataatcaggtttttagcrataacatgtagaatatagtaagaaaaaaacttacgtcaaatagtagaataaacataaaaagtccaaagaggattattcttcaagtctattgctgtttcaa

SEQ ID NO: 47162 - DNA, 201 bp, Homo sapiens
ttttctagatagggtattcatctttattttttattgttcttttagtttaggttattttacagttatattttcaaactccttattgctgatcttaaaagccrttgcattttaaactttttaattaaccatcttattctacatttggtagattaaagcattttaaatttattctcttgggtattttagttatacagccatttc

SEQ ID NO: 47163 - DNA, 201 bp, Homo sapiens
taagacttttattcccggtaaaattcccagtggggatctttattgccttattgaacagttggcatcatttttaaaaaggactctttttttcccttcattcrttcttatgccattatttatgtctcagataagccagggtgttaacggttatatcacggcaactcacaatgccaagaaacttctcttcactattttatcagt

SEQ ID NO: 47164 - DNA, 201 bp, Homo sapiens
ctatgtctgtcagtaagggattctcttggtttttgtttatcttggaatgtcttaatttctccttaaattttgaaggataatttttacttaaagtttttttyctttcatcaatttgagtatgtcatcccactaccatctgacctccatggtcaaaattcagctgtcaatctcattgaggatcctttgaacatgattttcttc

SEQ ID NO: 47165 - DNA, 201 bp, Homo sapiens
agcatggttacatgttaagaaagctgtaaaatggggaaatttagtgtttctatatgaaaatgtggatgctaatataattttcctggtgtttcatattcctmgaggtgaatgtaacaagttatttattctgcttttctcctttagctcaattatttattttttataactatcagtactttaaggaatttttctagaaactct

SEQ ID NO: 47166 - DNA, 201 bp, Homo sapiens
acctaaggaaaaaattgacttaaaataatatttatctaacatttattgaacaaatttcagttctcagagctttgaatatattcttatatgggttgacaatwacgatgatacccctgtcctaaggttgtgctacagatctatataaagtacatagcacagtacctggaatacaatatttgctcaataaatgttcctgggaag

SEQ ID NO: 47167 - DNA, 201 bp, Homo sapiens
atcttgttgagtttatcctacttggagtttgttgaccttcttggatgtgtagattaatgctttttaagtcaaatttgataaattttcagccattatttctycaactattctttcttcctctttctctcctcttctctttctgagaatcacattatgtgtatgttggtatgtatgttggtaagatgttttcaccaatctctg

SEQ ID NO: 47168 - DNA, 201 bp, Homo sapiens
gcaataggcaaaaccacaaatagcaaacactctaatttcttgaattattttttaactattcccataagcactaggaaatgcccactcctgttttctggtcraagttatcagctcatgtgaatcatagaaagaataaattctacccaaggacctgaaaatatgttaagtcaaaatggcaagtagcaaaattcgcagtcactc

SEQ ID NO: 47169 - DNA, 201 bp, Homo sapiens
caggtggtctagctcagcggatctcacacccacagagctcagcaagctaagatccactggcttgaaattctcactgccagcacagcagtctgaagttgacytgggacgcttgagctttgtttggggaggggcgtctgccattactgaggctggagtaggtggttttcccctcacagtgtaaacaaagccactgggaagttc

SEQ ID NO: 47170 - DNA, 201 bp, Homo sapiens
tccccaaaatccctagtgttctgtgttgccttgaaatttatataaacagatgttttgaccatctgggtttaggttaggaaagacatgagtatccacttatwaataatgaagtcaagttattctcattctgtaatgttcaacaatattattcaaaggaattaagtgtcataactatggctcattttgcatctgcagatggag

SEQ ID NO: 47171 - DNA, 201 bp, Homo sapiens
ctgcgaggaaacggaaaggattgttgctaaccacattcgtgagcgagaagggaagacaaaggaccaggtaaagagaggtcttccctggtgggcagggagaytgtgggaggtcgaaggtctctgcaaggttgtctggtagttcccaacagtcagcctgtcgcttaaaggaaaaaaaaatagtggaacacaactacattatgt

SEQ ID NO: 47172 - DNA, 201 bp, Homo sapiens
tctagtagatttttaacttatgaatttagagtgcaaaattatgagtctaataaagaaaagttaaggttacttttcatgctaattgaagtatcctttaaaarattatatgaaggtaattaatttgtgggcaattactgaatttaatgtttgagaatttttagatgggttttcactgaagtgtttctctttgacttataggta

SEQ ID NO: 47173 - DNA, 201 bp, Homo sapiens
aaaattcaaaagccatcattgtctgaaacagtataccttattagttcctgagttcattctatgtaattattatattctattggctaagatatgtgcagtaygtttcagatggctttcaaatagtttcatatttcttattagtattggaaggaatgacttcagttttgagaaagatttgcatatgaaaaaagacgtaatttt

SEQ ID NO: 47174 - DNA, 201 bp, Homo sapiens; identical to SEQ ID NO: 8356

SEQ ID NO: 47175 - DNA, 201 bp, Homo sapiens
tgatttattttctttctgcgatcagggcatgctcattgtgaaaagatgaactggacagattgttgtgtgaatttactctttcctgtgggatttctttttcrtatctatacattttccatgagtggaacatctgtaccttcaaaggaagcttcttactggaagaaagattctggatgcgaatcatgctgtatacctgtgttc

SEQ ID NO: 47176 - DNA, 201 bp, Homo sapiens
aacaaccagctcttgggggaactctcatgggaactgatacagcgagaactcactcattactgccaggatagcaccaagccattcaggaggtatctgcttcmtgacccaaacacctcccattaggccccacctccaacactggggatcagattttaacatgagacttggtgggaccaaacaaacgatatgcaaaccatagca

SEQ ID NO: 47177 - DNA, 201 bp, Homo sapiens
ttactgtaacatctcctaattgttttccctgcttctctctttgatccccacagttgatttttaatggctaatgcaatcctttaaaaacgtaagtcaggccrggcgcagtggctcatgcttgtaatcccagcactctgggaggctgaggcgggcagatcacctgaggttgggagttcaagatcagcctgaccaacatggaga

SEQ ID NO: 47178 - DNA, 201 bp, Homo sapiens
aaatagacaaaacatatatagtgggttctatagtaaaggtttctacaaataacatggaagtatcatagtccagactaggcaggttaagaaaagtcttttcstaggggttgacacctgagatgagacttgaaggacaaatgggcaagggagaaggtacaccagatagaagaaactgcatgtgcaaaggcaaggatgcaagaa

SEQ ID NO: 47179 - DNA, 201 bp, Homo sapiens
aaagaaaagttaaggttacttttcatgctaattgaagtatcctttaaaaaattatatgaaggtaattaatttgtgggcaattactgaatttaatgtttgaraatttttagatgggttttcactgaagtgtttctctttgacttataggtattgctattgattgacattcaagtctcttacatcaacaccaaccatgaagac

SEQ ID NO: 47180 - DNA, 201 bp, Homo sapiens
atatagaaaacaccagaaagatactccttgagaagagcaaccccaagacacataaccgtcagactcaccaaagttgaaatgaaggaaaaaatgttaagggyagccagagagaaagatcgggttacacagaaaagaggcccatcagactaacagcagatctctctacagaaaccctacaagccagaagagagtgggggccaa

SEQ ID NO: 47181 - DNA, 201 bp, Homo sapiens
tttggaagtactcattctgtgaatttatatagaagtagcatttctggccaagcagaaaaaccaactagttggttcattttcctagaaaactaccagatgcyttcctagagataaagcataaccgagtttatttaaaattgagttggtgacttccttgtgtaaaactgactttaaaatatgcatttaacaaaccatatttca

SEQ ID NO: 47182 - DNA, 201 bp, Homo sapiens
tcatagtattacaatgtcaatttccttatcttgatcattgttgtgtagttttgtaagatactaacattcgaagaatctgggtgaaggatgtacaggaattytttgtattaattttcaaccttttaataagacaaattatttcaagatgaaaattattttacaaatcaaagatagtgttaatgatagcttccttagacctct

SEQ ID NO: 47183 - DNA, 201 bp, Homo sapiens
cccctcatgggacctcctgccacacatcttatttgtgcttgtccttcttttgaacagtatgcctacattttagagaaatcaaataattctagattctgtawtaaggtagcaaatagtgtatgcttataagttataatgctattctcttcatctgctgctcagatttacttttctagtagatttttaacttatgaatttaga

SEQ ID NO: 47184 - DNA, 201 bp, Homo sapiens
tggttcaaactaaaagcatgattttttttttttttaactccaggaatgtatacaaagactatcgcttccttgagctggcatgtgattcccaggaggatgtygacagctggaaggcatctctactaagagctggggtctatcctgacaaatctgtagtaagttggatatatctcttatgtaaaaattattattagctatgct

SEQ ID NO: 47185 - DNA, 201 bp, Homo sapiens
gatacagcactctcgcaggtaagaagatggccccggccgggtgcggtggctcgctcctgtaatcccagcactttgagaggccgaggcgggcggatcacgargtcaggagatcgagaccatcctggcgaacatagtgaaaccctgtctctactaaaaacataaaaaaaattagccgggcgtggtggcgggtgcctgtagtcc

SEQ ID NO: 47186 - DNA, 201 bp, Homo sapiens
gccaaaatgtaaagaccatcaagactgggaagaaactgcatcaactaacgagcaaaataaccagctatcatcataatgacaggatcaaattcacacataamaatattaactttaaatgtaaatggactaaatgctccaattaaaagacacagactggcaagttggataaagagtcaagacccatcagtgtgctgtattcag

SEQ ID NO: 47187 - DNA, 201 bp, Homo sapiens
agcagcagaaagtaaaagcttctaaattcttcaagaagtcagagattatttttgtattcctgaattgtatgtgtatatataaaatatacgtatatatatayaaaagtgaattcaagaatgattttaaaaactgaaagataactgctgaaaaatatagaagccaaaaagccagcttatttgttaacaaaacaaaagaaacag

SEQ ID NO: 47188 - DNA, 201 bp, Homo sapiens
ttcacagtttctcttgatcatgatgttcattgacatttggttttctaaataaaaaagaaagtttgattactattgaagaaaagttggggggaacatctcaytgtgaaatatttggtcgtattttgatatgttaagttgttgcttttcaatgtgtaaaaagcttttcctcttgggattattttacagtctacctctaactaa

SEQ ID NO: 47189 - DNA, 201 bp, Homo sapiens
gtgcagtggtgtgatctcggctcactcccacttctgcctcccaggctcaagtgatcctcctacctctgcctcctgagtatctggaactacgggcatgcacmagtatgcctggctaatttttaaattttttgtagagaccaggtttcatcatgttgcccaggctggtctcaaattcatgagctcaagtgatctacccacctt

SEQ ID NO: 47190 - DNA, 201 bp, Homo sapiens
agacagcacaaaaggtgtcccgccagctccctgttgggctttaatattacaaaggcaataactgaacttttagagacaagagattctgccattcagcatgkgcttgtgcatagttttcttctggataattcacgacttcattagcaagttatgatcttgacttttaagagcatatatacttttatgttaacgccattcaaa

SEQ ID NO: 47191 - DNA, 201 bp, Homo sapiens; identical to SEQ ID NO: 8357

SEQ ID NO: 47192 - DNA, 201 bp, Homo sapiens
cactggccatcagagaaatgcaaatcaaaaccacaatgagataccatctcacaccagttagaatggcaatcattaaaaagtcaggaaacaacaggtgctgsagaggatgtggagaaataggaacacttttacactgttggtgggactgtaaactagttcaacccttgtggaagtcagtgtcttgattcctcagggatctag

SEQ ID NO: 47193 - DNA, 201 bp, Homo sapiens
ggcacctgctaccacgcctggctaattttttgtatttttagtagagacagggtttcaccatgttagccaggatggtctcgatctcctgacctcgtgatccrcccacctcagcctcccaaagtgctgggattacaggtgtgatcaacattcttaaagaaaagaattttcaacccagaaattcatatccagccaaactaagct

SEQ ID NO: 47194 - DNA, 201 bp, Homo sapiens
taattttttgtatttttagtagagacagggtttcaccatgttagccaggatggtctcgatctcctgacctcgtgatccacccacctcagcctcccaaagtsctgggattacaggtgtgatcaacattcttaaagaaaagaattttcaacccagaaattcatatccagccaaactaagcttcataattgaaggagaaataaa

SEQ ID NO: 47195 - DNA, 201 bp, Homo sapiens
agctcccactggtctgctttacaagatcaccattgaggtttatgctgaccattcttaggagcttttcctgatgggtcactgacaaacatggtgcattcacyatgaactttacgatcttcatgacacaaagtgaagaataaattagaataaattgtgttaagcacatttcattgattcatggagtagaatttcccttcacta

SEQ ID NO: 47196 - DNA, 201 bp, Homo sapiens
attggatactttgacttataattaaagaaacttttataattatggcaaaaatgcatgaatttaagttgtgtcattttggttttatttttgtagaatatgcygagtttctacattgcaaaggaaagaaatttacagattttgatgaagttcgccttgagattgaagcagaaacagatcgcgtgactggaatgaataaaggca

SEQ ID NO: 47197 - DNA, 201 bp, Homo sapiens
accagcctggccaagatggtgaaaccctgttactaaaaaatacaaaaattagctgggcgtggtggcatgcgcacatagtcccagctactcaggaggctcargcaggagaatcgctggaacccgggaggcagaggtggcagtgagctgagattgtgccactgcactacagcctgggtgacagagcaagactctgtctcaaga

SEQ ID NO: 47198 - DNA, 201 bp, Homo sapiens
gccaaaaagagtgcttaggatgtaaactgctttcagtttcaacctttgattccacttactcgtggttcacggagagctttgtaaggatcagtaacttctcygaaataggtaataatagtgctaactgggaggtatttaggacataaaggtgttggggtgtgtgtgtgtgtgtgtgtgtgtgtgagagagagagagagagag

SEQ ID NO: 47199 - DNA, 201 bp, Homo sapiens
tttgtactatgtttaatatttctaaagtattaattgtgattcttagtaactactgtgttctgtgggatgttcatgaaggaagaagagagaatattggatastttgacttataattaaagaaacttttataattatggcaaaaatgcatgaatttaagttgtgtcattttggttttatttttgtagaatatgccgagtttct

SEQ ID NO: 47200 - DNA, 201 bp, Homo sapiens
gaagtgcagtggtgtgatctcggctcactcccacttctgcctcccaggctcaagtgatcctcctacctctgcctcctgagtatctggaactacgggcatgyacaagtatgcctggctaatttttaaattttttgtagagaccaggtttcatcatgttgcccaggctggtctcaaattcatgagctcaagtgatctacccac

SEQ ID NO: 47201 - DNA, 201 bp, Homo sapiens
tttttcctttcccacccggcttacagacatatcgctgaccgaatgggaaccccacacctgcagaaggtccttaatcaggtaaaaatgttctttcaagcaamaagaacaattatgaaatatgtaagtaggtgctggaattcatatttattatttttaagtttatttttttttccaaaacaagacatgcagcttcaatgatag

SEQ ID NO: 47202 - DNA, 201 bp, Homo sapiens
aaaagagtatatatagtatgattctgcagatggtctccaacttacagggttcagcttaacaaattgttgactttatgatggtgtgaaagcaatatgcattyggtagaaactataatttaaatttttatcttttctggtctagtgatatgtggtaggatacttggcagtcagtcaaccatgagatcatgaggtaaacactga

SEQ ID NO: 47203 - DNA, 201 bp, Homo sapiens
aatcttgaatcttataaccttgctttaattacttgttagttctcaaagactttgggacaattgttcagaatttctacatacacaattatggcaccttcaawcaaagacagttttatttttcctttctgatctgtatttctcttatttccttttcttgacttatggcatcagctagaatttccaatatgatattgaatggga

SEQ ID NO: 47204 - DNA, 201 bp, Homo sapiens
ccaattaacttttcacagtacatgacattaaaatctattgataagtctcctttgcaccttgaatggatcttttacccatgcatgaatttgcagtatcatgygttggtcatttgaagcatattggttccctgaataatatgtaaatcttccaaattttcactcatttcattatacatcaaaaaattacattagtttatatca

SEQ ID NO: 47205 - DNA, 201 bp, Homo sapiens
atattattatgagatagtcttcctatgggccttttatctgggtaccctaaaaagatcttgctgacacccaggagctgttgtttatactttgagaactgctsacctgaagtatcttctctaaacctatttcgtacttggaaaatttgtattcagacctaaagatcaggctcaaatgttatatactttgtgaagcttactgaa

SEQ ID NO: 47206 - DNA, 201 bp, Homo sapiens
ttactgaagctccccagattaatttgtcactactcctctgagtttctgtatattgtagtccctatcacatttctctttgtccatgaggtgctcctgttacrgactgagctttatttctctaccacccacaaatgcctggtagatgctcaggatttcttaaggagcagaagcctgtacccactcattacacattctggcttt

SEQ ID NO: 47207 - DNA, 201 bp, Homo sapiens
gtcaaaaggtcattttaggtaactccaccctaactgaagatgcccttggatctcctagttctcatataattttcatgggaacttaattgaatattttttaragttttatttcttatttttgttctagaaacatttgtttagcatttaccatgtgtcaggtgctcagcattcaaaggtaggcaggacatgaactctgctttc

SEQ ID NO: 47208 - DNA, 201 bp, Homo sapiens
gtgtttaaaacagtgttgagtttgtttttggaaatctgagtttcagagtaaggcttctagaatttaaaaaatcaccttaatatattatttacaaaaatatrtcatagtatctcagcattgatttttcaactttatattagcttcatgctttttagagaatacaaagaaagtgtgtacttctttaagtgtaatatttctttt

SEQ ID NO: 47209 - DNA, 201 bp, Homo sapiens
acatcagcatgtcctttaaggtataaattgtgttggtttctatacttagatttcattcctagcgatagcaaaagccaagtgtgagggaagagtttagagayaaacatgatagagaaggaaataaagggcattttttacatccagcgatttcagccatccttccctccctcaaaacaaaaattctgacaaatttaagaaatt

SEQ ID NO: 47210 - DNA, 201 bp, Homo sapiens
aagcaaagtagcattattgcttaacaaataccttgactaactaattaaggcttcagaaaaagaagacagagagcgagatttttctgattatcatcactccrtaattactagtattttccataacctaggtaactcagctgtctaagaaacaaaatccagctgaaactgaaccgtctaaagttttccttctacaatttttta

SEQ ID NO: 47211 - DNA, 201 bp, Homo sapiens
ataaataagttctttgaaaccaatgagaataaagacacaacgtaccagaatctctggaacacagctaaagcagtgtttatagaggaagttatagcactaamtgcccacaggagaaagcatgaaagatctaaaatcgacaccctaacatcacgattaaaagaactagagaagcaagagcaaacaaattcaaaaactagcgga

SEQ ID NO: 47212 - DNA, 201 bp, Homo sapiens
tcagagaatactataaacacctctatgcaaataaactaggaaatctacaagaaatggaaaaattattagacacatacaccctcccaaaactaaaccaggawgaagttgaatccctgaatagaccaatagcaagtctgaaattgaggcagtaattaatagcctaccaaccaaaaaaaagcccaggaccagatagattcacag

SEQ ID NO: 47213 - DNA, 201 bp, Homo sapiens
ggaagttctggccaggtcaatcaggcaagagaaagaaataaagcgtatttaaataggaagagaggaagtgaaattatccctgtttgcagatgacatgattrtatatttagaaaaccccatcgtctcagcctgaaatctccttaagctgataagcaacttcagcaaagtctcaggatacaaaatcaatgtgcaaaaatcaca

SEQ ID NO: 47214 - DNA, 201 bp, Homo sapiens
gatttttctgattatcatcactccgtaattactagtattttccataacctaggtaactcagctgtctaagaaacaaaatccagctgaaactgaaccgtctraagttttccttctacaattttttaaggcccagcgcaggatccctgtcatgctaaagtctctcctggatgtctggaaaaagtcttatagtctgggagacat

SEQ ID NO: 47215 - DNA, 201 bp, Homo sapiens
ttatgaggatgaaggagggttggagggtttgttgtaatgcttttacataatcaagatcaaattgttcaagctctttaatgttatctatttgttgtatttarcaaaggaatgaatttgtagctaataggcagtaatttggtttttattcacctaatagaaatattgtagcagagctgtcaccaggcttgttgtaatgtcaaa

SEQ ID NO: 47216 - DNA, 201 bp, Homo sapiens
cttaaaaataaaagctattatatgcttcttacatctttagacaatgggaattattctaaattacagctgacagaaagcattttttctattcttcatttgamtttgtgttgtatatctaaggacttgagaaattgatttcaaaatttcatggtaacttgtcataatccttatggaggaaaataaaacatagaagttggtctg

SEQ ID NO: 47217 - DNA, 201 bp, Homo sapiens
agtaaaagtataagcatataatatagtgttatggatcagaatatctaaagagaaattaaaagaaatttctctttgaagtagaggtaaagagggttggagcsggagacttgcttctcatcacaccttcttcaaaactatgaactgttatcatgtgcatgcattattaatactttagttttaaaaattaaattaattatttca

SEQ ID NO: 47218 - DNA, 201 bp, Homo sapiens
aattagccaggtgtggtgctgcatgcctgtaatcccagctacttgggaggctgaggtgggagaattgcttgagtctgggaggcagaggtttcagtgagccrcgccgagattgtgccactgcactccagcctgggcaacagagtgagactctgtcttaaaaaaaaaaaaaaaaaagtcagaggtggaatcagattctgtgaa

SEQ ID NO: 47219 - DNA, 201 bp, Homo sapiens
atggatcagaatatctaaagagaaattaaaagaaatttctctttgaagtagaggtaaagagggttggagcgggagacttgcttctcatcacaccttcttcmaaactatgaactgttatcatgtgcatgcattattaatactttagttttaaaaattaaattaattatttcaacaaacttgccttgagtttatgtaatgtgt

SEQ ID NO: 47220 - DNA, 201 bp, Homo sapiens
cctgccccagcattgttttccatggaggtttctgctcttgggtgtctgctctgttgagttgtgattctctatattcacctgtctctccaaattttgggaasagctaattgtctgtgatttcacttcactgacagatctaagaagggttggtttttcagtttgttcagatttttacttgttgggatggaatgatttccaagc

SEQ ID NO: 47221 - DNA, 201 bp, Homo sapiens
cacaggtagaaggtatttactaagtgtgtgttgaaagactggagatacttagtatgagccttattgaatgaatgagctctttgaacacagaagaattatcsagagtctgggctgtatgtgcaaaacgccaaggactttaaaacttatgtggctttcttggtttatttactcatctgcagaatggagataataaacattatc

SEQ ID NO: 47222 - DNA, 201 bp, Homo sapiens
aggaaatggagatcgcattaccaaataagatgggaagggaaagcagtgtgtttaagtagaactagacagaatgaccaggtggaatttggatttgaagtttkaggggatatcatgttaaagcagtaaacaccaagctatcacaatctgacccgttgagattccattaattgataacgatgatgagtacttctttatttgtta

SEQ ID NO: 47223 - DNA, 201 bp, Homo sapiens
actcttctattctccaaccaccttagtccaagaaaccactgtcttcttccttgattattgtaagagcttcgtacttgttctgtctacttctggccattctrtaagtcttctctaagtgtagctctcatcaatcacttccttgatattcccactgccacggtcccattgtgtcactttgtctgggccattggagtagccaac

SEQ ID NO: 47224 - DNA, 201 bp, Homo sapiens
aactgggttttttcaattgaacaaaattgtggatgtgataacacacccatgaaatttcactaaatcataactctgtcttcctcatctcagcatttaataawttaaattattcaattgattttgagaatttgactaaagctatggactctccctacctccttacaatatgtatgttttgtaaaagtttgcatatttttgtag

SEQ ID NO: 47225 - DNA, 201 bp, Homo sapiens
aaagaggatacaaataaatggaaaaacattccatgctcctggataggaagaatcaatatcatgaaaatggccatagtgtccaaagtaatttatagattcartgctacctctatcaagctaccactgactttcttcaaagaattagaaaaaactactttaaatttcatatggaaaccaaaaagagcccatgtagccaagaca

SEQ ID NO: 47226 - DNA, 201 bp, Homo sapiens
catttcattttctgaaagatttaagtcttttggaccatcttaaagtgatcccaagccacatcttctacatgaaacagggttatatttcttcattcaacacwtatatatatatattttttagcatcttcttcatgtgtaacattgcgttaggggcagaattccaaattgtagatcagccaccttctgggtagctaaaatgca

SEQ ID NO: 47227 - DNA, 201 bp, Homo sapiens
taataaattaaattattcaattgattttgagaatttgactaaagctatggactctccctacctccttacaatatgtatgttttgtaaaagtttgcatattkttgtaggggattgattgttttgctgaacacttggtgctctattgatttcaggaaagaatcctttgtttaactacttcatgcccaatataggacacatgct

SEQ ID NO: 47228 - DNA, 201 bp, Homo sapiens
aggacacatgctatttgaaaatgagaaaaaataaatatagtaacagtgttttaacaaaattagaatgttccttcaaatgaatgttattttcttacttaccrtttctttttttattacagcttgaatgttaaatgtttcatgggtgtatagtacttcctctgtttactcattctctttgaccctcttcagcccattgcgagc

SEQ ID NO: 47229 - DNA, 201 bp, Homo sapiens
tcccctttgactagtttgcccttcctctctcttacctctaaatgttgaaatgacatagatcttctcctcttttctgtcctcatacatcctctctagctgarctcatctaggagttcagctcctagatgagttcatctcatttaaataccatcaatatgccatatttatgtgactaccatagttatgtctccaactctgaac

SEQ ID NO: 47230 - DNA, 201 bp, Homo sapiens
atatccaggaaaaatcaaccttcagagaaacagaagggattgggaatcgtcaccaagtcactatgcccagacagacttttcatctgttcttctgagtgcarttccaagaaattaactggggaaatttatttgcataataagacaacctttgttctgtgcagttctgtccaccccttaccttcccataacttgttccatcca

SEQ ID NO: 47231 - DNA, 201 bp, Homo sapiens
tcattaaagagtcaagacacaacagatgctggagaggatgtggagaaataggaatgctttgacactgttggtgggagtgtaaattagttcaaccattgcgkaagacagtatgggaatccctcaaggatctagaaccagaaataccatttgatctagcaattccattactgggtatatacccaaagaaatataaattattct

SEQ ID NO: 47232 - DNA, 201 bp, Homo sapiens
gtgggactgtaaactagttcaaccattgtgaaagtcagtgtggagattcctcagggatctagaactagaaataccatttgacccagccatcccattactgrgtatatacccaaaggactataaatcacgctgctataaagacacatgcacacatatgtttattgcagcactattcacaatagcaaagacttggaaccaacc

SEQ ID NO: 47233 - DNA, 201 bp, Homo sapiens
gagattattctaaattaccttccatcttagtctgtttggactgctgtaacaaatgactacagactgggtggcttataaaccacagaaatttatttctcacrgttctggagtttgaaaatcctaggtcagggtgtgagcatggtcgggttctggtgagatcccttttctggcctgcacagtgctgtcttcttattctgtcct

SEQ ID NO: 47234 - DNA, 201 bp, Homo sapiens
ggaaggatggaatggaggttgttgaggctggaggataaaagaaagggctttccggtggaaggggtgggatgaccaaaggcaaagaggtgagcgggcacagyatatatccatggagccaagagtcatgcatatgcattgggactggcttgaggaatgcagtcaggagagcagagggacctgagctgggtggggttgggggtg

SEQ ID NO: 47235 - DNA, 201 bp, Homo sapiens
atgcaggaggatcagcaggtttgggagtgaaagaaattgagaggttgttttaagtgtgttgagttcaaggcagctaagaggaaataaacatccagtacagytgagcatatgggccactcactcttctgagagttataggctaaagcggaaggtgtggagaaactatttctcaatagcccttgaagctatggcaaccttgag

SEQ ID NO: 47236 - DNA, 201 bp, Homo sapiens
agcagcgtggcaatcaaagcatccttcaattggcattcaaagtgcacactataatttctttctttgtgaggagattcccaaatgctcaaatatttaaatayaatattaattgcttcatcctatatttcctcattaaaaatattatacaaaggaaagagttttttttttttcagatataactctttcctaatttattctttc

SEQ ID NO: 47237 - DNA, 201 bp, Homo sapiens
ggatacccaaggtctacctccgaagatgatgtttggcacctcttatggcgcacttttctccccagcagcgtggcaatcaaagcatccttcaattggcattyaaagtgcacactataatttctttctttgtgaggagattcccaaatgctcaaatatttaaatataatattaattgcttcatcctatatttcctcattaaaa

SEQ ID NO: 47238 - DNA, 201 bp, Homo sapiens
tccttctgtctccatcagttcctttatcctgtgctgccacttgtgtcaagtccctctcaacaggaaggctcccctgcccagcacacactgcaggatacccraggtctacctccgaagatgatgtttggcacctcttatggcgcacttttctccccagcagcgtggcaatcaaagcatccttcaattggcattcaaagtgca

SEQ ID NO: 47239 - DNA, 201 bp, Homo sapiens
ccaggcactgcaaggagttcagtgtacagcaaaagagagactgcacagtgggggaggattggcaagaagtaatttacgagggcttaagacagtaagggacrtggagaaaatcaaggacaacccccagatttttacttggttggtagtgctattcgcactgtatgttttcattgcagaaaataaacaaggagggacagattc

SEQ ID NO: 47240 - DNA, 201 bp, Homo sapiens
agctgaggtggtggagcaaagttcctctagattactcaccagtgaacaattcaggcccttgcacagagcccactcagctccacacaactctcaccagtcarcttgtctgacatctacacccattacagaggaggagcaaggaggagccgcgtgggtgagggcaggcacactgatgcccgggagaagtggtagtcaatatgc

SEQ ID NO: 47241 - DNA, 201 bp, Homo sapiens
tttccctgcacccccaccggcaggccccagtgtgtgatgttccccaccctgtgtccatgtgttctcattgttcaattcccacctatgattgagaacatgcrgtgtttggttttctgtccttgcgatagtttgctcagaatgatggtatccagctccatccatgtccctataaaggacatgaactcatccttttttatggct

SEQ ID NO: 47242 - DNA, 201 bp, Homo sapiens
gcccagactggagagggatgctaaatgggggttataaaagcaacagcacactgaaatggaaattgggcaccaaggcaatgctgaaacagggaatcaagggygacaggggctggaaatatggagagaggcttggaagacagtgatgagaaccgtggtctattccataattttctctgggattggccttccttcttcaactag

SEQ ID NO: 47243 - DNA, 201 bp, Homo sapiens
tttagtagagacggggtttcaccatgttagccaggatggtctcgatctcttgacctcgtgatctgcccgcctcggcttcccaaagtgctgggattacaggygtgagccaccgcacccggcccagtttccccagttttaagagaatgtattcagaaaatgaaagaatgacacaactttgtcctaattttgagtttccagaga

SEQ ID NO: 47244 - DNA, 201 bp, Homo sapiens
attatgggaatttggttgtggtaagggccagtggagagtaaaaaaaggggcgggtttgagaaatgttcaggaaaattgaggactaggtggtagattagagytgttgggtaatgggagaggtagagtcaaggttacgtctcaggtttccagattcttatgaagtcaccaagatggggaaccctgaagggaagatcaaatact

SEQ ID NO: 47245 - DNA, 201 bp, Homo sapiens
taatgtttctagaccaaattgaggattttggctcttacctaagaccaatgaggagtcatttaaaggtcctgagtagaggaacaacaagatcagatccgtgrgtgaaaaaagaatgtggtattgacaagaagaccaagagtagaccagttagaagtaaaaatgagaaattatgggaatttggttgtggtaagggccagtgga

SEQ ID NO: 47246 - DNA, 201 bp, Homo sapiens
tgtatgtgtaccaatacttctgctcctgtgggataatttatatggaaaatgctggaaaatgacatgacgtttttgaaaaattgaatgaaattttcactgtsgggggaaggcagagaaagaggtagtgagttgtattagatgatattggagatgtaggcagtggctgaatcctgtaatgtttctagaccaaattgaggattt

SEQ ID NO: 47247 - DNA, 201 bp, Homo sapiens
actagaatccaagctttgtaattcctagtacagtcttctttccattaaatcatatttccttttctaaggaatagtgaatgctgtgtggcttacaagtttayttttggtgatggcactttacctgcttttcttcttttaatttttttgacctcagtgactagaactggatcaatagtaatccttggtttatgacgcactctc

SEQ ID NO: 47248 - DNA, 201 bp, Homo sapiens
ctacacattctgcacttgtatcctggaacttaaagtaaaataaaacataaagcaatataaattactaggcaaatactgtccatttcatctaatgaagaaarcaaatgacaaatatcatgtatatgacgtgctacacaaaatgtctaggttcttacattatttattactggaagaaaccttggagatcatggtttctaactc

SEQ ID NO: 47249 - DNA, 201 bp, Homo sapiens
aaggtgttattgggcagcctcattagtaacattagctgcattttaacagggtcttcctggatttaaagagatagctcaagtgagtgactctaaatgaaggmattttgagcatctctgaagggcagtggaggagggagttggtgttccttctccctatctacataatagtcaatgtcaaatgcagacataatgtttgaaatt

SEQ ID NO: 47250 - DNA, 201 bp, Homo sapiens
agagaaataagctatgcaatcaaaaacatacatggtatcaggcaagtgattcacatttttcttgtcatctgttcaagctaccaaaagaaaattaatgtttrtaaatggctaggaaactcgtcttttcatcattgaatagggtagaatacagaggtgggagtaagaaacaggaaatcctactttggggtttaatggtaactt

SEQ ID NO: 47251 - DNA, 201 bp, Homo sapiens
gggcgtctgccattactgaggctggagtaggtggttttcccctcacagtgtaaacaaagccactgggaagttccaactgggtggagcccactgcagctcakcaaagccgctgtagccggattgcctctttagattcctcctctctgggcagggcatctctgaaagaaaggcagcagccccagtcagggccttatagataaa

SEQ ID NO: 47252 - DNA, 201 bp, Homo sapiens
acccattacagaggaggagcaaggaggagccgcgtgggtgagggcaggcacactgatgcccgggagaagtggtagtcaatatgctgataacgaaggagggrcagacatgtcagaaaatgcctccaaaaggaataataatgccaataaaagctcacaacttgtgcagggttaccagacccctctgtaatagcaactgaaggc

SEQ ID NO: 47253 - DNA, 201 bp, Homo sapiens
tgggcagcatagtgggacctcgtctctacagaaaataaacaaagtatccaggcatggtggtggactgccaaatagtcccagctatttgggaggatggggtrggaggattgcttgagcccaggaggtcaacgctgaggtaagctgagatcgtgccactatacttaagcctgggtgacagagcgagaccctgtctcaaaaaat

SEQ ID NO: 47254 - DNA, 201 bp, Homo sapiens
agaaaataaacaaagtatccaggcatggtggtggactgccaaatagtcccagctatttgggaggatggggtgggaggattgcttgagcccaggaggtcaasgctgaggtaagctgagatcgtgccactatacttaagcctgggtgacagagcgagaccctgtctcaaaaaatatatataaataaataaataaaaataaagg

SEQ ID NO: 47255 - DNA, 201 bp, Homo sapiens
gtcagcctgtcgcttaaaggaaaaaaaaatagtggaacacaactacattatgtttatttttacttatttatgaattatacacatactatattcatatcttstttatgttaaaaatatgagcaaataaaaagacttcattcagaagaatgagatgcaaaagcagtaacaggagtttcattattttttttctcaatgctccat

SEQ ID NO: 47256 - DNA, 201 bp, Homo sapiens
gccgatgtgatcaactggaagaaagggtatcagcaatggaagatgaagtgaatgaaatgaagcgagaagggaagtttagagaaaaaagaataaaaagaaaygagcaaagcctccaagaaatatgggactatgtgaaaagaccaaatctacatctgactggtgtacctgaaagtgacggggagaatggaaccaagttggaaa

SEQ ID NO: 47257 - DNA, 201 bp, Homo sapiens
aattaggcaagttaaaggtagagaaaatcttaacatgtaaggaatataaatatatcaaaagccctaaaagtttttaacgatgttggtatagatacacaaakgaaaactaaaatgaatcctagattcagaaatcaatgcttcaaaaagttttaggttacaaggaaaagccacatgtaagctcgtgccttgtgaatcctttgt

SEQ ID NO: 47258 - DNA, 201 bp, Homo sapiens
aaagctacaccttcagtgaaaatggtgaatcaagaaaaatccgcttgccgttaaaaggagaaaatgaggaaagttatttgtctcggcttgcactgtgaatrgaaggagagaaaagtctttgagaatccatttgtataggttcctcattctgtaatttgagattcaaatatgtatcacttacatgcgcaagcagaaccaaag

SEQ ID NO: 47259 - DNA, 201 bp, Homo sapiens
taaatattcatcataggctacataaacttatactattgtaagcctggtatttacttgcctgctatatgacaaaactgctaagatacacactctcttaaaaygtacacagtttgagggtgagaggcattattgtactgatgctaaaaaattatcgtgggctcaatcagcagcctgtattcaatactgatgtttcccattgag

SEQ ID NO: 47260 - DNA, 201 bp, Homo sapiens
aagggtctccaaccaagcaagaagaaacttttttttttaacctcatcactcaatattcaagtactttttttgaccacccttgttcaccaagtatgatggtktctctttaaaaagacaaaactgaatcattcgaaaggatttgggttttactccagctcatcaaaatgacataaacacaatatggaaaccaagaaatgctcc

SEQ ID NO: 47261 - DNA, 201 bp, Homo sapiens
acaactactatgtgttactggttctactggaaccctgttaacatacttcctcaaacagtttcctgaaagagccaaattcctgaatggtaatctgaccaaawcactaaacaactcctgtggttaaaacagaatccacaggattctgttttcattagaggaagtactaaggtcaagatttgtaaactacaactaaattatgaa

SEQ ID NO: 47262 - DNA, 201 bp, Homo sapiens
tcctgatgaaatggtgatactgaagaggggaatgctaacagaactcagaggtatcccagatctaatgtctttaacaatcaggtgctgttgtttgctttatyatttggatagccaaaattttctttaaattatttaataggctagatggtttagggactggttttagtatttaattgcttatctgaaaattggcaaatttag

SEQ ID NO: 47263 - DNA, 201 bp, Homo sapiens
gattgggaactatctgtaatatagttgtcctggaatggataaattgtataatctagaaactctactattttagtgtataaaaagtgaagctcactcgctgytccacaaagggcaaggaattgattttggaatctttcagaaataggaatctaaattgagaacaccatttctattgtagcatttctttttattgctgcgaaa

SEQ ID NO: 47264 - DNA, 201 bp, Homo sapiens
attgcatgattctctttccctgaccctcactttgttatagatgttgtgtgtttgcctacagggaatggttgtggaaagtactgagtgggaattgctttcawgaagggcagacatactgtcttctatcattcctaatacggtggtttagaaagagtatatttctttggctgattttccccatgttgtcttaaacaaataaac

SEQ ID NO: 47265 - DNA, 201 bp, Homo sapiens
agatggaagttaacagtaataccaccttactttctttttccacgttacaatttttagagacatttcccaagggctatcttatttattaatatgtgattcargtacactggggaaggtaagtatactattgttattttacaaaggaaagtacaggtaaaagagagttcagtaacttgtttaaggtcctgtagctagtgtcaa

SEQ ID NO: 47266 - DNA, 201 bp, Homo sapiens
atcagcaacaggtaagcaataaattagaaatgtgggaactatgaattgtattcttttgaccaatggctttctgtgtaacctaaagcaaatcatttcgcccmtttgagttgaagtcagtttcttctaaaactacagtgaggtacctcacagagccatcagagattataataaaagtggctataagccatttagaaaaatata

SEQ ID NO: 47267 - DNA, 201 bp, Homo sapiens
ggatctcttgagcccaggagtttaagaccatcctgggcaacatggtgaaaccccgtctcctcaaaaaatagaaaaaaaaaaaaagccagcgtggtgtcacscacctgtagtcccagctactcgggaggctgaggtggatcacctgagcccaggagatagaggttgcagtgagctgagattgtgccactgcattccagcctg

SEQ ID NO: 47268 - DNA, 201 bp, Homo sapiens
agtttgttactcccactagtatttaactggtattaaattcaagattatattttcataatgttgtttggaaaccaaaagaaaataattggtatgaacgtgckttgaaaagttaaaggattatataagtattaattataattatcattaaagtgatttaatagaagtattattctactaaaataaaataagaactgctaaatt

SEQ ID NO: 47269 - DNA, 201 bp, Homo sapiens
ttctgctggtcttactgagggcagttagaagctaaagcaatttctaagctctgatccaaattatttgtaagtcaaggccatttgtttgtacctattttgartacttcaaccctttcgagagaattccaaatacactttttctaaatcaatatctctaaaacttgggtaatgtacaaatatcttttaaaggatgagtcctct

SEQ ID NO: 47270 - DNA, 201 bp, Homo sapiens
cgaattacagcacactgatgggtcttgactctttattcaatttgccagtctgtatcttttaattggggcatttagtccatttacaattcaggttaatattrttatgtgtgaatttgatcctgtcattatgatgctagctggttattttgcccattagttgatgcagtttctttatagtgtcgattttttttaccgtttggt

SEQ ID NO: 47271 - DNA, 201 bp, Homo sapiens
tccgaccagggtgcgaggaaccaagcacaagggatcagatgggaatgtgaggaatcctggcaatggtggaggaggcccttgccatgctggccatggtgggrgcttctgatggctctagagcaccacaggcttgactgagatttggtggacacatcaaagtgcctggttgggtagacatggtatcacaggagtagtttgaat

SEQ ID NO: 47272 - DNA, 201 bp, Homo sapiens
agattctcctgccttggcctcccaaagtgctgggattacaggcatgagccactgcacccagtctgtctgttcttaaagctacattttgttaccttaaagtmtttcttgtcccaatatattgtttacatacttacaaactactctatgataatttttaaagtatctgtctaacatgaatggatatcacttaagctcttcttg

SEQ ID NO: 47273 - DNA, 201 bp, Homo sapiens
agtcaccatactctagtattgaacattagaatttattccttctatctaactgtatgtttgtacccattagccaacctttcttcatcctctctccccaaccsccaccaacacacacacacacacacacacacacacagacaaacagacacacacacaaacacacacacacaaacattatttccaccgtctggtatatatcat

SEQ ID NO: 47274 - DNA, 201 bp, Homo sapiens
ctttcatttaggaaggataattttgctgggcataatatttttggctagcacattttttcttttggcactgtgaagatatcatcccattctctcctgtcttkttagggttctgctgagaaatctgctgttagtctgatggggttcctttatataggtggctagatacttttctcttgctgtttttaattttttttctctttg

SEQ ID NO: 47275 - DNA, 201 bp, Homo sapiens
ttcaaaagatctgtattcaagttctgagattctttctcctgcttgttctgtcttactgttgaaggttttgaatgtattttgtatattattcaatgaattcrtcagttccaaaatttctgctttttaaaaaattatatctctttgataaatttctcattcatatcctgaattgtttttctgatttctttgtatcgtttttca

SEQ ID NO: 47276 - DNA, 201 bp, Homo sapiens
ctgtcacccatgctggcgtgcagtgatttgatcatagcagcctctaccactgggcttaagtgattctcccaactcagcctcctgtgtagttaggactatargcacatgccactatgtctgactagtaaatttctttttattgggatctgttgctggataattattgtgttcctttcaaggtgtcaaatattcttgcttttt

SEQ ID NO: 47277 - DNA, 201 bp, Homo sapiens
tgctggcgtgcagtgatttgatcatagcagcctctaccactgggcttaagtgattctcccaactcagcctcctgtgtagttaggactataggcacatgccrctatgtctgactagtaaatttctttttattgggatctgttgctggataattattgtgttcctttcaaggtgtcaaatattcttgctttttcatctttcct

SEQ ID NO: 47278 - DNA, 201 bp, Homo sapiens
attttggatctttcctgctttctcctgtgggcatttagtgctataaatttccctgtaaacactgctttaactgtgtcgcagagattctggtacattgtgtstttgctctcattggttgcaaagaacttatttatttctgccttaatttcattatttactcagtggtcattcaggagcaggttgttcagtttccatgtagtt

SEQ ID NO: 47279 - DNA, 201 bp, Homo sapiens
ctaatttgtttgaaattgcttttgaaaaggagaactcttttctgacatgtatctatggtattggttgggtagggtactttgcttttgaatctgactatgcrtagtggtgtagtctctgtatgacttcttcatttgtagacagcatcagtggtgtctgagactaccttggtggcttagaatgcagttgttattagtagaggc

SEQ ID NO: 47280 - DNA, 201 bp, Homo sapiens
cacaggagaaggtgtgatatgtcatttaaaaagcccaaacctttcgctttgtattgtcacaaggaactaaaaacaaggcaaataagtgtttcaacttatgytcttagaaattatttcttaaataccacaaactgatttgggtatatcacaaggaaagatcagataattctaatccatgctgaacatgtgattttgaaacag

SEQ ID NO: 47281 - DNA, 201 bp, Homo sapiens
taggagagaactgacttaacagtattggatgctccagtcaatgaacatctttttttttttcatttatttcagtagtctctgcagtatattatagatttcartttacatattttgcatatattttattaaatgtataacggtagaagtactattattggatgatgtgttctatagatgtattttaggtcaagtttgttgata

SEQ ID NO: 47282 - DNA, 201 bp, Homo sapiens
ggggaaaaaacagagcagaaaaactggaaactctaaaaagcagagtgcctctcctccaaaggaacgcagttcctcaccagcaacggaacaaagctggacakagaattactttgacgagttgagagaagaaggctgcagacgatcaaactactccgagctacaggaggaaattcaaaccaaaggcaaagaagttgaaaactt

SEQ ID NO: 47283 - DNA, 201 bp, Homo sapiens
gtctcctttgctggcacttcttccacctccttaactgtgaatattcatccccaaatactttcctccctctctttcttgtttcattccattatttattcttycattctgaaagcatttactgagtactcacactaggccaggcactttgctaaacacaaagacaaatttgtttttttctgtacactcattgcttttaagaat

SEQ ID NO: 47284 - DNA, 201 bp, Homo sapiens
caatctctgatatccttttttctgcttgatcgatttgcctattgatacttgtgtatgcttcacaaagttcttgtgctgtgtttctcagctccatcaggtcrtttatattcttctctaaactggttattctagttagcaatttctctaacattttttcaaggttcttagcttccttgcattgggttagaacatgctccttta

SEQ ID NO: 47285 - DNA, 201 bp, Homo sapiens
tattcttctctaaactggttattctagttagcaatttctctaacattttttcaaggttcttagcttccttgcattgggttagaacatgctcctttagcttrgaggagtttgttattacccaccttgtgaagcctacttctgtcaattaatcatactcattctttgtccaattttgttttcttgctggcaaggagttgcgat

SEQ ID NO: 47286 - DNA, 201 bp, Homo sapiens
agggcctgagggagacctgtctcaaggtagctgaggatttttctttttcggtatatgtggtggggaggaaaatagctaaaaaatatttacttcatgtaagrctagatttaggggagaatattaaaactcaggaagaggacttttaacataatgaggtggttaaaaggagacaacttctcaatagacaagggaggtattttg

SEQ ID NO: 47287 - DNA, 201 bp, Homo sapiens
caagacaaaaaaaaaatgggctattttggaagtaaagagtttttaattccaggaggtggccctctactgatgtaagcagactgtgatttagtatgtgaagratggatgtaccagactcatttcccagagggaagaggcagttactagattgtttagcctcttcacatgcttgtaatattgttgctttcaaaggtttgctga

SEQ ID NO: 47288 - DNA, 201 bp, Homo sapiens
ttgtggatttatctacctttggtctttgatgttggtaagcttcagatggggtttctgtgtggacacctttttttgatgctgatgctgttcctttctgtttrttagttttccttctaacagtcaggcccctctgctgcaggtctgctggagtttgctagagttccactccagaccctgtttgcctgggtatcaccagcagag

SEQ ID NO: 47289 - DNA, 201 bp, Homo sapiens
ggtctccttctgtcacccaggctggagtgcagtggtgtgaacatggctcattgcggcctcgacttcctgggctcaagcgattctcccatctcagcctcccrtatagttgggaccaaaggcacgtgccaccacacctggctaagttttaaattttttgtatagatggagtcttaccatctttcccaggctagtcttgaactc

SEQ ID NO: 47290 - DNA, 201 bp, Homo sapiens
cacccacagctgccccttcccccaggtgctctgtcccaggaagatgggagttttatctataagcccctgactggggctgctgcctttctttcagagatgcmctgcccagagaggaggaacctagggaggcagtctgactacagcagctttgttgaactgtagtggagtcctcccaggtcaaacttccttggcagctttgct

SEQ ID NO: 47291 - DNA, 201 bp, Homo sapiens
tgtgttacctttttatttctgtttattttctcaccaatatgtttctagaacattcacattagctcatatcaccttagcaacctcatctctgtcaaacaccyttgcccttgccctggcctcattatcagcattagccagtcagtcacctgtttgggaaccaagggctcctcaaaatcgtgcagtttgaaatagattttgtca

SEQ ID NO: 47292 - DNA, 201 bp, Homo sapiens
tcccatccctttgcattgggccagcctttttctcttccgtgatactctctttcattactcttcttgatagttgaccagcagtgacattgcattttattacyttttttttcccatacagaatagtggagacagggagcagaatttttctcagacttaggcaagttaatttgactgaaatagtatactcgtgagtaaagcgtg

SEQ ID NO: 47293 - DNA, 201 bp, Homo sapiens
ttatcataacaaatatttctgagctagagttcttatttccattttgtggtggaaaagactaaggcttggagagattacatgatttacccaatttcaaaagytagtaaatggtaaattcaaattctgaaaaggtgcagccagtcccacctgacccatcgtcttcccagtagcattgtcagtaaacgaataatgtaatttata

SEQ ID NO: 47294 - DNA, 201 bp, Homo sapiens
atgtaaaatgtatttcttactatgggttatcctcaaaattgttgaatgcctctgatctagattaaatctaatattacttctagtcatttatttggttattytctatttaaatggcaggacatatctttttattagagaagacacaattcacactataccattactattccactaggatgaattaaaatggaaataacttta

SEQ ID NO: 47295 - DNA, 201 bp, Homo sapiens
tgacaattataagtggattttcaggcttaattgtgaaacaatatagctaataaataatggacctagaaacacacatagttggagctgtagtctcaccttcmtatacttacagtcaaaatatacacaatgaatataatcagagatttttaaggtataaagtactaaggtttttttccccctcaaaatcagaaatataaagag

SEQ ID NO: 47296 - DNA, 201 bp, Homo sapiens
acagcttgcccaaggctgctcagccagtccctagtggagctggactttaatcccatgcagtctgcttccaaagccatttcctgaccatgaccccagggttwttcagcctcatcagtactgacgtttttgttgtggagggctgtcctgtgtattgtaagatgtttagcagcatccctcccctctaccctctagatttcagtt

SEQ ID NO: 47297 - DNA, 201 bp, Homo sapiens
ggctggtctcagaccctgggagaagtgcttaggtgccacaggtggtcaactggcctggatgatcttcaggcccctggaaagtacatgcaggtgatgctcargcccctggaaggtgtgtataagtgatgcccgtgtccctggatggtatgctcaggtaaagggggaaggagtggagctgagccaggtggacttgctctcaga

SEQ ID NO: 47298 - DNA, 201 bp, Homo sapiens
gccatccagtggcaaaagttagaaaagatgtatttcctcttttgcggggaggaggcaattgataattcttttattttggagctttggcatgtaaaataatrtttttcatatgtcttataggaaatagtttttattctcttcctgcagttttggctgaaatgaagtggcctttcattatcaatagattgtagaaacaaaaaa

SEQ ID NO: 47299 - DNA, 201 bp, Homo sapiens
tttgagaagatggtcttacgtttagttgggcgatttgttttcttattttttctatggagatacattagtgcttcaccctaccaggtggcccacttaaaacrggcctcattgaatacaataagaattgaaaagaatctgttatataagagttggccggcatattcaaaccagctggaattcgtcaaaatttctgttcataag

SEQ ID NO: 47300 - DNA, 201 bp, Homo sapiens
attattttccacagcttataaatgaagaaattgaggttctgagacattgacttgcccaagatcacacagctgggggtggcagagttaagactgaaatccargtcttctcactcatagtctgatgttctcaccatttgaacattggataatgcacgtgacagggttaggaaactctaagtcagccctctccaactagaggac

SEQ ID NO: 47301 - DNA, 201 bp, Homo sapiens
tgaaacaatatagctaataaataatggacctagaaacacacatagttggagctgtagtctcaccttcctatacttacagtcaaaatatacacaatgaatakaatcagagatttttaaggtataaagtactaaggtttttttccccctcaaaatcagaaatataaagaggaaagaaaattagcccatatataaagttaattt

SEQ ID NO: 47302 - DNA, 201 bp, Homo sapiens
ttcctgctaaaatagattatggtctatagaatctggttatccgctatttaaaatgtttcctacatgtttgagggtttcaaaagtgtccttttcatttgtgraatttaattctattctctagacataatctcagtgttatatcattacagagagtactttagtgaacagtcaaataggaagagagtaaaagaagaacactgg

SEQ ID NO: 47303 - DNA, 201 bp, Homo sapiens
tactttagtgaacagtcaaataggaagagagtaaaagaagaacactggcatgttgagccagactcttaagaaaagcaattaataagaaaatagctctgtarcccaatgagaattaaatagtgagattaatagaaactaaataattggatggtttgggtttggattatgtacatgaagatttttttttttaaagtgaaagaa

SEQ ID NO: 47304 - DNA, 201 bp, Homo sapiens
gctcttagagaatgaagtctttaggtagctgatgactttccaagaaacagatgaaaaggttaaagttgtaagtgtttatgttgatatattttccttttcayaacaccctaaaatctagatacaatagtcttcccttatctgaagttttgcactctgctgtttcagttacccatggtcaattgcggtctgaaaagactcaat

SEQ ID NO: 47305 - DNA, 201 bp, Homo sapiens
gtagtagaagacagaaaacagacacagcagaacttttggctttgctctttaaatgtaaggatctacttctaaaatcagtcctcatgtatttttatctagakcatgttttgctgatgtgatgattaattttatgcatcaacttggctaggccactatacccagaaatttggtcaaacaccagtctaaatgtcactgtaaggg

SEQ ID NO: 47306 - DNA, 201 bp, Homo sapiens
atttggatttcatgctaaagatcctggggagtcattcagtgatttaaagtctggtaatgatgtgatagaacttacatcactgttaaagttggataggaggstgctcaaattagatgcagggaaattagttgtgagattagtgtagcagtttatatgatagttggtggaagctggagtggtgatccaaatagacaagagagg

SEQ ID NO: 47307 - DNA, 201 bp, Homo sapiens
aaccttgaaaaaattttagaggaattgctaactagagaaaccagtttagagaagaacataaatgacctgatggagctgaaaaacacagcacgagaacttcrtgaagcatacacaagtatcaatagccaaatcaatcaagcggaagaaaggatatcagagattgaagatcatcttaatgaaataaagcatgaagacaaaatt

SEQ ID NO: 47308 - DNA, 201 bp, Homo sapiens
gaaatcatattcaggagtggcttctccatcgaaggtataattcccttggaagattcacatgtattttatacagtttatccctaaaaatgtttaaagacaastctgtgtaaaatgtgaagtacttgacttccttattagtgactttatctgaggcatggtctaccatagtagtgattacactgcccattaaccagtgagtat

SEQ ID NO: 47309 - DNA, 201 bp, Homo sapiens
gaggcggatggatcacctgagatcaggagttcgagaccaccctggccaacatggtaaaaccccatctctactaaaaatacaaaacttagccaatcatggtkgggggtgcctataatctcagctactcaggaggctgaggcaggagaattgctggaacctgggaagcggcggttgcagtgagccgagattgcactattgcac

SEQ ID NO: 47310 - DNA, 201 bp, Homo sapiens
gacctttgtttgatgcataatttgtaaatattttctcccgttctgtaggttgtctgtttaccctattgatagtttcttttttgctgtctaggagatctttygtttaattaggtccctcttgtcaatttttatttttgttgtaattgcttttgagtatttagtcataaattcttgccaagaccaattccaggaaggtatttt

SEQ ID NO: 47311 - DNA, 201 bp, Homo sapiens
tgccacttctgttgcattcccatactatatcattttcagtgcatttgtcctgtgtatgtatatgggaggatttctgagtatatcaaattccccacttaaarctaccattcccacggtatgtgtctccttcacattcattatagaggaattttagtgagttttttgtgtatgtgcatgcggacagaaactgtttagaagggc

SEQ ID NO: 47312 - DNA, 201 bp, Homo sapiens
tcctcctttccctcctcctcctcctgtttttttctggaagagaaaaattatatctaaagctaattgccttaaattcttttttagaaagtgattgtatactrtaaataaactaactcttttcagtaatcgctcatttttttatttttgcagtaaggatagaatgtatgtaagagcatttaggacatataaagcattaaagga

SEQ ID NO: 47313 - DNA, 201 bp, Homo sapiens
ttttttctggaagagaaaaattatatctaaagctaattgccttaaattcttttttagaaagtgattgtatactataaataaactaactcttttcagtaatygctcatttttttatttttgcagtaaggatagaatgtatgtaagagcatttaggacatataaagcattaaaggacatataaagtgcaaaagacattgtcct

SEQ ID NO: 47314 - DNA, 201 bp, Homo sapiens
ttttcactgcttacttacatacattttgaggcatagattaatttcaaaacaagaatttaaagctaggaggaacctcagacatcagcatagtttgtggtttycaaacttttctctccttttctgtttttaaacattagaacactttattcaatcaaaatcttccatgaaatcccattgtataaaataaataaaaccagagct

SEQ ID NO: 47315 - DNA, 201 bp, Homo sapiens
gggcaagggaggcctttgagcctctttggtaccaggccttagggctacctcttacctaggccaaatgaggatttcatgtggtccagcccatgtttccaggrttggaaagggaatacattgaagtttgcagcaaaacccagctcagtttgtcctttccacatgcatttcttttagaaactctgcaggaaggggtggctaaca

SEQ ID NO: 47316 - DNA, 201 bp, Homo sapiens
gacctcgagaagactcccagagaagatgacatgcagctgagtgttgaagatttagggggatagggatgtgcctagacacgaagtctaagagcacagatgcrcacagagacttacactagaggacaaggctttatttctgctttgtttactgttatatctccagtgtctaaggcttcatttagcttgtagtagacacataat

SEQ ID NO: 47317 - DNA, 201 bp, Homo sapiens
attgaagagcaaagatattaaatccatattaattagttatgcctctttacaccaagccctcaactcctaaattattgtccttggtcgtatgtgagagaaartagatagccactgaaaactcatcctcacaatgtgaaaatgtctttctgatgatgcgtgttataatcatggtgaatgaaaggagcagagagtacagtgtca

SEQ ID NO: 47318 - DNA, 201 bp, Homo sapiens
gtggtacagcaagaataggcaggagatttgcagtcagaagacctgggttactgaaggtcttgggcaactcatttaactctgagatgggagttctttatctrtgaaacagggagaactcaataaggttgttccccagatcatatgacatgaggtatttgaaagagtttgatacactgtaaagactacagttgttaccactgt

SEQ ID NO: 47319 - DNA, 201 bp, Homo sapiens
ctaaactggaaaaatctgagggcctttattgggtatgacatttgccatttttccttttgtggcttccaaagattattccttcaccttctcatagtcttccwttaaggcccaggtggtgccagctgtacctgttccttatattcactgtcaccaccaagttccaggtcactcccttgcattcatcaggatctttagaacctg

SEQ ID NO: 47320 - DNA, 201 bp, Homo sapiens
caagaaaaaaacaaccccatcaacaagtgggcaaaggatatgagcagacacttctcaaaagaagacatttatgcagccgaaagacacgtgaaaaaatgctyatcatcactggtcatcagagaaatgcaaatcaaaaccacaatgagataccatctcacaccagttagaatggcaatcattaaaaagtcaggaaacaacagg

SEQ ID NO: 47321 - DNA, 201 bp, Homo sapiens; identical to SEQ ID NO: 8347

SEQ ID NO: 47322 - DNA, 201 bp, Homo sapiens
tatccaggaaaaatcaaccttcagagaaacagaagggattgggaatcgtcaccaagtcactatgcccagacagacttttcatctgttcttctgagtgcaaytccaagaaattaactggggaaatttatttgcataataagacaacctttgttctgtgcagttctgtccaccccttaccttcccataacttgttccatccag

SEQ ID NO: 47323 - DNA, 201 bp, Homo sapiens
tatttcatgcacagatgaaaggaagcaaaatgtggtggctaagagcatggaccctggagcctgctccctgccaccaggcatatgaccttaagtgtaagtckctctgtgccctactctctacatttttaaacttcgatgataaatacctacttcataacattattggaagaattaaatgactaaatatattggaaatgctta

SEQ ID NO: 47324 - DNA, 201 bp, Homo sapiens
aatcagccaaatacagtatttttacttcacttgtaaaactcattaccatatacagcttttgtcaaatataactgcaaaatctcagtaattcagaattgtcratttctgatttatatgcctaccaacaggggattgttggtggttattatatgcctgtaagatgataagaaatgcacaatgtcctgagcataagacatactc

SEQ ID NO: 47325 - DNA, 201 bp, Homo sapiens
tgatattattatactatgcaattttgagacaccagtggttctctttcagtgagattaagcttggaatgtttgtttaaaaaggcactattattttcttatasattttaaagtttacaatattcgcccaaatttctttttctttttgtttatttctttgctgtaaccatatgtttgcttacctgaagaaatggaggtaggcat

SEQ ID NO: 47326 - DNA, 201 bp, Homo sapiens
agatgcatccaagacatctttttgaagcctcagacagagcagtagtatgaagacctatttttccatgtaataaaggctcatataaaacttttcaaaatcarttcaaggaactcactttgatatgacttgacatgaatttaaataacaacaataataataccaagaggtaataatttagaaataatttgaaagccgagtttt

SEQ ID NO: 47327 - DNA, 201 bp, Homo sapiens
agatccagatctgtggccaaatgtcttgctcatacttcaactcccagtaatcacaaccacagctgagcaaccacagacctctaccagagggcagagctcaycagaacatcttggaataggagagaaatgcctgtgtcctgcaggcacgtcttgctcaatttctcctttatagctcaccagtcaaatcagccagtcctcctc

SEQ ID NO: 47328 - DNA, 201 bp, Homo sapiens
tttgctatatcaagagaaggaaataacagatcaaatatcaaatcaactgaggtccaaaaaactcgtccctttggcaatgaatcatggtactttgagacaayaggcaacggtcaacctccaatttgaatggttgttgcattgatctttgaggatgctatagaaagataaggaaaaaagtatttataatatatataaaatata

SEQ ID NO: 47329 - DNA, 201 bp, Homo sapiens
ttggttccagacacctagtggagatgttaagagttgtagagatgtttaagaggttaatgtgattttgagttctagtgtttggctacctctctggtagctcstttctattctctcagttccacttctttcaggtacccattaaatgttggtatttctgagagtccatattaatcacttgtttccactccattcctactcatc

SEQ ID NO: 47330 - DNA, 201 bp, Homo sapiens
atttagttatatgtatttaaatatattcaaaacatcattataaagagagtattgttctttctcttttctgaactccaatgtagtttatcttcccttctttratggttttcatgactatgttttgttcccattaggttccgaactcctggtgtctacccagcatgagtccatgcccacagcatctccctagcacttcttaat

SEQ ID NO: 47331 - DNA, 201 bp, Homo sapiens
gcaaaattcaggaatttgcagggaccacagctccagttacccaccaggatattttttagttgccttccttttccatacagcatattcaaaacctcctaatytttactttcctttttcctttgcatttctcctcctgcctcctgttacaaaatttactggtctaagaagcctaggcttcctgaggagacattctcccctcta

SEQ ID NO: 47332 - DNA, 201 bp, Homo sapiens
atattgaaacatatatatgcatataggtatatatgtgtatatagcaccctatattttatagaatacataattttacgtatacataattttatacatatacrtaattttctgtatgtatataattatggcacatagactatttgagagtaatagtacaatccaacctggtcttggttgggtaggggataaggatcatggatg

SEQ ID NO: 47333 - DNA, 201 bp, Homo sapiens
agtcatattatgaacagttgttatattttacattgttttataattggtctcctgcatgataaaactcatttgcaaggcagaaaggcaaaaatgtgagaagyaagaaaccaatttattgttaatcaataattacaataaaaatgggaataaggagaaatgtgattttaactcacttcctgggaagacattccagagtttggg

SEQ ID NO: 47334 - DNA, 201 bp, Homo sapiens
aaactgacaaatttatttgctttccagaaattttgtttctttattttgtgtatttatacactttgaaaatccatcaatttgtcttggcaattctgatattwctcctatttcacaagtaatgaaactgaggccaggatggctaaatgacatctcaggtagcagaactattaggagttagactaacgtctccagatttctttt

SEQ ID NO: 47335 - DNA, 201 bp, Homo sapiens
tactgaattgtaacagatatatattaaatacaagtcccatatcagatatttgatttgcattttttttttctattttataggcccttttcattttcttggcrgtgtcctttgaagcacaagattttttattttggtgaagtccaatttatctacttttttctttcatttctcgttatttttgtatatatctaagaatccttt

SEQ ID NO: 47336 - DNA, 201 bp, Homo sapiens
ataaatgagctagagtttcttttccaataaatttccatatttgctgccttagaagctgttggactatggttttatattgattatattgatttataggtttycaagggcaggtgatttttcaaatttaagactttcaaacacaatcttttgacgtagtctctctgtgtctggtcctatttttctggtccaggtgtctggtcc

SEQ ID NO: 47337 - DNA, 201 bp, Homo sapiens
cacatttctttttttttttttttttcactttaagttctagggtacatgtgcacaacgtgcagtttgttacatatgtatacatgtcccatgttggtgtgctrtacccattgactcatcatttaaattaggtatatctcctaatgctatccctcccttttccctgcacccccaccggcaggccccagtgtgtgatgttcccca

SEQ ID NO: 47338 - DNA, 201 bp, Homo sapiens
atgttccccaccctgtgtccatgtgttctcattgttcaattcccacctatgattgagaacatgcggtgtttggttttctgtccttgcgatagtttgctcaraatgatggtatccagctccatccatgtccctataaaggacatgaactcatccttttttatggctgcatagtattccatggtgtatatgtgacacattttc

SEQ ID NO: 47339 - DNA, 201 bp, Homo sapiens
gggggtggataagctttttgatttgctgctggatttggtttgccagtatttcattgatgatttttgcatcgatgttcatcagggatattggtctaaaattmtcttattttgttgtgtccctgccaggctttggtattaggatgatgttggcctcataaaatgcattagggaggattccctctttttctattgattggaata

SEQ ID NO: 47340 - DNA, 201 bp, Homo sapiens
cattagggaggattccctctttttctattgattggaatagtttcagaaggaatggaaccagctcctctttctacctctggtagaatttggctgtgaatccrtctggtcctggactttttatggttggtaggctattaattattgcctcaatttcagaacttgttattggtctattcagggattcagcttcctcctggttta

SEQ ID NO: 47341 - DNA, 201 bp, Homo sapiens
agctcctctttctacctctggtagaatttggctgtgaatccatctggtcctggactttttatggttggtaggctattaattattgcctcaatttcagaacytgttattggtctattcagggattcagcttcctcctggtttagtcttgggagggtgtatgtgtcgaggaatttatccatttcctctagattttctagttta

SEQ ID NO: 47342 - DNA, 201 bp, Homo sapiens
agtgcttctttcttataaatggaatttaactccttgggcaaatgtaacgttctttttacttctgtgattgctaaagtttctttaggataaacatagaaaaraaatgggagtagagggaatacacacacacacatgcacacacacacacacacacacatgctgcaaccacacaaagcacaaagcaattgttgaatatgtctg

SEQ ID NO: 47343 - DNA, 201 bp, Homo sapiens
ggtttagtcttgggagggtgtatgtgtcgaggaatttatccatttcctctagattttctagtttatttgcgtagaggtgtttatggtattatctgatggtrgtttgtatttctatgggattgctggtgatatcccctttatcattttttgttgcatctatttgattcttctctcttttcttctttattagtcttgctagcg

SEQ ID NO: 47344 - DNA, 201 bp, Homo sapiens
ttcctaatacggtggtttagaaagagtatatttctttggctgattttccccatgttgtcttaaacaaataaacattatttccaaactattaggcaaatgcyctaagctcatttttcctgtggtgcatggatgagggtaattgttagagaaggaaatcactgatagtacatatatcaataagaaaattcttctaaattgcaa

SEQ ID NO: 47345 - DNA, 201 bp, Homo sapiens
attgatctgtctaatgttgacagtggggtgttaaagtctcccattattatatgtgggagtctaagtctctttttaggtctctaaggacttgctttatgaawctgggtgctcctgtattgggtgcatatatatttaggatagttagctcttcttgttgaattgatccctgtaccattaggtaatgaccttctttgtctcttt

SEQ ID NO: 47346 - DNA, 201 bp, Homo sapiens
tttaaaaaaaatgtaaaacagatatttacaggggtatctaaagatagaggtttttattccctgatttactcagttgctgactcaataagttgtgggtcggygctcttctctgggcaaatcccatctgcattgtctggtaggcaagacttggcaggttcttcttttattgttaggtactattattcctgttgtttatattac

SEQ ID NO: 47347 - DNA, 201 bp, Homo sapiens
tgtaaatatgttacaaatatcataccgtgtctctgagttctgagtcaaatttgcagtgtttttgaagcagcattgccttctgttacctggctgctcttgtrtagtttagcatgaatgcatggcagtttgccctgtaggaacaaatctagtctatgtggatatactatcatgattcagttaggtctcaagatcagtaaatta

SEQ ID NO: 47348 - DNA, 201 bp, Homo sapiens
gaaatcagcaatattatctgtaaggtaaaagacaatttatagtcctaatttattaaatttatattattgacatcataggtttgatgattaatttgtgatamtgtaagatctttgtgtcattaatttattgtcaataatctttgaagaactttgaatgctgagaaaatactggtgagactagtcagtcaacaaatattaatg

SEQ ID NO: 47349 - DNA, 201 bp, Homo sapiens
gaatgatccaagcagttgaaaggaagaaactgtataaaaggaatgaacacagggtggaagttcatgcggaccttaggagagacaggaccccatgtctcagytgaaggtttggccttccattatacaagataaaggcagaatctgtggttgcaaatgtaggtagtctcatggatttgttggaaagaagatggattattctta

SEQ ID NO: 47350 - DNA, 201 bp, Homo sapiens
tcttcacatatataatccatttttcattataataagcctcaagttgatattataatccccattttataggtaggttaacagattcagaaaggttgcctcakgcagtgtcacataagataataaatggcacaaaatggatttgagcaggtgttcatggtctttaatatatcctgaattttactcatcttacattagcaaata

SEQ ID NO: 47351 - DNA, 201 bp, Homo sapiens
ttctcgttatttttgtatatatctaagaatcctttgccaaaaccaaggttataaaactttattctatgttttcttctaggagatttatagctttgatcttmcacttaggtctttgatccattttttaaaattactaatttttaaattttaaatttcattttagatttggggataggtacaggtttgttatattgcataatg

SEQ ID NO: 47352 - DNA, 201 bp, Homo sapiens
aaatgaaaatgttataggaaaaagctaattaaaatttgtgtgagtcagttattaacacagtaagtcattaggtaacagaatctaattttaacccatttttygaggctgccttttatctttatttagcaatgaatgaagttacttgattaggttcaatgactggcccagggtcaatcacacagtaaattaaaatagcaaaag

SEQ ID NO: 47353 - DNA, 201 bp, Homo sapiens
gatattgaatgggagttgtgagaggggacatccttgccctcttcctcatctcatggtacagcatctagtgtctcaccattaagtatgatgttagctctatrgtttttttgtagatgttcattatcaagttgaagaagttcccttctattcttagtttgctgtgagtttttatcatgatggttgttgtcaaatgcttttctt

SEQ ID NO: 47354 - DNA, 201 bp, Homo sapiens
gctgacctagtgattctacaagtcctataccatttgtaagaatcaacaagactgatacaataaaatttattttaaatcttcaggatacagatacaagtgawtatatttatgaagatttagagatttataaaatttaatcgagagattatttcatttttaaaacctattttttcttcttattaaagaaaatacatgttcatt

SEQ ID NO: 47355 - DNA, 201 bp, Homo sapiens
ccagagagatgcaggtcagcaattgcttagtgcaatcagcccagggtggagggtctgtgctatgggaccaagccaggggttccctgtctggtgatgagcastggagggtgtgtgggacccatgtgagacagtctggccttcctccttaggtcaactgcagcttgctggaggtgtgaataaggcacttaggatctttgcttc

SEQ ID NO: 47356 - DNA, 201 bp, Homo sapiens
tagccttgtaatatagtttgaagttgagtaacatgatgcctccagctttgttctttttgcttaggattgccttggctactcagggtcttttttggttccayatgaattttaaaatagttttttctagttctgtgaagaatgtcattggtagtttgataggaatagcattgaatctgtaaattgctttgggcagtataacca

SEQ ID NO: 47357 - DNA, 201 bp, Homo sapiens
cgattaataaatggtaattctttttcttcatatttaccacctgggctaatagaagtgacagaagcctatcatgtggtgcacttaaaactgaccttttaatycatcaggtatgaaggtcaggcagaaagaaaatgttggtgctacacaactcatctctcagtcttcaaattcctcatgctcttttttttgctgttgttaaaa

SEQ ID NO: 47358 - DNA, 201 bp, Homo sapiens
gttaatttgagatcattccaactttttgatgtaggcattaagtgctatgaatttccctcttaacgcaggcttggctgtgtcccagagattctggtgtgttktatctgtgttctcattattttcaaagaacttcttgatttctgccttagttttattatttacccaaaagtcattcaggagtatgttgtttaatttccatgt

SEQ ID NO: 47359 - DNA, 201 bp, Homo sapiens
tttcttatctgaaaattatcttgttcctccttcacttacgaagcttagtttggctgtatatgaaattcttggttgaagattttttctttaagaatgttgartataggcccccaatctcttctggcttatagggtttcagctgggaggttcactgttatcctgatgatgttttctttgtaggtgacctgccctgtctctcta

SEQ ID NO: 47360 - DNA, 201 bp, Homo sapiens
aattacctccacctggtctctcccttgacatgtggggattgtgaagattatggggattacaattcaagatgagatttgggtggggacacaaagcctaaacrtatcaatagccattctgactggtatgagatgatatcttattgtagttttgatccgtatttctctgatgattaatgatgttgagcattgttttcttatgtt

SEQ ID NO: 47361 - DNA, 201 bp, Homo sapiens
ctggtatgagatgatatcttattgtagttttgatccgtatttctctgatgattaatgatgttgagcattgttttcttatgtttgttggctgcttttatgtwttcttttgagaattgtctgttcctgtcctttgcccacttttttttttccccctttttgagatggagtctcgctcttcttgcctaggctggagtgcagtgg

SEQ ID NO: 47362 - DNA, 201 bp, Homo sapiens
tagcctcataggatgagttaggaagtgttccttctgtttttatttaaaagagtttgtaaagaattggtataatttcttctctaaatgtttggtgcaattcwtctgtgaaaccatctaggcctggtgctttattttttgaagattattagttattgaatcaatttatgtaatagatctaggcctattgagattatctatttc

SEQ ID NO: 47363 - DNA, 201 bp, Homo sapiens
attgaatcaatttatgtaatagatctaggcctattgagattatctatttctctttatgtgagttttactagattatgtctttcaaggaattggttaatcaygctttcaaatatcctacttattacccatatatacttttgatatgatatatttcacacttcattactttatatatgtatttcttttactaaattgtggggt

SEQ ID NO: 47364 - DNA, 201 bp, Homo sapiens
gtttgtaatgattatggtaaacaaccagatttccttgtgaagtagactcatgttatttctcagaatttatcacattatttatctgtatttcttccctgtartctgtgaagttagcttttgtataatagggtgtgtgtatttatttacaagaaaattactctatgtgttaaaataatgtttagccttgttttcttcttatta

SEQ ID NO: 47365 - DNA, 201 bp, Homo sapiens
ttgatggttaaattggttatttatgttgtgtataaggtttgcaaggctacttaaccagcttgattcttcatttccatcactataaagtggataaaactgtmtgccacatttttaaaggtgaaaagattattgatatttttatgtaaaatggctggtaccaagggtgtcattgctattaaacatatacttctgcaggcagag

SEQ ID NO: 47366 - DNA, 201 bp, Homo sapiens
gtaaagttaaataagcaaatggagaggtaagagaggatggactagagaagtataaaaggggtacaactaggaaaggataataaaggagagtttttccaaawgaaaatgttataggaaaaagctaattaaaatttgtgtgagtcagttattaacacagtaagtcattaggtaacagaatctaattttaacccattttttgag

SEQ ID NO: 47367 - DNA, 201 bp, Homo sapiens
actgaaaataataaagaataaaaaggttttctagagagaatagtagtgagtctgccacactgcagccaagctcagtactagtttacatgccttcatcagarcagcagagactcaggagattctaaagcaatcatcagaggtgtgctcagccttcttgcctagatgcagagtggaacaggtgactgccaaacaggaagtcaa

SEQ ID NO: 47368 - DNA, 201 bp, Homo sapiens
cagtgctaggtctttatgctttttctgtccttccaaccgtgaacgcttagtaaaagaaaacttgctgcaaaatctggaccattgcaaatacccaacacttrtaagaccctgccctcctttcactcacctctttgttgactagccaatcacctgctccaaaaatgatcttccatcacatctgtccctcacttttcctgtagg

SEQ ID NO: 47369 - DNA, 201 bp, Homo sapiens
tcataaattatacccattttaaattcactagacaagtttactatttaaaaaaatgtggaatgcatctgttggaaacatacatttaagaccctcccaaaaartgactaattaacatatgaaaaaaagttttcatttcactggcaaccagaaattgtaaaataaaacagccatccagatatcatgattgggctttcagaatag

SEQ ID NO: 47370 - DNA, 201 bp, Homo sapiens
tttttaaattctttttattttatttttatttttgagacagagtcttgctctgtcacccaggctggagtgcagtggtgcgatctcagctcactgcaagctcygcctcttgggttcatgccattctcctgcctcagcctcccgagtagctgggattgcaggtacccaccaccacacctggctaatttttttttgtatttttag

SEQ ID NO: 47371 - DNA, 201 bp, Homo sapiens
ccattttaaattcactagacaagtttactatttaaaaaaatgtggaatgcatctgttggaaacatacatttaagaccctcccaaaaaatgactaattaacmtatgaaaaaaagttttcatttcactggcaaccagaaattgtaaaataaaacagccatccagatatcatgattgggctttcagaataggagacgtgagaaa

SEQ ID NO: 47372 - DNA, 201 bp, Homo sapiens
tactattttttgaatgagacagaacaagcacaaagatgtttatataaacccaagtgagaattttgactgatagtatctcaactacaaattgcagtttttcygcaagatttagaagagaggagaccacaagtagtagaagacagaaaacagacacagcagaacttttggctttgctctttaaatgtaaggatctacttctaa

SEQ ID NO: 47373 - DNA, 201 bp, Homo sapiens
taaagttcttatagattctggatattagtcctttattggatgcatagtttgcaaaaattttctctcatcctgtagatcgtctgtttactctgttggtagtytcttttgcagtgcataatgtctttagtttagttaagtcccgtttgtctatttctgtttttgttgcattgcttttggggtcttagtgagaagtccttttcc

SEQ ID NO: 47374 - DNA, 201 bp, Homo sapiens
tcttatagattctggatattagtcctttattggatgcatagtttgcaaaaattttctctcatcctgtagatcgtctgtttactctgttggtagtttctttkgcagtgcataatgtctttagtttagttaagtcccgtttgtctatttctgtttttgttgcattgcttttggggtcttagtgagaagtccttttcctaggct

SEQ ID NO: 47375 - DNA, 201 bp, Homo sapiens
aagacgtgttggttgaaaatatgtggctttacttctgagttctctgttcttttacattgatctatgtgtctattttcatacaagtaccatgctgttttggktactatagccttgtatagtttagtatagagtagtttgaagttgggtaatgtgatgcctctggctttgttctttttgcttaggattgctttggctatttgg

SEQ ID NO: 47376 - DNA, 201 bp, Homo sapiens
tagtgattacactgcccattaaccagtgagtattgatctatttattcctgaaaattttccctccccatttaaaaataagcagaaataaaaacctggcttcrtcatttgtgatggatgctaaagtcatgactagataaaagacttcaatttatcagtttatgtctgaagccgaaaactacttgttgatctcttaaattcaaa

SEQ ID NO: 47377 - DNA, 201 bp, Homo sapiens
ctttctgagcttgggcacttccactaactcttattttgctgctggtccctgtccctttgaggagcaacagcactaaaaagctactttcagagatccaaaamcaacatggttcgtggaaagccatgtattggtatggctggggcctgccaaccaattgtgttcagtcctttactctcagagatatttaaaatctcctactgg

SEQ ID NO: 47378 - DNA, 201 bp, Homo sapiens
ttagaggctataccataccacttagttcatattacatgctatctttatgacacattgtttttggcctgttaatgggctcctccccaaatacagggtaaacktcttaggtgcagaaactgtgctgtgactttccctttaatctccaaagaaacctagtgcatgtctcatcatatattaaatgtttaatatatagcctgggtt

SEQ ID NO: 47379 - DNA, 201 bp, Homo sapiens
tgtttttcctgaagggtgacagtagagggtgggaaaggtacattttacataggagatttatatcttaattttactctcaaaatagaagaccctgagaaaawacacatgagcagggaattttttaaaagaaattcagtttaaagtcagctttttctagattgcaagtaagctgtgtagagtaagggaaacatggctcatctg

SEQ ID NO: 47380 - DNA, 201 bp, Homo sapiens
ctatgttagcaagatttcaggatacactatcaatacacaacaatcagttgtattttttaaacttttattttaggtttgggggtgcatgtgaaggtttgtcrcataaataaacccatgtcatgggggtttgtggtacagattatttcatcatccaggttttaagtccagtaagcccagtgctcaagttatcttttctgctcc

SEQ ID NO: 47381 - DNA, 201 bp, Homo sapiens
cattctggctggggtaaggtggtatctcattgtggttttaatttgcacttccttgatgattagtgatgttgaacattttttcatgttttttggccatttgyatatcttcttttgagaaatgaagatagatatattttgaattttgatgttttcacatccacccctcctccaaaaggctgtgccagttaatattccagccaa

SEQ ID NO: 47382 - DNA, 201 bp, Homo sapiens
gttatgatcttgacttttaagagcatatatacttttatgttaacgccattcaaaggtaatcaaagcacacttgcaattgtacagaaaccatgagtgttctscttttaaaaaatatatattattgtatctttccattccaatataaaaggagaggaaggagagaggtggtggagtcatttttggcccagcttttctcagctg

SEQ ID NO: 47383 - DNA, 201 bp, Homo sapiens
tgcttctgtcattggtaacttgagtatacacaaatcagtgatttgtggaacattttctattgccagaatatctggattgtcacctcccctctcacctccaytcaacttctctgaaggggctaaatgctgtttgaaaatccaatccagtgtgtatttacttaacaagatgatcttaaacagacatcaccacctctttagggt

SEQ ID NO: 47384 - DNA, 201 bp, Homo sapiens
aaagccctaacaaacaatattgggcttacaaagaacatacctatgtctaaaatattttattcttttttctttaaatgttcaatgattcatctcaaaatgargctgtaacttaagtggcattaaaatgctattcaagtgttcaattgcaaaagacaataggtaaattatatacatatgttaaaaaataagagaaagctttat

SEQ ID NO: 47385 - DNA, 201 bp, Homo sapiens
atttgtttactccctttaactaccattgctctttgctgagtgatgatgcagggcagatggtgtcagggagagaaatcatcaactagctcaggattgaaagsggatgaagatgctggaaatgtgttgatgtttgagaaggatgtgtggaaatgaagaagtgactaaagaggacagccttatcaccaacaacataagcatatc

SEQ ID NO: 47386 - DNA, 201 bp, Homo sapiens
tttaaattcactagacaagtttactatttaaaaaaatgtggaatgcatctgttggaaacatacatttaagaccctcccaaaaaatgactaattaacatatkaaaaaaagttttcatttcactggcaaccagaaattgtaaaataaaacagccatccagatatcatgattgggctttcagaataggagacgtgagaaaggtc

SEQ ID NO: 47387 - DNA, 201 bp, Homo sapiens
attatggctattaacttttattcatatatattgccaatacttttctcaatttatcatctgtttttcaattttgttcattattttgccatgaagaagtgtgycattgctatgagtcttttatagtttcaggttttatgccaaatgtcttttttttttcttttaacttcaatcttcccaaattgtcatctattttgtactctg

SEQ ID NO: 47388 - DNA, 201 bp, Homo sapiens
gagctcacaagttcgagaccagcctagacaatctggcgaaaccccatttctacaaaaaataccaaaattagccaggctgggactgcaaggctgtagtcccrgctacttgggaagctgaggtggaaggatggtttgagcctgaaaggtggaggtggcagtgagccaagatcgcgccactgcactacagcctgggcaacagag

SEQ ID NO: 47389 - DNA, 201 bp, Homo sapiens
tattcatatatattgccaatacttttctcaatttatcatctgtttttcaattttgttcattattttgccatgaagaagtgtgtcattgctatgagtctttyatagtttcaggttttatgccaaatgtcttttttttttcttttaacttcaatcttcccaaattgtcatctattttgtactctggggctttgagatttgacc

SEQ ID NO: 47390 - DNA, 201 bp, Homo sapiens
atgagaagccagttgtcctaaaattatttgttcagaagtctggtttgtaatgccgcctttatcataaactaacttctcaggtcggtttcactctttcttcrctctcttctattcacctgacctgccagtggacttttaccacaggcttctgttgtctaatttttatattaaatttaaatcttaatatttgaagggcatttt

SEQ ID NO: 47391 - DNA, 201 bp, Homo sapiens
aatgtattcatataagactgcacattttctggtaggtttatgaccagatgttttttagtagataccctacgttcatttaatggttgatttggagtgcagtmccacaagttgagtctaaagtgtgaaaataaattttttaaaatttttatcaatcattgtcaccaaagacctcttcttttgccactttctactatgaaacac

SEQ ID NO: 47392 - DNA, 201 bp, Homo sapiens
ggtggtacctaccttaagagcagttaagtattcatccttatgtttgtagcattttaatgcatccattattgacatttttccctgtaacctgtctgagattygtcatggcacatggtaggaggtgaggcactaacttacagagcagagtatagaggctaagagcatagaatctgcaaagtctagttctgccacttgccagcc

SEQ ID NO: 47393 - DNA, 201 bp, Homo sapiens
gtggctcaatgcaagctgtacctcagaatcctgtcatttctaaataacatcttatctatatgctatttccatgaaaagctagtttggccaagattttgctrtaaagtatccaacgagttaggctttcattatttttctggtcttacttaatgaagaaacacatctgggaaatcaatgagtatttgaactcactgggcttca

SEQ ID NO: 47394 - DNA, 201 bp, Homo sapiens
gtaactatttggcaattttccattggtgttttaaatagctctggcattggtgtaaacatatgctcaatctgtttccaagatttttgtttttctgatgggamctttaaatttcatattgagaaacgtgtttagtatttggtttagagtgacctcaaactttgcttccaagcacttcaacacacacctggcatagccactttt

SEQ ID NO: 47395 - DNA, 201 bp, Homo sapiens
agtcctgagagacctacaaagagaattagactcccatacaataataatgggagactttaacaccccactgtcaacataagacagatcaacgagacagaaakttaacaaggatatccaggaactgaactccgctctgcaccaagcagacctaatagacatctacaggactctccaccccaaatcaacagaatatacattctt

SEQ ID NO: 47396 - DNA, 201 bp, Homo sapiens
agaggtacaaggaggaactgataccattccttctgaaactattccaatcaatagaaaaagagggaatcctccctaactcattttatgagtccagcatcatyctgataccaaagcctggcagagacacaacaaaaaaagagaattttagaccaatatccctgatgaacatcgatgcaaaaatcctcaataaaatactggcaa

SEQ ID NO: 47397 - DNA, 201 bp, Homo sapiens
gcaaatcaataaatgtaatccagcatataaacagaaccaacgacaaaaaccacatgattatctcaatagatgcagaaaaggcctttgacaaaattcaacarcccttcacgctaaaaactctcaataaattaggtattgatgggacgtatctcaaaataataagagctatttatgataaacccacagtcaatatcatactga

SEQ ID NO: 47398 - DNA, 201 bp, Homo sapiens
aaatcaataaatgtaatccagcatataaacagaaccaacgacaaaaaccacatgattatctcaatagatgcagaaaaggcctttgacaaaattcaacagcscttcacgctaaaaactctcaataaattaggtattgatgggacgtatctcaaaataataagagctatttatgataaacccacagtcaatatcatactgaat

SEQ ID NO: 47399 - DNA, 201 bp, Homo sapiens
attcaattaggaaaagaggaagtcaaattgtccctgtttgcagatgacatgattgtatatctagaaaacctcattgtctcagcccaaaatctccttaagckgataagcaacttcagcaaagtctcaggatataaaatcaatgtgcaaaaatcacaagcattcttacacaccaataacagacagagagccaaatcacgagtg

SEQ ID NO: 47400 - DNA, 201 bp, Homo sapiens
aaaatactcaaagtccttagcaagcaaccattgatggagaatcacttttaagttataaaattagcaaacatactttaaagatgacagtcaatatttatgcrtatgagattcattactcaataaatatctatggaatacctactagtgctggtcactttgtgagaccttggggtacagtgtaatcaaatcaagtcatccaaa

SEQ ID NO: 47401 - DNA, 201 bp, Homo sapiens
ccatcgtgtatatgtgccacattttcttaatccagtctatcattgatggacatttgggttggttccaagtctttgctattgtgaatagtgctgcaataaayatacgtgtgcatgtgtctttatagtagtatgatttataatcctttgggtatatacccagtaatgggatcactgggtgaaatggcatttctagttctagat

SEQ ID NO: 47402 - DNA, 201 bp, Homo sapiens
ttgagatgagataatcctggatttagggtagaccctaaaatccaataactgatatctttataagagaaaagagagagatttaagacagagagagacaagayagaaggccatgtgaagatggaggcagagattggagttatgttgccacagccaaagaatgctaggagtcaccagaagttggcagaggcaaggaagaaccct

SEQ ID NO: 47403 - DNA, 201 bp, Homo sapiens
aaaaatgaggccaaacaagaagacaacccaaagaagcctctatgtttcttcactacatcaacttgagaaacgtgggcactgtgacaaccagaaatccagasaggcaactttgaactataaggccaactcaaaaaacgaatccaagtaagaatttacaacggggaagtccaggtagaagatgcctgatggtaaatatttatt

SEQ ID NO: 47404 - DNA, 201 bp, Homo sapiens
ctcattgtctcagcccaaaatctccttaagctgataagcaacttcagcaaagtctcaggatataaaatcaatgtgcaaaaatcacaagcattcttacacamcaataacagacagagagccaaatcacgagtgaactcccattcacaattgcttcaaagagaataaaatacctaggaatccaacttacaaaagatgtgaagg

SEQ ID NO: 47405 - DNA, 201 bp, Homo sapiens
aagtacataactgatgtattgatgtctgcctctgccctttttttcattaccatactataaatacattactaccacttggtgcaaacacaagcactaaaatygaatggtggtgtccaattataaagtcatgccccagacagttcagcaaatctcttttactaatttttattagataccaacacaagatttctttttaattct

SEQ ID NO: 47406 - DNA, 201 bp, Homo sapiens
gggttgggcagctttaatttctctctaatgataccttctcagttcattctctgggttcttggttatctctctcccctccgcttcttcttttctccagcccygtccttttttttccttttttttttttttttttttttttgtagtgggcaggctaggaggcatgattaggattgatggaggaggggaactattccagttcat

SEQ ID NO: 47407 - DNA, 201 bp, Homo sapiens
ttctctctaatgataccttctcagttcattctctgggttcttggttatctctctcccctccgcttcttcttttctccagccctgtccttttttttcctttyttttttttttttttttttttgtagtgggcaggctaggaggcatgattaggattgatggaggaggggaactattccagttcatttattttttccctgtcca

SEQ ID NO: 47408 - DNA, 201 bp, Homo sapiens
cggcatggagatgtgttggagccagtagtggtgcacagaccaccagctgtgcttgcagtgatccagccaaatatcatcttaaatacagggctgagtctcaraaggcacatggaaggggcccccttttccctattctatcccagactcctgtactccttggaacacagggagaagggctcttaactaaagtacaaagggcat

SEQ ID NO: 47409 - DNA, 201 bp, Homo sapiens
gtaaacaaggtacttttattaagttgaacttttacaaacatatggtatatttagccaaaataacactgttatttaaggcaagtacatccaaagggctagcrtgtagaattatgtttgattaatgtgcactcaaaagctgttacacagtaagcataatttcagtttgtggagtgtcttaaatttactttgtaatttaatgtg

SEQ ID NO: 47410 - DNA, 201 bp, Homo sapiens
gatctcattgttcaattcccacctatgagtgagaatatgcggtgtttggttttttgttcttgtgatagtttactgagaatgatgatttccaatttcatccrtgtccctacaaaggacatgaactcatcattttttatggctgcatagtattccatggtgtatatgtgccacattttcttaatccagtctatcgttgttgga

SEQ ID NO: 47411 - DNA, 201 bp, Homo sapiens
ccaagtctttgctatcgtgaataatgccgcaataaacatacgtgtgcatgtgacaaaattgacaaatgggatctaattaaactaaagagcttctgcacagmaaaagaaactagcatcagagtgaacaggcaacctacaaaatgggagaaaattttcgcaacctactcatctgacaaagggctaatatccagaatctacaat

SEQ ID NO: 47412 - DNA, 201 bp, Homo sapiens
ataaacaccagattttagttttcaacagcatgtggaaatattattctggtattctcaatatttgcatagcctctcattattctttgatactttgattattktatgagtcagtcatcatctctgagtccttgaactaggcaaagcactataccagcccaggagggggctgttcatatgttcattcagcaagtgtttgctgaa

SEQ ID NO: 47413 - DNA, 201 bp, Homo sapiens
caaaactaataaggaaataatttatttcctcaaagagttgatggtttggtagcaaagtcagcacacaactacagagtaacaggggagcaagacacatagartgattaacaacgataataaataaaggtaataatagtaatggagttgcttgtttctttaggggtttatcttgtagttggaaaggcagagcatagacacact

SEQ ID NO: 47414 - DNA, 201 bp, Homo sapiens
cagtaaaatgcacatcacttaaaagtttagtttgaggagttttgacaaatgtatgcccacatcccagtcaagacatgggacatttccatcactccagaaartttcctcatgcctcctacagtcaatctccactcctcaaagacaaccacagttccgatttctattaccatagaatagctttgctggttgtagaacttcaca

SEQ ID NO: 47415 - DNA, 201 bp, Homo sapiens
tgatgattttctgattgagattaaaaccaaaacccaattatactgttgacatttataataggacttttaaaaagtaaaacaaatggaaaaaaatgtaaaartaaaagaagaaacaaagataggtcaggcaaatgcaaagaataagtgaaaagactttgaaatactatacaaaaatattgtattatatttttgtaatgaaat

SEQ ID NO: 47416 - DNA, 201 bp, Homo sapiens
attgtttctcatttgcaatcttgtatacttttgttttctcccatttccccccttaattaggattgtaagtgtattatctactggtaaagggaaaatacttstggatgtccttaacctctgttatttttatatttcctatttccttaattttggccttaatctgtgttaattctctttgttggtttattttattttttaaaa

SEQ ID NO: 47417 - DNA, 201 bp, Homo sapiens
ctaacttcctggagcacagtaggatacagagaaaccagagatttgcccaaggtcagaagaaatcagagctaggtttggaacttaatgttaggaactgggargcctgtgccagttcatcatcttctcttcctcctgttattgttttagagcacctccctccaaccctcaccctgcctcctccttttcccatccctttgcatt

SEQ ID NO: 47418 - DNA, 201 bp, Homo sapiens
cctgcctcctccttttcccatccctttgcattgggccagcctttttctcttccgtgatactctctttcattactcttcttgatagttgaccagcagtgacmttgcattttattaccttttttttcccatacagaatagtggagacagggagcagaatttttctcagacttaggcaagttaatttgactgaaatagtatact

SEQ ID NO: 47419 - DNA, 201 bp, Homo sapiens
aattatatgaatgatacaggattgctttagatcttgtttttctctaatatccctgctgcaagtcctctatttccaagggtttaaaatgtacctcagtgctyctttgtgacagtgtgtcatttttatttcccactgcttcaaggtcatgatatacccatgaatagcatatatatacatgatagcagtagctaggtatcctga

SEQ ID NO: 47420 - DNA, 201 bp, Homo sapiens
atttttttagatttctcaaaagtgagtatttgaagaggagtcatcacagcatggtgatggagtgcaggctttgctggcagctcttgagtcctgcctctgaytctcactggtagcatggctcctcattacggaatctagcctcacttggcctcagttccttcatctgcaaaatagggattgcagacttcaccttttaatctg

SEQ ID NO: 47421 - DNA, 201 bp, Homo sapiens
cctcagaagctttgaaaagaatagctttgggtttcttatctagtggaggtttagaaccctgtatatgtgtgtctgtttatgttttctggttaataaaactragacccattctcttcatattttgaaaagaggggcaaaggcttgcaattatttttatagatcctagcattcatggttctgagtcctactaccaggacagca

SEQ ID NO: 47422 - DNA, 201 bp, Homo sapiens
tgaagacagagggcagaccataaggttccagccagacggaggtcagggcagagtcctgccactgtgggaacacttggaggataaggctgccaggtggaccrgctagggaacaaggatctggaaatttaggcctgtgttctagtcatccacaggtgtattagtccattctcacactgctataaagaactacctgagactgga

SEQ ID NO: 47423 - DNA, 201 bp, Homo sapiens
tttttcctcagagtaagttaagaagggaagtggcagaaggatcatgagttccttgcttgcagagtaagtggggagatgagaaggaggaagcaatgcttttstgagtgtccaccagattgtagggacatacgaagagaaaagactggtaaggttcaaccactgtgagaattaggagtatttgtgaatgagttagtctggggt

SEQ ID NO: 47424 - DNA, 201 bp, Homo sapiens
tgtcatgggccagtaataggcactgctatgggagactcaggggagccttctgcattagagtagaaaaacttagcccctccacaccttcttaggaccagagrgtcaggcccacttaaaggtcctgcagtcatcaaagacagctcgaccaagaatctgatgtttgctggttcttgtcctaaagctagaaagtgccacaacaga

SEQ ID NO: 47425 - DNA, 201 bp, Homo sapiens
acgttctgtgtggaaaatgaaaatgcatggactttcctgggaagcaggaatcccatggctggtgcagtgggtacagtgaagagtttgaatttactctggcrggcaatccagtgtctcagaaaatgaggtgtgggtgaggagcatgatgaatatgtatggttacataactctgtgtcagttactcagagcatgaagggcttg

SEQ ID NO: 47426 - DNA, 201 bp, Homo sapiens
actgcacaggaatctaccgaacagttggttgcctcctctgtctgctcaactatttgcagcttccacgaagccaggagctgtgtctcctttatcattttccrtagtgcagtgccggcatatggcaggagctaactgaatgaatcagctacttgactctgtacaagccatttatctaagctgaaacatacctttgtcatcaat

SEQ ID NO: 47427 - DNA, 201 bp, Homo sapiens
ttggtgccattagcggctttttcgtatgttaatatttctctttattactctattattatttcttatttatttatttatttatttatttatttatttatttrtttgtttattttgagacagtttcgctcttgtcacccaggctggagtgcaatggcgtgatctcggctcactgcaacttctgcctcctgggttcaagtgatt

SEQ ID NO: 47428 - DNA, 201 bp, Homo sapiens
atttatctaagctgaaacatacctttgtcatcaataaattggttgagaatagttgagtgggcttggattagaacggttgttgttttttgagacagagtctygctctgtcgtcccggctgaagtgcagtgagtggcatgatctcagctcactgcaacctctgcctcccaggtgcaagcaattctcatgcctcagccacctga

SEQ ID NO: 47429 - DNA, 201 bp, Homo sapiens
attcttattcttattctaatataatctcttttaagttctaccatttttgaaaacttttcatcagttcatatctcctaggagcagaatctatgctttttttkgtatgcttttgaagtatattggattaccacagtacatttatgtgttaaaggtttgtatgaatcaaatcagagatattggtttaggttagtaaaacttcat

SEQ ID NO: 47430 - DNA, 201 bp, Homo sapiens
tttacttgattatcatatatatgtgactatcaaacatcttaatcaacacctggctttggttgtcagacattttcaaatcaattcaataatatttataatayacactgtaagaatttttatgcctagcatcatgctaggcattatatagaaacaaggaaggactcatagtcttacctttgaagatgttgttgctttaataga

SEQ ID NO: 47431 - DNA, 201 bp, Homo sapiens
ctcgctctgtcgtcccggctgaagtgcagtgagtggcatgatctcagctcactgcaacctctgcctcccaggtgcaagcaattctcatgcctcagccacckgagtagctgggactacaggagtgcgccaccacacctggctaattttcatatttttagtagagacggggtttcgctatgttggccaggctggccttgaact

SEQ ID NO: 47432 - DNA, 201 bp, Homo sapiens
ggataaacctgatagcagaaacagggaggtcagaaggaaaaactgtttggatggatgagaggaaggaaagagttaagtacatggggtatttagtgctatcrgtagaaatttaatggaactacatatgtcatttaaaattgtctgacagccaacttcaaaacagtaagaaaaaacaggtgaaattatgtttaataatgcttt

SEQ ID NO: 47433 - DNA, 201 bp, Homo sapiens
attgcctttgagatcaaaaggatacagttacaaataagaaagcgtaggctcagggatgctaactcactttcttaaggtcataaaactggtgcatgggggarctggaacttgtattaggacttcctctaagtacacttttccttccactcattttccattgtgtgcttattttgttctgctgttcatgtgcagtatcaaaac

SEQ ID NO: 47434 - DNA, 201 bp, Homo sapiens
tctttgactgaatacccagtaacgaagtagttctagttttagtatttttagaaattgccatactgttttccataatagctgtgctgatttacattcccacyaagagtgtatgttcccttttctccacatcctcaccgccatcaacagattaaatctcattactcattattggttggttcaggttttttatttctttctgat

SEQ ID NO: 47435 - DNA, 201 bp, Homo sapiens
gtctaatatgcagtttaaatccaatgtttcttcgttaattttcagtctagatgatctgtcttatgcttagagtggagtgtagaagtcccaactattcctgyattagagtctttcccttcaggtctaataatatttgctttatatatctgggtgctctggtgttgggagcacacatgaggatacaatcattacaatcattat

SEQ ID NO: 47436 - DNA, 201 bp, Homo sapiens
catgtgttttcataatggtagttattattcttttgcttttgggtgtaggtctcccttaagtatttcttataggggtggtctagtggtgctgtatctcttascttttgctcatctgtgaaagacattatatctctttcatttaggaaggataattttgctgggcataatatttttggctagcacattttttcttttggcact

SEQ ID NO: 47437 - DNA, 201 bp, Homo sapiens
caacacttgtttgttctttatggtttaccaatttcactcgttagatcctgacttttaccctgtatcgtagatagggctgagattatgcacctcattttackcacaaggaaactaaagccaaagaacagtgtgtgattttctcagtagccttcaaatatattggcctagaaaatattctgatagataaatagtctaaggaca

SEQ ID NO: 47438 - DNA, 201 bp, Homo sapiens
gagcggacaaatttcatatactatgactaaattcagggaatagaattattcagttatggcaaataaaaatgtatagtattttacagtttttcaaagtgctstctacattcattgtcattggtttttgtaacaattgcctttgagatcaaaaggatacagttacaaataagaaagcgtaggctcagggatgctaactcactt

SEQ ID NO: 47439 - DNA, 201 bp, Homo sapiens
agctagtacacagagggtggtacagcaagaataggcaggagatttgcagtcagaagacctgggttactgaaggtcttgggcaactcatttaactctgagaygggagttctttatctgtgaaacagggagaactcaataaggttgttccccagatcatatgacatgaggtatttgaaagagtttgatacactgtaaagacta

SEQ ID NO: 47440 - DNA, 201 bp, Homo sapiens
gactataattccagaaggagtctttctgaaaaaatcagttgcagagttttatcaaaaagaaacatttcaatttgtagactttgtcaaatttgggggggtawaaaaatgactacccaagataccatatatgaagtcaagtacacaaatacactaaaaaaacttattaatatatttaggaaataaatgtagaagcttgaggaa

SEQ ID NO: 47441 - DNA, 201 bp, Homo sapiens
agaaaccttaaaatcagactgcattgtgaatctccaagagatgagtaatgtctacatatttctcagacttatttgaccatagaacatctcacagatctagwgtcctgaggcacatgccttaggaaactgcttcagtggctttaagccaaaggaaaagacattgagtgtgatttcctcagtacagactctcactaacaaaaa

SEQ ID NO: 47442 - DNA, 201 bp, Homo sapiens
ctcttgtcaatttttatttttgttgtaattgcttttgagtatttagtcataaattcttgccaagaccaattccaggaaggtattttctagattttcttctraagttccccacctacaaccatctgatctttgacaaagttgacaaaaataagcaatggggaaaggactccctattcaatagatggtactgggataactggc

SEQ ID NO: 47443 - DNA, 201 bp, Homo sapiens
caagttaaaagaggccatgggattctgggagaccaatgaggaggctattgtataataatagtccaaaagagaggtgattataataacaatttaaagaggayacttttatgtagtaaaatggaagacaggtgataaagagtgaaaggtgtccaaaatacccctaaagtatctgaattacaccactaaaatgggaacattgga

SEQ ID NO: 47444 - DNA, 201 bp, Homo sapiens
cccagctaattttctgtatttttggtagagacagagtttcaccatgctgcacaggctggtatcaaactcctgagctcagcgatccacctgccttggcttcycaaagtgctgggattacaggtgtgagccaccatgcccagcctcaattccttacttaaaatacaattaaatttttgttaattttcagatgatatagtactc

SEQ ID NO: 47445 - DNA, 201 bp, Homo sapiens
agccactgcacccgacctgaacagtgctttttaaactgtagattgtgacctaatagtgggccatgatatcagtttagtagatggtgtgtgacagtgttaarcgaagtatcagactacatccaaggtagttataagtaccactttgtgaaagttttgtattagttgcatatttgtatatgcatactaggctgcaatgtaaaa

SEQ ID NO: 47446 - DNA, 201 bp, Homo sapiens
tgttggtccaataatcacttattattgtacaatattggaaataagttgtcttggtgtgagttcatattaaagtgtttttttttgttttctttttttttggkgtttcctttttttttttttttttttttttttttgaggcagggtctcactctgtcacccaggctagaatgcagtggcaaaatcacgtctcactgaagcctt

SEQ ID NO: 47447 - DNA, 201 bp, Homo sapiens
aaaaacctctgcagcctgggcgacagagtaagactccctccatctcaaaaacaaaaaaacaaacaaaacaaaacaaaacaaaaacaaacaaacaaacaaamaaaaaccctctgaagtctctcatgcactattctgtgttctgcaaaacgttggccctaattccctgaaataaaaagtgaggaattgatcttcagtaagagt

SEQ ID NO: 47448 - DNA, 201 bp, Homo sapiens
agagctggcagagtgaattggggccctatggaggattgctaagatgaggaattggtactgaatttaggaagcaatgaggagctgttaatgatttgtaagakacattgcagtgtgcctggagtcaggctttaggaagattaagttggccacatattaactggaggatacatagatggagggagacatctgaggtaccagtgg

SEQ ID NO: 47449 - DNA, 201 bp, Homo sapiens
tccaataatcacttattattgtacaatattggaaataagttgtcttggtgtgagttcatattaaagtgtttttttttgttttctttttttttggtgtttcytttttttttttttttttttttttttttgaggcagggtctcactctgtcacccaggctagaatgcagtggcaaaatcacgtctcactgaagccttgacctt

SEQ ID NO: 47450 - DNA, 201 bp, Homo sapiens
acaaacaaacaaacaaaaaaaaaccctctgaagtctctcatgcactattctgtgttctgcaaaacgttggccctaattccctgaaataaaaagtgaggaaytgatcttcagtaagagtcttttgaatgcttattatgtgcctatcactttgcaaattagattatgtatcaaaaggaggtttagagtagttcttgagctcaa

SEQ ID NO: 47451 - DNA, 201 bp, Homo sapiens
ctccggacgcttgcctagctgggctgaggcaggctgaggcctgtttgttgttagcccagctgcaagagcagtggccttagtaacgtcagcaggaacagagmaggcttcatctctaccctttgtctggatttggtgctggtgtgttttccccgctgctgccatgtgatggctcgtaagcagcactacacactggatctgtaa

SEQ ID NO: 47452 - DNA, 201 bp, Homo sapiens
tgctaagcctctaccgactgccagcctccatgcagacgagctatggccattgagctcacagagctagctgataacccatcaggaaaggaatgtgataaggkgtgtagggagaatttgagagatgacaaagcattgtagagggttgagggaagatcagggaaaatgacagagatcatcacatttgagttagtgcttaaagaa

SEQ ID NO: 47453 - DNA, 201 bp, Homo sapiens
aaataagtttagagagggaaggaatgcattctctctctacttgcaactggtcagatcttccattctaccatcaagctcagggttatccatggaacatcccrtttgaacactctgtctatgctgattttgaccttctcagatgtcctgatgacttatggttcaaaactgtttaaaacttgaatatttctgactgtttcatta

SEQ ID NO: 47454 - DNA, 201 bp, Homo sapiens
gtatcagtgatggaagatcaaattaatgaaataaagcgagaagagaactttagagaaaaaagagtaaaaagaaatgaacaaagcatcaaagaaatataggrctgtgtgaaaagaccaaatctacatttgattggtgtgcctgaaagtgatgggagaatggaaccaggttggaaaacactcttcaggctatcatccaggaga

SEQ ID NO: 47455 - DNA, 201 bp, Homo sapiens
tttctagtacagttgtatatacagatttttgttgttactgttttagaaaaaataaataaaatgtttatttcttctgcaaggtttagtgaggagctctttargatttttaatgactaagtacatatttgggttcctttaactgcaactaggcatatttccaagatatcatagttactttgagagaacatgaacattttatct

SEQ ID NO: 47456 - DNA, 201 bp, Homo sapiens
gaaatgactctcaaatcctattcattatataggctttgcagtgaattaccaaatggtatattttgagatgaaaaagcttctttgttatctcccaccccaaratagtttttcctttttttttcctttttgcagttctccatcatttgttttttcatatttagatctggtcttcctaaagagtttatgaggatagaaactgtg

SEQ ID NO: 47457 - DNA, 201 bp, Homo sapiens
atataatggagagctttcagcctttttcatacctgatttatctgcaacatgtgatgccttttattgaacatccactgtgtgccaggcactgtcttaagcascagaaagacagtaataagtgaaaaagcacattccttgtcattttggagcttgcagtctaatgaagaggcatataataaacaaataaaaatgtataattat

SEQ ID NO: 47458 - DNA, 201 bp, Homo sapiens
agtagctggaaccatgggaacacatcaccatgcctgactgatttttttttaaaaattattatttgtgaagggacctcgctgtgttgcccaggctggtctaraactcctgggctcaagtaatcctactgctttagcctcccaaagttttgggatcacaggtatgagctactgtgcctggcctatattaacgttttaatcctc

SEQ ID NO: 47459 - DNA, 201 bp, Homo sapiens
catgtccaagaagaagaggtgagatttaagcaaggacttgagggaggtgacagcattaattgtgtctcatctcctcagtcaagagttgatgtttcaaatgrcaagataaatgactgtaaaaatgcctgatgttcttaactattagacttaaaccatacgaaaaactgtacgctttttcttttctcgttctccacgaagtaa

SEQ ID NO: 47460 - DNA, 201 bp, Homo sapiens
ttggaggaacttaaggtaagtcagtgtctccagagctcagtcgagagggagaaatatagcaaggaaagatagcagagggaagttcaggtaggctctgttgktgccaaaaatagattttatccagagtgctatggtaagtgactgaaggaaggattttaatcaggttagttatgtaatctgatttacattagagaaagatta

SEQ ID NO: 47461 - DNA, 201 bp, Homo sapiens
gtgaagggacctcgctgtgttgcccaggctggtctagaactcctgggctcaagtaatcctactgctttagcctcccaaagttttgggatcacaggtatgarctactgtgcctggcctatattaacgttttaatcctctatgagagtatcctacatcattgcatttttttttccaagaaaagaatgatgcaaaattagagaa

SEQ ID NO: 47462 - DNA, 201 bp, Homo sapiens
tgagattctttctcctgcttgttctgtcttactgttgaaggttttgaatgtattttgtatattattcaatgaattcgtcagttccaaaatttctgcttttwaaaaaattatatctctttgataaatttctcattcatatcctgaattgtttttctgatttctttgtatcgtttttcagaatcttctttttttcacccattt

SEQ ID NO: 47463 - DNA, 201 bp, Homo sapiens
ccacttataagtgggaacgtgcagtatttggtttgctgttcctgtgttaattcacttaggataatggcctccagctctgtccatgttgctgcaaaggacaygattttgttctttttatggctgcatagtattccatggtgtgtagctatcatgttttctttatccaatttactgttgatgggcacccaggttgattccatg

SEQ ID NO: 47464 - DNA, 201 bp, Homo sapiens
tatagatgacaaagtacagaaaagcagaagagagaggcaggacatgcttgagaaagtatggtgagatgggcatcccacagaggagtagggatatcttatcyactgtaactgaaaggtaaagaagctggtgcagacaagaagggtgtatagatttggtggggaatgtagggaagctccagtttaatgaagtgatagcatcag

SEQ ID NO: 47465 - DNA, 201 bp, Homo sapiens
ctagaactcctgggctcaagtaatcctactgctttagcctcccaaagttttgggatcacaggtatgagctactgtgcctggcctatattaacgttttaatmctctatgagagtatcctacatcattgcatttttttttccaagaaaagaatgatgcaaaattagagaaaccaattatttgcatttttggttcacagggttt

SEQ ID NO: 47466 - DNA, 201 bp, Homo sapiens
atgaattcgtcagttccaaaatttctgctttttaaaaaattatatctctttgataaatttctcattcatatcctgaattgtttttctgatttctttgtatygtttttcagaatcttctttttttcacccattttaaatatatactttaatgagttttacagatatgtacagttgttcagccattaacacaagatatgcaac

SEQ ID NO: 47467 - DNA, 201 bp, Homo sapiens
tgttttaagttctttgagaaatatccaaactgctttccacagtggctgaactaatttacattcccaccaacagtgtataagccttccctttcctctgcagkcttgccagcatcttattcagccacttctagagttcattattactttgtctgaattgtttgtaccaaagttacttaaaaagccagtattatttcattgaac

SEQ ID NO: 47468 - DNA, 201 bp, Homo sapiens
tgcttaaataaaaaaaaaaactaattgtatagcttggagttccaaatttagaatgagaatctttttgtgaggctaaattgttttgtaatgaaattaatcaytcattaatttgcctcttaaaatacagacttatttaaaatctagtgggttttcttaattggacggagagacattcttgtaattcataagaagttatttatc

SEQ ID NO: 47469 - DNA, 201 bp, Homo sapiens
ctgggctcaagtaatcctactgctttagcctcccaaagttttgggatcacaggtatgagctactgtgcctggcctatattaacgttttaatcctctatgaragtatcctacatcattgcatttttttttccaagaaaagaatgatgcaaaattagagaaaccaattatttgcatttttggttcacagggtttcatttaaga

SEQ ID NO: 47470 - DNA, 201 bp, Homo sapiens
ctggcccacagactttcaggtggtgtgtatggttgggtgccagctgtggtggtagtgcaagttgaatatggctggtctcagaccctgggagaagtgcttargtgccacaggtggtcaactggcctggatgatcttcaggcccctggaaagtacatgcaggtgatgctcaggcccctggaaggtgtgtataagtgatgcccg

SEQ ID NO: 47471 - DNA, 201 bp, Homo sapiens
ggagtaaaccaaatatttactggcaatagagtgtgccatagcatttgagagcattggaatgagcctgaatacctgggttcaaatctcaccttgccacttaytacctggacaaccttggggaagttaattagccttctaggctttactttcctcatctgcgaaattataaaaatagtagtacctaccttactgcattgtttt

SEQ ID NO: 47472 - DNA, 201 bp, Homo sapiens
tacatggtggcaggcaagagagtatgtgcaggggaacttccctttataaaatcatcagatcttgtgagacttattcactatcatgagaacagcatgggaamaatcagcctccatgattaaattacctcccactaggtccctcccatgacatgtgggatttatgggagctacaattcaagatgagatttgggtggggacaca

SEQ ID NO: 47473 - DNA, 201 bp, Homo sapiens
agaggaagtcgggaaaactatgggatggtccagaaggactgaggaataacagttaagccaagaacaaaaggatcaagagaagtcagtttcattcctttctmtcttggctacaagccttgatccaagctatcacatattcatgaaacgatttccaatccatcatgccatgctgtatcctacttctcactgaatttgtagtct

SEQ ID NO: 47474 - DNA, 201 bp, Homo sapiens
aggcgcgtgccaccatgcccagctaatttttgtatttttagtagagacggagttttaccatgttgtccaggatggtctcgatctcttgaccttgtgatcckcccccctcggcctcgcaaagtcctgggattacaggcgtgagccactgcgcctggccaaaaagagttatcttttaaagatacgtacttacatctttattga

SEQ ID NO: 47475 - DNA, 201 bp, Homo sapiens
tcactagtgtgagtgtcatacatttatttttcattgaacttaaaacagaaggactatgttagaaaagaagaaaatgaagtttagttgtgagattattatayatgaaattaatgagttatagtgtgtaaggtaacatctaactagattacaggatagggtattccactgcagttctgaagtgtcagaatagcagacagcata

SEQ ID NO: 47476 - DNA, 201 bp, Homo sapiens
gttattcgaattttttagtggtagtttgaaataggaatacctgtggctttatattaaaatgtttttgctatttgggggcatttctttttattcttttcaargacttcatttaggaagttaatgttgttccaggcgattagcaaagttacaaatatgtccttctaattctggcatgttgagaatctgaacatgtgaaatact

SEQ ID NO: 47477 - DNA, 201 bp, Homo sapiens
ctttccctacacaatagaatcctaacttcttggcataactttaaaagcttttaatgatctggctaccaactacttcccagcataattttccatttcttttrtacatcataggtagccattctctgaaaccgtccttgtactttctctcctttgtgtcatcactcataccattccctccatctagaatgcttttgctccttc

SEQ ID NO: 47478 - DNA, 201 bp, Homo sapiens
acttcagcacttgaggagagcgaatttcacactcagactggtttagcctacataaactcccggtaagaatacccattcctgagccttcctctggctctttyaaagatggcatcatagatatctggggagactaacattgtgatactctgttctcacattaattgcttcacctaattataaactgaaagttaaattttagtt

SEQ ID NO: 47479 - DNA, 201 bp, Homo sapiens
attgtcctttaagaaaaaaaaaagcatagatgttttattgtaaattgtcttaacatcattctcataatcttaacgtttattattcaaaaatgctttgtagwtagctacactaagcattctaaatctttatttcttggttctagcaaagtattgacaaatttcaggttttcttttttttttatttttagagatggagtctca

SEQ ID NO: 47480 - DNA, 201 bp, Homo sapiens
cacacccagacagaaatcaaatataatttggtaatatttttatgaactaagtctgtgacaattgaattcacagctaagatatattctcatgaaagacaacrtaatttcttgagtatgaaatgcctgtgacttaaagcaagcaatttaaattctttattgtttttcaaatgaaactctgaaatgaaataggagtatgacgtc

SEQ ID NO: 47481 - DNA, 201 bp, Homo sapiens
aaagtgattaggacaaagtttctgtacttctggttatttatattctggatttattattttaaatatatagaagttttactctatggttatgaaatctgtayatttagatttttaaaaagtaaatatttagcacagtgctcttcactttcataggtaaaaaattttaaacatttctttactttatctgaaatttgttttcat

SEQ ID NO: 47482 - DNA, 201 bp, Homo sapiens
ttcatgcttaaaacacctgtgtgaagtctagattcatttttctaggggaatcaggcatcgtacttttcaggagcctttgcgtatttcaaacaaatagattrataggatagaatcagcaacttcagttgctttcttcccaaggattcagtttctctcttcccaaggatttaaactggagttgtaaccgaagccattagtagt

SEQ ID NO: 47483 - DNA, 201 bp, Homo sapiens
cccattttaaagtcagatggtttgtttgtcagctattgagttgtttgagttccttgtatattctggatattaccatcttgtcagatgcacagtttgcaaattttttttttctattttgtaggttgtctctttctctgttgtttcctccggtatgcagaagttttttagtgtgatgtaatttcatttgtctgtttttgcttt

SEQ ID NO: 47484 - DNA, 201 bp, Homo sapiens
gtcagatggtttgtttgtcagctattgagttgtttgagttccttgtatattctggatattaccatcttgtcagatgcacagtttgcaaattttttttttcyattttgtaggttgtctctttctctgttgtttcctccggtatgcagaagttttttagtgtgatgtaatttcatttgtctgtttttgcttttgttgcctgta

SEQ ID NO: 47485 - DNA, 201 bp, Homo sapiens
gtgtccaaaatacccctaaagtatctgaattacaccactaaaatgggaacattggaagaagaccaagttgtaaatcacctgttcagtttttcacatcaagrttccttggcaatactcaagagcagaagtcaataggcagtatgactctggggaaggtctagacaggagatataaacacatgggccttctgagtttaggtgg

SEQ ID NO: 47486 - DNA, 201 bp, Homo sapiens
tgagtttttatcatgatggttgttgtcaaatgcttttcttctgcatctatcgatatgatagtatgttgttttattctttaatatgctgatgtgaaggattmaattaattgattttcaaatgttgaaccctcctagcatacctggaataaatctcacttggttatgatgtgtaattctttttatgtatttttgggcttgatt

SEQ ID NO: 47487 - DNA, 201 bp, Homo sapiens
aagtcaataggcagtatgactctggggaaggtctagacaggagatataaacacatgggccttctgagtttaggtggagatggaggctcttaggcataaatragcacaacttgggagagaataagggagaagaaagcttgttaatcttgtatactgctagtgtgtctaaattggactatcttttctggaaaggtaattagga

SEQ ID NO: 47488 - DNA, 201 bp, Homo sapiens
gaaaaagacagcagtaacctctgcagacttaaatgtccctgtctgacagctttgaagagagcagtggttcttccagtacgcagctggagatctgagaacgrgcagactgcctcctcaagtgggtccctgactcctgacccccgagcagcctaactgggaggcacccccaagcaggggcacactgacacctcacacggcagg

SEQ ID NO: 47489 - DNA, 201 bp, Homo sapiens
gatcaaaagagacaaagaaggctattacataatggtaaatggatcaattcaacaagaagagctaactatcctaaatatatatgcacccaatacaggagcamccagattcataaagcaagtcctgagtgacctacaaagagacttagactcccacacaataataatgggagactttaacaccccactgttaacattagacag

SEQ ID NO: 47490 - DNA, 201 bp, Homo sapiens
acaggagaaagaattttttttgttgtttatctagaagtcggaagagagaaagccattgattagggaagatggaaaaggctctttaaagctattctttaccrgaaatgtattagcagagaccgactgaacagtcatctgggataattgcagaaggtgaaagttgggctttaagtatctttatttcacccattaatatttaat

SEQ ID NO: 47491 - DNA, 201 bp, Homo sapiens
aatctgggtgctcctgtattgggtgcatatatatttaggatagttagctcttcttgttgaattgatccctgtaccattaggtaatgaccttctttgtctcyttcgatctttgttggtttaaagtctgctttatcagagactaggattgcaacccctactttttttttattttccatttgcttggtagatcttcctccatcc

SEQ ID NO: 47492 - DNA, 201 bp, Homo sapiens
gagaaaaagtctctgcgttattgtaggagaagaagaggaatagccacagacctgcatacatatttattaaagtgctgatgacccctcatatgcattttttyagcagtctaataatacaagacttaaaatgcttggtacttagcccccaacacataactttgttcttagcattttcagcaaaacttagaagagctacatggc

SEQ ID NO: 47493 - DNA, 201 bp, Homo sapiens
catttcattatccataggtctgatgaaatgcaagccagcctagggaaatggagaaagatccagcagaccagatttcatttaccttgggcccacttcagaayaaatcagaaatacagttatacctagctcttagacagagggaaatcctagaaaatcctggggttgccatggaccagaccttgcctcctagtttccctaggc

SEQ ID NO: 47494 - DNA, 201 bp, Homo sapiens
ggctatctcacaggatgtgagttggtttagctttgtaaaatagctctatttttattttagccaaatctctacaagactctcagtcagctccctcccccacyagaatgaaacagcaacaacagcagtgaaacctgactgaaacagcagagtaaatgttggccagaagcctgctgtgatccagcctggcttttagaaggagtc

SEQ ID NO: 47495 - DNA, 201 bp, Homo sapiens
agaactctaaagacttgcttttctgatttttagtgctctgtaaattacaagcataatatagaacaaattggagaaagtcaaaaaggcaatgagaagtgatmataatatcctgaaagaaaaaggaaaattatatgtgagaaataaaaattcaaaagccatcattgtctgaaacagtataccttattagttcctgagttcatt

SEQ ID NO: 47496 - DNA, 201 bp, Homo sapiens
cccttccttccatctttccttcctcctgcctttctgcctccttccttttcttcctccctcccttttttccttccttttaactaatatttttgaacacctgytatgtgccatgtgtagtagtgggaagaaaataaatgacatagtctttgctgtctctgaacttaaactggatactaacagtcccagttatgaaagtgaaaa

SEQ ID NO: 47497 - DNA, 201 bp, Homo sapiens
ctcataccattccctccatctagaatgcttttgctccttctattcctcccatttcagttgaatccagcaaatctgtactgagtgtttgctacatgcctaargattgtaccaactactttggttccaaagatgaggataattatcctttccctcaaagatctcacagacttatgtagaagaattggtaaattgaagttgaca

SEQ ID NO: 47498 - DNA, 201 bp, Homo sapiens
attgtatagataatatatagcacagttatataaatgcatggatagtaaagagttcagaaacagaacagttaaccattggaaaaagtgttaaatccagtaasatgacaaattcaaatgtttcataaaggagaatttcagaaaatggatttttgcaattcacactttgttattgaagtcaacttcttaaaaatcttgtttagc

SEQ ID NO: 47499 - DNA, 201 bp, Homo sapiens
tataaagtactaaggtttttttccccctcaaaatcagaaatataaagaggaaagaaaattagcccatatataaagttaatttttaaaaaattcaattcagrgaattaaaatatttatacactccatgaaggaatatctgactgtatatgaaccataaaaacagatgtgacttctacccatccctgaagcctgagccacctt

SEQ ID NO: 47500 - DNA, 201 bp, Homo sapiens
aaaagtgattctgagataatttaaaagtaaagtaaaatttttatttaaaaatataacacatgaaataatttaagaaaaatgaaagagtaggtattaaagayaagacttccaactccccaaaagtaaaattactaacagcttgcagaagctttaatgaaattatttttaacacagattgaaaaaaaccatgtgagatcattt

SEQ ID NO: 47501 - DNA, 201 bp, Homo sapiens
tccttctattcctcccatttcagttgaatccagcaaatctgtactgagtgtttgctacatgcctaaggattgtaccaactactttggttccaaagatgagrataattatcctttccctcaaagatctcacagacttatgtagaagaattggtaaattgaagttgacatattgcttcctctataaagctttcctaattttca

SEQ ID NO: 47502 - DNA, 201 bp, Homo sapiens
gggcagagggtggggttcacagatctccacttctcctgatccttgtattattatattctcagaagtgttaagggggcttgtcatccaaaagaccaccaggrtggctaaatagtagaaagaagagctttattagcaatagcagtttgcaaatcaggaagagagtctctggcatcgacccagggtattctccctttgaagtgg

SEQ ID NO: 47503 - DNA, 201 bp, Homo sapiens
aacagttaaccattggaaaaagtgttaaatccagtaagatgacaaattcaaatgtttcataaaggagaatttcagaaaatggatttttgcaattcacactytgttattgaagtcaacttcttaaaaatcttgtttagcaagtaattatgagatgttatttcaaaaattttaaatccattacatatcctcattcaacaatga

SEQ ID NO: 47504 - DNA, 201 bp, Homo sapiens
gtatcgatttctgaaaataaaaatgcctgttcttttttcaaattatgcaatcctgataagcctactaggcatatacatatatatccttttaactaatcackttatcatttttttccaacaaagaatataataaatgaaagtcaccttctgggtgattagtggcagttgacttggagtttcagcccttcctcaggacttttt

SEQ ID NO: 47505 - DNA, 201 bp, Homo sapiens
gaaacaaaagtatatgaacaaatggaaataaccagtgggaatgaatgatccatctgattagatcctttgtcattgtgggaaattattacattattccaacytgtagaaatttcctaaaatccccacatggagtcccctatcttttctgtcagagtgtatgtagttatgcaagtgcacttaattttatggaacatcctcatg

SEQ ID NO: 47506 - DNA, 201 bp, Homo sapiens
tgttttaaatataaattatttcatatgccccattttattataagcttctatggcatcatgttatctgggtccttaggtctttaggcatgccacattataaytctcacatagtaggtgttcagtaattttttgcaaggttgtgtacctggtgaatgtgctgagatgacatagatcatgtaggtatcactgtcaaagcagtca

SEQ ID NO: 47507 - DNA, 201 bp, Homo sapiens; identical to SEQ ID NO: 8352

SEQ ID NO: 47508 - DNA, 201 bp, Homo sapiens
gaggctgaggcaggaggatcacttgagcccaggagtttgagactgcagtgaactgtgatcgtgccactgcattccagcctgaggagtggaatgggaccccmccatctcttaaaaaagaaaaagaccaaatgtaagagcaacaagagctctcaactaagggcaattcatctggagctctggtactttgtcaaaggagtatct

SEQ ID NO: 47509 - DNA, 201 bp, Homo sapiens
tgctagtgcatttaattgggattattttttggcacagcgatcattaattagagcaaatggagcataagcaacgttagttgaataaataatgaatttaaagmgtctatgaaggttaaatagcatactctggaatgttctatgaagtaatttttcctttccatgctacatactgtcaagataactagtctaacccaaggttag

SEQ ID NO: 47510 - DNA, 201 bp, Homo sapiens
ggaacacttaggaagggggtaggagtgtggcctttagggcagggctccctaaaggataaaggagctgaaggtcaggctttgaactgatttgaagaaaactwgtgtctatgttagaggtgattgcttttgaaatttgatataattctggctaatccattgtgaaaatggctactggttaagtagttgaggaatactgtgctt

SEQ ID NO: 47511 - DNA, 201 bp, Homo sapiens
ggccttttttgtgagattttaacagaaaagaaaaaagctataaggaagacctcctcagagatctggccagaggaatgtcaccataagaccaaatttcagcrttgacatagagccaaaagaatgagggtaattcatcattcttgttaataattgagtcttttatatataaattacacccatgttccagatacagctttccaa

SEQ ID NO: 47512 - DNA, 201 bp, Homo sapiens
gttaagtagttgaggaatactgtgcttcctgtgcctctgtgattgctttatttcactaaaaatttgtattttaatatggctgttcgtgcttcaaacctcayatatttggaatatgaagtcacatctgcgctaggctccagtaggctgcatccctggtttatccagtccatgattcttctgctaatagccaagtggcattcc

SEQ ID NO: 47513 - DNA, 201 bp, Homo sapiens
attccatggtgcaaaataagaagctttttgagtgagctcaaatggctcatacctagaacattgctagtagccaggaaaagtcctgggaactgctaacttarctatgtgatgtcccttcatttcctttgcatgtctgcatgtttttgtgtgtgatttgaatttgacttttgtgagctatttttgcatgctattatttgggtt

SEQ ID NO: 47514 - DNA, 201 bp, Homo sapiens
attttgaaataatttcaaacttgtagaagagttgcaagaagagtattaaaaccctcttgtggccgggcatggtggctcacacctgtaatcccagcactttrggaggccgaggtgggcggatcacctgaggtcaggagttcgagaccagcctcaacatggagaaaccccatctctactaaaaatacaaaattagctgggcgt

SEQ ID NO: 47515 - DNA, 201 bp, Homo sapiens
tgacgcccatggtgatagatatgagttttccaaaactctaacacaaaaatttatcattggccacaaatagtgtcagttgttttcctttaaatgacaggctwattttgtttatttttgagaaaatatctgccaaaaactgaagttttagtaacgatagattgttagccagtttttcaagtaaaaatggaatcccatgaaaaa

SEQ ID NO: 47516 - DNA, 201 bp, Homo sapiens
gttaaacagatgttcagcatggctgcatcttcaaagttttgtctggttccagccctgacgaaacttctagggccctgagagaaagagaaagtttctagttkaagtaatatcctatagtttgttagtggaaacagaagcacgtggtttctgatttggttctggtgttctctttggagatttgtatcagtgatgaaaaaaagg

SEQ ID NO: 47517 - DNA, 201 bp, Homo sapiens
ataaaaaaacagcataaggctagaaaaataaaataaaatgcgaaactgaacacaatcaggtacccaaactgcctgtatttgtaatgtgaagtccaaagggraataatctgtgttgaaaggtagtacccaggaagagtttatgaaagaagtatcatttgagatgggccccagagtacgacagaatttgagaagacagagaaa

SEQ ID NO: 47518 - DNA, 201 bp, Homo sapiens
ataagaattcatttaaatgaatatctttgaggattagttagtactgataccagacaaatagaatcaaaacaagtgtcattctttagacttgtccattttasggcaaaagtataattctgcagattagagttctaaactcatgtttcatggcagcaactaaatatttaattagacaaattaactctgtcattttaaaattat

SEQ ID NO: 47519 - DNA, 201 bp, Homo sapiens
gtgttctctttggagatttgtatcagtgatgaaaaaaaggaaaggttggttaagtctgttgcctcctgaagtggttctttttatcagaataaagactaggyatcatctcctctatgaactttttcctgacactcctgttcatcttccatgctggacccattaggattaatcaccttctcctttgagttacccatatatgtt

SEQ ID NO: 47520 - DNA, 201 bp, Homo sapiens
tattatttttttaatccaaggaccataatgtatcttttccttccctccctccctcccttccttccttcctccctcccttcctccctccctccctctccctmtccccatcccccaccctccctccattcctccctccctccctccctcccttcctcccttcttcccttcctcccttccttcctctctctttctctctttctt

SEQ ID NO: 47521 - DNA, 201 bp, Homo sapiens
tttaactaccattgctctttgctgagtgatgatgcagggcagatggtgtcagggagagaaatcatcaactagctcaggattgaaaggggatgaagatgctrgaaatgtgttgatgtttgagaaggatgtgtggaaatgaagaagtgactaaagaggacagccttatcaccaacaacataagcatatcccttgctctttaat

SEQ ID NO: 47522 - DNA, 201 bp, Homo sapiens
actcttgacagaaagaatttgcatgaaggtttaggtatgatagcgtcagagaggctaaaactgagaattggccaaagtttttgaaaaggttaaggcaaaamcaaaaacaaaaatgggttaaagacaggagaaagaattttttttgttgtttatctagaagtcggaagagagaaagccattgattagggaagatggaaaagg

SEQ ID NO: 47523 - DNA, 201 bp, Homo sapiens
gtccctatctgtaggtaagagaaaatgtggaaagtcgatgtttgctctggaagttatagaaatttccactcagaaggtccttctttctgaagaaatgtttktttttttttaattcaggtccaatttggacaagatactcttgctttttcgagtcagttgaagagcaagataacaggtgaaaagtatttcaagagtttagat

SEQ ID NO: 47524 - DNA, 201 bp, Homo sapiens
aaatgtgttgatgtttgagaaggatgtgtggaaatgaagaagtgactaaagaggacagccttatcaccaacaacataagcatatcccttgctctttaattytgccccagagggaaaggaacagggcttcagtctcaaatgagagagccacttttctagtctggggtaaagatatcatgcatacctttccttccttcccctc

SEQ ID NO: 47525 - DNA, 201 bp, Homo sapiens
aaggaacagggcttcagtctcaaatgagagagccacttttctagtctggggtaaagatatcatgcatacctttccttccttcccctccactgtgatagatytgagaagtgatgaaagccaagaaatattgagctgttggattttttttactaaatgctatgtatgccaagggttatttgcttaatatccttcatcttggat

SEQ ID NO: 47526 - DNA, 201 bp, Homo sapiens
caggattacagttggacatcagacatgaacaagattgaggatacaggtactatccggatcttccctcttctttccctgtgctcctctccttgtgtcttttyacttttctctttctctgaagatgagcacttcccttctactggtgaaatcttactaaccatagttgccaatgttattcctcacttatagttcagtcactca

SEQ ID NO: 47527 - DNA, 201 bp, Homo sapiens
tggtgagaaatttaaaaccgagaatttccctgaaacactggtttttaaaccttctctagtgaaggttttttttttttttttaaattttcaattacttgcaratcaatgcaaggtcctattgcacgcctgagcagtttgcaacttgcatggcatgagactcaccttatgagttcagcagcactcaaactggtctaaacactt

SEQ ID NO: 47528 - DNA, 201 bp, Homo sapiens
gatgacttaagaacatgaatagcttgagtagagcatattttatgaccaaaatgggttcaaacaatcaacctatacttgagttgctactttgtgaaagacaytgttttgggatggaaaaaaaaatatttgcccttaacagaatctagtgtagactagcatagagtgtagtcagaacttacagagtgttgaggtaaagaacat

SEQ ID NO: 47529 - DNA, 201 bp, Homo sapiens
gggctcatcaggtagaaccattcaaagtgtatatcacttatatctcatagattagaacacatggtccagatacttattaaattattggatagatcaaattwccattaactatacctctaacacagaggctatcatctgtgtgaatatacagatgatagaacatacagaacaagaacatgcaggctcaatatttgtcactaa

SEQ ID NO: 47530 - DNA, 201 bp, Homo sapiens
atgaccaaaatgggttcaaacaatcaacctatacttgagttgctactttgtgaaagacattgttttgggatggaaaaaaaaatatttgcccttaacagaawctagtgtagactagcatagagtgtagtcagaacttacagagtgttgaggtaaagaacatgtattctgtggagcctgactccctgggttcacatcgtagtt

SEQ ID NO: 47531 - DNA, 201 bp, Homo sapiens
tggcatgctgcatgtctgcttctttatagtgccttctttcaaatacctgaatcataaatgaagaaaaaaaaacttgagaaagatacagttgttgacatttyaaccttcttgctcttttcaaaaccaccttacctgctaacttctgttgcctctccccaccagagatgattattaattttttctttcacatggctcaactgg

SEQ ID NO: 47532 - DNA, 201 bp, Homo sapiens
aaaagacaatctttagaggatttcacagcgttttagtagtgagcaggaaaatggcagactaattgaaatgtggaaaaacctgaggtgtcatgtaaatttakaggaaaatggtccaaactgtagtcatagattcttggagtctgatcaaaggcagtgagtgtaggagtctctgtagactagttctgaaagtatctatgcaat

SEQ ID NO: 47533 - DNA, 201 bp, Homo sapiens
tctctcttttttccctctctgctattatggctatttttttttttttttttttttttggtcactggtgtcagcaatttaattatggtgtgccttggtatgttttgtgtgtgtgtgtgtgtgtgtgtgtgtgtgtgtgtgtgtagctgatgttctttgagctttagaatctgtgagtttgtagttttcatcaattattttttc

SEQ ID NO: 47534 - DNA, 201 bp, Homo sapiens
ctcttttttccctctctgctattatggctatttttttttttttttttttttttggtcactggtgtcagcaatttaattatggtgtgccttggtatgttttgtgtgtgtgtgtgtgtgtgtgtgtgtgtgtgtgtgtgtagctgatgttctttgagctttagaatctgtgagtttgtagttttcatcaattattttttcttt

SEQ ID NO: 47535 - DNA, 201 bp, Homo sapiens
cttttttccctctctgctattatggctatttttttttttttttttttttttggtcactggtgtcagcaatttaattatggtgtgccttggtatgttttgtgtgtgtgtgtgtgtgtgtgtgtgtgtgtgtgtgtgtagctgatgttctttgagctttagaatctgtgagtttgtagttttcatcaattattttttcttttc

SEQ ID NO: 47536 - DNA, 201 bp, Homo sapiens
tagaatctgtgagtttgtagttttcatcaattattttttcttttcattccttttatttactcatgttcgtgttttattttatatttttaagaattttgtgygtatttgtaataactgtttaaatgtcatttgtgaattccattgcttctaggtaggattctattgacagatattttttccctgacgagaggtcatactttc

SEQ ID NO: 47537 - DNA, 201 bp, Homo sapiens
aggttgttcagtttccatgtagttgagcggttttgagtgagtttcttaatcctgagttctagtttgactgcactgtggtctgagagacagtttgttataawgtctgttgttttacatttgctgaggagtgctttacttccaactatgtggtcaattttggaataagtgtgatgtggtgctgagaagaatgtatattctgtt

SEQ ID NO: 47538 - DNA, 201 bp, Homo sapiens
ccaacatacatgtatatgtgtacatgtgctcacaaaaaaaatcacaaaatgtgtttttctaaagaagcattctattaattgtattccattaagcatactartaccaaaagctttcagaatacttcatattttatagccttataaaagttttattctatctgttgatcattaatatgtagggtctcatgtccacatcagatg

SEQ ID NO: 47539 - DNA, 201 bp, Homo sapiens
gactcataaaatatcttcagagaattgatctagcggctgagcaatagcaattccttccccacagcacaagttccaatcagttcacacccagtgtataataytgaatacatttgtatttactttttaattttgtagcagtacagataactctgagctttgtaatgtgattttttaaaaaattatattgtaaatacatgtaga

SEQ ID NO: 47540 - DNA, 201 bp, Homo sapiens
cagagtttcaggaatacaggattgaggacttgcaccaaaatgtcgtcctctctgctgttattttaactcacacatagacctctttatgccattgcatgctrtacttgtcatcctatacctgtctgacacctaaaacaatgaacctcccacaatatgctttgtgccctccaaatggaagttaaactagatgctttcctgtca

SEQ ID NO: 47541 - DNA, 201 bp, Homo sapiens
ttttgcaactaaattgtgctggaaggacccatagtctacctgagagaggaagagcatcaaagtgaaaaggctgcaatgaccaatacagtctcctatataargaaggtgaaggaggcaggtgatgcaaattacggcattagagatggggctgcaggtatagatttggcagtcgtcctatacagtaaacatcacagctttttc

SEQ ID NO: 47542 - DNA, 201 bp, Homo sapiens
agtaccacttttacttttgtttttaactctattacttattactcttccctatccattgatggtagtgtgtttaatttcacaaatgttctatattaaaaatrcacacatacctaattttttattaactcattccacacaaacctttggagcatatgctttttgccagctgccattctaggccctggtgatacagaggtgaac

SEQ ID NO: 47543 - DNA, 201 bp, Homo sapiens
gaaggaggcaggtgatgcaaattacggcattagagatggggctgcaggtatagatttggcagtcgtcctatacagtaaacatcacagctttttccaaattwtttttttcaaatgaacgttttctttaagaagagttttagattaatagaaaaaattacatgggcaagtgctaaaaaaaaaaaacagaaaaattacaaagag

SEQ ID NO: 47544 - DNA, 201 bp, Homo sapiens
tgtttttgcatttattaatatcttacattagtatggtatgtttgttgcaattaatgaaccactacttttacaatattattaattaaaatccatattttatycagatttttgttgtttttagcctgcttgcctttttctatccaggatcatatccaggataccacattacatttcatcatcatgtctctaggctcttcttag

SEQ ID NO: 47545 - DNA, 201 bp, Homo sapiens
gttcttaaatgttagcttctttgtttggcagtattatacttgtttctttctcactgagataaatgttcctaacaaaaagagataataaatgttttgggtgrtggatagtccggttacactgatttgatcattatacattgaatacttgtatcaaaatatcacagtaccccataaatatgtataactcttatgtatttacaa

SEQ ID NO: 47546 - DNA, 201 bp, Homo sapiens
tttctcactgagataaatgttcctaacaaaaagagataataaatgttttgggtgatggatagtccggttacactgatttgatcattatacattgaatactygtatcaaaatatcacagtaccccataaatatgtataactcttatgtatttacaaaaattaaaaaagaaaaatctaacatataatttttggtcctcccaat

SEQ ID NO: 47547 - DNA, 201 bp, Homo sapiens
aaaaaaaagaaagaaagaaagaaaaccaagtcaatgttgattttattgagatgtaagagggttatattctaaatttagcagggaagaggcagatttccctmggaaagtgctatgttgtctccttcctcagctaagtttttataaaaggttgcctttgggttttcgttgtggttaaaaatgtgcaattgcttgttttgcaat

SEQ ID NO: 47548 - DNA, 201 bp, Homo sapiens
catgattttttaaaattgagaatgatattttttctttgaagagtcggttatatccattattttaaaaactgtcagttcacctgaaacagcctccccaaacraatcactctatagccaagcctcatggagaccaggtttttaccaactttttgcagcaagactacttatgtggcccagactttgggccatgaataattttgt

SEQ ID NO: 47549 - DNA, 201 bp, Homo sapiens
tcacctgaaacagcctccccaaacgaatcactctatagccaagcctcatggagaccaggtttttaccaactttttgcagcaagactacttatgtggcccaractttgggccatgaataattttgtgcaaaactcaccccatcccaatctcactgaatgttagcagtggggtgctgcagagtctgaatgaaggtggcggtgg

SEQ ID NO: 47550 - DNA, 201 bp, Homo sapiens
ggctggtgtcagctgaaaactgggctaatttattttcatcctaagtgaacttgttcatagagaaatctcatgtgaccgtagacttgggttgacggtgggcyaataaaatgggggaaagaagcgatctggggtgtgtgttcactgctcatgcagtttgcttgtgccttcagatcttaattgggacataatataagtatgact

SEQ ID NO: 47551 - DNA, 201 bp, Homo sapiens
agcttaatttactttccaaatatgtctgaaactgatcatctgtgcttaattcctacaaccactgactgagtacaagttgtcatcattcatcttctggactrtaacaatagactcataatactttccccatttgtaaccttccaatctgactttcacacagccatagcataattgatatggaattcaaattaaatcacatca

SEQ ID NO: 47552 - DNA, 201 bp, Homo sapiens
agtaccaagataattcaatggaggaaagagtagccttttcaacaaatggtactgggacagcagtatatccatgtgcaaaagaatacattggggcccctacytcacatcatatatacagattaactcaaaatggatcaaagacctaaatgtaagagctaaagctacaaaatttttagaagaaaacacaagtataaatcttgg

SEQ ID NO: 47553 - DNA, 201 bp, Homo sapiens
acttacagtaaatgtgttttgcaatgctcttatatttaaaaatattttctacaaatttttaattcttatttaattttctattcatgttttattatcatttrctctttgctatatcaagagaaggaaataacagatcaaatatcaaatcaactgaggtccaaaaaactcgtccctttggcaatgaatcatggtactttgaga

SEQ ID NO: 47554 - DNA, 201 bp, Homo sapiens
aaccctgggacacccccagaatttaaaggcctttaagaggaagacgagacaaaaagagattaagaagctgtagtcagtgaggtagcagtgtgggagtcagscgggtgtgatatcacagaagcctggaggagaaggtgtttgaggacagagtggggagtggtcaacaaatgctacagtaaagccaagtaatgtgaaaacagg

SEQ ID NO: 47555 - DNA, 201 bp, Homo sapiens
aaaagtttagcatctggtcaaaaatgaaaaaggtggtttaaaaaataagcactgtccaagtttattccattgtgttttcattcatttatttgtccattttyttattcattcaacaagtgtttgttttatggaggctataaaccaaggattggggtagacccagattatgccacttattagttatgtgatcttgggaacacc

SEQ ID NO: 47556 - DNA, 201 bp, Homo sapiens
agacccagattatgccacttattagttatgtgatcttgggaacaccctttaatatctctgaatttcagtttcctcatctgtgaaacagctttactaccaastttacaggattgctataaagagtaaatgagattatttatcttttaaaatggtaaaaagttaggccaggtgcagtggctcaaacctgtaatcccagcactt

SEQ ID NO: 47557 - DNA, 201 bp, Homo sapiens
ttataagtgaaatagtttaaaactgatactaagagcaaaaagtgccaaagaacataggtaatctataaactaaataatcaaattcaagaatggggttataytgcctgaaggcattattgccatgactttctcacttgcaatggagagttaaaaaaaaactctgcttttgatttttctccacttgctgctctgttaccaccc

SEQ ID NO: 47558 - DNA, 201 bp, Homo sapiens
tcacaagacagggatgccctctctcaccactcctattcaacatagtgttggaagttctggccagggcaattaggcaggagaaggaaataaagggtattcarttaggaaaagaggaagtcaaattgtccctgtttgcagacgacatgattgtatatctagaaaaccccattgtctcagcccaaaatctccttaagctgataa

SEQ ID NO: 47559 - DNA, 201 bp, Homo sapiens
ttccaaagtatcaatgaaatgtattatctatcctgaatgtcagtattggtactgtgtattattctgttctcatgctgctaataaagacatatctgagactrgataatttataaagaaaaagagatttcatggactcatagttccacatggctggggaggcctcacaatcatggcagaaggcaaaagacacatcttacatgg

SEQ ID NO: 47560 - DNA, 201 bp, Homo sapiens
ctctattatcagtttctttttaaattttttaagtgttattttgttttttacacatagtagttgtatatactatggggtgtaatgtgatgtttccatacacrtatacattgcataatgttcaaatcggggtaattagtatatccatcacctcaaacatttatcatttctttatagtgggtacattcaaaatcctctaactat

SEQ ID NO: 47561 - DNA, 201 bp, Homo sapiens
catatgtcttgggagggacctggtagaatgtaattgaatcatgggggtggtttcccccatgctattctcatgagaatgagtaaattcttacaagatctgayggttttataaggggcatccccctttgcttggctctcattcttcttgctgctgccatgtgaggagggacatatttgcgtcctacaataccccactctcagc

SEQ ID NO: 47562 - DNA, 201 bp, Homo sapiens
agatgagtaatactctatctaaaatgaagtatgactgtagattactgagtctgatttttttcagacttggtaaggcttttcactttcaaaggaggaattcyacttgtattgtgtgaaaaagcagcattattacaataagtttgttgcttttcaaatgaacatgaaggaaaatactcatttagatatgtgttctgatgtgtt

SEQ ID NO: 47563 - DNA, 201 bp, Homo sapiens
ggaaggccaattcttgtgcctccaggttgctttctcagatgctgctaatggcatcagtgggtctggcaagtgaacaggttcttaagcccctgggcagtggrtgtggcatgggcaatggcagtagcaatggtggaacatccatctgggacccaagtggtccacccctgtggtagcagtggctgcaagaggttgggtgggctg

SEQ ID NO: 47564 - DNA, 201 bp, Homo sapiens
agctaatttcaaaggcaagatgagccctagtgacaaaaataaaaacattcctttttgtttccatagaatttattgaactggacttacccatgtcagtttaygtattttaatcctctgtgttgtggtaaaatcatgcatctttcaaaagcccatatgcttagcatgattctatcaactattcttaaattacattcttttcac

SEQ ID NO: 47565 - DNA, 201 bp, Homo sapiens
gtgaaggagaatttcccatctattggctaagcaagccgagttatttaaagggagatctgatgcactctggggggataggccagcctccatcggttagtcasgagtgagcagaaaggctgtcgggagctgagaattcacaagcctgctctcagatgcgcgcctactggtaggaagtctgaaacaatgtcctggaaagaaatt

SEQ ID NO: 47566 - DNA, 201 bp, Homo sapiens
tctaattgttttctctagtggtcaatgagcatcttgagagtgaagaccatgccttatttatgttgtattctaaacacctccttatagctcctgggaaattyataggcatttatataaatgctccttgaatgaatgaatgtgttcccccaacatccttactgaatactgaatttgggatcttgtgaaatcctactcagttta

SEQ ID NO: 47567 - DNA, 201 bp, Homo sapiens
ggtggaggtggcagtgagccaagatcgcgccactgcactacagcctgggcaacagagccagactttgtctcaaaaaaaaaaaaaaaaaaagtaaaaagttrtaagtttcactttcccccttctctatttattatttattactataccccaaaagtcatacacaacaaagatggaaatcctcaaagacacagaaaagtagag

SEQ ID NO: 47568 - DNA, 201 bp, Homo sapiens
tccttgaatgaatgaatgtgttcccccaacatccttactgaatactgaatttgggatcttgtgaaatcctactcagtttaagctttagtggaggtgttgamaaaaaactaagctctgtaaaacatttcaaaaggtttattatgagcccatattaatgactatagcgcaggaaacagcctcaagaagtcctgagaaagtgag

SEQ ID NO: 47569 - DNA, 201 bp, Homo sapiens
caaagatggaaatcctcaaagacacagaaaagtagagatgtcagtcaacgtttgcaagactcatagattgaactggattgaaaatctatcagtgaccagtraatgctttgccctgattaagaaaaatgaggccaaacaagaagacaacccaaagaagcctctatgtttcttcactacatcaacttgagaaacgtgggcact

SEQ ID NO: 47570 - DNA, 201 bp, Homo sapiens
aacttgagaaacgtgggcactgtgacaaccagaaatccagagaggcaactttgaactataaggccaactcaaaaaacgaatccaagtaagaatttacaacrgggaagtccaggtagaagatgcctgatggtaaatatttattcaagataaacatgtagagttccatctaataaatgcttaaatataacaaaactgaataca

SEQ ID NO: 47571 - DNA, 201 bp, Homo sapiens
tttgaaatactatacaaaaatattgtattatatttttgtaatgaaatcagaacaaagaacttcatttctataaacatactaaaatactcaaagtccttagyaagcaaccattgatggagaatcacttttaagttataaaattagcaaacatactttaaagatgacagtcaatatttatgcgtatgagattcattactcaat

SEQ ID NO: 47572 - DNA, 201 bp, Homo sapiens
attttcatcttgcagttaatgttagccttttaaacatagcatcttggccgggcacagtggctcacgcctgtaatcctagcactttgggaggccaaggcggrctgatcacctgaggtcaggagttcgagactagcctggccaacaatgtgaaatcccatctagactaaagatgcaaaactcagctgggccttgtggcatgtt

SEQ ID NO: 47573 - DNA, 201 bp, Homo sapiens
catcttgcagttaatgttagccttttaaacatagcatcttggccgggcacagtggctcacgcctgtaatcctagcactttgggaggccaaggcggactgaycacctgaggtcaggagttcgagactagcctggccaacaatgtgaaatcccatctagactaaagatgcaaaactcagctgggccttgtggcatgttcctgt

SEQ ID NO: 47574 - DNA, 201 bp, Homo sapiens
taggtttaatatatattaatatatataatatataatatataaatattaatatgtattatataatatatattaatatattatattatattactatataaatmatattaatatattatattaaaatattaataaatatatcatattaaatattatattaattaaatattaataaatatattatattaatatatttatatatta

SEQ ID NO: 47575 - DNA, 201 bp, Homo sapiens
tggacgctttaagtgggctggtcccacaagtgtgggaaggcacagatgtctcagttgtcatgggccagtaataggcactgctatgggagactcaggggagycttctgcattagagtagaaaaacttagcccctccacaccttcttaggaccagagagtcaggcccacttaaaggtcctgcagtcatcaaagacagctcgac

SEQ ID NO: 47576 - DNA, 201 bp, Homo sapiens
taccactgtttattattgataccttcaacctgcttctgagattcttcttatgagttagagtatccccagaatcctaaatggggaacctcacttccatattmgataagctgatgtcaattacaataaagagtatgagaattataagttagacaaaaggcaagatagttcctttgagaggaaagcatgccttacaactctatg

SEQ ID NO: 47577 - DNA, 201 bp, Homo sapiens
gagccttctgcattagagtagaaaaacttagcccctccacaccttcttaggaccagagagtcaggcccacttaaaggtcctgcagtcatcaaagacagctygaccaagaatctgatgtttgctggttcttgtcctaaagctagaaagtgccacaacagatgtcttgctcacaccctgtctacctgagtaccactcccaata

SEQ ID NO: 47578 - DNA, 201 bp, Homo sapiens
ttttacaaagtgtatgtctttgactcagggcttcagaactagcagctgtggtaagagcttaggcaaggttagacctggggatgtggtggcacctgggtccrgaggtgtgggatgtcaggacactcagggactattcaaaaccatgtggatactgagtgtccaatgcagtgactttgtcataaccctagaaagtcttataaa

SEQ ID NO: 47579 - DNA, 201 bp, Homo sapiens
aaattatgaaacctttttgactcttagcttttgaaaaagcaaataataagtctacttatatcatgaagctggtctaaagttcaaaacaaactatataagtraaacaacttgaaaactgtatgcctctacattcatacaaagtatatattcatatttatatgactagtgtacagtattattatcagtatcaaagaaaactaa

SEQ ID NO: 47580 - DNA, 201 bp, Homo sapiens
aagatgggtgatttctgcttttccaactgaggtacctggtttatctcactgcgaccagttggacagtgagtgcagcccacagaggacgagccaaagcaggktagggcatcacctcacctggggttggggaatttccctttcctagccaagggaagccgtgacagactatacctggaaaaatgggacattcccgactaaata

SEQ ID NO: 47581 - DNA, 201 bp, Homo sapiens
atagagatgaaaaagagggtaagaaggtctagaaacaagtctggtgtactccaatatttagaagtgtagaagagaagggaaggaacagtcagcaaagaacsatggagaaagagcaatcagtgaagatggagaacaatcagaagagtgtttcagggaagaggaggacaatcgtgtcagatgctgccaagacatagaataatt

SEQ ID NO: 47582 - DNA, 201 bp, Homo sapiens
aggctttaaatcttgctaacttgtgcaagaatgtgcgcgtgtgtatatgtgtgtgtgcgtaggtaaaaatgtaaatgaccactatggaaagaacaatgctrgcttttaaaatctactaaagtaaaagaaataattattcctgaataaggtatgtcaaacaccagtgggaagaaagaagagcgggttattttgtttagagct

SEQ ID NO: 47583 - DNA, 201 bp, Homo sapiens
ttgatatagtgcatctatactcatccatgtaaatgattttgaagaacaaaacaattgacagattttgctttacaatatctgtgatttttgtttcatacctytgtccatctttcaatctttgtaaacagacctagttctttattgcatagaccttataatcccttaataccctgattctaaactgaatgagctttaaaagtg

SEQ ID NO: 47584 - DNA, 201 bp, Homo sapiens
taaattcttggaacttgtttctgtatctataaaactggaatactaatacatgtttcttcagtgtgtgataagaattgtcatataacttatgaagccacttrgtatataccatacttcatcgattctcacattcacttctttttatttaatatttctgaaatgaagatgcatcttatactcaatggcatcttgacatcctgt

SEQ ID NO: 47585 - DNA, 201 bp, Homo sapiens
gattattattcttcctgcaaccagtcagtagcaaattgtcaccagttggaatctgctgaatattcctatatacaagttaatgttagctcaaagaaaggggrgtttaaaaaaaaaagttttgcccagtgtaagcagatacagatttgtagatgacacacaagctagtacttctatttcatcactgcacttcgttgtttccct

SEQ ID NO: 47586 - DNA, 201 bp, Homo sapiens
ctaagatcattttttaccactgcccagaaatacaccagtcagtttggctccactaacatctcatagaaaatgaaaaagaagtttttctgtttttgtttttkttttttttttatagacttcattgctccactcacaagcaagaataagatgtgtaacaagaataagatggaagtgagcgttgttgaacacctggataagaag

SEQ ID NO: 47587 - DNA, 201 bp, Homo sapiens
ggggaggcttaggattttatttttgatttacaggggcaaatacagtagaagtttgtattccatgaaaatttaataacacaaaatttagtacatggaatttwttataaatggaaagactagtacatttattggctattttgaagagagttattttgcaatatgaatcaatgaataacttatatcattgcttctttgcttcta

SEQ ID NO: 47588 - DNA, 201 bp, Homo sapiens
atatgaatcaatgaataacttatatcattgcttctttgcttctatagaaaccaaataactttctatgactgggacaggtagtacctctatgtttaaataaytattttctcttagagtgttataatttgtatttctcatcattaatagaaccagttttactgccaacatgaataaaacactctcctttttacattattttat

SEQ ID NO: 47589 - DNA, 201 bp, Homo sapiens
cagtgtatgagggttacagtttttctatatccttgctaacccttgtgggtaagaagtgatatctcactgtggttttgacttgcgttttcctaatgactaargatactgagcatcttttcatgtgcttaatgatcatttgtatatattatttagataaatgtgtattcatttcctttgcctagttttaaatttggttatttg

SEQ ID NO: 47590 - DNA, 201 bp, Homo sapiens
tggatgacaacctgccagatttgttgaacctatgaaggttctctgattctctggaagacctctttctccctgcacatgtaaaaatcctccctactgttcartattcagtccataccccacttccttttttgggtaccacagcttaaaatcatcttttctatctctacctttcttatcattttaagagcaggttagcattta

SEQ ID NO: 47591 - DNA, 201 bp, Homo sapiens
atgtacatgacagggattcattgaccagtgggttttcccatggagtaactgtgctgagagttgaccattttgttaggagacttcctcaactgttaggttckatgagtattttctcctgagctggtctggtataagcctgatgtctagtgttcttggagccaagaattggtgggtcaggggatggagtgggaggaggatggt

SEQ ID NO: 47592 - DNA, 201 bp, Homo sapiens
gaaaaaaaaatttagacaatctgctccacaaatctcaaatagtatgggcagatacgagtttacaaagtgaagaggagaaaacatctataaccaaatctaaygttttttcttttaccatcgataggatttctaagctccctattctatttcttctccaccaaatccagaatacatttggtgtagaaactgttttgcttttta

SEQ ID NO: 47593 - DNA, 201 bp, Homo sapiens
atgtaaatgtgaaactgccaagcatcttttcaccccttcatgatcttcccatcttatctttgggttactagagttattcctgtggtgtcttggggtaggakagcagagaattgttagagaattcctagctctttatatcttacactttcttctctccttcaaatccttctgtctccatcagttcctttatcctgtgctgcc

SEQ ID NO: 47594 - DNA, 201 bp, Homo sapiens
cttaagtctttgctcagcatttttttttagtggtcaggacagggatcttcttaaatactagagtcagtaaatcgctaaacatttaccaaagctctcaatgygcattttggggtatggcttcaatgctcaggcagacagtttacaactctgccttaatcctaacttcctgcttatgcagagctcaaggtgagctagaggtga

SEQ ID NO: 47595 - DNA, 201 bp, Homo sapiens
gtgtgaaataatttaaccagctccttcttactcaaaactattaaatagatgtgatcatttactctatggaaaataaagtttgattgtatgtgtgcatgcaygggcttcaagcttcattgtgaataagaatcaccttggcaacatatttaaatgtagatttttgggtttcatatatatacattctcattcatttggaatggt

SEQ ID NO: 47596 - DNA, 201 bp, Homo sapiens
ctgttctttgtgaagtagagagttaaaaagccgtggagaaaagtgcattagcccagactggagagggatgctaaatgggggttataaaagcaacagcacamtgaaatggaaattgggcaccaaggcaatgctgaaacagggaatcaagggtgacaggggctggaaatatggagagaggcttggaagacagtgatgagaacc

SEQ ID NO: 47597 - DNA, 201 bp, Homo sapiens
agagacatctagtcaaacttagttctgtaaacagtcttagatgatataacttagttggaaataacatagctaatcacttgtaaattttagctaagacttakgaggcagaaaaatttagtgattaaaaatggaattaggttgctggatttgaatgccagtttcatgccacacagtctgtgactcttaggtaagtgtgatttt

SEQ ID NO: 47598 - DNA, 201 bp, Homo sapiens
actttcattttaaaaataaaatagctgaatgaaaaatagtttgctttagttaagaatacatacataaagtgtttaattgttaaatgtgaaaaaagttttgmgtagccttgtgttacattttttaagcttgaccagaatctaagaaagatgaaaattaatttcaaatactgaagctaaaacatgttaatgaactaaataaaa

SEQ ID NO: 47599 - DNA, 201 bp, Homo sapiens
agggaagtgaaactcaattttgaaagcagaaccatttttacatttaagttgaactgtggttttaaaacatttagctctctattggaaaccattgtgggtgkggtgcatttgtaacagagcttcacctaattcattctatatgcttggcagaggaaaggctgaaatcagagccaaattccaaagagcctctgagggaagcaa

SEQ ID NO: 47600 - DNA, 201 bp, Homo sapiens
gcagtaagcttgaaaagatcaggagacacacacgtgcacacaaatcaatgctcctgccaaggccagtagattggaggcattcttagatgtctctacttcaygggatattcttgtcattttggcctttccctgacttaatgatggccatatactggcctggggtccttcagctatcaagtgtttagtatctgaataaatatt

SEQ ID NO: 47601 - DNA, 201 bp, Homo sapiens
ttttgatttgcatttctctgatggccagtgatgatgagcattttttcgtgtgttttttggctgcataaatgtcttcttttgagaactgtctgttcatgtcmttggccccatcaaaaagtgggggtggataagctttttgatttgctgctggatttggtttgccagtatttcattgatgatttttgcatcgatgttcatcag

SEQ ID NO: 47602 - DNA, 201 bp, Homo sapiens
agccatctcactcttccttggtagacctcaactgcttgcgtagttacttctctgaggcaatgtgattctataatagtgtggctgtcattgaatagcttggraagctgtctgagtgcaggcggaattgattgtcttggtgacctagggcaggctaatgtttggtgtcagatacaccactcaggtttgcactagtcaagaagg

SEQ ID NO: 47603 - DNA, 201 bp, Homo sapiens
agctgaggatagatggggccacctgagcatgcagtgaacacagagagcacttctgggttgggcagctttaatttctctctaatgataccttctcagttcaytctctgggttcttggttatctctctcccctccgcttcttcttttctccagccctgtccttttttttccttttttttttttttttttttttttgtagtggg

SEQ ID NO: 47604 - DNA, 201 bp, Homo sapiens
tcaaggttcacattcttcctgcacaatcatatgtatgttgttatttctccttgaaaagcacattttccttttgtgaggagatcacagttgctcaggaaaawttttccttccaggcctgttacttatttttccctttgaaaatgttttcgtgttggcatagtgatttcctaaattgctcagggtagagtctatctcctccta

SEQ ID NO: 47605 - DNA, 201 bp, Homo sapiens
actttattcatttaatgatatgtcttagggatttttccatgtaaattcgcagacataaaatgacaaaacttctttgtggcataatattatagtgttctacrgtatggatgtgccatacttaattcacatttccctaaggataggtatttctgctgtttccagtttttccaaaacacctgaaccagttcatagacccaacaa

SEQ ID NO: 47606 - DNA, 201 bp, Homo sapiens
gattggacagaatctataggacaaaaaaaaatttttaataacaaattgcaagagcaagaaatagagagatggagaagtctgaagattaaaatagacataasagaaatatctaccaatcacagtgacatggtttggatctgtatccccaccaaatctcatgtcaattgtaatccccaatgtaggaggtggggcctggtgggt

SEQ ID NO: 47607 - DNA, 201 bp, Homo sapiens
gggtgctcaaattagatgcagggaaattagttgtgagattagtgtagcagtttatatgatagttggtggaagctggagtggtgatccaaatagacaagagrgggtgaatttaagagatattaagatagaatcaacaggacatggtgaccaacttggagcatgaggatagaggtagaaggaggatggatgattcccaggtgc

SEQ ID NO: 47608 - DNA, 201 bp, Homo sapiens
tcccatttgtcaattttggcttttgttgccattgcttttgttgttttagtcatgaagtccttgcccatgcctatgtcctgaatggtattgcctaggttttyttctggggtttttatggttttagttctaacatttaagtcttttaaccatcttgaattgatttttgtataaggtgtaaggaagtgatccagtttcagcttt

SEQ ID NO: 47609 - DNA, 201 bp, Homo sapiens
tttatgcagacacatgaaaaaatgctcatcatcactgatcatcagagaaatgcaaatcaaaaaccacgatgagataacatcttacaccagttagaatggcratcaataaagtcaggaaacaacagatgctggagaggatgtggagaaataggaatgcttttacacggttggtgggagtgtaaactagttcaaccattgtgg

SEQ ID NO: 47610 - DNA, 201 bp, Homo sapiens
tgcagcccatggagggcaagccaaagcaggatggggtgttgcctcacctgggaagcgcatggggttgggaaactccctgccctagcaaagagaagctgggrgggactgtgcctagaggaagggtgcattccagctcagatactatgcttttcccacggtcttcacaacctacaggcaagagattcccttgggtgcctacac

SEQ ID NO: 47611 - DNA, 201 bp, Homo sapiens
aaaatctttgccttttcctatgtccaggatagcattgcctaggttgtattctagagtttttattgttttgggttttacatttaaatctttaatccaccttsagttgatttttgtatatggtgtaaggaaggggtccagcttcagtcttctgcatatggctagccagttatcccagcaccatttattgaatagggagtcttt

SEQ ID NO: 47612 - DNA, 201 bp, Homo sapiens
acgatgagataacatcttacaccagttagaatggcgatcaataaagtcaggaaacaacagatgctggagaggatgtggagaaataggaatgcttttacackgttggtgggagtgtaaactagttcaaccattgtggaagacagtgtggtgattcctcaaggatctagaactagaaataccatttgacccagtgatcccatt

SEQ ID NO: 47613 - DNA, 201 bp, Homo sapiens
tgggaggggcaactttctttttaaagtagagactagaagaaagcttcgtaacttctcctttcccgttcaaccatttgcctaccttagtgccaattatgackgtcagggaatggtgatgtctgtctagtagaaactagctgagatcacatttgaatgttaaaacatagatactttcttttacgctaagtcagacacttcttt

SEQ ID NO: 47614 - DNA, 201 bp, Homo sapiens
cccctaagggcctagcacaatgcctggcacatagcttctcaagacatgtttatcaaacaaataaatcaagaaatgaataccataggaacattatacagaaygacttttcatgtaatcagttacataattcatttgtccttccattttcttctacagagacacttggcatggaagtctcccttaatagaaactttcaggttg

SEQ ID NO: 47615 - DNA, 201 bp, Homo sapiens
atgaatgatccatctgattagatcctttgtcattgtgggaaattattacattattccaacctgtagaaatttcctaaaatccccacatggagtcccctatsttttctgtcagagtgtatgtagttatgcaagtgcacttaattttatggaacatcctcatgattcaatctgctgctcccaaatcaaaactaatatgctttt

SEQ ID NO: 47616 - DNA, 201 bp, Homo sapiens
aataaggaccactcattttcttcccccatttcttttacaatgtagagaaaaatggtcaagagcacagatgctagagttagactccctagatttgagtcccmtatgtcacttactagctttgtgaccctgtgcaaattatctgacttttttgtgcctctgttttctcatctgtaaagtaagaataacaatagtaccttcctc

SEQ ID NO: 47617 - DNA, 201 bp, Homo sapiens
aaaactgatgaattttgattctgtcaagataatccatcactctttctgctctaaagcaaagatacaacttttgaaaatttccaacaataaactttcatgcwtggagaatatatttcttttaaatgtgtccctcttttaattgaaatgactcattctgcttgttttggtttatccttttaaacttgaatatcttaggttttc

SEQ ID NO: 47618 - DNA, 201 bp, Homo sapiens
cttaatggtgaaacctaaattgtgttgagaatgctagttacaagggagtctgggaaatgaggtttttagttttctggcatctgcagtgtaagaaggcaaayatggagattggaacagaagttgagctggccaatgtgctgtatcagccacagatgcttttgtgttatttcctgtgatggctagaaaacaaacttagaatct

SEQ ID NO: 47619 - DNA, 201 bp, Homo sapiens
ataaaaccgtggtaaactatggtatactatggtttaccatagtatactatagtagaagacacacatttagcagctattaaaagatccagctattgatcagytagtacaactcgttctatagagtttgacttagatgctagaatttccttcatccccaaactacaattatcatcatagagacaagaggacacagatctatga

SEQ ID NO: 47620 - DNA, 201 bp, Homo sapiens
cttggaactgacccaaatgtccatcaatgatagactggattaagaaaatgtggcacatgtacaccatggaatactatgcagccataaaaaggatgagttcwtgtcttttgcagggacatgcatgaagctggaaaccatcattctgagcaaattatcacaaggacagaaaaccaaacaccacgtgttctcactcataggtgg

SEQ ID NO: 47621 - DNA, 201 bp, Homo sapiens
ccagttttctataggtggaattgagctagagaggtcatggaagttgatcactgtcaagcagctggtaagaggctgatgcatgataaaagtgcctgtctcaratgccaatagtgtaattctttccattatatcatctatctctgtctgttataagcactttattcagcgataatcatgaacacatgttagacttaaaaaata

SEQ ID NO: 47622 - DNA, 201 bp, Homo sapiens
agtaataaccaaactgttcttctcatgttgttttaaaagcttctggtgtatatgcctttttattttttactcatcatacagtctattcagaaaaataaaawaaaaaaaaccttaagtagctcttggcagaaggtcaaaaccagcatttcagggaaggtatttaaaagtcttttaagtgtgggctatttgtataagcaatat

SEQ ID NO: 47623 - DNA, 201 bp, Homo sapiens
cttcctgcctatagctgtgaggagtagcttgacacaaattagctaaaaggaaaaaaaaaaaaaacaaaaaacccctattgcaaatctatcctactttcacrttctcaagaaaaacatacacacatgcacacacatgtgcgcacacacacacacacacactgaaagaaagaaagaaagaaatgcaggggtagtttccctcac

SEQ ID NO: 47624 - DNA, 201 bp, Homo sapiens
ggcagtcagtcaaccatgagatcatgaggtaaacactgatattcttcagcatactgtgttactagatgattttgcccaattgtgcactaatgaaagtgttytgagtgcatttatagtaggctaggcttggtaggttcagcatattaaacgcacttttgacttaaaatattttcaacttatgatggatttattaggacataa

SEQ ID NO: 47625 - DNA, 201 bp, Homo sapiens
ttgaactcctgaaacttatttggtagatcaaaagctgcactgctgtggaatgcaataaactccatctgtttgaagtattttcagcaatattgcactacttrggagaaccagggtcccattattctctaaaataagacttttattcccggtaaaattcccagtggggatctttattgccttattgaacagttggcatcattt

SEQ ID NO: 47626 - DNA, 201 bp, Homo sapiens
ctcactgaaacctatgaaagagacactattttgcagtggagggaactgaggcttggggaagttaagtaatttctcagtcttgtgataaagaaattgcagamccttcaaacatgggtctgactccaaaatctttttttttttttttttgatacaagatctccctctgtcacccaggctggggcataatcttggcttactgca

SEQ ID NO: 47627 - DNA, 201 bp, Homo sapiens
gtaatggttacaagtactgtttagtgctctgtgcattctcatttgtcctccaacagtaggtactactatcctcatttatggatgggaagattgaggctccragaggttaaggatcatgctctagagggatggagctgggtgtagatgaccctggagacttgctacctccttaggagtgttgcttattttacagtatgcata

SEQ ID NO: 47628 - DNA, 201 bp, Homo sapiens
tagggacaaagcaggaagactaactcgagcccatgttgctttttatgatatgtggttttgagtttcagaggagtcgagtgcagtgtgaatcatagaagcarccagctgaaaaatcctcaaccctataacaaaaagcagattttttcccatatttcttccaagtttttatttcacatgcaagtctgagatacaaaatattct

SEQ ID NO: 47629 - DNA, 201 bp, Homo sapiens
attgttattgctccctgagacctgtgatgttgaacaattgccactgattatttttgacaaattttttctggggaaagaggcttttcacactgaataagctytgagtcaggtcaagtaaagaaaagccctgtgaatgggggtttttagggaactgctagacaggttaaatagttacaattgtctgaaaattgtatttttgat

SEQ ID NO: 47630 - DNA, 201 bp, Homo sapiens
cattgaactttgaaagattttcttcctcataatgtaaagaaaaggtaaataagatcaactgcatacctatgctattattttgctatgtagtttattatgayggcccatgctgctttcatattatttgaattttattgcccctgctttctctaggactttattaactttgatatagtgcatctatactcatccatgtaaatg

SEQ ID NO: 47631 - DNA, 201 bp, Homo sapiens
agcatggcacatgtatacatatgtaactaacctgcacattgtgcacatgtaccctaaaacttaaagtataataataataaaaaaaagaaagaaaaaagagaaaaaaaaatttagacaatctgctccacaaatctcaaatagtatgggcagatacgagtttacaaagtgaagaggagaaaacatctataaccaaatctaacg

SEQ ID NO: 47632 - DNA, 201 bp, Homo sapiens
cccctgcttttcatctctaaactcatcttctcccctttctctcctcctcttggtccactccagctgcactggattccttgtttatttagcaggccaaggamacatgtctgtagagcctttgcacttctcattcttaatgtgggaaatgatctgccccaagatatctgcatggatcaaaccattgcttctttcaggcctctg

SEQ ID NO: 47633 - DNA, 201 bp, Homo sapiens
aatgatctgccccaagatatctgcatggatcaaaccattgcttctttcaggcctctgctattcaaatgccccataaagcagagtctttctccgacttttcyattttcagttgcatagccttcccacaaatacacacacacacacacaccacacatgcacaccatcgttaatctacttaccaaactttttctttgcagtata

SEQ ID NO: 47634 - DNA, 201 bp, Homo sapiens
acctggctcagagggtcctacgcccacggaatctcgctgattgctagcacagcagtctgagatcaaactgcaaggtggcagcgaggctgggggaggggcasccgacattgcccaggcttgcttaggtaaacaaagcagcagggaagctcgaactgggtggagcccaccacagctcaaggaggcctgcctgcctctgtaggc

SEQ ID NO: 47635 - DNA, 201 bp, Homo sapiens
gatttcttttctttctcctcttccaattaatgtatatttttaatcatcatcactaaagtacctcacgacataagttttatatatgctgtaatatgaatacmtttgccatcatagtgatcacatcatatataggtactacagatatatacaagttttttgaattccaggaacaaatgtgcactgccaatttgattatctcta

SEQ ID NO: 47636 - DNA, 201 bp, Homo sapiens
aacaaaattgatagactgctagcaagactaataaaggagaaaagaaagaagaatcaaatagacgcaataaaaaatgataaaggggatatcaccacagatcmcacagaaataaaaactaccatcagagaatactacaaacacctctacgcaaataaactagaaaatctagaagaaatggataaattccttgacacatacact

SEQ ID NO: 47637 - DNA, 201 bp, Homo sapiens
aaaaaccacatgattatctcaatagatgcagaaaaagcctttgacaaaattcaacaacccttcatgctaaaaactctcaataaattaggtattgatgggaygtatttcaaaataataagagctatctatgacaaacccacagccaatatcgtactgaatgggcaaaaactggaagcattccctttgaaaactgtcacaaga

SEQ ID NO: 47638 - DNA, 201 bp, Homo sapiens
atccaacgtgggttttaatctgtttttgaattctaagtatctagcgcaagcaaggtgcctagaacatagtatacaataaaaagtgtttgcagaattaattrtatgaataattacatttccccatcctacccaacatatttttttgctagtcattttaatctcatttttttatcaaagctgctaaaaaatagaacttactca

SEQ ID NO: 47639 - DNA, 201 bp, Homo sapiens
actggaagcattccctttgaaaactgtcacaagacagggatgccctctctcaccactcctattcaacatagtgttggaagttctggccagggcaattaggbaggagaaggaaataaagggtattcaattaggaaaagaggaagtcaaattgtccctgtttgcagacgacatgattgtatatctagaaaaccccattgtctc

SEQ ID NO: 47640 - DNA, 201 bp, Homo sapiens
catctgactggtgtacctgaaagtgacggggagaatggaaccaagttggaaaacactctgcaagatattatccataacaatattaaccttaaatgtaaatrggctaaatgctccaattaaaagacaaagactggcaaattggataaagagtcaagacccatcagtgtgctgtatcaggaaacccatctcacatgcagagac

SEQ ID NO: 47641 - DNA, 201 bp, Homo sapiens
atgattgtatatctagaaaaccccattgtctcagcccaaaatctccttaagctgataagcaacttcagcaaagtctcaggatacaaaatcaatgtacagawatcacaagcattcttatataccaacaatcgacaaacagagagctaaatcatgagtgaactcccattcacaattgcttcaaagagaataaaatacctagga

SEQ ID NO: 47642 - DNA, 201 bp, Homo sapiens
atacacactgtaagaatttttatgcctagcatcatgctaggcattatatagaaacaaggaaggactcatagtcttacctttgaagatgttgttgctttaayagaagaaaaggtatgaacaaatacaataattaaagctgtcatcaaaccaaggctactcaaataattcaagttatgaaactccctatgtataaattgccac

SEQ ID NO: 47643 - DNA, 201 bp, Homo sapiens
caacttcagcaaagtctcaggatacaaaatcaatgtacagaaatcacaagcattcttatataccaacaatcgacaaacagagagctaaatcatgagtgaaytcccattcacaattgcttcaaagagaataaaatacctaggaatccaacttacaagggatgtgaaggacctcttcaaggagaactacaaaccactgctcaa

SEQ ID NO: 47644 - DNA, 201 bp, Homo sapiens
gatattatttagcttataattatttgagaaaaaatgtacgtataagcagggatttatttggtattgtcatctcaatatccagaaaaggtcctttcttatgmgtatgtttaaactttttacttctctaagttgaataacgacagtttatcttcagagacctcagtgctggccttggtgtgtgtctgtttaaagtgattgtgg

SEQ ID NO: 47645 - DNA, 201 bp, Homo sapiens
tatttagtgttagtcttatgaatgaggtgggaaatcaagatgagtaatactctatctaaaatgaagtatgactgtagattactgagtctgatttttttcaracttggtaaggcttttcactttcaaaggaggaattccacttgtattgtgtgaaaaagcagcattattacaataagtttgttgcttttcaaatgaacatga

SEQ ID NO: 47646 - DNA, 201 bp, Homo sapiens
ggtttctgctcttgggtgtctgctctgttgagttgtgattctctatattcacctgtctctccaaattttgggaacagctaattgtctgtgatttcacttcwctgacagatctaagaagggttggtttttcagtttgttcagatttttacttgttgggatggaatgatttccaagctccctacatgccagataggagtcctg

SEQ ID NO: 47647 - DNA, 201 bp, Homo sapiens
ttttctattttgtaggttgtctctttctctgttgtttcctccggtatgcagaagttttttagtgtgatgtaatttcatttgtctgtttttgcttttgttgmctgtactttcttattcttatccaaaaaatctttatctagatcaatgtcacgaagagtttctcctctgttttcttcgagtagttttttataattttgggta

SEQ ID NO: 47648 - DNA, 201 bp, Homo sapiens
tattacaataagtttgttgcttttcaaatgaacatgaaggaaaatactcatttagatatgtgttctgatgtgtttattaaaagttctaactctgtgtataragccacacctagaaaaggctatgaactttttgcttgctaggaaagtggtgtggaaacaaacatgagagcctgagagcaggagctggcatcgattacatgg

SEQ ID NO: 47649 - DNA, 201 bp, Homo sapiens
gaatctataaattactttgggcagtattgccattttttcaatattgattcttcctatccatgagcaagggatgttttttccaattgtttgtgtcctctttkatttccttgagcagtggtttgtagttctctttgaagaggtccttcacatcccttgtaagttgtattcctaggtattttattctctttgtagcaattgcta

SEQ ID NO: 47650 - DNA, 201 bp, Homo sapiens
ctgtgctatgggaccaagccaggggttccctgtctggtgatgagcactggagggtgtgtgggacccatgtgagacagtctggccttcctccttaggtcaaytgcagcttgctggaggtgtgaataaggcacttaggatctttgcttcttcattagtctgagggtagcaagggtagttccactgcagaggcagtggcagaga

SEQ ID NO: 47651 - DNA, 201 bp, Homo sapiens
aatatattatattaatatatttatatattaaacctataacatatgcatatacttatttatatataacatgcatgtacttatttatatatacaatatatatwtatatattatataatatattatatgtatttatatattatatatcatatattatatgtatttatatattatatatcatataatatatatatttatattata

SEQ ID NO: 47652 - DNA, 201 bp, Homo sapiens
atattaatatatttatatattaaacctataacatatgcatatacttatttatatataacatgcatgtacttatttatatatacaatatatatttatatatwatataatatattatatgtatttatatattatatatcatatattatatgtatttatatattatatatcatataatatatatatttatattatatatattat

SEQ ID NO: 47653 - DNA, 201 bp, Homo sapiens
ccaccatgcctagctaatgaaaaaaagattttttttttttaagagggagtcttgctatattgcccatgctggtcttgacctcctggcctcaagtgatcctyatgtcttggcctcccaaagcagtaggattataggcatgagctactgcacctggccattgttttgctttttaaaaaactttcaagaaatgattgggttgac

SEQ ID NO: 47654 - DNA, 201 bp, Homo sapiens
aacatatgcatatacttatttatatataacatgcatgtacttatttatatatacaatatatatttatatattatataatatattatatgtatttatatatwatatatcatatattatatgtatttatatattatatatcatataatatatatatttatattatatatattatatgatatataatattatataatgtattaa

SEQ ID NO: 47655 - DNA, 201 bp, Homo sapiens
acatatgcatatacttatttatatataacatgcatgtacttatttatatatacaatatatatttatatattatataatatattatatgtatttatatattwtatatcatatattatatgtatttatatattatatatcatataatatatatatttatattatatatattatatgatatataatattatataatgtattaat

SEQ ID NO: 47656 - DNA, 201 bp, Homo sapiens
tgcatgtacttatttatatatacaatatatatttatatattatataatatattatatgtatttatatattatatatcatatattatatgtatttatatatwatatatcatataatatatatatttatattatatatattatatgatatataatattatataatgtattaatatatattaaacctatatttataattctgga

SEQ ID NO: 47657 - DNA, 201 bp, Homo sapiens
gcatgtacttatttatatatacaatatatatttatatattatataatatattatatgtatttatatattatatatcatatattatatgtatttatatattwtatatcatataatatatatatttatattatatatattatatgatatataatattatataatgtattaatatatattaaacctatatttataattctggac

SEQ ID NO: 47658 - DNA, 201 bp, Homo sapiens
aatgtactagcatagcgtagatcttatggtctgataaactgttaatacattttggaagtgtataatttttgttttgttggatagaaatgtctcccaagtgtttttttttttctctaggaaaatgtgatccatactgaaattaaatttttatattgaggttccaccaaaataattaatcagtaccctaaataacacttacaa

SEQ ID NO: 47659 - DNA, 201 bp, Homo sapiens
cagaaacagaaagcaagtcttgtgaaagtcagaatctgggagctttgcagatgcgtcaaggtagccttcagattgcctctctgttttcaatgtgtcccttrtctcactcttccaaacatcctatgctgtaagagggtaaaaggaaaaggaaaataagaaaggatctacataaggcaaagtacaagtaacataaatgcagac

SEQ ID NO: 47660 - DNA, 201 bp, Homo sapiens
ggtgcaatctcggctcactgcaacctccacctcccgggttcaagtgattctcctgcctcagcctcctgaatagctgggatattacaagtgcgtgacaccamgcccggctaatttttgtatttttagtatagacggggtttcgccattttggccaagctggtctcgaactcccaacctcaggtgatccgcccgcctcggcct

SEQ ID NO: 47661 - DNA, 201 bp, Homo sapiens
tgcaacctccacctcccgggttcaagtgattctcctgcctcagcctcctgaatagctgggatattacaagtgcgtgacaccacgcccggctaatttttgtwtttttagtatagacggggtttcgccattttggccaagctggtctcgaactcccaacctcaggtgatccgcccgcctcggcctcccgaagtgctgggatta

SEQ ID NO: 47662 - DNA, 201 bp, Homo sapiens
tattacaggattttgtgattctcagatgagtgggaaggaggtgagggagaaatggggaaaaggaagaagacaaaataaaagagagaggaaaaaaccacagrgagagacacacacagcacacagagtgtgcgtggggaagaggagcaggtggaggagaaaggagaaaaggaaggacagagggatggagacccagcagattgg

SEQ ID NO: 47663 - DNA, 201 bp, Homo sapiens
ggctgaggtggaaggatcacatgagcctgggaggttgaggctgcagtgagctatggtcatgccactgcactccagcctgggtgacagagcaagaccctgcatatatatatatatatatatatatatatatatatatatcttagttcttaattaattttagttgtttttgttgttattcccaaagagctatggcacatggta

SEQ ID NO: 47664 - DNA, 201 bp, Homo sapiens
gctgaggtggaaggatcacatgagcctgggaggttgaggctgcagtgagctatggtcatgccactgcactccagcctgggtgacagagcaagaccctgcatatatatatatatatatatatatatatatatatatatcttagttcttaattaattttagttgtttttgttgttattcccaaagagctatggcacatggtag

SEQ ID NO: 47665 - DNA, 201 bp, Homo sapiens
ctgaggtggaaggatcacatgagcctgggaggttgaggctgcagtgagctatggtcatgccactgcactccagcctgggtgacagagcaagaccctgcatatatatatatatatatatatatatatatatatatatcttagttcttaattaattttagttgtttttgttgttattcccaaagagctatggcacatggtaga

SEQ ID NO: 47666 - DNA, 201 bp, Homo sapiens
tgaggtggaaggatcacatgagcctgggaggttgaggctgcagtgagctatggtcatgccactgcactccagcctgggtgacagagcaagaccctgcatatatatatatatatatatatatatatatatatatatcttagttcttaattaattttagttgtttttgttgttattcccaaagagctatggcacatggtagat

SEQ ID NO: 47667 - DNA, 201 bp, Homo sapiens
ttagtttaattagatcccatttgtcagttttggcttttgttgccattgcttttggtgttttagtcatgaagtctttctccatgcctatgtcctgaatggtattgcctaggtttccttctatggtttttatgcttttaggtcttgtgtttaagtctttaatccatcctgagtcaatttttgtataaggtgtaaggaaggtgt

SEQ ID NO: 47668 - DNA, 201 bp, Homo sapiens
gagtctcagggatgaagccgacttgatcatggtggagaagctttttgatgtgctgccggattcagtttgccagtattttattgaggattttcacattgatrttcatcaggatattggcctgaaattttcttttttgtgtgtgtctctgccaggttttggtattaggatgacgttggcatcataaaatgagttagggaggag

SEQ ID NO: 47669 - DNA, 201 bp, Homo sapiens
atttgtgcttcattttaaagtattttaaatgaataataataataaacatataaccctacatagcttattgtacatttgtttattagtatcttaatttcttmgcactgaaaacattaacagatacctctataatattctctaatatggtgtattctctaaatttgaaatttcctaatgtaatctttcttaaaagtaggagat

SEQ ID NO: 47670 - DNA, 201 bp, Homo sapiens
aggttaataaatagaatttttcaagaattaataaccccattctattctgaaacctggaaaacacattaactttattagcttttaagtaacaaatattcctyttttaattctaaactatagtttgcccttttaatccatttaattgaaatagtaacctatagtagaaactattaaaaatcaattatgaaaggtccattaaat

SEQ ID NO: 47671 - DNA, 201 bp, Homo sapiens
atactaccaacacctctatgcaaataaactagaaaatctagaagaaatggataaatttctcgacacatacactctcccaagactaaaccaggaagaagttraatctctgaatagaccagtaacaggctctgaaattgtggcaataatcaatagcttaccaaccaaaaagagtccaggaccagatggattcacagccgaatt

SEQ ID NO: 47672 - DNA, 201 bp, Homo sapiens
gagatcgagaccatcctggccaacatagtgaaaccccatctctactaaaaatacaaaaattagctgggcgtggtggtgcatgcctgtaatttcagctactyaggaggctgaggcaggagaatcacttgaaccagggagttggaggttgcagtgagcccagatcgtgccactgcacttcagtctgggtgacagagcgagact

SEQ ID NO: 47673 - DNA, 201 bp, Homo sapiens
tttactcacagctctcttccaccctgtgtctcagcgagaaattccttctgggccccttgtgagaagagttcagatctgttcccggcccatatcccatcacrtctcccccacaggatctgaccttgtgaggacttgggctgccccgggagtaatgaatcaccgtcttatttttttaggccatatgtgagttaaattgtttga

SEQ ID NO: 47674 - DNA, 201 bp, Homo sapiens
ctttcttaataaaacaatgttctcactataattatagtccacaagcactatgagccacatagtggcatttaagatgctctcaccttcttcagcctccttayacctcactcttagagcatcactactatcccttaaaatatggaaaggtggagaaatctttctgagcttgggcacttccactaactcttattttgctgctgg

SEQ ID NO: 47675 - DNA, 201 bp, Homo sapiens
atttcttccaagtttttatttcacatgcaagtctgagatacaaaatattctgtaaaattttaaggaagccacagtagttcttactgtttggggatttcccrgagagaataatcgtgttcagaatggtccttttttttgccaaaaggtttattatgtgaactgaacggctcaaccaaacagataacaccatctccattttat

SEQ ID NO: 47676 - DNA, 201 bp, Homo sapiens
aggaaaattttctgttgaagagatgcctaagttgaatcttaattagtagaagctaactgggctgtattagtctgttttcatgctgctgataaagacatacstgagactgggcaattgacaaaagatagaggtttaatggactcatagttccacatggctggggaggcctgacaatcatggcagaaggtgaaagtcatgtct

SEQ ID NO: 47677 - DNA, 201 bp, Homo sapiens
aaaattttctgttgaagagatgcctaagttgaatcttaattagtagaagctaactgggctgtattagtctgttttcatgctgctgataaagacatacctgmgactgggcaattgacaaaagatagaggtttaatggactcatagttccacatggctggggaggcctgacaatcatggcagaaggtgaaagtcatgtcttac

SEQ ID NO: 47678 - DNA, 201 bp, Homo sapiens
atccttatccctaggtccagaaattttttccaggtttcctccacagtcagtgaactctagggagcctgtgccaagctctactctagtttctatagtgggtkgggggggaatgtagaaaaagaaaaaaactttttgccttttaggagcttgccaaataattgaaaagtatagagacacacaagtaaaaatttaaactgacac

SEQ ID NO: 47679 - DNA, 201 bp, Homo sapiens
gcctggactatcacagtgtaacctgtgataagttacactcttgggactcttgtgaagtgttcataatctttcttggataatataaaagaacagtctaaaaktgctttactctgtagcaccattgcacaatagaactttctgagatgatggaactattgtataatctgtgctgttcaatacagaagccactagctgtatgtg

SEQ ID NO: 47680 - DNA, 201 bp, Homo sapiens
cctggactatcacagtgtaacctgtgataagttacactcttgggactcttgtgaagtgttcataatctttcttggataatataaaagaacagtctaaaatwgctttactctgtagcaccattgcacaatagaactttctgagatgatggaactattgtataatctgtgctgttcaatacagaagccactagctgtatgtgg

SEQ ID NO: 47681 - DNA, 201 bp, Homo sapiens
tctttcttggataatataaaagaacagtctaaaattgctttactctgtagcaccattgcacaatagaactttctgagatgatggaactattgtataatctrtgctgttcaatacagaagccactagctgtatgtggctattgagcagttgaaatgtgggtagtgcaatgaaggcaataaatttttaatttaattcaatcta

SEQ ID NO: 47682 - DNA, 201 bp, Homo sapiens
acaataatttgttcaaaggaagcacctgtgggtctatcacaggttttcaccactagtcagtgtttcagtgaaaacattactcctaaaacacaattatggtkcttggaagagataaacataacctatgaaggtgtcatgatctcattataatagtagttttctcatgcattcctggaagagcaggaagcctggagggtgctg

SEQ ID NO: 47683 - DNA, 201 bp, Homo sapiens
ttttccccctcaaaatcagaaatataaagaggaaagaaaattagcccatatataaagttaatttttaaaaaattcaattcagggaattaaaatatttatayactccatgaaggaatatctgactgtatatgaaccataaaaacagatgtgacttctacccatccctgaagcctgagccaccttgccaactgattatggcac

SEQ ID NO: 47684 - DNA, 201 bp, Homo sapiens
gttaaatctttgaaaaccagatactatgtcttcttttatggaagtgtaaaaacattgtcataagcatttagaaaaaaaattaaactctaatttctaccacrgataaagcaggcttattcttccaactatgcacagtttgagaatgagattggagcatgggtcaattatctgccccatgatattttgggaagacacaggttt

SEQ ID NO: 47685 - DNA, 201 bp, Homo sapiens
gcaatgcccagattgtggttggatatgatataaaggatttacctgtaaaagtttcctcacagtcagaagcatcgcttagctcacagaagtatgtacatgtrggaaaatcaatagtataatagcatatatgcatactttagatcagaggaaacttggaacagctttcagttatattacttccaaatgctcaaatcatgctaa

SEQ ID NO: 47686 - DNA, 201 bp, Homo sapiens
tggggggcggaggttgcggtgagctgagattgcaccattgcactccagcctgggcaacaagagcaaaactctgtctcaaaaaaaaaaaaaaaaaaaaaaaacaactcaggaagtccatgttttcttaacgtaaatttttactttcctggcatcaaaaattggtcttgacaaaagtgcccaaagcgtttacacaaaatttta

SEQ ID NO: 47687 - DNA, 201 bp, Homo sapiens
gcaacaagagcaaaactccatctcaaaaaaaaaaaaaagtcttcactgaggcctaagccttctctctattttagaataccagaatggcggcattttttttwaaaatgtgcatggctcttatatttagtctttgtgactgatatggtttgactgtgtctccatgcaaatctcaccctgaattgtatctctcagaattcccac

SEQ ID NO: 47688 - DNA, 201 bp, Homo sapiens
tgttttggaagcgaagctcagtgagaagaggtttctggtgcttttgcagggcagaatgagtagacgatgatgaaggcactgtagacatagtcattgtagasttgggaagtccagaaaaaagtgagaaagggactccttcagttgcatgatgaagttcttttgcgaaacagtaacttggagttctgtttaatttataaaatc

SEQ ID NO: 47689 - DNA, 201 bp, Homo sapiens
tggggtggctaacagattgtaactgggagtcagaatgtctggatttaaatctttgactggcatctcctacctgtgtaacctcaggcaatttgtttaacctstttgaggctaaggcttttgctatttagattaattgttacatatttactcaattctttttttttaattaagggtttactatgtgttaaatgccttcattca

SEQ ID NO: 47690 - DNA, 201 bp, Homo sapiens
cacatggctgaagaggcctcacactcatggtggaaggtgaatgaggagaaaagtcacatcttatatggcggcaggcaagagaacatgtgcaggggaactcycttttataaaaccatcagctcttgtgagacttattcactatcatgagaacagaataggaaagacccacctccatgattcaattacctcccactgggtccc

SEQ ID NO: 47691 - DNA, 201 bp, Homo sapiens
cttatatggcggcaggcaagagaacatgtgcaggggaactcccttttataaaaccatcagctcttgtgagacttattcactatcatgagaacagaataggraagacccacctccatgattcaattacctcccactgggtccctcccatgacatgtgggaattatgggagctacaattcaagatgagatttgggtggggaca

SEQ ID NO: 47692 - DNA, 201 bp, Homo sapiens
ttctgatacaactactacttaaatctcatttataaattttgttccttgtggccaagattctgtggggaaacagtattttcattttgtaaatcttagacttyctattgtatttttttgtattgaaatctgattatttgaattttcatgacaaagtctcatcattttgcttttaattactctatagatttttatttggcagat

SEQ ID NO: 47693 - DNA, 201 bp, Homo sapiens
gatttttggaaatggtacacaaaattagttttattgaagagtgaaagagctggacagatgggaaaatcatcatggagactagtagattgtgagggtgaaawccatgagtaggcttaaaagtattgtctcaagacaaaaaaaaaatgggctattttggaagtaaagagtttttaattccaggaggtggccctctactgatgt

SEQ ID NO: 47694 - DNA, 201 bp, Homo sapiens
ccctagtaattactagcaggtaaatccttagaagcactgaaaaaggtagtgatacataagggcaagttagaagttgtgaagtgtgttctcttgcttggtargaagaaagacaactgggtcatacataagagattgtggcactgaacaggggagttggtaagccactcctcgggacctcaagactaaagtgcacagggctaa

SEQ ID NO: 47695 - DNA, 201 bp, Homo sapiens
aaaataaaaactgggttattcagaattgttgaaagtaacaagaaactactactcagggaaaacttagagaaaaaaagacaaaactcttcctattcatcacygtttgctttcagaattaaaatattccataatctttgccagacagaaagtaacaacattgatttcaaatcaccctccctgacaactcccatcaaaacccaa

SEQ ID NO: 47696 - DNA, 201 bp, Homo sapiens
tggtgtgatctctgctcactgcaagctccacctcccaggttcacaccattctcctgcttcagcctcctgagtagctgggactacaggtgcccgccaccacrctcggctaattttttgtatttttcagtagagacggagtttcaccatgttagctaggatggactcgatctcctgaccttgtgatctgcctgcctcagcctc

SEQ ID NO: 47697 - DNA, 201 bp, Homo sapiens
ggtgctctggtgttgggagcacacatgaggatacaatcattacaatcattatatcctcttgatgaactgacacctctttcattatataataattttgtcastttttattacttaaagtctgttttatctgttgtaagtatagctactcctactcacttttgagcaccatttacatggaacatctttttccattcctttatt

SEQ ID NO: 47698 - DNA, 201 bp, Homo sapiens
acaaatggcaagatttctttcatttttaaagctgaatatttcattatttcatatgtatgtatttcatatgtgtatatgtatgtgtatatatgtatatatgcacatgtgtatatatgtatatatgcatgtgcatatatacacatgcatacatatatatacacacacacacacacacacacacacacacatctcacatttttt

SEQ ID NO: 47699 - DNA, 201 bp, Homo sapiens
caaatggcaagatttctttcatttttaaagctgaatatttcattatttcatatgtatgtatttcatatgtgtatatgtatgtgtatatatgtatatatgcacatgtgtatatatgtatatatgcatgtgcatatatacacatgcatacatatatatacacacacacacacacacacacacacacacatctcacattttttt

SEQ ID NO: 47700 - DNA, 201 bp, Homo sapiens
acaatgtattgtcattctcttggtctgactgctgggagatcacagggagctgagtgccgctgagttaaacagatgttcagcatggctgcatcttcaaagtyttgtctggttccagccctgacgaaacttctagggccctgagagaaagagaaagtttctagttgaagtaatatcctatagtttgttagtggaaacagaagc

SEQ ID NO: 47701 - DNA, 201 bp, Homo sapiens
catttttaaagctgaatatttcattatttcatatgtatgtatttcatatgtgtatatgtatgtgtatatatgtatatatgcacatgtgtatatatgtatayatgcatgtgcatatatacacatgcatacatatatatacacacacacacacacacacacacacacacatctcacatttttttttatccattcatctgttaa

SEQ ID NO: 47702 - DNA, 201 bp, Homo sapiens
atgtatttcatatgtgtatatgtatgtgtatatatgtatatatgcacatgtgtatatatgtatatatgcatgtgcatatatacacatgcatacatatatayacacacacacacacacacacacacacacacatctcacatttttttttatccattcatctgttaagttgtttccacatcttggctattgtggataatgctg

SEQ ID NO: 47703 - DNA, 201 bp, Homo sapiens
tgtatttcatatgtgtatatgtatgtgtatatatgtatatatgcacatgtgtatatatgtatatatgcatgtgcatatatacacatgcatacatatatatacacacacacacacacacacacacacacacatctcacatttttttttatccattcatctgttaagttgtttccacatcttggctattgtggataatgctgc

SEQ ID NO: 47704 - DNA, 201 bp, Homo sapiens
gtatttcatatgtgtatatgtatgtgtatatatgtatatatgcacatgtgtatatatgtatatatgcatgtgcatatatacacatgcatacatatatatacacacacacacacacacacacacacacacatctcacatttttttttatccattcatctgttaagttgtttccacatcttggctattgtggataatgctgca

SEQ ID NO: 47705 - DNA, 201 bp, Homo sapiens
tatttcatatgtgtatatgtatgtgtatatatgtatatatgcacatgtgtatatatgtatatatgcatgtgcatatatacacatgcatacatatatatacacacacacacacacacacacacacacacatctcacatttttttttatccattcatctgttaagttgtttccacatcttggctattgtggataatgctgcaa

SEQ ID NO: 47706 - DNA, 201 bp, Homo sapiens
tatgcagttgacctcaaactacctgggtgcaagagattctcctgccttggcctcccaaagtgctgggattacaggcatgagccactgcacccagtctgtcygttcttaaagctacattttgttaccttaaagtctttcttgtcccaatatattgtttacatacttacaaactactctatgataatttttaaagtatctgtc

SEQ ID NO: 47707 - DNA, 201 bp, Homo sapiens
atttcatatgtgtatatgtatgtgtatatatgtatatatgcacatgtgtatatatgtatatatgcatgtgcatatatacacatgcatacatatatatacacacacacacacacacacacacacacacatctcacatttttttttatccattcatctgttaagttgtttccacatcttggctattgtggataatgctgcaat

SEQ ID NO: 47708 - DNA, 201 bp, Homo sapiens
ggctcaagcgatcctcccacctcagccttctgggtagctgggactagaggcccacgccaccacgtctggctggctagtttttgtagggtttttttttttctttttttttttgtagcgctgggtttttgctatgttgtccaggctggtcttgaactcctggactcaagcaattcaccagcctcagcctcccatagtgctggg

SEQ ID NO: 47709 - DNA, 201 bp, Homo sapiens
gattggagtgttccaacaggttgtgacatgattggattgatggtttagaaagattgccctggctgctggattgtgcataataagtggtatggggtggatgygtgaagggagcggggatggctagcatggaagaagggagaccagattggaaactctgaccatggtccaggcaagagaggatggtggctgggtagtagctgg

SEQ ID NO: 47710 - DNA, 201 bp, Homo sapiens
tatcataattcactgtgcaatagctttcagtgctaggatgttaggtaaatacttgattaatgagttactttagattactaatcattaaatatggtctcccttttttttttgtcttttcttaaaatattaactacactgggaaagcaagaaagcacacctgccatttcctcactatgggctatcatttctccttgtatgtgt

SEQ ID NO: 47711 - DNA, 201 bp, Homo sapiens
tttatttattcatcaattctacaaatatgcaactggtttagttactggaaatacagcaggggtaagacagataatgctcctgttctcatggtgcttatatkccagtggatgaagacagacaataaaaaacaaatacgaaaaacttcagacagtgaccatgtgcaccgaagaaaaaaactgggcaatgtaataggatgtgat

SEQ ID NO: 47712 - DNA, 201 bp, Homo sapiens
agtttgcaacttttggccaagtgctcagaatgcttctttcctgttttctgtatttggaatatagtttatcttttataaaaaaattttgtgggtacatagtmggtagatataccctaaagaaaggaaatgagtatattgaagagatatctgcactgccatgtttgttgtagcatggttcacaatagctaagatttggaatat

SEQ ID NO: 47713 - DNA, 201 bp, Homo sapiens
aactagagatgagatttgcatggggagacagagccaaaccctatcaacgggcattccaggggtgtcttagaggcaataccagggtgagaagatgagtttartggacaggtttcctcatagccccacttgctgcaatcagaggagctccactttttaatctatttaatatataggacttgtcagaatttttttttaatcaac

SEQ ID NO: 47714 - DNA, 201 bp, Homo sapiens
tagtggcatttcattgttgtttgaagttgcaatttcctaatgtaatatgatgttgaacatctttttcataggcttacttgtcatctgtttatcctctttgrtaaggctgttcaggtatttttctcattttttaattgagttgtttcttgttgagttttaagagtatttttgtgtattttggataacagttctttataagat

SEQ ID NO: 47715 - DNA, 201 bp, Homo sapiens
gagcagtggatctcttagcacagcattcgagctctgctaagggacagaatgtctccttaagtgggtccctgaccaccgtgcctcctgactgggagacacckcccagcaggggttgacagacacctcatacgggagagctccggctggcatcttgtgggtgcccctctgggacgaaacttccagaggaaggaacagacagca

SEQ ID NO: 47716 - DNA, 201 bp, Homo sapiens
tatataagtgaaacaacttgaaaactgtatgcctctacattcatacaaagtatatattcatatttatatgactagtgtacagtattattatcagtatcaamgaaaactaaaagtctacagtatatggagcccaaataaaatttggccaaaaagagtgcttaggatgtaaactgctttcagtttcaacctttgattccactt

SEQ ID NO: 47717 - DNA, 201 bp, Homo sapiens
tagcaggccctaaaataaatcaaagtattttaccccaaaatatatttctttgacatattttgaaatggccctgcaaagctgtctcctgtggggaaaatctrcattctgtaaagaatgctgttccctttccaggtctttttcctgatccaggagagaattaagagtctggcacctttttaagtctgataagaaacatttaca

SEQ ID NO: 47718 - DNA, 201 bp, Homo sapiens
ttttgcttttgcagtttcagttacctgtggtcaactgtggtccgaaaataggtgagtgttgtacaagaatagagagagagagagagagacaccacattcaygtaacttgtattatagtatattgttattattgttctattttattattaattattgttatcaatctcttacagtgcctaatttataaattcgactttatca

SEQ ID NO: 47719 - DNA, 201 bp, Homo sapiens
tatctgtgtaccagtataaggaaaatacagtgattctgggtttcaaaacccaaatacactgaaacattgtggagtttttaaagtaaggaatgtgcttggtytggcagatgataaaacatgttagttgcttaaaattattgccaattattttggtaaatacattcaaacttttttaaatttttttattttttgtgatagggt

SEQ ID NO: 47720 - DNA, 201 bp, Homo sapiens
ccacaagactgtcccgagttcaaatgccaatctcaagtagtgagtccccaggtaatccacacttctgtgcaatttgactaggggttcacatgcaaattaagggttcacatgaccccttcctcagattcaataatttgctataacagctcatgtatttcagggaaacacttttgtttactggtttattaaaaaggatattgt

SEQ ID NO: 47721 - DNA, 201 bp, Homo sapiens
cattcaaacttttttaaatttttttattttttgtgatagggtctcaccctgtcacccaggctggagtgcagtgatgcaatcatggcttactgcagcctccmcctcctgggcccaagcaatgctcccacctcagcctcctgagtagctaggactacagggttgcaccaccatgcccagctaatttttttttttttttttttt

SEQ ID NO: 47722 - DNA, 201 bp, Homo sapiens
gagtgcagtgatgcaatcatggcttactgcagcctccacctcctgggcccaagcaatgctcccacctcagcctcctgagtagctaggactacagggttgcmccaccatgcccagctaatttttttttttttttttttttttttttttttgtagaaacagggtttcaccaggctgattttgaactcctgggctcaagtgttc

SEQ ID NO: 47723 - DNA, 201 bp, Homo sapiens
ccatgcccagctaatttttttttttttttttttttttttttttttgtagaaacagggtttcaccaggctgattttgaactcctgggctcaagtgttccttytgccttagcctcccaaagtgctgggattacaggcatgagccaatacacctggcttcaaagtttttttttttttctagagaatcagcagtgtaatagaaat

SEQ ID NO: 47724 - DNA, 201 bp, Homo sapiens
gagttgtttccaccctttggttattatgaatgatgttgctataaacattcatgtacatgtttctgtgtggacatgtgttttcatttctcttagaaatatacctgagtataattgctgggccatgtagtaactctctgtttaattgtttaaggaactgacagactgttttcaaagcagctgccccattttacattcctaccg

SEQ ID NO: 47725 - DNA, 201 bp, Homo sapiens
tgcctgttcactctgatggtagtttcttttgctgtgcagaagctctttagtttaattagatcccatttgtcaattttggcttttgttgccattgcttttgktgttttagtcatgaagtccttgcccatgcctatgtcctgaatggtattgcctaggtttttttctggggtttttatggttttagttctaacatttaagtct

SEQ ID NO: 47726 - DNA, 201 bp, Homo sapiens
tataaattaccttgggcagtatggccattttcacaatattggttcttgctatccatgagcatggagtgttcttccatttgtttgtgtcctcttttatttcrttgagcagtggtttgtagttctccttgaagaggtccttcacatcccttgtaagttggattcctaggtattttattctctttgaagcaattgtgaatggga

SEQ ID NO: 47727 - DNA, 201 bp, Homo sapiens
tgctctctgttttacaagtgtggtgtgtttgattccaagtaagcaaatgcctgtattattccaattccttggaattttgataacatttaaaaatgttaatrtttctcaccaaagatattattttattaaccactgtatagcttatttagcacaaagtatccatggagccaataaagtatccatttgttacttgtatccaaa

SEQ ID NO: 47728 - DNA, 201 bp, Homo sapiens
tgtataggaatgcttgtggtttttgcacgttgattttgtatcctgagactttgctgaagttgcttatcagcttaaggagatttggggctgagatgacgggkttttctaaatataccatcatgtcatctgcacttttcctaagtgaatactccttatttctttctcctgcctgattgctctggccagaacttccaacactat

SEQ ID NO: 47729 - DNA, 201 bp, Homo sapiens
ttgtattaaatgtgataatactagttaggtacttaggtatggtgttgggtgttttacacacattagctcattaattcctctcaacaactctatgaggtagrtacccctattatctcagttttacagatgggaaaactgaggcatggagaggcaaagtaacttgcccagtcacacagatcataaatgatagcaccaggattc

SEQ ID NO: 47730 - DNA, 201 bp, Homo sapiens
ttggctgtgggtttgtcataaatagctcttattattttgagatacactccatcaatacctagttaattgagagtttttagcgtgaagggctgttgaatttygtcaaaggccttttctgcatctcttgagataatcatgtggtttttgtctttggttctgtttatatgatggattacatttattgatttgcatatgttgaac

SEQ ID NO: 47731 - DNA, 201 bp, Homo sapiens
atatataaacataaaatacagttttcatttacaactcctcatgtgatgcctcatgtgtaaaaaccttaaatgcttttttcttaagctgcataaataaacaycagtgaaaaacatatgtgatttatgtgtgttcaaacaacaaaacacaaagctagactcctaacctggggaaatgcatttcttcccagatactttctcact

SEQ ID NO: 47732 - DNA, 201 bp, Homo sapiens
tactttcaatatcttttatttaaaaactggtctaattaaaatattttgcaaagcaaaataatcctaattagagttgagtctgctgggactttattacttgcctcgttttgaacatgagccatagataaggtgactatataatttattgttcagtgcaggacatttttgagacttaaagggagtgctatgaatactttcact

SEQ ID NO: 47733 - DNA, 201 bp, Homo sapiens
cctaactgatctatttctagcctggtcaccctcaaattcatctttgccattgctgtcaaagtgatttttctaaaatacagctatgccttttgcctatatcytcaaaattattcaacgactcctcagagccttgaaaataaagttcagatcatttagggttgtatttaggttccctgtctgatctctgaatacttctccagc

SEQ ID NO: 47734 - DNA, 201 bp, Homo sapiens
acattttatagtttgccttagttaaacacaaaatctagcttttcccctgaggttactatttaccctttagctttcttcagtgaaggatatttattccagcytaaactggaaaaatctgagggcctttattgggtatgacatttgccatttttccttttgtggcttccaaagattattccttcaccttctcatagtcttcca

SEQ ID NO: 47735 - DNA, 201 bp, Homo sapiens
ttgagttttaagagtatttttgtgtattttggataacagttctttataagatgtggggtttcttttgcaattgttttcttctagtctgtgacttgttttcycactttttaatttttttttctgagcagagcttttaagttttaataaagtccccttattgattatttctttcatggatcatgtctttggtgttgtgtctag

SEQ ID NO: 47736 - DNA, 201 bp, Homo sapiens
tccatacaaaacttagaatcagtttgttgatatccacaaaataactgactgggattttgattgagatttcattgaatctatagattaagttgggaagaacyaatatctttgcaatattgagtctttctacttgttaacatgtaaatagctcttcatttatttagttcttctttaatatctttcatcagagttttgtagttt

SEQ ID NO: 47737 - DNA, 201 bp, Homo sapiens
agtagatgcctttttctaactcaaaaagaggcagttaaggagtaattattgagcctccagatctaaataccaaattataggaaatacaaggagtggaagarcacattaaatgatatgcaggggatgcaatcagccaaatccacactgggggattggacagaatctataggacaaaaaaaaatttttaataacaaattgcaa

SEQ ID NO: 47738 - DNA, 201 bp, Homo sapiens
actcccaatgtcccttaggggagtaaaattcctctccacgtgagaaccactgcactgtagtattcgaaagaattcccttccatgtaaaaccatgaatttcmgcattgagccttgctacaagcaagatccaatttattattttagaaaacctcaaattgactaggaaagtgtctgccattgtaccaggaaggtattgaggcc

SEQ ID NO: 47739 - DNA, 201 bp, Homo sapiens
cccctttaaaaaacaaatacataaatttatcattgggcattgtgatttttcatggaacagtttttatttttagcaactggctttcaaagcaaggaaagatktttttttaagcataattactaagaatagaaacaactttgaggtgttctttttgattcttaatatttaaggtgtctcatgacatttgaagtctctaaatgt

SEQ ID NO: 47740 - DNA, 201 bp, Homo sapiens
tgatttgctgctggatttggtttgccagtatttcattgatgatttttgcatcgatgttcatcagggatattggtctaaaattatcttattttgttgtgtcyctgccaggctttggtattaggatgatgttggcctcataaaatgcattagggaggattccctctttttctattgattggaatagtttcagaaggaatggaa

SEQ ID NO: 47741 - DNA, 201 bp, Homo sapiens
tgtttgctcttgcttctctagttcttttaattgtgatgttagggtgtcaattttggatctctcctgctttctcttgtgggcatttagtgctataaatttcmctctacacactgctttaaatgtgtcccagagattctggtatgttgtgtctttgttctcattggtttcaaagaacatctttaattctgccttcatttcatt

SEQ ID NO: 47742 - DNA, 201 bp, Homo sapiens
tataaatttccctctacacactgctttaaatgtgtcccagagattctggtatgttgtgtctttgttctcattggtttcaaagaacatctttaattctgccytcatttcattatgtacctggtagtcattcaggagcaggttgttcagtttccatgtagttgagcggttttgagtgagtttcttaatcctgagttctagttt

SEQ ID NO: 47743 - DNA, 201 bp, Homo sapiens
ttgccagcatctattatttttgactttttaataatagccatgctgactggcatgagatgttatctcattgtgattttgatttgcatttctctagtcatcartgatattcacctttttttatatgtttattgaccagatgtatgtcttctgttgagaagtctctgtttatgtcctttgtccacttttaaatgggggttgttt

SEQ ID NO: 47744 - DNA, 201 bp, Homo sapiens
agttttcaaggggaatgcttccaactttttcccattcagtaaaatgttagctgtgggtttgtcacaaatggcttttattgttttgaggtatgtccttcaaygcctagtttattgagagtttttaacatgaaggggtgttgaattttatgtaaagccctttcttcatctgttgaggtaatcatgtggtttttgtctagtttt

SEQ ID NO: 47745 - DNA, 201 bp, Homo sapiens
ttaggattgctatccctgcttttgcctgttttccatttgtttggtagattttcctctatccctttattttgagcctatgattgtcattacatgtgagatagcatgtaatgacaagacagcatactattagttcttgcttttttatccactttgccactctgtgccttgttgagtgggacatttggtccatttacattccag

SEQ ID NO: 47746 - DNA, 201 bp, Homo sapiens
atagggataatcttaaatatattctaattatttgtatgtccattctttgaaaattttaactgttattagtaaaatttttaaatttttaaattaaaattagyaaaataattgtcctgtagctcagttgactaaatccactggactaaatgatgtttaataaatatccttttcagctacattaaatgcttctagaaatagtgg

SEQ ID NO: 47747 - DNA, 201 bp, Homo sapiens
tgattgtcattacatgtgagatagcatgtaatgacaagacagcatactattagttcttgcttttttatccactttgccactctgtgccttgttgagtgggrcatttggtccatttacattccaggttagtattgatatgtgtggatttgatcctattattgtgctgttagctggttattacataggcttgtttgtgtggtt

SEQ ID NO: 47748 - DNA, 201 bp, Homo sapiens
tctcaacctccccggcctcacaagatgaggcagctttattcctattcaaggctagacccttctctttgctgttcatgttatccactcctatctttgtcctygtatcctctttattgtatcgccaatctcttactctctacttattattattattattattattattattattattattattgaggcagagtctctctctgt

SEQ ID NO: 47749 - DNA, 201 bp, Homo sapiens
caagggtagcaagggcagttccactgcaaaggcaatggcagagaggctttcagttgcccctgggggcctggtccaaggaatttccgaattgctactggctygatagctctggcaggggttggctggaggcccaggcctggaggacctgtctagtgaggagatatgggaacggacacccatgtaacagtctgtctacttttc

SEQ ID NO: 47750 - DNA, 201 bp, Homo sapiens
gtgagtacctggatgtttcagttgaagttgttgtatttacttgccctgttcattcctctccatgagaggcatgcacactagctacttctagtaagccatcwtgctttatctggttttgattttagagtaatactagcctcataggatgagttaggaagtgttccttctgtttttatttaaaagagtttgtaaagaattggt

SEQ ID NO: 47751 - DNA, 201 bp, Homo sapiens
acttaaaactggcatatttttggtatgttttattgtttttagtgatattgtcttctagaaccttaactattttgcataaactgatacaagcagtgcattatttgtttgttctcaaaaaatacacctaattgtgttaatataagactaagaggactagtgcagtgctcctaaaatagcagtgtggagacctaacagcaatta

SEQ ID NO: 47752 - DNA, 201 bp, Homo sapiens
aaaatgtataatttccatatatgcgtggtacaaaaataaactcttatatttcaaaattatttttgtgctatagctatttgtttttctcccttgggttgaargttatcttctggatgggtggtttggcaactgtcctcctcatcacactgaaatcaccaaactcaagtagcacttagaaaacaaagtaagacagaaggaaat

SEQ ID NO: 47753 - DNA, 201 bp, Homo sapiens
aactgttgcctcttcgcaggggtaatgtactgtggtctatacaagactttttttttttttttttttttttttttttgttatatggaagagaaatgattggsaagccactaggaggtttggttttaatgccttctcagttgtaaggaatggatttattattagttatacttttctggaatggctgtatgttcccaaatgata

SEQ ID NO: 47754 - DNA, 201 bp, Homo sapiens
ttaacacataataattgtacatatttatggagtacagtatgatatttcagtatatatataccatgtgtaatgatcaaattagggtagtcagcatatccatyacttcagacatttagcatttcttagtgttgggaacattcaaaatcctctcatctagctatttgaaaatatacaatttattattcttaactgtagttcccc

SEQ ID NO: 47755 - DNA, 201 bp, Homo sapiens
actgtagttccccttcagtgctacagaactctggaagttactactcctatctagctgtacttttgtatctgctccccaacctctccctatctcctttgccycccaacacttctcagtctctagtaaccactattctactctctaattctatgagatcaacttttttagctttcatatgtgagtaagaacatggagtattta

SEQ ID NO: 47756 - DNA, 201 bp, Homo sapiens
gcaaggcagcattgggtatcatttttttaaaagtagattttaagaagcttagaaacaaagtagatattttagaagggattgtgactcatgaggatggtacrtaagaagaaaatgaaattctgattatttacttacgaatgattttttggtttctttttgagacagggcctctctctgtctctcactcaggctggattgcag

SEQ ID NO: 47757 - DNA, 201 bp, Homo sapiens
tggaagttactactcctatctagctgtacttttgtatctgctccccaacctctccctatctcctttgccccccaacacttctcagtctctagtaaccactrttctactctctaattctatgagatcaacttttttagctttcatatgtgagtaagaacatggagtatttattggaagcattgttatatccaaagtattctg

SEQ ID NO: 47758 - DNA, 201 bp, Homo sapiens
atctacagatttttttttttttttttttttgagacagagtctcactctgtcactcaggctggagtgcagtgacatgatctaggctcactgcaacctccacktctcagattcaggtgattctcctgcctcagcctcctgagtagctgggataacaggcacctgctatcacacctggctaatttttgtatttttcatagagac

SEQ ID NO: 47759 - DNA, 201 bp, Homo sapiens
aattgtgtctttcaagaaattggttcattttaaatttatttttaattaattattgaaaaaaaaccatcttaatctgtcacccaggctggagtgcagtgttkcaatcatagctcattgcagcctcaaactcctgggctcaagcaatcctctcacctcagcctcctgggaattggtccattgtatttaggttttcaaatttat

SEQ ID NO: 47760 - DNA, 201 bp, Homo sapiens
tcctctcacctcagcctcctgggaattggtccattgtatttaggttttcaaatttatgggtatacagttgttcataatattctcttattattcttttaccrttcatgagacctgtagtcatgtcctttctttcatatctgacattagtaatttgcatgctctctctttttgattacttagtctggctagaggcttattgat

SEQ ID NO: 47761 - DNA, 201 bp, Homo sapiens
tttttcactttaagttctagggtacatgtgcacaacgtgcagtttgttacatatgtatacatgtcccatgttggtgtgctgtacccattgactcatcattwaaattaggtatatctcctaatgctatccctcccttttccctgcacccccaccggcaggccccagtgtgtgatgttccccaccctgtgtccatgtgttctc

SEQ ID NO: 47762 - DNA, 201 bp, Homo sapiens
taggaaaaagctaattaaaatttgtgtgagtcagttattaacacagtaagtcattaggtaacagaatctaattttaacccattttttgaggctgccttttwtctttatttagcaatgaatgaagttacttgattaggttcaatgactggcccagggtcaatcacacagtaaattaaaatagcaaaagaagacgtcttccta

SEQ ID NO: 47763 - DNA, 201 bp, Homo sapiens
caaaaaagagcccgcattgccaagacaatcctaagcaaaaagaacaaagctggaggcatcacactacctgacttcaaactatactacaaggctacagtaascaaaacagcatggtactggtaccaaaacagagatatagaccaatgggacagaacagaggcctcagcaataacaccacacatctacaaccatctctttgac

SEQ ID NO: 47764 - DNA, 201 bp, Homo sapiens
acacactctcctgggatcattacctttccgctctccagaaaatatctgtatatattatttcccccttcacatcctcaacttaaaactaaatgccaaatctrcagccagacctgtgactccgccctgttctaggtctccacagatgcacacactttactcacagctctcttccaccctgtgtctcagcgagaaattccttct

SEQ ID NO: 47765 - DNA, 201 bp, Homo sapiens
cctattcaaggctagacccttctctttgctgttcatgttatccactcctatctttgtccttgtatcctctttattgtatcgccaatctcttactctctacwtattattattattattattattattattattattattattgaggcagagtctctctctgttgcccaggcgggagtacagtggtgcgatcttggctcactg

SEQ ID NO: 47766 - DNA, 201 bp, Homo sapiens
gacaaaaaaccaaacaccgcatgttctcactcataggtgggaattgaacaatgagaacacttggatacaggaaggggaacataacacaccggggcctgttktggggtggggagagtggggagggatagcattaggagatatacctaatgctacatgacgagttaatgggtgcagcacaccaacatgacacatgtatacata

SEQ ID NO: 47767 - DNA, 201 bp, Homo sapiens
cgccagcatgctgggctaattttttgtattttttgtagagatagggtttcaccatgttatccaggatggtctcgatcccctgacctcgtgatacacccacytcagcctcccaaagtgctaggattacaggtgtcagcaccgtgctcggccctctctactaattatgaatcaataaacatgctcaattgttgcccatgctaa

SEQ ID NO: 47768 - DNA, 201 bp, Homo sapiens
acattaatgaaaatacataactaaatataaaagcaagagagaaagaaaaaaaggaaggacagaaagaagaaagaaagaaagagagagagagagagaaagamagagaaagaaagaaaggaaaagaaagaaggataaaaagaaaaacagatgcataattctgaaatcacaactgtgatgagtgctacaaaggaaaggtaaata

SEQ ID NO: 47769 - DNA, 201 bp, Homo sapiens
cttaaaactggcatatttttggtatgttttattgtttttagtgatattgtcttctagaaccttaactattttgcataaactgatacaagcagtgcattatttgtttgttctcaaaaaatacacctaattgtgttaatataagactaagaggactagtgcagtgctcctaaaatagcagtgtggagacctaacagcaattat

SEQ ID NO: 47770 - DNA, 201 bp, Homo sapiens
tatactatgcaattttgagacaccagtggttctctttcagtgagattaagcttggaatgtttgtttaaaaaggcactattattttcttatagattttaaaktttacaatattcgcccaaatttctttttctttttgtttatttctttgctgtaaccatatgtttgcttacctgaagaaatggaggtaggcatcaaagttga

SEQ ID NO: 47771 - DNA, 201 bp, Homo sapiens
ttaaaactggcatatttttggtatgttttattgtttttagtgatattgtcttctagaaccttaactattttgcataaactgatacaagcagtgcattatttgtttgttctcaaaaaatacacctaattgtgttaatataagactaagaggactagtgcagtgctcctaaaatagcagtgtggagacctaacagcaattatt

SEQ ID NO: 47772 - DNA, 201 bp, Homo sapiens
ttgagcagagactgagatgatgagctgtgcagaagattttgctgaagaatattccaggtagagggaacagtaagtataaaaaccctggagatgggatccawcaggaagtctgtggctgtaacataggaacagtgggggagaaaggagataaaatcagaggtaccagtagatgggggccttatcagtccctacccaatggtt

SEQ ID NO: 47773 - DNA, 201 bp, Homo sapiens
taaaactggcatatttttggtatgttttattgtttttagtgatattgtcttctagaaccttaactattttgcataaactgatacaagcagtgcattatttgtttgttctcaaaaaatacacctaattgtgttaatataagactaagaggactagtgcagtgctcctaaaatagcagtgtggagacctaacagcaattattt

SEQ ID NO: 47774 - DNA, 201 bp, Homo sapiens
taagtataaaaaccctggagatgggatccaacaggaagtctgtggctgtaacataggaacagtgggggagaaaggagataaaatcagaggtaccagtagawgggggccttatcagtccctacccaatggtttggattttattacaaggataactgaaaatgattggagtgttccaacaggttgtgacatgattggattgat

SEQ ID NO: 47775 - DNA, 201 bp, Homo sapiens
acaaatgcctggtagatgctcaggatttcttaaggagcagaagcctgtacccactcattacacattctggcttttgttattctcccccaagtctaacacaggtcagaaggagaataattactgcctgaggcaagtaattttctgaggcaagcagggacatttcaccaacatgtccttagtgctacttccacaggtatcaga

SEQ ID NO: 47776 - DNA, 201 bp, Homo sapiens
ctttatgttttaaggaaaaatattgaaaatgttatcctggagtgcctcaccttaggatgactctgctgccgtcctagctttccctttggagtctgaaggaygggtgtagtctccttaatgttctggctaggtcattgtctcattctgggagctgtcaagcactctcctgagccttgcagggtccagtagaataattccata

SEQ ID NO: 47777 - DNA, 201 bp, Homo sapiens
cataatttaagtcttcagattcctaagttactgatttttgcaaacaattctcttataaatgacatcaaatatataggtaattaagagtaagagagcgtgcttttttttttttttttttttttgcctgtttgcgttctgaacaaagaaatgtgggactcagtaaggtgagaaaaatgacatttgcctccctaaaggatcact

SEQ ID NO: 47778 - DNA, 201 bp, Homo sapiens
aattaaatatacattaaatgaaagcaaattttgaaatgtaatcatttctagagtaaaaaaaaaaaaaaaacccagaaaatttgagaaaaacattaccaaartaccttgttagctatttttcctcttcagtaattgtatcaattagaaaaaatatatttcttgaaaaaatgagctcctctaagttactttttttagttttct

SEQ ID NO: 47779 - DNA, 201 bp, Homo sapiens
ataatttaagtcttcagattcctaagttactgatttttgcaaacaattctcttataaatgacatcaaatatataggtaattaagagtaagagagcgtgcttttttttttttttttttttttgcctgtttgcgttctgaacaaagaaatgtgggactcagtaaggtgagaaaaatgacatttgcctccctaaaggatcacta

SEQ ID NO: 47780 - DNA, 201 bp, Homo sapiens
tttcttatgtaaaagaaactatatagatttttaacatctcatttgttctactaaaaataattaatatggaactctccaagtcacaatagaaaatgaaaggwtaactttactatatcatctaagtgaaagtagctaaatttctccttgctgtttatattttaactaataatcatgaatatatgagaatacttaatgttttct

SEQ ID NO: 47781 - DNA, 201 bp, Homo sapiens
aggtccgggccacagctgatttttagaggaggccccttgcacacaaaccaagtttgcttctggccaatagacctagaaattacaggctgatcttgctttactcctctatacgtgcttcagaaatgacttctttgcagaaactgtgttggcatggttaattaaaaagcattgttagaagagggcacaaggggagtgtcattc

SEQ ID NO: 47782 - DNA, 201 bp, Homo sapiens
aaacaacttgttcccctaccgaattcttatagtgcttatatttcctgttgttaaaatgccaattaattatctgctgcgctttcacagttttgtactaagaygttacctgtactgttattttatgtatttaaacttttttttcctagataaaatataagctaattgaaggcaggaacaatatatttgtattttttttttttt

SEQ ID NO: 47783 - DNA, 201 bp, Homo sapiens
ggtccgggccacagctgatttttagaggaggccccttgcacacaaaccaagtttgcttctggccaatagacctagaaattacaggctgatcttgctttactcctctatacgtgcttcagaaatgacttctttgcagaaactgtgttggcatggttaattaaaaagcattgttagaagagggcacaaggggagtgtcattcc

SEQ ID NO: 47784 - DNA, 201 bp, Homo sapiens
ctgcctgcttacaccctcaaaagctgacaagcatcatctgaatgctatgtgctatgagctcccgttgaattccatgttacaatcagactttaaaatgaggrctggttcccttggacaagagaatcatggtgtcctcaggtcactgacaattttagaatattgactcctgatgtcttttggcatcaccagtattttatttcc

SEQ ID NO: 47785 - DNA, 201 bp, Homo sapiens
gtccgggccacagctgatttttagaggaggccccttgcacacaaaccaagtttgcttctggccaatagacctagaaattacaggctgatcttgctttactcctctatacgtgcttcagaaatgacttctttgcagaaactgtgttggcatggttaattaaaaagcattgttagaagagggcacaaggggagtgtcattcca

SEQ ID NO: 47786 - DNA, 201 bp, Homo sapiens
aggggcatcagaaggagattccacatcaaagcaatcattaaatcctgccatttgtcttctttccatctctaccattactgccttggacttgacatttattrtcttctttctgaatgacatacaccggctactgactagtgactcatcaccctgtctttgatctttctcttcttcaacgttttctatataatccccagtgat

SEQ ID NO: 47787 - DNA, 201 bp, Homo sapiens
tgggaacattcagtttgtggaaattatgtgatgtatatttctggatatttcaacaaaaagttaaacaaagcttacagaacaattaagaatccattgttacaaaaaaaaaaaaaaaaaaaaagcctattggtggccgggcatagtggctcacacctgtaatcctagcgcttcaggaggccaaggcaggtagatcatgagatc

SEQ ID NO: 47788 - DNA, 201 bp, Homo sapiens
acttccccaatttttctttatttgagaaagtctattactccttcacttttccttccccttccttccctccctccctccttccttccctccctccttccttygccccctcccttcctccctcccttcctccctcccttcctcctttcttccctcccttctttccttttttcttcctttcttcctttgttccttccttcttta

SEQ ID NO: 47789 - DNA, 201 bp, Homo sapiens
tctccaaccccaaactgtttctgtttgattttctctctttggaatgtcagttattcaaatatcgaatcttctgggccatttctctagttttaacaatgtgkttttttttttttccttgtttacttcttttttttttctttcattttctggaacaattccttgagtttttcttccaaccattttactaacattttaatttct

SEQ ID NO: 47790 - DNA, 201 bp, Homo sapiens
gttctttaacagcgttcttaaaaaggtgaaagggaggtaaaatattttgagatttgcaagtctggaaatatcttttcctactgtcacgtttattgaaaatktagaattctaggttagaaatgatttttccctcagaatttcaaaaacattgctctattgttttttagtttccagtttgctgctaggaagactgatgctata

SEQ ID NO: 47791 - DNA, 201 bp, Homo sapiens
gaattctgtacttgccagagacatctagtcaaacttagttctgtaaacagtcttagatgatataacttagttggaaataacatagctaatcacttgtaaawtttagctaagacttaggaggcagaaaaatttagtgattaaaaatggaattaggttgctggatttgaatgccagtttcatgccacacagtctgtgactctt

SEQ ID NO: 47792 - DNA, 201 bp, Homo sapiens
gattatttaacttacaattttttgactttatgatggtgagaaagtgatagaaattcagtacacttcttgacttattatggtgtgatgtcccaattacaacyccattgtaaatacaggagcatctgtaccactttaagagtagtgcaagtacctgataataacaaaataattttaattctttcatcctgttccttgtattgt

SEQ ID NO: 47793 - DNA, 201 bp, Homo sapiens
aaatcctaattaaataatcattgatttccactcatctaagatgcttttctagataaccccttttcccacaataatttagaattgggccttctgcctacccygctccatgcactatgcacacacttcttccgtaaatcctcaatgctcttacttggttacagatattccttcccctattggagttaagtgttacgacaagca

SEQ ID NO: 47794 - DNA, 201 bp, Homo sapiens
tcattgatttccactcatctaagatgcttttctagataaccccttttcccacaataatttagaattgggccttctgcctaccccgctccatgcactatgcrcacacttcttccgtaaatcctcaatgctcttacttggttacagatattccttcccctattggagttaagtgttacgacaagcatcattgtcattgaatgc

SEQ ID NO: 47795 - DNA, 201 bp, Homo sapiens
tttcttgattaaatcctaattgtgctttctaggaggaacgctcttgtctgttgtctattattcttcctgtgttcaacttgtgaaagtttcttccttgtccrttatcttctttgacatatctgaagaagaaatgggggattgtgaccttcttgagagattcacagctttcacagcctgccttcttcttgtaaaaacttgggg

SEQ ID NO: 47796 - DNA, 201 bp, Homo sapiens
gacactatcactcgtctaaggctccttgcacattgatgggttataaaggtgataaccaagtatgatgcacaaagccagagccaccctttcaaaaagcagcygtgttacctacacaattgtgtgtgtgtgcgcactggttgttttttaaaaagccaattacaattacaattattaaaagaaaaacagaaaattacaattttc

SEQ ID NO: 47797 - DNA, 201 bp, Homo sapiens
ttctctctttttctgaatttaattgccaattagtaacatgaatcttcatttttttcagaaattctctttatattaatatatggatgttgcattgctattcmaggtaaaagtgtttaataatgatgactttagtgttacagaataattgtgctcttatgtctttcttatttcaaagacattaaaacacaattaatagtttcc

SEQ ID NO: 47798 - DNA, 201 bp, Homo sapiens
catgtttcctgcagagaaagcaagtaggtgccatctagtggcaacaaaggagatccacatttgtgttaactggaatgtatcgattagcagtgattgaaaaygtagttcctgatccagaagcttatgaactctatgacagaacagttgtgatagccataagtcttgaagggtgcattttccatggaatatatggcattgaaa

SEQ ID NO: 47799 - DNA, 201 bp, Homo sapiens
agccaagaatactatacctacaaaatctatacttcagaaatgaaggggaaataatgtctttcccagacaaacaaaaactgaggaaattcatcaccactagrccagcattacaaaaattattaaagaagtcctacacatggaagcaaaaggatgataattctaccgtcctaaaaacatgcaaaagtgtgaaactcactcata

SEQ ID NO: 47800 - DNA, 201 bp, Homo sapiens
ttcaggtgagatgtaaaagtaaacatccagttatgtcattcttttattttttcactcactccatgaacatttatcagacgcctgtgatgttagactctgtsctggagatactaaggtagaaaatacaaactttataccttcaaggagtttgcttgggatgactaaggggcaaaaacaattgttaagaagaaagatagtgat

SEQ ID NO: 47801 - DNA, 201 bp, Homo sapiens
tgggtttgcactcctgtgagaatctaatactgctgctgatctgacaggaggcagagctcaggtggtaattcaagtgatagagagcagctataaatatgtayggcctggttcttaacaggccaaggactggtactgcgttcgtggttcaggggttgggaacctctgccatagagtattgtgaggattaaacaagataatact

SEQ ID NO: 47802 - DNA, 201 bp, Homo sapiens
agtggaaaagacagacctagagaacatccaggatcgcctgtccagaacagacagtgtgcagtgagaagagagggaaacaaggttgaataaatgagtgagatggatgatggaggccttgaaacctaggcagaggacttttggtttctactgattagaaagatgtttctagtcaatagaagcaaaccaatgaaaaaatctaaa

SEQ ID NO: 47803 - DNA, 201 bp, Homo sapiens
taaatgtattatcttcagaaaaagcatttttacttgaaaataagtttgtgtttctgctacagcaagttcatctcacattgagttattgtccaagactgccrtggtaaatatagtctgctccacctagaactgaacttattttcatatggattggtcctcctcagaaatttagcatgtgtataaacatgtttctttagcttt

SEQ ID NO: 47804 - DNA, 201 bp, Homo sapiens
ctcacattgagttattgtccaagactgccgtggtaaatatagtctgctccacctagaactgaacttattttcatatggattggtcctcctcagaaatttascatgtgtataaacatgtttctttagctttcaaatgtgaatgagatccagtgctaagttgattttcatgaaatctatcttaagaagtagatgatgtgacta

SEQ ID NO: 47805 - DNA, 201 bp, Homo sapiens
gtagaaatatcagagtgtatttacacaaacctaggtggtagagcctgctatatacctaggctatatggtatatagcccattgcccctaggctataaacccrtacagcatgttactctactgaatactgtaggcagttgtaacacaatggtatttgtgtatctaaacgtgcctaacaaagaaaaactacagtaaaaatacag

SEQ ID NO: 47806 - DNA, 201 bp, Homo sapiens
ccctattctggacatgtcatatgaatagaatcatttaatatgtggtcttttgtaataggcttttcttgcttggcataatcttttcaaggttcatccatgtygtagcatgtattagaacttcatttctttttatggcctaataatattccattgtctggatagatcacattttgtttgtccattcgttaactgaggagcatt

SEQ ID NO: 47807 - DNA, 201 bp, Homo sapiens
gggtttctccatgttgatcaggcttgtcttgaactcccaacctcaggtgatctgccggcctcggcctcccaaagtgctgggattacaggcgtgagccaccrcagctggctgagatttctctgtttttaaggaaaaaaattttaaaaatatattggttctggatttttttttaaattttattttcttccaattctattccat

SEQ ID NO: 47808 - DNA, 201 bp, Homo sapiens
caaggttcatccatgtcgtagcatgtattagaacttcatttctttttatggcctaataatattccattgtctggatagatcacattttgtttgtccattcrttaactgaggagcatttgagttgtttccaccctttggttattatgaatgatgttgctataaacattcatgtacatgtttctgtgtggacatgtgttttca

SEQ ID NO: 47809 - DNA, 201 bp, Homo sapiens
aattcaggtggtgtctacagctttgagactagttgaattgagattacttaggagatgagtgtaggtagaaaagagaagagggccagagacagagccccggrgcactccagtattttagcagtggtgaataggagggaaaatagcagaggtgatgaagaagcggtagagaatcaagtgactgtggcattccagaggacaaga

SEQ ID NO: 47810 - DNA, 201 bp, Homo sapiens
ttacctccacctggtctctcccttgacatgtggggattgtgaagattatggggattacaattcaagatgagatttgggtggggacacaaagcctaaacatrtcaatagccattctgactggtatgagatgatatcttattgtagttttgatccgtatttctctgatgattaatgatgttgagcattgttttcttatgtttg

SEQ ID NO: 47811 - DNA, 201 bp, Homo sapiens
tgccagccacttaccaacccattagcctgcaaaaagatacttatcactttgaagattccaaggactttagtagttgtgtgctggggaatagggaagaagaytaaaaatgcgtaccgcaatatgacaatccagatgaagcttcatggaggactgcaaatgataccattcagtccctgatttctctttcgtcctaccttggtt

SEQ ID NO: 47812 - DNA, 201 bp, Homo sapiens
gtggtgtttttgttttcaaggctactgtagagatgagagggggatgggcatagggcaagttcaaacaccatacggcttgttgttcttactgaaatccaggttttttttttttttttttttttttgagatggagtttttgctcttgctgcccaggctggagtgcaatggcacagtctcggctcactgcaacctctgcctcct

SEQ ID NO: 47813 - DNA, 201 bp, Homo sapiens
atgatggtttccagcttcatccattctgcccttgtgatagttttctgagaatgatggtttccagctttatctatgtgcctgcaaaggacatgaactcatcrttttatatggctgcatagtattccatcgtgtatatgtgccacattttcttaatccagtctatcattgatggacatttgggttggttccaagtctttgcta

SEQ ID NO: 47814 - DNA, 201 bp, Homo sapiens
gttgcatctgcccaaggctcctttttggttgtcatttcatattcttcttttgacaatctcttccacacggtggcttcaattacaacctgaacattacaackctcacatgtatagttcctgggctaaactccagactcatttttaactgactgtttgaaactctacttggatatttcaaatgtatttcaagctcagcatgtc

SEQ ID NO: 47815 - DNA, 201 bp, Homo sapiens
acgtctcaggtttccagattcttatgaagtcaccaagatggggaaccctgaagggaagatcaaatacttgattttggacatgttgagcttgagatatcatygacacatccaagaggagaagtcaatcaactggtcaaatatgcatgccacagcaaagataaatcttgtttggagacaacatcttacagctataggtatttg

SEQ ID NO: 47816 - DNA, 201 bp, Homo sapiens
acaactttcaggaatttgtcatgatgactgttctcatactgctagtaaagacatactggagattgggtaatttataaaagaaagaggcttaactgacttayagttccacatggctgaagaggcctcacactcatggtggaaggtgaatgaggagaaaagtcacatcttatatggcggcaggcaagagaacatgtgcagggg

SEQ ID NO: 47817 - DNA, 201 bp, Homo sapiens
caacaagaagagctaactatcctaaatatatatgcacccaatacaggagcatccagaattcataaagcaagttcctagagacctacaaagagacttggacwtccacataataatagtgggatactttaacaccctactgccaatattaggtcaacgagacagaaaattaacaaggatattcaagacttgaattcagctctg

SEQ ID NO: 47818 - DNA, 201 bp, Homo sapiens
caccatgcctagctaatgaaaaaaagattttttttttttaagagggagtcttgctatattgcccatgctggtcttgacctcctggcctcaagtgatcctcrtgtcttggcctcccaaagcagtaggattataggcatgagctactgcacctggccattgttttgctttttaaaaaactttcaagaaatgattgggttgact

SEQ ID NO: 47819 - DNA, 201 bp, Homo sapiens
atcctttattccaattatttcatgtaacttatttgtgtgcatttttcagtggaatgagaaccaagggtttaatttaaaagttctaacaataaggctgtagtttttttttttccttttacataatgattttaatgtagtcctttgaaaatgtaaatgtgaaactgccaagcatcttttcaccccttcatgatcttcccatct

SEQ ID NO: 47820 - DNA, 201 bp, Homo sapiens
aattatctaagggaaacttctaaatattttaagtttatcccaatttagataatttatacactagttgacctgttccattaattgagttttcttcatactarggacaacctttggttcttcttttttctcctcctccttctccccctcttcttcttctactgtttttttttttgagttggggtcttggtctgtcacccaggc

SEQ ID NO: 47821 - DNA, 201 bp, Homo sapiens
agtctgtgtatttttaaaattaccttcttcatttacttaaatgaattcaggttgttttgctgtggtatatccaggcacttgcttatttaaacattttcctrattaaggatcatttatcttttcactgtttcaccgagagtcattagtgctgccatcagttcaaacgctgctttgctctgcactatattaaatcatcagcac

SEQ ID NO: 47822 - DNA, 201 bp, Homo sapiens
ggcatcagacatggtaaccctagggtggtcaaaagtggctgggctacactgcagttcttctagtcatttgtttcaaagcccaaagcaagcatgcctcctgwttatactaatggcacatgtaaccctttttgtcctgaggctgagtacttggcacaaacacaagctggtcattttaaccaagagtacaatgtagtctggaga

SEQ ID NO: 47823 - DNA, 201 bp, Homo sapiens
aatatgaatacatttgccatcatagtgatcacatcatatataggtactacagatatatacaagttttttgaattccaggaacaaatgtgcactgccaattygattatctctagctataggtatcaagttaggattagacctggatcccctgaagacaagtaatccaacgtgggttttaatctgtttttgaattctaagtat

SEQ ID NO: 47824 - DNA, 201 bp, Homo sapiens
ttgaattccaggaacaaatgtgcactgccaatttgattatctctagctataggtatcaagttaggattagacctggatcccctgaagacaagtaatccaaygtgggttttaatctgtttttgaattctaagtatctagcgcaagcaaggtgcctagaacatagtatacaataaaaagtgtttgcagaattaattatatgaa

SEQ ID NO: 47825 - DNA, 201 bp, Homo sapiens
aaacccgaagattatcaaggggtttcttggtaaaagattatcaagaaggggtttctactatgttgtaagaggtgaaacttggcatacattttaagacgaamatggtccttttgcatttgaattttcaaaggtgcaaataattataagtcagggatggtgaaaatagtagtagtctttggatatatacattagcttttttct

SEQ ID NO: 47826 - DNA, 201 bp, Homo sapiens
acttggttgttaaccctgtgtcagttgctgtttttttttttaactttgtaatgatgaaatgcagtttccattctcctgaccaccttaaggtagtaccaatygtgggtaaaataatatagaagagatataatataaaaggggaaataatttagaaggacaatgctgtcccccccttttgaagatgacatggatttagagcaa

SEQ ID NO: 47827 - DNA, 201 bp, Homo sapiens
gttgctgactcaataagttgtgggtcggtgctcttctctgggcaaatcccatctgcattgtctggtaggcaagacttggcaggttcttcttttattgttasgtactattattcctgttgtttatattacagaaggaaatcttcagaaaagcactatccatatagcatttaaaaaccagcaagtattctttactttggggaa

SEQ ID NO: 47828 - DNA, 201 bp, Homo sapiens
ccaatcgtgggtaaaataatatagaagagatataatataaaaggggaaataatttagaaggacaatgctgtcccccccttttgaagatgacatggatttaragcaaagttttggttatttttgagaggtccagaatccaggcatctgcctcttttgatacaaaggctgctacttcttgcttcttcaagggacttctcaccc

SEQ ID NO: 47829 - DNA, 201 bp, Homo sapiens
ctcctcaccagcaatggaacaaagctggatggagaatgactttgacaagttgggagaagaaggcttcagatgatcaaacttctgcgagctaaaggaggaarttcgaacccatggcaaagaaattaaaaaccttaaaaaagattaggcaaatggataactagaataaccaatgcagagaagtccttaaaagacttgatggag

SEQ ID NO: 47830 - DNA, 201 bp, Homo sapiens
aattagctgggggtggtggcgcacacctgtgatcccagctactcgggaggctgaggcaggagaatcgcttgaattcaggagtcagaggttgcagtgagccragatcacgccactgcactccagcctgggtgacagagcgagactccgcctcaaagaaaaaaaaaaggaggttgtagaagactgtgttctatggtatacaga

SEQ ID NO: 47831 - DNA, 201 bp, Homo sapiens
tgtagagtgctggggcaagacttcccaagtaggaggactcctcactgaggaatatggagaacatgtgctgaattcctcggttcatgaaaagaatatcttgyattgaaaaacacaaaaagagaattagtgatggtatttacagtagggtaggtctagccccctgacagttaacacttgtgcttttaatatttcttcaaccta

SEQ ID NO: 47832 - DNA, 201 bp, Homo sapiens
aatatggagaacatgtgctgaattcctcggttcatgaaaagaatatcttgtattgaaaaacacaaaaagagaattagtgatggtatttacagtagggtagktctagccccctgacagttaacacttgtgcttttaatatttcttcaacctatggataattctgtttttgttagttttgttatccttccctttatagatggt

SEQ ID NO: 47833 - DNA, 201 bp, Homo sapiens
aggagaatacctattttccagaacttttgtggggtattaacagtacttaatatgtgttaatttacatactaacttaggtaacaagcgtgtgttaagaatawgtatataaaatgtgtttttggattcaaattttattttaaatgtgatagatagaaatatttttgctaagatatataattatcctccaaattatttttagga

SEQ ID NO: 47834 - DNA, 201 bp, Homo sapiens
aaaccacaagttttggcggaaacagataaagataagcacttattcttatttggcatagatagttccttccttctgcatcctactgctattttcattttatmgatggaatactttgaagcacgaaaaatcattatatcttgaaataatttttaaaataatccaataacaaactcagaactactgaagaataataaaggtaag

SEQ ID NO: 47835 - DNA, 201 bp, Homo sapiens
catggtgtatacgctacctgacttcaaactatactacaaggctacagtaaccaaaacagcatggtactggtaccaaaacagagatatagatcaatggaacmgaacagagccctcagaaataacgccgcatatctacaactgtctgatctttgacaaacctgagaaaaacaagcaatggggaaaggattccctatttaataa

SEQ ID NO: 47836 - DNA, 201 bp, Homo sapiens
aacttcactgtgaacaaaagttgtcttattatgcagatagcatctcccaggtaatctctggagctgccctaacaatagatgagaagtctgtctggacatgstgatgactcctagtctcttcattgggattcctagaaacggggggtcttaaaataattgcatttctttgataaagaagctttcttggtcatataaaggaaa

SEQ ID NO: 47837 - DNA, 201 bp, Homo sapiens
ttgtgaagtaattccactggcaacaaacttccccaatttttctttatttgagaaagtctattactccttcacttttccttccccttccttccctccctccytccttccttccctccctccttccttcgccccctcccttcctccctcccttcctccctcccttcctcctttcttccctcccttctttccttttttcttcct

SEQ ID NO: 47838 - DNA, 201 bp, Homo sapiens
cctttcttttttcttttcttttatttcatgagtactggtgcaccaggatctccttcacttttgaaagataattttgcagggtacagaattctaagttgatrttttatttctcagcactttaaatacttccaccttttcttttgtgcatggtttgtgaggaaaattctgacataattcttatatttgcaatcctttacttct

SEQ ID NO: 47839 - DNA, 201 bp, Homo sapiens
tttacttctttcaagatttttatttttgctttttttttttgtattttaaatatactatgcctagttatagcttttggggggcatttatcccacttgctgtyggagcttcctgaacctgtggtttgatatctgatgttaatttggggggaattctcagtcattatttctttaaatatctgttcctttctctctctcttcttc

SEQ ID NO: 47840 - DNA, 201 bp, Homo sapiens
gatgagtaatactctatctaaaatgaagtatgactgtagattactgagtctgatttttttcagacttggtaaggcttttcactttcaaaggaggaattccrcttgtattgtgtgaaaaagcagcattattacaataagtttgttgcttttcaaatgaacatgaaggaaaatactcatttagatatgtgttctgatgtgttt

SEQ ID NO: 47841 - DNA, 201 bp, Homo sapiens
aaaatactttacagacaagcaaatgctgagagattttgtcaccaccaggcctgccctaaaagagctcctgaaggaagcactaaacatggaaaggaacaacyggtaccagccgctgcaaaatcatgccaaaatgtaaagaccatcaagactgggaagaaactgcatcaactaacgagcaaaataaccagctatcatcataat

SEQ ID NO: 47842 - DNA, 201 bp, Homo sapiens
actgcaggtacaatttggtgccactgctgtcttgtgctaaggcaccagcagttttacccaccttttcttctgcaccatcagtgcaaacgtcaacatagtgraaaaggcaaataagaagttaatattattatgagatagtcttcctatgggccttttatctgggtaccctaaaaagatcttgctgacacccaggagctgttg

SEQ ID NO: 47843 - DNA, 201 bp, Homo sapiens
gataaagcacttagaacatggcatatactcaataatcattaacttaatttccattacaactctcctctgtacctgtgagacactgcaaatatgtcaactcrtatgttattaatgttacaatgcagcttttctttaagtggtgttattatatttttggtttatatgctactaggagttatgtgctattaggagtcccattga

SEQ ID NO: 47844 - DNA, 201 bp, Homo sapiens
ggctgagtgatgtcaggctaagctgttatttgatgtgaacatcagtttctaataactaaaaaatggtttgttgtgatatttaaatgaactatccataattytgtttcttttttcttcttttgaagaattttgattttcagttttaacatcaaggaaccaagggcaaaacttaacagcataatgttgggttttacagtgtgc

SEQ ID NO: 47845 - DNA, 201 bp, Homo sapiens
gaaatttaccatttagttataaaattagatgcagcattccatatctcatccaaatataataatctattgggaaatcatattcaggagtggcttctccatcraaggtataattcccttggaagattcacatgtattttatacagtttatccctaaaaatgtttaaagacaagtctgtgtaaaatgtgaagtacttgacttcc

SEQ ID NO: 47846 - DNA, 201 bp, Homo sapiens
attttcttgaaaatatctgataattcaatttataatttattcttaacactctctttaaaaaaaaaagaaagaaaacttaaagtataataataataaaattwaaaaaaaaaaaaagaaaagtaagggaccagatcaggggtagaacaaagctgcagacatatatttttcaaacctgctgtcaaggaaatcagaggcataaga

SEQ ID NO: 47847 - DNA, 201 bp, Homo sapiens
aaatagagaaaatgtaaggtatgatcctaatttcttaaagacctgacagtaagaaatggaagtatccattcatatatttaatttcagtgatgttagaaatyccatattctttgaagctaagtaagtggtatagataataagtacaaataagaaactggaggaaggagattcctccaagaactaatagcaagaaataaaatt

SEQ ID NO: 47848 - DNA, 201 bp, Homo sapiens
cttggaggcagtggaggaagggaccttagtagtgattgtggccaagggtcttttgcttggttcctgggggctccaccccagagagatgcaggtcagcaatygcttagtgcaatcagcccagggtggagggtctgtgctatgggaccaagccaggggttccctgtctggtgatgagcactggagggtgtgtgggacccatgt

SEQ ID NO: 47849 - DNA, 201 bp, Homo sapiens
atcaatggaatctttcttaataaaacaatgttctcactataattatagtccacaagcactatgagccacatagtggcatttaagatgctctcaccttcttyagcctccttacacctcactcttagagcatcactactatcccttaaaatatggaaaggtggagaaatctttctgagcttgggcacttccactaactcttat

SEQ ID NO: 47850 - DNA, 201 bp, Homo sapiens
tttgttaattttctaccttgttgatctgtctaatactgtcatgggagtgttgaagtctcttcctattatcatgtgggagtctatgtctctttgtaagtctytaagaacttcctttatgaatctgggtgctcctgtgttgggtgcatatatgtttaggatagtcttcttgttgaattgaatccttcaccattatgtaatgcc

SEQ ID NO: 47851 - DNA, 201 bp, Homo sapiens
tgtcatgaagaaagcagcagaaagtaaaagcttctaaattcttcaagaagtcagagattatttttgtattcctgaattgtatgtgtatatataaaatataygtatatatatacaaaagtgaattcaagaatgattttaaaaactgaaagataactgctgaaaaatatagaagccaaaaagccagcttatttgttaacaaaa

SEQ ID NO: 47852 - DNA, 201 bp, Homo sapiens
cttcagcctccttacacctcactcttagagcatcactactatcccttaaaatatggaaaggtggagaaatctttctgagcttgggcacttccactaactcttattttgctgctggtccctgtccctttgaggagcaacagcactaaaaagctactttcagagatccaaaaacaacatggttcgtggaaagccatgtattgg

SEQ ID NO: 47853 - DNA, 201 bp, Homo sapiens
tgaggaattgccacactgccttccacaatggttaaactagtgtacagtcccaccaacagtataaaagtgttcctatttctccacatgctctccagcacctrttgtttcctgactttttaatgattgccattctaactggtgtgagatggtatctcattgtggttttgatttgcatttctctgatggccagtgatgatgagc

SEQ ID NO: 47854 - DNA, 201 bp, Homo sapiens
tcttatggctccagcttccaattttgtatgaaagatttctaaatctacattttctgttgtggcttctgaatgctcattctgtgattccagttgccaccagrtatgtcctttgcatctacaaaatttactaaaaaataaactcattttttccataaaaaccgatttctctgcctcagtttatttgccccaatctatgaagtc

SEQ ID NO: 47855 - DNA, 201 bp, Homo sapiens
agagattctggtatgttgtgtctttgttctcattggtttcaaagaacatctttaattctgccttcatttcattatgtacctggtagtcattcaggagcagsttgttcagtttccatgtagttgagcggttttgagtgagtttcttaatcctgagttctagtttgactgcactgtggtctgagagacagtttgttataaagt

SEQ ID NO: 47856 - DNA, 201 bp, Homo sapiens
gactggaggcctcttttccattagagatgtgtttcctcatagacttttgtcttcacactttattttcttgtgcccactgcctcttattcgatcatttgttrtttctattctcaaactctctttcttcttctcctaattttgtttctgaaaatttagcctgtatcttacaatctactatataccaggcagtgctccactctc

SEQ ID NO: 47857 - DNA, 201 bp, Homo sapiens
tttattttcttgtgcccactgcctcttattcgatcatttgttgtttctattctcaaactctctttcttcttctcctaattttgtttctgaaaatttagcckgtatcttacaatctactatataccaggcagtgctccactctctccttacttttttaactacagcctatcaaccaaagtttattctatggttgacttcctc

SEQ ID NO: 47858 - DNA, 201 bp, Homo sapiens
atatagtgttatggatcagaatatctaaagagaaattaaaagaaatttctctttgaagtagaggtaaagagggttggagcgggagacttgcttctcatcayaccttcttcaaaactatgaactgttatcatgtgcatgcattattaatactttagttttaaaaattaaattaattatttcaacaaacttgccttgagttta

SEQ ID NO: 47859 - DNA, 201 bp, Homo sapiens
ttatagcattatatacagagaagacagtgactactattttccagctaagagagtgtacatctaggtgtgtatgagggtaatgggcctggtgaactgtaggrgagggaagaggaaagtcagtcaagggagccttcacagaggtgctggacctttttagaacgcaaaagactcaatctgagaggcgtcagagggagacagaca

SEQ ID NO: 47860 - DNA, 201 bp, Homo sapiens
acagattttaggggggatttcaggagtttagttttgaaatattaagaatgatatgcccattaaatacccaagtgatgaggttaagttgttaaaaacatcartaagtccagagttgggactcatacatatttggatctacatggcagatccaaaccagagatgcattaaaggagttgtcagaatatattggaattcaaagca

SEQ ID NO: 47861 - DNA, 201 bp, Homo sapiens
agctctggaccagtggtgaaatgacctgacttcttgtatttctaccattttttagtttgtgactttataaagaaattactttgttggggtgtagaaaacarttccccaaaatctagcttgttgacatgctgagtgctttgaaaatgaaaaggccttagaaataggcctcagaaccaaggttctgactttcctctgtctctc

SEQ ID NO: 47862 - DNA, 201 bp, Homo sapiens
aatgcatatgcaggggcaggaggtgggatatatgggaactctgtactttctggtcaatttctctgtgaacctaaagctgctctaaaaatggtctttttttwaaaaagtggtgaaaataattatattatctctatatagatattatatatattatctctatatagataacgtatatatatatataaaatcacagccaaaaaa

SEQ ID NO: 47863 - DNA, 201 bp, Homo sapiens
ccctactgtaaactatggactttgggtgataatgatgtatcaatataagttcatctattgtaacaaatgtcccactctggtgatgcatgttgatattgggktaatgcatatgcaggggcaggaggtgggatatatgggaactctgtactttctggtcaatttctctgtgaacctaaagctgctctaaaaatggtctttttt

SEQ ID NO: 47864 - DNA, 201 bp, Homo sapiens
taggagaacagagtttctgtaagcagtggtaatggtcactatcttagtcaatttgggctgctataacaaaatatcacagactgggtagcttaaacaacagrcatttatttctcacggttctggagattaagatgctagctgattcggttcctggtgaggcccctctttctggcatacagatagccatcttcattccatgac

SEQ ID NO: 47865 - DNA, 201 bp, Homo sapiens
ttgctaatgtatttgctcaggtttcactttctcttcttatgaaaccattagtttcatcctcatggtaacccattagttaacccatgaatccattaatccamgaatgtaatcatcaatttatgaagacagagctttcaagatccaatcaactcttagaggctcctttcactgctaccgcagtagggattaagtgtctaacac

SEQ ID NO: 47866 - DNA, 201 bp, Homo sapiens
gcctaattcaatattaccatatccctctgggtaaataactcatttagctatctttataatccactgagggatgtacaaaggtaagatgaaccccaaatcawtttggaattatgaacattcaaaacaaaataaaatgcaaagttttctatctccacttggtcttacatataataataggtgtcaggaagttccttcttatag

SEQ ID NO: 47867 - DNA, 201 bp, Homo sapiens
taaagagcttctgcacagcaaaagaaactagcatcagagtgaacaggcaacctacaaaatgggagaaaattttcgcaacctactcatctgacaaagggctmatatccagaatctacaatgaactcaaacaaatttacaagaaaaaaacaactccatcaaaaagtgggcaaaggacatgaacagacacttctcaaaagaaga

SEQ ID NO: 47868 - DNA, 201 bp, Homo sapiens
tatagttattttaacttttatggttacacaaaacaatgataaatcaactcacttttttccaatatattaagtgcactgtgtgtttccagctgtgtggcagrtataagggcatcagagaggaatatgagatagttttggcccatagaccagaaggggagtcaaagacttaaatggtacaatgtggtcaataaaatgataaag

SEQ ID NO: 47869 - DNA, 201 bp, Homo sapiens
gcatatgaaaaaagacgtaattttcattaaaactactagataaatgaaaggtgacaatgttaaaatcattacagatcataaccacttctgctggcctgtaygtgcatgagcatgtgtgtaatggctctttctcagtgtccttggaacaatgttctgctagatattctacttgtttctttacctttctctttttctctttct

SEQ ID NO: 47870 - DNA, 201 bp, Homo sapiens
atgtgggatttagtttcctcaccgttgtggtcattgtcctttttcatatactccagtttgtcagtaaagctgttaaagcatgacatccaatactgcatgcwatccctgtgggctcaacctagcacataactcagagggactactgccccttctgttgtggacattaacctgcaattaactcagtcttagatcacattaatt

SEQ ID NO: 47871 - DNA, 201 bp, Homo sapiens
tcagtcaaccatgagatcatgaggtaaacactgatattcttcagcatactgtgttactagatgattttgcccaattgtgcactaatgaaagtgttctgagygcatttatagtaggctaggcttggtaggttcagcatattaaacgcacttttgacttaaaatattttcaacttatgatggatttattaggacataacttca

SEQ ID NO: 47872 - DNA, 201 bp, Homo sapiens
aggaaactaaagaagaccgacatggctggatcatagtgagaatgtaggagtgtggtgccttgcgcagctggagagacagggaggggaagatcttgcaagayctgcagttttaattttattctaattgcaatggaagtctctcaagagttttaagacaaggaccatcatattctgatttacattttaaaatttctttgtgcg

SEQ ID NO: 47873 - DNA, 201 bp, Homo sapiens
aaactcctgagattataggtgtgagccaccacgccctaccaacaaaacttttttttttttgcccgacccccagcaacaaaacttttgattccttccttatratagtttctttttaaataacttggacaagaaatgtttgcacagaatctcactgataatgtactttaacttgaagagtatgaaataatcttgagtctacta

SEQ ID NO: 47874 - DNA, 201 bp, Homo sapiens
tacagtcttcacatgccaggaaacactattcttaaattttttttcagccatttaaaacaataaaaaccattcttagtttagagactgtacaaaaacagatrtcagattgggttggatttagctcagaggccatattttgccaacttttaaacaatgtatttatttatttatttatttatttatttatttatttatttattt

SEQ ID NO: 47875 - DNA, 201 bp, Homo sapiens
aggatcactttttgcatgcatgtgtgtgtttgtgtgtgtgtgtgtgtgtgtgtataatgcattttgtatttatacagtattatagtagtatataaactgtwtaatagtacttatacagtttaaccagtgagatggttaaatggttaacaagtaaaccacatagttaaccagtaaagatgtaaaatgacttcagacaaatat

SEQ ID NO: 47876 - DNA, 201 bp, Homo sapiens
gcaaacaatagtcctaggtgaatgttcagggtgctgtggtatttcttctccatgatgttttgcagagatccagaatcctttcatcttgtcacccttagggrcgtagggagttattatagttagattcagcaaagggaaggcaaagcagcatgcaggagcacatgtgggaagttatatggaccaactctaaaagtggcacat

SEQ ID NO: 47877 - DNA, 201 bp, Homo sapiens
attaaggcaagatataaaaattttttgagccagaaaaaccacaacagtttttcaggggaaaaaaaaaatcttgctgaaaacaattgttctattcataaggyttttggacaatttatgtttctgatagatttttaaaacacacttacagtaactatgtgacatatgcacacttcattgttatgttgaacctgcccctaaact

SEQ ID NO: 47878 - DNA, 201 bp, Homo sapiens
acttcctgtattgctgtagtcagttttttccaagtgaaaaagcaaaaacattttctgcatttccagcctgtactctgcacaataggggattcgcagattakcaagaccccattctccagagccttcatttttcatgagggaggccagacatgctcataattaatcattacttacaccagagaagggacagattaattttga

SEQ ID NO: 47879 - DNA, 201 bp, Homo sapiens
actctgcacaataggggattcgcagattagcaagaccccattctccagagccttcatttttcatgagggaggccagacatgctcataattaatcattactyacaccagagaagggacagattaattttgactagtgttgtggagcaagattgggaaagattaatggaggttgttactttcaagtttatcctttcctgtggg

SEQ ID NO: 47880 - DNA, 201 bp, Homo sapiens
cctttttcctccctatcctttcttctttttccttcttcctcctgatttcctcctccttctcagaagcggacacttgcctcgcccagtagctagttctcagyacctcctttctgcctcctccttcccctaaatggtggcagttggcctctccctctcctggtgcctgaagtgggagtgacgagaagggtcagaaaaaggttt

SEQ ID NO: 47881 - DNA, 201 bp, Homo sapiens
aaattagctaaaaggaaaaaaaaaaaaaacaaaaaacccctattgcaaatctatcctactttcaccttctcaagaaaaacatacacacatgcacacacatrtgcgcacacacacacacacacactgaaagaaagaaagaaagaaatgcaggggtagtttccctcactcttcactggtgtgttttcttgttttaatgaaatg

SEQ ID NO: 47882 - DNA, 201 bp, Homo sapiens
agagctttatgagctatttggcttcatgccagggacatctcaactttgaaattattttggtgggcatctcttttcagctgcttttctttacctcctcttcwccagtgcatcatcacagggtgctgaaggtcttttcagaaagcactgagaggaacatcttgattttttttttaaccacagtttagcaactgtgccatttac

SEQ ID NO: 47883 - DNA, 201 bp, Homo sapiens
gctaaaaggaaaaaaaaaaaaaacaaaaaacccctattgcaaatctatcctactttcaccttctcaagaaaaacatacacacatgcacacacatgtgcgcrcacacacacacacacactgaaagaaagaaagaaagaaatgcaggggtagtttccctcactcttcactggtgtgttttcttgttttaatgaaatggctaaa

SEQ ID NO: 47884 - DNA, 201 bp, Homo sapiens
aggatgtgaatggtataaaaaataagtgagattcaaaagatatatatgtgcatatttaaaggatatatgaatattgaatgtctggtaaaatacagaaaacyagagctgtatagaaaaatttaaatgtaaaaacctatctatttacaagtgaaaaaatacattccaaaatagatccaatggaaattagtatttaacttacag

SEQ ID NO: 47885 - DNA, 201 bp, Homo sapiens
cctgcttccagtctcactctccttaaataaattcagcctgcagttgccatactaatcttcctaaaccactgcttgagcacatcctttctggtgacctttcmagcccaccacatgtcatctcatctccttagcctaacccaagttctccacaatctgaccactcattttgcaattcagccatatactcttcttctcaatata

SEQ ID NO: 47886 - DNA, 201 bp, Homo sapiens
ggcgtgtgccaccatgcctggctaatttttgcatttttagtagagacggcatttcaccacattggccaggctggtctcgaactcctgacctcaagtgatcygcccacctcagcttcccaaagtgctgggattacaggcatgagccactgcacctggccttttttgtgagattttaacagaaaagaaaaaagctataaggaa

SEQ ID NO: 47887 - DNA, 201 bp, Homo sapiens
cttagtgcttcttacataaattgatgagagatagagctgtgatgtgtagaaggtacagaaaacctggttatagatgaaaagaatgcccaggaagctatatkagttcaagtttacatttccatagcacatttaaaaaaataataattttcaatctgtattgccctgtgaaatcataaaaaggttaataaatagaatttttca

SEQ ID NO: 47888 - DNA, 201 bp, Homo sapiens
cctgtgagacactgcaaatatgtcaactcgtatgttattaatgttacaatgcagcttttctttaagtggtgttattatatttttggtttatatgctactargagttatgtgctattaggagtcccattgagttggttttgcttccagaattaaactgacctggaattttggtattaggtctgtctccattgattttttttt

SEQ ID NO: 47889 - DNA, 201 bp, Homo sapiens
gtaaagtgaaaacaattttcgttaaagaaagtgttgaaggacccaaggtaatagaacattttaagagtgaaattaataatattgatgcacagttaataaarcatgttggaattgttcctgtgacatctgtctcaaatgaaaggcttttaagaacgtccacatcgctagtcttcaagtgagtctcagatcattgtttataca

SEQ ID NO: 47890 - DNA, 201 bp, Homo sapiens
ggtgatccgggcttgggtgtttgtactgaatttgaggaaaagctgatgaattcaagagatattaagtaggaagaatccaaaaaatctgtgataaattggakgtcggagagagggctggaggttgtcttcaatgcatcaagatttatgatttaggtacaagtaagatggtgctgctcttcacagagaaaggagcatagtgaa

SEQ ID NO: 47891 - DNA, 201 bp, Homo sapiens
attatatatatgtatatattttataataatatatatgatccagatacaaagtggtgcttgccattcagtgaaacagtggataaagaacagaaagcagttcrggaggaacaaacgaatggcactaggaaggaagacaacagagcactcgaatgttatcatgggccgtttctcagcctaacttcagcattatgagacacttat

SEQ ID NO: 47892 - DNA, 201 bp, Homo sapiens
agtcagggaaacctctctaaagagatgatattttggatgaggaaatgacaggaaggagccacacatgcagagatcagagggacaaacattccagaagaggwgcagcttatagagaggccctgaggtaggaagggacttggtgctcttgagctgcagaagggaggccattgcaagcagagcgactgagtaggtaggatggag

SEQ ID NO: 47893 - DNA, 201 bp, Homo sapiens
ttttaaaattaccttcttcatttacttaaatgaattcaggttgttttgctgtggtatatccaggcacttgcttatttaaacattttcctgattaaggatcrtttatcttttcactgtttcaccgagagtcattagtgctgccatcagttcaaacgctgctttgctctgcactatattaaatcatcagcacaggaaatagca

SEQ ID NO: 47894 - DNA, 201 bp, Homo sapiens
agcaattatttttgtatttccagacttgaattatttccacttccatagaataaaatttctgttcccctcttgagcatcactacttgaacaacttgcaggcytctgaaactcagcccactcaaaactcaccaaaactaaattggtttattttttgcctttgcctccatgccctgcaaacctattgctcttctgcatgttcta

SEQ ID NO: 47895 - DNA, 201 bp, Homo sapiens
aatgtccagtaggaaggtggataaaagtgtttaagtccagaagtgacagagaactctttcttccaaaggtattggagactcatggaaggatttccaatagrgaagggaactcaactgatttttatattagaaaggtctgtaatggaatagtttgaaggagacaaactagagatatgggaattggtgaggatgcttttgaaa

SEQ ID NO: 47896 - DNA, 201 bp, Homo sapiens
agagaaacattggttgcaggtagtatttagcagaaggaacagattcaaaatatattcagagggtagaattggaagggttataaagagttctcagggggttaagtcatcctcctaggcttatggctaagggcatgcactgacaaagggagtgcaggagaagggggagcaggtgtaaggggagatgagagcagaaggtgctga

SEQ ID NO: 47897 - DNA, 201 bp, Homo sapiens
ctcttaatttaaatcttttatttagactggacattttttgagtgttttaaaaacaaaagtaagttgaggcagatggtaatgcgtatttgcaaattcttttygtgaatgttggaaaattacagttgcatcaaaatacttacttgtagataaggctaatagaatatatttgagccttctttaaagaaagcattgcccacattc

SEQ ID NO: 47898 - DNA, 201 bp, Homo sapiens
tgctgctaaagtgcaggttacagaattcatagtttaaatctctttaatattgttattcttaaattttaatgtgcacaagatacactgggtgggcttcttawagatgcagactcctggacatcacccctgggaggtttgattcatgaagtctgaggtagggcccagagacctgctttatttacttatttatttatttgagac

SEQ ID NO: 47899 - DNA, 201 bp, Homo sapiens
actcttggacatgtttacccttacatttatagatttcttatttaagcatccttgcattcctaagatatacttgattatagcaattaatacttttattgtaytgttgaagtaattccactaatttatgttatttgcatttcattgtctctgtatacatttattattgtcaagttattgaatcaaagctatactagtcagcat

SEQ ID NO: 47900 - DNA, 201 bp, Homo sapiens
tattactgcattttgcatattcatgctcagattaacaaaagtaatatagattaggttgcataaatatgtaattaaataattataagtgcttatattttgtmaatattatttgctaatggtagaactcttatattagaagtggttttttccatccagtggatcaggagatttctatcttttttcccccctaatttccaaatt

SEQ ID NO: 47901 - DNA, 201 bp, Homo sapiens
  misc_feature (101)..(101): n is a, c, g, or t
ttgatgtcgttgcatttttaaagattataataaaatgaggcaaaaaatgtttaaattgtcatttaaaaatttcttatccccagaaagacatccataaaccncaaggtgagaaaacaatactttagacagttatgtaaagcctgttctgtgttttgcctgtttatacctaaagactacatagcaagcaaatctgtgagttgc

SEQ ID NO: 47902 - DNA, 201 bp, Homo sapiens
ggaaaaaatcctagctggtagtaatgcctgggtctttaaatttttcattaagttccgtttcctaatatatatttttaggagtttcacatttctattcatgrgtgagattggtttaaagcgatatattgaaaagtttgttccttttaatactagccccaggagaagctcaagggggaaaaaaagattcaaaggtgaagtaag

SEQ ID NO: 47903 - DNA, 201 bp, Homo sapiens
gttttataggaggtcacgtgcacaggacctaaaggcagtggaaataataaatgataaaagtgtttgaattttgtatatttttcttatatatttaccttatstttggcattgtgttaagcaagctcttcacatatataatccatttttcattataataagcctcaagttgatattataatccccattttataggtaggttaa

SEQ ID NO: 47904 - DNA, 201 bp, Homo sapiens
cacatatataatccatttttcattataataagcctcaagttgatattataatccccattttataggtaggttaacagattcagaaaggttgcctcaggcartgtcacataagataataaatggcacaaaatggatttgagcaggtgttcatggtctttaatatatcctgaattttactcatcttacattagcaaatattta

SEQ ID NO: 47905 - DNA, 201 bp, Homo sapiens
taaccaaaccagttgtttcattaatgccattcagtggtgggcctagatcctacattgcttagtgtctcttcaaggtttttcctcctttgtctccataatgrtagttcttctagtgtgttctctgtttcttttgttccacttagaattcaggcttattgacttccagttgtctcaattgtaggtacaaaattgtggctctta

SEQ ID NO: 47906 - DNA, 201 bp, Homo sapiens
ctagtagtgtattggaaagagatggatatttctgttaatgatatagtataacaaatgagatttctcatgatcctaattttctagatttctaggactctaamcagccttaacgtttgtataagtaatcagaaatactttgcaaaaactcatattttgcagatcaggctcacttgggtagtgaaaagacaatctttagaggat

SEQ ID NO: 47907 - DNA, 201 bp, Homo sapiens
aacttgcaggcctctgaaactcagcccactcaaaactcaccaaaactaaattggtttattttttgcctttgcctccatgccctgcaaacctattgctcttytgcatgttctatctttgctaatggcctcagcagccacacgtttctcccaaactacacgtcctcagagtccctgtgggtgtatctttctccttctaaaaaa

SEQ ID NO: 47908 - DNA, 201 bp, Homo sapiens
tgagaaagaatgttatctttcagaatgttagagcaagccagggaataattataacaaatatcacatattttaaaaataaattaaaacaacttaaacaactrtattgtgtaagcttatataaactgcttaaacaatatataagctacttaaacaagagagttgactgaacattctaaattccaaatgagcaacgttcacata

SEQ ID NO: 47909 - DNA, 201 bp, Homo sapiens
ctttaaatgacaggcttattttgtttatttttgagaaaatatctgccaaaaactgaagttttagtaacgatagattgttagccagtttttcaagtaaaaayggaatcccatgaaaaacagcatctgcttcaccttacaactgctttgcttgagacaagcacttcaggatacagcagaagtgcttgtgtgtacttcttattt

SEQ ID NO: 47910 - DNA, 201 bp, Homo sapiens
gttatccagtagacattcagcaatgccaactgtacaaaagcttttagactctcagctagtgtgcacttctccagctaatgcagcacaatgatttatcctawaaaatgcttcaaggactttttcacttctagtttgaaaagccctaacaaacaatattgggcttacaaagaacatacctatgtctaaaatattttattcttt

SEQ ID NO: 47911 - DNA, 201 bp, Homo sapiens
tgtgattcagttgagatgaacaaatcagtattaactcctgagtcagtgaaatcaagcctagagccagatatggagccctagggccagaggttctccctaaygtctaatgtcttggcccctcctgggctgagaaaacttaagttcttaagaatcagctgtactcctgaccttaagtaaataagctaactgttttaatttagt

SEQ ID NO: 47912 - DNA, 201 bp, Homo sapiens
ttccccttattggtcttactccttgtggtctgaccatttttcctgaatgtctgccttttcttatctcattccactgttttactttgattttgcagcttctytccctcaattccttagtgaaaagtacattaggaattgttctttctaaaatcctattttgagctgattgttatcagaaaaacaagtccatttgtgaaaaat

SEQ ID NO: 47913 - DNA, 201 bp, Homo sapiens
tctttctaaaatcctattttgagctgattgttatcagaaaaacaagtccatttgtgaaaaatgtgcttcctttattgtaaaagaaagggctgggattggaytactgcttcttaacctttttatgatggcagcttaattgctgacaacatccagtgctgaactcacttccatgggtaactggtaagagatgtgggtcatgtt

SEQ ID NO: 47914 - DNA, 201 bp, Homo sapiens
ctattatgttctctgaaacctgtcttgtatttgaatacccatatggtcaaacagttcttggttatatcctactgaagctttcttcttttttttttttagtytttttttttcttctattctcttatagttagaaatcagcatgttttgacaattatatattaagaatctaggagttaagtaacagaaatttttctttatcat

SEQ ID NO: 47915 - DNA, 201 bp, Homo sapiens
gtaaaagaaagggctgggattggactactgcttcttaacctttttatgatggcagcttaattgctgacaacatccagtgctgaactcacttccatgggtamctggtaagagatgtgggtcatgtttcttcacaacatggcagctgtaatcttctttttcccttcaaattagaaagcatattgcattgcaagtgatataatg

SEQ ID NO: 47916 - DNA, 201 bp, Homo sapiens
ctccttccctcccgctctctctctctttctctccttctctctctccctccttctcctgtctgttgaatctgtcagcagcttgcaggctgctctagacttgracagtaattatagcaacttcctgaaagtgaagcccccatgaaaagtctggagaaatgttctttgtcatggcctctacatgagtaattagttccacatgtg

SEQ ID NO: 47917 - DNA, 201 bp, Homo sapiens
atctttcctccattcagcacgaaactttctctgagtattcctcttctctccagcccctattcgtcctgtttcttttttagaacatgaagttggaattgagsttattggtaaaaaaatgtgttaggttatttaataagattttgtttcttctccttaaattttcagtcagatgaattaaaccctaggtgtgcattcttaaaa

SEQ ID NO: 47918 - DNA, 201 bp, Homo sapiens
taaacttagtataatatattgacgtatctgttgcttttgcttgattatcagctttgagattttccttagagaatgcatgatttataagttcaaaaaaacawcattttgggtcaaatcatacacataagggctgctttccaaacatttggcagtaaattctgacctcctgattaatgtcaagtagtttacttaatatatgat

SEQ ID NO: 47919 - DNA, 201 bp, Homo sapiens
ttaattgcttcatcctatatttcctcattaaaaatattatacaaaggaaagagttttttttttttcagatataactctttcctaatttattctttcttttygttcttgggttttgttgagctcttgcaaaaactcttcaagttacagagaaagctatttctgtttaggccctaggtcattatcttaatatccaactaaaac

SEQ ID NO: 47920 - DNA, 201 bp, Homo sapiens
aaaaaaggaaggacagaaagaagaaagaaagaaagagagagagagagagaaagacagagaaagaaagaaaggaaaagaaagaaggataaaaagaaaaacasatgcataattctgaaatcacaactgtgatgagtgctacaaaggaaaggtaaatataatagaaaggggaaaaatgtatgacagaggagctggcctggtagg

SEQ ID NO: 47921 - DNA, 201 bp, Homo sapiens
tgcattgtcctcagagactgcctgaaaattcaaattctgggcctcattaggcacagagtcctaagattgtgtttctgtttttattcaaagagagaaaacaraagtagaaaaagttgaatacccaatcttttataccattgcaggaaggcttaaggaccccaatcgtcagttttcctgcaattggtgacttcaatatgagaa

SEQ ID NO: 47922 - DNA, 201 bp, Homo sapiens
tgtgatgagtgctacaaaggaaaggtaaatataatagaaaggggaaaaatgtatgacagaggagctggcctggtaggactgtcagggaagtgatgcctgaygaagtgatgactgagttgaaatcccaagatagagtaggaattaactgtgcaaagagagatggaaagacagctgcaggcagagagcagcatattcaaaagc

SEQ ID NO: 47923 - DNA, 201 bp, Homo sapiens
cctatctttattgatattagatactgacagtgaagaaaaatattcaataataaaaatttgtgcttcattttaaagtattttaaatgaataataataataawcatataaccctacatagcttattgtacatttgtttattagtatcttaatttcttcgcactgaaaacattaacagatacctctataatattctctaatatg

SEQ ID NO: 47924 - DNA, 201 bp, Homo sapiens
aatagaaaggggaaaaatgtatgacagaggagctggcctggtaggactgtcagggaagtgatgcctgatgaagtgatgactgagttgaaatcccaagatasagtaggaattaactgtgcaaagagagatggaaagacagctgcaggcagagagcagcatattcaaaagcattggaagtaagcgtggcacatctgacacacg

SEQ ID NO: 47925 - DNA, 201 bp, Homo sapiens
agttggtttttttttttcgtgtttctttctttctttctttcaagcagccagtgtaaggtaattcattctttcctgggacaaatatttattaaatctcccarttatgttgagcagggaaaggtaaagaaaacacacattccttgcccttaggagagtgactaatagacatggcaatgttaatgtactgtgccaaatgctctg

SEQ ID NO: 47926 - DNA, 201 bp, Homo sapiens
tcatagtctgatgttctcaccatttgaacattggataatgcacgtgacagggttaggaaactctaagtcagccctctccaactagaggactcctacccccmcagggtattcatgagttattttcccagacagttaattttacttgaagatttaattaggatttgtttgaaggtgagaagcaatgtttgaaatctttctcat

SEQ ID NO: 47927 - DNA, 201 bp, Homo sapiens
tgggaggctgaggcgggagaattgtttgaacccaggaggcggaggttgcagtgagctgagattgcaccattgcactccagcctgggcaatagagtgagacytgtctcaaaaaacaacaacaaaaaaaagagttaactgttcttcaagcctggtagatagttacacaaataaggccgcaaatgtttattgggcacctattgt

SEQ ID NO: 47928 - DNA, 201 bp, Homo sapiens
cactgttcctgagtaaattctttgtgttccagtttatgtgtgtatgttagaaagccctaattctttctgcagactctttacatggcccaggggacatattrttctttacccttttagcaccaatttttacaaacacagcatttctctcatttaaaaaaagcgtctgacaagccgctgagtagaagcgactgaacctttagg

SEQ ID NO: 47929 - DNA, 201 bp, Homo sapiens
ggtactttgtcaaaggagtatctgactcttaaggaggaaagtcacattggaacaggtagcacaaaagcagtttagagacatacatgcattgagtcttaatragacttatgaaggattcagataattttataccttaccttttctctctgactctccaaaaaagggattctttaaattacctccatgagattattgtgaagg

SEQ ID NO: 47930 - DNA, 201 bp, Homo sapiens
ctcactgttggttagtttcctctggaatagattccatgatccctaaaatatttgtatatctccttataaagtaatatgaaaataaaattaaacatttttcyaatttacctggatatagatatggctataatgtatataaatgtgggcgtgtgtaccagcgcataaactacaatcctgccttcattcagcagagctttataa

SEQ ID NO: 47931 - DNA, 201 bp, Homo sapiens
caagtcatggtttcataaattatacccattttaaattcactagacaagtttactatttaaaaaaatgtggaatgcatctgttggaaacatacatttaagaycctcccaaaaaatgactaattaacatatgaaaaaaagttttcatttcactggcaaccagaaattgtaaaataaaacagccatccagatatcatgattggg

SEQ ID NO: 47932 - DNA, 201 bp, Homo sapiens
ttcccccttctctatttattatttattactataccccaaaagtcatacacaacaaagatggaaatcctcaaagacacagaaaagtagagatgtcagtcaaygtttgcaagactcatagattgaactggattgaaaatctatcagtgaccagtgaatgctttgccctgattaagaaaaatgaggccaaacaagaagacaacc

SEQ ID NO: 47933 - DNA, 201 bp, Homo sapiens
gcctctatgtttcttcactacatcaacttgagaaacgtgggcactgtgacaaccagaaatccagagaggcaactttgaactataaggccaactcaaaaaaygaatccaagtaagaatttacaacggggaagtccaggtagaagatgcctgatggtaaatatttattcaagataaacatgtagagttccatctaataaatgc

SEQ ID NO: 47934 - DNA, 201 bp, Homo sapiens
tttataatttatctagatgaataccaaccttcttttctaaatgatgagcatatttaaggttatacattttcctacagcctttgctcctttggatatgaagygtttatatctttattgctttctaaataatttttacttttggtttcttctgtcatacaaggtttatctgggagtatgtttctcacatttttcttttatact

SEQ ID NO: 47935 - DNA, 201 bp, Homo sapiens
ctcacatttttcttttatacttttttattagaacttcatatgcctcagttgtatcttttctcattaattccacctgattgtacttttgatgtacatatttktgtctttctaaatctcagggaaagcttctttttaaaaaaatatgtcttttataattgtttttctccttctatcttccttttctttttttctggaactcct

SEQ ID NO: 47936 - DNA, 201 bp, Homo sapiens
tatttctaggggggtttcagggctgaccacatctctggggttatactaaaatgtaacagagtttcaggaatacaggattgaggacttgcaccaaaatgtcrtcctctctgctgttattttaactcacacatagacctctttatgccattgcatgctatacttgtcatcctatacctgtctgacacctaaaacaatgaacct

SEQ ID NO: 47937 - DNA, 201 bp, Homo sapiens
gcctggtgaactgtaggggagggaagaggaaagtcagtcaagggagccttcacagaggtgctggacctttttagaacgcaaaagactcaatctgagaggcrtcagagggagacagacacaaggtgaagatgtagaaaagttcttgatggagagcactcttccatgccctccttgtagctagagaaaaccaggctgtagctc

SEQ ID NO: 47938 - DNA, 201 bp, Homo sapiens
tgtgtgaaagagtgataccctgtctcagaaacaaaaacaaaaactttcaatgaatctcttatgagggaaaaactgtcctagaaaatcaaagttatccatckcccagtaaactggctggatttttatgtatccatagctctacatcaaaaagacaaagaaatattttctatttttaattagaatactcaattttaagcaaat

SEQ ID NO: 47939 - DNA, 201 bp, Homo sapiens
gggaaggaaattatttttaggtagttattcctaatttagaaagacttgatgaagtcagaataacctaataacagatgcctccgtctgtgtaaatttttagratgtctaagtagtgtgattttgctttcatgtcaataaaccattgagtctacaaatcagtcaattgctaccctaataatgaaacatttatgtgtcatgcat

SEQ ID NO: 47940 - DNA, 201 bp, Homo sapiens
gtaagtctaaaattatctcaaaaaagtttttttagaaagtggaaaataaaagatagaacaaaatgacaatctctttcaggggaaaaaaaggtgagagtaasagagtaaagatattttactttaaggaagtaaagatatttctgcatgtttaatatttatacgcatacacaaaatacagcttttatgataccacactgctca

SEQ ID NO: 47941 - DNA, 201 bp, Homo sapiens
tgagccccagcctaccttcccagcattataggttactattatcctgctccagatccctagccaaactgggctcctccctgacctccagcagggatttcccmttctacctcatgaaatctacagcaaccaacgctgcaaggaacatttaaattcttacttccttcaagaagtcttcccggatcacctccaactcaaggtaat

SEQ ID NO: 47942 - DNA, 201 bp, Homo sapiens
gagttgttaaactgtgtcttgataactcatattaccacagtaagattttttttaagtgcaatttcctgcaaagtggagattaattcctgacgctttgaggktttgggttcttcagataaaagactacaaagggaaaacatgaacataccatctccgggagtaattatactctttagcattcatggatgttatgctattttc

SEQ ID NO: 47943 - DNA, 201 bp, Homo sapiens
gggaaagcaagaaagcacacctgccatttcctcactatgggctatcatttctccttgtatgtgttaacacagagaataaaggagaatcctgtatattttarcaaaaggtttagtggtcatagcagggtgaatgctttaaatagggctgagtatgcaattgttctattatcgagacaattgcctgattgagaacagctctct

SEQ ID NO: 47944 - DNA, 201 bp, Homo sapiens
tatcttgctcagttatcatcaccatgcaattttttttataagacagaatccttccctatttctgcaatttgtttggaatgaaattccatattgaggggatwttcctccattgcagatacttttaagaagaagcctctctaccaattctccatcaacctgaatgagctgagtttgggtactctcagagcttgaatgggtcaa

SEQ ID NO: 47945 - DNA, 201 bp, Homo sapiens
tcatgaacaagattgacttactagaaagcatgtttgtaggcatgaacataggttaatattattccatttactggctgagtgatgtcaggctaagctgttawttgatgtgaacatcagtttctaataactaaaaaatggtttgttgtgatatttaaatgaactatccataattttgtttcttttttcttcttttgaagaatt

SEQ ID NO: 47946 - DNA, 201 bp, Homo sapiens
tttggggacatgtaacaataaaaatgctttctttctagttattatgatcatgttattgaataattcattatatatatttttaaatggaattgaatgctgtrtgataaaagtatatgaatagtttttgcattagaaggcagaagaaagtatgtgagttgaatataagaatgagttcctctgagtaaaaagttacatttcgga

SEQ ID NO: 47947 - DNA, 201 bp, Homo sapiens
tttctttctagttattatgatcatgttattgaataattcattatatatatttttaaatggaattgaatgctgtatgataaaagtatatgaatagtttttgyattagaaggcagaagaaagtatgtgagttgaatataagaatgagttcctctgagtaaaaagttacatttcggagaggtatgactgcacctacctatttac

SEQ ID NO: 47948 - DNA, 201 bp, Homo sapiens
ggttagctgtgcattttatccaaacttgttatttacttgtcattttccatttaaaacagttaggtagagtagctgtatactgtctacaactgctgtgcagraagacctcagtgccagcttctccttggtgtagagtgaagagatacaatcatgctttggaaaatgtgttgatatcaaccttagacagaagggttaggctga

SEQ ID NO: 47949 - DNA, 201 bp, Homo sapiens
tcaagtaatagcttgaccttggattagttgctttatctcaattttatttctgcaaagtagcgtgaggatccctatcctgctcacctcacaagttgtgaagytcattaggtttattgttgcaatgttttctaaatcttctcattaaatgatgttaaaacctactaagaactcaaacaatcccagacacactgatggagaatt

SEQ ID NO: 47950 - DNA, 201 bp, Homo sapiens
gtggaacatttttaatgacctcacattcctttacactgagcagagcgacatggtgcagtaatgcctgtttatctagcctagagagtttgagctggaatgargtttcatgtgtgagaacttttacaaaccatacagagatgtataggttataaggtgttataattaaaaacataaatattatttcagatctcaaatttaagt

SEQ ID NO: 47951 - DNA, 201 bp, Homo sapiens
ttccctgcctggggtgggtggtatcatccaccatgaggagagacttgggaatgcaggaggatcagcaggtttgggagtgaaagaaattgagaggttgtttyaagtgtgttgagttcaaggcagctaagaggaaataaacatccagtacagttgagcatatgggccactcactcttctgagagttataggctaaagcggaag

SEQ ID NO: 47952 - DNA, 201 bp, Homo sapiens
ttccctgcttctttggtagaagggctaatggactaactaagagagagaataagctaaaagtctggatagccacaactaaatacaccaccacaggagaatcyctcagcttctatggtaattttgaaactaagagaaaataagacagcatgagaaggcattatgctgctttaaatatgacttgggaatggtcttattttacaa

SEQ ID NO: 47953 - DNA, 201 bp, Homo sapiens
attgggagggtatacagagagaaataaagaaaaaataataatgaatggctgtgttctttggcacatgaatagcagtttccctttcgggacttcaagaatamaaaatgagaggctttaaatcttgctaacttgtgcaagaatgtgcgcgtgtgtatatgtgtgtgtgcgtaggtaaaaatgtaaatgaccactatggaaaga

SEQ ID NO: 47954 - DNA, 201 bp, Homo sapiens
tcttaatttcttcgcactgaaaacattaacagatacctctataatattctctaatatggtgtattctctaaatttgaaatttcctaatgtaatctttcttraaagtaggagatatatattccaagcttatcttttaccattgtcctcttacatgtaatgctatagccatattaaatgtggcctgtccctccctccttccct

SEQ ID NO: 47955 - DNA, 201 bp, Homo sapiens
ttgttcagtcacgatcttctaggtgactgaaaaacgcatggagttactcatgccaataattattgctactgaattgttccaaagtctcccttcctgcagaraaataagtttcagtaaaatattctagaggattacaagttatctttgcagttcataaatactttcataggctccattgatattcacagttttcagttagaa

SEQ ID NO: 47956 - DNA, 201 bp, Homo sapiens
ttctagtgtctttagtcttttgccttctggcttctttttaaacttcatatatacacatgtcttccctggcctaaaagaaacatctttgacccaaccctggwatcttgataaacaccgtgccattcccttcatttttctgccaaactttcacagtatgacttatactttctttcagccccctttccacattctgcacctcac

SEQ ID NO: 47957 - DNA, 201 bp, Homo sapiens
gcatggagttactcatgccaataattattgctactgaattgttccaaagtctcccttcctgcagaaaaataagtttcagtaaaatattctagaggattacragttatctttgcagttcataaatactttcataggctccattgatattcacagttttcagttagaatgttatttttattgcaaagtttgcatttatatttc

SEQ ID NO: 47958 - DNA, 201 bp, Homo sapiens
gttccaaagtctcccttcctgcagaaaaataagtttcagtaaaatattctagaggattacaagttatctttgcagttcataaatactttcataggctccaytgatattcacagttttcagttagaatgttatttttattgcaaagtttgcatttatatttcttttctgtggattgcttaccacttattaaaattaaaatgc

SEQ ID NO: 47959 - DNA, 201 bp, Homo sapiens
ttatattgccactatttgatggttttaaaaataactttctgctgtaatctatttgctaaatgctgttaaagccatctcactcttccttggtagacctcaamtgcttgcgtagttacttctctgaggcaatgtgattctataatagtgtggctgtcattgaatagcttgggaagctgtctgagtgcaggcggaattgattgt

SEQ ID NO: 47960 - DNA, 201 bp, Homo sapiens
gtagacgatgatgaaggcactgtagacatagtcattgtagacttgggaagtccagaaaaaagtgagaaagggactccttcagttgcatgatgaagttcttytgcgaaacagtaacttggagttctgtttaatttataaaatctttgttagttggttacaatttaaacttatgcctgtgttattaggtaggggttgggattt

SEQ ID NO: 47961 - DNA, 201 bp, Homo sapiens
ggtctacagctcccagcgtgagcaacgcagaagacgggtgatttctgcatttccatctgaggtagcaggttcatctcactagggagtgccagacagtgggygcaggtcagtgggtgcagcacgcggtgcacgagccgaagcagggcgaggcattgcctcactcaggaagtgcaaggggtcaaggagttccctttcctggtc

SEQ ID NO: 47962 - DNA, 201 bp, Homo sapiens
agtcaattgcaaaaaaaggtgtaatataaccagaaaagattctgtaaataataattaaaataattgatgaggtaagagaattatcttttatgaaaatagcraaagcattaggattcttcattatgaaaagatgagatgtgttttcaagtgttaatgtcattgaattatgtgactgtgattttcccccaaattgaaaactac

SEQ ID NO: 47963 - DNA, 201 bp, Homo sapiens
ttgtccgttgctcatcctcgccgctcattctgtctacctccttctttgatcttcctttctcagttaattacatcatctggaaatatggccttgtgaactawtcactttctccaggaacatttccattttaataataatcactaccagtcaccatgctaaatgctttgcatgcattatttcaaattcttaaaacaaccctct

SEQ ID NO: 47964 - DNA, 201 bp, Homo sapiens
aggaaataaacatgtatccgaagtccctgaatacacggtcatctgcatggtctcaaatctccataccctctctgaggcatgaattatcacctccatacagrgagaagagaaatcgaggaacttacagaaggttcacatagctagtgtcagagctcctatgtgaacctctatgttaactccaaaccatttgtcatttcctct

SEQ ID NO: 47965 - DNA, 201 bp, Homo sapiens
agtgctaatttctgtactcacaagatagatagaagtaaataggacagtgtcaaaaaaatttctgtaaatagtagttattgagtctttattctcttcattgyagagggaagctgagaaaaggggatgggggattatattccagacacaagaaatctccagtatggaggtttgggagcatcaaagaatgggactggagaacag

SEQ ID NO: 47966 - DNA, 201 bp, Homo sapiens
gcacttatgaagaatgcgccagtctattttccttaggtgtataaatagctatggttttttttctgcccaaagtcaatatttcaagtattttcttactttastaatgctgtcacaactcatcatttatagccccttcaaagggccattagtgtttcacaatatgtaatgcaggggtgcccaatcttttggtttccctggcca

SEQ ID NO: 47967 - DNA, 201 bp, Homo sapiens
atagaagtaaataggacagtgtcaaaaaaatttctgtaaatagtagttattgagtctttattctcttcattgcagagggaagctgagaaaaggggatgggrgattatattccagacacaagaaatctccagtatggaggtttgggagcatcaaagaatgggactggagaacagcacctggtgcctgttgagtaagaggtgc

SEQ ID NO: 47968 - DNA, 201 bp, Homo sapiens
ctaattcacagggactacattccaagactccgcatagatgcctaaaaccacagatagtactgaatcctatgcatactatgctttttttccatctgataacygagacagctactaaataactaacaggtggttagcaaagacagcatggatacgtcggacagagggatgattcatatcccaggtgggatgatgggagatttc

SEQ ID NO: 47969 - DNA, 201 bp, Homo sapiens
ttggcatttttaaccattgttggccttttaacctcttttagtaattctatctatcatttgtgctatgcacataaaaagatagtaagctaccattacaggtrgtgaatagctctggaaggggtttgagcaaggaaacaattttatgaggcttgtattttagagagattattctggtagaggtgtgaaggatggattggaagg

SEQ ID NO: 47970 - DNA, 201 bp, Homo sapiens
catattctttgaagctaagtaagtggtatagataataagtacaaataagaaactggaggaaggagattcctccaagaactaatagcaagaaataaaatttygtgaaggagatgggagctaaggtgcacttttggtaaacattttattataacaaatttcacacgatcaaatgttgaaagaattttacattgaatattagta

SEQ ID NO: 47971 - DNA, 201 bp, Homo sapiens
tctatacacattctttataatcccctctcatgttgtttcaggattggtctgtgtaactgtggtaggctaagtaatccctccaaccctcccaagggtgtccrtatttgaatccgtagaacctgtaaatatgttatcttatatggcagaagtgactttgcacacgtgatttgtgaataagttaaggattttgagatggagaga

SEQ ID NO: 47972 - DNA, 201 bp, Homo sapiens
ctttataatcccctctcatgttgtttcaggattggtctgtgtaactgtggtaggctaagtaatccctccaaccctcccaagggtgtccatatttgaatccstagaacctgtaaatatgttatcttatatggcagaagtgactttgcacacgtgatttgtgaataagttaaggattttgagatggagagattattttggatt

SEQ ID NO: 47973 - DNA, 201 bp, Homo sapiens
ctaactgtgtgttataaagcactttggctctgagtggacttatagccaacccaggggaaatgctaacagtgatgtggttttggtatccataagacaaacasaatctgagagaaatgtctccattggatcttcctaaaggtcatgcacatcctcagtattatcctgtggtaaatactatattttatagggtttttttccctt

SEQ ID NO: 47974 - DNA, 201 bp, Homo sapiens
ttcatcagagcaggtgttattacttttttatgtattaaaaaactaaggctctgagaggttaattagattttcgcccatggcgtacatagcagggattagaygactagaaccctaccattagtagataataagctcaggtggtgaaaatcaattagcttcagtaaagcctaattgtatctgtaaatatgttacaaatatcat

SEQ ID NO: 47975 - DNA, 201 bp, Homo sapiens
agtgtcccaaaatttgttctcttagagcagacattcacaagaagaagtaggggtcctgcatcacagctgccttccattttacctagaagtgtgctccaacmcgatttatctttgggcccattcacactcattgatctaccgcttgggacactgccctcagcaggtgctgtggaaagctgcaagaggcgtaggagtaatctt

SEQ ID NO: 47976 - DNA, 201 bp, Homo sapiens
actaaattttgagacagttatattttaaactttcaattataatttacaagtaaatcttgcaatgtaaaagaagctactgcatatcctttttatgcaaatarctacccttttaagcagatatcttctctaaaaatgtcagtctttgtatatctttttgaaggctttcttttaatttgggtccacctaactacttatgctgga

SEQ ID NO: 47977 - DNA, 201 bp, Homo sapiens
gtagtagttattcttctgataatgactaacaacaacgacaacaaacactgtagtccagtatcttggtctttataacataaggctaaaactgctttcacccrtgcttaagtctaattcctaaaggtatcaaagtgtttctacaagcatttcttcatccttcttaagatttccagcactttctctttttgtttttactttatc

SEQ ID NO: 47978 - DNA, 201 bp, Homo sapiens
ggcacccagcaacctgtgttttaacaaggcttccagggaactctgatgcaaggtccaatttgagaaccattgccaagagcatatcaatctaactgcccaayagaaaaaattctgcactgaaagtcatgagaccttagtgcaagcacaggaaaggaagaagactgaactacataggcccattctggcttaaaaatttaccag

SEQ ID NO: 47979 - DNA, 201 bp, Homo sapiens; identical to SEQ ID NO: 8351

SEQ ID NO: 47980 - DNA, 201 bp, Homo sapiens; identical to SEQ ID NO: 8353

SEQ ID NO: 47981 - DNA, 201 bp, Homo sapiens; identical to SEQ ID NO: 8355

SEQ ID NO: 47982 - DNA, 201 bp, Homo sapiens
aattagattttcgcccatggcgtacatagcagggattagacgactagaaccctaccattagtagataataagctcaggtggtgaaaatcaattagcttcartaaagcctaattgtatctgtaaatatgttacaaatatcataccgtgtctctgagttctgagtcaaatttgcagtgtttttgaagcagcattgccttctgt

SEQ ID NO: 47983 - DNA, 201 bp, Homo sapiens
tttcttatataattaagagcttactgctagaatacagtgtgatttaggtaaaacttctcaacatatagcatacttgagggaaaacagaagatcataaaaartttccttcttttattgcaggaatagcatatgatttatttgaagcctaattattttccagaggaatgctctacatgtttccaatagctgttttgtgtttct

SEQ ID NO: 47984 - DNA, 201 bp, Homo sapiens
tctgtagagggttagaggagaagctgccagtttcctcccaatactgatgttgcaaatctcagaactttaatctggaacactctcctctgttatgtatatgyatgaaaatttgccctacctattaccttactttggcatgtggcatttacttgtgaaaaatgtcacaatatctaatagtttatttcctactcatggatataa

SEQ ID NO: 47985 - DNA, 201 bp, Homo sapiens
ggggaacacagctcttccttagctgagctcataatctggactgtgaggcctacacatcagggcagaaagcttctagtttcacttttcatatagtaattttraaagcataagaggctttgcaaaacatcttttaaaataaagatgcttctccaccatctctaagataagttggttctttttggcaaaggtgattttaattgt

SEQ ID NO: 47986 - DNA, 201 bp, Homo sapiens
gggaaataattggactgtatccagatgtgcatgtgtaaaacatcaccacttaactcctcccccatatcctgtctgaagacagggttttttttttttttttygaaaataaactggggttatttgaaagaagttgtggtctctgactaaaactgaataagcaaggccaggctggccataattctgtgtgttcttgtatttttg

SEQ ID NO: 47987 - DNA, 201 bp, Homo sapiens
agatgaagtaataaaacacactttttccctcaaatgcaaatatttcctcaaaaacaagataaccaagtccagcaataaatccaactcatttcaataaaatkttctccacagacttgcttttctcctactctgtttaaggacaaaaataaagatgaaatgaattgcaatgaacctgctcagaggtactcactaaagtggagc

SEQ ID NO: 47988 - DNA, 201 bp, Homo sapiens
ataaagatgaaatgaattgcaatgaacctgctcagaggtactcactaaagtggagcatagagaggccttctgctctgcatgcccctccctctatctgcatwgtcctcagagactgcctgaaaattcaaattctgggcctcattaggcacagagtcctaagattgtgtttctgtttttattcaaagagagaaaacaaaagta

SEQ ID NO: 47989 - DNA, 201 bp, Homo sapiens
atcatgacaactgagtatagtttctatcaaaaaaaatttcttagttcctttaccaagaactggtaaaaaggcaactttttaactaaagggagctaggtacrgaaaggcactgtcctgtcccagacgccaaaagtttagtgggaagtgatggccatagagagggaaaggggatgagaagatcactggtttcagtattaatac

SEQ ID NO: 47990 - DNA, 201 bp, Homo sapiens
cataacaataatagcaaaatctatgttcttggctcagttacactcaagtaatagcttgaccttggattagttgctttatctcaattttatttctgcaaagkagcgtgaggatccctatcctgctcacctcacaagttgtgaagttcattaggtttattgttgcaatgttttctaaatcttctcattaaatgatgttaaaac

SEQ ID NO: 47991 - DNA, 201 bp, Homo sapiens
gggttgttcaaggcagaagtagcaacctcgggtaaggcactaaagtatgacaggtgaagaacagatgtggctgatgaaggagaggggcatgaagtgaattyagagagggaggaagtgtccagttcacacaaagctttctaggttgaggtaaagtctttatacttaacaatgggaagttacaggagggttttaagcagtaat

SEQ ID NO: 47992 - DNA, 201 bp, Homo sapiens
tgattttagaagaatagtatgcctgctggattgtaaagagccaagagagtgaggagaacagtaggccagaccaggggtggattcattttctgtggagtctraagcttctacaattttacaggcccccttgaagaagaatacaaaattataaacacacaggcccagggtcttggaagaggcttgtgcaagggggaaatgctg

SEQ ID NO: 47993 - DNA, 201 bp, Homo sapiens
accatgcctggctaatttgtttgtattgattgattaatttttattatgcttaaagttctagggtacatgtgcacaatgtgcaggtttgttacataggtatrcatgtgccatgttggtttgttgcacccatcaactcgtcatttacattaggtatttctcctaatgctatccctctcccagcccccgactcccccagcaggc

SEQ ID NO: 47994 - DNA, 201 bp, Homo sapiens
atagagagatgggtggctttggggttttggagataaagttgctagggcttcgattgaaatgggggaatggaagaaagggaagttttgagatgacttccaakgttttggctttcacagctgagggagtggtagtgcccatcagatgagggaaatggaggaaaacctctgtttgtatggagaagtgaattaggagttctgttt

SEQ ID NO: 47995 - DNA, 201 bp, Homo sapiens
aagtgaattaggagttctgttttggatgtgctaagcgtaaaatgcccaataggcagttgagtagttttagggaccatgctacttgtctcaaacagagaggygagtgcttatgtcttcgtgtgggaggcaaatgggtaaatagataatttcattaaaaatgtgctaagtaaagtgataaacttcagcaaagggtactatgga

SEQ ID NO: 47996 - DNA, 201 bp, Homo sapiens
tgctacttgtctcaaacagagaggtgagtgcttatgtcttcgtgtgggaggcaaatgggtaaatagataatttcattaaaaatgtgctaagtaaagtgatraacttcagcaaagggtactatggaaacacagcccacagacatgaatcccagctcaagtgtgtaagggagccaggcttctgagctgagtttggaaggatga

SEQ ID NO: 47997 - DNA, 201 bp, Homo sapiens
acagcccacagacatgaatcccagctcaagtgtgtaagggagccaggcttctgagctgagtttggaaggatgagcagctagttaagcaggaagaggtaggytacaggagggggtgatccagacaggagaggaatgagctatgaagccatcagttatgggtagagacctagaacaattcgtcattctagggcataagctgtg

SEQ ID NO: 47998 - DNA, 201 bp, Homo sapiens
gacaaacacaatctgagagaaatgtctccattggatcttcctaaaggtcatgcacatcctcagtattatcctgtggtaaatactatattttatagggtttytttcccttaatgtgcccaatgaatatacagtcatacattgcttaacgatataattatattctaaaagttgtgttatcaggcgctttctttgttgtccaaa

SEQ ID NO: 47999 - DNA, 201 bp, Homo sapiens
ttgacacgcccttcaaaataatcagatgaaaacaaggaacacaaatatgtccagccctgaactcttcatttttcctcttgatgaatcctttcttatgcttyaaaacacttgagtttacacacacacacacacacacacacacacacacacacatatttctggtaggcgtggagatatatatctatatatatcttgctatta

SEQ ID NO: 48000 - DNA, 201 bp, Homo sapiens
tttcatccatgtccctacaaaggacatgaactcatcattttttatggctgcatagtattccatggtgtatatgtgccacattttcttaatccagtctatcrttgttggacatttgggttggttccaagtctttgctatcgtgaataatgccgcaataaacatacgtgtgcatgtgacaaaattgacaaatgggatctaatt

SEQ ID NO: 48001 - DNA, 201 bp, Homo sapiens
attatctgtcttgtttcaggcttttatttcaaagaataagtttatattttggttacttatgttaaggatggaattaaagtgagttgtgtgctgcagcttcsttttagccagtgtggtggtgattttgtgaatttgtgatagcgtggggcccccaggctgaagccagtagtgagacagcaagtgttcaggtatttcagtcag

SEQ ID NO: 48002 - DNA, 201 bp, Homo sapiens
tctcctgcatgataaaactcatttgcaaggcagaaaggcaaaaatgtgagaagcaagaaaccaatttattgttaatcaataattacaataaaaatgggaayaaggagaaatgtgattttaactcacttcctgggaagacattccagagtttgggggatgacagaacatcttttgggtgcttagggaccaaaagggagtgag

SEQ ID NO: 48003 - DNA, 201 bp, Homo sapiens
agtggccagggacaaaagacagccattgttaatttcaggacatctgtactgctactgcacagcaggtgaaactctcatttatgcattcttctgtgccctcmaatttaccatattcagcaaaagaatgaagaattatacatttcaaatgaatggctagatttatgtccagaaggcatccttatgcatagcactccatatcta

SEQ ID NO: 48004 - DNA, 201 bp, Homo sapiens
ttgtcagattcaccaaagttgaaatgaaggaaaaagtgttaagggcagccagagagaaaggtcgggttacccacaaagggaagcccatcagactaacggcrgatctctcggcagaaactctacaagccagaagagagtgggagccaatattcaacattcttaaagaaaagaattttcaacccagaatttcatatccagcca

SEQ ID NO: 48005 - DNA, 201 bp, Homo sapiens
aatgctgtcccccccttttgaagatgacatggatttagagcaaagttttggttatttttgagaggtccagaatccaggcatctgcctcttttgatacaaargctgctacttcttgcttcttcaagggacttctcaccctctattgatggtcagccccctctcactgaaggaatcagaatcaattggtgatagaaagttttg

SEQ ID NO: 48006 - DNA, 201 bp, Homo sapiens
ctatccttcagggtctaatggctagttcagagaggttgacattataaggaaagagctcccacactaaaagaaaagattttgaagatttaataatgaggacycttctgcagaaggggtacagcaataggatggaattcagtgcagctgaagtttttgactaaaaatcaaacctcttatgttaatgtgcagttacaaaaaccc

SEQ ID NO: 48007 - DNA, 201 bp, Homo sapiens
cagatgcatggaggtggggttgcgtggcacttgtgcctcctcattttaaggttcttctccatcttgtccctcaaagatggtttgcattgttacaaatgttragaaaatcactttttctcctttcctatttttcttctttctacagaagaaaattcagatcatatgagatttcatgtttctctgaatatcctgttgctcttc

SEQ ID NO: 48008 - DNA, 201 bp, Homo sapiens
ctgggaatccaggtttgcaccaccttgcctggattttcaacaaatgggactggctctctaaccaggaattgaacctgggctgtcatgacgaaagcaccaamtcctaaccactagaccacagggtggagatttcttcttttttaaaaatctgcccctcttgtcactgtttctttttattgctaaataatattccattgtctg

SEQ ID NO: 48009 - DNA, 201 bp, Homo sapiens
tgttagtagaagcatatctaagtatttatgtatttatttttggggtgctaacgtagatgactatattagcccatttttgtgtcactataaagaaatacctsaggctgggtaacttactaagaaaagagatttaatcaattcacagttctgcaggctgtacaagtgtggctccagcatctgcttctggtgagggtctcagga

SEQ ID NO: 48010 - DNA, 201 bp, Homo sapiens
gctgggtaacttactaagaaaagagatttaatcaattcacagttctgcaggctgtacaagtgtggctccagcatctgcttctggtgagggtctcaggaagyttaccaccatggcagaaggtgaaaggggagcaggtgctgtgacatgttgagagagggagcaagaaagagagaagggggaggtccaagactcctttaaaca

SEQ ID NO: 48011 - DNA, 201 bp, Homo sapiens
ccaagactcctttaaacaaccagaactcacatggactaactgagcaagaacttatttatcaccaaaaggatagtgctaacccattcatgagggttccatcmccataatcaaatgacctcccattaggccccacctccaacattgggaatcacatttctttttttttttttttttcactttaagttctagggtacatgtgca

SEQ ID NO: 48012 - DNA, 201 bp, Homo sapiens
tttcaaaatgagatttggagagaagaaacatccaaaccatatcaatgatgttgtatttttaatttcaaatcaaattattcattgctggtatataggaaggygattgacttttgtatattaatcttgaatcttataaccttgctttaattacttgttagttctcaaagactttgggacaattgttcagaatttctacataca

SEQ ID NO: 48013 - DNA, 201 bp, Homo sapiens
tttgtatattaatcttgaatcttataaccttgctttaattacttgttagttctcaaagactttgggacaattgttcagaatttctacatacacaattatgkcaccttcaaacaaagacagttttatttttcctttctgatctgtatttctcttatttccttttcttgacttatggcatcagctagaatttccaatatgata

SEQ ID NO: 48014 - DNA, 201 bp, Homo sapiens
attaatcttgaatcttataaccttgctttaattacttgttagttctcaaagactttgggacaattgttcagaatttctacatacacaattatggcaccttmaaacaaagacagttttatttttcctttctgatctgtatttctcttatttccttttcttgacttatggcatcagctagaatttccaatatgatattgaatg

SEQ ID NO: 48015 - DNA, 201 bp, Homo sapiens
aggctaaagaggcaagatgtgctaaagaggcaagattccaaaagatctcaaatggtaaaaatcaaaagtttgcaatggacatcgtcagaaatattgggctrgagagggagatcaggaagggatcagtacatgttgtcgagaaataagtgacatgatgtgcaattatgtatgtgctcaccactctatactcaacgcccagag

SEQ ID NO: 48016 - DNA, 201 bp, Homo sapiens
tggggaaatgcatttcttcccagatactttctcactgttgtctctggggcactggaggataagacaggaacattagagctttatgagctatttggcttcawgccagggacatctcaactttgaaattattttggtgggcatctcttttcagctgcttttctttacctcctcttcaccagtgcatcatcacagggtgctgaa

SEQ ID NO: 48017 - DNA, 201 bp, Homo sapiens
aaacattactcccaaaagttaggtgctgtttcttcaaactcttgggagaaaaagtttaagtacaagaagattataaaatttataaaatgagaacaacaaawcacttgggaaaattagaagctatggaaattgttctgatgcctgcaatgcccagattgtggttggatatgatataaaggatttacctgtaaaagtttcctc

SEQ ID NO: 48018 - DNA, 201 bp, Homo sapiens
aagagcaggaagcctggagggtgctggaaaagtgacatttaatgtggaaaaagaaagtaaggaggagatccgaagcccttaggagagtgctactcaagacrctgtgtgcgccagggcatgagggcagccagagggcggtgtgggcacattggatcctggttacctctttcacagcctcacctacaagacctgaataatgta

SEQ ID NO: 48019 - DNA, 201 bp, Homo sapiens
accactccactccactgagactgcttttgtccaggacaaaacagttaatccaatggacaattctgagcctttcatttgacaccaccgttaatcactccttsttgaagagatctgttcctttgcttcaataaccttccactctctcctggttttcctcttttcactctagccacttctcagtctttaggagctcttcatctt

SEQ ID NO: 48020 - DNA, 201 bp, Homo sapiens
gccagacatgctcataattaatcattacttacaccagagaagggacagattaattttgactagtgttgtggagcaagattgggaaagattaatggaggttkttactttcaagtttatcctttcctgtggggaggatggtttcaacaggccaggaggtgttgtgtgtgcatgtgtgcttgcacatgtgggagcgtgcatatg

SEQ ID NO: 48021 - DNA, 201 bp, Homo sapiens
tttccataatttatctaagtggctttatatctttcaagaacagaaagtcgaatagtgggatcagcatcaagttgtggatatactgatttttaaaaattatyatcttatttcatatggagtaaatttagttcattgaagcatacagcattctaacaaaacaagtaccagggaattttatttctaacaacagtttaccaatct

SEQ ID NO: 48022 - DNA, 201 bp, Homo sapiens
ttaaaagacacagactggcaagttggataaagagtcaagacccatcagtgtgctgtattcaggaaacccatctcatgtgcagagacacacataggctcaamatgaaaggatggaggaagatctaccaagcaaatggaaaacaaaaaaaggcaggggttgcaatcctagtctctgataaaacagactttaaaccaacaaaga

SEQ ID NO: 48023 - DNA, 201 bp, Homo sapiens
aaggcaggggttgcaatcctagtctctgataaaacagactttaaaccaacaaagatcaaaagagacaaagaaggccattacataatggtaaagggatcaaytcaacaagaagagctaactatcttaaatatatatgcacccaatacaggagcacccagattcataaagcaagtcctgagtgacctgcaaggagacttagac

SEQ ID NO: 48024 - DNA, 201 bp, Homo sapiens
ccagtaatgggactgctgcgtcaaatggtattgctggttctaggtcattgaggaattgccacactgtcttccacaatggttgaactaatttacactcccamcaacagtgtaaaagcattcctatttctccacatcctctccagcatctgttgtttcctgactttttaatgatttctattctaactggcgtgagatggtatc

SEQ ID NO: 48025 - DNA, 201 bp, Homo sapiens
aacaaaaaaaggcaggggttgcaatcctagtctctgataaaacagactttaaaccaacaaagatcaaaagagacaaagaaggctattacataatggtaaakggatcaattcaacaagaagagctaactatcctaaatatatatgcacccaatacaggagcacccagattcataaagcaagtcctgagtgacctacaaagag

SEQ ID NO: 48026 - DNA, 201 bp, Homo sapiens
aaagggaatgcttccagcttttgcccattcagtatgatattggccatgagtgtgtcataaatagctcttattattttgagatacattccatcaatacctartttattgagagtttttagcatgaagggatgttgaattttattgaaggctttttctccatctattgagataatcatgtggtttacgtcattgattctgttt

SEQ ID NO: 48027 - DNA, 201 bp, Homo sapiens
acaaattggataaatcaaaggcaggagagtgggagacattgtgtttctgatttgatgtcattattggaatcgattgacgaacacaaaccttagcaggaggktatgatgtgacagttaccaagaagcaccatgacagtttgctgttgaaaatgaagcatttattttagaaattctgggaagtggaaggaggaaagatggtgt

SEQ ID NO: 48028 - DNA, 201 bp, Homo sapiens
taactattgctgttaacaaagaaaagtttaggagggatagcattaggagatatacctaatgtaaatgttacgagttaatgggtgcagcacaccaacatggyacatgtatacatatgtaacaaacctgcacgttgtgcacatgtaccctagaacttaaagtataataaaaaaaaagaaaaaaaagtttggatacatatacat

SEQ ID NO: 48029 - DNA, 201 bp, Homo sapiens
aagcaatgctcccacctcagcctcctgagtagctaggactacagggttgcaccaccatgcccagctaatttttttttttttttttttttttttttttttgkagaaacagggtttcaccaggctgattttgaactcctgggctcaagtgttccttctgccttagcctcccaaagtgctgggattacaggcatgagccaatac

SEQ ID NO: 48030 - DNA, 201 bp, Homo sapiens
gcaatgctcccacctcagcctcctgagtagctaggactacagggttgcaccaccatgcccagctaatttttttttttttttttttttttttttttttgtaraaacagggtttcaccaggctgattttgaactcctgggctcaagtgttccttctgccttagcctcccaaagtgctgggattacaggcatgagccaatacac

SEQ ID NO: 48031 - DNA, 201 bp, Homo sapiens
agctaatttttttttttttttttttttttttttttttgtagaaacagggtttcaccaggctgattttgaactcctgggctcaagtgttccttctgccttarcctcccaaagtgctgggattacaggcatgagccaatacacctggcttcaaagtttttttttttttctagagaatcagcagtgtaatagaaattaatattc

SEQ ID NO: 48032 - DNA, 201 bp, Homo sapiens
ttttctagagaatcagcagtgtaatagaaattaatattctagtactcaaaacaacagcaatcataacaataatagcaaaatctatgttcttggctcagttrcactcaagtaatagcttgaccttggattagttgctttatctcaattttatttctgcaaagtagcgtgaggatccctatcctgctcacctcacaagttgtg

SEQ ID NO: 48033 - DNA, 201 bp, Homo sapiens
tggaaccaaattacattttttggggtcatacagtatttgaaatcagccaaatacagtatttttacttcacttgtaaaactcattaccatatacagcttttrtcaaatataactgcaaaatctcagtaattcagaattgtcaatttctgatttatatgcctaccaacaggggattgttggtggttattatatgcctgtaaga

SEQ ID NO: 48034 - DNA, 201 bp, Homo sapiens
gagatgctttgtttttcttcattgttttgttaacactgaatgctgactatgagcaagggagggagacagtccttatggagcaaatcaagataaatagggtracaactctccttactgtgtatcctgcaatgtgaaatagaatgctgggcttccaagaaggaaggtctcagcagcaagactggaactataagtgcttgcttt

SEQ ID NO: 48035 - DNA, 201 bp, Homo sapiens
cacacagatgtgtttagccagaggcttctctttaggttgtccatgtctcttactcccaccaattatcctgtcttctttacaagggacagttgtgctgtgtytgttcccaaacccatttagccagttgcgcttattttaataatatactttttaaataaagagagtaattaaactgacccaatgcagaaaagactttgagtt

SEQ ID NO: 48036 - DNA, 201 bp, Homo sapiens
tctttaggttgtccatgtctcttactcccaccaattatcctgtcttctttacaagggacagttgtgctgtgtttgttcccaaacccatttagccagttgcrcttattttaataatatactttttaaataaagagagtaattaaactgacccaatgcagaaaagactttgagttttgtttctatgaaaactaaactgaatgc

SEQ ID NO: 48037 - DNA, 201 bp, Homo sapiens
actagtgctctttccataccacctcttctctcttgactatcacattgcctgcccagatcccatgttgtcatatatttttgtatgtagtttgtgctgtcaargacctcttttcaaaatgcacacactcaaccatagactgttaccgttattggttttgttacttgaaattataattggaacaattagagatgcgtcagtgga

SEQ ID NO: 48038 - DNA, 201 bp, Homo sapiens
aattaaactgacccaatgcagaaaagactttgagttttgtttctatgaaaactaaactgaatgctatgaaaagacttgataactgttagctacaaaagctytgctattgactaggtgtaggcaaggtaatgaaaagaatgtgtgtgtgtgagggattataaaaatctggataggtttggcattcaaattatttcacaagta

SEQ ID NO: 48039 - DNA, 201 bp, Homo sapiens
accatagactgttaccgttattggttttgttacttgaaattataattggaacaattagagatgcgtcagtggaaaggcaatgaaagaaggccattaagtgytaataaatgcctctcctcatgggaacggagatcttttcttctctatgtatttgagctcttttcactggtgcttttaagtggctagaaataacacttgcca

SEQ ID NO: 48040 - DNA, 201 bp, Homo sapiens
ttcttgccttctatccctcaaacttacctgtattcacagccacacccccttcttatccttgtctctgttgagatagtattcctgatcaagggggtgggggrtggtttcctatctgtactctcacctccttagaggatgtactctttttagccttttatttcctgaatcatcatcttctccatcacattttaaaaaatcaac

SEQ ID NO: 48041 - DNA, 201 bp, Homo sapiens
atacatatgtacatatatacacatacacacacctcatcccccccacacacaaataattggcatacggtgaatatattttaccactaaagctgtactaaacrtaattagatatgtttgggataagtcagaagtattttcgaatcttacagtaacttaattattatatactatagttaatatcctgcagctataaaaatgact

SEQ ID NO: 48042 - DNA, 201 bp, Homo sapiens
ttccactccattcctactcatctgttcctttggcttcaacttcctgctctgttgctcactgtcaaattattgtctccagacaagacttttgtcctgagtgmcaactgttcagtctaactgcctacatgttgtttcaatcagatattccccaggcatgtaaagataaatgtgtacaaataaggaccactcattttcttcccc

SEQ ID NO: 48043 - DNA, 201 bp, Homo sapiens
ttttaacccagtacctagtccaatttatcaatcattcacatgctaaaatgaaaaataattatgaaatttctatgaagtgtagtttggacagaccctgaaayaattttctcttcatgaccacatataatgtttaattttaatacttacacttattacatccaggggtagttttagttgaagatgctcactgttggttagttt

SEQ ID NO: 48044 - DNA, 201 bp, Homo sapiens
ccagttaattcctcaactgaaatttggattctaccccactactctatagagttaattattgcaaagatcagtgagagtcctgattgccaagcctaaaggaygctcttattcctgagactatattccactctctttataaagctggcactcctctctcatgggttctcttccctctttctctttattccttctctacctcct

SEQ ID NO: 48045 - DNA, 201 bp, Homo sapiens
ataagacaggaacattagagctttatgagctatttggcttcatgccagggacatctcaactttgaaattattttggtgggcatctcttttcagctgctttyctttacctcctcttcaccagtgcatcatcacagggtgctgaaggtcttttcagaaagcactgagaggaacatcttgattttttttttaaccacagtttag

SEQ ID NO: 48046 - DNA, 201 bp, Homo sapiens
tactaaaaatacaaaacttagccaatcatggtggggggtgcctataatctcagctactcaggaggctgaggcaggagaattgctggaacctgggaagcggyggttgcagtgagccgagattgcactattgcactccagcccaggcaacaacagcgagactccatttcccccccgcccccccaaataaagaaaaagaaatac

SEQ ID NO: 48047 - DNA, 201 bp, Homo sapiens
aatgtccctgtctgacagctttgaagagagcagtggttcttccagtacgcagctggagatctgagaacgagcagactgcctcctcaagtgggtccctgacycctgacccccgagcagcctaactgggaggcacccccaagcaggggcacactgacacctcacacggcagggtactccaacagacctgcagctgagggtcct

SEQ ID NO: 48048 - DNA, 201 bp, Homo sapiens
aaaaatttagacgaatgtataactagaataaccaatacagagaagtgcttaaaggagctgatggagctgaaaaccaaggctcgagaactacgtgaagaatkcagaagcctcaggagccgatgtgatcaactggaagaaagggtatcagcaatggaagatgaagtgaatgaaatgaagcgagaagggaagtttagagaaaaa

SEQ ID NO: 48049 - DNA, 201 bp, Homo sapiens
ccagctatcatcataatgacaggatcaaattcacacataacaatattaactttaaatgtaaatggactaaatgctccaattaaaagacacagactggcaarttggataaagagtcaagacccatcagtgtgctgtattcaggaaacccatctcatgtgcagagacacacataggctcaacatgaaaggatggaggaagatc

SEQ ID NO: 48050 - DNA, 201 bp, Homo sapiens
atgactactgggtacataacgaaatgaaggcagaaataaagatgttctttgaaaccaaggaggacaaagacacaacataccagaatctctgggatgcattyaaagcagtgtgtagagggaaatttatagcactaaatgcccacaagagaaagcaggaaagatccaaaattgacaccctaacatcacaattaaaagaactag

SEQ ID NO: 48051 - DNA, 201 bp, Homo sapiens
cattactgggtatgtacccaaaggactataaatcatgctgctataaagacatatgcacatgtatgtttattgcagcactattcacaatagcaaagacttgraaccaacccaaatgtccaacaatgatagactggattaagaaaatgtggcatatatacaccatggaatactatgcagccataaaaaatgatgagttcgtgt

SEQ ID NO: 48052 - DNA, 201 bp, Homo sapiens
gcactattcacaatagcaaagacttggaaccaacccaaatgtccaacaatgatagactggattaagaaaatgtggcatatatacaccatggaatactatgmagccataaaaaatgatgagttcgtgtcctttgtagggacatggatgaaattggaaatcatcattctcagtaaactatctcaagaacaaaaaaccaaacac

SEQ ID NO: 48053 - DNA, 201 bp, Homo sapiens
aacccaaatgtccaacaatgatagactggattaagaaaatgtggcatatatacaccatggaatactatgcagccataaaaaatgatgagttcgtgtccttygtagggacatggatgaaattggaaatcatcattctcagtaaactatctcaagaacaaaaaaccaaacactgcatattctcactcataggtgggaattgaa

SEQ ID NO: 48054 - DNA, 201 bp, Homo sapiens
tctttataaacacttattttagtattaatcaactaaaaatgatttccatttgccacacagaatcagattcagtgccatttcactgccactcaggaggagastacaaaagctatagagacaataacatatactgttttctgaatttagaggtttgttttgtttagttagttagtattttgttttgagcactgattttatgtc

SEQ ID NO: 48055 - DNA, 201 bp, Homo sapiens
aattattgtctccagacaagacttttgtcctgagtgccaactgttcagtctaactgcctacatgttgtttcaatcagatattccccaggcatgtaaagatmaatgtgtacaaataaggaccactcattttcttcccccatttcttttacaatgtagagaaaaatggtcaagagcacagatgctagagttagactccctaga

SEQ ID NO: 48056 - DNA, 201 bp, Homo sapiens
aggttacttttcttgcaaaggttaaagcagaggggacttcattatcatgccagctagcactggcttgtttggaaatttggctattatctctctcctgataycatggaaggttagagaaataacttagtgttggcttggtggtgtggaacttcagcttgagtgaccccattttggcttggtatgtgttgggcttagtgcagg

SEQ ID NO: 48057 - DNA, 201 bp, Homo sapiens
tgtggattgcttaccacttattaaaattaaaatgcattttaaggtgaaacattatgtacctagaatactgaaggtagcactgaccattgtctttagctcakaaagcaatgttgaattggaaaagcaagatttgagaatattcctctttactgcattgtcattgcactctagtccttctgatttcccttgtttctcagatga

SEQ ID NO: 48058 - DNA, 201 bp, Homo sapiens
agttacatgaattttctaaaatgcatgttttatcaaaccactctactgctaaaatccctgttacccagcttctaagcatgctgtagagtttccttcatggkctgccatctgtctttatgtccgttctctccttctccttctatgcactggggtgtgcagtcctgctgaacgactaaggttcctagaatgcagcaagccctt

SEQ ID NO: 48059 - DNA, 201 bp, Homo sapiens
ttgcacccatcaactcgtcatttacattaggtatttctcctaatgctatccctctcccagcccccgactcccccagcaggccctggtgtatgatgttcccygccctgtgtccaagtgttctcgttgttcaatttcccacctatgagtgagaacatgcagtgtttggttttctgtccttgtgatagttttctgagaatgatg

SEQ ID NO: 48060 - DNA, 201 bp, Homo sapiens
tttcttggtttatttactcatctgcagaatggagataataaacattatctcaattccctttgcagagtctaaaaagtgggttttaaatgtctaatatactygtcaataaatgatagtttaaaaaatagtacttaagcaaagatttgcatgtagcaaaacgtgactgagagattgctttcattgcagggattgcaaggacac

SEQ ID NO: 48061 - DNA, 201 bp, Homo sapiens
tctgcatgggcgtgaactcagattgtttgatttgctacccagtggagagccaggtggccataactttattttcttttatatcatatttttatgtgaaaagrcataccattagtacccttaaggaataatcatatcgttttaatccctagtggtacttgggtactgttgggaccttcatcaagcagattccaactacttcaa

SEQ ID NO: 48062 - DNA, 201 bp, Homo sapiens
  misc_feature (101)..(101): n is a, c, g, or t
tgttctttctagtgaccagtccacttgctgaagctatccaggagctgccagccacttaccaacccattagcctgcaaaaagatacttatcactttgaagantccaaggactttagtagttgtgtgctggggaatagggaagaagactaaaaatgcgtaccgcaatatgacaatccagatgaagcttcatggaggactgcaa

SEQ ID NO: 48063 - DNA, 201 bp, Homo sapiens
gaacaaaaaaccaaacactgcatattctcactcataggtgggaattgaacaatgagatcacatggacacaggaaggggaacatcacaccctggggactgtkgtggggtggggggaggggggagggatagcattgggagatatacctaatgctagatgacaagttagtgggtgcagcgcaccagcatggcacatgtatacat

SEQ ID NO: 48064 - DNA, 201 bp, Homo sapiens
cacaagccatttgatttcctttttgaatgtgatggcttctcttggtggacaattttagaaatttcatagacttttaatttaattttttattaaatacttgrcgtttcagttaaatatttttgatattaaattaggcaagttaaaggtagagaaaatcttaacatgtaaggaatataaatatatcaaaagccctaaaagttt

SEQ ID NO: 48065 - DNA, 201 bp, Homo sapiens
cattatgagattaaatgagataatgaaatgagtggtagaaagcctaatcagaaatcaattgaaatgtcagtaggactttattttttaacctctgtatgtaygtatcttaagaattgggactatttatatgtttgggactatttatatatatttatatattttatatttgaaagccagcagttaaaaccaagattttgactc

SEQ ID NO: 48066 - DNA, 201 bp, Homo sapiens
agcctagagccagatatggagccctagggccagaggttctccctaacgtctaatgtcttggcccctcctgggctgagaaaacttaagttcttaagaatcakctgtactcctgaccttaagtaaataagctaactgttttaatttagtgttttcatctataatattcaaatgataataaatcctacttaactctttaggatc

SEQ ID NO: 48067 - DNA, 201 bp, Homo sapiens
gatttaatttgctcttctttttctagtattctaaggtagaagcttagattattaattttagatgtttctttttttctaatatcttattcaatattatacayttccttctaagcaatgcttttgttgcattccacaaatttggtaagttgtattttcatttagttcaaactgttttttaagtttctcataagatttttttta

SEQ ID NO: 48068 - DNA, 201 bp, Homo sapiens
gccacgtactaattatatatatgtatatgtgagaataaatcactccctggaaagttaactgttcttggccaggcacggtggctcacgcctgtaatcccagmactttgggaggccaaggtgggtggatcacctgaggtcaggagttcaagaccagcctggccaacatggtgaaatcccatctctacaaaagtacaaaaatta

SEQ ID NO: 48069 - DNA, 201 bp, Homo sapiens
tctctacaaaagtacaaaaattaactgggcatgatggcgggtgcctgtaatcccagctacttgggaggctgaggcgggagaattgtttgaacccaggaggmggaggttgcagtgagctgagattgcaccattgcactccagcctgggcaatagagtgagacttgtctcaaaaaacaacaacaaaaaaaagagttaactgtt

SEQ ID NO: 48070 - DNA, 201 bp, Homo sapiens
cctgttgtctatattaggtatttctcctaatgctatccctcccctagccccccacccccacaacaggccctggtgtgtgatgctcccttccctgtgtccaygtgttctcattgttcaactcccacttatgagtgagaacatgcagtgtttggttttctgtccttgtgatattttgctgagaatgatggtttccagcttcat

SEQ ID NO: 48071 - DNA, 201 bp, Homo sapiens
gatttctattctaactggcgtgagatggtatctcctcattgtggttttgatttgcatttctctaatgaccagtgatgatgagcttttttttcatatgtttrttggctgcataaatgtcttcttttgagaagtgtctgttcatatcctttgcccactttttgattttttttttctggtaaatttgtatacgttctttgtaaa

SEQ ID NO: 48072 - DNA, 201 bp, Homo sapiens
agttttcaaagggaatgcttccagcttttgcccattcagtatgatattggccatgagtgtgtcataaatagctcttattattttgagatacattccatcartacctagtttattgagagtttttagcatgaagggatgttgaattttattgaaggctttttctccatctattgagataatcatgtggtttacgtcattgat

SEQ ID NO: 48073 - DNA, 201 bp, Homo sapiens
tttacgtcattgattctgtttatgtgatggattacatttattgatttgcatatgttgaacctgccttgagtctcagggatgaagccgacttgatcatggtrgagaagctttttgatgtgctgccggattcagtttgccagtattttattgaggattttcacattgatgttcatcaggatattggcctgaaattttcttttt

SEQ ID NO: 48074 - DNA, 201 bp, Homo sapiens
gggatgaagccgacttgatcatggtggagaagctttttgatgtgctgccggattcagtttgccagtattttattgaggattttcacattgatgttcatcargatattggcctgaaattttcttttttgtgtgtgtctctgccaggttttggtattaggatgacgttggcatcataaaatgagttagggaggagttcctctt

SEQ ID NO: 48075 - DNA, 201 bp, Homo sapiens
gttttgtttttcctgaagggtgacagtagagggtgggaaaggtacattttacataggagatttatatcttaattttactctcaaaatagaagaccctgagaaaatacacatgagcagggaattttttaaaagaaattcagtttaaagtcagctttttctagattgcaagtaagctgtgtagagtaagggaaacatggctca

SEQ ID NO: 48076 - DNA, 201 bp, Homo sapiens
gattgatgttcagtgacttggaaattctctccagggcaaactgcattttcactgcttacttacatacattttgaggcatagattaatttcaaaacaagaayttaaagctaggaggaacctcagacatcagcatagtttgtggttttcaaacttttctctccttttctgtttttaaacattagaacactttattcaatcaaa

SEQ ID NO: 48077 - DNA, 201 bp, Homo sapiens
atttcaaaacaagaatttaaagctaggaggaacctcagacatcagcatagtttgtggttttcaaacttttctctccttttctgtttttaaacattagaacmctttattcaatcaaaatcttccatgaaatcccattgtataaaataaataaaaccagagctgtcttggttaaagcagggtgcgagcccaggatccagccct

SEQ ID NO: 48078 - DNA, 201 bp, Homo sapiens
cctctgctaccagagccaagtcaagagagtcccaagctcatatgctatatagaatgatccaatttaattttctgtatggccaaagttttgcaatttatcckagtccaagtttgcattgcagtttctcacactctctgcattgatttaaaaattcttatggattatgttatactaaatacattctataaagtagacggaaaa

SEQ ID NO: 48079 - DNA, 201 bp, Homo sapiens
acataaagcatattcatccctaactggagatctctgcagcttaagtcttctggatcatatatggccaggaccaagccaggacaatagtatttaaaagccaratacctaagaggaataccaaactagaaatccataactctggaatgccaaacttgaaattatgatgagttactggtgataccatagtagtatgttaataag

SEQ ID NO: 48080 - DNA, 201 bp, Homo sapiens
aacaggctgtgaaatcagaccttcagagatgagatatttacaattttggagttactaggtacagaaataaaaagttgtttaatatgtttagaaataaagargctttaagtatgagaagaaaagatcaagcagattgggggaatgacttctagaaataaaatataatcactgcaatgaaaaattcaattaaaagtgtcaagg

SEQ ID NO: 48081 - DNA, 201 bp, Homo sapiens
tagacataaacaattggcagaggaaaaaacatagtactcactaacaatagtatttgtagaaattttgaagccatggttaaaaaaagagaaatttgagggamaatgtaaatacatgcagtaataatgctttcttagcaaaattcgcatctttagtctcctgtcaccttattgctttgtaaagaaacatcttgatcccagtca

SEQ ID NO: 48082 - DNA, 201 bp, Homo sapiens
aaaaaaaagttgagatgtaatgtacagtaaaatgcacatcacttaaaagtttagtttgaggagttttgacaaatgtatgcccacatcccagtcaagacatrggacatttccatcactccagaaaatttcctcatgcctcctacagtcaatctccactcctcaaagacaaccacagttccgatttctattaccatagaatag

SEQ ID NO: 48083 - DNA, 201 bp, Homo sapiens
ctcctgggtagctgggattacaggcacctgccaccacacccagctaattttttgtatttttagtagagatagggtttcatcatattagccaggatgttctytatctcctcaccttgtgatctgcccgccttggcctcccaaagtgctgggattacaggcatgagccactgcacctggctgggtctttgttggtttaaagta

SEQ ID NO: 48084 - DNA, 201 bp, Homo sapiens
atattcttctctaaactggttattctagttagcaatttctctaacattttttcaaggttcttagcttccttgcattgggttagaacatgctcctttagctyggaggagtttgttattacccaccttgtgaagcctacttctgtcaattaatcatactcattctttgtccaattttgttttcttgctggcaaggagttgcga

SEQ ID NO: 48085 - DNA, 201 bp, Homo sapiens
gtatgcttataagttataatgctattctcttcatctgctgctcagatttacttttctagtagatttttaacttatgaatttagagtgcaaaattatgagtmtaataaagaaaagttaaggttacttttcatgctaattgaagtatcctttaaaaaattatatgaaggtaattaatttgtgggcaattactgaatttaatgt

SEQ ID NO: 48086 - DNA, 201 bp, Homo sapiens
aacacctgttttctcacagttgaaatgatacagtgtgcagatttcagttcttgttatttgagcaccatgaaaattctatgggtcttaagatttgttatatmtttttcctgatcctctggaatgcctctattgccgttttactgaaggcagtgcatttcaaccttgccactaaattccagagcaatcttagtctttcccttt

SEQ ID NO: 48087 - DNA, 201 bp, Homo sapiens
ataggtaagggaattaaactttggatttttaacacccaaaggtattcttatgaaatgttaatgaaagttacacatacagtcaaaacatggtctcatcatgmggtcctgttctctttagtgtaacgcttaaaagccttttacctaaggcataaaatttctcatacttcttttttagcattgaagtgacttatttctttaaac

SEQ ID NO: 48088 - DNA, 201 bp, Homo sapiens
acacctgttttctcacagttgaaatgatacagtgtgcagatttcagttcttgttatttgagcaccatgaaaattctatgggtcttaagatttgttatatckttttcctgatcctctggaatgcctctattgccgttttactgaaggcagtgcatttcaaccttgccactaaattccagagcaatcttagtctttcccttta

SEQ ID NO: 48089 - DNA, 201 bp, Homo sapiens
gtattcttatgaaatgttaatgaaagttacacatacagtcaaaacatggtctcatcatgaggtcctgttctctttagtgtaacgcttaaaagccttttacstaaggcataaaatttctcatacttcttttttagcattgaagtgacttatttctttaaactaaaacacatagttcagcttggttgtaatagtggaattatt

SEQ ID NO: 48090 - DNA, 201 bp, Homo sapiens
tgcaatgaaggcaataaatttttaatttaattcaatctaattaaagttttaatctggctaccagctactgcattggacggcagagccctacagtatagtgrctccggctgatggctctgggaccttcactgtgggtcctactttattgacagcttagtggtgacctatggtggtagctactgagagaaagagcaaggaagc

SEQ ID NO: 48091 - DNA, 201 bp, Homo sapiens
caaaccccagtctatgattggataattctaccataatagttttactctccacaacttccccatatgcctcatctttctacttcctggctttgctaataccmgtctattctcttggaacgtagtcatttgttttcctttattaaagtttatcttcttttcaagtttgctacaaacagttcagatcatatcatctgaaattat

SEQ ID NO: 48092 - DNA, 201 bp, Homo sapiens; identical to SEQ ID NO: 8354

SEQ ID NO: 48093 - DNA, 201 bp, Homo sapiens
ctttccccatttcttgtttttgtcaggtttgtcaaagatcagatggttgtagatgggtggtgttatttctgaggcctctgttctgttccattgatctatakctctgttttggtaccagtaccatgctgttttggttaccgtagccttgtagtatagtttgaagtcaggtagcgtgatgcctccaactttgttctttttgct

SEQ ID NO: 48094 - DNA, 201 bp, Homo sapiens
tctcactctttcacccaggctggagtgcagtggcttgatcacagttcactgcagccttgatttcctgagctcaagcaatccttccacctcagcctcccaartaactaggaccacagatgcacaccaacacaccgaactaattaaacaatttttttgtagagatgaggtctcattatatcacccaggttggtctcaaactcc

SEQ ID NO: 48095 - DNA, 201 bp, Homo sapiens
ccacatttaaaacagaagcactttgtttttgctttctattacatcctcacatgtttattaatatggattttattttttatttgttatttttgttttgtgtrtgcatatcattacttgtaccagacaaattgtaggcttttgataacaagaactataccttattcatatttttatatgctacggagttcgtgccctatagtt

SEQ ID NO: 48096 - DNA, 201 bp, Homo sapiens
aaagtacagagctattttaatagcaccattgtgttcagggtgtggaactggattcttgacctcagtgcttcttggagcagggggtgggcagtatttgtgtsatttgtctgtctttctcttcctatctcctttcttttgcctgtttccctttccttgtttctttttttgttggatcagtatattgaaatattgtgagatagt

SEQ ID NO: 48097 - DNA, 201 bp, Homo sapiens
acacctactgtgtgtcaggcactgttttaagagctagaaaaaagccataaagcaaacaaagattcctgtgcttgaggaactcaggttttaactggggagayggataagcaatacccaaagtaaataagtaaattatgtggcagattacaagattattagggccatggaccaaaggaaaggcaaagcagggtaagggggatc

SEQ ID NO: 48098 - DNA, 201 bp, Homo sapiens
agctgaagtatatattagagtacattatttagtaaacggtagacagttctttccttgaaactcatttgaacatttattgtaatgtgaactaagttttttcmattcctaattagagatggtagtttttctgtattttaaaattggatatcacatccatgtacatatatacaaacacacataaatttctcagatattaaaatg

SEQ ID NO: 48099 - DNA, 201 bp, Homo sapiens
cagaaagtacatttatacatttgttccaaatgtgctaacatggataatttgcgtaacagaaaactcacattaaaattttaaggaaaaaaagagattaaacwcaaggtttattcttaagtccaattcatattattactggcccacatgtagtcagagttcagcgtaattgaaccagatgtttttcctctttgcaaaaaactg

SEQ ID NO: 48100 - DNA, 201 bp, Homo sapiens
tattccttgaaatgaaattaattgtggcattggtacaagtcaaaataattcagtgttttggtagtggtagtatctgtgatagtcttaggcttagatattgyagtgacaaagtatccagtggtagagttgatgaaattgtatttttatagacgtatttgaggctattatgcttttatcatcaaaatataatattcatatagt

SEQ ID NO: 48101 - DNA, 201 bp, Homo sapiens
gaaataaatgtagaagcttgaggaataaataagtaataaataatattacttggtaatgttgagactctcaaatacagtaatatttcattatctaaagtacrtttgcttagtaaactcagctaccagaaacatcattaccaactagaaagtgagtaatactactaataccaatactaaagtctttaagacccaaaataggaa

SEQ ID NO: 48102 - DNA, 201 bp, Homo sapiens
tgtccttctaattctggcatgttgagaatctgaacatgtgaaatacttgtgttctattttatggttatggaaagtaagatttttttcatctgtgggcccamattattttttctatttactgacttaaatgatgcagagaagagtctagtatgaaactggaaaaagttaacaatgaaaacctaaatcacagaactttgtttt

SEQ ID NO: 48103 - DNA, 201 bp, Homo sapiens
ttttccctctgctgagggatttttttaaaattttacattacaggtaaatatttgctttgatataatactctataacttttttccttgagaaattgtctttrtataagttgatgtggtattttcaatagtgtgtttttaagctaaaggattccatatattatttatttttaacaaattaaatgatttcccttaacttatttt

SEQ ID NO: 48104 - DNA, 201 bp, Homo sapiens
tctctctctattttcttttcttttctttttttttttttttgaggccttactatgaaccaaaataatatgacacaatctaaggtgacaggcagtgttaaggkctgtgttcaggttagggtgctattacttagtattacagccagaggatcagaaatacccaagtcctctgagactacagcaatcacttcccctatggttgct

SEQ ID NO: 48105 - DNA, 201 bp, Homo sapiens
tcatgagctgaagcccagagaggggcaatgacttgcctgagattacattttaccttgtgatgtaaaagattttattcacatcacagtttaggaggcacttsgttcattttattatttttacttttatttttattttttgtagagacagggtctcactatgttgcccaggctggtctcaaactcctggcctgaagtgatcct

SEQ ID NO: 48106 - DNA, 201 bp, Homo sapiens
aggaaaagccagacctcttatataatgaattacgctcttttaaaacatattgaaatctgtggtatttgaggaaatagacatgtgggatttcctcaggtggktacgagtcacgtccttacaatctgctattttgaagaacttgcggtagtgagcagccttcctttggaatcaagggcatttatttatttaatgataattttt

SEQ ID NO: 48107 - DNA, 201 bp, Homo sapiens; identical to SEQ ID NO: 8407

SEQ ID NO: 48108 - DNA, 201 bp, Homo sapiens
ttttaaatgatttttggataaagactttctacatttaagttattttttaaatgatgaggtacaatttttaatgaagacatatattttaatatagtttgtgktacttgttctgaagtgaaaaaaattgcactggactacacggaaaaacgtaggcatggcaagctataaaaactagttcactggccttttgagaagggaaag

SEQ ID NO: 48109 - DNA, 201 bp, Homo sapiens
agtgtaaaaggatcctactaatttaacagaaactctcctagagcaatttaattaatccattagaatgaatgccaaattctttgaaagctctaagatatggwtctgtttagttctaggttaattaaagatacattattatctggaatcagcacagtatcactaatatttttaaatgatttttggataaagactttctacatt

SEQ ID NO: 48110 - DNA, 201 bp, Homo sapiens
ttttcaagaatttgacacttacaattttgtttttcagattatacaagccatacagaatttaacccgtctcttatacagccttcaggtaactatcctcctcyaatctttgaccttgtgaatggttctcttaatgcaattctctttgatgattcccagactttaaaaatgagaacaagtgagaggtagggaatgatcttaaaa

SEQ ID NO: 48111 - DNA, 201 bp, Homo sapiens
gattagggtatctgattattttatttgtacttctttgattactactgagacaaaacatttttccctcactggtttattattcattcatgcttcatatcttsttgaatttaaaagaaaataaaatgaagcctaagttttcagcagaaaatataaaggcatgctgcattcgatgttttgttatttagacttcgactctatcaa

SEQ ID NO: 48112 - DNA, 201 bp, Homo sapiens
tgggttcccgccatctgttagtccagtaatgcgcacaccagagaagtgcaagaaagaatttttcaaactgttcacagtgatcttgaatattccagatcatycatgcctccctcgacatcccacttcaattcttgatatcacatgggaggctattgcctgcctggcatctactgggctataacgcaacctgagaacaactac

SEQ ID NO: 48113 - DNA, 201 bp, Homo sapiens
gaggaaaacagaaacacataatgagatcatatcagaaatgttcaggttgaatctcttttcaaaggtgcaaatttagtaacatttgaggtggtgaatatatrttttcagaccatgtataaatttttaaacactttattataatctcttttaggaatcactgctttctggagttcgctcacgttcttattcttgctcatcacc

SEQ ID NO: 48114 - DNA, 201 bp, Homo sapiens
cctgaggcttttaatgaagccaggagtgttcaggaggcgcatgttcacaaggccccttcattataacttgcacattttattgtcacatttgactcttcatygcatttaatgtcttttgctttgaattcctcttggaaataaaataacaaaaatgatatagataagaattctgttctgtgtaactatgtggatattcttata

SEQ ID NO: 48115 - DNA, 201 bp, Homo sapiens
ttccatccaaactccctccatgcaaatttcttattatatctgacacagaattaatgtaaacatttttgtaatggccatattttgagtcactcacttagagraaggttttctaatgtggaatctgagcctgttaagcatcgttgctatggagactatgagagttggattaattaaggcttgaacagatgtgaagtgtgcaga

SEQ ID NO: 48116 - DNA, 201 bp, Homo sapiens
caactgtggtcgttaatcttccgcagcacaggaattgctagtaacataaaggtagtaatgggattatgttttcttttctttttttttttttgcaatagctyagaaaattaatgttaacttctgttcctagtttggggcagttgtttttactatgatgaagctgaatgtgatcatacaactccatctttccatccaaactcc

SEQ ID NO: 48117 - DNA, 201 bp, Homo sapiens
tatgaaagaaaggggcctcagtcatagagtgcttcagccattttgggtgcaaacaacataaatagactttttggtgtctaaatatcaccctaacttctctycttaagttagggtgcttaagttattatctgcttaagagtggacccctgcttaagcatcctagtcatgtaccagcccctggctgcactggggcagggagag

SEQ ID NO: 48118 - DNA, 201 bp, Homo sapiens
ggccttaactaaggggctttgggaattgtgagtgctctgattgggagggacattacgtgcctttatttgggattgattaaatgaaaacaaagctgaagggytgaagacattaattacaatatcaaattattattcagagatatatataggagtctgaggaaatcatctggcaactctttcttctagaatcgtgactatcac

SEQ ID NO: 48119 - DNA, 201 bp, Homo sapiens; identical to SEQ ID NO: 31138

SEQ ID NO: 48120 - DNA, 201 bp, Homo sapiens; identical to SEQ ID NO: 31139

SEQ ID NO: 48121 - DNA, 201 bp, Homo sapiens; identical to SEQ ID NO: 31140

SEQ ID NO: 48122 - DNA, 201 bp, Homo sapiens; identical to SEQ ID NO: 31141

SEQ ID NO: 48123 - DNA, 201 bp, Homo sapiens; identical to SEQ ID NO: 31142

SEQ ID NO: 48124 - DNA, 201 bp, Homo sapiens; identical to SEQ ID NO: 31143

SEQ ID NO: 48125 - DNA, 201 bp, Homo sapiens; identical to SEQ ID NO: 4931

SEQ ID NO: 48126 - DNA, 201 bp, Homo sapiens
ctgcccaggcctcgtcttccatttccagctggcctgtttgctattatcactcagttagccaggatttgactttaagttcagactgttatattttttaaaasttttccaagttttcctctaagcaactcctctttccaacttcctgatttctgttaccatcccaccactctcccaggtgtcctgctttaagttgagtttttg

SEQ ID NO: 48127 - DNA, 201 bp, Homo sapiens
acatgaactctttttacccccttctttagcattctttacttagtatctcccagcacttatagttactgtaatttgcatctttgaaaaaatcattatgttartctgttttccattacttataatagaatacctgaaactgggtaatttataagaaacaaaatgtatatcttatagaactagaagctgggaagtccaaagttg

SEQ ID NO: 48128 - DNA, 201 bp, Homo sapiens
aataacccattaatcatgaatagattgacctattcatgaggtctctgccctcatgatccaatcacctcttaaaggccctacctctcaatacaaccacatgyggattaaatttcaacatgagtttctggaggggacattcaaaccatagcaaccatgaagttactaccttagttgattagagcatctcatggtgccctacaa

SEQ ID NO: 48129 - DNA, 201 bp, Homo sapiens
atacaccatgtcaaagacttacggttgccttttataaagttgccaaagacttttgtgccaccttggaattagaaatgaccaggttgtggagtaacatataygggagggctctctttgtgggccatctgggtgtagaaaagtgctgagcagaggcgtgctgatgggagggaatttgaaaatctgggttactgaaacaataca

SEQ ID NO: 48130 - DNA, 201 bp, Homo sapiens
aaccatgaatctacagaaaacataaagtgattaatgaagtattcattttcagcagattatctaataaagttccatcattaaggcattaatctatttaaatktacttgaccagtcataaattagatttaaaaaatgtgtgagtctcacctgccaacctgaccatactgctttcaaaagtctattctcatcagtagaatctat

SEQ ID NO: 48131 - DNA, 201 bp, Homo sapiens
gaacacttctagaatgatacccaaactcctggagtgggggtggggaataccttctatatacacacttttctactgtttgaattttttactatgagcccaamctgtataatctgtttttaaatagaggaaaaaagttaaaaagaatttgtgagtctagcaggaatcacagattttttccatttaaagtcataagagagagga

SEQ ID NO: 48132 - DNA, 201 bp, Homo sapiens
tctgctaaaaagacaaaaaattagctgggcatggtggcaggcacctgtagtctcagctacttgggaggctgaggcaggagaatggcgtgaacccgggaggyggagcttgcagtgagccgagatcacgccgctgcacttcagcctaggcgacagagggagactccgtctcagaaaaaaaaaaaaaaaaagacaccatgattt

SEQ ID NO: 48133 - DNA, 201 bp, Homo sapiens
tggggagtaatctcacttcaatcaggcagtgccatctttcaggaaaataagatttatagcagtcactgccatcaccatgataatggtgttataatgtgtgyatgtgccaggttcttgctaaggtctttatgtgtgttactcatttatccttacaactgtcttatgaaataggcattattatgtatgatccccattgtatag

SEQ ID NO: 48134 - DNA, 201 bp, Homo sapiens
taggtgtgtgaacttgccccaagaaacaaaggaagactacggtgctggcattaaaatgtgagctttatagcagttcaagggacaatcaagaaaataaatamcaaagaaaagcagaaaatggcagaaagccctggatatgataagaggcctcataaatatcactgcagtctgaagggactgacccacagttgtggatagcta

SEQ ID NO: 48135 - DNA, 201 bp, Homo sapiens
tccaaggggccctttcttaactccaaaccatgtgactgaagtggggagaaatgtttttcttgctattgagttaaggctttttaaaaacaacacactgagcrttactgtctagttcaagtatttgcatggagcgttttaaaactggttggctcctgttttaaactctggattttatatttccctcagtatttttttaagtgt

SEQ ID NO: 48136 - DNA, 201 bp, Homo sapiens
gggtttcatctgttgcccaggcttgagtgcagtagcacgatcacagctcgctgcagcctcagccttcctgggctcaggtgatcctcctacctcaggccccmgagtagttgggactacaggtgtgtgccaccatgcctggctaatttttgtatatttttgtagagacaaggttttgccatgttgcacaggttggaactgttt

SEQ ID NO: 48137 - DNA, 201 bp, Homo sapiens
agtgttttgaatatattttaataagggcttaatatatgtttgatgaattaatgtataaagctacattttactaagaaaaaagtggtatatgaaagcatagyggaaacacacaaacagtaggaaatgattcttttggtttacaaaaatgttctcccattctagttaattaactttgagtcctttttgtgcataagaatattt

SEQ ID NO: 48138 - DNA, 201 bp, Homo sapiens; identical to SEQ ID NO: 31104

SEQ ID NO: 48139 - DNA, 201 bp, Homo sapiens; identical to SEQ ID NO: 31108

SEQ ID NO: 48140 - DNA, 201 bp, Homo sapiens
tctggatttcagaattgcagttaagacaatgtagactggccgggcgtggtggctcatgcctgtaatcccagcactttgggaggccgaggcggctggatcaygaggtcagaaggtcgagaccatcctggctaacacggtgaaaccccgtctctactgaaaaatacaaaaaattaactgggtgtggtggcgggcacctgtagt

SEQ ID NO: 48141 - DNA, 201 bp, Homo sapiens
catccttcaccttctgccagaagatcttaaaaaaacaatttgcctcacatcccttccccacttaaaaatccacttactggcttgaagttcacaatacttaktaaaacatatcattgaggtacagaaaaggttcccatccttctctcctactaccattcccttagtctatttatttatttttttagagacagggtcttgctc

SEQ ID NO: 48142 - DNA, 201 bp, Homo sapiens
ttaaagatatgccatgcatagcaaattgaagtttttggtactagctcattaaaagagtatgggagaggggagggagaaaagaagtggtaatcttgacctcrcttttactgaaatcttgattcctaagattctctcaggaataaatactttatgaaacttgtataagttagaaaaattattgtacttttcctctgtttcttt

SEQ ID NO: 48143 - DNA, 201 bp, Homo sapiens
ttgggcttggccattctgtggctgactatatgggcactgcatttcctaatcttagagagctctaacgccaagacatctgccttgtacatctcaggtggccwcctgtaacctgtgctgtctgtttcttgcagatttggacacctcccacactgagtccccaaccccccatgactcaaattcacaccgccctcaactgcaggc

SEQ ID NO: 48144 - DNA, 201 bp, Homo sapiens
tttgataattatattagttcaatataatatcacattatgttgacccttaccactcaacaactttcttttattttaatttaaaaaatgtctgaggagataartgattgtgttcagaaattccatgatatttattttttatttgcaaatactattttgaaatagatgaaaattgcatattttttgtgtgtttagaacttacta

SEQ ID NO: 48145 - DNA, 201 bp, Homo sapiens; identical to SEQ ID NO: 31118

SEQ ID NO: 48146 - DNA, 201 bp, Homo sapiens
actggctcacagttctgtaagctgtacaggaagcatggtgctggcatttgcttggtttctggggaggcctcagaaaacttacagtcatggcagaaggtgargggggagcacacagtcacatggccagagcaggaacaagagagcaaagggggacacgttatacacttttaaataagattttgcaagaactcgctatcacaa

SEQ ID NO: 48147 - DNA, 201 bp, Homo sapiens
aaataaccaaaccacaagctaatgttggtttatgttttactgttagctctcatgcatatatatagatcatataaacagatatactgggataattggtattratgtttcatgagggtgagataggaaaaaaggtctcaaaaggctctgaaaggagtgataatgaaaaaaaattggggaaacactagcatttagatttcagct

SEQ ID NO: 48148 - DNA, 201 bp, Homo sapiens
cagcctgtgcaacaggtgaaaccttctctctaccaaaaaattagctgggcatggtggtgtgtgcctgtagttccagctcctcaggagactgaggtgggaakatcacttgtgcccaggaggccatgattgtggtgagctgagatcatgccactgcactccagtctggggtactgaacaaggtcctgtctctaataataataa

SEQ ID NO: 48149 - DNA, 201 bp, Homo sapiens
tactgcagcagagctctggctgggcatggtggcgcatgcctgtaaggccagccactcgggaggctaaggcacaagaatcgcctgaacctgggaggcggagkttgcagagccaggcttggcctaaggagcagaacccaggcctcaaatgtgcagtgggagggaggcaagggtgcagggacaagtgagtcttcctgtctgccc

SEQ ID NO: 48150 - DNA, 201 bp, Homo sapiens
ccaggcttggcctaaggagcagaacccaggcctcaaatgtgcagtgggagggaggcaagggtgcagggacaagtgagtcttcctgtctgccccatttagarttctcttgcagcctgctcctccatttctcctaatctttcattctctttcattcagcttggaactccttgagggctggaccactttctggtggacccagaa

SEQ ID NO: 48151 - DNA, 201 bp, Homo sapiens
ttcagcttggaactccttgagggctggaccactttctggtggacccagaaggcatgtctttattatctttgtgtaatacctggcccgcagttggtgttcastgagtgatgctgggttttttttgttttttttctaagtaggaaacaagtttctaagtgctatttgtttacttttaaatttttaactgtggcaaaatagaca

SEQ ID NO: 48152 - DNA, 201 bp, Homo sapiens
gacaggattgaatactcttaggaaccttggatctttattgtgacagactcatttcatgggcaaagaaactgatgcccggcagagtgagaagcacaaactcyacactcccttcctatctggggcagttggactcctgttatgcagtaaggaatggcttattgaatggcacagcctgttcagttcctttttgtgtcttggttt

SEQ ID NO: 48153 - DNA, 201 bp, Homo sapiens
cttggatctttattgtgacagactcatttcatgggcaaagaaactgatgcccggcagagtgagaagcacaaactccacactcccttcctatctggggcagwtggactcctgttatgcagtaaggaatggcttattgaatggcacagcctgttcagttcctttttgtgtcttggttttcatgctctcatgatgttataggtc

SEQ ID NO: 48154 - DNA, 201 bp, Homo sapiens
atctatgcaaaactgaaagtccatatccaataaagaataaagtcctctgtgtcccacccctggcaactaccaatcatttttttttctgtttctcatgtcaractcatgtttgattactctaggtacctcatataactggcatcatatagtatttttcctttctgtctgagttctttcacttagggtaatgttgtcaaggct

SEQ ID NO: 48155 - DNA, 201 bp, Homo sapiens
ctactgcctacctgggcattcacaaaaatcttgaactctccaaatttgtaaaatgagatacagtgattgggtgccattgttaatttcttccaactctgacrttcttattatgtctaaatacactgtccctttgataaaatgtgtaaaacaaactttgtaaatggaggaactaatatggtatgtgttttttcctcttcagta

SEQ ID NO: 48156 - DNA, 201 bp, Homo sapiens
gtccaattgtagcatgtgttggaattgtattcctttttaaggctgaataacattcccctgtaggtgtatatcacattttgtttatccatccatctgtgctrtttttaaaggggcaggcacaccgagaggcagatccaggtgcacacacctggcagagaggttggttagcttgacagtgggctgcatcctacccatgtgttc

SEQ ID NO: 48157 - DNA, 201 bp, Homo sapiens
aagatcaggggcagtgatcctaagggctgggatcctggggctggtgtctttgaagctctgtgtgggttttgatttgtgttgtttcagttttcagggcagayggtccccaagcttctcccgagtgcagctcagtgaagaagcctccttgcattacattcactcatcggaaacgctgaccctgaccctgaaccacacagccga

SEQ ID NO: 48158 - DNA, 201 bp, Homo sapiens
tttgtttatccatccatctgtgctgtttttaaaggggcaggcacaccgagaggcagatccaggtgcacacacctggcagagaggttggttagcttgacagkgggctgcatcctacccatgtgttcatgcagctgaactctctggccctctgtgtaagggaggcaatagaactatcttgtcactatgctattctgcctcacc

SEQ ID NO: 48159 - DNA, 201 bp, Homo sapiens
tcatttggggtaacataaaattttgtttaaaaagagatttggagggaggagaaaaaggctaattaaatactagttggaaattaaatgaatacctattgcaycccccccgccccagtgaaagaatctggattcagagaagtagaaaccaatgacgctctgtgtccttccttgcttctttacttacttgctggctttgtgctt

SEQ ID NO: 48160 - DNA, 201 bp, Homo sapiens
agaaactgaagaaggtacgcatgctcctttcccacttatggcagccacagagtgctctggaccaacaatctaaccagtccgttgaagtgtgtggtgaagcyggccaggaatcaaggggctcagaggcaagatcaggggtgtgggatacagcaaagcccctgggtcctcggacagcatcaaatgaagtatactgtttgtttc

SEQ ID NO: 48161 - DNA, 201 bp, Homo sapiens
acacaaatagaaaatgcagtcaaatgttaacaatatgtaaatctgggtaaatagtatatattgctatttttttgtgctgctgttattctttcagctttttwaaaaaaaatagtggatatccttgagcttttctgtaagtttgaaattattcctgaatagtaaataaaaaaccatgtaaattgtttttgagggaggagatac

SEQ ID NO: 48162 - DNA, 201 bp, Homo sapiens
ctgcatgtttactgttctctctcattgaacaagatgtgaggatggagccagaaggagagaagagggagctggattagcagaacaagcttggagagctctcstggtagaggaaacagatctgcccacactcacactgttggtcaggttgaatacagtgaaatacactccaggttcaatggtatttagggcattgcaccagac

SEQ ID NO: 48163 - DNA, 201 bp, Homo sapiens
cgcaatctcggctcactgcaacctccatctctgggttcaagcaattctcctgcctcagccttccgagtagctgggactacaggcgtgtgccaccatgcccrgctaattttttataatttttagtagagacagggtttcatcatgttagccaggatggtctcgatctcctgaccttgtgatctgcctacctcagcctcccaa

SEQ ID NO: 48164 - DNA, 201 bp, Homo sapiens
acatcatctgtatagtttgaacaagaagttgtccctctgaatggttggctcttgtgtagagtgaatcaaagtcctccctagcatgggaataaatcggtacygatgagctggagtttgtggcattcacttttctttggggaagtctggggacagcctttgcttgtaagttacctagacaagtgagaccatggtcatagggct

SEQ ID NO: 48165 - DNA, 201 bp, Homo sapiens
tttgaaggaaacagaagaaaagaaggtagatgaaatgaaatgggtcaataccaaaaataagaaaaaaagggtctacttggctcaagtaaatggcactaaaygtgattaagaaataggatctggccaggcgtggtggctcatgcatggaatcccagcactttgggaggccaaggtgggtggaacacttgaggtcaggagttt

SEQ ID NO: 48166 - DNA, 201 bp, Homo sapiens
aatcacggtcagagatccctgagggagctcagcaatgctgaaatcacccctaacgtactaggttttcagtagttttgggaattagagaaatggagttctayttttatctcaactgattacaaaaggtattaatgaaagtccatttgtattaggttcacagattttcaatgattatcaccagtgagatcacagatctgtggg

SEQ ID NO: 48167 - DNA, 201 bp, Homo sapiens
tttgacatctacctccaaggcagacatggtacttccattcctggagagttaatttgaatgtttgttcatctccagtgtttgtgcgtggttagtatgaatascgatggacaggttcccatgccccctggtctgatggtgatcgaatgaatgctactttccttgcacttacctgttcttcactttgaaaagatcttaccctgc

SEQ ID NO: 48168 - DNA, 201 bp, Homo sapiens
ggggagaaggtattgtgaactgatttgttagtaaacggcagcggttactgtgtataataaaatagcctcaggttctggtctgtcacggcagtcagtggggsaaaggtgcttttctgaattgttctcaattgatttaaatattcatatttaaactttctaacttatttcttcttcaaatgtgcttgcactgcctgtgtcatg

SEQ ID NO: 48169 - DNA, 201 bp, Homo sapiens
ggggttcttagagcctgttctctcccatagggtttggcacagatctaatgtctttaagcttcatctccattttcagcctctgtcttttctctatcagaggkgctgcttacgagtgaaatctttaattggcagtccaagggaagcggaggtctggctagctcatcctggcatcatcagcctaaactaattgaatttaacaag

SEQ ID NO: 48170 - DNA, 201 bp, Homo sapiens
tgcaccagcgtgtgccaacctgcagctcagggcccatggtcatcctggatcttccttgtgatcacggtcctagcccctcacctggtcctctgagattcctrtgtcttaggatgtggatttggtctgctccaggtggcagatgcacaggccagaagcccttctttctggcgtcaagattttcggttctctttctggtacatg

SEQ ID NO: 48171 - DNA, 201 bp, Homo sapiens
taggtcgagcttgtcctggttaggatttctaatttaagagaaaaataaagcccagttccttaaaaaaacaaagaggtcatataaagaatatttctcacatrtgtttacacttacaaactaatatataacaatttggaagactcaagatattttttgccagagtaaattactattgttttcaaaaacgaacttggactcttc

SEQ ID NO: 48172 - DNA, 201 bp, Homo sapiens
gtaacatcattaagtctgtgaaggatttgagaaagataaatgagcacaactttagtccagtgatttatgaaaaggaccatgatgagtgtttgttgtgctascattttctttttggttcatttaaactttttgaattaataaagtcccctgagtttttgcaaaggaaattataacagattttcaaagaacctgagacagaga

SEQ ID NO: 48173 - DNA, 201 bp, Homo sapiens; identical to SEQ ID NO: 31145

SEQ ID NO: 48174 - DNA, 201 bp, Homo sapiens
ggggaggcttgcctcctggctggggacgccccgagttcttcctgagtctctactgtttcatctgttgatttcaccaaaacaaaaagatggattctgactcygactcaccttttaactactcgtggccttcctttcccaaaatgaagattcgaagaaggacgtccaaacaaggtagattgcagtatcttttctttccttcac

SEQ ID NO: 48175 - DNA, 201 bp, Homo sapiens
atattatcattggccacagtttcagcttttgtagaatatttgcttcacataattgaaataatgagttagccaaaaacattatgtatcaaacaaagattatyattggcttactccatatagagttttatttaatcagttaaaataaaacatggtcttcagagtatgatctttctctctttgctgggttttagggaatttggt

SEQ ID NO: 48176 - DNA, 201 bp, Homo sapiens
aatctgtcaaaaggaaattcggatggtcccaagagggcaacttttcgctaaagccttttggaaggctcatcaacttagtttcacccagggccagcctgcaycagcgtgtgccaacctgcagctcagggcccatggtcatcctggatcttccttgtgatcacggtcctagcccctcacctggtcctctgagattcctgtgtc

SEQ ID NO: 48177 - DNA, 201 bp, Homo sapiens
atcatttaacatttggctttgaaaacactctattccagaacagatttttcagttagtataagtacataaaatattcaagaacagcagacaagaattttccrttctgttttcataactggtttttctaagcctgacaaaattcttttcttattggataacagccaaatttgattttgatcagatttgattttgatgaaatta

SEQ ID NO: 48178 - DNA, 201 bp, Homo sapiens
tcccagcggctttcacccaccctctatttcccaacctcctagctctgagatcattgatagtgacttttgcctctttgttgtatatctggaacctcaaatgrttttctgtgcttttttgttttttttttccccattgtttcctaggcctttgagccagaagccaggccagaggaaagaacagctatgccctccagcggtgca

SEQ ID NO: 48179 - DNA, 201 bp, Homo sapiens
tgatagtgacttttgcctctttgttgtatatctggaacctcaaatggttttctgtgcttttttgttttttttttccccattgtttcctaggcctttgagcmagaagccaggccagaggaaagaacagctatgccctccagcggtgcagaaactgaagaaggtacgcatgctcctttcccacttatggcagccacagagtgc

SEQ ID NO: 48180 - DNA, 201 bp, Homo sapiens
tactctccatttgcttcatattttagttaggatattatattgatttttatttttaattagacatgaagataaggttatatgtatctagggggtagagttaygtgatctactaactcaatttcaagatagtgaaggaagcaacacaaaatacctgttaatgtaaagggcataggtctgatagggttgagaaccaccaagctt

SEQ ID NO: 48181 - DNA, 201 bp, Homo sapiens; identical to SEQ ID NO: 31115

SEQ ID NO: 48182 - DNA, 201 bp, Homo sapiens; identical to SEQ ID NO: 31116

SEQ ID NO: 48183 - DNA, 201 bp, Homo sapiens
ctacattaattacttttaaactgtaagacaacgcttttctacttgtcacagacctattctttatgacaagttactcttaagtttgctgttcgtaggagggmagatcaactgcggagtttgattatggacaatgtcttctgctcattagttaactttgcaaatactatcttttgaggattgtgtgtgggctcacttcaaata

SEQ ID NO: 48184 - DNA, 201 bp, Homo sapiens
accccatctgttgcctcctaggggaataaaaacattttgttttgtgatggagtctcactctgttgcccaggctggagtgcagtggtatgatctcggctcaytgcaacctcgagctcccaggttcaagcgattctcctgccacagcctcccaagtagctaggagtacaggtgcgcatcaccacccccagctaatttttgtat

SEQ ID NO: 48185 - DNA, 201 bp, Homo sapiens
gtcctcataatgtgagtatcgaagtttcctgcagaggctgaaattttagtttgtgaacaaaagctcagtaatgtagcagaaaaaactctcaatcaagatcycacttttctacttggtttagtcaggctttggggcttttatgtgttttagcttatttgctctaaaggttaataatgctcgctctgtttagtttccagagat

SEQ ID NO: 48186 - DNA, 201 bp, Homo sapiens
ttttgtgtttcgaggtagttccaaccgaaagggtaaacaataaccatggaaccttgtgttcagtgatttttcctctgtctgctctgacaggccgccttgamcattcaggacagccacattgagatccacaggctggttctccagcagcaggagggcctgtctctcggccactctatcctccgaggcggccccttgcaggac

SEQ ID NO: 48187 - DNA, 201 bp, Homo sapiens
aggctggtttccaaactttcttttcctccacttaagtgaggagtgacaattacactcctccttgtttggaatgttcacctttgggtgaattaatagtgcartattatatggcatttcatgccattcaaaagcagatttgaattcatgatctcatttgctctttataatgattttgtgaaatgatggttactgtctctgtaa

SEQ ID NO: 48188 - DNA, 201 bp, Homo sapiens; identical to SEQ ID NO: 31124

SEQ ID NO: 48189 - DNA, 201 bp, Homo sapiens; identical to SEQ ID NO: 31125

SEQ ID NO: 48190 - DNA, 201 bp, Homo sapiens; identical to SEQ ID NO: 31127

SEQ ID NO: 48191 - DNA, 201 bp, Homo sapiens; identical to SEQ ID NO: 31128

SEQ ID NO: 48192 - DNA, 201 bp, Homo sapiens; identical to SEQ ID NO: 31129

SEQ ID NO: 48193 - DNA, 201 bp, Homo sapiens; identical to SEQ ID NO: 31130

SEQ ID NO: 48194 - DNA, 201 bp, Homo sapiens; identical to SEQ ID NO: 31133

SEQ ID NO: 48195 - DNA, 201 bp, Homo sapiens; identical to SEQ ID NO: 31136

SEQ ID NO: 48196 - DNA, 201 bp, Homo sapiens
agttattttagttaaccttcttttaaaaaattggcattctgatatttccccctggatttaaccaatttgtatttacgtgaatgggacaatacatttgaatratcttgatatttcaaattatataaaagtcagacgcttttaaacatgcttcaaatcagatcaggggttcttcagttttttgattcacatgttctttgtgta

SEQ ID NO: 48197 - DNA, 201 bp, Homo sapiens; identical to SEQ ID NO: 31137

SEQ ID NO: 48198 - DNA, 201 bp, Homo sapiens
acttcaacacagctgatgtatttagaggatccagcttctcattctgtgggtccatggttggttggagagctgtccccaaagaaaaccaattggtggaactrgcaggacccactgagggtggcttagagaattgaatattttccaaaagtcagattaagagtacactccttaacttgcaaataacaccaatagagttataac

SEQ ID NO: 48199 - DNA, 201 bp, Homo sapiens
ttgtggaacatcaaacacttggtggaatgcaattaaaaagggtgccaaagattgtaacaatgtagaaaaatacttttgatagaagagaagaaaccacacartatgtattaatgtattatgccatgagtatagctgtgtaataattacctgtgcatatgaataaagactggaagagaataggaaaaatgaaaaaaggttgat

SEQ ID NO: 48200 - DNA, 201 bp, Homo sapiens
gttcactttctcctctatcatagggtaaggatatcttggcgagcaggtttgtttttgttggacaagcacacaaaagcccagatgcttctccacgcagggcmgagctctggaagccctccaaagtgggcgaccctttccacctccaggtttccatttccccgccactcccacaggctgggcagaatgcgctctctctctgga

SEQ ID NO: 48201 - DNA, 201 bp, Homo sapiens
tgttagagatgctcttggtataaagggctcagcagcagttttgtcatgagctcagtgttggccccaccctaatctagaaatttctttgcaggtttaggcayacaatatctaatgagtatatctgggagcctgtcaattatgatcttttgctgctattcagtggtaattgaaaaataattaagcagtagcacacagatatat

SEQ ID NO: 48202 - DNA, 201 bp, Homo sapiens
aacagagagcggcaaacaccacagtggagctgatgcacacggaccgaccaagggccctctgtgcaggggccttacaggtcgagcctcctgagcagagcaayggggtggctttggcaatattgacataatctcagggatttagtagatgggtagaagcactgctgtgaagtttgagaatgacccatatgaagccatttctct

SEQ ID NO: 48203 - DNA, 201 bp, Homo sapiens
ctatgaaatatggtggttttttaaaaacacaagttgtaggagaatatgggaacccgtgtgtgtgtgtttttaaatgaaaaatacttatatattgacggaamacttctagaatgatacccaaactcctggagtgggggtggggaataccttctatatacacacttttctactgtttgaattttttactatgagcccaaactg

SEQ ID NO: 48204 - DNA, 201 bp, Homo sapiens
tataaaattaaacatcagcaatttagctgtgcatatttgtatttagaggtgaaatagcttcagtctatggctgggaaaaggaattggaagtgtgactgcgygttgtgaccacaggcatgctttgtctcccagtgtggtaaaataggattcagagcattccaggttgatttgtaatgttgccctgacaaggaaatcattgcc

SEQ ID NO: 48205 - DNA, 201 bp, Homo sapiens
gcaatttagctgtgcatatttgtatttagaggtgaaatagcttcagtctatggctgggaaaaggaattggaagtgtgactgcgtgttgtgaccacaggcaygctttgtctcccagtgtggtaaaataggattcagagcattccaggttgatttgtaatgttgccctgacaaggaaatcattgcctgggaatatttttgttc

SEQ ID NO: 48206 - DNA, 201 bp, Homo sapiens
tttttgttctaacacaagctggttatttgtaattttgccatatggctgagcctgagggtgagtggtcagtggaacaagtgcagggaaaatggtttgcagcragtgtctttcttcaaatcaagcctcccttttgtctctccttgaaaatataatattagaggattttatcagaaaaagggagaatacacagtgtcctgctgt

SEQ ID NO: 48207 - DNA, 201 bp, Homo sapiens
tggctgctcttgctgagtactttgtgtagtattaacagatctgtgattaacagcataatggtgaggctggagggtctccttcattctttcactttttaccyccaccccttgaccacatcggtaaagtgccaaatatgttatttgagccttgaagtcaattcttgactgacagatattctgagggaaggtgctctgcagatg

SEQ ID NO: 48208 - DNA, 201 bp, Homo sapiens
ctttgtgtagtattaacagatctgtgattaacagcataatggtgaggctggagggtctccttcattctttcactttttacctccaccccttgaccacatcrgtaaagtgccaaatatgttatttgagccttgaagtcaattcttgactgacagatattctgagggaaggtgctctgcagatgcaaatatagttgatttaca

SEQ ID NO: 48209 - DNA, 201 bp, Homo sapiens
caaagaggttttcaccttcccatcatggtccaaaccccacctttgggtgctatcatagcatgccagtctcagggtttaaaacatttcaactttatctctcyttttttttttggtagactttgaaagaatattaagaatatttccatcttttaattatgattaatcaaggtgttattttgagtaaggcttgaataaggcttg

SEQ ID NO: 48210 - DNA, 201 bp, Homo sapiens
ttcctaatcttagagagctctaacgccaagacatctgccttgtacatctcaggtggcctcctgtaacctgtgctgtctgtttcttgcagatttggacaccycccacactgagtccccaaccccccatgactcaaattcacaccgccctcaactgcaggcgtttataacagaagcaaagctaaatctaccgacaaggacaat

SEQ ID NO: 48211 - DNA, 201 bp, Homo sapiens
acacaatttgctaatcccattaaagcatttgccaagtataaatgaaaggcagctcgtgttaccagctccacatgaatccgaatgatttaaatctatgtctrttataaattgttttctgggggatatgaggtagggaatgagaagaacttgaaacctctctaccgaaaaacagatggcatgcaatagaataaacaaatggct

SEQ ID NO: 48212 - DNA, 201 bp, Homo sapiens; identical to SEQ ID NO: 8412

SEQ ID NO: 48213 - DNA, 201 bp, Homo sapiens
aatttctacaggggagaaaagaaagtcagagaataggcggtgataagaaagtggattgaaaataggatatatacacttaaaagagtggtcaaggctagatraaattattcaaaccctccagagctttcacagcttttatcattgacagtaacacaacatcagccactggtgatggccttagctaggctccgtgggcgcttg

SEQ ID NO: 48214 - DNA, 201 bp, Homo sapiens; identical to SEQ ID NO: 8414

SEQ ID NO: 48215 - DNA, 201 bp, Homo sapiens
cacacccgggctaaattattaatttctagaaagctgttttgagctgtactttttttgagattgagagtctcactctgtcgcccaggttggagttcagtggygtgattttcaatcactgcaacctccacctcctgggctccatccacctcctggactcactgcaacctcccacttcagcctcctgagtagatgggactacag

SEQ ID NO: 48216 - DNA, 201 bp, Homo sapiens
atatctacattgtgtttttacttaggcaagtccaatcctaatttttttaaaagccccttttgggggcagtctttttctgactttagctggctatttttgtmacaattacattaaaaattcggtgactgatcttttcacagaatggatataacttattaaacttctattcaatcacttcacctctaagctgaactcttcaat

SEQ ID NO: 48217 - DNA, 201 bp, Homo sapiens
aaagaagttggtttagatatagaactaatctaatccttttgtaatgcctagtgggatgttcatgattaaggaccaggtttttgtttttattggtttttttytctcccctccttccctttttaatagtaacatttggaaaatatttctaaatgttttggattactgtggccaactcttgcatggggcctgaacattttcagt

SEQ ID NO: 48218 - DNA, 201 bp, Homo sapiens
ttactttccagttttggaagttatttcatgaacaaaattcttggatgttcaaacattaaatccaaattgatattttatttgtagtggaagagatggttggyttaagaactttttctgtactcctctatgggacaccagccaagactacagaatatttgaatttccttaaacaatagtctctgtgggacaattgctatgtaa

SEQ ID NO: 48219 - DNA, 201 bp, Homo sapiens
taataatatagatactgggaaaaaagtaacttgattaagtttgagttctctttccttttactacatattagaatttggtgccaaggaaactattttcaaawttcaaagcattgtatttagaatacctcatcttgataatttttttttaaaagacagctgtgttaaactttgacaagttttttatgtaagggaagaaaatag

SEQ ID NO: 48220 - DNA, 201 bp, Homo sapiens
ggaatgtatttgttgactagggctgccataacaaagtaccacaggctagggggcttagacaacagaaatttatttcttcagttctggaggctagaattagrgatcaaggtgttggcagcgttggtttcttccgaggcctctctccttgacttgcggatgagatggccaccttcttcctgcgtcttcacctggtcttccccc

SEQ ID NO: 48221 - DNA, 201 bp, Homo sapiens
gggctgccataacaaagtaccacaggctagggggcttagacaacagaaatttatttcttcagttctggaggctagaattagggatcaaggtgttggcagcrttggtttcttccgaggcctctctccttgacttgcggatgagatggccaccttcttcctgcgtcttcacctggtcttccccctgtgcctgtctgtgcccca

SEQ ID NO: 48222 - DNA, 201 bp, Homo sapiens
tctctctttatatcagtgatattggattagggcccaccataatgacctcaattaactttattctttaaagctgtatctacaaatacattctgagctactgrgggttaggaccttaacatgtgaattttggggggacacagttcagctcttaacaggggacaaaatgatgatttttctccctaccatagttttaggtgtcat

SEQ ID NO: 48223 - DNA, 201 bp, Homo sapiens
cagtgatattggattagggcccaccataatgacctcaattaactttattctttaaagctgtatctacaaatacattctgagctactgggggttaggacctyaacatgtgaattttggggggacacagttcagctcttaacaggggacaaaatgatgatttttctccctaccatagttttaggtgtcatgaaagccttaatt

SEQ ID NO: 48224 - DNA, 201 bp, Homo sapiens; identical to SEQ ID NO: 31157

SEQ ID NO: 48225 - DNA, 201 bp, Homo sapiens; identical to SEQ ID NO: 31158

SEQ ID NO: 48226 - DNA, 201 bp, Homo sapiens
gctcaggcagaactgacattgacaaagtttgtcttctctcttcctcattcttctgtaagcagcctggcagccatgggtctgcctctcctctgcttgctccstttggtcactggggttctttccttgatgccctgtccatccagaatcttccttgggggatctccagctccagaactttctctccccatcatcaaaatgctt

SEQ ID NO: 48227 - DNA, 201 bp, Homo sapiens; identical to SEQ ID NO: 31160

SEQ ID NO: 48228 - DNA, 201 bp, Homo sapiens; identical to SEQ ID NO: 31162

SEQ ID NO: 48229 - DNA, 201 bp, Homo sapiens
tggggtctcactgtgttgctcaggctgaacttgaacttctgacttcagtgatccttctgcctcagtctcccaaagtgctgggattacaggcatgagcccaygtgtccagccaatagctgctttttattggtgattacaagttatatataattttattggaaatacacaaatgttgttttgtaatttattaaatacaacata

SEQ ID NO: 48230 - DNA, 201 bp, Homo sapiens; identical to SEQ ID NO: 8397

SEQ ID NO: 48231 - DNA, 201 bp, Homo sapiens
tgtcgagggccatcctattgccattttcattgctatttggggatacattcttgtttgccaggcttttagctgtcatggcctttgatttatccatatttttrtaacagacagatttatgtcaccaggaggtcctttctgacccctctgccagtatttatacatactatatgtattttcatgagagaaaaactggagtggttt

SEQ ID NO: 48232 - DNA, 201 bp, Homo sapiens; identical to SEQ ID NO: 31101

SEQ ID NO: 48233 - DNA, 201 bp, Homo sapiens
aattccattcctacctataaaccctagcaagaaaacatgctgatatggtttggctgtgtccccacccaaatctcaccttgaattgtaactcccacaattcmtacatgtcatgagagaaactggtgtgaggtgattgaattatcggggtgggtctttcctgtactatactcatgatagtgaatgagtctcatgagatctgat

SEQ ID NO: 48234 - DNA, 201 bp, Homo sapiens
tatgttggccagtctggtctcgaactcctgacctcaagtgattcacccacctcggcctcgcaaagtgccaaacctggttttgtaaaggtactagcatgaaytgaatctgcagggcaaaaatattaaagtgtttaacaaaacaaagtattacctggcagattgcttcgtcaggtttaaagagttaagcttttctcctgcctt

SEQ ID NO: 48235 - DNA, 201 bp, Homo sapiens
ctgcttctgtaacatatctgctacacgtggaaagaaggtagccagtgaacatgcaaacaacacagacacagtgagaattgtagagaagtgcagatacctcktagctctacctggtcttggtcactgaattaatctgttgtccaatttctgagaccatcggcaattttaagcacttctgtctttagtccagtaatctgcatc

SEQ ID NO: 48236 - DNA, 201 bp, Homo sapiens
ctgtgggtctttcaggcccttttaatttgtatcataaagagactctttaatttttattagagttaagattgagatcatttttaaaggagcttgtccctacmtgcttctgtaacatatctgctacacgtggaaagaaggtagccagtgaacatgcaaacaacacagacacagtgagaattgtagagaagtgcagatacctct

SEQ ID NO: 48237 - DNA, 201 bp, Homo sapiens
gttgctaaggcaacccactggatgaacactaggggtggagagaatgttctttagatcctatggcacttgttatgatggtaaatcgataaaattgttttacrgttctcagctatatatatgtatattatttgtgaagctttaaatccttaattttaaaatgtcttctttgtcttacattccttttgtagtttttaatttttg

SEQ ID NO: 48238 - DNA, 201 bp, Homo sapiens
ataagaaacagcagcttaactcttccttaaaaaataagcttcctacttttgtctggcaacaatggcccttatactggaatagagaattacgcacttactcycacttctgggaaatagaacgtagagttggattccggtcactctctctccctcaattataattttcaagaacaaaaaatgtaaatggaagcaaacagccta

SEQ ID NO: 48239 - DNA, 201 bp, Homo sapiens
cagttcttcccagctcaaaataatagaaattttcattagctcaggtgtcagagggtggtaggtaagggtgtctttcaaaacaggttagtacagctaagtcyagcttagccaatggaatcgggcagggcttttgcctgaatgcaacttctagatcacgtgtttactttgtgcaaatttgtttttagcgaattatattaactt

SEQ ID NO: 48240 - DNA, 201 bp, Homo sapiens
atgtgaaacagaagagggaagactaaatttattcaaattgagatttggtttggccaccagcaatgtttacattattttgcaatagacttttatgaaagtgrgcaataaatttcagtggcaatggaaaaaggtgaattaaatcagcgaggaactgtttatgatctgttaacacaggaaatacttccaaagatagttttggca

SEQ ID NO: 48241 - DNA, 201 bp, Homo sapiens
cagcttttctgctctacatttgtgattcctgttttccatgtgacttggccttccaagattttatgggagtactgatgagtattttttatttgggcatgatygggtaagaggtgatataccttcactatttgacagggaaagggaatgattctgacactgattccaactggttcacttgggaaactaaaaattttgacctgc

SEQ ID NO: 48242 - DNA, 201 bp, Homo sapiens
ctatgttgcccaggctgatctcaaactccatgacatgttctctttggaagattaaataaaaaaagttagaaatctctttctccaaaaatttacagaatgcyatgtgagagcttttgtaggtagcaaactttaaatgatttttttgcaacaaaagcaatggaaacatggacagatactctttcaaaatgttgttactggctg

SEQ ID NO: 48243 - DNA, 201 bp, Homo sapiens
catacacgaagctcaaaaatggacatgtgtttaggaagcaggcactgatgagtgaagaaaggactctgttatatgatggccttgtttactggaaaactgcyacaggtcgtttcaaaggtactgtggctctaccagaccaatttctcccttcatacacattattcatttaacagaggacagattttcaaaagaaaaacagtt

SEQ ID NO: 48244 - DNA, 201 bp, Homo sapiens
aagacagagtcacagagtgactctagcacaaatttactaatcttaagagatgaccaccctatttttcaggatcataaatgggtttccccaaaaggacctayttttctcaccaagttaagagcttaaaggaaacactcattcctttagagatctgtcctagaaagaaaagcaatatttttgctctgtcccttccaggctgca

SEQ ID NO: 48245 - DNA, 201 bp, Homo sapiens
tttccatttccttatttataaaacagggatgactaccttatggaatcgttgcaagaattaaattattaatatatgcaatatgcttagaatagagcttgggrtatactaatcacttaatatatgctagccattattatcatattattttaaaaatctgttaataattgctcagcctagtcccagtctttaggcagatttctt

SEQ ID NO: 48246 - DNA, 201 bp, Homo sapiens
tttgaaacaaaagacatgagagactgtggcatacgtttggagatacccagaatgatttcctcccctctagattaaggtgtccaatgagaatgtccatctakctctgcctctttcaagcactctatataagaagtggggaaatgtggaagtccacccctgccctcgttggaactgatcaggttccaggctatggagcaatag

SEQ ID NO: 48247 - DNA, 201 bp, Homo sapiens
tccacccctgccctcgttggaactgatcaggttccaggctatggagcaatagcggactccttcctgggatgctatgctcttaaagtgtaaccaaatgcccyctcatcccctcacctttccacatccacctcttccataaagcaatgtaggttctggtcaaatggggaattggatatcttcctatttgatcccacgccacaa

SEQ ID NO: 48248 - DNA, 201 bp, Homo sapiens
aagagccccaatttccaccttcccctttttttatgcataggtctggcaataaatttaacttggctctgtctccaggcaatccagggttaaactgtctcctrgggcacacaatttcagtccctagggaaagtatgaaaaaccttctcttcttgttcagaagctcaattgagtgtctccattttatttcataaatgagatctg

SEQ ID NO: 48249 - DNA, 201 bp, Homo sapiens
ggttttctgcatagttgccagtgcttatttttacaatctctaacataacagcttcaaatataaacacaaacatagccagcatgaacgacagcatctgcatyggccacggagctaaaacaggctcttagaaatgtgcttgacatttcccgtggcagcttcacagcctccttggaaagccttggtccacctctctgctgctga

SEQ ID NO: 48250 - DNA, 201 bp, Homo sapiens
ttttctgcatagttgccagtgcttatttttacaatctctaacataacagcttcaaatataaacacaaacatagccagcatgaacgacagcatctgcatcgrccacggagctaaaacaggctcttagaaatgtgcttgacatttcccgtggcagcttcacagcctccttggaaagccttggtccacctctctgctgctgaca

SEQ ID NO: 48251 - DNA, 201 bp, Homo sapiens
ttttatgtgttgatgctcagatgactttggagttgaaagccccctcgaccttcctgctccatcaaactacctccctccacttgtgttcccagtagcttgayatggctggcaagcaccaagcttgccaacaccagtgaggggctgccatgtgggtaaagaacccaagggtactacaaatggtatctccaaagacagatggca

SEQ ID NO: 48252 - DNA, 201 bp, Homo sapiens; identical to SEQ ID NO: 31123

SEQ ID NO: 48253 - DNA, 201 bp, Homo sapiens
atgataatggtgttataatgtgtgcatgtgccaggttcttgctaaggtctttatgtgtgttactcatttatccttacaactgtcttatgaaataggcattrttatgtatgatccccattgtatagataaagacagattaagtagcttgcctagagtcataagctgagttgctaaacagattgacctgcacatctgaatcta

SEQ ID NO: 48254 - DNA, 201 bp, Homo sapiens
ttataaagaaaataaatgtatttggcttatggttctgtaggctgggaagtccaagattgggagaccacatctgctgagggcctttgtgccacactatcccrtggtggaagttggaatggcaagagagcatgacagagcaagagggggccaaacccacttttataacaaacccactctcatgataacaaaatcactcatcca

SEQ ID NO: 48255 - DNA, 201 bp, Homo sapiens
ggtcatggcacttaaggaatccctgagaagatttatgctctccatacggcacttgtctttttctgagccctcaccagcattgctttgaatgctccacttayggcaatctaggctttttctagcttgcccctccaaattctttcagcctccacccattacctagtttcaaagctgcttcattttcgggtgtttgttatggtc

SEQ ID NO: 48256 - DNA, 201 bp, Homo sapiens
cactgggtttggttgagcctaagaagaagggaatggaaaatgctcttggaggtgtggtccaggtcatgagctctggagtgagatagacttgggcttacttmccagctcgactgtgttttagctggtgacattggaccccagtctgttttctcattcataaagtgggaatagtaacattatttatggattgttgtgcagaat

SEQ ID NO: 48257 - DNA, 201 bp, Homo sapiens
ttggttgagcctaagaagaagggaatggaaaatgctcttggaggtgtggtccaggtcatgagctctggagtgagatagacttgggcttacttaccagctcsactgtgttttagctggtgacattggaccccagtctgttttctcattcataaagtgggaatagtaacattatttatggattgttgtgcagaatacttacac

SEQ ID NO: 48258 - DNA, 201 bp, Homo sapiens
tccccagaagggagatccaggtgctagcagaaaaaagggaaggatgccagacaaccagaaccccataaatgtctgctctggagaaaccaggaaggaagcayggcctgaggcactcgaggggctctcaacaccagcctcaaatggcaggtacagggagaggcctttcctctctaggagccactgagagattggcagtagggg

SEQ ID NO: 48259 - DNA, 201 bp, Homo sapiens
gggattagaactcattgaccttggggaagtcatcagacttttcttgcctcaggtgaacacagtggcataattatgctggcccacccagtgaaatgctgccrgaatgaactcagtcatctctttcatccagatacagattcatcatggtgtcaggtttagctcattgcttgtttctaccccttgtgtgtctgatcattttct

SEQ ID NO: 48260 - DNA, 201 bp, Homo sapiens
aaccagtttttgaatgtccccatcttgttttgctgctgatacctttccaagtgtcagatgagcaaggcagcacctgctgttccagctcaggctctgcaatrggtgccgaaaagcctcccttcttcccttctcagatttcaacatccttaagggcgagaatggtctctaatcttcctcctttttacctcttttcttgttcct

SEQ ID NO: 48261 - DNA, 201 bp, Homo sapiens
gtgccgaaaagcctcccttcttcccttctcagatttcaacatccttaagggcgagaatggtctctaatcttcctcctttttacctcttttcttgttcctaygtgtgctttggcaagagagtacctcagtaaaggatttggtgggcagaataaagcccagatctgtatatcttggtatccaggaggcagctcgccacatgtg

SEQ ID NO: 48262 - DNA, 201 bp, Homo sapiens
aaacacttcaggcaaagattcttcgtaggacatcactctgtttttcaatgagtctttattttatgactttgggagtgctcccttgctttcttgggagagcrcaactatgcatttaagtaattctgaaacagagtccatccaatgcttcaagcaataaggttctcatgttattcaatccattatttgggtagaaaggaagtc

SEQ ID NO: 48263 - DNA, 201 bp, Homo sapiens
ggccgtctctgatgcaggggagaaggtattgtgaactgatttgttagtaaacggcagcggttactgtgtataataaaatagcctcaggttctggtctgtcmcggcagtcagtggggcaaaggtgcttttctgaattgttctcaattgatttaaatattcatatttaaactttctaacttatttcttcttcaaatgtgcttg

SEQ ID NO: 48264 - DNA, 201 bp, Homo sapiens
caataaggttctcatgttattcaatccattatttgggtagaaaggaagtcctttttttaaaaaaaaaaaaaactcaattaacaaatctttatcaagtcctyctgcaagctcaccctgcccactcctggcaggattagtccctctcctgtcaccccatttcttctctttactctaatgttcattacctggcattggctgttt

SEQ ID NO: 48265 - DNA, 201 bp, Homo sapiens
aggggagaaggtattgtgaactgatttgttagtaaacggcagcggttactgtgtataataaaatagcctcaggttctggtctgtcacggcagtcagtgggrcaaaggtgcttttctgaattgttctcaattgatttaaatattcatatttaaactttctaacttatttcttcttcaaatgtgcttgcactgcctgtgtcat

SEQ ID NO: 48266 - DNA, 201 bp, Homo sapiens
tgagctccgtgaagaaagaaaggataggtcttgtcgtcttcataccatctgtgcctaacacagtgcctgacacacatcaggtatttattgaatgaaggaakaagagaaaataatctaaaagaggtcataatattcacagtccttgaacatggtcatttcttcgaagtactcaatggatactcatgtgtaacttcttaagac

SEQ ID NO: 48267 - DNA, 201 bp, Homo sapiens
caaggtataggctgctggtaggaaagatcaagattttaaactcattactactcactgtcatattaacttgggttatatcactgagttaattaactatcacrtagtacagaatatgaacttaaagcactagtgaacaagataggtaaaagtttgttatgtcactttgggaggccgaggcagacagatcacgaggtcaggaga

SEQ ID NO: 48268 - DNA, 201 bp, Homo sapiens
atatatataggagtctgaggaaatcatctggcaactctttcttctagaatcgtgactatcacattaggttatgttttaaaggaaactataatattgcttgytcttggtaatctatatcatgacaaaaatataaagtactgggctcaagggcttaattttcatctttctcatcgacaagtggagatgattgactttagcctt

SEQ ID NO: 48269 - DNA, 201 bp, Homo sapiens
tgctcttgcttccaggctggagtgcagtggtgcaatcacagcttactgcagcttcaaactcctgggctcaagagatcctcccacctcagcctcccaagtakttgggactgcaggcacctattatcacatctggctaacttgtttttgtcttagtctgttttgtgctgctctaatggagtaacacagatggggtaatttata

SEQ ID NO: 48270 - DNA, 201 bp, Homo sapiens
aataaataaataaataaataaataaaaataaaaaataaacctggggctggatgtgatggctcatgtctgtaattccagcgctttgggaggttgaggtgggrgggtcatttgaggcccaggagtacaataccagcctgggcaacatagtgagactttgtctctaccaaaaaaaaaaaaaaaatttagctaggtgtggtgtgg

SEQ ID NO: 48271 - DNA, 201 bp, Homo sapiens
agcctcccttttgtctctccttgaaaatataatattagaggattttatcagaaaaagggagaatacacagtgtcctgctgttgctaggtaaccagaaaacrtcaaacccagtcagagctgaaactggcttgattttccctaggaacctggctgctcttgctgagtactttgtgtagtattaacagatctgtgattaacagc

SEQ ID NO: 48272 - DNA, 201 bp, Homo sapiens
ggaatactctttctggagaagttttggagggagctaaccttttctctttgctttaaggaaaaggtacagctaagtaactgaagcaaaattaaaatctggcyaaatttcttttttaaaaaattgttattattttgagacaagatctcactctgctgcccaggctggagtgcaatggcccaatctcggttaactgcaacctcc

SEQ ID NO: 48273 - DNA, 201 bp, Homo sapiens
gcccttttcagtccttgtctttcttggcctcaccacagtcctctgtaagctccgagcattgtgcattactattaaactatttgtttagctctcaattgttrgcaaacagttcatgtgtttggacttggctgtctgtaaacttttcaagggcaggaccttgtatttcttcatgccctttgtaatattcaggacgatttttaa

SEQ ID NO: 48274 - DNA, 201 bp, Homo sapiens; identical to SEQ ID NO: 31100

SEQ ID NO: 48275 - DNA, 201 bp, Homo sapiens
gccaaacgtccttttataacaaaccctctcatgataataaacccacacccatgataatgacattaatccattcatgagggcagagtcctcatgacctaatsacctcttaaaggcccacctctcaatactgttgcattggggattaagtttccaacaggtgcttttctggaggacacattcaaaccatagcattctgcctct

SEQ ID NO: 48276 - DNA, 201 bp, Homo sapiens; identical to SEQ ID NO: 31102

SEQ ID NO: 48277 - DNA, 201 bp, Homo sapiens; identical to SEQ ID NO: 31105

SEQ ID NO: 48278 - DNA, 201 bp, Homo sapiens
attaatgttgcattaatttccagcaatcccacataagactctagggagagttaccctccctcatcaaagtaaaaagtgggaaaccctgtagcttacaaaartaagagcaagtttctcagccaggctttatctaggacctgacccaagtgttcctttcacagtaatacattcctttacttctctgggagacattgccagatt

SEQ ID NO: 48279 - DNA, 201 bp, Homo sapiens; identical to SEQ ID NO: 31103

SEQ ID NO: 48280 - DNA, 201 bp, Homo sapiens; identical to SEQ ID NO: 31109

SEQ ID NO: 48281 - DNA, 201 bp, Homo sapiens; identical to SEQ ID NO: 31112

SEQ ID NO: 48282 - DNA, 201 bp, Homo sapiens
tttatgtcccaagaaacatttctggaaaatgtggtacaatttttttaagtacttgactatgaaaaacttggtaattgcagatgaagaactcaaactttcayagatagaatgaaatatagagggtggcatttatatagtgaaaagtgacagcacatcaaggacttaagcagttgtaacttgcctagcaaatacaaatttgtt

SEQ ID NO: 48283 - DNA, 201 bp, Homo sapiens
agcatggtttagccatgtggctctgcaagtgagcatggaactcagtgctctactgtgaaagaggaattaacttggggaaaatccaaatgagaatataaaawtttaaaatatatttcagtttgaagtttcctggttttattgagtatatatttgctccagcatatttttttctacaattagtctatgaaattctatagggct

SEQ ID NO: 48284 - DNA, 201 bp, Homo sapiens; identical to SEQ ID NO: 31114

SEQ ID NO: 48285 - DNA, 201 bp, Homo sapiens
tccatatccaataaagaataaagtcctctgtgtcccacccctggcaactaccaatcatttttttttctgtttctcatgtcaaactcatgtttgattactckaggtacctcatataactggcatcatatagtatttttcctttctgtctgagttctttcacttagggtaatgttgtcaaggcttgtccaattgtagcatgtg

SEQ ID NO: 48286 - DNA, 201 bp, Homo sapiens; identical to SEQ ID NO: 31117

SEQ ID NO: 48287 - DNA, 201 bp, Homo sapiens
aaatagccaaatataaagaaagaaatatgtcaggttgtatcaagtgctatgaagaaaaataagcaggataagggagagagagggtgatggagttgggatcrctctgttttagatagggtggccagggaaggcctctttgatataatgatatgtaagtggacatgaaggaagaaagctaagtggtatcttgagggagagtct

SEQ ID NO: 48288 - DNA, 201 bp, Homo sapiens
ggacaagtgaatctgatgaagacaagaggaaagctgaagccagagtggccaaaattcagcaatgtcaaggtacagtgcaggcacttctggctccctggtcrtggtgttctcctgggtgttgggaaagcctgagtgtcatgaacaggaggttataactacatgattcatcctgtgcacctgaggcccacctggaccaccctc

SEQ ID NO: 48289 - DNA, 201 bp, Homo sapiens
tgactgaagtggggagaaatgtttttcttgctattgagttaaggctttttaaaaacaacacactgagcgttactgtctagttcaagtatttgcatggagcsttttaaaactggttggctcctgttttaaactctggattttatatttccctcagtatttttttaagtgtgtaatttctggattcaaacactcagttcactc

SEQ ID NO: 48290 - DNA, 201 bp, Homo sapiens
cttgccagaaatgcaaattctcagacctcatgctggacctactgaatcagacactctgtggatggggcccagcaatctgtgttttaataaaactttcaagygattctgctgtgtgctaaagattgagaaccatggacttagtgcaaacattttcatgttcttctgtattcatatatacatatacaagctttagtagaagga

SEQ ID NO: 48291 - DNA, 201 bp, Homo sapiens
acacacacacacacacacacacacacacacacacacaactccccatccccatccccgttcattcttggttctgtatcttcttgaagtagagcatacaatgyaacttaaaaaagagttatttctgatatatattcaatttggctgttttgaacaagtcttctcttgaagccattaaggggattttccatgtacctcaaaata

SEQ ID NO: 48292 - DNA, 201 bp, Homo sapiens
aaatgtaaaagctatttaaattctattatgaaattatttgaaggttttctcttctcaattattttctaaagtgcctgattttgatataggtaaatatcacrtaattaaattagatatgaaatgaagcaaccaaccttctacatttgcccagaggttatacagtattacccatcttcataatctgatagtggattatgacta

SEQ ID NO: 48293 - DNA, 201 bp, Homo sapiens
taagaatgcccttgaaagataggatgatgatcaagttgacttcgtgacaatggcaatgaggatgatgatagcaaaagcagtaattactgacaaatattgarcatttgtatgtgccttgtactgttttaagcagtttacatttattatctcatttaagcaatttacttcctcattctggaatttgatcttcatcttggtcat

SEQ ID NO: 48294 - DNA, 201 bp, Homo sapiens
ataaatcagcatggagaaatagtttatgcttgtttcttaatgatttaaacaaatttcttagctaatgatgcttttcaggggaagaagaagggaggtggaakgtttgtgacaaaggtggaaagtctctttttctgtattagtaaaatattgcccccaaatcatttccttttgtatatttgtgaggtcatgtcttccaacctt

SEQ ID NO: 48295 - DNA, 201 bp, Homo sapiens
tatatattttcagaccatgtataaatttttaaacactttattataatctcttttaggaatcactgctttctggagttcgctcacgttcttattcttgctcrtcacccaaaatttctttaggaaaaactcgtttggtgcgtgaattaacagtatgcagttcaagtgaaggtaagcatcatttaacatttggctttgaaaaca

SEQ ID NO: 48296 - DNA, 201 bp, Homo sapiens
gcagtaatgagcttctcctgaatgctaattactggagaattgttcagggagacggcaagaactgttggtttgtggtaaattagtcaccagctctattgagrtggactgaaagtttagatcggagctataaaggcaccaaaatcctgatgattgacggccagacttggtgacagtaccaatatggaaataccccaattgtgc

SEQ ID NO: 48297 - DNA, 201 bp, Homo sapiens
tccagatgcctgtggcttagatttgtagtccctaatgttgtccacgaagagtttctgtatgggaccaagtttcttgttaaatgccactgtgtgacaccaaygttcttctgcaaagggagtgagactactgaccgaatgacagaggagaacttgaagagcctctgaagaatcatggggactctatgtgcctgagccaccacc

SEQ ID NO: 48298 - DNA, 201 bp, Homo sapiens
tcaacctcagcttaaaaagttgaagtatcggctgggcgtggtggctcacgtttttaatcccagcactttgggaggccgaggtgggtgaatcaccagaggtyaggagttccagaccagcctggccaacatggcaaaaccccatctctactaaaaatatgaaaatcagctgggcctggtggtgggcgcctgtaattccagcta

SEQ ID NO: 48299 - DNA, 201 bp, Homo sapiens
tgaaaatgtttgctgtcccttgctgatgctaacttagttcatgaagtcattaaatgttggcatattttggccatgtttctccctaccctctttaaattacrgaaagtgatttaaaaaaatccagagcaatgccttacttatataaggtaactcattttctcattattttctagctggtagtgtgtataatgatacaatatg

SEQ ID NO: 48300 - DNA, 201 bp, Homo sapiens
ccacagagcacatctctgaacttgctgctgctaggattttatgaggacattgcagctatatgaaaattaactcttcttatgctgtccttcaagacttcatytgagctttgtttaaaagcagttatttattggttctgtatgttagggcattagtgttatgaagaatagggatgactctagtgaaaagtatccaaaaagata

SEQ ID NO: 48301 - DNA, 201 bp, Homo sapiens
agtgcttgttaaaggtttgtggagataaattgaggataaaagttttggggttgcaaagaggtttgagaactgccagtccatgttctccttctctatgttgwaactatttttaagtgctagggaatggggtatataaaagacaatatgatctcttccctcacgaagcttattatctagttgagaaggtcacactagtggaaa

SEQ ID NO: 48302 - DNA, 201 bp, Homo sapiens
gtttaggttggtgtatttttaatagctcgacaccttttcactgatagtcccagctgatgaattaacctcacattgttactatttggaaaacatgtttaagytttctgtgcttcaaattatggctttgcctttagatctgtggtccttgatctatgaagtcagatatctctagagtttgaaattattgaccacacaattaag

SEQ ID NO: 48303 - DNA, 201 bp, Homo sapiens
cataattaataatatttttaaaaaagcatttttatgtttacactgttatatctcaggtcttatcaacctcagcttaaaaagttgaagtatcggctgggcgyggtggctcacgtttttaatcccagcactttgggaggccgaggtgggtgaatcaccagaggtcaggagttccagaccagcctggccaacatggcaaaaccc

SEQ ID NO: 48304 - DNA, 201 bp, Homo sapiens
tatgatattcacatttctaccaggttgggtgatggtttaagttttcatatttcataattaataatatttttaaaaaagcatttttatgtttacactgttayatctcaggtcttatcaacctcagcttaaaaagttgaagtatcggctgggcgtggtggctcacgtttttaatcccagcactttgggaggccgaggtgggtg

SEQ ID NO: 48305 - DNA, 201 bp, Homo sapiens
attcctagtggggatgaattggactcttttgagactaacactgaaccggattttaatatctccagggctgaatcccttcctctatcaagtaatctacagtygaaggtattcttattgctattaatttggtatattgcaagtgtggagaatatgttgtctgcatttacccatctgtatctgaaaggcatattatattttatt

SEQ ID NO: 48306 - DNA, 201 bp, Homo sapiens
tgttgaaacacttcagaatacccatgtatataggcatttacaaaaaaaaaaattacatttacaaagggataattggccagcaagctcgattgctctgtgtstgtgtgtgtgtgtgtgtgtgtgtgtgtgtgtgtgtgtgtgtgtgttggtaggcttgttttatactgagtatccagtggctaattccttggaagggacttt

SEQ ID NO: 48307 - DNA, 201 bp, Homo sapiens
tatgtgtgaagtgatgtgtcattttggttttgattttcatttccccaatagctaatggagttgagcatcttttcatgttcttattggccatttgtatatcyttttggagaaacatctgttcaaatcctttgaccatttttgaattggttatttatttatttatattgttgagttataagatttttaaaaatatactagata

SEQ ID NO: 48308 - DNA, 201 bp, Homo sapiens
tcctggcccctataagtctattcatttttgtcacaaatgtagtatgtgtgttttaaggatggattatgtataaacataggaggctgatgacgtttgctctytctggttcataaacctattgcttcaacccctcaaactcctttgtgtttcctaaagatagcatgtccttatctgtcttcatactgaactccgactttccat

SEQ ID NO: 48309 - DNA, 201 bp, Homo sapiens
ggtgactggtggctggcagcccctaggtagtttcaggataggcactggtcacaggaaagactaagggaagattagaggattgggattttcagctccacccsccaacctctggggagaagagaggggctgaagactaaactgatcacaaatggccaatgatgcaatgagtcatgcttatgtaatgaagcttccttaaaaacc

SEQ ID NO: 48310 - DNA, 201 bp, Homo sapiens
gaaagtatatggtgaattcttctaggaatagtccatcttggagatgtccacaaacacaaagatgacattgaatcatagagtcatgcaggtattttctttcratcattctgttgattgaaggagaaagtctcagtgtggtacccttgcatctttaacatttcttgaatccttcagaatctccctttacaacaaagagtcaga

SEQ ID NO: 48311 - DNA, 201 bp, Homo sapiens
ttgcggaatattgagcaaggtgcctgagtattacctgttaattagttttgtaaaaggcacacaaaccaatgtttatcgacatattcaaagacaaaattaargtgataggttttatagtcattctgccttagaatattttatttagatgaaaaatgtgaaaaattcagaatttcataaagtcaagaattgatatttttccat

SEQ ID NO: 48312 - DNA, 201 bp, Homo sapiens
ggggggagttagcatgtaccctatttaatgtatttatttatagtcatttataaatcatattactgtaacaatgtatatatattttgactagggacagggtstggctctgttgctcagactgaagggcagtggtgcagtggcacgatcatacctcactgtagcctacaactcctgggtttgggagatcctcctgcctcagcc

SEQ ID NO: 48313 - DNA, 201 bp, Homo sapiens
catggtgaaaccccatctgtactaataatacaaaaattagctgggcgtggtggtgggcatctgtagtcccagctactcaggaggctgaggtaggagaattkcttgaacctgggaggcagagcttgcagtgagctgagattgagccactgtattccagcctgggcaagagagtaagactccatctcaaaaaaaaaaaaaaaa

SEQ ID NO: 48314 - DNA, 201 bp, Homo sapiens
attacaggtgcctgccaccctgcccagctaatttttgcattttagtagatatggggtttcaccatattggtcaggctggtcttgaactcctgacctgaggkgatccacctgcctcagcctcccaaagtgctggcattacaggtgtgagccaccatgcccagccccacaattcattcttaagagaagcctctaaagtactgc

SEQ ID NO: 48315 - DNA, 201 bp, Homo sapiens
accctgcccagctaatttttgcattttagtagatatggggtttcaccatattggtcaggctggtcttgaactcctgacctgaggtgatccacctgcctcarcctcccaaagtgctggcattacaggtgtgagccaccatgcccagccccacaattcattcttaagagaagcctctaaagtactgcagcagagctctggctg

SEQ ID NO: 48316 - DNA, 201 bp, Homo sapiens
gaattcaaacaaaaagtgttgggacataaacagaagtgggagttggcgctgggggggacaggaatgcccaaggagatttgtacttagatgtgccatctagrcccaggaggatgccattctgagaacaactcctgggggtaacagggaagtgaacagattgtttcctcacacagaaaatggcagatggcctcatctttcctc

SEQ ID NO: 48317 - DNA, 201 bp, Homo sapiens
ggatgccattctgagaacaactcctgggggtaacagggaagtgaacagattgtttcctcacacagaaaatggcagatggcctcatctttcctccttccttstgatttcagacaaaacttcctttcttgggaaggaactgtgttggtgtgaggtggggcctgggcaggtgggcctgggtgtgtgaggagactggagtttaga

SEQ ID NO: 48318 - DNA, 201 bp, Homo sapiens
tttcctatttctggatctagtattcagtggttgcttcttctggtgggttgttggtgtaactttgttctgtggtatcttagggtatctacattttccctatyatttactcactctgcaatgaggagagggctgtctgaatctgatgcttatcagccgggccaatgcatagattagccttgggccctgcttgctggccactgg

SEQ ID NO: 48319 - DNA, 201 bp, Homo sapiens
gaaaagtacaggaaagtgttaagaaaataagtcataatctcacccccatggataatgttattatattaaaatactaatatattttatcatttttaaggtgwaatttttcttctcattttaacatctctaaaattgagatgctcttacattcactgtgcttcctggcagatgtcattacctacacgtgtgtgaccttggtta

SEQ ID NO: 48320 - DNA, 201 bp, Homo sapiens
ttccactcagtagtcatgtcacagatgcatgtgagtgaacatgatgatccttcagggggaaatttgcagttgcaaacctctgtgtcaataggaacacataytgcgtcagatcacagagttgagggctgttttgaaggtgacatttcagtgctacaggtggttgtctcctatagtcaggagggatagcaggaggtagaaaga

SEQ ID NO: 48321 - DNA, 201 bp, Homo sapiens
ctttacatacatttggcatcatcagcctaatggtcttgtagctgttggtcaatagctctattttacagataaggaaactgaggcttaaggaggttaaacarcttgcccagcgccacacatccagttagaggcagagtgaggggccctgctccaagtgtgcatgactgtttcttgccttggttcttcccacacctgacactt

SEQ ID NO: 48322 - DNA, 201 bp, Homo sapiens
ttaggatagttagctcttcttgttgaattgatccctttaccattatgtaatggccttctttgtctcttttgatctttgttggtttaaagtctgttttatcygagattaggattgcaacccctgcctttttttgttttccatttgcttggtagatcttcctccatccttttattttgagcctatgtgtgtctctgcacgtga

SEQ ID NO: 48323 - DNA, 201 bp, Homo sapiens
ctgttttagatagggtggccagggaaggcctctttgatataatgatatgtaagtggacatgaaggaagaaagctaagtggtatcttgagggagagtcttcyaggcgtagggaatggccggcacaaaggtcctggtgcatggaagtgccaggctcgcctgaggagcaggcagggggacagcacaggctgagggaagggaggg

SEQ ID NO: 48324 - DNA, 201 bp, Homo sapiens
ctttcttttcttctgtctcttcctcttgaaacccatccatccttccaggtcctgctcagttttcacctcctgtaaaaacatattccgaatcctaatagatratagaatgctcttcctcctccatgctgcagtagcatttataatgctctaataatgctgatggagatgagtgctgatcacatgcttctgtatggtctagtg

SEQ ID NO: 48325 - DNA, 201 bp, Homo sapiens
ctggagaagtacttttaatttctttcaataacttttccttcacattcacaccttgactgtttggcacaagaggcctgctttcagctatcttggcttttgaygtgcctttctcactaagctcaataatttcttgcttttgatttgaagtgagagacatgcaactcttcctttcacctgaacacttagaggccattgtagggt

SEQ ID NO: 48326 - DNA, 201 bp, Homo sapiens
tggaaattgaaactggtattagacaccataaacttctatgatgtgagtgtatttgaagagggggaatgtatttgttgactagggctgccataacaaagtamcacaggctagggggcttagacaacagaaatttatttcttcagttctggaggctagaattagggatcaaggtgttggcagcgttggtttcttccgaggcct

SEQ ID NO: 48327 - DNA, 201 bp, Homo sapiens
ttcccaagtagctgggattacaggtgcacaccaccacacctggctaatttttgtaatttttgtacagacaaggttttgccgtgttggccaggctggtctcraactcctgatctcagatgatccgcccacctcggcctcccaaagtgctgggattacaagcatgagctaccttgcccagccaaaatctgaccaattttcaaa

SEQ ID NO: 48328 - DNA, 201 bp, Homo sapiens
acaagaacaaaactgtctcaaaaaaaaaaaaaaaaaaaaaaagaaagaaagaaagaaaatgaaagaaagaaatggcttttgctaggtaggaatgttcattyggggtaacataaaattttgtttaaaaagagatttggagggaggagaaaaaggctaattaaatactagttggaaattaaatgaatacctattgcacccccc

SEQ ID NO: 48329 - DNA, 201 bp, Homo sapiens
gaattttatatataccaaagttgaactataacaacattgttagttttttgacttggtaagggaagtgaattgaactttgtaaagaaaataataattacatrataataaaattgtgatgaatatttatatctgtatattgatagatattgaagtctgttatcaagcctagttcaacacatagaaattaaggcaggaatattg

SEQ ID NO: 48330 - DNA, 201 bp, Homo sapiens
ttacaatatcaaattattattcagagatatatataggagtctgaggaaatcatctggcaactctttcttctagaatcgtgactatcacattaggttatgtyttaaaggaaactataatattgcttgctcttggtaatctatatcatgacaaaaatataaagtactgggctcaagggcttaattttcatctttctcatcgac

SEQ ID NO: 48331 - DNA, 201 bp, Homo sapiens
tcttttgagtttacaaacaatccagttacactctttaagttattttaaaatgtacagattaggttgagtatagtcactctattgtgctatcaaatagtagstcttattcattctttccatttttttttgtacccatcctttgtaatgttttattgacctttcagggcatcaagaattaacacttaccattagtttataagc

SEQ ID NO: 48332 - DNA, 201 bp, Homo sapiens
tttcatctttctcatcgacaagtggagatgattgactttagccttttgcagattttatacaaggaaaaggaaagatgacattcgcttgtagagcctggtgrgccaggagtgcttactgccaacttcctgattgcatatttctctgggggcaggttggctatgtgagccaactgggccagggccatcccgcctcagcacaca

SEQ ID NO: 48333 - DNA, 201 bp, Homo sapiens
taagttgttaatgggtctctgccacattctcatttaacttgacaagggttcatttaacttgataagggtacattttgaagatctgcctctaaaaagtgagwctttttccctagttggcaagctctaagtatttttcccagtagttttccttcaggctttgtagaattaggcatggcctatggtgtgtggcaagcttatcaa

SEQ ID NO: 48334 - DNA, 201 bp, Homo sapiens
gtctcctgctgtgtttggtcccaagaatgttggttgctgctgggctcattgtgggtgttgaaggtataatctgatgtctagaggtagtgggggaaactctmtcctattcagccttttctaatttctggatgttggtatagcttccatgaatacttggtggagcatgctccccttggtcccagccttctgcagggagggccg

SEQ ID NO: 48335 - DNA, 201 bp, Homo sapiens
ttcaaaacaggttagtacagctaagtctagcttagccaatggaatcgggcagggcttttgcctgaatgcaacttctagatcacgtgtttactttgtgcaartttgtttttagcgaattatattaactttacttgtgtctttatttaaaacacagcagcatgtgcatctcagaggattgccacctgctggggtgtttctgcc

SEQ ID NO: 48336 - DNA, 201 bp, Homo sapiens; identical to SEQ ID NO: 31151

SEQ ID NO: 48337 - DNA, 201 bp, Homo sapiens
gtgtgaccttggttacaggggttcatattgttgtcatttcagtttatttatataccttgctggtgctacataaattaattgctttcaaaatgacttcaccrtgatctagcattataaggcaaagttactatgtaactagaaagacttggaaataacagcatgttacatgataaaatctatgtatagattaatttagaaaag

SEQ ID NO: 48338 - DNA, 201 bp, Homo sapiens
taaaaataaaagtcacttaatgtggatgggaatatggggagggaatggggaaatggcatttaggacatttcctgctttgactaagacaagttgctgggagrtctatgcttctccccagatagactagtgaatgttactatgttgtcctcatgatgttaacagccctttgggaatctactcacttacccagggtaggtcagt

SEQ ID NO: 48339 - DNA, 201 bp, Homo sapiens
taataagagttatttatttgcgtcttttctaatcatgcttgagaatcctattcgtcccagaaatttattttcctgtgttatgtgcatgtatgtttttttaytgatagtgcctaaagttgtagaagttgataagcttacaagatctctgttgcaatctgtttttccttttaagttggctaaattatgtttattgcaaactcc

SEQ ID NO: 48340 - DNA, 201 bp, Homo sapiens
tagagagcagattgcagaattctttttctaagcacatgttgctttgctgtgttggttcattaatctgctatttacagtgcttcatgtggttttgtcagcayggttttacatactggctttggtataattccgaaactcagtttgagttaaaccacattcagcttttgtttaaaagaagcatgtctcttactttttgtgtat

SEQ ID NO: 48341 - DNA, 201 bp, Homo sapiens
tcatgtcttttcatgacttgatagctcatttctttttaatgctgaatgctaacgctaataccatcaactggatgtaccacaatttatttatcatttgcctrctgaaagacatcttggttgtttccaagttttggcaattctgaatagagctgctgtaaacatccatgtgcaggtttttgtatgatgtaagtttttagttcc

SEQ ID NO: 48342 - DNA, 201 bp, Homo sapiens
tactttttaaagaagttggtttagatatagaactaatctaatccttttgtaatgcctagtgggatgttcatgattaaggaccaggtttttgtttttattgktttttttttctcccctccttccctttttaatagtaacatttggaaaatatttctaaatgttttggattactgtggccaactcttgcatggggcctgaaca

SEQ ID NO: 48343 - DNA, 201 bp, Homo sapiens
cattaaggcaagaaaaatcagatttttcttgaaattaagaaatgagatgaggcgtgaaaaagaagaaatatctcagagtgggtaatatataaagaaaagakgtgtaactggctcacagttctgtaagctgtacaggaagcatggtgctggcatttgcttggtttctggggaggcctcagaaaacttacagtcatggcagaa

SEQ ID NO: 48344 - DNA, 201 bp, Homo sapiens
ttccttaaacaatagtctctgtgggacaattgctatgtaatcggccctatgagatgctcaacagcattactctgaaaggcaaaaacaaagaaacaacaatwaaaaaacccaacattttattcttgtggctttttttctcctagctttaacattttagaactatatattgaatgcatctatatgttatttgcctttttcatt

SEQ ID NO: 48345 - DNA, 201 bp, Homo sapiens
aattaatacatttattaatttttattaattaaattaaaattaattaaattaaattaaaatttatttatttattaagtgtcagaagtgctatgcaagtgccratatattttatttcatttagcaatgttaagaatttcctaagataggcaggcactgtttttattcctgttttacaatttagtagcagaggcagccaggatt

SEQ ID NO: 48346 - DNA, 201 bp, Homo sapiens
tcctgttttacaatttagtagcagaggcagccaggattggagtccaggtctgcttgaatctttgaggccttacacttttcactagagcttcaggaggtggmtagagatccagaccagtatctctggtctgcatgtacagtcattgagccagacccatgtttttctaatctctaggttatttttggtactcttaaaaattcc

SEQ ID NO: 48347 - DNA, 201 bp, Homo sapiens
tggtccagcagttcttaaaatgtgtcttgattgttcggtgttcacttaagtttaaaaagcagttttaatattgcttcttatctgcaggaaaagccattacrtaggaattaacagttcattacaaaagagtggatgggaactactcattttatgtgacagccacatcttgcttcaagccacataccctgaaacttctaggca

SEQ ID NO: 48348 - DNA, 201 bp, Homo sapiens
cagaccagtatctctggtctgcatgtacagtcattgagccagacccatgtttttctaatctctaggttatttttggtactcttaaaaattccagagcagcmgggtactgagaaagagactgtagctcaaggaaagccaatctcgatagcagccttcctggcataactgcctgtgtctcctagactggtctttgtaaaatgc

SEQ ID NO: 48349 - DNA, 201 bp, Homo sapiens; identical to SEQ ID NO: 31106

SEQ ID NO: 48350 - DNA, 201 bp, Homo sapiens; identical to SEQ ID NO: 31110

SEQ ID NO: 48351 - DNA, 201 bp, Homo sapiens; identical to SEQ ID NO: 31111

SEQ ID NO: 48352 - DNA, 201 bp, Homo sapiens
atcctgacttcttttcataaaggctcttcccagtccctgggggaggaataggattcatctgggggtcagactgttgctcttccccactagtagcttggggragtgggaaaggtattcgatggaaggtgaccaccagggatttctggtccaaggttagcagtgtgatggaacctagatcaaggttatgggtcttcagtttgc

SEQ ID NO: 48353 - DNA, 201 bp, Homo sapiens; identical to SEQ ID NO: 31113

SEQ ID NO: 48354 - DNA, 201 bp, Homo sapiens
tttcagttgttagtgagttcctggaatttgaggtacagcatttaggatcaggggcagtagaatcaagctttgtgcctattggcatctaaagggtcagggaygggctaagcctttgagcagagctgtggttgcagcctcacccccatgcctccctacctctcttcctcccctcccctgccttgagggtcctcctttgcttca

SEQ ID NO: 48355 - DNA, 201 bp, Homo sapiens
actggggaaagttaggtaagttgaaagttagctttcaacttatttgcatttctaaatctcctcttaactcatgtattcagtaaacatttattgacggtccrctaaaggccaagcaatctgtgcgggacaaaataaagattaataagtatgcaagctattggagaagactaacacatgaacagatgatcctaaagtagagag

SEQ ID NO: 48356 - DNA, 201 bp, Homo sapiens
cgttccatatccaggaatgccactaaggtaggaatgggatgcaatatggtatgttggttatgaccttggatagctatgcatttggccgtgcatcctctcckgaacgcagattgttacccttcattacattgcaatacctagtgcagtgcccaacgcactgtaggctttcactaaacgtttgtggattgagtttctggagaa

SEQ ID NO: 48357 - DNA, 201 bp, Homo sapiens
aaccatgtaagaataaatgaaaaatatggtgttcctttacctcttaatctttcatggtgtattttcctaaaaacatggatagtttcttacgtaagcacagwacagttaccaaaatcataaaattatcatcgatacaatgctattagctatctccagaccttgttcaattttagcaagttgtcccaataatgttccctgtgg

SEQ ID NO: 48358 - DNA, 201 bp, Homo sapiens
gtattgttgttattgttttgtttagtgtcccttctattgtaagcaccaatacaacagagactcaaacattcaattaaaatttgtaatttgtctttataaaygaatattcattttcaatctaattttgtttttataattttattccttttctgaaaggaaatccttccaatggcataatcttctagtggacaattgtttttg

SEQ ID NO: 48359 - DNA, 201 bp, Homo sapiens
ctacttagaaaaacacatttgtttcataatttcagtacagagaatccctgtataccctttactcaaattcctcaaatggtaatattttactacattttacrttgtcattccctgagtgggtggttatgtgtgcatgcaaatagttaaattatgtctataaatgtttcttaaccatgtaagaataaatgaaaaatatggtgt

SEQ ID NO: 48360 - DNA, 201 bp, Homo sapiens
tatttactatattttcaagcctagtatacttgtagttttatattgctaacctctaccttctgagagaatatagacctgtcccctgttagaatatagatttrccaactagataaagagtttgtatatggttctttttgtcttacagtcaaaacactttagctttactgtcaaagttttttttttttaatttcagcttttatt

SEQ ID NO: 48361 - DNA, 201 bp, Homo sapiens
tattaatgtttcccattaattttcaaggttatcaaccttcctgttgagaaaattcacatgatgaaagttactttgaaaatttctgtcatataaactacttwgaaaaacacatttgtttcataatttcagtacagagaatccctgtataccctttactcaaattcctcaaatggtaatattttactacattttacattgtca

SEQ ID NO: 48362 - DNA, 201 bp, Homo sapiens
tttttaatttcagcttttattttaggttcacgggttatatatgcaggtttgttacatgggtatattgcatgatgctgaagtttggggcacaattgatctcrctacccagacactgagcatagtagccaataggtagtttttcagccattacctccctccctttctccccaccttaataatccccagtgtctgtcattccca

SEQ ID NO: 48363 - DNA, 201 bp, Homo sapiens
gagcattagttgagggggtttctttattcaccatttattgtggtttccccaaatgtaattatattttctttccctttctcttgcagatggggtaaattcamccaccctaaggaaatgaaataaaattactgtatgaagaccaaatttatatgaaaatgaagtatttgaggcagtcaatattctaattgtgaaaaaatttta

SEQ ID NO: 48364 - DNA, 201 bp, Homo sapiens
cagcttttttttttttttttgtctttttggtaatagccattctaacaggtgtgaggtggtatctcattgtagttttgttcatttttctgatgattagtgaygttgagcacttttgcatatacctattggccatttgtgtgtgtcattttttgggaaaatgtctatttaggtactttatttttaaatctggttatttgtggg

SEQ ID NO: 48365 - DNA, 201 bp, Homo sapiens
aactttttcgagtttttgaataaaaggttgaaggtgtgaagaaaaataaaactggaactgatcacgtggtccatccccgggaggcactaaagaatatcacygggtgttgaaatgtgtccagtgataattcttctatcctcagaagagaatgcccaggaaagtccaaggtcaaaggagagagcaagcacaagtgaagattat

SEQ ID NO: 48366 - DNA, 201 bp, Homo sapiens
tagcatactgtttttaaggttcatcctagttgtaatatgtatgggtacaccattcctttttatggatgatgaatatcctattttgttttcctaatcatcarttgatggacattttgggtttttccacttttggggtcatagagtagtagctttacgtttaatcacttgagaaactgccagactgttttccaaagcagctat

SEQ ID NO: 48367 - DNA, 201 bp, Homo sapiens
taccctctgtaacacaaacgacacacgaacacttcagtgcaagaaagaaaagtacaaagatggtgatactttgtgcggttcgtcagttgctgtctgttagygtgtaagccccatgtgggcagggaccacatgcattgctctgcgctcatccaagcacctcatctaagaatactcaatatgtattattttgtggtgtttcct

SEQ ID NO: 48368 - DNA, 201 bp, Homo sapiens
cgtagtcctctattatatgaattcatttaggaacagttaaaactaatatggccaattgccttgtatagatacgccctttaggtttgaggcttataggtatraatagaatgttggtccactggacgttattttttcccttggataaactcaatacctcttaactgttatttaaatggtgactgtaagaacattattgtcctt

SEQ ID NO: 48369 - DNA, 201 bp, Homo sapiens
tgaacgaggcatgtttaagcacttaatgttgtcaccagccttttaaaactatctttttttcccgctgcccaactgtagtttcccttcagtgttgagtggtygtaatctaaacacattaagtttttgtcttgttctttctgcagagatagaaagctgggtctgaaaataaaagcagagcttttatacaaggaggtcagtgtt

SEQ ID NO: 48370 - DNA, 201 bp, Homo sapiens; identical to SEQ ID NO: 8413

SEQ ID NO: 48371 - DNA, 201 bp, Homo sapiens
aagcttttaaaattctttgcttaatatttttcctctgcaaatatttttcttcattacctgtcctcatgtcagttttcttcctgtcatgatcattacaaagyccattttggtatccatgtgaattggtataattggagccggtgaaattcagattaggcatcaggaagaactttctgaaaagccagaactgtgggaatacta

SEQ ID NO: 48372 - DNA, 201 bp, Homo sapiens
gttttgctctgttagccaggctggcatgcagtggcgccatcttggctcactgcaacttctgcctcctgggttcaagcaattcccctgcctcagcctgccgrgtagctgggattacaggcacccatcaccatgcccaggtaatttttgtatttttagtagagtcggggtttcgccttcaaactcctgacctcaagtgatctg

SEQ ID NO: 48373 - DNA, 201 bp, Homo sapiens
cataaatctgtagacctcaagtgctaaataataaccatgtgaggttactgtctgtgtgggttcaaggtgaatttgaagttgacaaattgtagtctttacastggtgcacatgtaaagcttgtttgagacatgaaccataaaaagggcttagaggaatattttcttaggccattagtgactttggtcactaatagaacttag

SEQ ID NO: 48374 - DNA, 201 bp, Homo sapiens
atattcatttgtcattaggagagagatttaagaccgaaggagccaatgttatacttggctaaatagtagcctataaaatattttcactttgatggcatctktatgaagtttctttttatctggttcttcgttctctgtcactcttgtttttgttttctattcctttctattctttaatctttcttggtccacatcctgaaa

SEQ ID NO: 48375 - DNA, 201 bp, Homo sapiens
tcatgccactgcactccagtctggggtactgaacaaggtcctgtctctaataataataataataaaaataaataaataaataaataaataaataaataaawaaaaataaaaaataaacctggggctggatgtgatggctcatgtctgtaattccagcgctttgggaggttgaggtgggggggtcatttgaggcccaggagt

SEQ ID NO: 48376 - DNA, 201 bp, Homo sapiens
aaaatccatactggcagacttggtgtactatttggagtagtctatctacatttaatataattgctgatatagttggatgtatatctacatatagctatttrctctctgtttggcatgcatgttttatttttatgttttttgtttcacctgtcttattttctttttgatgaatcaactatttttattatttaagtttcctct

SEQ ID NO: 48377 - DNA, 201 bp, Homo sapiens
taacttattagttatgcattcttttggtggctactctcaagtcaaaatatgtatatttaatatattataaatatgataaaagtactttcaggccgggcgcrgtggctcacgcctgtaatcccagcactttgggaggccgaggcgggtggatcatgaggtcaggagatcgagaccatcctggctaacaaggtgaaaccccgt

SEQ ID NO: 48378 - DNA, 201 bp, Homo sapiens; identical to SEQ ID NO: 31135

SEQ ID NO: 48379 - DNA, 201 bp, Homo sapiens
tatttaatatattataaatatgataaaagtactttcaggccgggcgcagtggctcacgcctgtaatcccagcactttgggaggccgaggcgggtggatcaygaggtcaggagatcgagaccatcctggctaacaaggtgaaaccccgtctctactaaaaatacaaaaacttagccgggcgcggtggcgggcgcctgtagtc

SEQ ID NO: 48380 - DNA, 201 bp, Homo sapiens
cacttgaagtggtcttgtcagagtccgccgcttcatttgaggtcttttggttttatcatggtgtttttatatattaggttcttcccctctcggtttgccartttttccttgatgtggactaatttgctttaggccttggagaactgcatcaagaaggaaggggcttgttgattaaatctaatcatgccgaagtccacacac

SEQ ID NO: 48381 - DNA, 201 bp, Homo sapiens
cagcactttgggaggccgaggcgggtggatcatgaggtcaggagatcgagaccatcctggctaacaaggtgaaaccccgtctctactaaaaatacaaaaamttagccgggcgcggtggcgggcgcctgtagtcccagctactcgggaggctgaggcaggagaatggcgtgaacccgggaagcagagcttgcagtgagccga

SEQ ID NO: 48382 - DNA, 201 bp, Homo sapiens
cagtagatgaatatttaagtaatcatgcaattgtggaacatcaaacacttggtggaatgcaattaaaaagggtgccaaagattgtaacaatgtagaaaaayacttttgatagaagagaagaaaccacacagtatgtattaatgtattatgccatgagtatagctgtgtaataattacctgtgcatatgaataaagactgga

SEQ ID NO: 48383 - DNA, 201 bp, Homo sapiens
gcctctgctgctagtacttctactatggcagtcactggtctggtgatctctgactgtggtgggatctagagcagcccagctacgcgcgccactatggccayggtctgagtctggtttcttttcccaactgctgtatatgttgatatcgtgaatctcaaacattgagaaaaggagttaaggccagacatgatattctttctt

SEQ ID NO: 48384 - DNA, 201 bp, Homo sapiens; identical to SEQ ID NO: 8404

SEQ ID NO: 48385 - DNA, 201 bp, Homo sapiens
ggtgtgaattttgtaaacagaattataaagccataagtcacaatccaaaaggatctctgtttctttcctttaatcagggtcacactaaaactcttctgggyacttaaagacgtctcttgtttttaagaccttggatgagggaagtcacaagtctagtccagcaccgagccatgcctgaatcctgtgtgctgtactctcctg

SEQ ID NO: 48386 - DNA, 201 bp, Homo sapiens
gagatatgaaatataagggggagttgcagtgatgatacttgaaaggtcttgggatacaccattcattcattcattcaacaaatactttttaaaaatgaagyattaataaaatatttttaataaagtatttaataaagtaaatgtgctgcacattttaaatttctacaatgagtcatagtagtacctgcttctttagctgat

SEQ ID NO: 48387 - DNA, 201 bp, Homo sapiens
tatttacctgatcgcagacaaattatttagatcacctagaccttagtttctccatctgtaaaatgaggataatattaaaagtaatagcaaaaaccacaatyggttttgcaataacctaataatactcaggttttaaatattgttttgagactgcaatgaggcataatatgtacctggcacagagcaaatgttatttcccat

SEQ ID NO: 48388 - DNA, 201 bp, Homo sapiens
acccaagaacattaatatttccccttgaggtttctttactgttactattacaggaccttataagccatccagaatattgcgatactaaccatgaagcctgmatgtaatttacaaatgtacaaatgttctcagccaagatataacagaaaataagtgtatattcaagtcttgaatatacatgactctccaaaaaacacataa

SEQ ID NO: 48389 - DNA, 201 bp, Homo sapiens
aaatatttttcttcattacctgtcctcatgtcagttttcttcctgtcatgatcattacaaagtccattttggtatccatgtgaattggtataattggagcyggtgaaattcagattaggcatcaggaagaactttctgaaaagccagaactgtgggaatactaagaagatgggcaagtttcttcttagaaacatataaaga

SEQ ID NO: 48390 - DNA, 201 bp, Homo sapiens
gttaaaagaggaaaggggcatagagctagttctgtgaattgaggaatctgggaacaatctggtgggatgtgacatgctgaggtatgctgtaacccaagaayattaatatttccccttgaggtttctttactgttactattacaggaccttataagccatccagaatattgcgatactaaccatgaagcctgaatgtaattt

SEQ ID NO: 48391 - DNA, 201 bp, Homo sapiens
ccatgtgaattggtataattggagccggtgaaattcagattaggcatcaggaagaactttctgaaaagccagaactgtgggaatactaagaagatgggcargtttcttcttagaaacatataaagaaacattttaaaagtgatcttcttggggagtttgtctccttgcttagacctgagggggtgagtgaaataatctttt

SEQ ID NO: 48392 - DNA, 201 bp, Homo sapiens
ttacattcactcatcggaaacgctgaccctgaccctgaaccacacagccgagcatttgttggaggcagatattaaactcttccggaaatacttttgggatmgagcctttcttgtcaaggtttgtacatagtgattctagcatgtgataatgcatgcttcagagaatgcaggcatcaatttcttattatgagaacagtgttt

SEQ ID NO: 48393 - DNA, 201 bp, Homo sapiens
ccaggccccacccccaacactggggattataattgaacatgggatttgggtagggacatggatctaaactatataagagggtaaaaaaaaggatggaaggrgcataaattggtaaaatgaaggcctgtagtgttggcagagagaaaagagaagaatagggagggacagttaaatactacgagacaggttgggatgagatgg

SEQ ID NO: 48394 - DNA, 201 bp, Homo sapiens
tgttggcagagagaaaagagaagaatagggagggacagttaaatactacgagacaggttgggatgagatggcctgaaattcagagggacatcatgggcatkcccagaagagtggggccttccaggatagctggggttgggatgagcagaagggccagggcagcatgctcactggtaatgaaaggtatgaaatcctgaggat

SEQ ID NO: 48395 - DNA, 201 bp, Homo sapiens
ttctgtttttttgttttgttttgtttttgttttttttaaataggagattcaatcaagaaatgtattgcttattaatcaacgattgaaaaatacaggaattrggctttacccaaggttctcataattgtcattcaatctttaaaatgcatactttagtataaatcattaggccccaggaaatgttgaaatgtttattccttt

SEQ ID NO: 48396 - DNA, 201 bp, Homo sapiens
gagactcttgtgctcacttgtgtttgtttaagctcttctcttcctattaggctgtgagctccgtgaagaaagaaaggataggtcttgtcgtcttcataccrtctgtgcctaacacagtgcctgacacacatcaggtatttattgaatgaaggaataagagaaaataatctaaaagaggtcataatattcacagtccttgaa

SEQ ID NO: 48397 - DNA, 201 bp, Homo sapiens
gcctgattttctgtttttttgttttgttttgtttttgttttttttaaataggagattcaatcaagaaatgtattgcttattaatcaacgattgaaaaatayaggaattaggctttacccaaggttctcataattgtcattcaatctttaaaatgcatactttagtataaatcattaggccccaggaaatgttgaaatgttt

SEQ ID NO: 48398 - DNA, 201 bp, Homo sapiens
atatagcacttcatttatttagatttttgtcatctttcactggcattgtatagtttttactatgagtcatatatgtgttttgttagatttgtacccaggtratttttttgaatgattgtaagtggtttaagaattatcatttgaggcttattggccccacacattcatataagcaaagatgaaaagaccagaggtcgtgat

SEQ ID NO: 48399 - DNA, 201 bp, Homo sapiens
agccatcaggtcctgtctaatttcagaacatcttcatcacttcaaaaatcctgtacatgttactagtcactccccatttaccccttccgccagcctctggsaaacactagtctactttctgtctctacagatttgtctattctagacattttatgtgaatagtacaatatgtggtcttttgcggctggcttttgtcaccta

SEQ ID NO: 48400 - DNA, 201 bp, Homo sapiens
gtgcctctgaaaaattacaaattgttgaaggtcatggaacctcataactgcacatgaatagcttaaactaagggtctccaaaatggaattcatgttacccrcatactatatttattttttatgccgatatttagaaatacattcatactctctagtatttaatccgtggattgcaataatagaagcatacagttttccatg

SEQ ID NO: 48401 - DNA, 201 bp, Homo sapiens
atgtgacttagaagcagtgcctttggaaatgacccatgtccagagcggagcatgatgaaagcagttaaaaccaggctgcccaagatgtactcctagggtcygcaaaagttggcttgttccttgcataggcagccccaggacaggccatactagcggcccagcagttaatgattggagtgggccagaatccattactgttcc

SEQ ID NO: 48402 - DNA, 201 bp, Homo sapiens
attgcatatggccttccagtttggctgcatacaccagccattcacagagaccaggtgcagtgtgagtagctgcacctgggttagggcagggtttgactacrtgctgccatcctgagtacagaattcagctgtggtgagattgtattttgtcatgctatttgggatgaaggcattctggattggagaaagttaaattataga

SEQ ID NO: 48403 - DNA, 201 bp, Homo sapiens
taactgcacatgaatagcttaaactaagggtctccaaaatggaattcatgttacccgcatactatatttattttttatgccgatatttagaaatacattcrtactctctagtatttaatccgtggattgcaataatagaagcatacagttttccatgctgggcatgcctgctcaaagttatttttgctggtagagatacat

SEQ ID NO: 48404 - DNA, 201 bp, Homo sapiens
gagggagtgatgtgaaaatttagagcaaggatttggtaacaagaggaaaataacattagcagaaactcgctaataccatatttcaattcaaaagtatatcyagtactttcttatccttatgccttcagcgggaaggtaagaggatgtgacttagaagcagtgcctttggaaatgacccatgtccagagcggagcatgatga

SEQ ID NO: 48405 - DNA, 201 bp, Homo sapiens
gagaaaaatatctgtttctctttctttgaatacagaaaagagatctgtagccagtaggaagcaagatttgtttaatgtttgaaatggagcgtggcttgtgkttttatctttgaatactgtctgctggctgtagatatagaaagaaaatagagcaaggccccagagcctggcactgtgggttggcctgatgactgcactgtg

SEQ ID NO: 48406 - DNA, 201 bp, Homo sapiens
attcatctgccacacaggtgccaaatggaaacctctcagggagttcactcttgagatcttattaaccccatggagacactgttttttttcctgtgaatcaraattattttcaatatactttaactagtgtcctcagagttacatggcaacttcacaaagtaagaacttaagcaaaatcaatggagcttaatgcaggacttg

SEQ ID NO: 48407 - DNA, 201 bp, Homo sapiens
ttcatttattcatttgacaatatatgttgaaacctactactattatgacctgacatttacttcggtagttttggactagttatactacttttatttcctawttctttttttttttttttttttttttttttgagacagagtttcgctctgtcgcccaggctggagtgcagtggcgcgatctcgactcactgcaagctgcgc

SEQ ID NO: 48408 - DNA, 201 bp, Homo sapiens
ggggtttcaccgtgttagcccggatggtctcgatctcctgacctcgtgatccgcccgtctcggcctcccaaagtgctgggattacaggcgtgagccaccgkgcccggcctatttcctatttcttacatattactttttaagctttaaatgaactcaaatttaaaagactggagaatagaaatccaaattccaagaaaacgt

SEQ ID NO: 48409 - DNA, 201 bp, Homo sapiens
aatgacttgtcatacagttgcattaaaattgatctaaacatagttggcatccagaagaggcttctaatttattgccccagtgttccatttatatcagatayatagaagctagactgttggaataacagaaccctttataatattgtagtccaaatatatggaagcctatagacttttaaaatgttatagaacttttcaaac

SEQ ID NO: 48410 - DNA, 201 bp, Homo sapiens
tttccccctcagtttgtttgaattggaatccaaataatttcatatattgcatttggttggtgtgtctcttaagtctcttttaatctaaagttctgttgccrcctttaaaaaattttacaattgttaaaaagtctgggttgtgttttttgtttgtttttattttattaaatgcctcttgagtcataagaactgtgttgttta

SEQ ID NO: 48411 - DNA, 201 bp, Homo sapiens
taagtgatagatgacatgtatgatctacattaatatagatatagtatatataaatttatatatctatgatacatattgtctatatctaaatattatatacrtataatgttttctggctaagaaacttcatcttaagcctcttggatttttaaaaagatttctaactataatattggaaggtgtttttttgggggggtgtgg

SEQ ID NO: 48412 - DNA, 201 bp, Homo sapiens
ctcttaagtctcttttaatctaaagttctgttgccgcctttaaaaaattttacaattgttaaaaagtctgggttgtgttttttgtttgtttttattttatyaaatgcctcttgagtcataagaactgtgttgtttatctgtggaaaagacaggttcaattattttctgaaatattccccacattctggattttcctgattg

SEQ ID NO: 48413 - DNA, 201 bp, Homo sapiens
tatgatacatattgtctatatctaaatattatatacatataatgttttctggctaagaaacttcatcttaagcctcttggatttttaaaaagatttctaaytataatattggaaggtgtttttttgggggggtgtggatccattttgacaaagacacaaaagtttcatgatttcccatgagtaaaggaagagcatcacagc

SEQ ID NO: 48414 - DNA, 201 bp, Homo sapiens
aaagttctgttgccgcctttaaaaaattttacaattgttaaaaagtctgggttgtgttttttgtttgtttttattttattaaatgcctcttgagtcataaraactgtgttgtttatctgtggaaaagacaggttcaattattttctgaaatattccccacattctggattttcctgattgcattcccatcgcgtcatttga

SEQ ID NO: 48415 - DNA, 201 bp, Homo sapiens
aactaagggtctccaaaatggaattcatgttacccgcatactatatttattttttatgccgatatttagaaatacattcatactctctagtatttaatccrtggattgcaataatagaagcatacagttttccatgctgggcatgcctgctcaaagttatttttgctggtagagatacataaaaaaataagtttggagaac

SEQ ID NO: 48416 - DNA, 201 bp, Homo sapiens
aatgtttctagactttctctaaaggcagtttgtagtacttgaggtaaaactgtctgcagcctagacttgtagtgtagcttctctacaacatcaatgtcaarcgacagggttaatgctcatgtttgaagtcgaattttactctgaaggttatgaccatcttatgagatttgattcagcccaccatgtgtttaaatctctgta

SEQ ID NO: 48417 - DNA, 201 bp, Homo sapiens
catggtgaaaccccatctctaccaaaaatataaaaactaagctaggtgtggtggcacatgcctgtaattcttgctacttgggaggctgaggcaggagaatwgcttgaacccgggaggcggaggttgcagtgagacgagatcgcgccattgcactccagcctgggcgacagagagaaactgtctcaaaaaaaaaaaagatgt

SEQ ID NO: 48418 - DNA, 201 bp, Homo sapiens
tgggtaagatgctggcaggtgccagcaaaggacaataggcttttaattaaggtctgtagagccatagctcaggaaacacacctcctgaagagttttttttkttttgtttttttgtttttttttttttttttaaaaacacttgcgtttcttcttgctaccctacaaacagtaactgtgtgctccatcgaggcaactgtggtc

SEQ ID NO: 48419 - DNA, 201 bp, Homo sapiens
actctgaaggttatgaccatcttatgagatttgattcagcccaccatgtgtttaaatctctgtatctgcctgttcacacctcagttctgttatgtatgtaygtaggggctcatatatggatattggctaagtttagattggtaggtcttaacagatgtatttatcagtacatttctgtcaaaattattccacgttaaaaaa

SEQ ID NO: 48420 - DNA, 201 bp, Homo sapiens
aagatgctggcaggtgccagcaaaggacaataggcttttaattaaggtctgtagagccatagctcaggaaacacacctcctgaagagttttttttgttttktttttttgtttttttttttttttttaaaaacacttgcgtttcttcttgctaccctacaaacagtaactgtgtgctccatcgaggcaactgtggtcgttaa

SEQ ID NO: 48421 - DNA, 201 bp, Homo sapiens
gtttagattggtaggtcttaacagatgtatttatcagtacatttctgtcaaaattattccacgttaaaaaaaacaaattgggcatttagatgaatagattsaaatataaattcttctgtgtcagttttaattttgtactttagaaattgtattagatactaggtagaaggaaaacgtggagtttttattgtatttactgaa

SEQ ID NO: 48422 - DNA, 201 bp, Homo sapiens
aaaggacaataggcttttaattaaggtctgtagagccatagctcaggaaacacacctcctgaagagttttttttgttttgtttttttgttttttttttttkttttaaaaacacttgcgtttcttcttgctaccctacaaacagtaactgtgtgctccatcgaggcaactgtggtcgttaatcttccgcagcacaggaattg

SEQ ID NO: 48423 - DNA, 201 bp, Homo sapiens
cacgttaaaaaaaacaaattgggcatttagatgaatagattcaaatataaattcttctgtgtcagttttaattttgtactttagaaattgtattagatacwaggtagaaggaaaacgtggagtttttattgtatttactgaatcaagtagttggacataagttaatcattttatagttgggaataaacaagagtatttggt

SEQ ID NO: 48424 - DNA, 201 bp, Homo sapiens
ttcctacttttgtctggcaacaatggcccttatactggaatagagaattacgcacttactcccacttctgggaaatagaacgtagagttggattccggtcrctctctctccctcaattataattttcaagaacaaaaaatgtaaatggaagcaaacagcctacccaatgtgcttcccaaaggattcgggactgtagaaggt

SEQ ID NO: 48425 - DNA, 201 bp, Homo sapiens
gcatgaacccaggagatggaggttgcagtgagccaagatcacaccactgcactccaacctgggtgacaaagcaagactccctctcaaaaaaaaaaaaaaamaaaacaaaacaacaacaacaaaatctattttgagctttttattcttgtataaatttttcttcactactcccatcttcccatctgcagtttataataggag

SEQ ID NO: 48426 - DNA, 201 bp, Homo sapiens
ccattgaagctgtagctcatacccaaagagtgtaatatttctaatatttctcaatccgggactttggacacaagacactggcttccagtgcaagggcactsaatggaccctgcctggctgtaggcgaatggccagtttcctggttgtctttgaaggcagacttccaatgcagacttcaaagggccatctgcgaggcatgat

SEQ ID NO: 48427 - DNA, 201 bp, Homo sapiens
agcttggaattactggcttgttggcaaacctctcttgagttaggtcagaaataatgtctgatgtgctctcttgctctttccttgtcctgaacacatatatrttactggcttgtggagggagtgatgtgaaaatttagagcaaggatttggtaacaagaggaaaataacattagcagaaactcgctaataccatatttcaat

SEQ ID NO: 48428 - DNA, 201 bp, Homo sapiens
aaaattagactgcaatgtattttcatttgtctcccaaacagaacagggtccctggagagtcaagtgggagggcgtctgagaattctagctcatctggggtrtaaggggagatcttgcagaagagtgcctgcacacagttggctatcagcaaatatctgttgagtgaaatgaatggtggacttgaatcatagccttgaagca

SEQ ID NO: 48429 - DNA, 201 bp, Homo sapiens
aggtggatggatcacttgagctcaagagtttgagaccagcctgagcatcatgatgaatccctgtctctacaaaaaatacaaaaattagcttggcgtggtgrtatgcacttgtagtcccagctatttgtgggctgaggtgggcagatcgcctgagcctgggaggttgaggttgcagtgagccgagatccttctcctgcactc

SEQ ID NO: 48430 - DNA, 201 bp, Homo sapiens
gttcaagtcacctgagaaatcatgaaagtggctttgagagcttggaattactggcttgttggcaaacctctcttgagttaggtcagaaataatgtctgatrtgctctcttgctctttccttgtcctgaacacatatatattactggcttgtggagggagtgatgtgaaaatttagagcaaggatttggtaacaagaggaaa

SEQ ID NO: 48431 - DNA, 201 bp, Homo sapiens
ggccttataagggtttttaatgttggggatggtggtgggtggggcatgttggacaggaaaggagcttgatcaggactcgggaaggatcataatgtagttargattgcttttagggttcaaactgccttttattggtttctactgaacagttggttagtcttgtggaaggttcctataatgagcaatcattcatttgcctgg

SEQ ID NO: 48432 - DNA, 201 bp, Homo sapiens
aaactgcttagtccccccaatactggcttttatagttcttgacagccctgtcccatttgttattttcattacagccccctggcaatcccaggtagtaggcygggcagttatcatgtccgttttacagatcaagcaacttgaaacttgagaattaaatggctttccatttcattctagctgttagctggaggcttgctatgt

SEQ ID NO: 48433 - DNA, 201 bp, Homo sapiens
cttgagaattaaatggctttccatttcattctagctgttagctggaggcttgctatgtgttcaaatccagagctttgaatccttggtctccccatctttgyaccatacagtgttgtatctggattcttaatatcttatactggtggctatatgcataatttagtttggaaatatcctcagaatgtgaaggtcaaaaattga

SEQ ID NO: 48434 - DNA, 201 bp, Homo sapiens
agcctaaagggccttagagatgatctggtccaattccctcatttgacagatgagggggtgttattcatatgttcaacaaacatctggggtggggggtgccrggcactgttcttgagggtatggtgaagtaatgaccctcacagatgctgtctctgcttacagggatcttaacatggggacccatctcccaggacccagaca

SEQ ID NO: 48435 - DNA, 201 bp, Homo sapiens
atttagtttggaaatatcctcagaatgtgaaggtcaaaaattgagttgccatcttgaaattctgatgaagactttttaaagttgcaactgatttagtattygttccacaagctaaaataaagtatatcttgccaatatgagatgcaaaatccaggaagtacattccagtgttatacagcactatgtgaattttctggaatg

SEQ ID NO: 48436 - DNA, 201 bp, Homo sapiens
gtagcagagaggtggggattgttagaccatgtttcacacttgcgttctttattaaatcatggtgatttagttatgaagagcgggtttggtcatgctgtaaygcgagctggacagagtcccagcatcacagatccttagagcctaaagggccttagagatgatctggtccaattccctcatttgacagatgagggggtgtta

SEQ ID NO: 48437 - DNA, 201 bp, Homo sapiens
gtatatatgcctaagtaataattttaacttttactcttcttgaacttcatattaattgaaacatatcctgtgtattttgtgacttgatttttcccttttgwcattatattcattacttccttctgtgttaatctgtaattcattttgattgttagaatattgttgtatgattgcactgcaatttattccattgatgaacat

SEQ ID NO: 48438 - DNA, 201 bp, Homo sapiens
aaattacaatccatacaactatggaatatttctcactatattcagattaggagatatgtcttagaaattccatccgggctgggtgcggtggctcatgcctrtaatcccagcactttgggaggccaaggcgagtggatcacctgaggtcaggagttcaagaccagactggcatggccaacatggtgaaaacctgtgtctact

SEQ ID NO: 48439 - DNA, 201 bp, Homo sapiens
ctctctaccaaaaaattagctgggcatggtggtgtgtgcctgtagttccagctcctcaggagactgaggtgggaatatcacttgtgcccaggaggccatgrttgtggtgagctgagatcatgccactgcactccagtctggggtactgaacaaggtcctgtctctaataataataataataaaaataaataaataaataaa

SEQ ID NO: 48440 - DNA, 201 bp, Homo sapiens
attaggagatatgtcttagaaattccatccgggctgggtgcggtggctcatgcctgtaatcccagcactttgggaggccaaggcgagtggatcacctgagrtcaggagttcaagaccagactggcatggccaacatggtgaaaacctgtgtctactaaaaatacaaaaattagctgggggtgatggcgcgcacctgtaatc

SEQ ID NO: 48441 - DNA, 201 bp, Homo sapiens
ctaagactgtggcaggcacaggggctcgtagggagaccatatgtgggaatcatcactcagagatttcatcgtcttcgaaacccagtgtgtctaaaaccgayctcaaagtccacgcccagcaggacatacttggcctggcatcacaagcttcaaccctggctgctttaattccactgccctcttgtccctcctgtcaatgtc

SEQ ID NO: 48442 - DNA, 201 bp, Homo sapiens
ggagctgtgaggtgaggtgagaatttattgagaacttgaagtttggcttaatgagggtcttttttttgagacagggcctcactttgtggcccaggttggcrtgcagtggtgcaatctccactcactgcaacctctgcctcctgggctcaagcgatcctcccacctcagcctgctgattagctgggaccacaggcgagtgcc

SEQ ID NO: 48443 - DNA, 201 bp, Homo sapiens
ttaacagccaattgtcattcaactcctcaaatgctaaatggctttcatttgccagatactgtgctaggtattaggaataaaatacctcaaggacccctcckcctggaagatgacaacagagagcggcaaacaccacagtggagctgatgcacacggaccgaccaagggccctctgtgcaggggccttacaggtcgagcctc

SEQ ID NO: 48444 - DNA, 201 bp, Homo sapiens
ggttaccaaaaataaaactaaaatagagcaggccaaaacaagcaaaagaatcttcaaatgtcttttttcctccatatgaacactctttttaaatatttgaytctttgctgtcatgaaagctgtcttaatttggaccatttcatcagtccagttttaagatgtttcagtctggctgggcacggtggctcaggcctgtaatcc

SEQ ID NO: 48445 - DNA, 201 bp, Homo sapiens
tcctcaaatgctaaatggctttcatttgccagatactgtgctaggtattaggaataaaatacctcaaggacccctccgcctggaagatgacaacagagagyggcaaacaccacagtggagctgatgcacacggaccgaccaagggccctctgtgcaggggccttacaggtcgagcctcctgagcagagcaacggggtggct

SEQ ID NO: 48446 - DNA, 201 bp, Homo sapiens
atgacactgtctgaaggaaataagattgaagcattttttttttctttttcaaagaagtctgtttcagggtgtctctttggtataggttctactttttaaamgaatgaaaatttagccccagaggagaaaaccagagagtgaccaaggaaatatgacgtaaattttaaatagacatattactaaaagaatgtcacaagcata

SEQ ID NO: 48447 - DNA, 201 bp, Homo sapiens
tacatattaatggctcagagagcttctggggctaactttgctcccctccctctctcctagcttcaggaggtcagccacatccttggagtctgagagtgacmataacagctgcagaagcaggtctcattctgatgagctgctacagtccatgggctcttctccctctacagagtctttcataatggaaggtgaggagaagac

SEQ ID NO: 48448 - DNA, 201 bp, Homo sapiens
cattaataaacccaggtaaagggcaggatcacttgaaatcaaacttttaaaaggtgtataatggatattttgtcattagcttcctctacaaggtaaggttrgaacaaatttctgaaagaatattaaaaaatgaaatctgactcaaatgcagaaataatggataaatcgccaactgcagttttaaacatttaccacaaggtg

SEQ ID NO: 48449 - DNA, 201 bp, Homo sapiens
acctcctgaagagttttttttgttttgtttttttgtttttttttttttttttaaaaacacttgcgtttcttcttgctaccctacaaacagtaactgtgtgstccatcgaggcaactgtggtcgttaatcttccgcagcacaggaattgctagtaacataaaggtagtaatgggattatgttttcttttctttttttttttt

SEQ ID NO: 48450 - DNA, 201 bp, Homo sapiens
aacatggaatttgcaactgtgcagagttgggtaaaatcccagttctatcattttctatttacctgatcgcagacaaattatttagatcacctagaccttaktttctccatctgtaaaatgaggataatattaaaagtaatagcaaaaaccacaatcggttttgcaataacctaataatactcaggttttaaatattgtttt

SEQ ID NO: 48451 - DNA, 201 bp, Homo sapiens
actgtggtcgttaatcttccgcagcacaggaattgctagtaacataaaggtagtaatgggattatgttttcttttctttttttttttttgcaatagctcaraaaattaatgttaacttctgttcctagtttggggcagttgtttttactatgatgaagctgaatgtgatcatacaactccatctttccatccaaactccct

SEQ ID NO: 48452 - DNA, 201 bp, Homo sapiens
tacatgatgtaggttgaattaatttaacatgcagatttgttttcttgtagtccagacagtttccttacttctattcacattctttgtgtctagaactacaracaatgaagtaagcctagagctgtagttcatcacatagtgatttcatgggccagatatttatagacagtccctgatttatgatggtttgatttatgattt

SEQ ID NO: 48453 - DNA, 201 bp, Homo sapiens
cttaaacatcagtcttattaaaaaataataaaataagttaaataattaaccaaggtctccagaactcacaatcactgctagaggcaatgtaagttattacmaccatttttggaaaacacagcagcattatctaatacatttagagaaactaatatctcatagcaaatctgttccatagcaattccattcctacctataaac

SEQ ID NO: 48454 - DNA, 201 bp, Homo sapiens
tccctagccacatggaattgtaagtccattaaaccactttcttttgtaaattgcccagtctcaggtatgtctttatcagcagcatgaaaatggattaatasagtaaattggtaccactagagtggggtgctgctgaacagatacctgaaaatgtggaagcaactttggaactgggtaacaggcaggggttggaacaatttg

SEQ ID NO: 48455 - DNA, 201 bp, Homo sapiens
aacatttattgcctttccctccctggtgtgcaggagctatttcatccaatctcattccttccctttacatcacatggggaggcttgcctcctggctggggrcgccccgagttcttcctgagtctctactgtttcatctgttgatttcaccaaaacaaaaagatggattctgactccgactcaccttttaactactcgtggc

SEQ ID NO: 48456 - DNA, 201 bp, Homo sapiens
aaatgtgcaaaagtttggaacttcctagagacttgttgaatggctttgcccaaaatgattatagcaatatggacaataaattccaggctgaggtagtctcygatggaaatgaggaacttgttgagaactggagcgaaggttacgttttagcaaagagactgacagcattttgctcctgtgctagagattcgtggaattttg

SEQ ID NO: 48457 - DNA, 201 bp, Homo sapiens
tgaacaaaaacatataaaataattctctgtttacataaaacaagagtctcactctgtaacccaggctagagtgcactggcgcaatcgctactcattgcaaygtctgcctcccattcaggccattctcctgcttcagtctctgagtagctgggattacaggcgcccgccaccacaccctggctaatttttgtatttttagta

SEQ ID NO: 48458 - DNA, 201 bp, Homo sapiens
agagtaaatatactggtaagttggtggcatttcactgtgatgagttcatttacatattttaagtataatgccttacattcattgatctagctatctatatmtctatagatatagatatataaataattaaaaatgtaaactaagccttttatttgcattcatttatggtggagtgtttccttctaattgtttcaaattaga

SEQ ID NO: 48459 - DNA, 201 bp, Homo sapiens
aatctcagggatttagtagatgggtagaagcactgctgtgaagtttgagaatgacccatatgaagccatttctcttgcggcttcttatcaggggaggagcrgctctgaggacaaagggtggaaacggaagtccctctacagtctcagcctctaaaagcctccctgcctgagcagcaggatctcctcaaggaactctttgca

SEQ ID NO: 48460 - DNA, 201 bp, Homo sapiens
gaatattaagaatatttccatcttttaattatgattaatcaaggtgttattttgagtaaggcttgaataaggcttgagtcaatctagttggcagtgctccrgggtctattgaacacactaaccagatcctatggcctcctgtgttctcaagcacattccttcacaagacacaggtctcgtgactatttaggctttacagag

SEQ ID NO: 48461 - DNA, 201 bp, Homo sapiens
ggaatttggtgtgtaattttctgacatacagcatcacatccagtatatacagaatgagggtcttcttttaaggatgcttgtcatttaaaactgctcaagcyggctgggcgtggtggctcacacctgtaatcctggcactttggcactttgggtagccgaggtgggtggatcatgaggtcaggagatcgagaccatcctggc

SEQ ID NO: 48462 - DNA, 201 bp, Homo sapiens
agttggattctaggtatttgtcagatactatgatcttaaactctttacctgcatgtttgttaaaaaaaaaaaaaaaaaaagtagtcttggctgggcacggwggctcacacctgtaatcccagcactttgggaggccgaggtgggtggatcacctgaggtcgggggttcgagaccagcctgaccaacatggcgaaaccccgt

SEQ ID NO: 48463 - DNA, 201 bp, Homo sapiens
ccccacttccttggctaaaaagggcaaggcaagaacacttcctttgactcattcatcgtgaacaattctgtgttctactgaggtcctagaggcacacttcrtctgttggtagctttgtatctttttactgtgtccaagacgagaagatacgtgttttaaatgtttccaggtctaataaatccattcatggatgggattaga

SEQ ID NO: 48464 - DNA, 201 bp, Homo sapiens
tttacaacagtggtaccatgtgttatgaatatctcacttatttatgacatccaaacctcaccatgttccctggagatcatatctgttttccacagtaatcrcctaataaaccactggctgccagctaatttgttctactacaggtagccccattaaagtgagaggcatcttttcagattaaaaggagaatgaaatgttgag

SEQ ID NO: 48465 - DNA, 201 bp, Homo sapiens
ttgtttttgtttgtttatgttttaataaagcatgtggattacttctataagacgaaagggaaaatgtagatcctatgcacaagtatttatttccctccaamccccctttttataatatgtattgttgattttatagagtgacctgatcagtacatgtaggggctcaaatcacagctattctttaatacttcgggttacttc

SEQ ID NO: 48466 - DNA, 201 bp, Homo sapiens
gggcatttctgggagtcaggagtcaatcctacgcactttatgcatgagaaagtggcagcacagaaaagttatgtaacttacctgaggtgacactggcccargccgtcagaactcaggtgatcagtccactcccttaccgaccacactatagactcccactacccctatagagcagaggactgatctatttagcgtctggac

SEQ ID NO: 48467 - DNA, 201 bp, Homo sapiens
ctttattgcagcatgggcttcatgttcacattggttctccttgcccagcaagtcccccaggagccttgtgagcagctcagatagatgctgcacacacactyagtttgtgtcacagctgaggaaccccaaactaagaaatcccaaatcttataaggagactgctagcaagcctgcccaacccttgcactggaagaggctgtt

SEQ ID NO: 48468 - DNA, 201 bp, Homo sapiens
gttaattaactttgagtcctttttgtgcataagaatatttgagggaaatttgagaggaaataattactttatatcctgctttattcatttttagctttttwaaaattttttatttcaataggttttggggaacaggtggtgtttagttacatgaataagttctttagtggtgatttctgaggttttggtgcacccatcacc

SEQ ID NO: 48469 - DNA, 201 bp, Homo sapiens
ctagaagtagggtatttttggcattttcaacaaaaatcatacgcagccccaggaaatgatttgtaactgttgctttcatttagtattattatcattattawtaagttctgggatacatgtgcagaacgtgcaggtttgttacataggtatacacgtgccatggtggtttgctgcacccctcaacccgtcatctacattagg

SEQ ID NO: 48470 - DNA, 201 bp, Homo sapiens
tagtagttgttgttcttcttaacaaaagctcccatcagcagatcctgataattatttcttttgcagagattaagaattcagtgtccagcagatcagcagcygaaaaggaagatataaaggtaatgaatgactccctgcttctttctttgcacgtctttccataaagtagaaatgaagatttagtggtaataaaaatgttta

SEQ ID NO: 48471 - DNA, 201 bp, Homo sapiens
gcacggatgctggccagatgagagggacaaggggaactgtctccagcttttatacctttgtacaaaggagagggactgcctgtggaacacaaggacttggwggtccaccatgaaataagaatggatagttatgatcaggttatgcccagagataatcaatccatggagacctggggttgtttgtattcctgatagtcttca

SEQ ID NO: 48472 - DNA, 201 bp, Homo sapiens
gtatttttggcattttcaacaaaaatcatacgcagccccaggaaatgatttgtaactgttgctttcatttagtattattatcattattattaagttctggkatacatgtgcagaacgtgcaggtttgttacataggtatacacgtgccatggtggtttgctgcacccctcaacccgtcatctacattaggtatttcttcta

SEQ ID NO: 48473 - DNA, 201 bp, Homo sapiens
tctgtatttcctttagtgactgactttgccagtcctctttcttctccttgtcacaggaaagaacagtctccatcattaaagggaccatgatatggataggwtatcatgatgatatgatactcattttgtatattattataaaaaatcagtattttctcacacagaaataaaaattctcctcaccacttagtttatcaaagg

SEQ ID NO: 48474 - DNA, 201 bp, Homo sapiens
tcctaacaggcagaagttcttctgctcattatggaacaggtgcattctttgttatatccatcataaaaacataaccaaacctgtttattttttatttttattttttttttgagacgaagtctcactctgttgcccaggctggagtgcagtgggatgatattggttcactgtgacctctgcctcccggattcaaatgattct

SEQ ID NO: 48475 - DNA, 201 bp, Homo sapiens
ttaacagaaactctcctagagcaatttaattaatccattagaatgaatgccaaattctttgaaagctctaagatatggttctgtttagttctaggttaatyaaagatacattattatctggaatcagcacagtatcactaatatttttaaatgatttttggataaagactttctacatttaagttattttttaaatgatga

SEQ ID NO: 48476 - DNA, 201 bp, Homo sapiens
ctgtgagagctcctgggcttgtttccatcttagtccacacagataataccagagtatggacagtcgggttattagacactctgctctgtggagagctgatktttaagaggcctaatctaaaaacctatctctgtgcagaaggctcctgggcaactcatttacacttgtcagctagtagttgttgttcttcttaacaaaagc

SEQ ID NO: 48477 - DNA, 201 bp, Homo sapiens
ggacagcaagtttgaaataacattagctgaaacaccagtgggtaggaaacccataaaggacagatttattacaaaatacaagaaatacaagtttccagtgtttttttttttttaagttttgaaatcaatacattatgggtaacaactgattcaggggttttgtatgtttctcttggaaatcttgacatttttcaaggggtt

SEQ ID NO: 48478 - DNA, 201 bp, Homo sapiens
gaataaatccacctgcagatttggggcattagataaattaataggagtgacaaaacggaatagggaaggtctaggtaatgaacctgctggaaaacttcagrcgtttccccaggattagcataaagcagggctgtgggggaagggatgtggagattccagaaaaggagtgagaccccacaatgttgtatgttaatgcaaatc

SEQ ID NO: 48479 - DNA, 201 bp, Homo sapiens
gtttgtattttgctaaccacttattaatttaaattagcagatcccaactctggctttgcattggaatcacttgagaatatttggaaaagtgtgatgacttggccctgccccagaagttctgatttaatttttctggagagggccttaaacatcagtcttattaaaaaataataaaataagttaaataattaaccaaggtct

SEQ ID NO: 48480 - DNA, 201 bp, Homo sapiens
ttaaaacatattgaaatctgtggtatttgaggaaatagacatgtgggatttcctcaggtgggtacgagtcacgtccttacaatctgctattttgaagaacktgcggtagtgagcagccttcctttggaatcaagggcatttatttatttaatgataattttttccccttcaggatttcctgtgagagctcctgggcttgtt

SEQ ID NO: 48481 - DNA, 201 bp, Homo sapiens
gtatttttaatgaattgtttttctctttagaacagccactaaaacctgaaaaaatacatacacatacatatatgtgtacacacacacacacacacacacayacacacacacgtatatgctattcttcctaagtcatatgagccatgataacagattctgtttttgtagaattcaggaagaagaatgggataaatacatcat

SEQ ID NO: 48482 - DNA, 201 bp, Homo sapiens
atatggtttggctgtgtccccacccaaatctcaccttgaattgtaactcccacaattcctacatgtcatgagagaaactggtgtgaggtgattgaattatyggggtgggtctttcctgtactatactcatgatagtgaatgagtctcatgagatctgatggtttttaaaataggagtttccctgcacaagctctctctctt

SEQ ID NO: 48483 - DNA, 201 bp, Homo sapiens
aagatacaggctgagctatcagcagaggctgagtttgggcacctggatgtctgtgaagacctctggggctgacaagtgagaggcagatgagcacgaaccaytccagttggtttcctctggttctgtgaagctgaggcatctcacacacctggaaggcacacatgggcaggacagtcttagaagttgcaaggggtgaggtgt

SEQ ID NO: 48484 - DNA, 201 bp, Homo sapiens
aagaaggagaaaggcagcattgataggaactttcagcctgggtctggacacatgagctggagacctctggtttctgttcccctgaggcttttaatgaagcmaggagtgttcaggaggcgcatgttcacaaggccccttcattataacttgcacattttattgtcacatttgactcttcattgcatttaatgtcttttgctt

SEQ ID NO: 48485 - DNA, 201 bp, Homo sapiens
gagaaactggtgtgaggtgattgaattatcggggtgggtctttcctgtactatactcatgatagtgaatgagtctcatgagatctgatggtttttaaaatrggagtttccctgcacaagctctctctcttgccgccaccatgtaagaagtgccttttgccttctgctgtgattgtgaggcctccctagccacatggaattg

SEQ ID NO: 48486 - DNA, 201 bp, Homo sapiens
tttcaagttatctctttgtctattgtgctttcctctcctctgttgtgtgggtgttccccagggccctctgctttcccctctttttctcgcgagctcatctvttcttgttatttagaccaccactcctcctgaaagactcccacatgtgggccctctcgtcttgacctctgcccaggcctcgtcttccatttccagctggcc

SEQ ID NO: 48487 - DNA, 201 bp, Homo sapiens
cactttcattctattttactgaggcccccgtcttctgtctcttatcaagaacaattttcaagtatctaaagtttctttcctatttctggatctagtattcmgtggttgcttcttctggtgggttgttggtgtaactttgttctgtggtatcttagggtatctacattttccctattatttactcactctgcaatgaggaga

SEQ ID NO: 48488 - DNA, 201 bp, Homo sapiens
aatttgtataagtaatgaagaactgaatattaatccccaagacaatggggaaaatgtctccagggcatgtcagagggcttcatgggagcccctcccattayaggcccagaggcctaggaggaaatggtttcatgggctgggcccagggtccccatgttgtgcagcctagggacttggtgcctggcatcccagctgctccag

SEQ ID NO: 48489 - DNA, 201 bp, Homo sapiens
ccccatgttgtgcagcctagggacttggtgcctggcatcccagctgctccagccgtagctgaaaggaaccaacacagaactcgggccatggcttctgaggstgcaaacctcaagccttggcagcctccacatggtgttgaacctgcaagtgcacagaagtcaagaattgaggtttgggaacctagatttcaaagaatgtat

SEQ ID NO: 48490 - DNA, 201 bp, Homo sapiens
gtaactggctcacagttctgtaagctgtacaggaagcatggtgctggcatttgcttggtttctggggaggcctcagaaaacttacagtcatggcagaaggygaagggggagcacacagtcacatggccagagcaggaacaagagagcaaagggggacacgttatacacttttaaataagattttgcaagaactcgctatca

SEQ ID NO: 48491 - DNA, 201 bp, Homo sapiens
gtaaatgcaggcctgttgctactctaacaaaacaaattatttagtatgctggctttgttcccattgtagactcaagcctgaggcctatttgccccctcttyctcctctccgttccttatctcctgactgtcttcctgggaatctgcttattaaattgttcatgtcagttggatggttaccctcctttatttctctcgtctt

SEQ ID NO: 48492 - DNA, 201 bp, Homo sapiens
ctatccatcccctaccccctaccctctgacagaccctggtgtgtaacgttcccctccctgtgtccactttattcaactcccacttacgagtgagaacttgkggtgtttggttttctgttcctgtgttagtttgctgagaatgatggtttccagcttcatccatgtccctgcaaaggacatgaactcatactcttttttatg

SEQ ID NO: 48493 - DNA, 201 bp, Homo sapiens
catttggctcatatctgagatactttattctagctgagtcagataagcagcctagagagaaaaaaaagtattaaactcaactaagtattctaatagaattrcagtgatctttacttgaaaatatagctaaaggttagtttctttcttgagttaaagtagaatctaagtttggtaaaaatggaattttgtttatgtctttga

SEQ ID NO: 48494 - DNA, 201 bp, Homo sapiens
aggttagtttctttcttgagttaaagtagaatctaagtttggtaaaaatggaattttgtttatgtctttgaaagatgacttgcttaattttattcaagccrttgattaacttaggaaaattatgccctggcttcaatttaaaaatgcagttaacccttgaaaaactcagattaggggcaccaatcccctgcacagtcaaaa

SEQ ID NO: 48495 - DNA, 201 bp, Homo sapiens
actgatgaccagaagccttgtcaataacataaaccattgattaatatatattttgtatgtcacatgtattatatactatattcgtataataaggtaagctrgagaaaaaaatgttcttaataaaatcataaggaagataaaatacatttaccatttattaagtggaactggaccaccacaaaggtcttcatccttgttgtc

SEQ ID NO: 48496 - DNA, 201 bp, Homo sapiens
cactcctcctgaaagactcccacatgtgggccctctcgtcttgacctctgcccaggcctcgtcttccatttccagctggcctgtttgctattatcactcarttagccaggatttgactttaagttcagactgttatattttttaaaagttttccaagttttcctctaagcaactcctctttccaacttcctgatttctgtt

SEQ ID NO: 48497 - DNA, 201 bp, Homo sapiens
agtttttatttattttatttatttttttgatacaaaagactttattgcagcatgggcttcatgttcacattggttctccttgcccagcaagtcccccaggrgccttgtgagcagctcagatagatgctgcacacacactcagtttgtgtcacagctgaggaaccccaaactaagaaatcccaaatcttataaggagactgc

SEQ ID NO: 48498 - DNA, 201 bp, Homo sapiens
atatactaaaacccattgaagtgtatactctaaatgggtgaattgtatagtatatgaattataccttaataaagctgtcataaaaacatatatgggggagwatataccaacatttaatggtagttatattgatttttttgtttagttttttttccaagtttttatttattttatttatttttttgatacaaaagactttat

SEQ ID NO: 48499 - DNA, 201 bp, Homo sapiens
tgtaactttgacactcctcaagcttaactactcatagcccactgatgaccagaagccttgtcaataacataaaccattgattaatatatattttgtatgtyacatgtattatatactatattcgtataataaggtaagctagagaaaaaaatgttcttaataaaatcataaggaagataaaatacatttaccatttattaa

SEQ ID NO: 48500 - DNA, 201 bp, Homo sapiens
ttctccttgcccagcaagtcccccaggagccttgtgagcagctcagatagatgctgcacacacactcagtttgtgtcacagctgaggaaccccaaactaaraaatcccaaatcttataaggagactgctagcaagcctgcccaacccttgcactggaagaggctgttatctttactaccctggtctgaaaacaaatctgcc

SEQ ID NO: 48501 - DNA, 201 bp, Homo sapiens
ttcttgtgttgaaacacttcagaatacccatgtatataggcatttacaaaaaaaaaaattacatttacaaagggataattggccagcaagctcgattgctstgtgtgtgtgtgtgtgtgtgtgtgtgtgtgtgtgtgtgtgtgtgtgtgtgttggtaggcttgttttatactgagtatccagtggctaattccttggaagg

SEQ ID NO: 48502 - DNA, 201 bp, Homo sapiens
gatacttctgattagttgtgcaacaaattcatgacaaattaccagattaatttttactttatttcttcaggactggggtttttcgatggtttcaaatttakaatcttcgcatttgaaattagataacatattcctgtctgctttcagcagaagtttactctccaactcttgctggtgctctgggccagtatcagcaggtcc

SEQ ID NO: 48503 - DNA, 201 bp, Homo sapiens
cacatgggcaggacagtcttagaagttgcaaggggtgaggtgttgctgatggtagtgactgagggctcaagctgatgtgaaatcaggaaaagctaaatcartgctcagagtgagattaatggagaaggtgggtaacccacggggtcaccgtgagcctacacgtgcatggggctccctggaggctgagggagtgtggttggt

SEQ ID NO: 48504 - DNA, 201 bp, Homo sapiens
tattattgtgggaataagacaagaaaacacacaagaaagcactgtataaattgtggtgtgctgtacacatagataatatgtataagtagttagatatgtcratatctgtatttgtatacatgtgcacacacatataagaaataatatttgcatctccacacttccttttaacgaagtacttcagctaaacacagtaatttg

SEQ ID NO: 48505 - DNA, 201 bp, Homo sapiens
ggtgaggtgttgctgatggtagtgactgagggctcaagctgatgtgaaatcaggaaaagctaaatcaatgctcagagtgagattaatggagaaggtgggtracccacggggtcaccgtgagcctacacgtgcatggggctccctggaggctgagggagtgtggttggtatgctgtgccaacacacgacagagcagttacaa

SEQ ID NO: 48506 - DNA, 201 bp, Homo sapiens
cacttacaaactaatatataacaatttggaagactcaagatattttttgccagagtaaattactattgttttcaaaaacgaacttggactcttccagttgkctaggtaaaagtagttcatgtgatcaaaggtctcctaacaggcagaagttcttctgctcattatggaacaggtgcattctttgttatatccatcataaaa

SEQ ID NO: 48507 - DNA, 201 bp, Homo sapiens
caggaaaagctaaatcaatgctcagagtgagattaatggagaaggtgggtaacccacggggtcaccgtgagcctacacgtgcatggggctccctggaggcygagggagtgtggttggtatgctgtgccaacacacgacagagcagttacaaccattcggaaatcatgctgtgtagagcagagcaaggaggaagcacgcttg

SEQ ID NO: 48508 - DNA, 201 bp, Homo sapiens
ctttcttttttcctttttccttttgtttctcctttcctttcctttttcctttcctttccttttcctttctttctctttctctttctttctctctgtctctytctctttctttctctctgtctttctctttctttctctcttcctctctttctgtccttccttcctttccttcctttcctttcttccttcctttccttcttt

SEQ ID NO: 48509 - DNA, 201 bp, Homo sapiens
ggaaaagctaaatcaatgctcagagtgagattaatggagaaggtgggtaacccacggggtcaccgtgagcctacacgtgcatggggctccctggaggctgrgggagtgtggttggtatgctgtgccaacacacgacagagcagttacaaccattcggaaatcatgctgtgtagagcagagcaaggaggaagcacgcttggt

SEQ ID NO: 48510 - DNA, 201 bp, Homo sapiens
aaattgtatatatttttatattccttttactccagctgcagggcattgttcctaagtagtcaaagaatgaagcacccaatccacggggcttaatgacacgyccaaggggataagggacctatgtcagttatgtgattacctgcccaagtatactgatgattgattttagaacctgtgctgggggtgtcttgggctggctta

SEQ ID NO: 48511 - DNA, 201 bp, Homo sapiens
acagattttcaatgattatcaccagtgagatcacagatctgtgggaaataggcaaactttggggggaaaaagtgttgaaagaatttcctaaccacttcaayttatgagatgattaaacctttaaaagttaattatttttgaacattaagaatcaagtgactgtaatttgctgtcacagggtcatttgttggactttgaagt

SEQ ID NO: 48512 - DNA, 201 bp, Homo sapiens
tgtgcataatacctagctcatatgcaggaacatcatcattcctcattttcctcaacttgacagtttatctatgcatgcaattcttacttcatttgaggttrcttctgcttttccatatgcaaattaattttggtcttttagtaagttatggtaataaacagaagttttcattctaggaagcatatttttgcatattcctgt

SEQ ID NO: 48513 - DNA, 201 bp, Homo sapiens
ctttagtacattctaaattacctttttctttcattttacaactttctgaagtgtaacaagggagggaaaaatggcagtactttctctgaactctaaatttyccttctccaaaataagatccttgaccccaaataaaccagcttagtgactaagcagatttcatgtattccattcctaaagactcccttagtttgatatttc

SEQ ID NO: 48514 - DNA, 201 bp, Homo sapiens
gtgatctaatggagggaagggaattctacatgcaatacaaagtcctgagccaaatgacgtactggggaaaatgcagctcattttgaagccctggaatataktgtgtgtgtgtgtgtgtgtgtgtgtgtgtgtgtatgtgtgtgtgtgtgcgcgcttctgtatggtggtggcagtgatgccaagaacataggcttaagaagt

SEQ ID NO: 48515 - DNA, 201 bp, Homo sapiens
  misc_feature (101)..(101): n is a, c, g, or t
agtaaaccttaatgtatgcaaatttaagaaaaccttgaggttggggatgggatgcagaatgtgacaaaacaatctagctgtattaaaaatgtaagaaatanccttaccaaagggaattttgggtgtggtggagagaggtgcagatctattaactttgcaaatgagtggagtctataagaataaaggcaaaagaaactacaa

SEQ ID NO: 48516 - DNA, 201 bp, Homo sapiens
atacaaagtcctgagccaaatgacgtactggggaaaatgcagctcattttgaagccctggaatatagtgtgtgtgtgtgtgtgtgtgtgtgtgtgtgtgtrtgtgtgtgtgtgtgcgcgcttctgtatggtggtggcagtgatgccaagaacataggcttaagaagtaggcagattggcatggctgtacgtgaagcaagtt

SEQ ID NO: 48517 - DNA, 201 bp, Homo sapiens
ctgaagcaaagaaatgaatgttaattaagacacatactgtcaccttctaagtctgcagacttaatggatcctcatattgtatgtttccaatgtcgtttagkttatttggacatcaggtgacctcacaaaacaaaacaaacatttcttgctattgtttctactaaaagaaatgcttaaaagagactgcctgataacatttgg

SEQ ID NO: 48518 - DNA, 201 bp, Homo sapiens
caaagtcctgagccaaatgacgtactggggaaaatgcagctcattttgaagccctggaatatagtgtgtgtgtgtgtgtgtgtgtgtgtgtgtgtgtatgwgtgtgtgtgtgcgcgcttctgtatggtggtggcagtgatgccaagaacataggcttaagaagtaggcagattggcatggctgtacgtgaagcaagttgtt

SEQ ID NO: 48519 - DNA, 201 bp, Homo sapiens
caggtggaagggagatagtattataatttactatattcttgttcaggggactcctctccatcacttctagttttagggaaggacaaatgattatttattcwgatacattaattacgtaaggtagaaagtgattaagtcccataggagagatcaggaaaaattactgtcaaagttcaaggcaaagaggatagttcaagttgg

SEQ ID NO: 48520 - DNA, 201 bp, Homo sapiens
aacacaccttctcatatttgcgtagtcctctattatatgaattcatttaggaacagttaaaactaatatggccaattgccttgtatagatacgccctttargtttgaggcttataggtatgaatagaatgttggtccactggacgttattttttcccttggataaactcaatacctcttaactgttatttaaatggtgact

SEQ ID NO: 48521 - DNA, 201 bp, Homo sapiens
ataggagagatcaggaaaaattactgtcaaagttcaaggcaaagaggatagttcaagttgggggtatcataaaaagaatgtcatttcaatagcctgtaagsctgtggtgagcttgatggggttttaatggcaggatgttccttctaagcaaatggacagagtcagatatacagagaatgtatcaaagtgatagaaaatagc

SEQ ID NO: 48522 - DNA, 201 bp, Homo sapiens
gacctgcatgaatacatatgtggctttggaaatcagaataaaacttattttaatgagttgaatttaatgtgaatcaaaaaaaaattagtcttctaaaaacrtattgtgggctgggcgcggtggctcacgcctgtaatcccagcactttgggaggccgaggtgggcggatcacaaggtcaggagatcgagaccatcttggct

SEQ ID NO: 48523 - DNA, 201 bp, Homo sapiens
ttaaacagttgaaaactaacatcttagatgtctttgggacagtatgtactgagctagattttttttttgcaatgatcagatgaaattctttaattttttcytcttctctgcctttaagctaaaaaaaaaaaaccctctaatctcttatgcagaaaagtagaaaattcttgatgttctctgtgacaagaataatccattttt

SEQ ID NO: 48524 - DNA, 201 bp, Homo sapiens
caactaaagtggaaacattcaattagtttttgtccattcatgagtctggaggagactcaactgaaagaacaaaacattttgagcataagagcttcctcttaaaaaaaaaaaaccaaacaaaccctaaagcaaacttcctctttaaaatctattagaagattcttagtagattatgcttttctgtcccctctgggacaatgt

SEQ ID NO: 48525 - DNA, 201 bp, Homo sapiens
ctaaatagtagcctataaaatattttcactttgatggcatctttatgaagtttctttttatctggttcttcgttctctgtcactcttgtttttgttttctrttcctttctattctttaatctttcttggtccacatcctgaaagcatcttactctctcagtcatatgccttggtgtatctagtagagtggatctttcatct

SEQ ID NO: 48526 - DNA, 201 bp, Homo sapiens
gtatttttggaccgaagtcaacggcaggtaatcaaaaccatagaacatgaaatccctgatggcaggggctactgtatatgaaactcccacttttgagattyggaatgcatttaatgttttgtgggctctagtaagtcaagaaacctatataatcttgtttaacttagcagttctctaaattaatggatcacacgagagtcc

SEQ ID NO: 48527 - DNA, 201 bp, Homo sapiens
tgctaacttagttcatgaagtcattaaatgttggcatattttggccatgtttctccctaccctctttaaattacagaaagtgatttaaaaaaatccagagyaatgccttacttatataaggtaactcattttctcattattttctagctggtagtgtgtataatgatacaatatggttgagtatgcatttcagactaacat

SEQ ID NO: 48528 - DNA, 201 bp, Homo sapiens
tgtgagatattactgggaaaacaatagggctcttatccacacaaagtgttgtttccaagatttttcatttgagacactctagctcaagggctttttaggakaactgttgcagatggtttagatatcaagatataggtcctttaagccaggacagctgggacctgggtgttggggacttaagacagcagtactaggcaggcc

SEQ ID NO: 48529 - DNA, 201 bp, Homo sapiens
ccttgactctcatgtgaaatatctggtcaagcacttgaaaatattgttttcctagaagtagggtatttttggcattttcaacaaaaatcatacgcagcccyaggaaatgatttgtaactgttgctttcatttagtattattatcattattattaagttctgggatacatgtgcagaacgtgcaggtttgttacataggtat

SEQ ID NO: 48530 - DNA, 201 bp, Homo sapiens
aaaagggcaaggcaagaacacttcctttgactcattcatcgtgaacaattctgtgttctactgaggtcctagaggcacacttcatctgttggtagctttgyatctttttactgtgtccaagacgagaagatacgtgttttaaatgtttccaggtctaataaatccattcatggatgggattagaagtagagtgtaagctaa

SEQ ID NO: 48531 - DNA, 201 bp, Homo sapiens
ttgtagtccctaatgttgtccacgaagagtttctgtatgggaccaagtttcttgttaaatgccactgtgtgacaccaacgttcttctgcaaagggagtgasactactgaccgaatgacagaggagaacttgaagagcctctgaagaatcatggggactctatgtgcctgagccaccacctctgccactgctgtcagaatct

SEQ ID NO: 48532 - DNA, 201 bp, Homo sapiens
agcctggatggcggaagtagtagtgagccaagatcatgtgactgcactccagcctgggtgatagagcaagactctgtctcaaaaaaaaaacaaaacacaaraaactgtttcagtgtctataacagaagaataatatatgaaagggaaattttatttacattcaacatttaaagcttgttgaaaatttacttctgttaagtt

SEQ ID NO: 48533 - DNA, 201 bp, Homo sapiens
tataccctaagacactgaattccttgaaggcggccagcccattatcacatctccagcacttggatcccagaaagtaggcagtgaatattgaaagtgcctcrtggcacaaatttacccacactacacccagatagtctttatctacaattgatctgatcatcttcatggggtcccactctataggcagtggggcaggggagg

SEQ ID NO: 48534 - DNA, 201 bp, Homo sapiens
ggtggagggatggaaagtcccaatccttcaatctacactgcacctcctgggtcctcctaggttctgctgtggcttgactggcctaggctcttccctgaggyatgagtgctttattactgggtgttctggcatctgtgataaaggtcagcagctgggattgtggtgctagtcaggacctggtgattctccttctggcttcac

SEQ ID NO: 48535 - DNA, 201 bp, Homo sapiens
ttcaggccacttcgtgttcttctcagagggcttcgggatttatgggatcccattctcaccatgcaggcacctgagagtggcccagggaagctgagcctggycctgctgcttgacctttttcttcctgcaagtgtgcttggtaatggttgtcctcatgatggtgaggggtagcctgcaaagtgatctactgcagagtcccag

SEQ ID NO: 48536 - DNA, 201 bp, Homo sapiens
ctttcctttcttttttcctttttccttttgtttctcctttcctttcctttttcctttcctttccttttcctttctttctctttctctttctttctctctgwctctttctctttctttctctctgtctttctctttctttctctcttcctctctttctgtccttccttcctttccttcctttcctttcttccttcctttcct

SEQ ID NO: 48537 - DNA, 201 bp, Homo sapiens
ctttccttttcctttctttctctttctctttctttctctctgtctctttctctttctttctctctgtctttctctttctttctctcttcctctctttctgwccttccttcctttccttcctttcctttcttccttcctttccttcttttcctttttcctttttcttctttgagacagggtgttacttattctgtcgtccag

SEQ ID NO: 48538 - DNA, 201 bp, Homo sapiens
tctactgtagtgtgtatgcttgttttagagctgcaagtaatccacttataggcattggaatctggcccgttcatcacctgagagatgttttctttctttcytttttttttttttttttttttttttagacggagtctcattctgtcacccaggctggagtgcaatggcatggtctcagctcactgcaacttccgcctcttg

SEQ ID NO: 48539 - DNA, 201 bp, Homo sapiens
ttgagacggagtcttgctcttttgcccaggctggagtgcagtggtgtgatcttggctcactgcaagctctgcctcctgggttcacgccattttcctgcctyagcatcccaagtagctgggattacaggtgcctgccacaacagccggctaattttttgtatttttagtagagatgtagtttcaccgtgttagccaggatgg

SEQ ID NO: 48540 - DNA, 201 bp, Homo sapiens
ttctcaggccgtatcaacagaggaaacacgtgtctactgagtattatctctgcgttccaaaaataaataaaatccagttgcatattgttggttatttggcktctctgtgctctggggaattcttactagcatagtaaacaggaagttgagtgttttcagggtaaaattataagtctaaggtttatttcctcaatattttat

SEQ ID NO: 48541 - DNA, 201 bp, Homo sapiens
ttctaactccttaccacacatgggcaagatgtctccccttccctcagtagccattaaacccaatcttctgggctgctgagaccattaaaacacttcaggcmaagattcttcgtaggacatcactctgtttttcaatgagtctttattttatgactttgggagtgctcccttgctttcttgggagagcgcaactatgcattt

SEQ ID NO: 48542 - DNA, 201 bp, Homo sapiens
ttaggtgtgcccaagcagagaattgtcagtatcagctgggttttcattgaacttgattatatatatatatatatatatatatatatatatatatatatatwtttttttttttttttttttttttttttttttttttgagacggaatctcgctctgtcacccaggctggagtgcagtggcgcgatctcagctcactgcaacc

SEQ ID NO: 48543 - DNA, 201 bp, Homo sapiens
ctgccaccacacctggctaattttttgtatttttagtagagatggggtttcactatgttggtcaggctggtcttgaactcctgacctcaggtgatccaccygccttggcctcccaaagaacttgataatatatttcattgtgaggggagggcaaaagtaaagcacatgtaggaaaagctagaatatatgttgttgaaaatt

SEQ ID NO: 48544 - DNA, 201 bp, Homo sapiens
gtgagcttgatggggttttaatggcaggatgttccttctaagcaaatggacagagtcagatatacagagaatgtatcaaagtgatagaaaatagcctagcyttgtggcctgttgattcatggcgatacagaaatgcagagaggtgccaaatgttgcgctggcctggatggttagttttgcgtgcttagtacgtttcttccc

SEQ ID NO: 48545 - DNA, 201 bp, Homo sapiens
gtcttgaactcctgacctcaggtgatccacccgccttggcctcccaaagaacttgataatatatttcattgtgaggggagggcaaaagtaaagcacatgtrggaaaagctagaatatatgttgttgaaaattctggctaaaaggaaatgtgtaattaagagtgttattgctgggtctctggcaaaaggactcctggcccct

SEQ ID NO: 48546 - DNA, 201 bp, Homo sapiens
attacaggagggagccgttgggcccggcctaaaccaccaattcttaaggatgagcatgcctataattcctctttttccatcctctcttttccataccgtckccattggagattgtatcaacttctacagctcttttgaaaagattggaagtggagaaaggtttacctagtactcttgcttcctttagctcatgttttacgg

SEQ ID NO: 48547 - DNA, 201 bp, Homo sapiens
aagcaaataaatccctactatgctaggtgatggtaaggggcatgagtgaaaataaagcaagggttggcggttgccatttcatataagatgatcagggagarcctctttggtaagatgacactggggcagagatgagaagaaagtgagaaagcaaggcatctgcatatccaggggaagagccctgctggaaggtggagcagc

SEQ ID NO: 48548 - DNA, 201 bp, Homo sapiens
ttcaccatgagtacataccatctttctttcacatacttggaaaattttatcattttacaatgatttctcccatcatctcttaagcaaagggagaaaaaccratagtattaaatgagtttaagtgatcaaacttgttttgctcacgtaaataattgtatggccctgatgatgaggtaaatgatgttaataaggtagaagtga

SEQ ID NO: 48549 - DNA, 201 bp, Homo sapiens
actttcagaataatgtgaaattctgttttctttttctttcttttttttttttttttgagatggagcctcgctctgtcacccaggctggagtacagtggcaygatcttggctcactgcaacttctgcctcctgggttcaaatgattctcctgcctcaccctcctgagtagctgggactataggcgcccaccaccacgtctgg

SEQ ID NO: 48550 - DNA, 201 bp, Homo sapiens
taacctccagacaaaaaaaactgtgtaagaggagggacttctccactgtcttaaataattacttttgtctttaaaaaaagaaacacaagtaatttaaatgaaaaaaaacctgtattttaaagaagatgtcttaaattctttctgaaacaatatagaatagaaatataaaaatgatatgccaaggagcacattttggagttg

SEQ ID NO: 48551 - DNA, 201 bp, Homo sapiens
ttcttttagccttaaccttaagtgatatcttaaaaatgcatgggcaggatcagtcctaagggctttataggatagaagttgggtactataaatggcttcartggagttctattgcatattcacttaaattttctggaacataagaaaactatgttttaatgatcttgccatcttgcattttcatgtatgttgccaatataa

SEQ ID NO: 48552 - DNA, 201 bp, Homo sapiens
cttttttttttttttttgagatggagcctcgctctgtcacccaggctggagtacagtggcacgatcttggctcactgcaacttctgcctcctgggttcaartgattctcctgcctcaccctcctgagtagctgggactataggcgcccaccaccacgtctggctaatttttgtatttctagtagagatggggttttgccat

SEQ ID NO: 48553 - DNA, 201 bp, Homo sapiens
agtggagtagagaagcaaagcaaatcttcctctttgagctccttcccttcttcttcctccttcttctcctcctcctgctgtttctgtcttggtatagtttycttggaacttccttgcacattgccatgtctcagttttaaaaatcaaatgattactcctcagggtcaaagtgagactatttcagtggctgggaaccatggc

SEQ ID NO: 48554 - DNA, 201 bp, Homo sapiens
cctcacattgttactatttggaaaacatgtttaagttttctgtgcttcaaattatggctttgcctttagatctgtggtccttgatctatgaagtcagatayctctagagtttgaaattattgaccacacaattaagaggaaacttattgttcacaagggaaaatagccctaatttacttattctttaatgatcaaggaagg

SEQ ID NO: 48555 - DNA, 201 bp, Homo sapiens
ttttttttttttttttgagatggagcctcgctctgtcacccaggctggagtacagtggcacgatcttggctcactgcaacttctgcctcctgggttcaaaygattctcctgcctcaccctcctgagtagctgggactataggcgcccaccaccacgtctggctaatttttgtatttctagtagagatggggttttgccatg

SEQ ID NO: 48556 - DNA, 201 bp, Homo sapiens
catgaatcttacagcgacttaaccctgttcacttgtgcagtgtcactagtaaacataagtcttagagattatctcttgttccattatagtttggcaataamaaaaaccatgtttatcaagtttggcaagtctgatttagaggagtaatccttacttctgggtgggcttgagggcaagattaataggcctttaaaacagaat

SEQ ID NO: 48557 - DNA, 201 bp, Homo sapiens
aggaatgaatgtcctaaaacaggcaaagtaaaagggtgtgactcttgatgtctgtgcagatgtgtctgttgaaactctggtccaggttatccttcccttcttttttttttttttttttttttaacgcctttgtggtttctttcctacttatcccaatttttagtgtttgagtatatgagtttcaaaaccaaaccaaatccc

SEQ ID NO: 48558 - DNA, 201 bp, Homo sapiens
ttctttggaaatgtccacacatcatttttgctatctgttcactagttcatgagaggtttccatgtaacaagcctgcctaagaccctttgctccctctgggwtctgtatcaggatagatctgccagccctcccctttcagtccttggctgtgcaggcctcaggattggggacagcatgttctgtctgggtatcttcaaagcc

SEQ ID NO: 48559 - DNA, 201 bp, Homo sapiens
gtactacaaatggtatctccaaagacagatggcatcgttcctgtgaacacagtagcttctctcctaacctatggagtaggtcgagcttgtcctggttaggwtttctaatttaagagaaaaataaagcccagttccttaaaaaaacaaagaggtcatataaagaatatttctcacatatgtttacacttacaaactaatata

SEQ ID NO: 48560 - DNA, 201 bp, Homo sapiens
tggcacgatcttggctcactgcaacttctgcctcctgggttcaaatgattctcctgcctcaccctcctgagtagctgggactataggcgcccaccaccacrtctggctaatttttgtatttctagtagagatggggttttgccatgttggccaaggtggtctcgaactcgtgacctcaggtgatctgcccgcctcggtctc

SEQ ID NO: 48561 - DNA, 201 bp, Homo sapiens
ggaatgaatgtcctaaaacaggcaaagtaaaagggtgtgactcttgatgtctgtgcagatgtgtctgttgaaactctggtccaggttatccttcccttcttttttttttttttttttttttaacgcctttgtggtttctttcctacttatcccaatttttagtgtttgagtatatgagtttcaaaaccaaaccaaatccct

SEQ ID NO: 48562 - DNA, 201 bp, Homo sapiens
tgtcatctcatttgtactgctttgagctggaacctctctaatgagtgccatttgggtaaatagggtttagttttcctgaggagtgtgtgtgtggggtgggrggggggtggggaagggcatgtatgtatgtgtggtttgtttgtaatttcatcagaaaaatctgcactcatttgtgactcaagtacttagacgctgctttgt

SEQ ID NO: 48563 - DNA, 201 bp, Homo sapiens
aacacatagtattgtgtaagtattcaaaattcttgggtaattttcttcttgttaaagcctgagttgctaattttccacaaaattatatttctataaaattrcccttgcttataaataagtttcttggctattatgttgatgttacattatctgttacacataaatttatatatcataccttcattgcagatttaaccttaa

SEQ ID NO: 48564 - DNA, 201 bp, Homo sapiens
aaaatccacctgactttatctcttccagcgtgtcaaaagcctggtggttcaacacaatgaacatgaagaccagcacagcctagatttgggtatgaaataaygcttttacctatactcgtaggggcatcccagatccaggtttagagtggacaagaagcaagtaaattttaacataaaatattccttcctggtaaccttatc

SEQ ID NO: 48565 - DNA, 201 bp, Homo sapiens
gttatttcgacaatagcggctcttgtttaagggcaactgagtatttgggaacagaaccaatcaattaaaccacagataaaaatgctgccttgggtgaaccttttttttttttttcttcatcccagtacatcctgaccactactgtttccaggaaaccctttattcagaaagaggacacccggtgtgcccggggctgaggtt

SEQ ID NO: 48566 - DNA, 201 bp, Homo sapiens
catttacaatctaaaaaacaaggcaatcaaagcttttcctgaacagttttactctgagccagaagctggctctggacttgtcatatgttcccttgttattyctgtgaagtaggcactaccagtctcaggttcaggtgaagcagttgaagcactggtggagagtagatggtggaaccgagactcataacttcattccacctg

SEQ ID NO: 48567 - DNA, 201 bp, Homo sapiens
actctgctctgtggagagctgatgtttaagaggcctaatctaaaaacctatctctgtgcagaaggctcctgggcaactcatttacacttgtcagctagtakttgttgttcttcttaacaaaagctcccatcagcagatcctgataattatttcttttgcagagattaagaattcagtgtccagcagatcagcagctgaaaa

SEQ ID NO: 48568 - DNA, 201 bp, Homo sapiens
gaagatttagtggtaataaaaatgtttaaaaaacactaaaaaaaggatgtgccccaagtcactttcagaataatgtgaaattctgttttctttttctttcttttttttttttttttgagatggagcctcgctctgtcacccaggctggagtacagtggcacgatcttggctcactgcaacttctgcctcctgggttcaaat

SEQ ID NO: 48569 - DNA, 201 bp, Homo sapiens
aagatttagtggtaataaaaatgtttaaaaaacactaaaaaaaggatgtgccccaagtcactttcagaataatgtgaaattctgttttctttttctttcttttttttttttttttgagatggagcctcgctctgtcacccaggctggagtacagtggcacgatcttggctcactgcaacttctgcctcctgggttcaaatg

SEQ ID NO: 48570 - DNA, 201 bp, Homo sapiens; identical to SEQ ID NO: 8421

SEQ ID NO: 48571 - DNA, 201 bp, Homo sapiens
gctggagtacagtggcacgatcttggctcactgcaacttctgcctcctgggttcaaatgattctcctgcctcaccctcctgagtagctgggactataggcrcccaccaccacgtctggctaatttttgtatttctagtagagatggggttttgccatgttggccaaggtggtctcgaactcgtgacctcaggtgatctgcc

SEQ ID NO: 48572 - DNA, 201 bp, Homo sapiens
cattgctagcttgatggggatggcattgaatctataaattaccttgggcagtatggccattttcacgatattgattcttcctacccatgagcatagaatgktcttccatttgtttgtatcctcttttatttcattgagcagtggtttgtagttctccttgaagaggtgcttcacgtcccttgtaagttggattcctaagta

SEQ ID NO: 48573 - DNA, 201 bp, Homo sapiens
aacacgtgtctactgagtattatctctgcgttccaaaaataaataaaatccagttgcatattgttggttatttggcttctctgtgctctggggaattcttrctagcatagtaaacaggaagttgagtgttttcagggtaaaattataagtctaaggtttatttcctcaatattttattatgaaaattttcaagtacacaga

SEQ ID NO: 48574 - DNA, 201 bp, Homo sapiens
ttgtaatgtttatgtgtttttttataatgaccagtgaaagcatgatgtagtcttattaatttcagactaattaagtaagatggatgcttttgtatcttttycctttatttcagactgtaatgcaaatgtgcacaaaggttgtaaagatgctgcgcctgcatgcaccaaggtaattgctcagtgatctgtgaatatatatgt

SEQ ID NO: 48575 - DNA, 201 bp, Homo sapiens
ttctctgtgctctggggaattcttactagcatagtaaacaggaagttgagtgttttcagggtaaaattataagtctaaggtttatttcctcaatattttaktatgaaaattttcaagtacacagaaaagttgagagaattatctagtgtatacccacttccaccacctatgttctataattgttgacattgtgagattgtt

SEQ ID NO: 48576 - DNA, 201 bp, Homo sapiens
tcttactagcatagtaaacaggaagttgagtgttttcagggtaaaattataagtctaaggtttatttcctcaatattttattatgaaaattttcaagtacmcagaaaagttgagagaattatctagtgtatacccacttccaccacctatgttctataattgttgacattgtgagattgttgctctaatcacatgtctgtt

SEQ ID NO: 48577 - DNA, 201 bp, Homo sapiens
ggaagttgagtgttttcagggtaaaattataagtctaaggtttatttcctcaatattttattatgaaaattttcaagtacacagaaaagttgagagaattmtctagtgtatacccacttccaccacctatgttctataattgttgacattgtgagattgttgctctaatcacatgtctgttcacttatgctatagggtgta

SEQ ID NO: 48578 - DNA, 201 bp, Homo sapiens
attttaatgctgtttcatttgatgctgacatcaaatgtatttaactatttgtttttgaacatttaattttttcctaattttttaaacaaataatttggcartgagcattcctttgcacatatcattgtccacatatttggtgattgcctaagattaaattctagaatcagtatgagtaggtcaaagtgtgtatttgatttc

SEQ ID NO: 48579 - DNA, 201 bp, Homo sapiens
cagtagcgtagtatagcaatattgcagtaatatatttgtctatacagatacacaccacattcttcttaagaatcgccatgtttgatggaaaaagtcttcaratttggagtctgtagattcttatcagtttctgttgtccattattataattacctggtgtttaattagctgtgcttgaggctgtgatctcattagctcctt

SEQ ID NO: 48580 - DNA, 201 bp, Homo sapiens
atcttctccaaatgtactgttttttgaagctgtttcatcctatcatttacagcgatggagttcagctgttggtctgtatgcagaaaatgggggagttatgytgagtggtattccatgctattgatatatcactgtttactcattcacttgttgaaggatatcttcttgtttccagtttttagctcttataaataaagctgc

SEQ ID NO: 48581 - DNA, 201 bp, Homo sapiens
ttgaaccagccttgcatcccagggatgaagcccacttgatcatggtgcataagctttttgatgtgctgctggattcggtttgccagtattttattgaggayttttgcatcagtgttcatcaaggatattggtctaaaattctcttttttggttgtgtctctgccaggctttggtatcaggatgatgctggcctcataaaat

SEQ ID NO: 48582 - DNA, 201 bp, Homo sapiens
gggatgaagcccacttgatcatggtgcataagctttttgatgtgctgctggattcggtttgccagtattttattgaggacttttgcatcagtgttcatcawggatattggtctaaaattctcttttttggttgtgtctctgccaggctttggtatcaggatgatgctggcctcataaaatgagttagggaggattccctct

SEQ ID NO: 48583 - DNA, 201 bp, Homo sapiens
gatgtctgtgccacacagattcttctcattgtctcttttccttccttgcggtccttgcctgtctcatgaagctccattttcctctcctcctgcaggccaartctcacatcctattctccctccatgcactttcattctattttactgaggcccccgtcttctgtctcttatcaagaacaattttcaagtatctaaagtttc

SEQ ID NO: 48584 - DNA, 201 bp, Homo sapiens
tttgttagttttccttctaacggacaggaccttcagctgcaggtctgttggagtttgctagaggtccactccagaccctgtttgcctgggtatcagcagcrgtgtctgcagaaatgtggatttttgtgaaccgcgaatgctgctgtctgatagttcctctggaagttttgtctcagaggagtacctggccatgtgaggtgt

SEQ ID NO: 48585 - DNA, 201 bp, Homo sapiens
cctttcctttcttttttcctttttccttttgtttctcctttcctttcctttttcctttcctttccttttcctttctttctctttctctttctttctctctstctctttctctttctttctctctgtctttctctttctttctctcttcctctctttctgtccttccttcctttccttcctttcctttcttccttcctttcc

SEQ ID NO: 48586 - DNA, 201 bp, Homo sapiens
gaaagtcattgctagcttgatggggatggcattgaatctataaattaccttgggcagtatggccattttcacgatattgattcttcctacccatgagcatrgaatgttcttccatttgtttgtatcctcttttatttcattgagcagtggtttgtagttctccttgaagaggtgcttcacgtcccttgtaagttggattcc

SEQ ID NO: 48587 - DNA, 201 bp, Homo sapiens
gatggaccaacatgggatcttccactcccacagaaggattcattctgcatacatttctgatgcacccaggctcctcggtctatgctacagtgtgtgtgggrtggtgatgtacaggtgggaggggaaaggacccaaagacaacagcttggcagcaaccagtgcccacatagtgcagctttccatgaggacagcctcagtgtc

SEQ ID NO: 48588 - DNA, 201 bp, Homo sapiens
gtcttttttgaagctgaatgtcttatatgtgactgaagtttttacataaacaattttgaatcaggtggaatgaaatttgatccctatatcaggaaaatagrgttagaaatgaggcatagacagggctaaaaggaaaagacacagatattctagcaaagtaaagttaagagagtgaattgggaatttccctaaacttgaaaa

SEQ ID NO: 48589 - DNA, 201 bp, Homo sapiens
ttagccacttacatatctcctaaaaatggtattaactgctattcttaggcattatgttataaaaacattatttacctaaagtctccaaatagttgtttttyatttttatgtcttcataatgcaatgtagctcaagtaatttctggtttgggactcaaaggaaggatactactaggtttatgtggattcttaagttctcatg

SEQ ID NO: 48590 - DNA, 201 bp, Homo sapiens
cagcgggggtcaccgttagatgaggtggtgtgggccaggcagactgggatcagatcattgtaggctgtgtttaaataattttagaagaggatgttattccaaatatgatggaaagcactggaagcttttaatcatgggtgtggcatgatcttatttatgtcttaaaacactggctgctgaatggacaagagattaggagac

SEQ ID NO: 48591 - DNA, 201 bp, Homo sapiens
cctttatttcagactgtaatgcaaatgtgcacaaaggttgtaaagatgctgcgcctgcatgcaccaaggtaattgctcagtgatctgtgaatatatatgtrgcatggttgcttcatagtatctatttgagcttttactcttttttattaccatctagatttatttctaaagcgatcatgatagcgataacataacatatgc

SEQ ID NO: 48592 - DNA, 201 bp, Homo sapiens
aggctgagggagtgtggttggtatgctgtgccaacacacgacagagcagttacaaccattcggaaatcatgctgtgtagagcagagcaaggaggaagcacscttggtgttggttgatggtgttgctagtagcttggccacatgccagaggtggtttccaggatcttgctgcatgtggccctactgaaattggaacagaaat

SEQ ID NO: 48593 - DNA, 201 bp, Homo sapiens
tcaagattggaagattaaattgaactcagaacttctttaacaacatcccttgattaattaagatatatagatgcagtatagctttttaattctatacttcttttttttttcttttttaaacatcagcaccactaattatcttcctctctcaagttctgctttatctaatcctgagtttctagtttcagaatgcgcacgtat

SEQ ID NO: 48594 - DNA, 201 bp, Homo sapiens
atgctgcgcctgcatgcaccaaggtaattgctcagtgatctgtgaatatatatgtggcatggttgcttcatagtatctatttgagcttttactcttttttrttaccatctagatttatttctaaagcgatcatgatagcgataacataacatatgctcaaagtgtatagttatttgcttaactgtacactgttagaaatag

SEQ ID NO: 48595 - DNA, 201 bp, Homo sapiens
gcaagtatagtactattctgttatgctgagcttcttctctctttgtaaatttgatatagtaaattcaaaatccatttcactaataagagttatttatttgygtcttttctaatcatgcttgagaatcctattcgtcccagaaatttattttcctgtgttatgtgcatgtatgtttttttactgatagtgcctaaagttgta

SEQ ID NO: 48596 - DNA, 201 bp, Homo sapiens
tgctgataaatagatatgtaagtctttgctgacttgtattattcagaattgtgtggtgtggatgtggcctcatcagtgacacaagtgctgttccagtggcrccctctgtgctgatggacacattttatagctgttctatccagtgtagtagcctgtggccacctacgtctattgagcatgtgacatgtgactgaggaatcg

SEQ ID NO: 48597 - DNA, 201 bp, Homo sapiens
tgactgatattttaaaaccactttaatcgggacaattatgcatgcaaatttgtggcaacatgctattgggtgtaatgttatattaggttaagttggtgcargtagtaacaactgtcacatcactctcttgccttgaccccaaaagtctctttgatgatgtcagttataaggggcttctcattttcatagggttaaatgtga

SEQ ID NO: 48598 - DNA, 201 bp, Homo sapiens
gtgttttctttctccttctagaagtgttttatgcatttattgttttctattttttttaagttgttgtggtacattggagatgtatatatttttagggtacrtgagatgttttggtacaggcatgcaatatgaaataagcacatcatggggaatggagtatccatcccttcaagtatgtatcttttgagtttacaaacaatc

SEQ ID NO: 48599 - DNA, 201 bp, Homo sapiens
atctaggttgccccctccttatgagaatctaatgcttgatgatctgaggtggtacgctttcatcctgaaaccattctcaccacatcccagcccatccattaaaaaaaaaaaaaaaactgtcttccacaaaacaggtccctgatgtcaaaaaggttggagaccactaccttagaccatgcaaagaaagaggctcagtgtgtc

SEQ ID NO: 48600 - DNA, 201 bp, Homo sapiens
taacctaataatactcaggttttaaatattgttttgagactgcaatgaggcataatatgtacctggcacagagcaaatgttatttcccatattcctttcamgtttacttaggtttggcctatactcttacctcttctgtgtaagaattgcagtgaaccttcacatattttaatgtagggctattgcatatggccttccagt

SEQ ID NO: 48601 - DNA, 201 bp, Homo sapiens
gtcactctattgtgctatcaaatagtaggtcttattcattctttccatttttttttgtacccatcctttgtaatgttttattgacctttcagggcatcaakaattaacacttaccattagtttataagctgaaaatgatggttggagaaatgtcttgggtgagtaacaactggcaagctcatccaagccggtgccccagaa

SEQ ID NO: 48602 - DNA, 201 bp, Homo sapiens
tctaggttgccccctccttatgagaatctaatgcttgatgatctgaggtggtacgctttcatcctgaaaccattctcaccacatcccagcccatccattaaaaaaaaaaaaaaaactgtcttccacaaaacaggtccctgatgtcaaaaaggttggagaccactaccttagaccatgcaaagaaagaggctcagtgtgtcc

SEQ ID NO: 48603 - DNA, 201 bp, Homo sapiens
taagttgtatttcatagggcattcagggtggaataagacctagttcctagctgaaggtatctaaagatgctagctagttatattattgagtttcagatacrttagattcttgtatattggacttgacatatatgtcctctttaatatctggataaaagaaaatggtttaatattttagagtgaatgaaatgtttaatgttg

SEQ ID NO: 48604 - DNA, 201 bp, Homo sapiens
ggatctggccaggcgtggtggctcatgcatggaatcccagcactttgggaggccaaggtgggtggaacacttgaggtcaggagtttgagaccaggctggcsaacatggtgaaaccctgtttctactaaaaataccaaattagccaggcgtggtggcgcatgcctgcagtcctgctacttggggggctgaggcaggacaatg

SEQ ID NO: 48605 - DNA, 201 bp, Homo sapiens
gccaggcgtggtggcgcatgcctgcagtcctgctacttggggggctgaggcaggacaatggcttgaacctgggaggcagaggttgcagtgagccaagatckcaccgttcattgcactccagcctgagcaacagagcgagactccatctcaaaaacaaataggaactgcttaaagttttgatcctatttcttaatcatattt

SEQ ID NO: 48606 - DNA, 201 bp, Homo sapiens
tgaacccggtacctcagatggaaatgcagaaatcacccgtcttctgcgttgctcacgctaggagctgtagaccggagctgttcctattcggccatcttgtrgtttcaagtttaaggattctttgtctagccctaggtctcaaacatgttctcctatttttaaaaaaggatttacagtttttgctgggcatggtggctcacg

SEQ ID NO: 48607 - DNA, 201 bp, Homo sapiens; identical to SEQ ID NO: 8419

SEQ ID NO: 48608 - DNA, 201 bp, Homo sapiens
gagaaaaaaagagacaggctcatgtacctcttctgctttattttttacccaaccctgatgctacccatagctccctgttttaatctaccacctagggctgwgtggagcatggaaaagaaaaaaaggaggggaacacatggaagattccagaattatcttgattgacatgcagagtttgctcttttctttcctgactgcctc

SEQ ID NO: 48609 - DNA, 201 bp, Homo sapiens
tttcttactgtggttgttgaggtttcaaaaccaaggttgagaatcacggtcagagatccctgagggagctcagcaatgctgaaatcacccctaacgtactrggttttcagtagttttgggaattagagaaatggagttctacttttatctcaactgattacaaaaggtattaatgaaagtccatttgtattaggttcacag

SEQ ID NO: 48610 - DNA, 201 bp, Homo sapiens
gctacttgggaggctgaggcaggagaatggcgtgaacccgggaggcagagcttgcagtgagccgagatcgcaccactgcactccagcctgggcaacagagygagactccatctcaaaaaataaaaaaaataaaaaaataaaaaataaatgaagaggatcttaagcatggcatcttagaagctgtgacccctgtgagtggaa

SEQ ID NO: 48611 - DNA, 201 bp, Homo sapiens
ctcaggaacatcctggtttatataagtagggattacatcagaaatgctgtgtgtactgttcaccactggagttttgcagctagtcaaaaaaccttatttaktgtttacttcatgataagcaatttctacaggggagaaaagaaagtcagagaataggcggtgataagaaagtggattgaaaataggatatatacacttaaa

SEQ ID NO: 48612 - DNA, 201 bp, Homo sapiens
actcccttagtttgatatttcaataaaatgattagattataaacttcaaacaaatagaaactcttaagaaagtgacaacaaatgtacaaaacatgaaacargtgaaaaatatgaaatatattctggaaatggtatctataaagtttgttttataaaaagttaaaataataccactaagggatttcttccccttttcttgtg

SEQ ID NO: 48613 - DNA, 201 bp, Homo sapiens
ttttcttgtgttgaaacacttcagaatacccatgtatataggcatttacaaaaaaaaaaattacatttacaaagggataattggccagcaagctcgattgctctgtgtgtgtgtgtgtgtgtgtgtgtgtgtgtgtgtgtgtgtgtgtgtgtgttggtaggcttgttttatactgagtatccagtggctaattccttggaa

SEQ ID NO: 48614 - DNA, 201 bp, Homo sapiens
gacattaattacaatatcaaattattattcagagatatatataggagtctgaggaaatcatctggcaactctttcttctagaatcgtgactatcacattargttatgttttaaaggaaactataatattgcttgctcttggtaatctatatcatgacaaaaatataaagtactgggctcaagggcttaattttcatctttc

SEQ ID NO: 48615 - DNA, 201 bp, Homo sapiens
tttcttgtgttgaaacacttcagaatacccatgtatataggcatttacaaaaaaaaaaattacatttacaaagggataattggccagcaagctcgattgctctgtgtgtgtgtgtgtgtgtgtgtgtgtgtgtgtgtgtgtgtgtgtgtgtgttggtaggcttgttttatactgagtatccagtggctaattccttggaag

SEQ ID NO: 48616 - DNA, 201 bp, Homo sapiens; identical to SEQ ID NO: 31126

SEQ ID NO: 48617 - DNA, 201 bp, Homo sapiens
tcttgtgttgaaacacttcagaatacccatgtatataggcatttacaaaaaaaaaaattacatttacaaagggataattggccagcaagctcgattgctckgtgtgtgtgtgtgtgtgtgtgtgtgtgtgtgtgtgtgtgtgtgtgtgtgttggtaggcttgttttatactgagtatccagtggctaattccttggaaggg

SEQ ID NO: 48618 - DNA, 201 bp, Homo sapiens
cttgtgttgaaacacttcagaatacccatgtatataggcatttacaaaaaaaaaaattacatttacaaagggataattggccagcaagctcgattgctctgtgtgtgtgtgtgtgtgtgtgtgtgtgtgtgtgtgtgtgtgtgtgtgtgttggtaggcttgttttatactgagtatccagtggctaattccttggaaggga

SEQ ID NO: 48619 - DNA, 201 bp, Homo sapiens
taggaggcccactaggaagcagtctgttgattcttcataatatttaaaataacagaaaatcagaataaagagttaagttgggctgggtgcagtgcctcacrcctgtaatcccagcactttgggaggccaaggtgggaggatcacctgagctcacaagttcaagaccaacctgggcaacatagtgagaccctgtctctacaa

SEQ ID NO: 48620 - DNA, 201 bp, Homo sapiens
agctccatgttgctttgtttttccagctctttctctgcttgcccccgtcatcactccccagcccactgccgttgtttttgtttctctccccaccgagcccwcttccttcttttcttttcttttcttttcttttcttttcttttcttttcttttcttttcttttcttttcttttcttttcttttcttttcttttttgtgatg

SEQ ID NO: 48621 - DNA, 201 bp, Homo sapiens
gtacctggccatgtgaggtgtcagtctgcccctactggggggtgcctcccagttaggctgctcgggggtcaggggtcagggacccacttgaggaggcagtytgcccgttctcagatctccagctgtgtgctgggagaaccactgctgtcttcaaagctgtcagacaaggacatttaagtctgcagagttactgctgtcttt

SEQ ID NO: 48622 - DNA, 201 bp, Homo sapiens
gtttgtttgaattggaatccaaataatttcatatattgcatttggttggtgtgtctcttaagtctcttttaatctaaagttctgttgccgcctttaaaaarttttacaattgttaaaaagtctgggttgtgttttttgtttgtttttattttattaaatgcctcttgagtcataagaactgtgttgtttatctgtggaaaa

SEQ ID NO: 48623 - DNA, 201 bp, Homo sapiens
tggccatgtgaggtgtcagtctgcccctactggggggtgcctcccagttaggctgctcgggggtcaggggtcagggacccacttgaggaggcagtctgccygttctcagatctccagctgtgtgctgggagaaccactgctgtcttcaaagctgtcagacaaggacatttaagtctgcagagttactgctgtctttttgtt

SEQ ID NO: 48624 - DNA, 201 bp, Homo sapiens
atatattctagaatagtcttatttatatttttaaaaagcatactgggattttgttaagaattgtactaaaactgtatatcagtttgaagaaaattgacatytttactattttgagtcttctaatccatgaacatcatatagcacttcatttatttagatttttgtcatctttcactggcattgtatagtttttactatgag

SEQ ID NO: 48625 - DNA, 201 bp, Homo sapiens
tttgtattataactaagatgagaataaaatagatcaaatgtttttcatttggctatttgataattatattagttcaatataatatcacattatgttgaccyttaccactcaacaactttcttttattttaatttaaaaaatgtctgaggagataagtgattgtgttcagaaattccatgatatttattttttatttgcaaa

SEQ ID NO: 48626 - DNA, 201 bp, Homo sapiens
atatatcagaaaaatcaaagtgaaaataaacacagaatctactccacttctgaattagcttgaagcagattcatgacatcatataatttcatctgtaatakttttctccagatgaaaaagttaaaaattatgacattattatacaaataaagtaacaatagtttttgatatcttaaaatttcactgattatctcataaaat

SEQ ID NO: 48627 - DNA, 201 bp, Homo sapiens
caacctgtagattctattgctcgaagtcatttgctgtttatccatttaatagaatcagtttggtaactttgtgttagactattcagtgggtgcaatgaagrtgagttcttgtgaacaatgtgtaagggaagtatggaatcttaaaccttgctcagatctagatgaaacaaaatagcaggcctatataatttgaggtagaag

SEQ ID NO: 48628 - DNA, 201 bp, Homo sapiens
cctcgagggcagggttcatgtcttatgtttctctgtgtgcctagtgctgagaaatcattcaataaatgtttctgaattggtggatctaagtattctaagtyaatttattcctcattacttgtgcaaggacagtttttataattgggagcacaagggtgggggtgatcattctcaacagtagtttgattagttagatcctga

SEQ ID NO: 48629 - DNA, 201 bp, Homo sapiens
gaatgacaggaagtttttaggcataccagtttactgaaagttgcatttgagatattttaatataatggtttatagttttctattgagttaattctctgtcrtaaaatgatgctaaaagtattggtctagattgaagatctgcaaacttttcctataaagggccagatactaagtattttgggttttgtaaatcacacagtc

SEQ ID NO: 48630 - DNA, 201 bp, Homo sapiens
aattattttaatctgagctggtccaaggccatgggctttgaaagatttctgttcatggcacagtcgtcttttttgaagctgaatgtcttatatgtgactgragtttttacataaacaattttgaatcaggtggaatgaaatttgatccctatatcaggaaaatagagttagaaatgaggcatagacagggctaaaaggaaa

SEQ ID NO: 48631 - DNA, 201 bp, Homo sapiens
cgttgctcacgctaggagctgtagaccggagctgttcctattcggccatcttgtagtttcaagtttaaggattctttgtctagccctaggtctcaaacatkttctcctatttttaaaaaaggatttacagtttttgctgggcatggtggctcacgcctgtaagcccagcactttgggaggccgaggtggatggatcacttg

SEQ ID NO: 48632 - DNA, 201 bp, Homo sapiens
atgatgaatccctgtctctacaaaaaatacaaaaattagcttggcgtggtggtatgcacttgtagtcccagctatttgtgggctgaggtgggcagatcgcytgagcctgggaggttgaggttgcagtgagccgagatccttctcctgcactccagcctgggtgggcatcagaagtggcaccctgcctcaaaaaaaaaagtt

SEQ ID NO: 48633 - DNA, 201 bp, Homo sapiens; identical to SEQ ID NO: 31152

SEQ ID NO: 48634 - DNA, 201 bp, Homo sapiens
ctgattagttgtgcaacaaattcatgacaaattaccagattaatttttactttatttcttcaggactggggtttttcgatggtttcaaatttagaatcttygcatttgaaattagataacatattcctgtctgctttcagcagaagtttactctccaactcttgctggtgctctgggccagtatcagcaggtcctccagat

SEQ ID NO: 48635 - DNA, 201 bp, Homo sapiens; identical to SEQ ID NO: 31153

SEQ ID NO: 48636 - DNA, 201 bp, Homo sapiens; identical to SEQ ID NO: 31154

SEQ ID NO: 48637 - DNA, 201 bp, Homo sapiens
tgttgttttacatttaagtgtgtgttgtactttgagtgtttttttgtgcaggttatgagacttagtaggttaagttcaggttttttttttttttgtctatrgctgtccaattgctccagtgccattcgttgaaaaggctatttttcctctaattgcttttgcatttttgtcaaaaatcatgtgggcatctgggttaccatt

SEQ ID NO: 48638 - DNA, 201 bp, Homo sapiens
cctttttacatatcatcaacattgtatatatcttttttttagggtggtaaaggtgttctttgattcttgaattgtaggtacacaacactatgcctttatcmaaatccacagaacattagagtgcaccgagtaaaccttaatgtatgcaaatttaagaaaaccttgaggttggggatgggatgcagaatgtgacaaaacaat

SEQ ID NO: 48639 - DNA, 201 bp, Homo sapiens
atttccgttttctattccaggatcccattaggatcaagctgccgttaataaatactagtcaggaattttgtagaatgtcccttaattgggttttttctgatttttttttcatcattacactgagaattatgggttttgggaagaagacccaaaggtaaagtgctgttttcatcacaccatataaaaggtacatactatcaa

SEQ ID NO: 48640 - DNA, 201 bp, Homo sapiens; identical to SEQ ID NO: 31155

SEQ ID NO: 48641 - DNA, 201 bp, Homo sapiens; identical to SEQ ID NO: 31156

SEQ ID NO: 48642 - DNA, 201 bp, Homo sapiens
cttatttacatgtggatagcaatacctgtatatagtatatatcgatatgtactatatatcgatatatagtacatatcaatatatactatatatcgatatakagtatatatagatatatatacatagatagtatatatagtatagtatatatagtatatatatactctatagagtatatatatactatgtagatatactatc

SEQ ID NO: 48643 - DNA, 201 bp, Homo sapiens
tttacatttaagtgtgtgttgtactttgagtgtttttttgtgcaggttatgagacttagtaggttaagttcaggttttttttttttttgtctatggctgtscaattgctccagtgccattcgttgaaaaggctatttttcctctaattgcttttgcatttttgtcaaaaatcatgtgggcatctgggttaccattttgttt

SEQ ID NO: 48644 - DNA, 201 bp, Homo sapiens
atatacgatatatcgtatacatctatatgtaccatatatacgatatatcgtatacatctatatgtaccatatatacgatatatcgtatacatctatatgtrccatatatatgatatatcgtatacatctatatgtgccatatatacgatatatcgtatatatggtatatatcgatatatactatacatctatatattgtat

SEQ ID NO: 48645 - DNA, 201 bp, Homo sapiens
tctatggatctatctttccatagtcttagtaactgtagctatataatcttagaagaatgagtccttccactttattattttttccaaaattgttctagctrttctagttcctttcctttttcatatatattctagaatagtcttatttatatttttaaaaagcatactgggattttgttaagaattgtactaaaactgtat

SEQ ID NO: 48646 - DNA, 201 bp, Homo sapiens
tagttatactacttttatttcctatttctttttttttttttttttttttttttttgagacagagtttcgctctgtcgcccaggctggagtgcagtggcgcratctcgactcactgcaagctgcgcctcccgggttcacgccattctcctgcctcagcctcccgtgtagctgggactacaggcgcgcgccaccatgcccggc

SEQ ID NO: 48647 - DNA, 201 bp, Homo sapiens
gaggaaggctttatccatccctgattttcaccttatgctagaagttaaggctgcatatgatgaagcatatatttaagttgtcactgcactggctcagcttrtccaggaaaggcttatcctagcctcagaggccttgcctccttttatctggatattttatgactttccaggaacaatgtctagtagtattaaaaactgtgg

SEQ ID NO: 48648 - DNA, 201 bp, Homo sapiens
caaaaaatcaaattccctactaaggactcagtctatggacatggtcattagccagtgtaaatgccaaatgggtgatttttttgggggggaggttagccaawgtaaatgtcaaatgagtgattttttttggggggccagaccttcctgaaggcccctaaatgttgccatatacttttctttcaatctataaaagtattaaaa

SEQ ID NO: 48649 - DNA, 201 bp, Homo sapiens
actacttttatttcctatttctttttttttttttttttttttttttttgagacagagtttcgctctgtcgcccaggctggagtgcagtggcgcgatctcgrctcactgcaagctgcgcctcccgggttcacgccattctcctgcctcagcctcccgtgtagctgggactacaggcgcgcgccaccatgcccggctaatttt

SEQ ID NO: 48650 - DNA, 201 bp, Homo sapiens
tctttatatatacaatattaaatctatataaaatatagtcagttaaactttgcattttaaaattattaagtctgtgaacaagtctatggcatgtaagaggtttttttttttttttttgaaggtttgggaaaattggaatgtaacattatcggatgctgctctcctgaagtccgtgggttcttcctaataggagggatttct

SEQ ID NO: 48651 - DNA, 201 bp, Homo sapiens
ctatttctttttttttttttttttttttttttttgagacagagtttcgctctgtcgcccaggctggagtgcagtggcgcgatctcgactcactgcaagctscgcctcccgggttcacgccattctcctgcctcagcctcccgtgtagctgggactacaggcgcgcgccaccatgcccggctaattttttttgtatttttag

SEQ ID NO: 48652 - DNA, 201 bp, Homo sapiens
caatttttgacaacagtggttgtaccatgctcccgattcatgtctattttatgtgaattcaattttatgggctctgtaaaaaataaaaagtgctgggggtkgggggaggtagggaggaaaatcagaattcacacctcggggtggctgtacccatcatttcattttgagagaataaagtccgtgagtgagtgggacactgca

SEQ ID NO: 48653 - DNA, 201 bp, Homo sapiens
actaaagtttgatatgtatcatgataaattagagaaaattctagtttttctcataataacagttctgtccctcacttcattctgacatactttttcatggmgtaaagagcttgaagttaccgcgttagcctaggaattgctaataatttacagcctgtttcatctgtgacacagcctataatttgggtaaatctatgggag

SEQ ID NO: 48654 - DNA, 201 bp, Homo sapiens
tgatcatcacatctaaaaaaaaattaacagttgttacttaaaatcatgctgtcagtatttgaatttctctggattgtctcataaatgtttttttttttttycccctcagtttgtttgaattggaatccaaataatttcatatattgcatttggttggtgtgtctcttaagtctcttttaatctaaagttctgttgccgcct

SEQ ID NO: 48655 - DNA, 201 bp, Homo sapiens
gctgaggcaggagaattgcttgaacccaggaggcagaggttgcaatgagccgagatcctgccactgtactccagcctaggcgacagagtgagcctgtctcaaaaaaaaaaaaaaaaagccacaaaatagaaaatgtatcagtatttctttccacttagttgcaatgtttgtaactatactctagttgtattttgttttagt

SEQ ID NO: 48656 - DNA, 201 bp, Homo sapiens; identical to SEQ ID NO: 31159

SEQ ID NO: 48657 - DNA, 201 bp, Homo sapiens
acagtagtgatttatgtaattctgattttgatttaaatttgaaattaagtggtctctcccctttctcctcttctccctgtatgcctcactcaacccctacmcaatcagacaggattagcttccatggagcaggctatgcagctattttcttacacagcgtggcacagtagtaccgacaatttaggaaataactgaagcaaa

SEQ ID NO: 48658 - DNA, 201 bp, Homo sapiens
ttggttggtgtgtctcttaagtctcttttaatctaaagttctgttgccgcctttaaaaaattttacaattgttaaaaagtctgggttgtgttttttgtttrtttttattttattaaatgcctcttgagtcataagaactgtgttgtttatctgtggaaaagacaggttcaattattttctgaaatattccccacattctgg

SEQ ID NO: 48659 - DNA, 201 bp, Homo sapiens
atcctcggctgggcttagctggcagtgattgttgccttctgaggtttaaaaaaataagatagtgtgtaatccttccccgttcttgtcttgtgcagggacgygtgtgcttatgttttcaattcaaggagaaaaggaacattttcataagcttacaagcagaaaaggtgtttctaagcgggttgcctctgcagtgctgtcctt

SEQ ID NO: 48660 - DNA, 201 bp, Homo sapiens; identical to SEQ ID NO: 31161

SEQ ID NO: 48661 - DNA, 201 bp, Homo sapiens
aatgctaattactggagaattgttcagggagacggcaagaactgttggtttgtggtaaattagtcaccagctctattgagatggactgaaagtttagatcrgagctataaaggcaccaaaatcctgatgattgacggccagacttggtgacagtaccaatatggaaataccccaattgtgctaaacagtggtagataactt

SEQ ID NO: 48662 - DNA, 201 bp, Homo sapiens
gcatgtgccaccatgcccagctcgttttttgtatttttggtagagacagggttttgtcatgttgtcaggctggtcttgaactcctggcctcaagtgatccrcccacctcagcctcccaaagttataaataccttctgatgtatccaaagaaaaagcttttgtaaacgtgtcccaacaactagtgcttggaggaattaatag

SEQ ID NO: 48663 - DNA, 201 bp, Homo sapiens
ccatgatatatgtaacttactgttaaatgattcagggggtatatatatatatatatatatgagcacaagcatgcgcttataaaaacaagctcgtacacaartagaaaatgcagtcaaatgttaacaatatgtaaatctgggtaaatagtatatattgctatttttttgtgctgctgttattctttcagcttttttaaaaaa

SEQ ID NO: 48664 - DNA, 201 bp, Homo sapiens
gagcacaagcatgcgcttataaaaacaagctcgtacacaaatagaaaatgcagtcaaatgttaacaatatgtaaatctgggtaaatagtatatattgctatttttttgtgctgctgttattctttcagcttttttaaaaaaaatagtggatatccttgagcttttctgtaagtttgaaattattcctgaatagtaaataaa

SEQ ID NO: 48665 - DNA, 201 bp, Homo sapiens
gagcttgcacaacaactaggagtttggcctaactatggttcacaggtcaacatgtttaacctttatgtggagacttacaagagtgacagcttcttggtagtttttaatgatttttgacctgtttaatattgtgttttatcttgagaaattatttctacatatccttacattggaactgtacttcacagagacctttaacac

SEQ ID NO: 48666 - DNA, 201 bp, Homo sapiens
cacaaatagaaaatgcagtcaaatgttaacaatatgtaaatctgggtaaatagtatatattgctatttttttgtgctgctgttattctttcagcttttttwaaaaaaatagtggatatccttgagcttttctgtaagtttgaaattattcctgaatagtaaataaaaaaccatgtaaattgtttttgagggaggagataca

SEQ ID NO: 48667 - DNA, 201 bp, Homo sapiens
catttaagtaattctgaaacagagtccatccaatgcttcaagcaataaggttctcatgttattcaatccattatttgggtagaaaggaagtcctttttttaaaaaaaaaaaaaactcaattaacaaatctttatcaagtccttctgcaagctcaccctgcccactcctggcaggattagtccctctcctgtcaccccattt

SEQ ID NO: 48668 - DNA, 201 bp, Homo sapiens
gctctgtacattctcatctgaaatgagtttttcttcacaaatgtgtaatataaatgtatagaccacatacctagacaggtctgtgatgcatgcaggtacacacacacacacacacacacacacacacacacacacacacacaccacactcacaggcaggggactgtatatttcttgtaacttggctaataggcctgcttgc

SEQ ID NO: 48669 - DNA, 201 bp, Homo sapiens
gagtttttcttcacaaatgtgtaatataaatgtatagaccacatacctagacaggtctgtgatgcatgcaggtacacacacacacacacacacacacacasacacacacacacacacaccacactcacaggcaggggactgtatatttcttgtaacttggctaataggcctgcttgccccaaactctgtatactgactgcc

SEQ ID NO: 48670 - DNA, 201 bp, Homo sapiens
ctgaggcaggagaatggtgtgaacccaggaggtggaggttgcagtgagccgagatcggccactgcactccagcctgggtgacagagcaagactccgtctcaaaaaaaaaaaaaaagtttgttatgtgtttgtgagtgcatgtacatgtgtatgttggtagtggggttaagatgaactaaaagttagtcctattaatgtgat

SEQ ID NO: 48671 - DNA, 201 bp, Homo sapiens
ctcatgcctgtaatcccagaactttgggaggccgaggcgggaagatcacctgaggttgggagttcgagaccagcctggccaacatggtgaaaccccgtgtytactaaaaatacaaaaattagctgggcttggtggcgggcctctgtaatcccagctactcaggaggctgaggcaggagaatcacttgaacccatgaggcgg

SEQ ID NO: 48672 - DNA, 201 bp, Homo sapiens
tacactatacattctgaattgctttttttttttttttttttttttgagaaggagtctctctttgtcgcccaggctggagtgcagtggtaatatcttggctyactgcaacctccacctcccgagttcaggtgattctcctgcctcagcctcctgagtagctgggattacaggtgcccgccatcacacctggctgatttttgt

SEQ ID NO: 48673 - DNA, 201 bp, Homo sapiens
actgatggggtaatgatccggcttcagcaaaggaaaggaagcatcactctctccatgtatcagaatctggggactgtcttctccccatccagctatgcagrttttgtttttaaggtttgcttaaaatgtggaatgttcggctgagtaccattgatttatgtttgcctaagaagaatgtgaccatctgtcttagggggtggc

SEQ ID NO: 48674 - DNA, 201 bp, Homo sapiens
gtgaagaaaggactctgttatatgatggccttgtttactggaaaactgctacaggtcgtttcaaaggtactgtggctctaccagaccaatttctcccttcwtacacattattcatttaacagaggacagattttcaaaagaaaaacagttcagaattgcaggcacacatgcgcaaaccctgggtcagttgaaagattgatt

SEQ ID NO: 48675 - DNA, 201 bp, Homo sapiens
ctgatggggtaatgatccggcttcagcaaaggaaaggaagcatcactctctccatgtatcagaatctggggactgtcttctccccatccagctatgcagawtttgtttttaaggtttgcttaaaatgtggaatgttcggctgagtaccattgatttatgtttgcctaagaagaatgtgaccatctgtcttagggggtggca

SEQ ID NO: 48676 - DNA, 201 bp, Homo sapiens; identical to SEQ ID NO: 31119

SEQ ID NO: 48677 - DNA, 201 bp, Homo sapiens; identical to SEQ ID NO: 31120

SEQ ID NO: 48678 - DNA, 201 bp, Homo sapiens; identical to SEQ ID NO: 31121

SEQ ID NO: 48679 - DNA, 201 bp, Homo sapiens
aaaagtatatattttttaagctccgaaatagtaatcttttggctcgacgccgaggaattccagaatgcattctgttggtcactcagcgtattacaaaataycctgtcttggtggaaaggatattgcagtacacaaagggtaagttgtgacttctgggataaaaatttgcccctcttattagttttaaacacagttgaggtg

SEQ ID NO: 48680 - DNA, 201 bp, Homo sapiens; identical to SEQ ID NO: 31122

SEQ ID NO: 48681 - DNA, 201 bp, Homo sapiens
caggagaattgcttgaacctgggaggcggaggttacagtgggccgagatcgtgtcactgcactccagcctgggggacaagagcgagacttcgtctcaaaawaaataaataaataaataaataaaaaataataacaatagccatgtcttgcagggctgttgtgaactacttgaagaagcccagtgcagtaaacggcatacag

SEQ ID NO: 48682 - DNA, 201 bp, Homo sapiens
cagctttaaaatctctttatcacaatgcaatccctggataatagaatcagcacaaaatggatacggtgtaacaatacagctaagcatggcagctcctttcrtcttctcctacattagaggtcttcaactcctaatgcctgtaggcattgggcagaaatgtgattgagtgaatgtgatagggtcagaagcaatgagacaata

SEQ ID NO: 48683 - DNA, 201 bp, Homo sapiens
ataaataaataaaaaataataacaatagccatgtcttgcagggctgttgtgaactacttgaagaagcccagtgcagtaaacggcatacagtcagcactctaaaaaatgagagcagttgttttatgccggggataggggtagaaagaaggcaggcttgggcatgctcaagaatcgaagtagctagggcatcgctactttggt

SEQ ID NO: 48684 - DNA, 201 bp, Homo sapiens
cagtggtagataactttgtataaatctaatgaaatgagtacaatctatataaaagttaaaacttccaaccacattaggattaaaagggcggtgagactggwttgttaaatgaattatgagagctgttttggttcttagatccgaaaagctgcccaagctgccaatggtatgaaagaatagtctgctctggaaagagctctt

SEQ ID NO: 48685 - DNA, 201 bp, Homo sapiens
tgcccaggctggagtgcgctcactgcaacctctgcctcccaggttcaagcaattctcatgcctcagcctcccaagcagctgagactacaggcgcacaccascacatctggctaatttttgtgtttttagtatagatggggtttcaccacattggccaggctggtcttgaactgctgacctcaagtgattcacctgcctcgg

SEQ ID NO: 48686 - DNA, 201 bp, Homo sapiens
aacacaggattatattttctttgctaatttcactagattctatagttacattagagaactgttccttatttctggaagagccccaatttccaccttcccctttttttatgcataggtctggcaataaatttaacttggctctgtctccaggcaatccagggttaaactgtctcctggggcacacaatttcagtccctaggg

SEQ ID NO: 48687 - DNA, 201 bp, Homo sapiens
atggaatgggtttacattacttattctctcttacttgcaatccattcttgttgtagtgtgggccatggaaacaaggagcaagctggtgttagggtgtagargaagtgccctgagaagctgttatcccatcctcggctgggcttagctggcagtgattgttgccttctgaggtttaaaaaaataagatagtgtgtaatcctt

SEQ ID NO: 48688 - DNA, 201 bp, Homo sapiens
atgttaacaatatgtaaatctgggtaaatagtatatattgctatttttttgtgctgctgttattctttcagcttttttaaaaaaaatagtggatatccttsagcttttctgtaagtttgaaattattcctgaatagtaaataaaaaaccatgtaaattgtttttgagggaggagatacacaaagtcattattactttggag

SEQ ID NO: 48689 - DNA, 201 bp, Homo sapiens
gttcttgtcttgtgcagggacgtgtgtgcttatgttttcaattcaaggagaaaaggaacattttcataagcttacaagcagaaaaggtgtttctaagcggsttgcctctgcagtgctgtccttcgggagcatacctgttctagggagcaggatggcttaccctgtcaccctgtgcttctcccagaggaggatggacgctag

SEQ ID NO: 48690 - DNA, 201 bp, Homo sapiens
tgttaagtcacttgctggaggccacagtcactaagtggcatggtcaggactgagacctgcatctgccccactcatcaacctgggttttctcttggaggtcwtactgcttgctaattagcaacatctttttcgtggactttcacattagtggttgtattcatgttagtgataatcttctatggtaaatactatttcatagaa

SEQ ID NO: 48691 - DNA, 201 bp, Homo sapiens
ccaggacaggccatactagcggcccagcagttaatgattggagtgggccagaatccattactgttccacttcaagggctccaggaatgcctgattttctgtttttttgttttgttttgtttttgttttttttaaataggagattcaatcaagaaatgtattgcttattaatcaacgattgaaaaatacaggaattaggctt

SEQ ID NO: 48692 - DNA, 201 bp, Homo sapiens
tcctatagtccttagaggggccttagagactctttcttattggataaaaggaaaccttttttttttccaaacaagtattatgaggaacattaatatgtaakcttgataaaactttattattataaatgtgttctttaagtttattgcatttgtcaattcgatggaaaaatgacaacctggcactttaggtcctctccaatg

SEQ ID NO: 48693 - DNA, 201 bp, Homo sapiens
cggtaagggatggtaaacttcaatgggtagctaccttgggttcaaaaggtgccattgtgcctccccatcttagcttctccctctcctctgtgtatctttaytaggaggagaagtgacagggagagactctggaggagcaagatggtagggttgtttgtgcatcttgataccttcctcctatacacagatatagtacttaaa

SEQ ID NO: 48694 - DNA, 201 bp, Homo sapiens
cctgcatctgccccactcatcaacctgggttttctcttggaggtcttactgcttgctaattagcaacatctttttcgtggactttcacattagtggttgtrttcatgttagtgataatcttctatggtaaatactatttcatagaaatactcactaaccaagaccaacaaatttgtgcgtatttggaggagaagctgcata

SEQ ID NO: 48695 - DNA, 201 bp, Homo sapiens
tctgaaaaaataatccttgacacagtaagtaggcagaggtatgatggcattttagaaatgttaatgatttttaaaggtgagatacttttatctcatgggcwtgtctttttttctttcccttcctcccttttgtcaagtttcatcagatgtacacatgcatgtggatatgcaagtgagtattcagtctaaaaactccccaaa

SEQ ID NO: 48696 - DNA, 201 bp, Homo sapiens
atagtattataatttactatattcttgttcaggggactcctctccatcacttctagttttagggaaggacaaatgattatttattcagatacattaattaygtaaggtagaaagtgattaagtcccataggagagatcaggaaaaattactgtcaaagttcaaggcaaagaggatagttcaagttgggggtatcataaaaa

SEQ ID NO: 48697 - DNA, 201 bp, Homo sapiens
attgaagatctgcaaacttttcctataaagggccagatactaagtattttgggttttgtaaatcacacagtctctggggtgtgtgtgtgtggtgtgcgcgygtgcgtaggcacatgcccatgttttgacaacctttaaaaatgtaaaaatcatttttagcccctgggtcctataaaaacagggacaggccaaatgcgattt

SEQ ID NO: 48698 - DNA, 201 bp, Homo sapiens
aacactaagaccattggtgaaaaggactttctataaacttcagaacttggtgaaggtccctttgaatgaggaaatttgggagattgtatatgcagcagctgggctttgctctctgtcaggaccgtgtttgcgttctggttcaaccacttaataacctgggcaggttaatcactttccctgggccttagctttcttgtctac

SEQ ID NO: 48699 - DNA, 201 bp, Homo sapiens
ttgcacagttgctggtggcagttgcatgttcggttttaagaaactgctaaactgctttccagagtggctttattgttttgcatctctaccagcaaaaaaamcagtttttccatatctgctatagcatttggtgatggcactttttttgtgtgttagccattttgaatggtatgcattgatatctcattgtgattttaattt

SEQ ID NO: 48700 - DNA, 201 bp, Homo sapiens
tcttgtgtctcccggggggagtccaggccttggctttacccaacgaagagggtgccacaccattagacttagctttacgtgaaggacactccaagctggtrgaagacgtcacaaagtgagtttagctacttgatagtctctctcttatttgtataaagtcggccaagcattatagaaaaatggaaataaccaaaccacaag

SEQ ID NO: 48701 - DNA, 201 bp, Homo sapiens
ctttgccttgctgagtgcagtgggatgggaaccccacccagactaggctgatcacagcaatcctcctgcctgggtcacaatgattggcctgggttgggcamatgatttaagcatagccaatcggaatccttccttgggattattcaaactggaggttggtgggtgatgtcttctttcttggatggcagtgtcttctttctt

SEQ ID NO: 48702 - DNA, 201 bp, Homo sapiens
ccaaagacataagtatttttattaaagaaaaaagcatttcctatattggaaataaagttttaaaaagacacaataaaaattatacaaacaaacagtgtcayaaagtgaatatcgattttgtcagggtctggattggacatggttctaataaaacactgttttgggctttgaaaattctagttttaatcagtgcaaggtggg

SEQ ID NO: 48703 - DNA, 201 bp, Homo sapiens
cagggtggtcttgaactcctgacctcaggtgattcacccaccttggcctcccaaagtgctgggattataggtgtgagccactgcgccagacctgaagatgtttttttaagagtcgctgatagaggctgagggctccatcctgggcccagcaggttgcacagtacctggtgatcagtagacactcagtaagtgttgaaaaaa

SEQ ID NO: 48704 - DNA, 201 bp, Homo sapiens
cacacctgtaatcccaacactgggaggctgaggtgggaggattgcttgagctcaggagttcaagaccagcctgggcaacagagtgacactccatctctttaaaaaaaaaaaaaaaaggtgggtgtggtggtatgctcctgcagttccagctactcagagggctgaggtgggaggatcacttgaactggggaggtcaaggct

SEQ ID NO: 48705 - DNA, 201 bp, Homo sapiens
ttggggttcagcattgtatctcctgtgtcactctgccttgcgtacgtttttaggaaaggccctctcgttactgtatcacagctgttattaaacctctatamcctaagacactgaattccttgaaggcggccagcccattatcacatctccagcacttggatcccagaaagtaggcagtgaatattgaaagtgcctcgtggc

SEQ ID NO: 48706 - DNA, 201 bp, Homo sapiens
gtgacaggaagatgacatgggctaagccaccttttcttcctttcctttcctttttcctttctcctttcctttcttttttcctttttccttttgtttctccyttcctttcctttttcctttcctttccttttcctttctttctctttctctttctttctctctgtctctttctctttctttctctctgtctttctctttctt

SEQ ID NO: 48707 - DNA, 201 bp, Homo sapiens
aggcaggcggatcacaaggtcaggagattgagaccaacctggcgaacactgtgaaactctgtctctactaaaaatacaaaaaaattagctgggcgtggtgrcgggtgcctgtggtcccagctacttgggaggctgaggcaggagaatggcatgaacccaggaggtggagcttgcagtgagccaagatcgcaccactgcact

SEQ ID NO: 48708 - DNA, 201 bp, Homo sapiens
ctctgtaacctcaggtccaactcagaagagtatggccaagactaatatcaggaaaaatcctaagagaaccttagaagaggaatgggcgaggagatgaatgytagtttacctctggaaatgtcctgcccaccccattttttttagagacagagtctcacccaggctggagtgcagtgacaagaacatagctcactgcagctt

SEQ ID NO: 48709 - DNA, 201 bp, Homo sapiens
caccaagcctggccaaggaatgcattttagtttgctgctttatttctctgtattctttcagctatttttttttagcttccacatttcctatagtaatgcattttttttttttttttggctattaagtggaaatcccaaagtactgggattatgtacaaaaatacataaggatcttctaattttatcatcaagttaagcaaa

SEQ ID NO: 48710 - DNA, 201 bp, Homo sapiens
taacactaagaccattggtgaaaaggactttctataaacttcagaacttggtgaaggtccctttgaatgaggaaatttgggagattgtatatgcagcagcygggctttgctctctgtcaggaccgtgtttgcgttctggttcaaccacttaataacctgggcaggttaatcactttccctgggccttagctttcttgtcta

SEQ ID NO: 48711 - DNA, 201 bp, Homo sapiens
tgccaacatcattaagttaaaatttcattatatttttgaaataaattggagagaatcaacacctttaccataatcacttacttgtcttataaaagaacatyggtcagtcatctcttattctatgatttgctggagagctttgtaattgtcttcatatggtatgatatgcgtgtatatgtatttttttcactaagtttattc

SEQ ID NO: 48712 - DNA, 201 bp, Homo sapiens
caggtattttctttcgatcattctgttgattgaaggagaaagtctcagtgtggtacccttgcatctttaacatttcttgaatccttcagaatctccctttrcaacaaagagtcagaatctaatttcattgttttgtttgcatgatttcagtacatataattcccttcttcttttttttgagatggaatctcactctgtcgc

SEQ ID NO: 48713 - DNA, 201 bp, Homo sapiens
accaagcctggccaaggaatgcattttagtttgctgctttatttctctgtattctttcagctatttttttttagcttccacatttcctatagtaatgcattttttttttttttttggctattaagtggaaatcccaaagtactgggattatgtacaaaaatacataaggatcttctaattttatcatcaagttaagcaaat

SEQ ID NO: 48714 - DNA, 201 bp, Homo sapiens
ctgttggattgccgactggaaggagggagactgtgggacaggtccatccattgtccagaagtgttccaggcaccaccttggaaaggtaaggctgagtgtgyttttacatattaatggctcagagagcttctggggctaactttgctcccctccctctctcctagcttcaggaggtcagccacatccttggagtctgagagt

SEQ ID NO: 48715 - DNA, 201 bp, Homo sapiens
cagaattgcagttaagacaatgtagactggccgggcgtggtggctcatgcctgtaatcccagcactttgggaggccgaggcggctggatcacgaggtcagraggtcgagaccatcctggctaacacggtgaaaccccgtctctactgaaaaatacaaaaaattaactgggtgtggtggcgggcacctgtagtcctagcaac

SEQ ID NO: 48716 - DNA, 201 bp, Homo sapiens
ccaagcctggccaaggaatgcattttagtttgctgctttatttctctgtattctttcagctatttttttttagcttccacatttcctatagtaatgcattttttttttttttttggctattaagtggaaatcccaaagtactgggattatgtacaaaaatacataaggatcttctaattttatcatcaagttaagcaaatt

SEQ ID NO: 48717 - DNA, 201 bp, Homo sapiens; identical to SEQ ID NO: 8401

SEQ ID NO: 48718 - DNA, 201 bp, Homo sapiens
ggagaatggcgtgaacctgggaggtggagcttgcagtgagccgagattgcgccactgcactccagcctggtgacagagcgaaactccatctcaaaaaaagaaaaaaaaaaaaaaaaagaaaatgtttttctttaacatcgtatgtttcctccagaagcttaatgaatctcacacttcagtgttctgtgtggagaagagata

SEQ ID NO: 48719 - DNA, 201 bp, Homo sapiens
cagggtttcaccgtgttagccaggatggtctcgatctcctgacctcgtgatctgcctgcctcggcctcccacagtgctgggattacaggcgtgagccaccrtgcccagccaaaaccaagtgtttctagttattaaaaaaatgctgataagagtaaaatgaaaagtacaggaaagtgttaagaaaataagtcataatctcac

SEQ ID NO: 48720 - DNA, 201 bp, Homo sapiens
gtaggtcattttgttctcagtgtccattttacagtgaacaattcagtgtacagactattcaaactaagtaatttaaatacacacaaaccgtagagattttracagccaattgtcattcaactcctcaaatgctaaatggctttcatttgccagatactgtgctaggtattaggaataaaatacctcaaggacccctccgcc

SEQ ID NO: 48721 - DNA, 201 bp, Homo sapiens
acattttttatttttctttttaaagattgtttcttccactattgttttccccttctagacagaacaactaatatccaaagattggattgtttttttctttwtggggagagaggagggttgcattctggaaggcttttttttgagatggagtctcactctgtctccaggctggagcacagtggcacaatcttggctcactgc

SEQ ID NO: 48722 - DNA, 201 bp, Homo sapiens
ttttctggctgaaaattcttcagttaacaccacttgggagcttaaaagttctgtactggaaattataaagatatttttattttggttttatttttaaattaattattttaagatttcacgttgccgtgagaaagtagataattttatttttagattattgctcttagtcttctttttcctagtttgtgtgtaaaaagagat

SEQ ID NO: 48723 - DNA, 201 bp, Homo sapiens
ttctggctgaaaattcttcagttaacaccacttgggagcttaaaagttctgtactggaaattataaagatatttttattttggttttatttttaaattaattattttaagatttcacgttgccgtgagaaagtagataattttatttttagattattgctcttagtcttctttttcctagtttgtgtgtaaaaagagatag

SEQ ID NO: 48724 - DNA, 201 bp, Homo sapiens
ggttgtgtcaggagaaagtatgttcttggaattcttaaacaggaaccctgattctcctgggaaacacggctaaacatgctgcttaggacagtactcatggracaggatatgagttaaagtggctcatgtaagctggtctactgtagtgtgtatgcttgttttagagctgcaagtaatccacttataggcattggaatctgg

SEQ ID NO: 48725 - DNA, 201 bp, Homo sapiens; identical to SEQ ID NO: 31146

SEQ ID NO: 48726 - DNA, 201 bp, Homo sapiens
gaaagttagctttcaacttatttgcatttctaaatctcctcttaactcatgtattcagtaaacatttattgacggtccgctaaaggccaagcaatctgtgygggacaaaataaagattaataagtatgcaagctattggagaagactaacacatgaacagatgatcctaaagtagagaggtgccaataattatatagagaa

SEQ ID NO: 48727 - DNA, 201 bp, Homo sapiens; identical to SEQ ID NO: 31148

SEQ ID NO: 48728 - DNA, 201 bp, Homo sapiens; identical to SEQ ID NO: 31149

SEQ ID NO: 48729 - DNA, 201 bp, Homo sapiens; identical to SEQ ID NO: 31150

SEQ ID NO: 48730 - DNA, 201 bp, Homo sapiens
taattatattagaattttcaaattaagtattcactaattcatttattcatttgacaatatatgttgaaacctactactattatgacctgacatttacttcrgtagttttggactagttatactacttttatttcctatttctttttttttttttttttttttttttttgagacagagtttcgctctgtcgcccaggctgga

SEQ ID NO: 48731 - DNA, 201 bp, Homo sapiens
ccaacctctggggagaagagaggggctgaagactaaactgatcacaaatggccaatgatgcaatgagtcatgcttatgtaatgaagcttccttaaaaaccyaaaaggactgggttcttggaactactggatggcagaacacgtggaggttcctggagggtggcacacccaggggagggtagggaagctccttgcccttttc

SEQ ID NO: 48732 - DNA, 201 bp, Homo sapiens
aaagatgtctccctcctgcttcggactcctccttcctcctaaaccttgtttatcgtctgctgctcttgcactggccacaagagagactttttacagacttragtctgccaagagaccttgcttttgttctacagcacctgttttaaatttcacccttcccaggaggcattttcctattaagtgagagtgagatgtagattc

SEQ ID NO: 48733 - DNA, 201 bp, Homo sapiens
ataaattatgatgatgctcgatgatttaggattctaacatttccccttttgcttctttttccccttcactgctctatctctaaatggtgttactgtcttcmtttttactgtcctcactccagacttgatgccttttgatgaccgccacctcaaatcatgagtgcttaaaagtacgcctttcttagagcaagtgctttcatc

SEQ ID NO: 48734 - DNA, 201 bp, Homo sapiens
cttcctcctaaaccttgtttatcgtctgctgctcttgcactggccacaagagagactttttacagacttaagtctgccaagagaccttgcttttgttctayagcacctgttttaaatttcacccttcccaggaggcattttcctattaagtgagagtgagatgtagattctaccctctgtaacacaaacgacacacgaaca

SEQ ID NO: 48735 - DNA, 201 bp, Homo sapiens
tttcctgtgccctgaagttctttaactttaaaaacagaacaaaccagctctgatacccatacctaaatacatcaggaagcatcttccctaatgtcaaatgygttgttgttggaaggaagcactcatgctatttgaactcaaccacatgaagtgaacataacaaatgacactgttatggacccaggtcctttgtattgtgct

SEQ ID NO: 48736 - DNA, 201 bp, Homo sapiens
aaaacatactttagttagttaagactggtcttctttggatctctgagatacttaccccatctgttgcctcctaggggaataaaaacattttgttttgtgayggagtctcactctgttgcccaggctggagtgcagtggtatgatctcggctcattgcaacctcgagctcccaggttcaagcgattctcctgccacagcctc

SEQ ID NO: 48737 - DNA, 201 bp, Homo sapiens
tgccgaaaagcctcccttcttcccttctcagatttcaacatccttaagggcgagaatggtctctaatcttcctcctttttacctcttttcttgttcctacrtgtgctttggcaagagagtacctcagtaaaggatttggtgggcagaataaagcccagatctgtatatcttggtatccaggaggcagctcgccacatgtgg

SEQ ID NO: 48738 - DNA, 201 bp, Homo sapiens
cccttcccaggaggcattttcctattaagtgagagtgagatgtagattctaccctctgtaacacaaacgacacacgaacacttcagtgcaagaaagaaaartacaaagatggtgatactttgtgcggttcgtcagttgctgtctgttagcgtgtaagccccatgtgggcagggaccacatgcattgctctgcgctcatcca

SEQ ID NO: 48739 - DNA, 201 bp, Homo sapiens
ccattcctggtggggtgaatctttctctctcctgctcatttttatttatctatttattttccatctttctcacgcttttcctatttcaactaagctccatsttgctttgtttttccagctctttctctgcttgcccccgtcatcactccccagcccactgccgttgtttttgtttctctccccaccgagccctcttccttc

SEQ ID NO: 48740 - DNA, 201 bp, Homo sapiens
tcagtgcaagaaagaaaagtacaaagatggtgatactttgtgcggttcgtcagttgctgtctgttagcgtgtaagccccatgtgggcagggaccacatgcwttgctctgcgctcatccaagcacctcatctaagaatactcaatatgtattattttgtggtgtttcctattttgaaatatgtgttggccgtgtacagaaga

SEQ ID NO: 48741 - DNA, 201 bp, Homo sapiens
ctataaacttcagaacttggtgaaggtccctttgaatgaggaaatttgggagattgtatatgcagcagctgggctttgctctctgtcaggaccgtgtttgygttctggttcaaccacttaataacctgggcaggttaatcactttccctgggccttagctttcttgtctacaaaacaaatatagtaatgactcatgcagtt

SEQ ID NO: 48742 - DNA, 201 bp, Homo sapiens
gtaggtgtaaacaaagcaacgattgaaaagttattaaaaagattaaaaactctcctgtgtatatgtgtgtctgtgctctctgacttctggtctttctgccstgcaaacctttgcttctcacccactatgtctggcagctctggcacccgggggcccttttgcaaccagatggcgccaaagtaattgaaacaccttttactt

SEQ ID NO: 48743 - DNA, 201 bp, Homo sapiens
ggaggccgagacgggcggatcacgaggttaggagattgagaccatcctggctaacatggtgaaacctgtctctactaaaaatacaaaaaattagcagggcrtggtggcgggtgcctgtagtcccagctactcgggaggctgaggcaggagaatggcgtgaacccgggaggcggagcttgcagtgagccgagattgtgccac

SEQ ID NO: 48744 - DNA, 201 bp, Homo sapiens
ttcacctactttttttgtggttaatttttaattaatctgaccagtttttgcttggggcacagcgattcccaaagggaatcctcttttttgacttactgctrtagacataggtattaactctctctttaagaattaaatacataaaacttcctattaatgtctactgaaagtgagatgtcagaaatagggaaggaataaaat

SEQ ID NO: 48745 - DNA, 201 bp, Homo sapiens
tgcaagcacagagagcttaagtaacttgccccagtcacacagctaataggtggtggagtagagacttgaacccaggcagttcagggctcatgcttttaacyactgcaacacacgagtgtttttcactaatttaaaatctgcagccatttttctaaaatgggagttgagctttggctacttttatattgtctttgaaatata

SEQ ID NO: 48746 - DNA, 201 bp, Homo sapiens
acctactttttttgtggttaatttttaattaatctgaccagtttttgcttggggcacagcgattcccaaagggaatcctcttttttgacttactgctgtakacataggtattaactctctctttaagaattaaatacataaaacttcctattaatgtctactgaaagtgagatgtcagaaatagggaaggaataaaatatg

SEQ ID NO: 48747 - DNA, 201 bp, Homo sapiens
tgaggcaggagaatggcgtgaacccgggaggcggagcttgcagtgagccgagattgtgccactgcactccagcctgggtgacagagcaagactctgtctcaaaaaaaaaaaaaaacccaaaaggactgggttcaagagattctggatagctgaatacatgggggttcctggagggtggtgcacctgtggagggtgtggaaa

SEQ ID NO: 48748 - DNA, 201 bp, Homo sapiens
ggaagctgaggctggagaatcacttgaacctgggagacagaggttgcagtgagctgagatcatgtcactgcactccagcctgggagacagagcgagactcygtctcaaaacgaaaacaaaaaccaaaacaaatctaattaacggcacatagttacttcagctgttggttgctttccctctgcccttttgctctggctaatg

SEQ ID NO: 48749 - DNA, 201 bp, Homo sapiens
ttttttgtggttaatttttaattaatctgaccagtttttgcttggggcacagcgattcccaaagggaatcctcttttttgacttactgctgtagacatagrtattaactctctctttaagaattaaatacataaaacttcctattaatgtctactgaaagtgagatgtcagaaatagggaaggaataaaatatgattctgg

SEQ ID NO: 48750 - DNA, 201 bp, Homo sapiens
tgtgggaccagactccatctccaggtcgatagtgccagaattgaattgaactgaattagaggaaattcagtggtggattgcttccttgctgcatgtcgggrgaaaaccccacacatttagtcacagaagagttctgtgttgattgttgagtaagagaatagaaaaaaagactgtttttatccctatattttcagaaaatca

SEQ ID NO: 48751 - DNA, 201 bp, Homo sapiens
gactctgccctgtgaaagtcatttaaacatactgaaaatctgttattaccataacacactatgattagtattaataaccttgcacttcacactgaacatgsttaaaaattgctatccataataattacaaatttaatagtaattctgaccaataatatttattgagcactttttaccaggcatgtgtcaagtctttacatg

SEQ ID NO: 48752 - DNA, 201 bp, Homo sapiens
gaaggaataaaatatgattctgggaggtggctagttggcctcttcctgcttgtcagggctccagagtttagctttatctaaaattgaattaggtacattamtaggtgccaatatgtgtcaatgtgaaaaaatggcaaatgtcagatcttctcacatatacaacatattttacatattatatactttttgtgtatattacat

SEQ ID NO: 48753 - DNA, 201 bp, Homo sapiens
agcacagtacagttaccaaaatcataaaattatcatcgatacaatgctattagctatctccagaccttgttcaattttagcaagttgtcccaataatgttccctgtggcaaaagaaaattccattacatgtgttgcatatagttgttgtgtctctgtagtctcctttaatctgggacagttcctcagtctttgtgttttat

SEQ ID NO: 48754 - DNA, 201 bp, Homo sapiens
aaaattcttcagttaacaccacttgggagcttaaaagttctgtactggaaattataaagatatttttattttggttttatttttaaattaattattttaaratttcacgttgccgtgagaaagtagataattttatttttagattattgctcttagtcttctttttcctagtttgtgtgtaaaaagagataggaaacgatg

SEQ ID NO: 48755 - DNA, 201 bp, Homo sapiens
aagttattaataaagggaaattaagtttagttatcaataaagggaaatgtatagtttttgtttgtttgttttgagacggagtttcactcttgttgcctagwctggagtgcaatggcacggtctcggctcaccgcaacgtccacctcccaggttcaagtgcttctcctttgtcagcctcctgagtagctgggattacaggca

SEQ ID NO: 48756 - DNA, 201 bp, Homo sapiens
ctccaattcagctacaggtagataattgaggttaagtgtctgggttcttctttggattaagctatctgcaaaattttttgcttaataaggcattttgaaarattaatacattaataaacccaggtaaagggcaggatcacttgaaatcaaacttttaaaaggtgtataatggatattttgtcattagcttcctctacaagg

SEQ ID NO: 48757 - DNA, 201 bp, Homo sapiens
aaatgaagggttggtgaaactgacatgtcaaaacaagaactgtgtgagcatgttttgactttccctatgagggaaggtgatagggagatagagacactccytataggtgataggggacatgaggatagcactggctggcatcctcctttctgcttggagagtctcagtactttgaagctctaggcatgaagcgctgcctca

SEQ ID NO: 48758 - DNA, 201 bp, Homo sapiens
gaggcaggctcattgcctgaatccgggaggcacagatttcagtgagcagagatggcactactgcactccagcctgggggacggagtgagactctgtctttaaaaaaaaaaaaaaaaaaagtctgtcaggtgtgtgagcccccagatctcaagagataaataagttctttagaagtcttctaggaatatagcatggaaaaga

SEQ ID NO: 48759 - DNA, 201 bp, Homo sapiens
tgagattattggcatgagccactgtgcccagtgaaattctcctttttagagaactttattagtattttggtaaacactaaaatttgtttggcaaatgtgtacacacacacacacacacacacactcatgatatttcataaggaattatacgggaatgctgtttttattataatggacaggaccccatttcccctcaccccc

SEQ ID NO: 48760 - DNA, 201 bp, Homo sapiens
gtttgtttgttttgagacggagtttcactcttgttgcctagtctggagtgcaatggcacggtctcggctcaccgcaacgtccacctcccaggttcaagtgyttctcctttgtcagcctcctgagtagctgggattacaggcatgcgccgccatgcccagctaattttgtatttttagtagagatggggtttctccatgttg

SEQ ID NO: 48761 - DNA, 201 bp, Homo sapiens
tataggtgataggggacatgaggatagcactggctggcatcctcctttctgcttggagagtctcagtactttgaagctctaggcatgaagcgctgcctcayctactcttccaggtctggctggtagagagtgggcttggcgcaagtgcaagagaagatattaagcatagtatcttgcaaagtaagcctcttggaaaaaaat

SEQ ID NO: 48762 - DNA, 201 bp, Homo sapiens
gagattattggcatgagccactgtgcccagtgaaattctcctttttagagaactttattagtattttggtaaacactaaaatttgtttggcaaatgtgtacacacacacacacacacacacactcatgatatttcataaggaattatacgggaatgctgtttttattataatggacaggaccccatttcccctcaccccca

SEQ ID NO: 48763 - DNA, 201 bp, Homo sapiens
cgccttggcttcccaaagtgctgggattacaggcgtgagacaccatgtccggcctgaagtttagttactaataaagggaaatgaagtttaatttaaaaatrtagtagaaatcaaaagcaaagatttaattgattttacaaaggcctctaatgatggggaaaataacgcttgaagtgggcaaatatttatctatctagaact

SEQ ID NO: 48764 - DNA, 201 bp, Homo sapiens
gatattaagcatagtatcttgcaaagtaagcctcttggaaaaaaattatgttagtcttctataattatagaaataataaatgttcacaatagaaaaattgrgaattttagaaagagtagaaaaagaaatccctataatatccccacccaaaggcagttactattaaatttgggtatatttcctaccagcattttttctcat

SEQ ID NO: 48765 - DNA, 201 bp, Homo sapiens
catcttcataatctgatagtggattatgactatgatattcacatttctaccaggttgggtgatggtttaagttttcatatttcataattaataatattttwaaaaaagcatttttatgtttacactgttatatctcaggtcttatcaacctcagcttaaaaagttgaagtatcggctgggcgtggtggctcacgtttttaa

SEQ ID NO: 48766 - DNA, 201 bp, Homo sapiens
agattattggcatgagccactgtgcccagtgaaattctcctttttagagaactttattagtattttggtaaacactaaaatttgtttggcaaatgtgtacmcacacacacacacacacacactcatgatatttcataaggaattatacgggaatgctgtttttattataatggacaggaccccatttcccctcacccccat

SEQ ID NO: 48767 - DNA, 201 bp, Homo sapiens
aaaaatatagtagaaatcaaaagcaaagatttaattgattttacaaaggcctctaatgatggggaaaataacgcttgaagtgggcaaatatttatctatcyagaacttttcatcctacgtaaaaattctagatagctgaggtttggatatagatgaaaaattacttgcatgtagatcttaaaatctagccaaaagccctct

SEQ ID NO: 48768 - DNA, 201 bp, Homo sapiens
tcctcacaataaccctttaaagtatagatatgattccattcgctatgagacaactaaggctcagaaaatgggaatgacttggttagggccactaactgacrgagccattatttgaacccggatatctgtgtctcccaaacccatgatttttctttttagcttgtggtgcactaaaaatgtaagacacagttcttgcccaca

SEQ ID NO: 48769 - DNA, 201 bp, Homo sapiens
gtctctccttgcacccttcttcctccgtgcctgttggattgccgactggaaggagggagactgtgggacaggtccatccattgtccagaagtgttccaggyaccaccttggaaaggtaaggctgagtgtgtttttacatattaatggctcagagagcttctggggctaactttgctcccctccctctctcctagcttcagg

SEQ ID NO: 48770 - DNA, 201 bp, Homo sapiens
tacatgtgatgatacttgtaacatgttttcattgatgctttccaaggttgtttttctagttcacaaaaataaacattagtgtagcatatatgtaatttttwaaaaatccacctgactttatctcttccagcgtgtcaaaagcctggtggttcaacacaatgaacatgaagaccagcacagcctagatttgggtatgaaata

SEQ ID NO: 48771 - DNA, 201 bp, Homo sapiens
ggcccgacctccttccagggaccacttttctttctaaaggatcccaggaaggttaggtaagttatgagggtgaattgggtatttggattgagactctagtktggtgaacagaggttccctgggttctctcagatattcttgctacatattaaaatctacagagttactttagcttacatatgacccacaggaaattcctgg

SEQ ID NO: 48772 - DNA, 201 bp, Homo sapiens
aaaaaaaagttgacacttttattcagctctatctctacctacagttttttagatgtggttctttgtttagcttgttttactgctcacttttgtttctttaaaaaaaaaaaaaactacagtgaatccttcttgaactcctaattttgattctgtcctcaaaaggctaaaataggagtgatctgttgatctgaaacttcatgt

SEQ ID NO: 48773 - DNA, 201 bp, Homo sapiens
ttctgtttcaatttctttgggaaatttcccaactgctttccacagtggttgaactaatttatattcctacccacagtgtataagcattcccttttctctgmagtcttaccagcatctattattttttgactttttaatagtagccattctgactggtgtgagataatatctcatctctctaacgattagtgatgttgagct

SEQ ID NO: 48774 - DNA, 201 bp, Homo sapiens
atcttagatgtctttgggacagtatgtactgagctagattttttttttgcaatgatcagatgaaattctttaattttttcttcttctctgcctttaagctaaaaaaaaaaaaccctctaatctcttatgcagaaaagtagaaaattcttgatgttctctgtgacaagaataatccatttttagtaactgtgctcaacctaa

SEQ ID NO: 48775 - DNA, 201 bp, Homo sapiens
atggagaattctgttgccatcataaagaagctgttaacctctttaaagaactccagcagaataaaaagtttcagaattttattaaggcaagtattttaaarctttattacaaagtgataaatcagcatggagaaatagtttatgcttgtttcttaatgatttaaacaaatttcttagctaatgatgcttttcaggggaaga

SEQ ID NO: 48776 - DNA, 201 bp, Homo sapiens
tttttagtagagatggggtttcactatgttggctggtctcgaattcctgacctcaagggatccacccaccttggcctcccaaagtgctgagattacaggcrtgagccaccacactgggccaaaatttgtttttggtatgtatactagttagcaggattatagacctcccaaagttatactcaggtatgaagaagaatgtag

SEQ ID NO: 48777 - DNA, 201 bp, Homo sapiens
aggaggaggggctgaaggttaaattgatcactaattactaataatttaaccaatcatgcctgcataatgaagcttccataaaaacccaaaaggacgggccrggcacggtggctcacgcctgtaatcccagcactttgggaggccgagacgggcggatcacgaggttaggagattgagaccatcctggctaacatggtgaaa

SEQ ID NO: 48778 - DNA, 201 bp, Homo sapiens
aggtgaatcacttgaacctgggagcctgaggttgcagtgagccaagatcacgccattgcactccagcctaggcaacgagagcaaaactccatctcaaaaaraaaaaaaagttaaagtgtcgtgttgtagaagtatgaaggatatatgataaattgtgcatttgtaagtttttaatcaatgtggaaactgtcgttttttata

SEQ ID NO: 48779 - DNA, 201 bp, Homo sapiens
gacaataggcttttaattaaggtctgtagagccatagctcaggaaacacacctcctgaagagttttttttgttttgtttttttgttttttttttttttttwaaaaacacttgcgtttcttcttgctaccctacaaacagtaactgtgtgctccatcgaggcaactgtggtcgttaatcttccgcagcacaggaattgctag

SEQ ID NO: 48780 - DNA, 201 bp, Homo sapiens
tcaggaaatgattttttaaatgtttcagagggtaaatatgaatcaaccactaaacagggaatataacttatattacagagttggaacagtaatgataaagmcccccgcctttttttaagtagagttattctaggaaagtgtgaatttttgatttaggaacatgcacaagggatatagtaataagaagtacaagtcagacac

SEQ ID NO: 48781 - DNA, 201 bp, Homo sapiens
ttttgatttaggaacatgcacaagggatatagtaataagaagtacaagtcagacacatgattaaaataaacaagaatagagccaaggctcagaagatacgmagttctgttttgtgacctttgatggggaggatggaatgggataagacagggagagaactgaacagcgcgtcatcagtgctctcaatggcagactaaacat

SEQ ID NO: 48782 - DNA, 201 bp, Homo sapiens
gtggctgactatatgggcactgcatttcctaatcttagagagctctaacgccaagacatctgccttgtacatctcaggtggcctcctgtaacctgtgctgwctgtttcttgcagatttggacacctcccacactgagtccccaaccccccatgactcaaattcacaccgccctcaactgcaggcgtttataacagaagcaa

SEQ ID NO: 48783 - DNA, 201 bp, Homo sapiens
tgagctcagatcctgctatggtctgaatgtcttaatgtttatatcccccccaggtttgtatgttgaaaacctaatcaccaatgcattgattattaggtggrcctttagggggtgagtagagcataaggatggggccctcatgaatgggattagtgcccttataaaagcggcactagagagctctcttgcccctttgccatg

SEQ ID NO: 48784 - DNA, 201 bp, Homo sapiens
ctctctcattgagaggcagcagagcatagaaattgaaagtatggattctggatccacatctgccactaactcgttgtgtgtccttggcatgttacttcacytcgctctgtttccatttccttatttataaaacagggatgactaccttatggaatcgttgcaagaattaaattattaatatatgcaatatgcttagaatag

SEQ ID NO: 48785 - DNA, 201 bp, Homo sapiens
gttttaaacatttaccacaaggtggcagaacaactccattaaaaacgcgaaatttcctgtcttgtgtcaaacctagtggcttttgggcataagtaaccgcrggtagcacagtccaactcatttctatggttctaatttttatagactataaaaactctgtgccatatggtcttactacagaagcagtggagtgtggatggg

SEQ ID NO: 48786 - DNA, 201 bp, Homo sapiens
cctctgctgctagtacttctactatggcagtcactggtctggtgatctctgactgtggtgggatctagagcagcccagctacgcgcgccactatggccacsgtctgagtctggtttcttttcccaactgctgtatatgttgatatcgtgaatctcaaacattgagaaaaggagttaaggccagacatgatattctttcttt

SEQ ID NO: 48787 - DNA, 201 bp, Homo sapiens
cacagagaactcaattcacattgtggtttgcacaaggtaaatgttgttacttgagttttcagggtgtccttactgtcatcccttgttgttttaaggggtgwttgggtgaaaattgccatccatctcaaacatcgactttgcgtgaaggacgctcttgttgtcaagtgtttgtttgattctataggcttttatttctgggag

SEQ ID NO: 48788 - DNA, 201 bp, Homo sapiens
cagtgatcttcaaattttagtatttataaaaattatagatctgaagatttctacacactaatatatggaggatttaagggattttcaagggtagttttgaygacacaaagtctgccttataaactgactttaaaacttaatccctatataagatccaccctatctactcactgagcagtaagacatttaacccttttatgt

SEQ ID NO: 48789 - DNA, 201 bp, Homo sapiens
aaaaatattgatgaatatgatctggcttgacatttacaatgaaactcttaggtgagtgtagcatgacttcacattttctgatgaaaacctaaattcacacytaaaattctttgacttctccatgtggccatcagcctttagagcagttaagtaatccatatgttgctttactcttttgtttgttcatccactcaacattta

SEQ ID NO: 48790 - DNA, 201 bp, Homo sapiens
tccaaacatccaccccagaaagtgctagatggaaggtctatcaaaaattgagtacagattggaaggatttgtatattaactggatatatttttccctaaaygttgcagctaacattataaacttaaatcatggtttggaagtctaaaaatctcttataattgtaagtggctattccactatcctctagtaatccttaaata

SEQ ID NO: 48791 - DNA, 201 bp, Homo sapiens
attccaattttcctgaggaactgcatgatccttctttggaaatgtccacacatcatttttgctatctgttcactagttcatgagaggtttccatgtaacargcctgcctaagaccctttgctccctctgggatctgtatcaggatagatctgccagccctcccctttcagtccttggctgtgcaggcctcaggattgggga

SEQ ID NO: 48792 - DNA, 201 bp, Homo sapiens
tgtttgtttgtttgtttttgctattgagttgcgtgagttccttacatattttgggtattaactccgtatcagatgcatggtttgtaaatatcttctccaaytctataagttgctgttttattttgctgtttcctttgctgtgcagagattttttggtttggtgtagtcacacttatttattttgcttttcttgcttgtgct

SEQ ID NO: 48793 - DNA, 201 bp, Homo sapiens
tcttccacaaaacaggtccctgatgtcaaaaaggttggagaccactaccttagaccatgcaaagaaagaggctcagtgtgtccgatggcttaatttactcrttaaaatgtatctcgaaaggatatacatgcaatgtttggattgttgaaaaatttgtagaaaaatttgagaatacaagtaaatgaaagaaaatgatttctg

SEQ ID NO: 48794 - DNA, 201 bp, Homo sapiens
acaagcatgcaccaccacacccagctaatttttgtatttttagtagagacagggttttgccatgttggccaggctggtcttgaactcctgacttcaagtgrtccacccgctttggcctcccacagtgctgggattacaggtgtgagccacggtgctaggccagttttacttatattttagtatgtgtgttttaaaatttca

SEQ ID NO: 48795 - DNA, 201 bp, Homo sapiens
tgtataaggggagaaatatctccaaagagattaaaataatagcattctgcttgtgcttgagtggtgaggatacatgtgatttaaatatttgtctttccttytttagttttccagatatttgtaatgtttatgtgtttttttataatgaccagtgaaagcatgatgtagtcttattaatttcagactaattaagtaagatgg

SEQ ID NO: 48796 - DNA, 201 bp, Homo sapiens
tcatgggcagaaaggggcagggaaagtattcccttacattcttccagtgagatgacattgttttatgacatgtgcccattgtttatgatataaaacaatgsgcacagggctaacatttctcatttaattagactacctgaaacttgtggttagtaggaattcttgccaagacctcacaatacatttttttcagcattgtta

SEQ ID NO: 48797 - DNA, 201 bp, Homo sapiens
tatttagacttcgactctatcaagacttctttctcttatgaccttttattcttgctctaggaccaacatctgaattgttaaagccttggattacatttgartatatgacagtgctcatcttatttatttttctatgcatatttatatatccttccacaagagcttttatttttttatttatttatttttttgagacagggt

SEQ ID NO: 48798 - DNA, 201 bp, Homo sapiens
ttctaacaagtttgcaggtgatgatattgctgctggtcctgagacctcagtttgagaaccactggactagaagaatgttctctgtagttgggaatgggctkgagtagatgaaggtgtctgtgattctattcctttcttttccactcagtagtcatgtcacagatgcatgtgagtgaacatgatgatccttcagggggaaat

SEQ ID NO: 48799 - DNA, 201 bp, Homo sapiens
tgtttttcctgaagtgtatattgctgaaatttaagcagtttctctttaaaataattggtgccctctgacagttctttacattgcatacaagaaccaatcaygccaatgtctcctaaatttgaaaatctcttgctttattgtgagagattttgtgacgccttctgcctaaagttgtgttgcttgacatgtggcaggaatttt

SEQ ID NO: 48800 - DNA, 201 bp, Homo sapiens
tatttcctcataattggattcaggttaggcatgtttggcaggaatactacggaagtgatgatgggtgcttctcagtgagttgtatcagaaggcataggacrtcaatctgtcccattactggtgattttattaatatctttcatctgccaagttcctttttcagtaaaattactgtttttaaaaaattattaagtaccatgt

SEQ ID NO: 48801 - DNA, 201 bp, Homo sapiens; identical to SEQ ID NO: 31131

SEQ ID NO: 48802 - DNA, 201 bp, Homo sapiens
ggaagatgctgtccctcttagtatttcttaagcaatttatattctactgtcaattttcttcatctacctctcaattctcaatttcatattattaaaagtawtctaacccattgggttgaattattacatggtcttttgtgtcagaaaggcttgcattccagggcaaattctttaccttctcttcctcactgtttctcttta

SEQ ID NO: 48803 - DNA, 201 bp, Homo sapiens
agtctgtttcagggtgtctctttggtataggttctactttttaaacgaatgaaaatttagccccagaggagaaaaccagagagtgaccaaggaaatatgaygtaaattttaaatagacatattactaaaagaatgtcacaagcataacgaagagaaatgaatgaaatatattgtgtgcttattattaaaaatgttttatag

SEQ ID NO: 48804 - DNA, 201 bp, Homo sapiens
gctaggactctttttcatgcatgtgggttgagctttctctttctggggaggatttttaagtaagtcttaggccctccagaagttccgtcctttctctgccrttcagagtttcccgactccccttaccctccgcagagtcttatagcaggagcacgaggccttacctgctggatttgctgttgattttattatttacaggta

SEQ ID NO: 48805 - DNA, 201 bp, Homo sapiens; identical to SEQ ID NO: 31134

SEQ ID NO: 48806 - DNA, 201 bp, Homo sapiens
ctacctctcaattctcaatttcatattattaaaagtattctaacccattgggttgaattattacatggtcttttgtgtcagaaaggcttgcattccagggmaaattctttaccttctcttcctcactgtttctctttaaaagataaggaaaatcattcctattttctgggtcataatgtattaatgggttaaaagattaaa

SEQ ID NO: 48807 - DNA, 201 bp, Homo sapiens
aagcatattttatagagcaggacttaatctagggaattagtttttgtatacaagcagcaccagtaagaaggaaaaccaaatggaaggagagtagtgacaaragagaggagtggattctgccccaggaacctgttttattttaatcttaagtctttaaattcattgtcatctcatttgtactgctttgagctggaacctctc

SEQ ID NO: 48808 - DNA, 201 bp, Homo sapiens
agtaagtcttaggccctccagaagttccgtcctttctctgccattcagagtttcccgactccccttaccctccgcagagtcttatagcaggagcacgaggscttacctgctggatttgctgttgattttattatttacaggtaatttgaaatttgggcattttctttcttctaatgatgctatgtacgtgcactttatgta

SEQ ID NO: 48809 - DNA, 201 bp, Homo sapiens
tccaattaaagaaatttttatttttgacaaaatattaaagctatatttagacttgctgactctccatggctgatatttaaggttctttcccaaaacttgcrgtaagtttggaaatactcattaatgtacaactagtacgtttggtgcacctgtaaattgtgagttgttattttctctcctgatgcgttttaaaaattgagg

SEQ ID NO: 48810 - DNA, 201 bp, Homo sapiens
aagctgctatgaacactcaggtgcagattttggtgcaaacctaagctttcatttttctgggataaatgcccaggaatgcaatttctgggttgtatgggagttgtatgttcagttttgtaagaaactgctaactgttttccagagtggttgtaccattttacattctcatcaacactgtacaagtaatccagtttctctaca

SEQ ID NO: 48811 - DNA, 201 bp, Homo sapiens
aacatcaaagaaccttataggtagacttcaaaaattctagttttaaactttttattgtctctaccacttttatttgcccatcaaaatgtccccttttaggktcctatattcactgatttgaaagtaagacacttaagaaaactgactaaaatatgataaaggaaaaccacgatgagataccagtttatactcacttgactg

SEQ ID NO: 48812 - DNA, 201 bp, Homo sapiens
gcactgtcatgtcaatgactttggacaaggaacccaacagatcttgtccccagtttgcaagtgtgtgaaagaaggagattagactagctcagtgattctcwactctggttggacactggaatcagttgagaggtctttaaaaatacggatgcctgggcctcaccctccaccgattgaatccgaatctgtggcaggtgggat

SEQ ID NO: 48813 - DNA, 201 bp, Homo sapiens
tatctcctaatgctatccctcccccctccccctccccccaccccacaacagtccccagagtgtgatgatccccttccagtgtccatgtgttcttattgttyaattcccatctatgagtgagaacatgcggtgtttggttttttgtccttgcgatagtttgctgagaatgatgatttccaatttcatccatgtccctacaaa

SEQ ID NO: 48814 - DNA, 201 bp, Homo sapiens
tttccactaatttcattttatcctgttgatcacactttccttagggagtagcttttttttcccccatatcctacccatgtgattatatgttcattttcacrtataaaatgaatcaaagtgaacataaaatgcacacacatatgtgactatgtatataaatatttctctgtgaatgaacatgcacataggtgaatgagtatt

SEQ ID NO: 48815 - DNA, 201 bp, Homo sapiens
agaggccagggtggtggaaggactaagtttatagaattgaaaatactgagaattttgacaggattagcgctagtgggagggggagaacttgtgctgtgtgstaactcattcagggaaggcaaacgagtggctgaaggtctatagaggaaaggcaacaatgagcggtagtgagtggttgtaacctgagggcagcggcttcaa

SEQ ID NO: 48816 - DNA, 201 bp, Homo sapiens
tcattttttatggctgcatagtattccatggtgtatatgtgccacattttcttaatccagtctatcatcgttggacatttgggttggttccaagtctttgstattgtgaataatgccacaataaacatacgtgtgcatgtgtctttatagcagcatgatttatagtcctttgggtatatatccagtgatgggatggctggg

SEQ ID NO: 48817 - DNA, 201 bp, Homo sapiens
aacatcaagtagacctcaaggtggacccttctcagccttcgaatgtcagtcacaaactgtggacagccgctggttccggccatcagatacttcctttccawgaaagcagcaaggattcttgtaaaaatggtaattaacactttaaacatcatctgtatagtttgaacaagaagttgtccctctgaatggttggctcttgtg

SEQ ID NO: 48818 - DNA, 201 bp, Homo sapiens
gggttggttccaagtctttggtattgtgaataatgccacaataaacatacgtgtgcatgtgtctttatagcagcatgatttatagtcctttgggtatatayccagtgatgggatggctgggtcagatggtatttgtagttctagatccctgaggaatcgccacactgacttccacaatggttgaactagtttacagtccca

SEQ ID NO: 48819 - DNA, 201 bp, Homo sapiens
gtcagatggtatttgtagttctagatccctgaggaatcgccacactgacttccacaatggttgaactagtttacagtcccaccaacagtgtaaaagtgttyccatttctccacatcctctccagcacctgttgtttcctgactttttaatgattgccattctaactggtgtgagatggtatctcattgtggttttgatttg

SEQ ID NO: 48820 - DNA, 201 bp, Homo sapiens
acaatggttgaactagtttacagtcccaccaacagtgtaaaagtgttcccatttctccacatcctctccagcacctgttgtttcctgactttttaatgatygccattctaactggtgtgagatggtatctcattgtggttttgatttgcatttctctgatggccagtgatgatgagcattttttcatgtgtcttttggctg

SEQ ID NO: 48821 - DNA, 201 bp, Homo sapiens
tcgtctagagttctctcagcatttgggggatagaaaaagcgcaaacattggaaacattgccttgaaatgagctctattccaaatggttcatctctctcaartccttatgacccgcaggcacagacatgtctcgatgacacatgccagtaataagctgactttgctaaaatcctcagctctgccgtgaactggcttttgagc

SEQ ID NO: 48822 - DNA, 201 bp, Homo sapiens
aacaatagccatgtcttgcagggctgttgtgaactacttgaagaagcccagtgcagtaaacggcatacagtcagcactctaaaaaatgagagcagttgttwtatgccggggataggggtagaaagaaggcaggcttgggcatgctcaagaatcgaagtagctagggcatcgctactttggttttgtccagctcattttccc

SEQ ID NO: 48823 - DNA, 201 bp, Homo sapiens
agccatgtcttgcagggctgttgtgaactacttgaagaagcccagtgcagtaaacggcatacagtcagcactctaaaaaatgagagcagttgttttatgcyggggataggggtagaaagaaggcaggcttgggcatgctcaagaatcgaagtagctagggcatcgctactttggttttgtccagctcattttcccgtgctg

SEQ ID NO: 48824 - DNA, 201 bp, Homo sapiens
ttatgccggggataggggtagaaagaaggcaggcttgggcatgctcaagaatcgaagtagctagggcatcgctactttggttttgtccagctcattttccygtgctgagagatgtcgaagatcaaagcctgttaggatgctgggctcagagtaagagcttcatgctacttattggatgagaggatgaacaagagtctttgg

SEQ ID NO: 48825 - DNA, 201 bp, Homo sapiens
catgggagcccctcccattataggcccagaggcctaggaggaaatggtttcatgggctgggcccagggtccccatgttgtgcagcctagggacttggtgcytggcatcccagctgctccagccgtagctgaaaggaaccaacacagaactcgggccatggcttctgaggctgcaaacctcaagccttggcagcctccacat

SEQ ID NO: 48826 - DNA, 201 bp, Homo sapiens
ttgtcacatttctgaccaacttaataaaacaagttagggagcccctatagattgtattacttttgttctgtttgtaatttaataagaaacatgtctttctytttcccatagcatcagtcaactgtaagaagtatagtattcctatacctttagttaaggggatggtatagtagaggtttagcatgtgtagcaaggagctac

SEQ ID NO: 48827 - DNA, 201 bp, Homo sapiens
tcaagtaatctacagtcgaaggtattcttattgctattaatttggtatattgcaagtgtggagaatatgttgtctgcatttacccatctgtatctgaaagrcatattatattttattcatacatatgaactattttttttgagacccatgtgatatctgattgagtctgtctttttaatctttcccactctgttttaattt

SEQ ID NO: 48828 - DNA, 201 bp, Homo sapiens
actacattcttttatcgtcaatatctattggcatcctgtttagagaaacatactttgaaatgcatctcaaggaagagggaaatgtagaattgtttgccccatactcccacggggcttgtgatgtgaaggccatggctccctaacagtggccttcttcttgagggaaggaagagcatgagagtgaatcaaagttcagacagc

SEQ ID NO: 48829 - DNA, 201 bp, Homo sapiens
tggattttcctgattgcattcccatcgcgtcatttgaaatattcttctgcccctatatttcctgtaaattggtaactgggaatacagatttgattagatgmaggctttattttttgacatgaaaataatatacatagatggtgttgtaaattgcatctcatcacgtggcacacaatgtctgtttctctttttgtgttatta

SEQ ID NO: 48830 - DNA, 201 bp, Homo sapiens
tttctacttgttttcttcttaagtttacttattactataaaacaatgtgtgctatggcaaaacttctctttctaacgtatggttgttatgataataccttmtttttgtagcatgccctacaatatacaaaatatgttttatgtatgtacaaaatatataattgcctcataactcacctattacataagtagtgcttttatt

SEQ ID NO: 48831 - DNA, 201 bp, Homo sapiens
atattgactattccaaatatgttaagtactgattaaagttcaactcccacaatcacaacttaaaaaattgtaacacaatttgctcttacttcacaaatttrtacatgtgttatacatgccacatacatacacaaacacatgcccaccccacagcacacttcagttgttttatttcaggtgcagtattggcatatgaagaat

SEQ ID NO: 48832 - DNA, 201 bp, Homo sapiens
aaattttctcccattttgtaggttgcctgttcactctgatggtagtttcttttgctgtgcggaagctctttagtttaattagatcccatttgtcaattttrgcttttgttgccattgcttttggtgttttagacatgaagtccttgcccatgcctatgtcctgaatggtattgcctaggttttcttctagggtttttatgg

SEQ ID NO: 48833 - DNA, 201 bp, Homo sapiens
gagcacagatcctgtatcctttaccctctgctctaagacctgcagagctgccgtaatcttttgcatctgaaggtcatgtgatatttctggataatgagaartttgtgtggttgttatgtagatacttcttagttttgcatgttgagtggaactgtgaaaagttcatcattacttggatgaaaaataatccagtctcttgaa

SEQ ID NO: 48834 - DNA, 201 bp, Homo sapiens
gacatacaaccacaaccacctccagtaatacatctggaattacaacatgggctgttcaccttagggcacaacaagctctcacctaggaatgtgtttctccygtatttttattcttatttgaaaaagttctgattaaacttctacactacaccacacacacacacacacacacacacacacacacacacacacacaactccc

SEQ ID NO: 48835 - DNA, 201 bp, Homo sapiens
atagctcaggaaacacacctcctgaagagttttttttgttttgtttttttgtttttttttttttttttaaaaacacttgcgtttcttcttgctaccctacraacagtaactgtgtgctccatcgaggcaactgtggtcgttaatcttccgcagcacaggaattgctagtaacataaaggtagtaatgggattatgttttct

SEQ ID NO: 48836 - DNA, 201 bp, Homo sapiens
gtatagtttgcagtcaggtagtgtgatgcctccacctttgttcttttggcttaggattgacttggcgatgcgggctcttttttggttccatatgaactttmaagtagttttttccaattctgtgaagaaagtcattgctagcttgatggggatggcattgaatctataaattaccttgggcagtatggccattttcacgat

SEQ ID NO: 48837 - DNA, 201 bp, Homo sapiens
agatcctgtatcctttaccctctgctctaagacctgcagagctgccgtaatcttttgcatctgaaggtcatgtgatatttctggataatgagaaatttgtrtggttgttatgtagatacttcttagttttgcatgttgagtggaactgtgaaaagttcatcattacttggatgaaaaataatccagtctcttgaaacagtt

SEQ ID NO: 48838 - DNA, 201 bp, Homo sapiens
tttttttgttttgtttttttgtttttttttttttttttaaaaacacttgcgtttcttcttgctaccctacaaacagtaactgtgtgctccatcgaggcaaytgtggtcgttaatcttccgcagcacaggaattgctagtaacataaaggtagtaatgggattatgttttcttttctttttttttttttgcaatagctcaga

SEQ ID NO: 48839 - DNA, 201 bp, Homo sapiens
cgatgcgggctcttttttggttccatatgaactttcaagtagttttttccaattctgtgaagaaagtcattgctagcttgatggggatggcattgaatctrtaaattaccttgggcagtatggccattttcacgatattgattcttcctacccatgagcatagaatgttcttccatttgtttgtatcctcttttatttcat

SEQ ID NO: 48840 - DNA, 201 bp, Homo sapiens
ggtttggaagtctaaaaatctcttataattgtaagtggctattccactatcctctagtaatccttaaatatagaaatctcagttaatatagaattttgttrgagggctacagtaaaataacaaaataactgacacctcaggtaaaaataataaactcattgttgaatatacaaagaaaaagtcatttgtcttaagttttca

SEQ ID NO: 48841 - DNA, 201 bp, Homo sapiens
tatgaaccagtggtagctgaataactcttctctgtccagtcatgattatcatgatcatagtgatttgctgccaccaattcctgaaaaatctgccaagggcrgcataaaaatgtacctgggtaagagcttcccagctctggcaaaataagagagtggggcaaagaagaggaagagtgaagggagggacaaacagcaggattt

SEQ ID NO: 48842 - DNA, 201 bp, Homo sapiens
gtttttttttttttttttaaaaacacttgcgtttcttcttgctaccctacaaacagtaactgtgtgctccatcgaggcaactgtggtcgttaatcttccgyagcacaggaattgctagtaacataaaggtagtaatgggattatgttttcttttctttttttttttttgcaatagctcagaaaattaatgttaacttctgt

SEQ ID NO: 48843 - DNA, 201 bp, Homo sapiens
agtgcaaatcataaatatgcatcttgaattttcaagtgaattcagatctataaatggaaaaattatgtacaacttagagctccccttgtatcctctctaasccactcctcccattttcacctgcccccattttgaaatgtaattatttcatactttctgtaattaatatgtaataattatattaaaaagcatatttgaaag

SEQ ID NO: 48844 - DNA, 201 bp, Homo sapiens
gctccccttgtatcctctctaacccactcctcccattttcacctgcccccattttgaaatgtaattatttcatactttctgtaattaatatgtaataattrtattaaaaagcatatttgaaagtattcatgccaatgcataatacatagcattataatgaaatttttgtcaatgtcttagagaatatctttattgtctatt
